United States Patent Application Publication US 2008/0034453 A1 - sequence listing, part 18

SEQ ID NO: 146439 - DNA, 250 bp, Glycine max
ggtgaggggaggtttgtttgttgtttcgtttttcctttcctttccgccagaatccgttgagaatggcgttgccggtagtcgtcgatgcagagtacctcaaggaggtcgacaaggctcgccgcgatctccgcgcactcatcgctaacaggaactgcgctcctctcatgctccgattagcctggcacgatgccggaacttacgatgctaagaccaagaccggtggacctaacggttcgatccggaacgagga

SEQ ID NO: 146440 - DNA, 250 bp, Glycine max
gcgagtcaccagaagataaatctaaatgggaatgtgtaagaaagggactttgctgcatatgctgtgaaagcaatatcgattctttgttgtacagatgtggtcatttgtgtacatgttcaaaatgtgcgaatgagttgcttcaaagcagaaggaagtgcccaatgtgtcaagctcctgtggtggaggtgatacgtgcttattctatacaataatttgacattaatataaaggtcacacttttaacaaaata

SEQ ID NO: 146441 - DNA, 252 bp, Glycine max
ctctttctctagtcctgttatttctcagcgcgtaaagcatggctttgttggtggagaaaaccacgagtggtcgcgagtacaaggtcaaggacctttcccaggccgacttcggccgcctcgagatcgagctggccgaggttgagatgcccggcctcatggcctgtcggaccgagttcggcccctcccagcccttcaagggggcccgcatcaccggctccctccacatgaccatccagaccgccgttctcattg

SEQ ID NO: 146442 - DNA, 254 bp, Glycine max
gaaggatactttaaggcttggagacaaggcagaacagggtaccctttggtggatgctggaatgagagagttgtgggcaactggttggttgcatgatcggatacgcgttgtggtttcaagtttcttcgtgaaggtgctgcagcttccttggagatggggaatgaagtatttctgggacacccttttggatgcagatcttgagagtgatgctcttggttggcagtacatatctggcactctccctgatggtcgtga

SEQ ID NO: 146443 - DNA, 254 bp, Glycine max
tgggaaagggagattgaattcgatcctgggacgttaacgttgtttcaattcaattgtggtcctgtcggtgccctatctcagacgacgatgtcatctttatatagaggggaatccaggaggtacaacaataaaccaagaggacgtcataatttgacaacgcagaagaagcaagagattaaggaagcctttgagttatttgatactgatggctcaggtactattgatgccaaggagctgaatgttgctatgagggc

SEQ ID NO: 146444 - DNA, 249 bp, Glycine max
gtttgatgaccactgttcattccatcactgctacccagaagactgttgatgggccatcagccaaagactggagaggtggaagagctgcttcatttaacatcattcctagcagcactggagctgccaaggctgttggaaaagtcctccctgctttgaatggaaaattgactggtatggcattccgtgttcccactgtggatgtctctgttgttgacctcacagtgaggctggagaaggaagcctcctacg

SEQ ID NO: 146445 - DNA, 248 bp, Glycine max
ctcgagccgctcgagccgattcggctcgaggcctttatttcacttattcacaacaagcatagcacattggactcggtaagagggtaatattgttctcgtatggaagtggcttaacttccacaatgttctctttgctattacgtgaaggtcaacatccatttagcctgtcaaacattgataaaatgatggatgttgctgggaaattgaagtcaagacatgagtttccaccagagaaatttgttgaaacc

SEQ ID NO: 146446 - DNA, 248 bp, Glycine max
gctcgtgccgcgaggggatctgcggctcctgcgcaatgaacatcgacggctgcaacggcctggcgtgcctcaccaagatcccctcggaaaaaaactccgccgccacgacgatcactcctctgccgcacatgttcgtgatcaaggacctggtcgtggacatgacgaacttctacaatcagtataagactatcgagccctggctgaagaggaagaacccaccggtgccgggaaaagagattctgcagagc

SEQ ID NO: 146447 - DNA, 251 bp, Glycine max
atttgaagaaaaagaaaacagaggcttaggcaactaagaaagaaagatgaagctgaaggtatatgcggaccgcatgtcccagccatcccgtgcggttctcatattttgcaaagtgaatggaatagattttgaggagatcaaagtcgatttatccaaacgtcagcagttatctcccgaattccgagcggttaaccctttaaggaaagtccctgctattgttgatggaaggttcaagctatttgagagtcatg

SEQ ID NO: 146448 - DNA, 254 bp, Glycine max
tgaagatctcagtgaaggttgctggcattcactggcactatggctcaaggtctcacgccccagaactcacagcagggtataacaacacccggttccgtgatggctacatccccattgctcaaatgttggcacgccacggtgccatcttcaacttcacctgtattgagatgcgcgatcacgagcagccacaagatgccctttgtgcacccgagaagcttgtgaagcaagtggctctggcaacgcagaaggcacag

SEQ ID NO: 146449 - DNA, 252 bp, Glycine max
cgaagtgttaagagaatgcctctttctatagggggaggagctggtgcaaagaatgctattctcatgaatatgccaaatgctgttctttcaatgtggagatattttgttggagatctcgtctttgaagtttctaagatgacttctccctacattaaatgtacagtctctttcttcatagcatttggaaatttggctgatgacaccatcaattttgaggcttttccccacaagctggtgcagtttggagagatt

SEQ ID NO: 146450 - DNA, 252 bp, Glycine max
gccgtgaagctgggcccatcagccccagaagtgggaagggtgagcatgaggaagaccgtcaccaagcaggtctcctcaggaagcccatggtacggcccagaccgagtcaagtacttgggcccattctctggcgagcccccgtcctacctaaccggtgagttcccaggcgactacggctgggacactgctgggctttccgcagacccagaaaccttcgccaagaaccgtgaactcgaagtgatccactccagg

SEQ ID NO: 146451 - DNA, 245 bp, Glycine max
ggctcgagtgctgtcccattccttgaaaagctagtcattgctgatgttgccgggcttgcccctggaactgggacattgactgttttcacaaatgaaaaaggaggggcaattgatgattcagtaattactaaggtgacggatgaccacatatatttggttgtgaatgctggttgcagggataaagatctggctcatattgaggaacatatgaaggcattcaaggccaaaggtggtgatgtgtcttg

SEQ ID NO: 146452 - DNA, 245 bp, Glycine max
acctggtgttgggaagacagcaattgctgaaggtcttgctcagcggattgctaatggtgatgtacctgaaaccatagagggaaaaaaggtcataacccttgacatgggtctgcttgttgccggaactaaatatcgtggtgagtttgaggagaggttgaagaaactgatggaagaaatcaaacaaagtgatgagataatactttttatcgatgaagtgcacactttgattggagcaggagcagcgg

SEQ ID NO: 146453 - DNA, 244 bp, Glycine max
cggctcgagcggctcgagcaaaattttcaggttttaggtgaggcttaccaagttctgagtgacccagctcaaagacaagcttatgatgctcatggaaaatcaggaatttcaactgaagcaattattgatcctgcagcaatctttgccatgctttttggtagtgagctttttgaggaatatataggtcagttagccatggcatcaatggcttcaatggacatctttactgaaggagaacaatttg

SEQ ID NO: 146454 - DNA, 246 bp, Glycine max
aagtagttgagaactaagaaggagaagcaaatggcttcctcaatgatctcttccccagctgttaccactgtcaaccgtgccggtgccggcatggttgctccattcactggcctcaagtccatggctggcttccccaccaggaagaccaacaatgacattacctccattgctagcaacggtggaagagtgcaatgcatgcaggtgtggccaccagttggcaagaagaagtttgagactctttcctac

SEQ ID NO: 146455 - DNA, 246 bp, Glycine max
atcatacaaagcattgaattcaaaaacttaagttcattccttgtgttttgctttcttcctcaaaaccaaacatgtcgaacacatgcggcaactgcgactgcgctgacaagactagctgcaccaagggaaacagctatggtgttattgtagagactgagaagagttacatcgagactgttgtcatggatgttccagcagctgagcatgatgggaagtgcaagtgtggcactaactgcacttgcacgg

SEQ ID NO: 146456 - DNA, 242 bp, Glycine max
ggcggaatattttcgagatgtcaatgaacaagatgtacttctatttatcgacaatatctttcgcttcgtccaagcaggatctgaagtatctgccttattgggtcgaatgccttctgctgtgggttatcaacccactcttagtactgaaatgggttctttacaagaaagaatcacttctcccaaagaggggtccataacttctattcaagcagtttatgtacccgcagacgatttaaccgatc

SEQ ID NO: 146457 - DNA, 244 bp, Glycine max
gagatgctagaatgaggctcatgaaacatgatgtcaatcttggaaggagtgtcttttgggatatgaagaatcgtcttcctcgaagcatcacaactttggagtgggagaacagttttgtttctgtttacagcaaggataatccaaacttgctttttagcatgtgtggatttgaagtaaggatacttcctaaaattagaatgactcaagaagcattcagtaacacaagagatggtgtctggaatct

SEQ ID NO: 146458 - DNA, 243 bp, Glycine max
tccaccttggcctagccagctagcgcttcttctctcgcattccgtggagatctagtgctgccaaacctcgctgaaaattagggtttcgtttcggaggtagacgaagatgttcggaagggcaccgaagaaaagcgacagcaccaggtactacgaaatcctcggcgtttcgaagaacgcttcgccggatgatttaaagaaggcttacaagaaagccgccattaagaaccaccctgacaaaggcgg

SEQ ID NO: 146459 - DNA, 239 bp, Glycine max
tcttggtggtggattcactgggccttccatgaaccctgccaatgcctttggatgggcctttgtcaacaacaagcacaacacttgggagcagttttatgtctattggatttgtcccttcattggggcttcctcagctgctttgattttcaggtctatgtttatgccaccaatcaagcagaagaaagcttgaattagttaagcttttacattttgatttactagttgagtaataaataaac

SEQ ID NO: 146460 - DNA, 242 bp, Glycine max
aagaagaaaggcgaaggagagcattcgaaggcataaacataaagaaattgaagataatgcgaaccctttgcgacgtatgcgagagcgccgctgccattctcttctgcgccgctgatgaggccgctctctgctccgcttgtgaccacaagatccatatgtgtaacaaacttgctagtaggcatgttcgagttggccttgctgaccccactgatgttccacgctgtgacatatgtgaaaatgca

SEQ ID NO: 146461 - DNA, 245 bp, Glycine max
aattattagggaaatagctaggatgctggcaaatgattacaagaagcgtgtgatgattgttgacacctccaatgaaattgggggtgatggcgatataccacatgctggaataggcaatgctcgacgtatgcaagtccctaactctgatatgcaacataaggtattgatagaagcagttgaaaaccacatgccacaagtgattgtaattgatgaaattggtacaaaacttgaagcaatggctgcga

SEQ ID NO: 146462 - DNA, 245 bp, Glycine max
cgtggatggaaaggaaatcaaagttgtttctgaccgcaaccctgccaaccttccttggaaggacttggggatagacttggtgattgaaggaaccggggtgtttgtagacagagaaggtgcagggaaacacattcaagcaggagctaagaaggtgctcatcactgctcctggtaaaggagatatccccacctacgtggttggtgtcaatgagtatgactacagccctgatgaacccatcatcagca

SEQ ID NO: 146463 - DNA, 247 bp, Glycine max
atcgtgaatgcgtataaaaggaaaataaagaaattagcgtcaaaatgttgggtgtgttcagcagctccatagtgtcgccgccggacgagctcgtggccgccggcagccgtactccgtcgccgaagatgacggcggcggcgctgcggaagcggttcgaggagaagaacccctccgccgtgtcggtggaggtcggagagcatgtccagctcgcttatacccaccacaacgagtcgccgtttcagcccag

SEQ ID NO: 146464 - DNA, 242 bp, Glycine max
gtgggcaaacaagtatcaggccatattggaggtgttactttccaaatacccaagcaataatctatgttgttgattcaagtgacgttgataggcttgtgatagctaaggaggagttccatgcaattctggaggaggaagaactaaaaggtgcagttgttctcattttcgcaaacaaacaggaccttcccggtgcacttgatgatgcagcagtgacggaggctctagagttacacaagatcaaa

SEQ ID NO: 146465 - DNA, 240 bp, Glycine max
cccggtggaaggcgtccaggtgcagttcagcagtcccagcagccagttcctatgatgccacagcagatgcttcctaggggacgtgtctatcgttatcctcctggtaggggtattcctgatgttcctatacctggggttgctggaggtatgttttctgttccatatgatgtgggtgggatgccgctgcgtgatgcatcaatctcccagcaaatacctgttggggctctggcaacggctctg

SEQ ID NO: 146466 - DNA, 242 bp, Glycine max
gctgtgggaagttgaggggaagtgggttgttaaaggagcagttgatgtagacattggtgcaaacccttctgctgagggtggaggagaagatgagggagttgatgatgcagctgttaaggttgttgacattgttgacacattcagacttcaggagcaacccgcattcgataagaaggagtttgttaccttcatgaagaggtttatcaagaatttgactcccaagctcgatgcagagcaacagg

SEQ ID NO: 146467 - DNA, 241 bp, Glycine max
gatacacaggcatcagtttcagttcccccactctctcctcggcgataagcaacttggtgcccgcttttacttttttgcttgccatcattttcaggatggaaaaggtgattgtaagaaatacaacttgtcaagccaaggtattgggtaccatagtatcaataactggagcattcgtagtgaccttctacaaaggaccaccaatcatcattgttcatacaccttccttgtcacttcatcaacc

SEQ ID NO: 146468 - DNA, 240 bp, Glycine max
tgcaattacaatataaaatgctattgatgtaacgcaagttatttgtgtctgttgtaacaactctagttaggaatggcgagtgcgttgtcaacactttgcggacaagcatacggtacaaaagaatatgtcatgatgggagtgcatcttcaaagatcatggatagttatgtccataacttcactctttcttcttccggtgttcatcttcacgaggccgattttgatgctcttaggccaagat

SEQ ID NO: 146469 - DNA, 234 bp, Glycine max
gtcactggctcctgttgttattggtgtgtccatggcatctttgaccgagctctcattcaactgggtcggcttcataagtgctatgatttcaaacatttccttcacgtaccgaagcatctattcaaagaaagccatgactgatatggacagtaccaatatctatgcctacatttccatcattgctctaattgtgtgtataccacctgccgtaattttggaagggccacactgttg

SEQ ID NO: 146470 - DNA, 234 bp, Glycine max
atggattcaagggagctgaaattgccatggcatcttattgttctgaacttcaatatttggcgaatccggtgacaagccacgtgcaaagcgcggagcaacacaaccaagatgtgaactctctggggctgatttcatcaaggaagactcatgaggctattgagatcctcaagctcatgtcctccactttcctggtcgccctttgccaagccattgacttgaggcatttggaggaga

SEQ ID NO: 146471 - DNA, 240 bp, Glycine max
aaattgcactaggagctgctaagggtcttgcttttcttcatgaagaagctgaacgaccagtaatatatagggattttaaaacttcaaacatattactggatgcagagtacaatgccaagctctcagattttggtcttgccaaagatggtccagaaggtgataaaacccatgtgtctactcgagtgatgggaacctatggttatgcagcaccagaatatgtcatgacgggtcatcttacat

SEQ ID NO: 146472 - DNA, 242 bp, Glycine max
ggcacccagagacgaggaagggcgtagtaagcgacgaaatgcttcggggagttgaaaataagcgtagatccggggattcccgatataggtcaacctttcgaactgctgctgaatccacgggcaggcaagagacaacctggtgaactgaaacatcttagtagccagaggaaaagaaagcaaaagcgattcccgtagtagcggcgagcgaaatgggagcagcctaaaccgtgaaaacggggttg

SEQ ID NO: 146473 - DNA, 244 bp, Glycine max
gaagggatgatctggaatctcttggttatgtgctcatgtatttcttaaaaggaagtcttccctggcaaggactgaaagctggcacccaaaaacaaaaatatgataaaatcagtgagacaaaggtgtcaactcccatagaggtgctctgcaaatcatatccgtctgagtttgtatcatacttccgctattgccgatcactgcagtttgaggacaagccagattattcgtatttaaagagactttt

SEQ ID NO: 146474 - DNA, 244 bp, Glycine max
gtagcccaaaaggtgtggtcagaggtattcttctacctggctgagaacaatgtcctgttggaaggtattctcctcaagcctagcatggttactccaggagccgagtccaaggacaaggccactcctctgcaagttgctgattacaccctcaagctccttcacaggagaatcccacctgctgtccctggaatcatgtttctgtctggcggacaatctgaggttgaagcaaccttgaacttgaatg

SEQ ID NO: 146475 - DNA, 268 bp, Glycine max
ggggttggattatatggatagtctttgttgcttcagctctttcagtcaggtggttggagggcgttcttcatgtaactctggcaaaggcaagagcagtcagtcctcagtcaagtatggctatagcctagttaaagggaaagcaaaccacccgatggaggactatcacgtagcaaaatttgtccagttcgaagggcgagagcttgggctttttgctatatatgatggacacctgggtgacagtgtaccagcctatttacaaaagcatctg

SEQ ID NO: 146476 - DNA, 255 bp, Glycine max
caactctttcaaaagggagaagaaaaggaaaggaaacaaaacgcacaaaggattattatagcaatggcagaacaaaaccaaaaccagacaactgaagctggaaggcaccaagaggttggccacaagagccttctccagagtgatgctctttaccagtatattctggagaccagtgtctacccaagagaacctgaatccatgaaagaactgagagagttgacagcaaaacacccatggaacatcatgacaacctct

SEQ ID NO: 146477 - DNA, 263 bp, Glycine max
cttcatgatagtcaatatggggcctcaccacccatcaatgcatggtgttcttagacttattgttactctagacggtgaggatgttattgattgtgaacctatacagggttatttacacagaggaatggaaaaaatagcggaaaaccgaacaattatacaatatttgccttatgtaacacgttgggactatttagctactatgttcacagaagcaataactgtaaatggaccagaacagttgggaaatattcaagtacctaaaa

SEQ ID NO: 146478 - DNA, 264 bp, Glycine max
aaataaactcacccactaagcactacacaaatcacacagagttgcaagagaaagataaaagaagatggcgactcttgattccgacgtgcctatggttcccgccggcgagccctcgagcagcgccggtccttcttccaagaagcccaagcgcttcgagatcaagaagtggaacgccgtcgctctctgggcttgggacatcgttgtcgataactgtgctatctgccggaaccacatcatggatctctgcatcgagtgccaagccaa

SEQ ID NO: 146479 - DNA, 265 bp, Glycine max
taggcgaaggactttaggttgggatttgggaattagggttattcgcgtggcgaagatgattgaggtggttttgaacgatcgattggggaagaaggtgcgcgtgaagtgcaacgacgatgataccatcggcgacctgaagaagcttgtggcggctcagactggcacaagagccgacaagatccgcatccagaagtggtacaccatctacaaggatcacatcactctcaaggattacgagatccatgacggcatgggtctcgaactc

SEQ ID NO: 146480 - DNA, 264 bp, Glycine max
acataacataacatccttaaccctttgaacatcgttttgcagccatggaaacaggcatagcatgctacactcgcgggcctttcttgcctagtgtttcttccaagcactctccaccttccatttctccatcttttggcttgaggagtctgaaatcaagctctttatttggagaatcgctaagagtggcctccaaatcaacaataaaggtttcaaagacaaagaatacttcactcgtgaccagatgtgaaattggtgacagtctcg

SEQ ID NO: 146481 - DNA, 257 bp, Glycine max
ggcttatggtggatacctaggcacccagagacgaggaagggcgtagtaagcgacgaaatgcttcggggagttgaaaataagcgtagatccggggattcccgatataggtcaacctttcgaactgctgctgaatccacgggcaggcaagagacaacctggtgaactgaaacatcttagtagccagaggaaaagaaagcaaaagcgattcccgtagtagcggcgagcgaaatgggagcagcctaaaccgtgaaaacggg

SEQ ID NO: 146482 - DNA, 256 bp, Glycine max
ctaccgtggatgacgggctttcatcggatgcagaagataagcgagccaaaaccaccgagcttgcacagttgctagtggagcttcaacgcatgaacgctgagaacaagaagctgaaagagatgctcagccatgtcaccggtaactacaccgccttgcagatgcatcttgtgacactaatgcaacagaaccagcagcgaacagaaagcacggaaaatggggtacttataaattccaagttgctcagggaaaggttgag

SEQ ID NO: 146483 - DNA, 253 bp, Glycine max
gaactattgcaaggctgtaaaagcaggccttcttaaaattctttccaaaatgggcatctcgttgctatcaagttactgtggtgcacaaatatttgaagtctatggattagggaaggaagttgttgatcttgcattcagaggaagtgtgtcgaaaattggtggattaacttttgatgaggtggcaagagagactttgtctttctgggtgaaggcattctctgaagttacagctaaagggttggaaaattttgga

SEQ ID NO: 146484 - DNA, 258 bp, Glycine max
cgcggaagagttacagacaaatggcggaaattcatgaagggacaaataaagagggcgaggatgttttttgatgaggcagagagaggggttgcagagctcaactcagctagcaggtggcctgtgtgggcatcattgttgttgtataggcaaatattagattccattgaagccaatgattataataacttcacaaaaagggcatatgtaggaaaagtaaagaaactcttgtcactacctactgcctatggtttttcactt

SEQ ID NO: 146485 - DNA, 260 bp, Glycine max
ggtggatacctaggcacccagagacgagtaagggcgtagtaagcgacgaaatgcttcggggaattgaaaataagcgtagatccggggattcccgatataggtcaacctttcgaactgctgctgaatccacgggcaggcaagagacaacctggtgaactgaaacatcttaatagccagaggaaaagaaagcaaaagcgattcccgtagtagcggcgagcgaaatgggagcagctaaaccgtgaaaacggggttgtgggaga

SEQ ID NO: 146486 - DNA, 262 bp, Glycine max
agtgtgttggcattgccgatagatctgcatatgatttgcgtgctcactcggataaaagtggtgttccgttagtggctcatgaaaaatttgcagaacctaaggaagtggagaaattggttataactccagtaaagaaatagctgggtctggcattcaaggggaaccagaggatggtggttgaagccattgaggcaatggctgagaaagaagctttggatatgaaggctgctctggagtcaaaaggggaggtggagtttcaagt

SEQ ID NO: 146487 - DNA, 263 bp, Glycine max
atgagaggtgccataaagctttctgcgctgtctgaggctggggttatttaatgtcatgacccatgattcaataggacttggagaagatgggccaacccaccagcctattgagcacctagcaagcttccgggcaatgccaaacattttgatgcttcgtcccgccgacggtaacgaaacagccggagcatacaaagtggccgtgctcaacaggaagagaccctccattcttgccctatccaggcaaaaactgccccagcttcccg

SEQ ID NO: 146488 - DNA, 260 bp, Glycine max
tgcaattgaagttgaagtcttgcccttctctcttcaactccaaacacaagacatcatcatccatggctgcctccgtctccactgtcggagctgtcaacagagctcttttgaacctgaatgggtctggacctggggtttcagctcccagttcatccttctttgggagcagcttgaagaaggttattggctcaagggtccccaacacaaagatttcctctggaagcttcaagattgttgctgtagaagagaagaaagagatt

SEQ ID NO: 146489 - DNA, 257 bp, Glycine max
agcaaggtcaacaagcccccgctatccctctctagattgattcgttacaccaagggaaaggaggataagatagctgtggtagtcggggccgtgaccgatgacattagggtgtatgaagtccctgctctgaaggtaactgccctgaggttcactgaaactgccagagctagaattgagaaggctggtggcgaatgcctcacctttgatcaactggctcttagagctccactcggccagaatacggttcttcttagagg

SEQ ID NO: 146490 - DNA, 254 bp, Glycine max
gaataataatattctctctttgttcctctctctaaaattaatggctgaagcacaaagtggccaagctagtgaagggattaaactgtttggaacaacgattacgttgcatggaagagaaagaaaagaagatagaaatgatagtgaagatgggacagaggagataaagagacctgataagatcataccatgcccaagatgcaagagcatggaaaccaagttttgctacttcaataactacaacgttaatcagccca

SEQ ID NO: 146491 - DNA, 253 bp, Glycine max
caaaggagaggaaaagtactgtgccacttcgcttgaatccatgattgatttcagcacttccaagcttggaaaaaatgttgaggttgtgtccacggaagtagtggaggacaaggaaacgggattgcagaaatacaccgtagcaccgggagtgaacaagttatcaggggacaaggctgttgtgtgccacaagcagaactacccttatgctgttttttactgtcacaaaactgagaccacaagagcttactctgtg

SEQ ID NO: 146492 - DNA, 257 bp, Glycine max
ctcgagccgttgcaattgaagttgaagtcttgcccttctctcttcaactccaaacacaagacatcatcatccatggctgcctccgtctccactgtcggagctgtcaacagagctcttttgaacctgaatgggtctggacctggggtttcagctcccagttcatccttctttgggagcagcttgaagaaggttattggctcaagggtccccaacacaaagatttcctctggaagcttcaagattgttgctgtagaaga

SEQ ID NO: 146493 - DNA, 132 bp, Glycine max
ggtttcaataatgagtttgatagcttcgaggacgtgcgttgtctctttgatggcggagtttatctccctacagatgtactcagcaaaattagccccataccggtgctcaaagaaatcttccacacgacagac

SEQ ID NO: 146494 - DNA, 260 bp, Glycine max
ttaaaattaaccatagttaatataatggggtcggggattaaggtttcgttttctgtgttgtgtttgttagggttagtcattgtgggtgatcatgctgcgtatgctcaagactcaccaacagactttgttaatgcacacaacgctgcaagatcacaggttggtgttccaaatatagtttgggatgacacagttgcggcttttgcacagaactatgctaaccaacgcaaaggtgactgcaaacttgtccactctggtggtga

SEQ ID NO: 146495 - DNA, 259 bp, Glycine max
tgaaatttccagatatggttcatgctcttaaacccaatcccaagaaccacatccaagagaattggtaggatccttgacttcttctctcactttccagaaagccttcacatgttcacctttttatttgatgatttgggtgttccacaagattacaggcaaatggatggttttggagttaacacatatacgctgatcaacaaggctgggaaagcagtgtatgtgaaatttcactggaagaccactagtggtatatagtgtc

SEQ ID NO: 146496 - DNA, 255 bp, Glycine max
tgtttcgttactatgctggttgggcagataaaatccatggtctgacagtgcctgctgatggaaattatcatgtggagacattgcatgaaccaattggtgttgcaggacaaatcataccttggaactttcctctcctcatgtttgcttggaaagttggaccagctcttgcatgtggaaatactgtcatccttaagactgctgaacaaacacctttaacagctctctatgtagcaaaactttttcatgaggctggtc

SEQ ID NO: 146497 - DNA, 259 bp, Glycine max
tttttcgtctttgctctccaaaaatctgacacacacaggtatctatcatatggggtctcaccaactagaaccatggctattggataatgggaaaccaagggctttgaccaaggagaccaggcatggccgttctgcacacagaatgtcctccacctctttgcgcaagaaatctagccgaactcttgtctcaaaggttccatgtgccactctcagaaactttctttcaaatttgcaagaggttattcttggcaccaagctt

SEQ ID NO: 146498 - DNA, 256 bp, Glycine max
cgataattaaaaatgggcaacttgacaaattaaaagatacttttcaagtattccaatattatttcctggacgaaaacgagagaatttataaacctgatctgtgtagtaacatcattttaaatccattctatttgaattggcattttctccaccataattattgtgaaaaaacgtttacaataatgagtcttggtcaatttatttgcgaaaatgtatgtatagttcaaacgaaaaatgcaccacacctaaaatcggg

SEQ ID NO: 146499 - DNA, 251 bp, Glycine max
gaagatgttagggtgcaacgagacaaaggttttgggtttgtgagatacagtacccatgctgaagcagctcttgctatacagatgggtaatgctcgaattctatttggcaaacctatcaagtgttcatggggtagcaagcctactcctccagggactgcctcaactcctctcccaccacctacttctgcgaatgtgtcgggattttctcttgctagtcttgcagcttatgaacgccaaatggctttgagtaa

SEQ ID NO: 146500 - DNA, 249 bp, Glycine max
gcacaattggcaaaggaagtagaataccttcttaggaagggatggattccttgcttggaattcgagttggagcacggtttcgtgtaccgtgagcacaacaggtcaccaggatactacgatggacgctactggaccatgtggaagctgcctatgtttggttgcactgatgcttctcaggtgttgaaggagcttcaagaggctaagactgcataccccaacggcttcatccgtatcatcggattcgacaac

SEQ ID NO: 146501 - DNA, 250 bp, Glycine max
taggcgaaggactttaggttgggatttgggaattagggttattcgcgtggcgaagatgattgaggtggttttgaacgatcgattggggaagaaggtgcgcgtgaagtgcaacgaccgatgataccatcggcgacctgaagaagcttgtggcggctcagactggcacaagagccgacaagatccgcatccagaagtggtacaccatctacaaggatcacatcactctcaaggattacgagatccatgacgg

SEQ ID NO: 146502 - DNA, 255 bp, Glycine max
gggtatttgggtatggttctttgatctcgaaagctgggtttcactatgacgaacgtattgttggtttcatcaaaggctatcgacgagtcttctaccaaggctctactgaccacagaggaacccctgagttccctggaagaacagtgaccctggagcctgctgaaggagaaatatgttggggagctgcttacaagatcgcaaagaaagaagatgcagaaacggcattagtgtacttggaagtaagggagaagcaat

SEQ ID NO: 146503 - DNA, 251 bp, Glycine max
caaggttgctccttctttagctgctggctgcaccatggtcctcaagcccgccgagcaaacacccctctctgctttgtttaatgctcatcttgctaaattggctggaatcccagatggagtgatcaatgtagtgcctggatttggcccaactgctggtgctgcattaagctcacacatcattgttgataaggttagctttactggttcaacacaaacaggccgtgagataatgcaggctgcagctaagagta

SEQ ID NO: 146504 - DNA, 253 bp, Glycine max
gattgtttgttgttgtaactcgttcttcttcttttgttgttctgtgtttgtgtttgttttttctctcacctgaaaatgtcttgctgcggtggtaactgtggttgcggaagctcctgcaagtgcggcaacggctgcggagggtaagattttcgttgtaacattgtttttttcttgggaaaatagagtttttccgggaaaattttctttttggatttttaattgttattatggttacccttttggttcaattgca

SEQ ID NO: 146505 - DNA, 253 bp, Glycine max
gtcttgcaattgaagttgaagtcttgcccttctctcttcaactccaaacacaagacatcatcactcatggctgcctccgtctccactgtcggagctgtcaacagagctcttttgaacctgaatgggtctggacctggggtttcagctcccagttcatccttctttgggagcagcttgaagaaggttattggctcaagggtccccaacacaaagatttcctctggaagcttcaagattgttgctgtagaagaga

SEQ ID NO: 146506 - DNA, 249 bp, Glycine max
ctcgagccgttgcaattgaagttgaagtcttgcccttctctcttcaactccaaacacaagacatcatcatccatggctgcctccgtctccactgtcggagctgtcaacagagctcttttgaacctgaatgggtctggacctggggtttcagctcccagttcatccttctttgggagcagcttgaagaaggttattggctcaagggtccccaacacaaagatttcctctggaagcttcaagattgttgct

SEQ ID NO: 146507 - DNA, 243 bp, Glycine max
gcctctgaaggccaggtggttgaggcatttaaaatattgactgctgatgacaaagtgaaggcaattttggttaacatttttgggggtataatgaagtgtgatgttatagcaagtggaatagtgaatgctgcaaaagaggttgcactgaaagtacccgtagtagttcgtctggaaggcaccaatgttgatcatggaaaaagaattttgaaggaaagtggtatggcgttgataacggctgaagat

SEQ ID NO: 146508 - DNA, 246 bp, Glycine max
tccatacatagcaagataaacacactcacacacagtgcttgtttagactagtgatcttccatggctgtgaaggatagaatcctggtcttgggacccacaggagccattggaaggcacatagtttgggcaagtttaaaggcagggaatcccacttttatattggttagggacacccctgcctctgttaacaagccaaggcttgtcactgctgctaatcctgaaaccagggaagaactcattcagagc

SEQ ID NO: 146509 - DNA, 247 bp, Glycine max
tgcagaaggtgttccaaagaggctaaccttcgacgaaatccagagcaagacatacttggaagtgaagggaactggaactgctaatcagtgcccaaccattgaaggtggagtggactcatttgccttcaaggcagggaaatacaaggcccagaagttgtgcctggaaccaacttccttcacggtgaaggcagagggtgtggccaagaatgccccgctcgaatttcagaacaccaagctcatgactcgt

SEQ ID NO: 146510 - DNA, 247 bp, Glycine max
acgatgcagatcactattgtggttcatgctgttatggttgcagaacaggagataagaagggaactgactccactttgttggttgattctgtaggcaatggtgcagtgatcctcactggatgtaaagctgagagattcatacttgaaaatggaaagaatggaatgaagaaaaagaagtgcttaggagtgattgctgcagcaagttggaggagtaaggtaacaaagaaactccaaattgaatccaaggt

SEQ ID NO: 146511 - DNA, 240 bp, Glycine max
cagaagcaaagatccctatgaccgtgttttggttgataccacagaacttgtttgtgggggcaggggaggcatttatgtacatggggcagttggactttttccttagagagtgtcccaaagggatgaaaacaatgagcacgggattgttcttgagcacactctctttggggtttttctttagcaccttgttatgctctatagtgaacaaaatgacagcacatggtaggccatggctcgcag

SEQ ID NO: 146512 - DNA, 237 bp, Glycine max
cggcgacctttccaatgtaggcctacgcaacgtgctggctcgtccgtctgtgggctccgaaaggatccctgaccttctatactgcgtataccaaggcatgttcgcatgcatcacagtcgccttggcatctggagccgtcagcgagcgaggcagaatgctgccgtgcgttgtgttcatgttcatatggacgactgtcgtctacgatccactcgcgtgctggacttggaacccggcagg

SEQ ID NO: 146513 - DNA, 237 bp, Glycine max
actgaagctaaccgccaggcataccgtaccctccttgtgacagttccaggacttggtcagtacatctctggtgccattctctttgaggaaactctctaccaatccacaactgatggcaggaagattgtcgacgtgctcctcgagcaaaacattgttcccggtattaaagtcgacaagggtttggtaccccttgctggttccaacgacgagtcatggtgccaaggtcttgatggtctt

SEQ ID NO: 146514 - DNA, 239 bp, Glycine max
atcctcttctttctctctctaccattgccatggatccctacaagcaccggccatccagcgccttcaattctcccttctggactacaaattctggtgctcctatttggaacaacaactcctctttaaccgttggagctagaggtccaattctgctggaggattatcatcttgtggagaagcttgcaaattttgatagggaacgtatcccagaacgtgttgtccatgccaggggcgctagt

SEQ ID NO: 146515 - DNA, 239 bp, Glycine max
ctcgagccgcattcggctcgagggctaaccattcgtgcagatgaaattagtaaaattatccgtgaacgcattgagcaatatactacggcagtaaaaattgtaaatacgggtacgtacttcaagtaggcgacggtattgctcgtatttatggtcttgatgaagtaatggcgggtgaattagtggaatttgaagagggtactataggcattgctttgaatttggaatccaaaatgttggtg

SEQ ID NO: 146516 - DNA, 237 bp, Glycine max
gtagattgtggcgtgttctcgatgatgatgatgatgagccgcagcggcgccaaccgggtagcgaacaccgcaatgtttgtggcgaagggtttaagcggcgaagttggtggtttaagagcattatatggcggtggtgtgaggagtgagagcactttggctttgtcagagaaggaaaagattgagaagaaggttggtttgtcttctgctggtgggaacaaagaagaaaaagtgatcgtg

SEQ ID NO: 146517 - DNA, 239 bp, Glycine max
gctgctgaatcattggctgatcctgaagaatatccaaatttgtttgaagattggcaggttgcactagctgtcgaatctaaagctgtggaaacaaggaatgtgtaccctcctgcggagcagtacgtcaaccatgctgacaaatcacaaattacccttgttgaagcctttagaaacatgcagattgaggaaggagaggagcatctggagaatggggactctactcatgagttgacagaaca

SEQ ID NO: 146518 - DNA, 239 bp, Glycine max
atatgatgtgactacaattagagcaagcacacctatgtttctcatgtctcggaagattaaatcacttggtgtcaaatgggttatctcaggagaaggatctgatgagatctttggagggtatttgtacttccacaaggcacccaacaaggaggagttccacagagaaacatgccgcaagatcaaagcacttcaccaatatgattgcttgcgagccaataaatcaacatttgcttggggtc

SEQ ID NO: 146519 - DNA, 235 bp, Glycine max
gtggtgaataccttacaagaaagaggagcaatggaatacactattgtagtagctgaaacagcggattctccagctacattacaatacctcgccccttatacaggagcagctctggctgaatattttatgtaccgtgaacgtcacactttaatcatttatgacgatctctccaaacaagctcaggctcatcgccaaatgtctcttctattacgaagaccacctggtcgcgaagtta

SEQ ID NO: 146520 - DNA, 236 bp, Glycine max
gatatttcgtatctcactaaccgcgctgctgtctatttggaaatgggaaagtatgaggaatgcataaaagattgtgacaaggctgttgaaagaggaagagaactaagatcagattttaagatgatagcaagagctttgacaaggaaaggaaatgccttggtgaaaatggcgaagtgctcgaaggattacgagtctgccattgagacttatcagaaagcactcactgagcaccgcaa

SEQ ID NO: 146521 - DNA, 235 bp, Glycine max
tttaatcacgcgcacatcagcacaacacaacaattcactaagctaaaatcacttcatcatggcttcctcgtgtgcttcctctgccattgcagctgttgccatctccacaccaagttcccagaagaatggatcactcttgggaagcacaaaagcttcttttcttagtgggaggaaactgaaggtgaacaactttacagcaccagttggagcacgatccagcactacagtttgcgca

SEQ ID NO: 146522 - DNA, 233 bp, Glycine max
ctctcatccagatcttgcaaaaaaaaaaaaacacaatggcagcgagcgctcccactccacgcgaagagttcgtgtacatggcgacctggcgaacaggccgagcgctacgaggaaatggtggagttcatggagaaggtctccgcttccgccgaaagcgaggagctaaccgtggaggagcgaaacctcctctccgtggcctacaagaacgtaatcggcgctcgccgcgcctcctg

SEQ ID NO: 146523 - DNA, 234 bp, Glycine max
cggcttagtgctgtttatggtggaacatatatgttgaataagcctgagtgcaaggtagaatttgatgaggaaggaaaggttgttggtgttacatctgaaggggaaactgcaaagtgtaaaaaagttgtttgtgatccatcatatttgcctggcaaggtgaggaaggttggtagggttgcaagggcgatagcgatcatgagccacccaatccccagcactgatgattcccattca

SEQ ID NO: 146524 - DNA, 236 bp, Glycine max
cctagattcagccacagttggaaaaaaaaaaaaagttgttcgagatggcacgtacgaagcaaactgctcgtaagtccacaggaggaaaggcacctaggaagcagctcgcaaccaaggctgcacgtaagtctgcaccaactactggtggtgtgaagaagccacatcgttatcgtcctggtaccgttgctcttcgtgagattaggaaataccagaagagtaccgagcttttgatcagg

SEQ ID NO: 146525 - DNA, 239 bp, Glycine max
gttccttggacggaggaagagcatagattgttcctgttagggttacacaaagtcggaaaaggagattggagagggatttctagaaacttcgtgaaaactcgcacgcctactcaggtcgctagtcacgctcagaagtactttctccgccgccacaaccagaatcgccgccgccggagatctagcctcttcgacatcaccaccgatacggtgatggaatcttctactataatggaagaaga

SEQ ID NO: 146526 - DNA, 240 bp, Glycine max
ctcgagccgcaaaaacaaagaaaaaaaaaaacccttagccaacacaaccatcatggccacctctgctattcagcaatcagcattcactggtcaaactgctctgaagcagctcaatgagttcgtccgcaagaccggtggcgccggcaaaggtcgcactaacatgcgccgcaccgtcaagagtgctcctcagagcatttggtatggccctgaccgtcccaagtacttgggtccattctcgga

SEQ ID NO: 146527 - DNA, 235 bp, Glycine max
tgattttggtatttctgagggtgttgattttattgctatttcatttgtcaagtctgctgaagttattactcatcttaaaagctatattgctgcacgatctcgtgatagtgatatttctgtcattgcaaagatagaaagtattgactcattgaagaacttagaagagatcgttctagcggcagacggagctatggtggcacgaggagacttgggagctcaaatacctttagaacag

SEQ ID NO: 146528 - DNA, 236 bp, Glycine max
cacaaaagcttcgaatccaattcctcagtaacatctgcatgaagtcttctccttcaccatgccaccaaagcctttagactatgggtcaataaatgaaaacgtgaagaagagtcaatatgctgtcagaggtgaattataccttcgagcttctgagcttcagaaagagggcaaaaagattatatttactaatgttggcaacccacatgcattgggacagaaaccactgagcttccctc

SEQ ID NO: 146529 - DNA, 232 bp, Glycine max
gcctactttaatttggaaaataagtatggaaaccctagagaggaggctgttatgaaagtattccaaagagctctacagtacaatgatcccaaaaaggtctacctagcactcttgggaatgtatgagaggactgaacagcataatttagccgatgaacttctcaataaaatgacaaagaagttcaagcattcatgcaaagtttggttgaggcgtatacaaagtcttttgaagc

SEQ ID NO: 146530 - DNA, 234 bp, Glycine max
tgcaattgaagttgaagtcttgcccttctctcttcaactccaaacacaagacatcatcatccatggctgcctccgtctccactgtcggagctgtcaacagagctcttttgaacctgaatgggtctggacctggggtttcagctcccagttcatccttctttgggagcagcttgaagaaggttattggctcaagggtccccaacacaaagatttcctctggaagcttcaagattg

SEQ ID NO: 146531 - DNA, 233 bp, Glycine max
aagtagttgagaactaagaaggagaagcaaatggcttcctcaatgatctcttccccagctgttaccactgtcaaccgtgccggtgccggcatggttgctccattcactggcctcaagtccatggctggcttccccaccaggaagaccaacaatgacattacctccattgctagcaacggtggaagagtgcaatgcatgcaggtgtggccaccagttggcatgaagaagtttga

SEQ ID NO: 146532 - DNA, 229 bp, Glycine max
ggctctctcacgcagtcgcagtgagtgaaaaggaaaaccctaattgcggtattctcagtgccttcgagagaaagaaaaaatggcagataatcttgttctccgtggcaccatgcgcgcccacaccgacgttgtgacggcgattgccactcccatcgacaactccgacatgatcgtcaccgcctcacgcgacaaatccatcatcctctggcatcttaccaaggaggacaag

SEQ ID NO: 146533 - DNA, 173 bp, Glycine max
attcggctcgagcgcgacggccgccctttttttttttgtacttaaactacattcccatttgttttacgctttatgagatttcatcatcctgtatttttggtttctgttttcggacttcaatggaaattaatggatgagaactaatgaataaaaaaaaaaaaaaggggggcccc

SEQ ID NO: 146534 - DNA, 231 bp, Glycine max
gaagagtgtcacacggtgttcggaaagtacgagatggggaggcttctcggcaaggggacgtttgccaaagtgttacgggaagcaaataagcacgggcgagaacgtggcaatcaaagtgatcaacaaagagcaagtgagaaaagaaggaatgatggaacagatcaaacgtgaaatctccgtgatgcgtttggtgcgacacccaaacgtggtggaaatcaaggaagtgatggc

SEQ ID NO: 146535 - DNA, 231 bp, Glycine max
ctcgagccgtgcccttctctcttcatttccaaacacaagacatcatcatccatggctgcctccgtctccactgtcggagctgtcaacagagctcttttgaacctgaatgggtctggacctggggtttcagctcccagttcatccttctttgggagcagcttgaagaaggttattggctcaagggtccccaacacaaagatttcctctggaagcttcaagattgttgctgta

SEQ ID NO: 146536 - DNA, 228 bp, Glycine max
ggtagcaccagctccagcaatgatgaacctattcaaacaactggtgcttcaccaagtactgctccattgccaacaatgggtttaattgtagatgaggcacagtcagtgacatcaatccagctgaggttggctgatggcacacgcatggtttctcgcttcaatcaccatcatacaatccgagatgttcgagcattcattgatgcatcaagacccgggggtgtaagaagt

SEQ ID NO: 146537 - DNA, 230 bp, Glycine max
gtttgaaggatcacacaaactagtaactagaataatggcagaaacaaagttgagctccttcaaagacaagagatggtcactccatggcatgacagctctagtgacaggaggcacacgaggcatagggtacgcaatagctgaagagttagcagaatttggggcagctgtgcatatttgtgcacgtaaacaacaagatattgataaatgtttagaagaatggaataagaaag

SEQ ID NO: 146538 - DNA, 227 bp, Glycine max
gtaacattgccacatattgtgttcattttggaattgtgccactaaaattctattcaattcatctatggctgcctcttcttatgctatgcaatcaatcctggcaaaccctttgatccgcatttccagcgggtctagggtgaaccaatttggcgttcctgctttgcacatgagaaggaatgttggcctgagagttaggtccatggctaaggaagaacaaccaagtgagc

SEQ ID NO: 146539 - DNA, 182 bp, Glycine max
gccacagagaactagtcttctactctcgaccgcaagaaaaaaatggcatctcacatcgttggatacccccgtatgggtcccaagagagagctcaagttcgctctcgaatctttctgggatggcaagagcagcgccgaggatttgcagaaggtgtctctgatctcaggcatccactggaacag

SEQ ID NO: 146540 - DNA, 226 bp, Glycine max
tgtaactttttgattcctaaattctctaaaattcgaaattctaatttcgttaggggaaagagattgtttgtgtgtgagtgagtatggctggaaaaggcgagggtcctgctatcggaatcgatttgggaacgacgtactcttgcgtcggcgtgtggcaacacgatcgtgttgaaatcatagccaacgatcagggtaacagaactaccccatcctacgtggctttcac

SEQ ID NO: 146541 - DNA, 230 bp, Glycine max
gttagcgacccttcagagcttcccaagtggaactatgatggttccagcacaggtcaagcttctggtgaagacagtgaagtgattttatacccacaagccattttcagggatccattcagaaggggtaacaatatcttggttatctgtgatgcctacactcctgctggagaacctattcccactaacaagaggcacgctgctgccaaggtgtattcttgttcaataccgta

SEQ ID NO: 146542 - DNA, 228 bp, Glycine max
cttggcctagccagctagcgcttctcctctcgcattccgtggagatctagtgctgccaaacctcgctgaaaattagggtttcgtttcggaggtagacgaagatgttcggcagggcaccgaagacaagcgacagcaccaggtactacgacatcctcggcgtttcgaagaacgcttcgccggatgatttacagacggcttacaagacagccgccattaagaaccaccctg

SEQ ID NO: 146543 - DNA, 224 bp, Glycine max
ataggattctacccgccgctcgatgggaattgcgcttcaaggcgtctcgtagggctaatccgcctcacgagggtcaccaacggcacgtgcctttggggggccgaggccccctactgctggtcggcaaacggacggcgggcgcacgcgtcgcttctagcccggattctgacttagaggcgttcagtcataatccaacgcacggtagcttcgcgccactggctttt

SEQ ID NO: 146544 - DNA, 222 bp, Glycine max
gctgcggatcatgctggacattcagcacaactggggctttagaagcagcctatgcacaagcatttgggaagagtatctctctttctgagcagcagctagtggattgtgctggccgtttcaacaactttggctgtaatggtgggttgccatcacaagcctttgagtacatcaaatacaatggaggacttgagacagaggaagcatacccctacactggaaaag

SEQ ID NO: 146545 - DNA, 225 bp, Glycine max
tgaatgtacaagtaaacatgcactaagagaatcactttattttctttgtgtgtgagagagagaaaactgtagaatgaaatatctgtcgcttccttattcatcatcagtttagagctgttaaaaaaaaaaaaaaaaaaaaaaaaaaaaaaaaaaaaaaaaaaaaaaaaaaagaaaaaaaaaaaaaaaaaaaataaaaaaaaaaataaaaaaaaaagggaggggggg

SEQ ID NO: 146546 - DNA, 224 bp, Glycine max
gcgggtctagggagaaccattttggtgttcctgcttatcacatgagaaggaatgttggcctgagagttaggtccatggctgaggaagagcaaccaagtcagcctgcgaccccagttacaccaccaccagcagaacccaaaccacagccagtctctactccttcaccaaaggtgagcaccaagttttctgatgtgttggcgttcagtgggccagcacctgagagg

SEQ ID NO: 146547 - DNA, 224 bp, Glycine max
tgcaggagagccagcaaaactgatcacgcagagataccgtgaagctgcagacatgatcaagaagggaaagatgtgcgctctcttcatcaacgatcttgatgcaggagctggtcgtcttggtggaaccacacaatacactgtgaacaaccagatggtgaatgccactctcatgaacattgctgataaccccaccaatgtgcagcttccaggtatgtacaacaagg

SEQ ID NO: 146548 - DNA, 222 bp, Glycine max
gttgatacttctggggatggtgtgaagctaactcttgaaccagcagctggtggtgatcagactacacttgaagcagatgttgtcctggtatctgctggtaggaccccattcactgccgaacttgggttggacaagataggagttgaaactgacaagattggacggattttggtaaatgaaagatttgccacaaatgtctctggtgtttatgcaattggagat

SEQ ID NO: 146549 - DNA, 271 bp, Glycine max
ctcgcgcgttggcgcagcgcttcagaacgccgacgaactcatcgactccgtcgagacatttatcttcgattgtgacggagttatatggaaaggtgataaattaatagacggagtgcctgaaacgcttgacatgcttcggtcaaagggcaaaagattagtttttgtcaccaataactcaacaaagtctaggaagcaatatggaaagaagtttgaaacacttggcctgaatgtcagcgaggaggagattttcgcatcatcctttgcagctgct

SEQ ID NO: 146550 - DNA, 269 bp, Glycine max
ctcgtcttcaatcctttcgttattctcttagtcatccgtctcttcggattattacaaggttgcgaaggtagtggatgacatgctcgttgagcaagagggggtatcgccttgtgccagtgggtctaggtgatgatgatcaatgcattgaggatgactttactgcatggaaagaagaactgtggccagcattggatgaattgcttagagatgaggacgatgcaactgtgtctacaccttatactgctgcagttttggagtaccgggttgtt

SEQ ID NO: 146551 - DNA, 262 bp, Glycine max
ctggattccagtgggcatcaaaagaaggtgctttggccgaagaaaacatgagagccatttgctttgaagtatgtgatgttgttctgcacgctgatgctatccacagaggaggtggtcaaatcatccctactgccaggagagtcttctatgcttcccagattactgccaaacccaggcttcttgagcctgtctacctggttgaaatccaggctcctgagcaagctcttggtggaatctacagtgttcttaaccagaaacgtgg

SEQ ID NO: 146552 - DNA, 264 bp, Glycine max
gaacaagtagttgagaactaagaaggagaagcaaatggcttcctcaatgatctcttccccagctgttaccactgtcaaccgtgccggtgccggcatggttgctccattcactggcctcaagtccatggctggcttccccaccaggaagaccaacaatgacattacctccattgctagcaacggtggaagagtgcaatgcatgcaggtgtggccaccagttggcaagacgaagtttgagactctttcctacctgccagaccttga

SEQ ID NO: 146553 - DNA, 263 bp, Glycine max
gtggttatgttgcctcaaactcaaaggatgaccctgcaaaggaggctgctaacttcacagcccaagtcatcatcatgaaccaccctggtcagattggaaatggctatgcccctgtcctcgactgccacacttctcacattgctgtcaagtttgctgaactcatgaccaagattgacaggcgatccggcaaagagcttgagaaggagcccaagtttttgaagaacggtgatgctggttttgttaagatgattccaaccaaaccc

SEQ ID NO: 146554 - DNA, 263 bp, Glycine max
cacacttgggtggccacagcaacaataacaatggtagcctcactacaagctgctgctaccttcatgcaacccaccaacgtgggcatggtcactcgcaacctcaaatctacacaatgcatttctaaggcttttggcttggaacccgctgcagctaaactcatttgctcccttaagcccgatctcagagctttggctcaaagatgtgtcgacgccaccaaaattgcaggactcgctcttgccacctcagctctcgttgtatctgg

SEQ ID NO: 146555 - DNA, 268 bp, Glycine max
cgcccatcacggatgagaggcgcatagagtgtggagaagttctactgggcaccaacaagggatgaccgcattggtgtctgcactggaatttttcgcaccgattcaattcctgaacaggacgttgtcaagattgttgacaccttccctggccaatccattgatttctttggtgcactgagggccagagtatatgatgacgaagtgaggaagtggatttctggtgttggtgttgacggcattgggaagaagcttgtgaactcaaaagatg

SEQ ID NO: 146556 - DNA, 256 bp, Glycine max
gcgaatccctctctctatctctcacacacactttctccctctctctctctcacccagatcttgtagcaatggcgagcgctcccactccacgcgaagagttcgtgtacatggcgaactggcggagaggccgagcgctacgaggagatggtggagttcatggagaaggtctccgcctccgccgagatcgaggagctgaccgtggaggagcgtaacctcctctccgtcgcctacaagaacgtgatcggcgctcgccgcg

SEQ ID NO: 146557 - DNA, 259 bp, Glycine max
ctcttccataaacgggtgctgcctctcttccatctccccagccaaaacctctctcagcaaggccacattacgcccttccgtcttcgcaacccttaacactccttcttctccttcctcttcatcttccttcccctctctcattcaagacaggcctgtttttgctgcccctgcccccatcatcaccccaactgtgagagaggatatggcaaaggaatacgagaaagctattgaagaacttcagaaattgttgagggagaag

SEQ ID NO: 146558 - DNA, 262 bp, Glycine max
aattctctctactactgctagctgtgacttgttttgagttcaatcaaatcgcattggtatctgaaatcaggaaagatggttagcgtagtgagatcaggcaggcacaaagggcagaaggcccagcaaccatccttgccattggaactgcaaacccaccaaaccgtgttgatcagagcacctatcctgattactacttcagaatcaccaacagtgaccacatgaccgagctcaaagagaaatttcagcgcatgtgtgacaagtc

SEQ ID NO: 146559 - DNA, 263 bp, Glycine max
  unsure (1)..(263): unsure at all n locations
gacggtgtcatctcgatcctcctcatccagaaaccctttaggagcaaactcaattgacaatgctngaggaccatgcaaataatctctttgataattcttgtatgatctccggaagtcatgcatcaaccttggataggctatatgcttgggaaaggaaactctatgatgaagtgaaggctagtgagatagtcagaaaggaatatgacatgaagtgtaaattcttaaggcaactggaatcaaaaggagaaaagacctctacagtt

SEQ ID NO: 146560 - DNA, 263 bp, Glycine max
ggctaatctctcactcttgttcttcggtctcctcctattctccgctgccgtagccaccgtcgaacgaatcgacgatgaagacaaccttctgatccgtcaagtggtgccggacgcggaggaccaccacctgctcaacgcggagcaccacttctccgccttcaagacaaagttcgccaagacctacgccacgcaggaggagcacgaccaccgcttccgtatcttcaagaacaacttgctccgcgccaagtcgcaccagaaattgg

SEQ ID NO: 146561 - DNA, 225 bp, Glycine max
tcgacgaccgtcttccccaatcgcctgcgtctctctctgaattgacaagcttaaagacaaagtcttaaatggctggtccaaggattgcccatgctaccttgaaaggtccgagtgtggttaaggagataataattggaataacacttggcttagctgctggtagcgtgtggaagatgcaccactggaatgaacagcggaaaaccaggaccttctacgatttactgg

SEQ ID NO: 146562 - DNA, 259 bp, Glycine max
cttgagtacagcaactatatcaccagcacttgtgaagcaacttcgaggaagaaacaggagctggaatgatggattgcaaaaaagcactatcagagaccggtggggacattattaaagcacaagagtaccttagaaaaaaaggcttatcaagtgcagacaagaaagcaagcagggtcactgctgaaggaaggataggttcttacatccatgacagcaggataggtgttttggtagaagtaaactgtgagacagattttgt

SEQ ID NO: 146563 - DNA, 261 bp, Glycine max
aaacaaagaaaaaaaaaaacccttagccaacacaaccatcatggccacctctgctattcagcaatcagcattcactggtcaaactgctctgaagcagctcaatgagttcgtccgcaagaccggtggcgccggcaaaggtcgcactaacatgcgccgcaccgtcaagagtgctcctcagagcatttggtatggccctgaccgtcccaagtacttgggtccattctcggagcagattccatcatacctgaccggagaattccc

SEQ ID NO: 146564 - DNA, 268 bp, Glycine max
ctcgaagttagaatgaccatgcagggtattggtactcaatcatgggatgttggtttcattgttcaagctttacttgctactaaccttatagatgattttggacctacaattgcaaaagctcacgatttcatcaagaaatctcaggtaagagaaaatccttcgggagattttaagagtatgtatcgtcacatttgtaaaggctcatggacccttgccgatagagatcatgcatggcaagtttctgataccactgcagaatgtttgaagt

SEQ ID NO: 146565 - DNA, 259 bp, Glycine max
ggctcatggccccaataatgctgaaaccactcagatgcaggggcggtaatgcgattgctgtgtctcgagatcacaaaccagaccgaactcgtgagaggcaaaggattgaagaagcaggaggctttgttatgtgggcaggaacttggagagttggaggtgttcttgctgtttctcgtgcatttggtgatagactcctgaagcagtatgttgttgctgatccagaaattcaggaagaaaaagttgacagctcccttgagtt

SEQ ID NO: 146566 - DNA, 255 bp, Glycine max
aaaggagttatctggcggtagaaaccattttgtggagagttgtggcttgcctattagcacatacttcagtgctttgaagctgctgtggttgatggaaaatgtagatgccgtaaaggaggccataaagaaaaaggatgcgctgtttggaactattgacacttggttgatatggaatctaactggtggggtgaatgggggattgcatgttaccgatgtttcaaatgcatctcgtacaatgctcatgaatctaaaaac

SEQ ID NO: 146567 - DNA, 255 bp, Glycine max
atcagagacgtgttggagacattccatgtcatagcagagcttccactagacaactttggcgcatacatcatctcaatggcaactgcaccttctgatgtgcttgcagttgagcttctgcagcgcgaatgccatgtcaagcatccactaagagttgtgccattgtttgagaagctagctgatctagaagcagcaccggccgcgttggcgcgattgttctctgtagactggtacagaaacaggatcaatgggaagcag

SEQ ID NO: 146568 - DNA, 255 bp, Glycine max
ccctcgagcgaatcggctcgagcatactcatactgtgtgtgaaattatcaaggcccgttgggacgattctgcgcacattgttactcctcattttctgcttcttgacgaatataattgtgacggctatgttgctcctcggtggttctgcggttgtaaatgcattaactggagtgaacctttatgctgctagctttctaataccacttggagtaattgtctatacactagcgggtggactgaaggctacattcttag

SEQ ID NO: 146569 - DNA, 257 bp, Glycine max
ctagaatctaaggactctcgatccgttgtttatgtgaattttggcagcatcactgttatgtctgcagaacaactcttggagtttgcttggggtttggccaatagcaagaaaccctttttgtggatcattaggcctgaccttgtcattggtggatccgtgattttgtcgtctgagtttgtcagtgaaacaagagacagaagcctaatagcaagttggtgtccacaggaacaagtgctaaaccatccttcaattggtgt

SEQ ID NO: 146570 - DNA, 260 bp, Glycine max
gagacgtgagatacactaagttatcctcataaatacactctaattaggtggcaagataagtgtctataccttagtaacattgccacatattgtgttcattttggaattgtgccactaaaattctattcaattcatctatggctgcctcttcttatgctatgcaatcaatccttgcaaaccctttgatccgcatttccagcgggtctagggtgaaccaatttggcgttcctgctttgcacatgagaaggaatgttggcctg

SEQ ID NO: 146571 - DNA, 149 bp, Glycine max
gtcgcttcttcgtaggtgcagctgcaatggtgaagggacgccaaggagaacgtgtcagactctacgtgaggggtacaatccttggatacaaaaggtccaagtcaaaccagtatccaaatacatccctgatccaaattgagggtgtgaat

SEQ ID NO: 146572 - DNA, 265 bp, Glycine max
cgaggatcctaatgcagaggcaaatatctccaccaacctcaccacaatgtataggcagcttgtgtctaacgcaaagactccaacattgttcttcggaaatccttatcgtgctggggatcagcctaaccctggtggtggctccgtagagagcactccacatggtcctgttcatgcatggaccggtgatatcaaccaccctacaatggaggacatggggaatttatatgcagctgcaagagaccccattttctattgccaccattcc

SEQ ID NO: 146573 - DNA, 253 bp, Glycine max
caaccttatcccgctccttgttggcaatgtgggattgattttcaccaaaggtgacctgaaggaggtcagtgaggaggttgccaagtacaaggttggagctcctgctcgtgttggtttggttgccccaattgatgttgttgttcctcctggcaacacagggctcgatccctcccagacctctttcttccaggtgctcaacattcctaccaagattaacaagggtactgttgaaatcattacccctgtggagctc

SEQ ID NO: 146574 - DNA, 242 bp, Glycine max
atggcttctgcagaagtagagttccgatgctttgttggtgggcttgcttgggccaccgaccacgatgctctcgagaaagccttctctcaatttggcgaaatcgtcgaatcgaaggtcatcaacgatcgtgaaactggaagatccagagggtttggatttgtgaccttcgccacagagcaggcgatgagagacgcaattgaaggaatgaacggccagaacctcgacggtcgtaatataaccgt

SEQ ID NO: 146575 - DNA, 241 bp, Glycine max
gccatccctgatggctggatgggattggatattggtccagattctgttaaatcattcagtgaagcattggatactacccaaaccatcatatggaatggaccaatgggagtgtttgagtttgacaagtttgctgttggtacagaggctattgcaaagaagctggctgatctcagtggaaagggggtgaccacaattatcggaggaggagattctgttgcagctgtggagaaagtaggagttg

SEQ ID NO: 146576 - DNA, 237 bp, Glycine max
attgagcaatataatacggaagtaaaaattgtaaatacgggtacgtacttcaagtaggcgacggtattgctcgtatttatggtcttgatgaagtaatggcgggtgaattagtggaatttgaagagggtactataggcattgctttgaatttggaatccaaaaatgttggtgttgtattaatgggtgatggtttgatgatacaagagggaagttcagtaaaagcaacaggaagaattg

SEQ ID NO: 146577 - DNA, 243 bp, Glycine max
cctcgctctatttctcagtctctgtgtttgcggctgtggattccgaacgagtgaccttcttcgtttctcgcaaagtttaagtaatcatgggtaaggaaaaggttcacatcaacattgtcgtcattggacatgtcgactctgggaagtcaactaccactggtcacttgatctacaagcttggaggtattgacaagcgtgtgattgagaggttcgagaaggaggctgccgagatgaacaagaggt

SEQ ID NO: 146578 - DNA, 240 bp, Glycine max
ctattcttcaagattcaggtactgcgtttcggaagcagacacagatggctcgtacgaagcaaaccgctcgtaagtccacaggaggaaaggctcctaggaagcagcttgcaaccaaggctgcacgtaagtctgcaccaactactggtggtgtgaagaagccccaccgttatcgtcctggtaccgttgctcttcgtgagattaggaaataccagaagagtaccgagcttttgatccggaagc

SEQ ID NO: 146579 - DNA, 243 bp, Glycine max
cgttctgtgtgtgcgagacatggcgatggcaatggcgcttcgcaggctttcatcttcaattgacaagcctctgcgccctctcttcaatgccggttccctctactacaagtcgtctttgcctgatgaagctgtttacgacaaggagcgacccggagttacatggccgaagcagttgaatgctccacttgaggtcgtggatcctgagattgctgatattattgagcttgagaacgctaggcaatg

SEQ ID NO: 146580 - DNA, 242 bp, Glycine max
cgcacgaatatcttgttgtttggagcgatccgagaaaaactctgtaaacatgttggtttaccaggacctccttacaggtgatgagcttctctctgactccttccgttacaaggaaattgagaatggaatgctgtgggaagttgaggggaagtgggttgttaaaggagcagttgatgtagacattggtgcaaacccttctgctgagggtggaggagaagatgagggagttgatgatgcagctg

SEQ ID NO: 146581 - DNA, 246 bp, Glycine max
caaaggttgctgtaggagataagattgcagtagtgctaagtgctaacacctgcagtgaacaatggcctctgcatcagcatctctgctcaagtcttcacttgttcttgacaagtctgagtgggtgaagggacaaacccttcgccaaccttctgcatcagttgtgagatgcaaccccaccaccccatcaggcctcaccatcagagctggttcctatgctgatgagctcgttaagaccgcgaaaacagt

SEQ ID NO: 146582 - DNA, 237 bp, Glycine max
gtggagcatcaatttattcccacaatggttacgatatccataaggacttcttgattggcagatctttgatgggcacaatggtatatctgctgctatttttgcgaaggaaagcatactaagtaatgttttgagtgcaataccacaagatatcagtagggatgagtggcttcaagctctgcctcgtgctctagttgttggttttgtaaaaactgacatagagtttcagaaaaaagggga

SEQ ID NO: 146583 - DNA, 237 bp, Glycine max
ctcgagcgtgcaattgaagttgaagtcttgcccttctctcttcaactccaaacacaacacatcataatccatggctggctccgtctccactgtcggagctgtctacagagctcttttgaacctgaatgggtctggacctggggtttcagctcccagttcatccttctttgggagcagcttgaagaaggttattggctcaagggtccccaacacaaagatttcctctggaagcttcaa

SEQ ID NO: 146584 - DNA, 238 bp, Glycine max
caagcagtgggaggaggctcgggactctgaccgcgtgcctgttgaagaatgagccggcgactcataggcagtggcttggttaagggaaaccaccggagccgtagcgaaagcgtgtcttcacagggcaattgtcactgcttatggacccgaacctgggtgatctatccatgaccaggatgaagcttgggtgaaactaagtggaggtccgaaccgactgatgttgaagaatcagcggatg

SEQ ID NO: 146585 - DNA, 239 bp, Glycine max
atttgcggtagacttcccaggatgtgaaccatgccgtccttgctgtggggtatggagttgaaaatggcgtcccatattggctcataaaaaattcatggggagaaagttggggtgagaatggctacttcaaaatggaattggggaagaacatgtgtggtgttgcaacttgtgcgtcttatccagttgtggcataaattgcataagaatatggtccctggtgactaccaccttgtcatgct

SEQ ID NO: 146586 - DNA, 238 bp, Glycine max
atttatagtaaaataaatattgggttgaattgagcgggtcgtatttaaataagaatttcttttccttttttcttagtttctatcgaaaaaaaaaagattcgatagaaactaagaaaataaacaaattgattcgccgagaaagaggagagagagggattcgaaccctcgatagttctttgttccgaactataccggttttcaagaccggggctatcaaccactcagccatctctcgaaa

SEQ ID NO: 146587 - DNA, 243 bp, Glycine max
gtcgcactcttgctgattataacatacaaaaggaatcaacacttcacttggtcttgaggctaaggggaggtaccatgattaaagtgaagactttaactgggaaagaaattgaaattgacattgaaccaactgatacaatcgaccggatcaaggaacgtgtagaagaaaaagagggaattccacctgtgcagcagagactcatatatgccggtaagcagcttgctgatgacaaaacagctaaag

SEQ ID NO: 146588 - DNA, 238 bp, Glycine max
aaagtagatggtccagattagtaccacaaaaatggagaaatagaataactgaatatcgtatagctcaaaataaagatttaaccaaatgcaattcatatgaaaaaagccaattaattctttacaaagaacaacaagtaaacgcattaaaaaaaaaaattagaaaacaatatagatacgatcttttatcctataattttatcaattatgcagataagaaagactcatatatttatggata

SEQ ID NO: 146589 - DNA, 238 bp, Glycine max
gagagaaatagagagagaacttcaagtgagggtgagagtgacacaaatctagagagagcactagtactctaaaagtctattatattcttcaaaatatgaccatgcatcgcgagtcttgggcttttgtcttcggcgttatgggcaacatcatctcctttggagtgttccttgctccattgccaaccttttaccaaatctacaagaagatatccactgaaggtttccagtcacttcctta

SEQ ID NO: 146590 - DNA, 240 bp, Glycine max
gtggaacactaccattggtcaaggtagaggaaatatctcagactattgacacgctgaattttaccgtccaaaactctgttcagttcgctggtcctttggccaccacctcaattagtactaatgccaaattcgatgttcgaagtccaaaacgtgtgcagataaaatttgaggaaggcataattggcactccacagcttacggactcactagagataccagaaaatgtggaacttctgggtc

SEQ ID NO: 146591 - DNA, 236 bp, Glycine max
tggccatggagggttttcttctgtcgagttcctcagggatgagctgtacaaggagtgtgttgaagctttacaaggtgggttactattagtcgagaaagatttcaaagccattaaaagggcattacaggaggcatttctcaaggctgacgcgaggttattaaaacggcttgaaatgaatggagaggaggatgaatcaggtgctacatcaactgccgtgttcattggagatgatgagc

SEQ ID NO: 146592 - DNA, 236 bp, Glycine max
tgcacattcttcatcacttcattcaacatttctctctcccttagctagtttttaccaatggctgctgcggttagtgctgcagtctcttttccatccaccaagtctacttctctcccaagcaggacctccatcattaccccagagagagttgtattcaagaaggcttcattgcaatacagagatgtttgtagcagtggaagggtagtttccatcagagctcaagtcaccactgaggc

SEQ ID NO: 146593 - DNA, 236 bp, Glycine max
ctccgatggctaatctctcactcttgttcttcggtctcctcctattctccgctgccgtagccaccgtcgaacgaatcgacgatgaagacaaccttctgatccgtcaagtggtgccggacgcggaggaccaccacctgctcaacgcggagcaccacttctccgccttcaagacaaagttcgccaagacctacgccacgcaggaggagcacgaccaccgcttccgtatcttcaagaac

SEQ ID NO: 146594 - DNA, 238 bp, Glycine max
gggacctcaaggcaagaatgcctggcctaaaggtataatcacatgtggcatgactttcataattataggaacggaggtggctccatggtgcaaaactggtgggttaggagatgttcttggaggtctaccaccagcattggcaggtttcgggcatcgagtaatgactattgtgccacgctatgaccagtacaaagatgcatgggatacaggtgttgtaattgaggtgaaagtaggagat

SEQ ID NO: 146595 - DNA, 238 bp, Glycine max
  unsure (1)..(238): unsure at all n locations
cgagtacttccacnagncnganaagnccanncaggctctccgtggagcaagtgaagtttcttgagaagaactttgatgaagagaacaagctcgagcccgagaggaagatttggctagccaaggaactcggcttgcagcctaggcaggtggcgatttngtttcagaaccgccgcgcgcgctggaagaccaagcagatggaaaaggactatgattccctgcaggctagttacaatgatct

SEQ ID NO: 146596 - DNA, 235 bp, Glycine max
gattactggacagagaaaagaccagtctcctggtactaggtctgaaatccctattgtccaggttgatcctgtttttgagggactggatggtggaattggcagcctggtgaagtggaacccggttgcaaatgttaatggtctagacatatggaacttccttaggaccatgaatgttcctgtaaattcattgcattcccaaggatatgtttcgattggctgtgagccatgcacaagg

SEQ ID NO: 146597 - DNA, 232 bp, Glycine max
gcggttgacgcgccactcgatgtttccatttgcctgcatacctttggtattgtggggtgtggttcgtttagtggtgtcaagtcttgcgaacgtgagggtgcatgagtggtaatcgggatgtttttgttgcacggctccatgcttgcgcatgcaacgtgtgacatgcatccttttcattgtcaccttagccttcgtggcttaggtgctgacgattggttcctgtgttgcctac

SEQ ID NO: 146598 - DNA, 236 bp, Glycine max
cttgtctcaagctctgcggcagaaaaaggaggatacaaaacttatgtgatggaaataaagggaaatcgtgtttacagtaaattgaaatatgaatctggtgtccaccgagttcaacgggttcccctaacagaaactcagggccgggtacatacttctactgcaacagtggccatcatgccagaggctgatgaagttgaagtcgtaattgacccaaaagatattgaactgacaacggc

SEQ ID NO: 146599 - DNA, 235 bp, Glycine max
gccatgtctacttcaaagagcgtcagagttctagtgaagatgacaatgaacttagaagagggccttggactcttgaagaggataatttgctctcccaatatatttctagtcatggagaagggcgatggaatttgctagctaaacgttcaggattaaagcgaactgggaaaagttgcagattaaggtggctaaattatctaaagccagatgtaaaacggggaaatttaaccccaca

SEQ ID NO: 146600 - DNA, 236 bp, Glycine max
ctgccataagtcccttccctattgtaatttctgccagcctcaaaaaagacttgctctgcctctgccactctctgagtaggactacactgccatggctgcctcagtctccactgttggagctgtcaacggagctccactgagcttgaacagctctggagctggagcttcagttcccagttcagccttctttggcaccagcttgaagaaggttattgcctcaagggtccctaacgtca

SEQ ID NO: 146601 - DNA, 232 bp, Glycine max
ctttttatgatgttctgttctgcattattttcaggtcacgcaacaaggaatatattccgttcgttgggcttgctgattttaataaattgagtgctaagcttatttttcgggctgacagccctgctattcaagacaacagggttaccactgttcaatgcttgtctggaactggttctttaagagttgggggtgaatttttggctaaacactatcaccaacggactatatactt

SEQ ID NO: 146602 - DNA, 235 bp, Glycine max
cacacacacagcaacacactgcactgtgtggaaagtaagcatggcaagagtggtggcactccaacagaaccaactatctttctctcccttagcttcctctctttttgacttcagtggaaccagacttcaaactcaacttcagttcaagagaaaactatgccatccaaaagggtctttctacgtctcggcatcgagcaccaagaaaatcctaataatgggaggcaccaggtttatt

SEQ ID NO: 146603 - DNA, 234 bp, Glycine max
  unsure (1)..(234): unsure at all n locations
cacctttctcctaaaacatctccagtgggttcttcttcttctattacaacaacgtcgtccaagaccatgaccatggccatggccacgatcctgctcctgttcacggtcttcgcggtttcatcggccctagacatgtcgataatctcgtacgacaacgcccacgccgccacgtcgcgcagccatgngatgctgatgtccatgtatcagcagtggctagtaaagcacggcaaggtg

SEQ ID NO: 146604 - DNA, 231 bp, Glycine max
ccaactctcatgttcgaagaaaacatacacactctcttcaaactctaattttcttttcctttcatttaatttcctcaatggcggcttccctcgaccagcgtccgtaccccggcctccacaatggcgtcgttccgcccctcaaaccaggcccggatatcccgcgtcccaagaagctaccccagccgccgccgccactctcggattcctcaagcgacgaagaagaagacacca

SEQ ID NO: 146605 - DNA, 234 bp, Glycine max
tgtaaattaagagcatggctgcacaagctcttgtatcatcatcttctcttaccttctcagcggaggctgcaagacaaagtcttggaccaagatcactccaatctccatttggcttctccagaaaagcctcctttcttgttaaggcagctgctaccccccctgtcaagcaaggatcagacagacctttgtggtttgcatcaaagcaaagtctttcttacttggatggcagccttc

SEQ ID NO: 146606 - DNA, 233 bp, Glycine max
cagtggtgtggtgcgcggtggcggtgctattatgcgccgcggccggtgcgtcgtgggtggaggaggcggcgaacccgatacgaatggtgtctggcgtggaggcggaggtggttcgggtgatcggggagtgccggcgtgcgttgaagtttgctaggttcgtgagcaggttcgggaagagttaccaaagcgaggaagagatgaaggagaggtacgagatattctcgcagaatctc

SEQ ID NO: 146607 - DNA, 236 bp, Glycine max
cagttgagcttttgatgcaaattttgtcacttgtggatgatcaaacggttatcatagcttctgaagtgtgtcgtgggtggagagaggcaatttgctttggccttactcggttatcactctcatggtgtagcaagaacatgaataacttggtcctatccctttctcctaaattcacaaaactgcagactttaatccttcgtcaagacaagcctcaactagaggacaatgctgttgaa

SEQ ID NO: 146608 - DNA, 234 bp, Glycine max
ccgtcttcctttccccgtttttcttctctctctcaatctctttcatgtgagggtagaaccacaacaaaacacaaaccacacactctcctaactcgaggttatttttttctttccccaaagaggcatgagttgcaacgggtgccgcgtccttcgaaagggttgcagcgagtcttgtattctgcggccgtgtctacagtggatcgatacgcccgaagcacaaggccatgccactgt

SEQ ID NO: 146609 - DNA, 230 bp, Glycine max
ggagtgtgtaacaactcacctgccgaatcaactagccccgaaaatggatggcgctaaagcgcgcgacctatacccggccgtcggggcaaggaccaagccccgatgagtaggagggcgcggcggtcgctgcaaaacccagggcgcgagccgttgcggagcggtcgtcggtgcagtgatcaaaagaatggcatgtagcaaaataagcaaggctcttttcaaccttagttaag

SEQ ID NO: 146610 - DNA, 235 bp, Glycine max
ctcactcctacaccggcgaccaaaggcttctcgacgcgagccaccgtgacctgaggcgcgccagggcggcagctctcaacattgtccccacttcaacaggagcagcaaaggcagtggcccttgtcctcccaaccctcaagggcaaactcaatggcattgcactccgtgtgccaacaccaaacgtctcagtggtggacctcgttgttcaggtctcaaagaagacctttgcagaaga

SEQ ID NO: 146611 - DNA, 234 bp, Glycine max
gcatgcacacacttgcatagttttggaaaccaagaatttttgaagggtagcatcaacaagaagttctggaaatggagatcaccaatgtcagcgagtatgaagctattgcaaagcagaagttgccaaagatggtgtttgactactacgcatctggtgcagaggaccagtggactctgcaggagaacagaaatgccttttccagaattttgtttcggccacgtattcttattgatg

SEQ ID NO: 146612 - DNA, 230 bp, Glycine max
ggcgacgacagcagccttgtgcggcactatgatgagcagctccttcctgaggagaaaagcagtggtcacaagcctgaaggcattccccaatgctaacgcagtgtttggtgtaaagggtggacgtggaggtggtgtgactgccatggctagcttcaaggtgaagctgataaccccagagggagagaaagaatttgaatgcccagatgatgtatacattcttgaccaggcag

SEQ ID NO: 146613 - DNA, 233 bp, Glycine max
ggcgacgacagcagccttgtgcggcactatgatgagcagctccttcctgaggagaaaagcagtggtcacaagcctgaacgcattccccaatgctaacgcagtgtttggtgtaaagggtggacgtggaggtggtgtgactgccatggctagcttcaaggtgaagctgataaccccagagggagagaaagaatttgaatgcccagatgatgtatacattcttgaccaggcagagg

SEQ ID NO: 146614 - DNA, 233 bp, Glycine max
gttaaaccagtggttggaaggaaaatcaattggttgaaagctggacttatagaatcatggtttgtgataaccgttagtccaaactatgctaaagaactggtgtcaggtccagacaaaggagtggaattggacaacatcattcgcaaaattgatgatgatggtcgtttggttggaattgtgaatggcatggatgttcaggagtggaatccaaccactgacaaatatatagctgt

SEQ ID NO: 146615 - DNA, 237 bp, Glycine max
aaaggcttcctttgaaagatttagagagagactgaagaaactagaaacactgattgatgagaggaatgtttacacaaagttgaagaacagaaatggagctggcattgtaccgtacgagcttttgaaacctgtctcaaagccaggtgtgactggaatggggggtccctgtagtatatctatttaagttgacaaagtcagactgaatattatgtgtgaagtatgatcctaaaccggtat

SEQ ID NO: 146616 - DNA, 258 bp, Glycine max
ctctctcacaataaccactaattctcccaactcaatttctctctcaaccggcccaatttagcataagcccagcatggccaccgcaacagcagcagccacctcgtccttcatggggacgcgcctcctggcggcccactccggggcggggcgggtgcaggcccggttcgggtttggcaagacgaaagccgccgccccgaagaaagtttccagggggtcgggctctagctccgataggcccctgtggtatccgggcgccaa

SEQ ID NO: 146617 - DNA, 258 bp, Glycine max
gctcgaagggagtctcctcatgctgatgagtttgatcttgagcaagctgaatctcgagaccacaagagatggatggaaaggcagaatgcaaaattgacagaaaaagctaggaaggaagactatgcacggatacgcactcttgttgataatgcgtataagagagatcccagaatattgagaagaaaggaagtagaaaaagctgagaaacaaaggaaaaaggaggctaagttcctagcaaagaaggtgcaggaagaagaa

SEQ ID NO: 146618 - DNA, 245 bp, Glycine max
gacgagagtgaagatgagaagaagaagcaagaggagttgaaggagaagtttgacaacctatgcaaggtgatcaaggatgttttgggtgacaaggttgagaaggttgtagtctctgaccgtgttgttgattcaccatgctgtctggtgactggagaatacggttggactgcaaacatggaaaggatcatgaaagctcaagccctaagggacaacagcatggcaggatacatgtcaagcaagaagac

SEQ ID NO: 146619 - DNA, 244 bp, Glycine max
ctttctcctaaaacatctcaatgggttcttcttctattacaacatcgcccccaaccatgaccatggctgcgatcgtgctcctgttcacggtctttgctgtttcctccgccctagacatgtcgataatctcgtacgacagcgcccactcggacaaggccgccacgttgcgcaccgaggaggagctgatgtccatgtacgagcagtggctcgtgaagcacgggaaggtgtacaacgcgctcggcga

SEQ ID NO: 146620 - DNA, 226 bp, Glycine max
tttacaagcttccacctgttggtcctgggcggtgatcttgccaaggttcagagggctgtgtgcatgatctccaattccaccagtgttgttgaggtcttctctcgcatcgaccacaaatttgacctcatgtatgccaagagggcttctgtgcattggtatgttcgtgagggtatcgaagagggagagttctctgaggctcgtgaagatctgactgccctggaataag

SEQ ID NO: 146621 - DNA, 241 bp, Glycine max
ggtagggatacccgctgaacattactcatgctgaccttattgcatctctaactctaaatgataaaggtgacaaccttactgcctcatattaccacattgtaaacccgctgactaacacggctgttggtgcggagtttcacatagcttttctggcaatgaaaatatactcacctttggtacacagcatgctctggatccactaactctgttgaagtcccgggtgaacaactatggtcgggca

SEQ ID NO: 146622 - DNA, 242 bp, Glycine max
tccagtgaagcagatgagatttacaaaatatgcagtgtgctaggtagtccaaccactgaatcttgggcagatggactcaaacttgccagggatatcaactatcagtttccacagcttgctggtgtacatctctctacactgatcccatccagaagcgatgatgcaatcagccttgtgacgtcactttgttcatgggatccctgcaagagaccaactgcagcagaggttcttcaacatccttt

SEQ ID NO: 146623 - DNA, 257 bp, Glycine max
ggggtttcttcgctgactgaatcagaaaggcagagttttaaggatgagatagagaagcttaaacatgaaaaagaacaacttcttcgggagttagagatgcatgaacaggagtggaaaatgtatgaggtacaattacaacactccaatgatcgtttggaaaagttggaaaagaagcaagaaaatttggtttcttctgtctctcaagtgttgcagaaacctgggattgccttaaatctcttgctgttgacagaaaacat

SEQ ID NO: 146624 - DNA, 260 bp, Glycine max
gctcgagcgagggtgagaagaagatcgcgtacgatgcgaactgtgcgacctaatggaggagtacggccagatcggcgttgtgaactccgataacgtgggatcgaaccagctccagaacattcgcgagggtctccgtggcgactccgtcgtcctcatggggaagaacaccatgatgaagcgctcagtcaggatgcacgctgagagaaccggaaacaacgcctatctcaaccttatcccgctccttgttggcaatgtgggat

SEQ ID NO: 146625 - DNA, 254 bp, Glycine max
ggctctctcacgcagtcgcagtgagtgaaaaggaaaaccctaattgcggtattctcagtgccttcgagagaaagaaaaaatggcagataatcttgttctccgtggcaccatgcgcgcccacaccgacgttgtgacggcgattgccactcccatcgacaactccgacatgatcgtcaccgcctcacgttccaaatccatcatcctctggcatcttaccaaggaggacaagacttacggtgtcccccgccgccgcc

SEQ ID NO: 146626 - DNA, 248 bp, Glycine max
ttgccattctcatcctcctctgtctctctctctccaccattgccatggatccttacaagctccggccatccagcgccttcaattctcccttctggactacaaattctggtgctcctgtttggaacaacaactcctctttaaccgttggagctagaggtccaattctgcttgaggattatcatcttgtggagaagcttgcaaactttgacagggaacgtatcccagaacgtgttgtccatgccagggga

SEQ ID NO: 146627 - DNA, 246 bp, Glycine max
ggacactggtgctgtggttcgtggctttctggggcagcaacaacttgagagtgcactcactggcatggacttggtaatcatacctgctggggtaccaaggaaacctgggatgacaagagatgatttatttaaaataaatgctggaattgtgaggaccctttgtgaaggaattgccaagagctgccccaatgcaattgtcaacttgattagtaatccagtgaattccacagttgctattgctgcaga

SEQ ID NO: 146628 - DNA, 247 bp, Glycine max
ctttgttagcactgttgaaatttctaatccgcagtacctaaagtatgtctccaacagtcacacacaaatgtcctcttctctgaaacgctgcacatcctacaccaaatacgagatcagaaagcgaaaccctgaaccaaaatcatgtgccctattggtaatcgacgtgcaaaaccacttctcatccatggccaccccaatcctccataacctcaacaccaccatctccctctgccgccgcgcctccatc

SEQ ID NO: 146629 - DNA, 237 bp, Glycine max
ggctacctgtttctgcaatggatgcggtagctaagattgtagaggttcctcccatacgggtgtatgaggttgccacattttactccatgttcaatcgagctaaggttgggaagtaccatctgttggtttgtggaagaacaccttgtatgataagaggttcacgaggaattgaagaagccttattgaaacacttgggagtgaagcgcaatgaagtaacaccagatggtttgttttctg

SEQ ID NO: 146630 - DNA, 242 bp, Glycine max
cagcttcatccctaacgcgtgcatagcagagtcagagacagagacgcagccatggggcggagacctgcgaggtgttataggcaaattaagaacaagccataccccaagtcacgtttctgccgtggtgttcctgatcccaagatcaggatttatgatgttggtatgaagaagaagggtgttgatgagtttcctttctgtgtccatctggttagttgggagaaggaaaatgtttcaagtgaggc

SEQ ID NO: 146631 - DNA, 244 bp, Glycine max
gcttggtcaactcaggtgcgtcctgcaacaactctgttggctgatgggtgtccatatttgtatgctatggtgcatgatagttcagtgtctacaataccaggtgattttgtcattggtgttaagttgacaaccataaacaatatgtgtgcatatgggctcaatcctggtatttcaggttctcgtcttttgggcaccattcctcagtctatttcacagcaaactgtttggaatcaaatggcaacag

SEQ ID NO: 146632 - DNA, 248 bp, Glycine max
ctggatttccgctcacagttatttgtaatagcatttttaatgagatgctcattagatatagctatgaaaaattactgcgccaggctaaagctccaagtatgtttttacaatccttcaaaaattttgtttctttgtgtgtgtatggtgatgataacttaattagtgttcatgaatatgtcaagccttactttagtggttctaaattgaaaagctttctagctggtcataatatcaccattactgatggt

SEQ ID NO: 146633 - DNA, 244 bp, Glycine max
tgtttgtgatttagctctattttttatggttctgtttgtgattgaacagatgcagatcttcgtgaaaactttgaccggtaagaccatcacccttgaggtggagtcctccgacaccatcgataacgtgaaagctaagattcaagacaaggaagggatcccacctgaccagcagagacttatctttgcgggtaaacagcttgaggatggtcgaacccttgccgactacaacatccaaaaggaatcc

SEQ ID NO: 146634 - DNA, 243 bp, Glycine max
aatttgtggcgtcaacctatgggtttcattgtttttctaatctcgtccctagcagaatgtgaaagattaccttttgatttaccggaagcggaagaagaactagtagcgggttatcaaaccgaatactcgggtatcaaatttggtttattttatgttgcttcctatttaaacctattcatttcttccttatttgtaacagttctttactttggtggttcaaatatctctattccatacatattc

SEQ ID NO: 146635 - DNA, 242 bp, Glycine max
gatggacggagaaacaagcggatcttcaggacgtagctgggatcctgggttggaaattgaggtcccttttgagcagaggccggtgaatgagtactcatctctaaaggatggaatcttgtattcgtggggtgaactaggtccgggatcgttcttccttcgccttggaggtctctggctggcagtatttacagttcttggggggccaattgcagctgcaagctttaatccttcaaaagagcctc

SEQ ID NO: 146636 - DNA, 240 bp, Glycine max
cgagagtccagtagccgaaagcatcactagcttacgctctgacccgagtagcatggggcacgtggaatcccgtgtgaatcagcaaggaccaccttgcaaggctaaatactcctgggtgaccgatagtgaagtagtaccgtgagggaagggtgaaaagaacccccatcggggagtgaaatagaacatgaaaccgtaagctcccaagcagtgggaggaggctcgggactctgaccgcgtgcc

SEQ ID NO: 146637 - DNA, 240 bp, Glycine max
tataagcaacgcttcctgcaccacaaactgtcttgctccctttgtgaagatcctggatgaagagtttggaattgtgaagggaaccatgacaaccacacattcctacacaggagaccagaggcttttggatgcttcacaccgtgacttgagaagagccagggctgcagcactgaacattgtcccaaccagcactggagctgccaaggctgtgtctctagtgttgccacagctgaagggcaa

SEQ ID NO: 146638 - DNA, 247 bp, Glycine max
agatgggctagtgtaaatcttggcatctttatatgcatgcagtgttcaggaatacatcgaagtttgggggtacatatatcaaaggttcgttctgcaaccctggacacttggcttccagatcaagttgcattcatccaatcaatgggaaacgaaaaagcaaatagtttctgggaagcagaattacctccaaattatgacagagttggaattgagaatttcattcgtgcaaagtatgacgagaagagat

SEQ ID NO: 146639 - DNA, 244 bp, Glycine max
ccggcttcctttccccgtttgtacgctctctgtcaatcgctttgatgtgaggggagaaccacaacaaagcacaaaccacacactctgctaactcgaggttattgtcttctttccccaaagaggcatgagttgcaacgggtgccgcgtccttcgaaagggttgcagcgagtcttgtagtctgcggccgtgtctacagtggatcgatacgcccgaagcacaaggccatgccactgtcttcgttgcc

SEQ ID NO: 146640 - DNA, 242 bp, Glycine max
gcaggagaacaagtagttgataactgagaaggagaagcagatggcgtcctcagtgatctctgccccagctggtaccactgtcaaccgtgccggtgccggcatggttgcgccattcactggcctcaaatccatggctggctgccccagcagaaggaccaagaatgacgttagctccattgctagcagcggtggaagagttcaatgcatgcaggtgtggccaccagttggcagagaagaagttt

SEQ ID NO: 146641 - DNA, 243 bp, Glycine max
ccgttgtcctcaaagttggtatgtcatgtcaagggtgtgctggagctgtaaacagggttttggaaaaaatggaaggtgttgagtcatttgacattgatctgaaggagcagaaggtgacagtgaaaggaaatgtgcagccggacgaagttctgcaagccgtttccaaatccggaaagtcgacggcattctgggtggatgaagcacaaccacctgaaaacaagccttctgaaactgcacctgtta

SEQ ID NO: 146642 - DNA, 243 bp, Glycine max
cttaccagtgcctggcgtcgcggacacagaacagagcttgcagaagcgatttctcatttctcattcttaacaacacacttcaacaatggccaaaaccttcaaatacatcatcctcggaggaggagtttccgctggttatgcggcgagggagtttgccaaacagggcgttaagccaggggagttggctatcatttccaaagaagcggtagcaccttatgaacgtcctgctctgagcaaggctta

SEQ ID NO: 146643 - DNA, 236 bp, Glycine max
aggcaatggacaaggaagatcgtaccaatgtgagcttgtcttggccaagatgggaatcaaccccatcatgatgagtgctggagagttggaaagtggaaatgcaggagagccagcaaaactgatcaggcagagataccgtgaagccgcagacttgatcaagaagggaaagatgtgtgctctcttcatcaacgatcttgatgcaggagctggtcgtcttggtggaacacccaatacac

SEQ ID NO: 146644 - DNA, 249 bp, Glycine max
atgagtccaaagaagaggacttgcagaacaagagccctttgctcctcaaaatgaacccggttcacaagaaaatcccggttctcatccacaatggcaaacccatttgtgaatctctcgttgctgttcagtacattgaggaggtctggaatgacagaaatcccttgttgccttctgacccttaccagagagctcaggctagattctgggctgactttgttgacaataagatatttgatcttggaagaaaga

SEQ ID NO: 146645 - DNA, 243 bp, Glycine max
ctacgagattacccgatgggctcctctccctccggcgactacagcttcacggcgggtgcggcgcttggggtgttttcttcacgggattgtttgcgaagaaagtgtacgtggaggagatttacggtgttggaaggccgttcggggctttgatgggtggcggagggaggctgctggcggcgcaggtgattcagatattggtggtgtgcgggtgggttacggcgaccatggcgccgttgttctatg

SEQ ID NO: 146646 - DNA, 236 bp, Glycine max
cctctgcacaatctccttcaaaaagcttctcatccatggcgaaaacgctcatttcgtctcaatcgttcatcggcacaccgctcccctcactccctcgccaccacctcccccaccgcaccaggctcgtcgccaccaaagtcctcgtcagcctccacgaaattcccccaatccactccataagccgcaacattgacttcgccggaatcgtgactagagccgaagccttctctacacgc

SEQ ID NO: 146647 - DNA, 240 bp, Glycine max
gccgattcggcttggatcatagtccacggtcatgtctatgattgcacccgcttcctcaaagaccatcccggtggcacagacagcatcctcatcaacgccggcaccgactgcaccgaggagttcgaagccatccactccgacaaagccaagcaaatgcttgaagactaccgaatcggcgagctcaccaccacctgctacaactctgattcttcatcgtcaaacccctccgtgcatggcagc

SEQ ID NO: 146648 - DNA, 239 bp, Glycine max
ccttatcacccttttgcataaaagggccaccccttcttcttcttcccttctcaacttgtactacaatttctggattgaattatcttcaaaatgagacgaaatccttcatgttcaagctggtcaatgtggaaaccaaattggaggcaagttttgggaggtgatgtgtgatgaacatgggattgatgccactggaaattacgtaggtaactttcatcttcaacttgagagggttaacgtgt

SEQ ID NO: 146649 - DNA, 237 bp, Glycine max
ggcaattttagagcaagtgttgatttgcagcgcactcatcgtattaaaggaatgattaaaatggtggccacagttggtattcctgagaatacaggtatagcattggcctgtgctatgaatagttcttttagggggcgtgccagttctgatatttacaccatctgctctcaagactgtgaattatggaatcctgcttgcacaaaagcaatgactatgtcatttaatccaaacccgtgt

SEQ ID NO: 146650 - DNA, 238 bp, Glycine max
gaagaaggaagaggagaagaagaaagaggcaccaccccctccaccagacccagttttagagctggtcaaggcttatatggcttataatccccacatgaccacatactactatgttcaaagcatggaagagaatcctaatgcttgtgtcgtttgttaaataccaagctgtggaagaaaacatgaggaaaggaagacatatataaaaatatatatcaaactttctctatttgcaatggaa

SEQ ID NO: 146651 - DNA, 245 bp, Glycine max
cagcacaaagcgggttactgtctgttcaagctaccatctctctctctctttcttagtgcctccttgccagaagttaaaatggcccaagaaactttcctattcacatctgaatcagtgaacgaggggcaccctgacaagctctgtgaccagatctccgatgctgtgctcgatgcatgcttggagcaggaccctgacagcaaggttgcctgtgaaacctgcaccaagaccaacatggtgatggtttt

SEQ ID NO: 146652 - DNA, 237 bp, Glycine max
attgcctcaagggtccccaacagcaaggttttcggtggatgcttcaagattgttgctgtagaagagatgaaagagattgaagagacccagcagaccgacaaggacagatggaagggtcttgcctatgatatctcagacgaccaacaagacatcacaagaggaaagggtttggttgactcccttttccaagctccacaggatgctggaactctatatgcagtcatgagctcctacgag

SEQ ID NO: 146653 - DNA, 231 bp, Glycine max
attggccagaaaagacttggtcattgcaatgaaacgacttcaagacatgggtgcctcatatttcatattggatctcagagacaatcttggtgggctagtacaggccggaattgaaattgcaaagcttttcctaaatgaaggagacacggtgatctacactgttggaagagatcctcagttacagaaagctattgttacagatacttcaccattgattcaagctcctattgt

SEQ ID NO: 146654 - DNA, 238 bp, Glycine max
aaaaggattagcttattttaataaatacatccaaccaaccccaatccttttaccgattaacatcttagaagatttcacaaaacccttatctcttagttttcgacttttcggaaatatattagctgatgaattagtagttgttgttcttgtttctttagtacctttagtagttcctatacctgtcatgttccttggattattcacaagcggtattcaagctctcatttttgctacttta

SEQ ID NO: 146655 - DNA, 234 bp, Glycine max
caatcatcttttgtttgttcttcagtactttagtgtgtgatttaattccaagattttgagaatgtctagctgtgggtgtggaagtagctgcaactgtggcagcaactgcggttgcaacaagtactcttttgacttgagctatgttgagaagacaaccacagagactcttgttttgggtgttgggtctgtgaaggcccaattggagggtgctgaaatgggtgttgcagctgagaa

SEQ ID NO: 146656 - DNA, 236 bp, Glycine max
gccaaatgctgttctttcaatgtggagatattttgttggagatctcgtctttgaagtttctaagatgacttctccttacattaaatgtacagtctctttcttcatagcatttggaaatttggctgatgacaccatcaattttgaggcttttccccacaagctggtgcagtttggagagattcaggaaaaagttgtattgaaattttcacaagaggaatttcttacagcttggtcaa

SEQ ID NO: 146657 - DNA, 238 bp, Glycine max
aaaatcaaatcaggagagcatgcatatgaacatgatgatgaagaaggtgtgtgggtttgcaatagtgatggtggcagtgcagcttctggtggaggtgagtcccaaggcagaggctgtgacttgtacccctgtggagctgagtccttgtttgggggcaataacttcctctcaaccaccatcaacaatttgttgccagaaggtgagggaacaaaggcaatgcctctgtggttacctcaaa

SEQ ID NO: 146658 - DNA, 232 bp, Glycine max
ggcgacgacagcagccttgtgcggcactatgatgagcagctccttcctgaggagaaaagcagtggtcacaagcctgaaggcattccccaatgctaacgcagtgtttggtgtaaagggtggacgtggaggtggtgtgactgccatggctagcttcaaggtgaagctgataaccccagagggagagaaagaatttgaatgcccagatgatgtatacattcttgaccaggcagag

SEQ ID NO: 146659 - DNA, 258 bp, Glycine max
aaaacactcataacacaaagcacaaagcaaagctcatccttgagttaaaaaatggcagcagcttcttccatggctctctcatccccatccttggctggcaaggccgtgaagctgggcccatcagccccagaagtgggagggtgagcatgaggaagaccgtcaccaagcaggtctcctcaggaagcccatggtacggcccagaccgagtcaagtacttgggcccattctctgacgagcccccgtcctaactaaccggtg

SEQ ID NO: 146660 - DNA, 247 bp, Glycine max
atgagtccaaagaagaggacttgcagaacaagagccctttgctcctcaaaatgaacccggttcacaagaaaatcccggttctcatccacaatggcaaacccatttgtgaatctctcgttgctgttcagtagattgagaggtctggaatgacagaaatcccttgtagccttctgacccttaccagagagctcaggctagattctgggctgactttgttgacaatacgatatctgatcttagaagaaag

SEQ ID NO: 146661 - DNA, 283 bp, Glycine max
gcatgcacacgtccgtattcggctcgagcactagtgacatttgcggtagacttcccaggatgtgaaccatgccgtccttgctgtggggtatggagttgaaaatggcgtcccatattggctcataaaaaattcatggggagaaagttggggtgagaatggctactcaaaatggaattggggaagaacatgtgtggtgttgcaacttgtgcgtcttatccagttgtggcataaattgcataagaatatggtccctggtgactaccaccttgtcatgcttcagagt

SEQ ID NO: 146662 - DNA, 257 bp, Glycine max
actttccaatacaataatcactaactgaatattcgatcggagatgtctgctgccgccgaagaagctaacgctcccgccgtcgaaaagccggttgaggaggtgaaggcgccgaaccccgcgaaggagaagaaacctaggctccgaaggaaaagaagccaaaacaggccaaaacagcttcacatcctccatattttcagatgattaaggaggctttgatcgctttgaacgagaaaggaggatcgagtccttatgcgata

SEQ ID NO: 146663 - DNA, 253 bp, Glycine max
ggactatatctggagattcatactatggctctcacgtgatgcagtatggtgatgtagggcttagcagagatgttctcttccattatttgggtacagatcctgctaatgataatttcacttttgtggatgaaaacccttatggtcaccttcaaaacccctcaaccaacgtgatgctgatctcatccatttttgggataagttccgcaaagctcctgagggttctctcaggaaaaatacagctcagaaacaagtt

SEQ ID NO: 146664 - DNA, 254 bp, Glycine max
gagcaacatcagaacagttgcagcattcaatgctcagaacaagatgttatcagtgttctgccacgagcttcgtgtgcctcagagccagagcctgcgccggagccagacatccggcttcttgtttggcctctctcacttgccctctatacttccgaggctctcattctatggtatggtgcacatttggtcagcaaaggtgtttcaaccttctccaaagtcatcaaggtgtttgtggtcttagtgatcacagcaaa

SEQ ID NO: 146665 - DNA, 245 bp, Glycine max
aaaggagttatctggcggtagaaaccattttgtggagagttgtggcttgcctattagcacatacttcagtgctttgaagctgctgtggttgatggaaaatgtagatgccgtaaaggaggccataaagaaaaggatgcgctgtttggaactattgacacttggttgatatggaatctaactggtggggtgaatgggggattgcatgttaccgatgtttcaaatgcatctcgtacaatgctcatgaa

SEQ ID NO: 146666 - DNA, 248 bp, Glycine max
cttttcacctgaaacttgcttttgttcccgattttctcaaattgctttcggttttcgttctgattctgcaaaatcatggagatggagcgcatcgttgaattccctcacacctacatggatcgacccccagaaagagagcgcgtttgggctgggacatcgctgaggcccccaaggctcaggtaggattgttttgtggacaagaggttgagaatatttcaagctatgctccttcagaacatccccctagt

SEQ ID NO: 146667 - DNA, 251 bp, Glycine max
tttgagtctgctggaaaggatagggcagagagcattgtaggtttcatattgtcaacatcattaacaatatcagagatacagtcatttctaatctcaggtggcttgagtcccattgattttgatgcttatatttgaatagtggcagtgatctatactatccatccctcaatcccggagatcgcccatttgtggttgacttgtattaccactcacacattgaataccgttggggtggagaagggttgaggaag

SEQ ID NO: 146668 - DNA, 252 bp, Glycine max
cagaagaactgatgagctagtggatggcccaaatgcttcgcacatcacccccggggccttggacaggtgggagcaacgactgagtgatgtttttgaaggtcgaccctatgatatgtatgatgctgccctctcactactgtctcaaagtacccagttgatattcaggtactttacatagccaaatctaagattgagaattacatctttttagaacaaacttacatgaagttctttagttggttttgatgttaa

SEQ ID NO: 146669 - DNA, 254 bp, Glycine max
cagcaagcatctccttctcaaactagtagtattattcttccattccgttctacatataatcattcataatgggtgttttcacattcgaggatgaaatcaactcccctgtggctcctgctactctttacaaggcccagttacagatgccgacaacgtcatcccaaaggctcttgattccttcaagagtgttgaaaacgttgagggaaatggtggcccaggaaccatcaagaagatcactttccttgaggatggag

SEQ ID NO: 146670 - DNA, 255 bp, Glycine max
ctctcttctcgctcttggcttatcgctcttgactcactctcattcattcatttccaccggtcatggatcccctaagcgtgtggggtaacacgcccttggcgacggtggatcccgagatcgatgacgtcatcgagaggagaagcgccgtcaatgccgcggaatggagctcatcgcctccgagaacttgacctccttcgccgtcatcgaggccctcggcagcgctctcacgaacaaatactccgagggcatgccggg

SEQ ID NO: 146671 - DNA, 253 bp, Glycine max
gttgcagaaagaaaagaccatcaaagtttcacttcagccttatccggtttagggtttcggtttttgacccaacctttgacgtatcgaaaccttaagtttcggatcaggtctgagcaatctggttggtagaaccttggtcttagagagtcaagttttatgtctgaattagacgatcaaattcctactgccttcgatccttttgctgatgcaaatgctgatgactcgggtgctgggtcaaaggagtatgtgcata

SEQ ID NO: 146672 - DNA, 251 bp, Glycine max
ggtgaagagaacgaatttgccgcagtagagatctcttccatggtgctcatcaagatgcgtgagattgctgaggcttacctaggctccacagtgaagaatgctgttgtcaccgtccctgcttacttcaatgatctcagcgtcaagctaccaaagacgctggtgtcattgctggtctaaatgtgatgcgaattatcaatgagcctactgcagctgccattgcatatggtcttgataagaaggccacgagtgtt

SEQ ID NO: 146673 - DNA, 252 bp, Glycine max
ggcggccaacgctgtcgtttcaccgtcgccgttccgacctcagccctttctccggtcatccttctccggcgtctccgtcaagctcactccccaatccataacgctttcacgctccaagcccctcaccgtcttgccgccaccaagaaggccgtcgccgtcctcaaggggacctccgccgtcgaaggcgtcgccactctcatccaagaagacgatggcccgacgacagtttctgttcgcatcactggccttact

SEQ ID NO: 146674 - DNA, 246 bp, Glycine max
cattctcatcctcctctgtctctctctctccaccattgccatggtctcttacaatctccggccttccagcgccttcaattctcccttctggacttcatattctcttgctcctgtttggaacaacaactccttttaaccgttggagctagaggtccaattctgcttgaggattatcatcttgtggagaagcttgcaaactttgacagggaacgtatcccagaacgtgttgtccatgccaggggagct

SEQ ID NO: 146675 - DNA, 251 bp, Glycine max
cgaaaatgtggaagagaacgggttttgaagaagaagcagttcaattgatcaactcagatttcagggacctaagtctagctgctaatagactcgcccatcatgccatcaaacttggtggcattggctttggacctcttttttcggattgtttgctgccattgctgctatttatctgttgattttggatcgtacaaactggaaaacaaatattctcacagcactactcattccatacattttcttcagcttgc

SEQ ID NO: 146676 - DNA, 251 bp, Glycine max
aaacaatagtgcatagcgtttttcattgtgcattattcaatggccaccacagcagctctatccggaaccatggtgagcacctccttcatgaggaagcaacctatgacgaccaagagcctaaagacattcccaacgctctttttggtctgaaaggtggacgaggtggtcgtgtaacttgcatggcctcgtacaaggtgaagctcataaccccagaaggagaagtggagtttgaatgcccagatgatgttttc

SEQ ID NO: 146677 - DNA, 249 bp, Glycine max
  unsure (1)..(249): unsure at all n locations
acacactcaatgaagggagttanagtgaaagttgaaganacaatggcgtatgctaatgctgcttcaactagcccaacaacatcttcaaacctctccccgcaacccatggaagggttgcacgaggtgggtcccctccgtttctcaccanaaccttcnacgtggtggnagacccatccaccaacgacatcgtttcgtggngcagatcccgcaacagtttcgtcgtttgggactctcacaagttctctacca

SEQ ID NO: 146678 - DNA, 249 bp, Glycine max
cctaccccaaaatctaccccaatcggatcggatccatggtccccttctccctccggtggctccacgccctaatccccatcaaattagggcaacgtcagcaaggcatggaccgattctacattcttctcgattcgtgcgcgggaagattaaggaaaaggagaaactgagcaacctcggcgtctcccttaatctgtggagaaaaagagaggtttttgtggtgaattgcatcatagggaaccatttaagtca

SEQ ID NO: 146679 - DNA, 249 bp, Glycine max
agcgatcgaagtttcacatcagccttatccagtttagggtttcggttccttaccctacctttgacgtatcgaaaccttaaatttgggattaggtctgagcaatctggttggtagaacctttggtcttagagagtcaagttttatgtctggattagacgatcaaattcctactgccttcgatccttttgctgatgcaaatgctgatgactcgggtgctgggtcaaaggagtatgtgcatattcgcgttca

SEQ ID NO: 146680 - DNA, 249 bp, Glycine max
caaactcagggtagggcagagagagagagagagagagagagagagagagagaatgggagggtgggatatcgcggtgcatggtggcgctggtgtcgaccctaatctcccactcgagcgccaagaagaagcgaacaacttctcacgcgctgtctcaatcttggaatctctgctctaaattctaatcttcgcgacatagatgtcgtcgaacttgtggtgagggaattggaaacggatccgctgttcaattcg

SEQ ID NO: 146681 - DNA, 251 bp, Glycine max
atctctctcactcttccaacaatcgcaatccaaaaccctaccgacaccacactcaatcgaaattcttcattctcttctcatcgatggggcagaagtctctgatctacgcgttcgtgtcgcggggaacagtattctcgcggagtacaccgaattcagcggaaacttcaactccatcgccttccagtgccttcagaagctccctgccaccaacaacaagttcacctacaattgcgacgcacacaccttcaatt

SEQ ID NO: 146682 - DNA, 246 bp, Glycine max
caagaggttggtcacaagagccttctccagagtgatgctctttaccaggtaccaccccaattgcattcctttgataaaaagaaaaagaaaaaaaatctttttctcttttgggtttttgataaaatggtatgttgaaaaaaaaatctattttttgggggtttttgataaaatggttatgctgtgtttagtatattctggagacaagtgtctacccaagagaacctgaatccatgaaagaactgagag

SEQ ID NO: 146683 - DNA, 252 bp, Glycine max
gccgaggctacaagacaaagtcttggaccaagatcagtccaatctccagttggcttctcaagaatagcctcctgtcttgttaaggcagctgctactccccctgtcaagcaaggatcagacagacctttgtggttgcatcaaagcaaagtctttcctacttggatggcagccttccgggtgactatggatctgaccctctgggactttcgaatcctgaaggaacaggagggttcattgagccgaaatggctag

SEQ ID NO: 146684 - DNA, 253 bp, Glycine max
caagaactctccaaggatcctccttcccacgagattctttggtgggaaaaatccaagaggtttgaaatttgaaggcagggaagatggattatttcaatgcaccaggaagaaaccatctctttgttccagggccgttaacattccggaccagatcatccgggccatgaacagaaacaatgaggactaccgttctccagcaattccagctatgacaaaaactttgcttgaggatgtcaagaagattttcaagacc

SEQ ID NO: 146685 - DNA, 247 bp, Glycine max
gcaagacctacgacaagtcatccatggaaataatacacgagatggtgtgtatattactcttagaatgcgcctccgatgtgaaatttttcgtaaaggtaaagcaatgccagggaaagtatttgacatcccaatgaggttgttgttgatcggggttctaatccatacctttcaaagattgaatgctatgaacatgatcgacttataaccaaagtacaaggtgatggagtcattgtggccacccctacag

SEQ ID NO: 146686 - DNA, 238 bp, Glycine max
ctacacatacatatatattaagaaaaattaagcaacgattcaagaagaaaatgggttctgaacttgaagctaacattcacgtcctcatggtgtcctatccagcacaaggacacataaacctttgctcagactaggtaagtgccttgctgcaaagggcttatttgtaaccttcaccacctcagagaccgctggtaaaaacatgcgaaccgccaataacatcactgacaaatcagtgatt

SEQ ID NO: 146687 - DNA, 246 bp, Glycine max
caaatatttatgggagttatgctccatccacctcaacctggagatatttcttatgacaaatttgttagggagagcaccggaatacttgaatcactgagaagaagagcaaggctaatgactgatggatcaacagttgcagaaatgtggtttgtaattttactgaaggtgccatgtattcattccctcaaatacgtttgccgccaagagctttagaggctgctaaacaggctgcaaaggttccagatg

SEQ ID NO: 146688 - DNA, 248 bp, Glycine max
caagtagttgagaactaagaaggagaagcaaatggcttcctcaatgatctcttccccagctgttaccactgtcaaccgtgccggtgccggcatggttgctccattcactggcctcaagtccatggctgcttccccaccagaaagaccaacaatgacattacctccattgctagcaacggtggaagagtgcaatgcatgcaggtgtggccaccagttggcaagatgaagtttgagactctttcctacct

SEQ ID NO: 146689 - DNA, 249 bp, Glycine max
aattttcattttattatttttttgacaagcagctctagaaaaatctgcaaagaataaaacaagaggaggaaatgcaacttacttgttgatataaacttcacagagagaaagttgttgtaaagccttgttgtgccatggccacccacgcggctcttgcttctacaaggatcccttcaaacacaaggttcccatccaaggcctctcactctttcccaacccaatgcgccttaaagagacttgaggtgacag

SEQ ID NO: 146690 - DNA, 249 bp, Glycine max
ctatacttggtgagtctaaaattaaattcacagatagtgagtctaagcttcaggatttgcttgtgcatgttttggataccttgcaacctgccaaatttcactggcagtgggttgtactcaggttgctcttaatgaacaagccctcgttgaaagactagagaatcgtgatgtgtccttggttgatgctataaagttgtcctcacctagtacagactaggcttctgctgcttctgagaatgagaacaattt

SEQ ID NO: 146691 - DNA, 244 bp, Glycine max
cacaccagcacacctacaattgttcatcgagatctaaagtctccaaatcttttggttgataagaactggaatgttaaggtatgtgattttgggttgtcacggttgaagcacaacacttttttgtctccaagtcaactgctggaacgccggaatggatggctcctgaagttctccgcaatgagccctcaaatgagaaatgcgatgtttatagttttggagtcatcttatgggagcttgccactct

SEQ ID NO: 146692 - DNA, 263 bp, Glycine max
gaagcatcttgggtttgtgaagattgtggcaattaaagcctttgtgtgtgtgtcgaatctctacgacttcgcaaagcaaaactcgggacctttgagatctgctgttggaaccgtggaagacactgtaaccaccgttctggtcccgtctaccaccaattcaaggctgtccccaaccacctcctcctttttgccgacaacaaggtggatgaagctgctcacaaattcgatgagcatgcaccttctttggttaagcaggttgcaac

SEQ ID NO: 146693 - DNA, 263 bp, Glycine max
gagcagctctggctgaatattttatgtaccgtgaacgtcacactttaatcatttatgacgatctctccaaacaagcacaggcttatcgccaaatgtctcttctattacgaagaccacctggtcgcgaacttatccagggatgttttttatttacattcacgtcttttggaaagagccgctaaattaagttctcagttaggcgaaggaagtatgactgctttaccaatagttgaaactcaatcgggagatgtttcagcttatat

SEQ ID NO: 146694 - DNA, 265 bp, Glycine max
ggagtgtggcatactggcttcaattgaagatgctgttgagccaaatataattgaaggaaagaaattccgtgaactatctgaaaaggaaagagaagatattgccaagaaaataactgtgatggggaggtcttctcctaatgacaagcttttgcttgtgcaagctctacgtaaaggaggggaagttgttgcggtcacaggagacggcaccaatgatgctcctgccctacatgaggctgatattggtctttctatgggcatccaagga

SEQ ID NO: 146695 - DNA, 266 bp, Glycine max
cggagaaggagctcagcaacagcgcaaagacgctctaactgcagctcgccgcccgctagcccgcccgcacgcatgcgcatatgctcgctcgcaccgccactgatgctcgaggtggcgatttgtcgtccgtctgttcgcgttaactcactagctccgactcggatacgaacgcacactctcacattgggaaaaaaaaaaaaaaaaaaaaaaaaaaaaaaaaaaaaaaaaaaaaaaaaaaaaaaaaaaaaaaaagaattcacaacaaa

SEQ ID NO: 146696 - DNA, 259 bp, Glycine max
actgagagtgaaagcaaggctgaactagacaggttctgtgatgctcttatttccattagacaagaaattgctgagattgagaaaggaaatgctgacattaacaacaatgtacttaagagcgcccctcatccaccatactgctcatggctgatgcatggacaaaaccatactccagggaatatgcagccttcccagctccttggctccgtgcttcaaagttctggcctaccacaggacgtgttgataatgtgtacggtga

SEQ ID NO: 146697 - DNA, 261 bp, Glycine max
agaaactagttgacgaggtgtccggttggctcaaaatttatgacgacggttcagtggaccggacatggtccggaccggaccaattcaagttcatggccgaaccggcccctccccatgaacaattcatagacggcgtgccattcgcgacgtcgccgttactcacggtggtggccagagtggccaccatgtccgactttatctgccagagataaagccggaagacagccaaaaactaccaattgtcctccatttccacggcgg

SEQ ID NO: 146698 - DNA, 258 bp, Glycine max
ggatatcataggatggctccgttggctgcgccacgaggtgggcttccaggattttcgatttgattttgtaaaggggttttcaccaaaatatgtgaaagaatatattgaaggagcaaagccattgttttgtgttgggagtactgggattcttgcaactacaagggttctaccttggactataaccaagatagccatagacagcgaataatcaattggattgatggcactggacaactttcaactgcatttgactttaca

SEQ ID NO: 146699 - DNA, 261 bp, Glycine max
ctcaagagaaactttaagcagatgtctaatgttttgtgggtggctcctgaggataaggcgagtttatggtcacaacttcattatgtttcgtgtaataatctggaaatgcaagaagcttatcttgtcaatctcgtaatgtgttacgagaattgtatttgcacagtccagaggaagctcgccaattgagaaggaaagctctctctcgtattgaatggctgcaaaaagctgatgtgcctaccatagcacagattgaagagttcc

SEQ ID NO: 146700 - DNA, 262 bp, Glycine max
cggaacatccctgattccttctacaccaacggcggtctcaaactgcgcgttgtgtggaccatcagttccctcatcgctgcctccgccaggcattacttgctccaacccattatctccgagcacgccaccctcgacacttggtgctcaccgacgccgatggccagggggtactttacatgaacagggagcaactcgaggagctgagggtgaagccgctctcggcctcgtcggcgtcgaagaggactctcgttccggcgcttaa

SEQ ID NO: 146701 - DNA, 262 bp, Glycine max
gagcttcacaaccacacccctttctctatttacttcattacctccattctctttattttcttcgtgttcttcaaattagttcaaagatcggattccaaaacctcctctacctgcaaattgcccccaggaccaaggaactacctctcatagggaacatacaccagattgttggctcactgccggttcattactacttaaaaaatttggcagataagtatggtccattaatgcatctaaaactaggagaggtgtccaacatcat

SEQ ID NO: 146702 - DNA, 263 bp, Glycine max
accatgcagctgtgaactttgggcaatatgtttatgggggatatttcccaaataggcctacaattgccaggactaaaatgccctcagaggaccctacagaagaagagtggaaaaagttcattgaaaagcctgaaaggcacttctgaagtgctttccttcacaacttcaagcaactagagtcatggctgtcttggacatactctcaactcattcaccagatgaggaatacataggagaaaagatggaaccatcatggggtgaag

SEQ ID NO: 146703 - DNA, 262 bp, Glycine max
cgagtgttgagttaaatgtgatatgttgatggaatttgtgaaagattttaaaggtgcagcacagatattggagaaaggtggttatactcaattcacaccccattatataacttggtactgtcctcaggcattcacatgagcaaacagtgcaagtcccagtgcataaatcatggaagatattgtgctccggatcctgagcaagatttcagcactggttatgatgggaaagatgtggttattgaaaatttaaggcagctatgtg

SEQ ID NO: 146704 - DNA, 257 bp, Glycine max
accgtaagctcccaagcagtgggaggaggctcgggactctgaccgcgtgcctgttgaagaatgagccggcgactcataggcagtggcttggttaagggaaaccaccggagccgtagcgaaagcgagtcttcacaggcaattgtcactgcttatggacccgaacctgggtgatctatccatgaccaggatgaagcttgggtgaaactaagtggaggtccgaaccgactgatgttgaagaatcagcggatgagttgtgg

SEQ ID NO: 146705 - DNA, 261 bp, Glycine max
ggtgaagagaaccaatttgccgcagaagaaatctcttccatggtgctcatcaagatgcgtgagattgctgaggcttacctaggctccacagtgaagaatgctgttgtcaccgtccctgcttacttcaatgattctcagcgtcaagctaccaaagacgctggtgtcattgctggtctaaatgtgatgcgaattatcaatgagcctactgcagctgccattgcatatggtcttgataagaaggccacgagtgttggtgagaag

SEQ ID NO: 146706 - DNA, 258 bp, Glycine max
aagaagaacaggtacctgagggtctagaaagagcaataatgacaatgaagaaaggagagcaagctctggtaactgtggatgctgaatatttgtgcgactataataattcaaagggaaacacagctaataataaatcctttattatgaagttgagttggttgatttcgttaaggaaaaaccattttggaaaatggatacacaagagaaaatagaagcttgtgagaggaagaagcatgatggaaatctgctgttcaaggt

SEQ ID NO: 146707 - DNA, 214 bp, Glycine max
  unsure (1)..(214): unsure at all n locations
ctgaccttcacttacgtgagccttgggctaaaaggaaacgctccaaacgaccgcgttttgagacggaggaagagtacctcgctctttgcctcatcatgctcgcacaaagcggtaacnnnnnnnnnnnnnnnnnnnnnnnnnnnnnattaccgtcttcttcactgtcagacaaagaagcgtcgccgccggtgaaataacacacaggtgcaccgtt

SEQ ID NO: 146708 - DNA, 256 bp, Glycine max
tggcacttgatcttcctcatggtggccatctttctcacggatatcagactgataccaaaaagatatctgcagtctcgatattttttgagacaatgccatatcgattgaatgaaagtacaggatacatcgacatgaccagatggagaaatctgctacactcttcaggccaaaattaattgttgctggagctagcgcttatgcacgtctctatgattatgaacgtgtacgcaaggtttgcgataaacagaaagctata

SEQ ID NO: 146709 - DNA, 257 bp, Glycine max
caagaacaatgggaatagagattctggagcctaacacgtgcattaggggttgctgcaccagtgcctctattccccttcatctccctccctcttcttatacccttctctctcctattgcccgagcaagttagtcatccaggaatagcaacaccgattgcggcccatgcaaaaccgcccaattacatgtttttcttcaagttatttgaatctccaaatctagcacaaaagttacatgtggacgagtggatcccaactct

SEQ ID NO: 146710 - DNA, 258 bp, Glycine max; identical to SEQ ID NO: 141298

SEQ ID NO: 146711 - DNA, 256 bp, Glycine max
atcaaatttcatcagtgtgtgcgtttggcccgatttgagaatgatcggacgatttcatttatccctcctgatggatcatttgatttaatgacatataggctcagtacacaggttaagcctttagtttgggtgaagcacaagttgaaaaacattcaaaaagccggattgagattatggtaaaagctaggagccaatttaaggaacgcagtactgccacaaatgttgagattgagttgcctgttcctgctgatgcaac

SEQ ID NO: 146712 - DNA, 258 bp, Glycine max
gttcacaaggcgcaatgcggatgctgtgtttgccttccagctccggaatcctgttcacaatggccatgctttgctaatgactgacacccgaaagcgccttcttgagatgggctataagaatcctgtcctcttgcttcatccacttggaggctacaccaaagctgatgatgtcccacttgattggcgaatgaagcaacatgagaaggtacttgaggatggtgttcttgatccagagacaactgtggtatccatattccc

SEQ ID NO: 146713 - DNA, 257 bp, Glycine max
gtttaaacctaattctcatttcttcatcgttcgattcttctcctcctaaagatgcagatcttcgtgaaaactttgaccggtaagaccatcacccttgaggtggagtcctccgacaccatcgataacgtgaaactaagattcaagacaaggaagggatcccacctgaccagcagagacttatctttgcgggtaaacagcttgaggatggtcgaacccttgccgactacaacatccaaaaggaatccactctccacctc

SEQ ID NO: 146714 - DNA, 256 bp, Glycine max
acattattgtcaaagttgtagctgctgctctcagaaatgtaccagaagcaaacgcatactggaatgttgagacgggtgaggtggttttaaatgattctattgacatatgcatagcagttgccactgagaaggcttgatgactccaataataaaaaatgctgatcagaagacaatatctgctatctcctcagaggtcaaggaactagctgcaaaggcacgtgctggcaaattgaagccacatgaattccaaggggga

SEQ ID NO: 146715 - DNA, 257 bp, Glycine max
cttgactctagtccgactttgtgaaatgacttgagaggtgtaggataagtgggagctggaaacagcgaaagtgaaataccactacttttaacgttattttacttattccgtgaatcggaagcggggcactgccctctttttggacccaaggtcggcttcggccggtcgatccgggcggaagacattgtcaggtggggagtttggctggggcggcacatctgttaaaagataacgcaggtgtcctaagatgagctcaa

SEQ ID NO: 146716 - DNA, 257 bp, Glycine max
gagaaagcaaagagcgtgcttggattggaacctgaatttggacttgtagagggtctagcagactcgtacaacctggactttggtagaggaacatatcggaaagaggctgatttctcaacagatgacataatcttggcaagagtcttgttagcgtataaacttttctatttcaattttaagtatttcacttgtatttagaaaagctgttcggatttgctacattatgaagtcgtgaaatattcatgagcttttcgttc

SEQ ID NO: 146717 - DNA, 252 bp, Glycine max
tgactggtggcagtgggaaggttgtggacagtggtcctgatgatcatatatttgtatactatactgaccatggaggtcctggggtgctcgggatgcctgctggtccttacttatacgcggatgatctgatgaagtcttgaagaaaaagcatgcttctggaacatataaaaacctagtattttatctggaggcatgtgaatctgggagtatctttgaaggtcttcttcctgaagatatcaatatttatgcaac

SEQ ID NO: 146718 - DNA, 254 bp, Glycine max
cttggagttggagttgtaagcgttttatcaatttttgcaattttctgtatcattcggagaagaagacgtcgtgatgatgataaagagcttctaggaattgatactaagccctacactttcagctattctgagttaaagaatgctacaaatgattttaatcttgaaaataagcttggagagggaggttttggacctgtttataaggggacacttaatgatggaagagtcattgctgtgaaacaactatctgtggg

SEQ ID NO: 146719 - DNA, 254 bp, Glycine max
gaatgaaacaacatgagaaggtacttgaggatggtgttcttgatccagagaccactgtggtatccatattcccttctcccatgcactatgctggacccacggaggtgcagtggcatgcaaaggctaggatcaatgcaggggctaacttctacatcgttggtcgtgaccccgcaggcatgagccatccagttgagaaaagagatctgtatgatgctgaccatgggaagaaagtattgagcatggcaccgggacta

SEQ ID NO: 146720 - DNA, 251 bp, Glycine max
atcagcttcaaacttccttcagcgagcctcgtctccttattcttaccgatccaagaacagatcaccagcctattaaggaagctgctcttgggaatattcccaccattgctttctgtgacaccgattcactatgaggtacgtggacattggaattcctgccaacaacaagggcaaacacagcattggttgtctcttctggctccttgcaaggatggtgttgcagatgaggggtaccattcgccctggcctca

SEQ ID NO: 146721 - DNA, 255 bp, Glycine max
ctttaaaggaataactgttaaagcaatggtgatcataaatcctggaaaccctactggtcaatgccttagtgaagctaatctaagagaggttttgcaattctgctatcaagaaaatttagccttgcttggaatgaggtttaccagacgaatatatatcaggatgaacgacccttcatcagttctagaaaggttttgatggaattggggccacctataagcaaggaagttcagcttatttcttttcactctgtgtca

SEQ ID NO: 146722 - DNA, 256 bp, Glycine max
atttaaacctggattttgatgcatctacaagttgtgcagatagtccagctatatcttgtgtgcaactagaagttgaagatcagcctaagtcacctggaatcaacatgaattctgagccatctgtagttgctgttcctgatcttgatgcatcaaaagaacaaccagtgggaaaagcccctgtgactactggtgttaatgacatattctgggaacgattcttgacagagaatcctggttcatttgaaatgcaggaagc

SEQ ID NO: 146723 - DNA, 255 bp, Glycine max
atttttctcccactaattcacaaataccacggcaacatatattgaaattcgccgcggatcgaatgcttgcgtttctcaaagattggagtaatttacgcatcacggcagtagctggcatattggtatccgtttaatgatcattccaccagctgatgctgttgacgctctcaaaacttgtgcttgcttgttgaaggattgcaggatagaactggctaagtgtctttcaaacccatcttgtgcggccaatattgcttg

SEQ ID NO: 146724 - DNA, 256 bp, Glycine max
gctgagctgcgaaaacccccaactccaacctctgttcatcgtctaccgcgctttcttttcaaccagaactatgattaagctttttaaagtaaaggaaaagcagagagaacttgcagaaaatgcaagtggcggaccacctgttaagaagcaaagtgctggagagttgcgtcttcacaaagatataagtgagctgaatctaccaaaatcatgtaccatgcaattccccaatggcaaagatgatctgatgaactttgaa

SEQ ID NO: 146725 - DNA, 255 bp, Glycine max
ttggtaagttgcggagaaggctcaaggtcagagggcaaccccgcatcttttatcgtgtgcaagaaaaaatctgaaagatgttaatgtaaggaacaactcttctaaagcatcggagaagaaagattgggagatgcaacctgctcagtctgtatggaggtcccccacaatgctatccttctcctttgttcatcttattacaagggttgtcgcccatacatgtgtgctactagtcatcgctattcaaactgttttgaa

SEQ ID NO: 146726 - DNA, 251 bp, Glycine max
aaaaaaaaaaacccttagccaacacaaccatcatggccacctctgctattcagcaatcagcattcactggtcaaactgctctgaagcagctcaatgagttcgtccgcaagaccggtggcgccggcaaggtcgcactaacatgcgccgcaccgtcaagagtgctcctcagagcatttggtatggccctgaccgtcccaagtacttgggtccattctcggagcagattccatcatacctgaccggagaattcc

SEQ ID NO: 146727 - DNA, 252 bp, Glycine max
caaatatttatgggagttatgctccatccacctcaacctggagatatttcttatgacaaatttgttagggagagcaccggaatacttgaatcactgagaagaagagcaaggctaatgactgatggatcaacagttgcagaaatgtggtttgtaattttactgaaggtgccatgtattcatcccctcaaatacgtttgccgccaagagctttgaggctgcctaacaaggctgcaaaggttccagatgttttct

SEQ ID NO: 146728 - DNA, 251 bp, Glycine max
aaaagcaatatatactggttctgagtttgttgatactgttaataccagtgatgatattggggtagttctggaatctacaagcttctatgctgagcaaggtggtcagatttttgatactggatcgcttgagggcttacatgcgtcatttcaagtgcgtaatgttcaagtttatggaggctttgttcttcacattggtaatgggactggtgtctctgttggtgacaaagtagtatgcaaggttgattatggaa

SEQ ID NO: 146729 - DNA, 254 bp, Glycine max
gccattctcatcctcttctttctctctctaccattgccatggatccctacaagcaccggccatccagcgccttcaattctcccttctggactacaaattctggtgctcctatttggaacaacaactcctctttaaccgttggagctagaggtccaattctgctggaggattatcatcttgtggagaagcttgcaaattttgatagggaacgtatcccagaacgtgttgtccatgccaggggcgctagtgcaaag

SEQ ID NO: 146730 - DNA, 252 bp, Glycine max
gctgcggatcatgctggacattcagcacaactggggctttagaagcagcctatgcacaagcatttgggaagagtatctctctttctgagcagcagctagtggattgtgctggccgtttcaacaacttcggctgtaatggtgggttgccatcacaagcctttgagtacatcaaatacaatggaggacttgagacagaggaagcatacccctacactggaaaagatggtgtatgcaaattctcagctgaaaatg

SEQ ID NO: 146731 - DNA, 253 bp, Glycine max
cttggaagtgaaggggacaggaacagcaaaccagtgtccaacaattgatggtggattggagtcatttgccttcaagcaagggaaatacaatgccaagaagttctgccttgagccaacttcattcacatgaaggcagagggtgtggccaagaacgctccccctgagttccaaaacacaaagctcatgacacgtttgacctacactcttgatgagattgagggaccctttgaggtgtcttctgatggcactgtga

SEQ ID NO: 146732 - DNA, 268 bp, Glycine max
caaactcagggtagggcagagagagagagagagagagagagagagagagagaatgggagggtgggctatcgcggtgcatggtggcgctggtgtcgaccctaatctcccactcgagcgccaagaagaagcgaaacaacttctcacgcgctgtctcaatcttggaatctctgctctaaattctaatcttcccgccatagatgtcgtcgaacttgtggtgagggaattggaaacggatccgctgttcaattcgggccgtggatctgccctg

SEQ ID NO: 146733 - DNA, 263 bp, Glycine max
cgaagattggcacatgaatggcaagcattcgtatctcgcactcacaagttaagaaaaacgtttgtatctgtgaaaggcatatactaccaggctgaggtcgagggccagacaataacatggttaactcctcattcactacaacaggttgtatctgatgatgttgacatcactaccatgctaaactttctgcaattgtatgagcctcttcttagttttgtcaatttccgcctctaccattctataaatttgaagtatccccccat

SEQ ID NO: 146734 - DNA, 261 bp, Glycine max
caaaacactcataacacaaagcacaaagcaaagctcatccttgagttaaaaaatggcagcagcttcttccatggctctctcatccccatccttggctggcaaggccgtgaagctgggcccatcagccccagaagtgggaagggtgagcatgaggaagaccgtcaccaagcaggtctcctcaggaagcccatggtacggcccagaccgagtcaagtacttgggcccattctctggcgagcccccgtcctacctaaccggtga

SEQ ID NO: 146735 - DNA, 257 bp, Glycine max
aacacattgaaactaaactccaagttcctaccatagtgctaggaaagtgagtgagagaaagagatcacatagcagaatggcttctactcaatgtttcttgcaccaccatgctcttaccacccctgccagatccccatcacaacgcatcatggttagcaccaagcctaaccagcttgtttgcaaggcacagaagcaagaggatattgatgtcagcccaatctctcgccggttagctctaaccgtgctcattggtgctg

SEQ ID NO: 146736 - DNA, 251 bp, Glycine max
gatttggcacacctagtagcaagcaagtggccaggggcagctaaagcagggagtggagacccattggaggaattctgcgagacaaaccctgctgatgaggaatgcaaagtatatgaatagaggagagcgcctttttctgatttgatgattaccattaccagcagcaaaccatttttactctttgccttgtgttaacgtatcatgtgaaaaagaaggaaattgttcgttcagacggtgtctgaggagagatt

SEQ ID NO: 146737 - DNA, 252 bp, Glycine max
acacgatgaggagccacacattccttaggataacttcacttttggtgtttattgggtggctcacggtttggatcttgttgcctacaaaggtttacaagaacacctggacccccaaactcaaaaccaagttaaactctacatactttagagagcaaggaacaaatctcttgcttttcacattccccgttatgctcataggggccctgagctgcatctatctccatcttcacgaaaaaggaacggaaaagctac

SEQ ID NO: 146738 - DNA, 253 bp, Glycine max
ggttgttgctactcaactcttctgaaaaacagtcacccttgtgtagaaggagcaatgcatcatgattgccctgtttgttttgagtatttgtttgaatcaagaaacgatgtcactgttatgccatgtggacatacgatccataagagctgcctgaatgaaatgagagaacatttccagtatgcatgccctctctgctcaaagtcagtctgtgacatgtcaaaggtttgggagaaatttgaccttgagattgctg

SEQ ID NO: 146739 - DNA, 255 bp, Glycine max
gaaaaccttagcccaaccggatcttcacgattaggagatggctaagtcgaagaaccacaccgctcacaaccagtcctacaaggcccacaagaatggcatcaaaaagccaaagaggcaccgccacacttccaccaaagggatggatccaaagtttctgaggaaccaaaggtacgcgaggaagcataacaagaagagcggtgaaacagccacggaagaagagtaaagtgtcactctcaaatggggctattaggattt

SEQ ID NO: 146740 - DNA, 256 bp, Glycine max
ggcggctctcagaaaagccgtgttctttgtaatcgctcaatgcttcaccttttccgcatatgctgcaaggtttgaaatcacaaaccgatgcacatacactgtctgggctgcgtctgtgcctgttggcggtggcgtgcaattaaacccgggccagtcatggtccgtggacgtgcctgcaggaacgaaaggggcccgcgtttggttccgaaccggctgcaacttcgacggttcgggccgcggtggatgccagaccggt

SEQ ID NO: 146741 - DNA, 259 bp, Glycine max
gcaggcgaatgggactcttctcttccctgctattaatgtcaatgactctgtcaccaagagcaagtttgacaacttgtatgggtgccgtcactctctccctgatggtctcatgagggctaccgatgttatgattgctggaaaggtggctgttgtggctggatatggtgatgttggcaagggttgtgctgctgcaatgaagcaggctggtgctcgtgtcatcgtgaccgagattgatcccatctgtgcccttcaggctctc

SEQ ID NO: 146742 - DNA, 257 bp, Glycine max
ctcgagccgccctcatcctggaaatattgcagttgatgatgtcaatggtggaagattgatcttttatgattttggaatgatgggaagtatcagtcaaaatattcgagaaggtttacttgaagctttttatggaatttatgagaagaatccagataaggtccttcaatcaatgattcaaatgtgtgttcttgtcccaactggagatatgactgctgttaaacgaacagcacagttcttcctcaacagttttgaagagc

SEQ ID NO: 146743 - DNA, 255 bp, Glycine max
gaactgtttttcttagatgacatgttaaaggaatgtccggaaacacatctacaaaacctgcgtactggaatctataaagaaacaatccaattaatcaaaacgcacaacgaagatcgtatgaatacgattttgcacttctcgacaaatataattagacactttattctaagcggttattctattcttggtaatcaagaacttgttcttattaactctttggttcgagaatttatatataatttaagtgacacaata

SEQ ID NO: 146744 - DNA, 252 bp, Glycine max
gttcatcatcataaccttcaatgaaaagaaatggctgaggcaagcattggcagcaaaagcagcagatggtctttacagggaatgacagctctcgtcaccggtggatccaaaggaatcggatatgctatcgtggaggagttggcacagcttggagccactgtgcacacttgcgctcggaacgaagctgaactcaatgaatccttaaatgaatggaacacaaaaggatacagagtaactggttccgtctgtgac

SEQ ID NO: 146745 - DNA, 250 bp, Glycine max
gaaggatactttaaggcttggagacaaggcagaacagggtaccctttggtggatgctggaatgagagagttgtgggcaactggttggttgcatgatcggatacgcgttgtggtttcaagtttcttcgtgaaggtgctgcagcttccttggagatggggaatgaagtatttctgggacacccttttggatgcagatcttgagagtgatgctcttggttggcagtacatatctggcactctcgctgatggtc

SEQ ID NO: 146746 - DNA, 247 bp, Glycine max
ttttccctcactttctcgctccccaaacgcccctctctctcctccaatggccgaccagctcaccgacgaccagatcgccgagttcaaggaggccttcagcctcttcgacaaggacggcgatggctgcattactaccaaggaacttgggactgttatgaggtcattggtcaaaacccaactgaggcagaactgcaggatatgataaacgaggttgatgctgatggcaacggaaccatcgatttcccag

SEQ ID NO: 146747 - DNA, 248 bp, Glycine max
gcagatgcttggttggatgacaaagccttcttcagatggaaggataatcctgcaaattacgagaataaactaaaggaattgcgtgcgcagaaagtgttgcttcaattgacaaatattggtgactcagctctagatttgcaagctctacctcaaggtcttgctgcccttttaagcaagttggagccatcgggtcgcgtgaagttgaccgatgaacttcgcaaggtacttggttagaggactttttcgtg

SEQ ID NO: 146748 - DNA, 251 bp, Glycine max
gccacatattgtgttcattttggaattgtgccactaaaattctattcaattcatctatggctgcctcttcttatgctatgcaatcaatcctggcaaaccctttgatccgcatttccagcgggtctagggtgaaccaatttggcgttcctgctttgcacatgagaaggaatgttggcctgagagttaggtccatggctaaggaagaacaaccaagtgagcctgcaaccccagttacaccgccaccatcagta

SEQ ID NO: 146749 - DNA, 252 bp, Glycine max
gccgaggctacaagacaaagtcttggaccaagatcactccaatctccatttggcttctcaagaaaagcctcctttcttgttaaggcagctgctactccccctgtcaagcaaggatcagacagacctttgtggtttgcatcaaagcaaagtctttcctacttggatggcagccttccgggtgactatggatttgaccctctgggactttcggaccctgaaggaacaggagggttcattgagccgaaatggcta

SEQ ID NO: 146750 - DNA, 257 bp, Glycine max
ctgggactggactctttgcagagattttggatggagatgtgtacaagtactatgctgatggagaatggaagaaatctgcttctgggaaaagtgttgccatcatcaaccccactaccagaaagactcaatacaaagttcaagcttgttcacaagaggaggttaacaaggtcatggacttggcaaaatctgcccaaaagttatgggcaaagaccccactatggaaacgtgctgaacttcttcacaaggcagctgctatc

SEQ ID NO: 146751 - DNA, 268 bp, Glycine max
atctcacattctgtgattcgggtaatggtgattagtggaggcgatgatgggcagaagaagcctgctctcgacccggatattggatgctccggaatgacccggatcacgagttcgactgaagttcgggtcgggttgcttgctggggtgctgagttggcctttcagcgagttgtagggtgaggtgaagactcatgttggatatactcagggtcacactccggatccgaattactgactggattgataccggagacactaaccacgttgaa

SEQ ID NO: 146752 - DNA, 260 bp, Glycine max
tattgatagaacttttgaagtagcccaaaaggtctgggcagaggttttcttctaccttgctgagaacaatgtcctttttgagggtattctccttaagcctagcatggttacacctggagccgagtccaaggacaaggccagtcctcagacagttgctgattacaccctcaagctccctcacaggagaattccccctgctgtccctggaattatgtttttgtctggtggacagtctgaggttgaagctaccctcaatttga

SEQ ID NO: 146753 - DNA, 221 bp, Glycine max
atttttatgtaatcataattatttttaaacaggtacatgtacatgtacatggccattattctaataaaatatggtgctttctatgtaccctaaaaaaaaaaaaaaaaaaaaaaaaaaaaaaaaaaaaaaaaaaaaaaaaaaaaaaaaaaaaaaaaaaaaaaaaaaaaaaaaaaaaaaaaaaaaaaaaaaaaaaaaaaaaaaaaaaaaaaaaaggggggggg

SEQ ID NO: 146754 - DNA, 259 bp, Glycine max
aaagaataggaatccatcgcaacaacaccaacaacatggcagcgcaacgagaggaggacattaaaatgatgttggccgctcaggttcacattggtacacgcaatgctgactccaagatggcggattatatctggcgccgtcgtaacgatggcatccacatcattaacgtgggcaagacgtgggaaaaactcatgctcgctgcccgtgtgatcgtggccgtggagaaccccgaggacgtgattgctatttcggctcgtcc

SEQ ID NO: 146755 - DNA, 249 bp, Glycine max
gctcactgatgctgttcttcctcccacgaaagactggaggaaagaaggaatagtgagtgatgttaaagatcaaggcagctgcggatcatgctggacattcagcacaactggggctttagaagcagcctatgcacaagcatttgggaagagtatctctctttctgagcagcagctagtggattgtgctggccgtttcaacaactttggctgtaatggtgggttgccatcacaagcctttgagtacatcaa

SEQ ID NO: 146756 - DNA, 248 bp, Glycine max
ctcaccatcatactgaggaagatcacttgcaccatcatgctcacaaagatgttactgaacctcttcttggtgaatcaaaaggtggaactaagaagaagaagcaatggaacataaatgtgcagggggcttatctccatgttcttggggactctatccaaagtattggggtaatgattgggggagcagtcatatggtataaccctcgttggcaaatagttgatttaatctgcactctaatcttttcaata

SEQ ID NO: 146757 - DNA, 248 bp, Glycine max
gatcattctcgcaaatcggctgaacaggctgtgaaggccatcaaggcagctgaggaaggaaaaacagttgaggagtatgattaccttccatacttctattcccgttcattcgatctgtcttggcaattctatggcgacaatgtcggcgacacagtgctattcggagacaacaatcctgcgtcttcaaagccaaagtttgggacatactggattaaagacgggaaagttgtcggggtctttctggaagg

SEQ ID NO: 146758 - DNA, 249 bp, Glycine max
gtgtgaatcagcaaggaccaccttgcaaggctaaatactcctgggtgaccgatagtgaagtagtaccgtgagggaagggtgaaaagaacccccatcggggagtgaaatagaacatgaaaccgtaagctcccaagcagtgggaggaggctcgggactctgaccgcgtgcctgttgaagaatgagccggcgactcataggcagtggcttggttaagggaaaccaccggagccgtagcgaaagcgagtcttc

SEQ ID NO: 146759 - DNA, 259 bp, Glycine max
aaacgatctaaacatgcaaatttttgttaagactttaaccggtaagaccattaccctcgatgtcgagccttctgactccatcgagaatgtcaaggccaagatccaagacaaggaaggtatccctcccgatcaacaaagacttatcttcgctggtaagcaactcgaggatggcagaactctttctgactacaacattcagaaggaatctaccctccacttggtcctcagactgagaggtggtatgcaaatcttcgtcaag

SEQ ID NO: 146760 - DNA, 254 bp, Glycine max
cggctcgagcgaatttggattagatgtggatcatcacaatgcagttgagccagcagcaagcattttcaacaaaaaagtgaaaatcagaagggcaattgaagctgaaggaatcccttacacttacgtttgctcatatgcctttgctggttacttcttgtctacattgggacaagaaaatgtcacagcccctccccgtgataaggttgtcattctaggaaatggaaacgtcaaaggagtttatgtcacggaggaag

SEQ ID NO: 146761 - DNA, 253 bp, Glycine max
ctttctctcgttttttctcagaaccttctgaggttaaagcaaaaaacaaagagagagagagagagaaaatgatgaagccatcgatgctcagatctctccactccgacgccacccgcggcgcctctcatctcttccgccgtgggtacgcctccgagccggtgccggagcgcaaggtagccgttctcggcgccgcggcgggatcgggcagcctctctcccttctcatgaagctcaatcccctcgtttcgagcctc

SEQ ID NO: 146762 - DNA, 247 bp, Glycine max
gtttcgaatagattatcctaagtctttgggaatagtgctgcaatggcttcaagtcaggaggaggtgacccttttgggagctactggaagcccatttgtgtgcagggttcatattgccctcaagttgaagggagttcaatacaaatatgtcgaagaaaatttgaggaacaagagtgaactgcttctcaaatccaacccagttcacaagaaggttccagtgtttattcacaatgagaagcccatagcag

SEQ ID NO: 146763 - DNA, 246 bp, Glycine max
attccattctctctgtgtatttccctacctctcccttcaagatgcagatcttcgtcaagaccctcaccggcaagaccatcacccttgaggtggaaagctctgacaccatcgacaacgtcaaggccaagatccaggacaaggaaggaatccccccggaccagcaacgtctcattttcgccggaaagcaacttgaggacggccgtacccttgctgactacaacattcagaaggagtgtactcttcacc

SEQ ID NO: 146764 - DNA, 242 bp, Glycine max
gcaggggctaacttctacatcgttggtcgtgaccccgcaggcatgagccatccagttgagaaaagagatctgtatgatgctgaccatgggaagaaagtattgagcatggcaccgggactagagcgtctaaacattcttcctttcagggttgctgcatatgacaagatgcagggtaaaatggcattctttgacccttcaaggcctcaggacttcctgttcatatcaggcacaaagatgcgcac

SEQ ID NO: 146765 - DNA, 248 bp, Glycine max
ttcattcaacatttctccccttagcttgtttcaccaatggctgctgcggttagtgctgcagtctcttttccatccaccaagtctacctctcttccaagcaggacctccctcattgccccagagagagttgtgttcaagaaggcttcattgcaaaacagagatgtttctagcagtggacgggtagtttccatcagagctcaagtcaccactgaggcaccagccaaggttgaaaaagagtccaagaaaca

SEQ ID NO: 146766 - DNA, 250 bp, Glycine max
cacacaatgtcagcaccatccggtaacccaagcgaagtcaagaacgcctcaaacgttgttgtcccagccaagacagccccagttgcagtcgcccaaaaggattcaaccatcgttggtttcctaaaggatttcgttattggaggtgcctcaggtgccgttgccaagaccatcaccgcaccaattgaacgtgtcaagattatcatccaaactcaagacgccaacccacgtatcatctcaggtgaagtcccaa

SEQ ID NO: 146767 - DNA, 252 bp, Glycine max
gcgttgccattctcatcctcctctgtctctctctctccaccattgccatggatccttacaagctccggccatccagcgctttcaattctcccttctggactacaaattctggtgctcctgtttggaacaacaactcctctttaaccgttggagctagaggtccaattctgcttgaggattatcatcttgtggagaagcttgcaaactttgacagggaacgtatcccagaacgtgttgtccatgccaggggag

SEQ ID NO: 146768 - DNA, 253 bp, Glycine max
gcaccaacaagggaagaccgcattggtgtttgcaccggaattttccgcactgatggtattcctgaacaggacattgtcaagcttgttgacaccttccctggccaatccattgatttctttggtgcactgagggccagagtatatgatgatgaagtgaggaagtggatttctggtgttggtgttgacagtgttgggaagaagcttgtgaactcaaaagatggacctccaacctttgagcagcccaagatgactc

SEQ ID NO: 146769 - DNA, 251 bp, Glycine max
ggtcagtgtcgattcttccggaaagactgctttgaggatggcgatgcaaactagggagcagcatatcaggagggacaaggccaccagcaacatttgcactgctcaggcactgcttgcaaacatggctgccatgtatgctgtgtatcatggacctgaaggcctcaagaacattgcacaccgtgttcatggtcttgctggggcatttgctcttggaataaagaaacttggaactgtggaaattcaggaccttc

SEQ ID NO: 146770 - DNA, 247 bp, Glycine max
gctgacttcctctttgttttctgatctatggcttccaaggagttctctggtctttgctccttggctccttcactatctgagagcattttgtgcactactgggttgaaaatgtatatgctggagagcaaaggaggtgccatagcatgcatgttcttgtctcttttcttcttggggacatggcctgctcttttgactatgttagagaggcgtggtcgtcttcctcagcatacctaccttgattactcaa

SEQ ID NO: 146771 - DNA, 243 bp, Glycine max
ccaaagttgggcaagaagaggtcctcttccaatttgaagctagcgaggatggacaagtccagttctttccaaatgctccagttgatgttgacaattctcccagctttgttgccatcaatgtcagtcctattgagtatgggcatgttttgctgattccgcgcattttcgagtgtttgcctcaaaggattgaccgtgagagcttcctccttgcacttcacatggcagtggaagctgataatccat

SEQ ID NO: 146772 - DNA, 242 bp, Glycine max
agcgatcgaagtttcacatcagccttatccagtttagggtttcggttccttaccctacctttgacgtatcgaaaccttaaatttgggattaggtctgagcaatctggttggtagaacctttggtcttagagagtcaagttttatgtctggattagacgatcaaattcctactgccttcgatccttttgctgatgcaaatgctgatgactcgggtgctgggtcaaaggagtatgtgcatattc

SEQ ID NO: 146773 - DNA, 245 bp, Glycine max
agcgaagtcatagttagaagttttaaacattcaacctcaatttgcagagttctaatattacattgcagagaaaatgtctttgattccaagtttctttggtggcagaaggagcaatgttttggatcctttctccctcgatgtgtgggacccttttaaggattttccttttcccacttctctttctgctgaaaattcagcgtttgtgagcacacgagtggattggaaggagacaccagaagcacacg

SEQ ID NO: 146774 - DNA, 246 bp, Glycine max
gtcgtgtcttcttctctaaaataaaaaaccctaacttctgaacctttcaccgcatcgccaccgattccctatctccactaatcaaagaaaagaaaatgagtagacgctcgagcagaactgtctacgttgggaatctacccggtgatatccatgaaagagaagttgaagatttgtttctgaagtacggacacataacacacatcgacctaaaggttcccccaagaccacctggttatgcatttgtag

SEQ ID NO: 146775 - DNA, 247 bp, Glycine max
aaaggtttccagggtaaagagcatttcattaaataagaacaaagaagtgaaattagccaaacgaaagcaaaactatgataatgctgcatctggagggtttgttcctgattatagtcaaggataccaaaaagttgtggatgaagatacaagcaatagatcaagctcagggtcagctgtctctaactcagagagctgtgctcaatttggtgggactgatgctagtgatttgacaggtcctgctcagtca

SEQ ID NO: 146776 - DNA, 224 bp, Glycine max
ggctcgaggcgtacatgctgaaatgtatgtggtggagagactggtgcgcgccatagggtgcatgctggtgtccatcttcttcctcgggacatggcctgctgtcatgactctgctagaaaggcgcggtcgtcttcctcaacacacctaccttgattacaccctcaccaacctcatggctgctgttatcattgctttcacctttggtcagattggcaacgctcaac

SEQ ID NO: 146777 - DNA, 250 bp, Glycine max
ctcgagccgtgcaaagaatgctattctcatgaatatgccaaatgctgttctttcaatgtggagatattttgttggagatctcgtctttgaagtttctaagatgacttctccctacattaaatgtacagtctctttcttcatagcatttggaaatttggctgatgacagtctcaattttgaggcttttccccacaagctggtgcagtttggagagattcaggaaaaagttgtattgaaattttcacaagag

SEQ ID NO: 146778 - DNA, 248 bp, Glycine max
caagcctctactatactgcttcaccttctgctctagaaaattcagtgctgaaacatggcttcggctactctctctgtagccaaaccagcccttcaggcaaatgggaaaggcttctctgaattctctggcctccgaagctcatcaggcttccttcccttttctagaaaatcttcagaggatttccattctgtcattgccttccagacctatgcagtttcgagcagtggaggatacaagaagggtgtgac

SEQ ID NO: 146779 - DNA, 249 bp, Glycine max
  unsure (1)..(249): unsure at all n locations
gaaaaattaaaccaaccatactacaccagacactncttctaaccttcaataattctcttctcacccttataaaaagaaactcattttaactcagactttgcatttcaccttatctatctatcttttctaacatggctgctgggactggactctttgcagagattttggatggagatgtgtacaagtactatgctgatggagaatggaagaaatctgcttctgggaaaagtgttgccatcatcaacccca

SEQ ID NO: 146780 - DNA, 248 bp, Glycine max
ctctttttcttctctctcaacaacttcaccttcttcctcctcgatcatgtctcacttcaagggcaagtaccatgatgagcttatcgccaatgctgcgtacattggcactcctggaaagggtattcttgctgctgatgagtcaacagggacaattggcaagcgtttggccagcatcagtgtagagaacattgaatccaacaggcgagctcttagggagctgcttttcactgctcctggtgttcttcaat

SEQ ID NO: 146781 - DNA, 251 bp, Glycine max
atcatattgagaagggaaatattgacctgagccaactaaagtttcgtgtccttgatgaagccgatgaacatgctgaggatgggttttgttgaagatgttgaaatgattctaggcaaggtagaaaatgttaataaagttcagacacttcttttcagtgctactttgccagactgggttaagcaaattgctttaaaatttttgaagccagataagaaaactgctgaccttgttggaaatacaaaaatgaaggc

SEQ ID NO: 146782 - DNA, 247 bp, Glycine max
gcgcgggtaaacggcgggagtaactatgactctcttaaggtagccaaatgcctcgtcatctaattagtgacgcgcatgaatggattaacgagattcccactgtccctgtctactatccagcgaaaccacagccaagggaacgggcttggcggaatcagcggggaaagaagatccctgttgagcttgactctagtccgactttgtgaaatgacttgagaggtgtaggataagtgggagctggaaacag

SEQ ID NO: 146783 - DNA, 245 bp, Glycine max
aaataaagcacagaacagttgaagtgaatggcataaaaatgcatgttgcagagaaaggagagggtccagtggtgttgttcctccacggcttccctgagctctggtactcatggcgccatcagattctctctctcagctccctcggctaccgcgccgtcgctcccgatctccgtggctacggtgacaccgaagcaccaccttcaatcagcagctacaactgcttccacatagtgggtgatctcgtt

SEQ ID NO: 146784 - DNA, 234 bp, Glycine max
cggctcgatctctagtcgattcggctcgaggggatcagttgagcactgtttaagagatgctaaactggacaacaggcctgtccatgacgttgtcctggatcgtggttcgatgagaattcccgcggtgcgactgctcctgcgagatctctcgactgggaccgtatctctgccacagcatctatcctgctgtggctgtcgcatatgagcgtgcagtgcaagctgctatccagaggg

SEQ ID NO: 146785 - DNA, 240 bp, Glycine max
gcacccctccgaactcgctcacggcgctaacaacggtcttgacatcgctgttaggcttttggagccactcaaagcggagtttcctattttgagctacgccgatttctaccagttggctggcgttgttgccgttgaggtcaccggtggacctgaagttcccttccatcctggaagagaggacaaacctgagccaccaccagagggtcgcttgcccgatgccactaagggttctgaccattt

SEQ ID NO: 146786 - DNA, 244 bp, Glycine max
tccatccttattgatgcctttgaggttggctacagacactttgatactgcttctctgtatgaaagtgaggagtctctaggcaaagctgtggcaaaggccttagagctaggcctcataaatagcagagaggaattattcatcacatcaaaactatggtccactgatgctcatcctgaccttgttgttccagctcttaagacctccctgcagaagttgggattggagtatgtagatctctatttga

SEQ ID NO: 146787 - DNA, 260 bp, Glycine max
aacaagcctgacaatgagattgttgaccattacacatatgttatattgggtgatggttgtcaaatggagggaatttcaaatgaagcttgctcacttgccggtcactggggtctaggaaagctcattgctttatatgatgacaatcacatttccattgatggtgacactgagattgcattcactgagaatgttgatcagcgttttgaagcacttggatggcatgtaatttgggtgaagaatggaaatactggatatgatga

SEQ ID NO: 146788 - DNA, 257 bp, Glycine max
ctagctagcgactccgagatgccaagcaaagaggattcacctttagtagaagcaaagcttccactattagaagctcaacctttaacagatgaaagagaacaagaccaaagtttcccacgaaggttttggcttagtcaaagaggctttggcacatagtaggcccttcaattttcagccgtattgcatcctactccatgttagtcataacacaagcctttgcaggccaccttggtgacctcgaactcgctgccatctcc

SEQ ID NO: 146789 - DNA, 256 bp, Glycine max
gtctgaaatcaagctctttatttggagaatcgctaagagtggcctccaaatcaacaataaaggtttcaaagacaaagaatacttcactcgtgaccagatgtgaaattggtgacagtctcgaagaattcctcaaaaagcaacaccagataaggggttgatcaggttgttggtgtccatgggagaagcattgagaacaatttccttcaaagtgaagacggcttcatgtggtggaacacaatgtgttaatacttttggg

SEQ ID NO: 146790 - DNA, 191 bp, Glycine max
gtccatctgagatgcctcatatattatttcattattgtgtaccacttttcaaacttgcttggggtttgtaacaacaacaaccaccaaaaaaaaaaaaactcgtttagagtttgtttgtgtacgtttatattaaataataatacgtgtttggtggctttttagcctaattatcaataacaggcatttgtttt

SEQ ID NO: 146791 - DNA, 261 bp, Glycine max
ccgtaagcgataagcaatagaattcagagagagagagaaagagagtctcttgctctgtatctttgatttgatcattccaatcttcaatttttctatatatccatcaatccgctgagtgcaaagttctaatctttgcctattgggttctactcctttctctcttcgtttccgatcgatccaattttcttcccatggctacgatcggacacaacaatctcaatgccaaattggttcttctcggggacatgggtgctgggaaat

SEQ ID NO: 146792 - DNA, 260 bp, Glycine max
aattaataaaattagtcgtgttttattcgattttttgaattggtttttttttacagtagctaatgctagtcaccgaacttagtcaatgagctagaatgggttataaagatatctatagatatatatagatatattatctatagatatctttagaaaaaaaaaaagagaataaacaaataagacgtatcattttatgtatagtagtgctgaattatgggacaaaaaataaatccgcttggtttcagacttggtacaactca

SEQ ID NO: 146793 - DNA, 233 bp, Glycine max
ggcaaagcaaacttggcaagtaaatatttctgttcctgaaggttgtgctgatccaagtgctagaagttgtgatgggacttgcgtgtaacattcttagaattctcaatgtcttaggtgcaaagagaagatgcaagtttgagatgattttactatatttttcatattggactgtcttcctctataattttgagttaaagtgtccacttaaattgaatttggtgccttttcctttt

SEQ ID NO: 146794 - DNA, 255 bp, Glycine max
gttgtgaaagcagagaagtgagatacactaagttatcctcataaatacactctaattaggtggcaagataagtgtctaaccttagtaacattgccacatattgtgttcattttggaattgtgccactaaaatctattcaattcatctatggctgcctcttcttatgctatgcaatcaatcctggcaaaccctttgatccgcatttccagcgggtctagggtgaaccaatttggcgttcctgctttgcacatgaga

SEQ ID NO: 146795 - DNA, 255 bp, Glycine max
gccttgaggaacgttccagaccacatacagagttttctctagtgatcttcgttcttctgtggagatcttgttttttcatctcacttttcttctaattaaggaacaagctttccgcagttgaaaaccctagcagctagcttccaccaatttgaatcaccaatggctcgctctttctctaacgtcaaggttctctctgctcttgtggccgacggattctccaacactctcaccaggcgtgggtacgcagcagcgaca

SEQ ID NO: 146796 - DNA, 256 bp, Glycine max
ggttatcaccaatggtaagtacaagagtgtggagcaccgtgtgatagcacaaacagatgggaccagaatgtccattgcctcattctataaccctggcagtgatgctgtcatctaccctgctccagaattgttggagaaagaggcagaagagaaaaaccagctctacccaaaatttgtgtttgaagactacatgaagctatatgctaagttgaagttccaggccaaggagccaagatttgaagcctttaaagcatca

SEQ ID NO: 146797 - DNA, 257 bp, Glycine max
caatgggttcttcttctattacaacatcgctctcaaccatgaccatggctgcgatcgtgctcctgttcacggtctttgccgtttcctccgccctagacatgtcgataatctcgtacgacagcgcccacgcggacaaggccgctacgttgcgcaccgaggaggagctgatgtccatgtacgagcagtggctcgtgaagcacgggaaggtgtacaacgcgctcggcgagaaggagaagcgcttccagatcttcaaggac

SEQ ID NO: 146798 - DNA, 252 bp, Glycine max
gcttcccaactcactcccaagaccaatggatcaactcctgtgaggggagagacagtggccaagttgaaggtggcaatcaatggtttcggacgcattggtagaaacttccttcgctgctggcacggccgaaaagactcaccccttgaagtcgttgttgtcaacgacagtggtggtgtcaagaatgcttcgcacctgctgaaatatgattctatgctgggaacctttaaggcagatgtgaaaatactagacaat

SEQ ID NO: 146799 - DNA, 256 bp, Glycine max
ttgtttaaacctaattctcatttcttcatcgttcgattcttctcctcctaaagatgcagatcttcgtgaaaactttgaccggtaagaccatcacccttgaggtggagtcctctgacaccatcgataacgtgaagctaagattcaagacaaggaagggatcccacctgaccagcagagacttatctttgcgggtaaacagcttgaggatggtcgaacccttgccgactacaacatccaaaaggaatccactctccac

SEQ ID NO: 146800 - DNA, 257 bp, Glycine max
atcaagtggcaggagaaggcatgtggggggttctggagttaggtgcatggctgtgggggaagcagcaaccactgggacaaagaagagaagtggatatgagcttcaaacactcactagctggttgctgaagcaggagcaagctggggtgattgatgcagaactcactattgtgctgtctagcatttccatggcatgcaaacagattgcttctttggtgcaaagagctaacatttccaacctcactggggttcaaggtg

SEQ ID NO: 146801 - DNA, 250 bp, Glycine max
ctttgaaccatgtggttattcaatgaactctgttgaaggcgctgctgtttctacgattcatgttaccccagaagatggtttcagttatgcaagcttcgaaactgttggttatgacttcaaagcggtgaactgaacgaaatggttcagagggtattggcatgtttcctcccaactgagttttctgttgcagttcatgtggatggtgcaagcaagtcgtttgagcagacctgctttctggatgttaagggat

SEQ ID NO: 146802 - DNA, 255 bp, Glycine max
gtctggtccaagtgctgcaatatgcaaggcaaagaaatggaagggttgtcgtcttcatcggcgatcgcgcagaaaacatgggaactcgagaacaacatcatcccgatggacactccgggcggcgccgctacctcctccaccgctaccaccacgaccaacgccgacgactcgatcttctactacgacgaggcggggcagaacgagttccagcgcgacaagccctgggccaacgacccccactacttcaagcgcgtg

SEQ ID NO: 146803 - DNA, 254 bp, Glycine max
gtctaccctgtaaatggaggaggagaactagagaggcaaagggcacagactattgctgatgccatcaccattacaaggccacataacaccatttctccacctcggtgacatcctcttctcaaagggctttccatcaccattctccacaccatcttcaacttcccaaacccttcttcctaccctcacttcaccttccacgccatccccgacgtcttatcagatacagaagcttcaacactcgacgccgtgctcct

SEQ ID NO: 146804 - DNA, 256 bp, Glycine max
  unsure (1)..(256): unsure at all n locations
ctcgagccgtggcttccgaagaatcccagaacaagccccccagcgagcagtccactaccgaactcatcacgagcgcgaagctggtggcggaggcggcgcagtcggctctgaagagcgacagcgncaaagtggacaaggccaaggtggctgacgctgccggcgatcttctcgacgcggcggggaagtatggaaaacttgatgacaaacaaggcatagggcaatatgttgacaaggctgctgattatctgcataatta

SEQ ID NO: 146805 - DNA, 260 bp, Glycine max
ctcagcaactgaaacaattgaacttaacaggccagtacagtgatgtaaacatctacattgagggttatgggctcattgcacgagctcataaaattgttcttagctcctggagtatcccctttgctcggatgttacaaatggaatgagtgaaagcatgtcctcggaggttactttaagggatgtcccaccggaagctttcaaggctatgcttaactttttatatgatgggcaattgaatgacaaagttatagattctggtg

SEQ ID NO: 146806 - DNA, 253 bp, Glycine max
agaaagaggaaaaaaccgaggatttcacatagtacttttggtcgaaaaatcgatctgatttttttcgtacttttcgctcaatgatgaaatgggtcagattctacaggaccaaaccttgtgggagttaagaatgatggaagaaaagaaataaaaaaaagtaaataataatgcagtagaagagtcctgattccaaacgaaaaaattcaaacttgattgaaaaggatctttctgattattgaagaatgggacaaaa

SEQ ID NO: 146807 - DNA, 252 bp, Glycine max
gcaggggctaacttctacatcgttggtcgtgaccccgcaggcatgagccatccagttgagaaaagagatctgtatgatgctgaccatgggatgatagtattgagcatggcaccgggactagagcgtctaacattcttcctttcagggttgctgcatatgacaagactcagggtaaaatggcattctttgacccttcaaggcctcaggacttcctgttcatgtcaggcacaaagatgcgcacactggcaagga

SEQ ID NO: 146808 - DNA, 260 bp, Glycine max
tgagaaagaggaaaaaaccgaggatttcacatagtacttttggtcgaaaaatcgatctgatttttttcgtacttttcgctcaatgatgaaatgggtcagattctacaggaccaaaccttgtgggagttaaggaagatggaagaaaagaaataaaaaaaagtaaataaaaatgcagtagaagagtcctgattccaaacgaaaaaattcaaacttgattgaaaaggatctttctgattattgaagaatgggacaaaaggatt

SEQ ID NO: 146809 - DNA, 257 bp, Glycine max
gcatctaagtgagatacacagtagttaggtagcaagcataagtgtctaaccttagaaacatatctgctacatatcgtgtgcattttggaattgtgcgactaaaattctattcatctatggctgcctcatgctatgctatgcaatcaatccttgcaaaccctatgatccgcatttccagcgggtctagggagaaccattttggtgttcctgcttatcacatgagaaggaatgttggcctgagagttaggtccatggct

SEQ ID NO: 146810 - DNA, 253 bp, Glycine max
atcaaatttcatcagtgtgtgcgtttggcccgatttgagaatgatcggacgatttcatttatccctcctgatggatcatttgatttaatgacatataggctcagtacacaggttaagcctttagtttaggtggaagcacaagttgataaacatgcaaaaagccggattgagattatggtaaaagctaggtgccaatttaaggaacgcagtactgccacaaatgttgagattgagttgcctgttcctgctgatg

SEQ ID NO: 146811 - DNA, 251 bp, Glycine max
gcctccacaggtcaacgagctggatggtatctcattgggggagtgggagaacgagaaagagattgatgaggtcgctgcacagtgtggacttcagagggttggtgtcatattcacagatctcctggatgcagacaagggtgacggctcggtcatttgcaagcgtcacgccgactcgtatttcctttcgtctctcgagatcaccttcgcagcaaggtaccaagcaaaatacccaagaccgtccaagtggagcg

SEQ ID NO: 146812 - DNA, 250 bp, Glycine max
ccaaacaccatgtctgtagaagagaagaaggaacgagcagatatgacactgagagaaatgggtctacaagatgccatcaacacaagggttggagggtggaattgtaaaggcctcagtgggggacaaagaggagacttagcatttgcatttagattctaacacacccaaaactcctcttccttgatgaaccaactagtggacttgatagtgcagcttcctattatgttatgagtggaattgcaaatctaat

SEQ ID NO: 146813 - DNA, 255 bp, Glycine max
gggaaaagcacaacttgttactccacagcttctcaaggaaatgaagatagaagaagaaagaattgaggctgagaaaaaacgggtaaaagaagaggcacagcaacttgctctaatttttgaaactgttgggctttcaaggtgaagcgtaaaggtggtaaaggaaaacaaatttttggaagtgtcactgctcaagatcttgttgacataatcaaggcacaacttcaaagggaggtggacaagagaattgttgatctt

SEQ ID NO: 146814 - DNA, 255 bp, Glycine max
ctctgcctctgcaattcagcgggctcaagtgctccccactctcatcttcttctctcttctccaaaccttctctttggacccaacaatcccaaaagcgcgtttcaattaccattgcgaactcaatagcaaagccaatgcgcagaacaaagagagagcgaggcttaagaaactcttcgaagaagcctacgagagatgccgcaatgctccaatggaaggtgtttccttcaccatcgaagacttcactgctgctcttga

SEQ ID NO: 146815 - DNA, 259 bp, Glycine max
ctttcaaccccatccaatcctcacatgcatgctgtctctgccaaagtgccaagtcacataacatttccattgttaccattctttctttccatcacaaccacttattcagcctctgatcctcactttctctccacaaaaacacactcaccatggatcatcgcaaaccattgctacccacttcctctgatgctgctcatattgcacacactcgcaaggaccttcttctagttatttgcggcttgctattactctcttccct

SEQ ID NO: 146816 - DNA, 250 bp, Glycine max
atcatttactgtggtagataatgaaaatcatgttcaagctgttgaggatgaaggactgttcactgttgccaagttaattggctgtgaaattgaagacctgaagttgactttatcaactcgcaaaatgaagttggtaatgatattattgtccagaagttgactctatctcaggctattgatgcaagagatgctttggcgaagtcaatatatgcttgtctgtttgattggttggttgaacaaataaaccaat

SEQ ID NO: 146817 - DNA, 251 bp, Glycine max
aattgaagttaaaagccttagccttccctacaactccaaacatcaagacatcatcatccatggctgcctccgtctccactgtcggagctgtcaacagagctcttttgaacctgaatggttctggagctgagcttcagctcccagttcagccttctttgggaccagcttgaagaaggttattgcctcaagggtccccaacagcctggtttccggtggaagcttcaagattgttgctgtagaagagaagaaag

SEQ ID NO: 146818 - DNA, 249 bp, Glycine max
atctcaatgggttcttcttctactccaccttcgacctgaaccatgaccatggctgcgatcgttctcctgttcacggtctttgtcgtttcctccgtcctagacatgtcgataatctcgtacgacagcgccacgcggacaaggccgccacgttgcgcaccgaggaggagctgatgtccatgtacgagcagtggctcgtgaagcacgggaaggtgtacaacgcgctcggcgagaaggagaagcgcttccaga

SEQ ID NO: 146819 - DNA, 250 bp, Glycine max
cgtagaagaagaaagcgtttccaagaagcgaaaggaaggaaaggggttttgtgatttttgaagaatcgcgtttgggagtagtcggagatggagctttcgactccgaattcttcctcgaagcacttgccatcacgccgggttctagggttttgagaagccctctctccgacgaacagatctggaagcgcctccgtgacgctggcttcgacgaggaatcgattaagcacaaagacaaagctgcgcttattgc

SEQ ID NO: 146820 - DNA, 251 bp, Glycine max
ttttgaacatgccacaagatatcatgtatggctgggacatctcacaatggtgctttttactgtccatggactcctctatgttattgcatgggcaatggaaggccaccttgtacaaggattaatacaaggaaagatattggtgttgccaatctcccaggagttatcagccttctagctggtttgttaatgtgggtgacctctcttcccggagtgcggacatggaactttgagttgtttttctacacccacca

SEQ ID NO: 146821 - DNA, 253 bp, Glycine max
caaattcatttcaatcctaattctgcactttttgatcattcgatttttctcctcaagatgcagatattcgtaaaaactttgaccggcaacaccatcacccttgaggtggaatcctccgacaccattgacacgtaaaagctaagattcaagacaaggaagggatcccacctgaccagcagagacttatctttgcgggtaaacaacttgaggatggtcgcacccttgccgattacaacatccaaaaggaatcaac

SEQ ID NO: 146822 - DNA, 271 bp, Glycine max
ggcagaacaggttggattgggggtttgctggggaagttgtgtgaaaaacaagaaattccctacgaatatggaaaaggacgactagaggaccgatcatcacttgtggctgatattcagaatgtgaagccaacacacatttttaatgcagcaggagtaactggcagacccaatgttgattggtgtgaatctcacaagacagaaaccattcgcaccaacgttgctgggactttaacattggctgatgtcagcagagagcatggaatcttgatga

SEQ ID NO: 146823 - DNA, 280 bp, Glycine max
cgcgtacggctcgtgatttaaatacagggatttgctataccaaaagaggcacaaggaaaagttgcaaaatttgatttccatgggcagccagcggtactcaagcatggcagtgttgtgattgctgcaattacaagctgtacaaatacatcaaacccagtgttatgcttggtgctggtcttgttgcaaaaaaggctcatgagcttggtttacaggtcaatccttgggttaaaacaagtcttgctccaggctctggagttgttacaaaatatctactccagag

SEQ ID NO: 146824 - DNA, 261 bp, Glycine max
ctttcaaggtctgcatccagaagtgtgtcccagaaagtgatatcttgggttggcaatatatctcaggaggcttaccagatggccatgagcttgagcgcttggacaatcctgagattcaaggggctaaatttgatccagaggtgaatatgtgaggcaatggctacctgagttggcaagaatgccaactgagtggatccatcatccttgggatgcaccacttactgtgcttcgagcagcaggagttgagctgggccagaatta

SEQ ID NO: 146825 - DNA, 262 bp, Glycine max
aaaaccacttacaaagtagtactacttggtttcaatcaaaacaaaaactcacactttggtggccacagcaacaataacaatggcagcctcactacaagctgcagctaccttcatgcaacccaccaaggtgggcatggccctcgcaacctcaaatctacacaatgcatttctaaggcttttggcttggaacccgctgcagctaaactcatttgctcccttaagcccgatctcaaagattttgctcaaaaatgtgtcgacgcca

SEQ ID NO: 146826 - DNA, 280 bp, Glycine max
cacgcgtacggaatctcagcgcctctgcacgagtgctgggcgtatggagaagttctactgggcaccaacaagggatgaccgcattggtgtcatgcactggaatttttcgcaccgattcaattcctgaacaggacgttgtcaagattgttgacaccttcctggccaatccattgatttctttggtgcactgagggccagagtatatgatgacgaagtgaggaagtggatttctggtgttggtgttgacggcattgggaagaagcttgtgaactcaaaagat

SEQ ID NO: 146827 - DNA, 262 bp, Glycine max
ctcaatatccgccattgaattcttcttccatttctcttttttctgcatacccatttcgtttttcttcccaaatggccctttcttgctccaaagttttaagcttttatctctcgcccgttgtgggtggtggtgatgttccaaaaagctcactttttcttcttttttgggtctttctaagggtgttggtggaagcaggagctcgagggtgtgtgctgcttcaaatgcacccgcaccactcgctggggtcatatttgaaccattt

SEQ ID NO: 146828 - DNA, 265 bp, Glycine max
gaagaagcacaaagagaagcattagcactaggagcagcaacaactagtctcagctgaaatggcctcttcagtgatggcatctgtggccctcaaacctgcccctttcactgttgagaagtcctcagtgagaggccttccctctctctcaaggaactcttcttcattcagagttgtggccagtggcaagaagatcaagactgacaaaccttatggaattaatggtggcatggctttgagggatggaactgatgcatctggcaggaaa

SEQ ID NO: 146829 - DNA, 266 bp, Glycine max
gagaaacaaagttagaagtaaagaagatcatggcttctctagcaaccttggctgctgttcaaccagctacgatcaatggccttgctggaagttccctctctggaactaagctctctttcaagccctctcgccacagtgtcaatccaagaacttcaggagtggtgccgtggtagcaaagtatggtgacaagagtgtgtactttgatttggaggatctgggcaacactacagggcagtgggacttgtatggctcagatgcaccttcac

SEQ ID NO: 146830 - DNA, 263 bp, Glycine max
cggtgatccgtatccttttgatggtccaggtgggatattgggccatgcattcgctcccactgatgggaggtgccactttgacgccgacgaatattgggtggcgtctggcgatgtcaccaaatcgccggtgacaagtgctttgaccttgaatctgtggcagtgcacgagatcgggcacttgctcggattaggccactcgtcggacctaagagccatcatgtatccttctataccacctcgaactaggaaggtgaatctagcgca

SEQ ID NO: 146831 - DNA, 261 bp, Glycine max
gccatggatgctttccagcaccaaactctcatttccatcattctggccatgttagtaggcgtgttgatttatggcttaaagagaacacatagtggccatggcaagatctgtagtgcacctcaagcaggaggagcatggccaattattggccatttacacctctttgggggtcatcaacatactcacaaaacacttgggataatggcagagaaacatggaccaattttcacaataaagcttggttcatacaaagttcttgta

SEQ ID NO: 146832 - DNA, 261 bp, Glycine max
ggttgatagcgctcgtgccggcgctgaagacattgatagttgacaagaatctagggtttcctgtgttctcggccatagatgaccttttcgatgaaggcctttacttgcctcctctaaaaggtatcaggagtatcttgcccaggctcgttaggcatattaaggatattcaggaagacattctcctttttgatcctcccgcaacaatgaacaaggacagatttttctggttaagggacgaagaatttggaagacagactctcg

SEQ ID NO: 146833 - DNA, 259 bp, Glycine max
ggacgctactggaccatgtggaagctgcctatgtttggttgcactgatgcttctcaggtgttgaaggagcttcaagaggctaagactgcataccccaacggcttcatccgtatcatcggattcgacaacgttcgcaagtgcagtgcatcagcttcatcgcctacaagcccccaggcttctaagtgtgaaaaatttgcaaagcatttgtagccgccaccccactttgtttgtttgtacttaaactacattcccatttgtt

SEQ ID NO: 146834 - DNA, 255 bp, Glycine max
gactattggaggcaactaagaaagatatgcacagtagagttactaacagcaaagcgcgtgcagtcttttcggtccataagagaagaggaggtggcagaactagttaaaaaaatagctgcaactgcaagtgaagaagggggtccatttttaatctcacccagagcatttactcaatgacttttgggatagcggcacgagcggcttttggtaaaaagagcagataccaacaagtgttcatatcaaacatgcataaac

SEQ ID NO: 146835 - DNA, 272 bp, Glycine max
gcaaaggattctacccgccgctcgatgggaattgcgcttcaaggcgtctcgtagggctaatccgcctcacgagggtcaccaacggcacgtgcctttggggggccgaggccccctactgctggtcggcaaacggacggcgggcgacgcgtcgcttctagcccggattctgacttagaggcgttcagtcataatccaacgcacggtagcttcgcgccactggcatttcaaccaagcgcgatgaccaattgtgcgaatcaacggttcctctcgta

SEQ ID NO: 146836 - DNA, 265 bp, Glycine max
ataacatgaagaaagggcttagacatggagaagcatctccacttcttgataaaattgtgtttgacaaggtaaagcaaggtttagggggtagagtacgtcttattttgtctggagcagcacctttatctgcacatgtggaaggttacttacgggtggtgacttgtgctcatgtcctacagggatatggtctgactgaaacctgtgcgggaacctttgtctcattaccaaatgaaatagaaatgcttggaacagtgggccctcctgt

SEQ ID NO: 146837 - DNA, 260 bp, Glycine max
caactacaaaggttgctgtaggagataagatattgaagtagtgctaagtgcctaacacctgcagtgaacaatggcctctgcatcagcatctcttctcaagtcttcacttgttcttgacaagtctgagtgggtgaaggacaaacacttcgccaaccttctgctgcatcagttgtgagatgcaaccccaccaccccatcaggcctcacaatcagagctggttcctatgctgatgagctcgttaagaccgcgaaaacagtggc

SEQ ID NO: 146838 - DNA, 257 bp, Glycine max
gtaagctcccaagcagtgggaggaggctcgggactctgaccgcgtgcctgttgaagaatgagccggcgactcataggcagtggcttggttaagggaaaccaccggagccgtagcgaaagcgagtcttcacagggaattgtcactgcttatggacccgaacctgggtgatctatccatgaccaggatgaagcttgggtgaaactaagtggaggtccgaaccgactgatgttgaagaatcagcggatgagttgtggtta

SEQ ID NO: 146839 - DNA, 258 bp, Glycine max
ggaaaatctttccaatgtgagcttgtctttgccaagatgggaatcaaccccatcatgatgagtgctggagagttggaaagtggaaatgcaggagagccagcaaaactgatcaggcagagataccgtgaagctgcgacatgatcaagaagggaaagatgtgcgctctcttcatcaacgatcttgatgcaggagctggtcgtcttggtggaaccacacaatacactgtgaacaaccagatggtgaatgccactctcatga

SEQ ID NO: 146840 - DNA, 256 bp, Glycine max
ggatacctaggcacccagagacgaggaagggcgtagtaagcgacgaaatgcttcggggagttgaaaataagcgtagatccggggattcccgatataggtcaacctttcgaactgctgctgaatccacgggcaggcaagagacaacctggtgaactgaaacatcttagtagccagaggaaaagaaagcaaaagcgattcccgtagtagcggcgagcgaaatgggagcagcctaaaccgtgaaaacggggttgtggga

SEQ ID NO: 146841 - DNA, 257 bp, Glycine max
gaggttttggacctgctcggagccagggagattgcggtgcgtgcttgggacgaggccctcaacacccaacctgaaaagctcatttggaatgttatgggcatgatgaacaactgctggttcagagtgaaaaccaagtgtgcaggccccacaagggtgagataggtatagtgtttgaacaccccacccaaccaggcaaccaatccggcggatggatggcaaaagaaaaacacctagagaaatcatctgagtccaaccca

SEQ ID NO: 146842 - DNA, 260 bp, Glycine max
gtttcttacaaggctctactctactgcttcaccttctgctctagaaaattcagtggtgatacatggcttcggctactctctctgtagccaaaccagcccttcaggcaaatgggaaaggcttctctgaattctctgacctccgcagctcatcaggcttccttcccttttctagaaaatcttcagaggatttccattctgtcattgccttccagacctatgcagttggaagcagtggaggatacaagaagggtgtgacagaa

SEQ ID NO: 146843 - DNA, 264 bp, Glycine max
gactatataaagtcactggatgctgatgaagatattgcccttttgaagtttcatggatggaatctgccagttgaatgcgcgcgcactcttcaaatctcaaccatgcttctgaagaaaggagtgaagagagggatgacccctttgccattggaagccttatgtgcagggaatccttgaacaaggagtctgtgattgagggaattgtaaaggcagctctggattctgttcttccttgcacaagtgaagccacatttctggatactg

SEQ ID NO: 146844 - DNA, 253 bp, Glycine max
aaggacacacctgctgttggcttgttgttcaagaatggcaatttgtaagaaagatgtttggagagttgaatgtggaatcccttctggatttccgctcacagttatttgtaatagcatttttaatgagatgccattagatatagctatgaaaaattactgcgccaggctaaagctccaagtatgtttttacaatccttcaaaaattttgtttctttgtgtgtgtatggtgatgataacttaattagtgttcatg

SEQ ID NO: 146845 - DNA, 254 bp, Glycine max
gcgactttttcgtctatatccctcaatatggcggtggcactgcttccttgaatgttactgtagctgcttccattgttctccatcatttcggagtttgggcaggttttactgagagatctcgtgatggaaataatttgttgtggctgagagacccgtaaaacagggtggacgtaattactgcactgaaacagaggattctatcattgaagagcggaaagctagaagagaaaatgctgccaatggtttctttgatg

SEQ ID NO: 146846 - DNA, 255 bp, Glycine max
catggcgtcactaggcaccccagcgcatgttagcagtaacaagaagcccttgcatcgttggagttggaaggcgaacgtgtgatgtgcgcagtgtcaccccccacatggcgtgaagggcggcgcacggtgtcgtgtctcttgctctctcccacttgcttctcattcctaaccgtgatactgccctagcaagtcctttcgataagtatgttaagagaaaaaagcttgatcctctggaggtttatataccagctgtca

SEQ ID NO: 146847 - DNA, 263 bp, Glycine max
cggctcgagcgacctaacactcctcaatggccttgcacttttggttgatgttccacgggataaaaacattactgctgaggttatgaagtccttgaatatccctagaggtgtaagccgcgtgcttttcagaactttaacactgacaggcaactcatgtttaagaaagaatttgacacaagctatgtgggattcaaggaggatggtgcaaaatggctggcagagaacactgacatcaaacttgtaggagtcgattacttatctgt

SEQ ID NO: 146848 - DNA, 265 bp, Glycine max
gcaggaactgggcataactgctcttcacatcaagctccgtgcgacgggtggaaacaagacaaaaacacctggtcctggtgctcaatcagctcttcgtgcccttgctcgttctggaatgaaaattggccgcatagaggattgacccccattccttccgatagcacacgtagaaagagtggtataaggggtagaaggctttaaggttctcgtggtatgataatttccatgtcaaacagaattgtggcattttgaaattttgcttaag

SEQ ID NO: 146849 - DNA, 253 bp, Glycine max
tgcaattgaagttgaagtcttgcccttctctcttcaactccaaacacaagacatcatcatccatggctgcctccgtctccactgtcggagctgtcaacagagctcttttgaacctgaatgggtctggactggggtttcagctcccagttcatccttctttgggagcagcttgaagaaggttattggctcaagggtccccaacacaaagatttcctctggaagcttcaagattgttgctgtagaagagaagaaa

SEQ ID NO: 146850 - DNA, 252 bp, Glycine max
cgggaagactggttctcactttaatccagacagtgacttgtttgttcccagtgagagaaaagatgttattacttcaacaatttgttggacagctatggctgctttgcttgttggtctgggatttgtgatcggtccagttcaattgcttaagctttatggcattccctatgcgatttttgttatgtggttggatttggtgacttatttgcatcaccatggccatgaagacaaattaccttggtatcgtggaga

SEQ ID NO: 146851 - DNA, 226 bp, Glycine max
  unsure (1)..(226): unsure at all n locations
aagctctttcttgttgaaactgtgagtctatgttatntgtggcggagatgaactccaccaccaacacttcgaattctcagtcaatggctgcagcagcaccgagtgatggttctgggaaganggtaagaaagccttacaccataaccaagtccagagagagttggactgaggaagaacatgataagtttctcgaagctctccaactatttgacagggactggaagaa

SEQ ID NO: 146852 - DNA, 282 bp, Glycine max
acgtccgtattctcgtcattcggctcgagcgttaccattctcatcctcttcattctctctctaccattgccatggatccctacaagcaccggccatccagcgccttcaattctcccttctggactacaaattctggtgctcctatttggaacaacaactctctttaaccgttggagctagaggtccaattctgctggaggattatcatcttgtggagaagcttgcaaattttgatagggaacgtatcccagaacgtgttgtccatgccaggggcgctagtgc

SEQ ID NO: 146853 - DNA, 251 bp, Glycine max
cggctcgagcggctcgagagaaaaagcatgcttctggaacatataaaaacctagtattttatctggaggcatgtgaatctgggagtatctttgaaggtcttcttcctgaagatatcaatatttatgcaaccactgcttccaatgcagaagaaagtagttggggaacatattgccccggggagtatcctagtcctcccccagaatatacaacctgtttgggtgacttgtacagtgttgcttggatggaagac

SEQ ID NO: 146854 - DNA, 251 bp, Glycine max
attgagaaagcgaaacgcatagaatcgaaagaggggaaaagaaaaagaaaagttagggttagggattttgagagatggcatcgactaagaagatcaccctgaagagttcggacggtgaggccttcgaggtggaggaggcggtggcgctggagtcgcagacgatcaagcacatgatcgaggacgactgcgccgacagtggaatccctctccccaatgtcaccagcaagattctggcgaaggttatcgagtac

SEQ ID NO: 146855 - DNA, 252 bp, Glycine max
ccaaggacggaggcaaagatggagacggcgaggatcccgagcaggccaagctacgggccgggctcaactccgcgatcgttagggaaaagcccaacgtgaagtggaacgacgtcgcggggcttgagagcgccaagcaggctttgcaggaagcggttatcttgcccgtgaagtttccgcagttcttcactggtaaacgacgaccttggagagcgtttttgttgtacggaccgccggggacgggtaaatcgtatt

SEQ ID NO: 146856 - DNA, 259 bp, Glycine max
acaagtttaaacccaagaccccttacattggtagatgcctgctcaacacaaagatcactggggatgatgctccaggagaaacttggcacatggtcttcagcaccgagggagagattccttacagagaaggacaacaattggggtaattccagatggtattgacaagaatggcaaacctcataaactgagattgtattctattgctagcagtgccattggtgattttggagattccaaaactgtttctctatgcgtgaaa

SEQ ID NO: 146857 - DNA, 251 bp, Glycine max
atgcagggcaagaccgacgccgacgccatcatcgtcatggacgccttcgccctccccgtcgaaggcactgagactcgcgtcaatgcccaggccgatgcgtacgagtacatggtcgattattcacagacaacaaacaggcagggcggttggagaatgtagtgggatggtatcactctcaccctggttatggttgctggctgtcggggatcgatgtttcgacgcagatgctgaatcagcagtttcaggagccg

SEQ ID NO: 146858 - DNA, 252 bp, Glycine max
tctcaatcgttttctacataatacaaacctttctaatttttgaagcttattatacccaatctcgatatgcagatcttcgtgaaaaccctaactggcaagacgatcaccttggaggtggagtcctctgacaccatcgacaacgtgaaggccaaaatccaagacaaggagggcattcctccggatcaacagcgtttaatcttcgccggaaaacagctcgaagacggcagaaccctcgccgactacaacatccaa

SEQ ID NO: 146859 - DNA, 249 bp, Glycine max
tgtccatccaaaccttaaaaagattcagtgaagaacaacgttaatggcatctcttggtgtgcaagcagttcatcctcctccattaacatccacctccgacccacctcctctttttgatggcaccacaggttgtacatcagttattcttgcccctatgcacaacgtgtatggatcgctcggaacttcaagggactaaaagacaagatcaatttggtccctataaaccttcaagacaggccagcttggtat

SEQ ID NO: 146860 - DNA, 251 bp, Glycine max
gaagatagccgtgttgccattttctctgatacccgggctgagtggctcattgcccttcagggctgcttcaggcagaatgtaacagtcgttactatttatgcttctctaggtgaggatgccctgatccactcactaaatgagactgaagtatctactctgatctgtgactccaagcagttgaagaagttggatgcaataagatcaagactaatatctttacaaaatattatttactttgaagatgataacga

SEQ ID NO: 146861 - DNA, 169 bp, Glycine max
cataaacggatttggaaggattggaaggaacttcttgaggtgctggcacggtcgcaaagactcccctcttgatgtcattgccatcaacgacaccggtggcgtgaaacaagcctctcaccttctcaagtacgattcgatcctcggaaccttcgatgctgatgtcaagcct

SEQ ID NO: 146862 - DNA, 168 bp, Glycine max
gtgaatgcagcattcagaaaggcagctgagggtccactgaaaggtgtgttggacgtgtgtgatgttccacttgtgtctatcgacttccgctgctctgatgtttcctctactattgactcctccttgactatggtcatgggagatgacatggttaaggtggttgcttgg

SEQ ID NO: 146863 - DNA, 170 bp, Glycine max
gtaagctcccaagcagtgggaggaggctcgggactctgaccgcgtgcctgttgaagaatgagccggcgactcataggcagtggcttggttaagggaaaccaccggagccgtagcgaaagcgagtcttcacagggcaattgtcactgcttatggacccgaacctgggtgat

SEQ ID NO: 146864 - DNA, 170 bp, Glycine max
ggtatcattacaatgtagcggatgcaagattagcgcaacatgtggagagagggattgcagatggccttctaattagttgtgtggcttcttgttccaatctctgggcccttattatggatgctggaactggcttttcaagtcaagtttataagttgtcaccatttttctta

SEQ ID NO: 146865 - DNA, 171 bp, Glycine max
ctctctgtgtatttccctacctctcccttcaagatgcagatcttcgtcaagaccctcaccggcaagaccatcacccttgaggtggaaagctctgacaccatcgacaacgtcaaggccaagatccaggacaaggaaggaatccccccggaccagcaacgtctcattttcgcc

SEQ ID NO: 146866 - DNA, 171 bp, Glycine max
atttggccatctactgaagaaattgctaaggttgtccaatccagtgtgttgcctgagatgtttcgaagtacatatgaggctattaccaaagggaacccaatgtggaatcaactacaagttcctgctgacactctatactcatgggaccctgactcaacatatatccatgaa

SEQ ID NO: 146867 - DNA, 168 bp, Glycine max
gaccaactcatcagccaatagagcacttggcaagcttcagggcaatgccaaacactttgatgcttcgtccagctgatggtaatgaaactgctggatcatacaaagttgctgtggttaacaggaagagaccctcaattcttgcactttctaggcaaaagttgacccaac

SEQ ID NO: 146868 - DNA, 168 bp, Glycine max
ggccagtcctcagacagttgctgattacaccctcaagctccttcacaggagaattccccctgctgtccctggaattatgtttttgtctggtggacagtctgaggttgaagctaccctcaatttgaatgccatgaaccaatctccaaacccgtggcacgtgtcattctc

SEQ ID NO: 146869 - DNA, 169 bp, Glycine max
ctccccaatatcgaagcagcactatttttgaagatgctacccctgagatggtgagggacttgttttgggatgatgagttccgaccgagatgggatgacatgcttgcatcctcctcaatcattgaagagtgtcccactactggtaccatgaaagtgcagtggatacggaa

SEQ ID NO: 146870 - DNA, 168 bp, Glycine max
ccaaggacggaggcaaagatggagacggcgaggatcccgagcaggccaagctacgggccgggctcaactccgcgatcgttagggaaaagcccaacgtgaagtggaacgacgtcgcggggcttgagagcgccaagcaggctttgcaggaagcggttatcttgcccgtga

SEQ ID NO: 146871 - DNA, 170 bp, Glycine max
gcccaggtcatcgtcctcaaccaccctggtcaggtcggtgccggttacgcaccagtcctcgattgccacactgcccacattgcttgcaagttctccgagctcctcgagaagatcgaccgccgtaccggaaagtctgttgagctctctcccaagttcatcaagtctggtga

SEQ ID NO: 146872 - DNA, 162 bp, Glycine max
gggtatttgggtatggttctttgatctcgaaagctgggtttcactatgacgaacgtattgttggtttcatcaaaggctatcgacgagtcttctaccaaggctctactgaccacagaggaacccctgagttccctggaagaacagtgaccctggagcctgctg

SEQ ID NO: 146873 - DNA, 162 bp, Glycine max
gttttccctggactgcaaggtggccctcacaaccacactattactggtttagctgttgcgttgaagcaggccactactcccgaatatagagcatatcaagagcaagttctcagcaacagctttaaatttgcacaggctctgagtgagagaagctatgagctt

SEQ ID NO: 146874 - DNA, 166 bp, Glycine max
cccactaacaccaagttcccatccaaggcttcacactctttcccaacccaatgcgcctcaaagagacttgaggtgacagaattctctgggctaagatccacttcatgtgtgacatatgctaacgatgctagagaatcttccttttttgatcttgtagcttcccaac

SEQ ID NO: 146875 - DNA, 168 bp, Glycine max
gcctctgaaggccaggtggttgaggcatttaaaatattgactgctgatgacaaagtgaaggcaattttggttaacatttttgggggtataatgaagtgtgatgttatagcaagtggaatagtgaatgctgcaaaagaggttgcactgaaagtacccgtagtagttcgt

SEQ ID NO: 146876 - DNA, 167 bp, Glycine max
gggatgggaacaaacatgtacccatcttcttcattgcttggtcaaagcaaggatgctgctgtttcagcagttccagttgatgaattgattgagaaggctgatggatttgctggagtatttcctgaacacaaatatgaaattgtgaagaggctgcaagagaggaagca

SEQ ID NO: 146877 - DNA, 169 bp, Glycine max
gtcaagttcttgctatcaacgagatttttgagaagaacccaaccaagattaagaactacgggatatggttgcggtatcagagtaggactggttaccacaacatgtacaaggagtaccgcgataccactctaaacggttcagttgaggcaatgtacaatgagatggcttc

SEQ ID NO: 146878 - DNA, 165 bp, Glycine max
caacaactcactcactaagctaaacaatttcatcaagcctgccatggcttcctcgtgtgcttcctctgccattgcagctgttgccatctccacaccaagttcccagaagaatggatcactcttgggaagcacaaaagcttcttttcttagtgggaggaaactgaa

SEQ ID NO: 146879 - DNA, 165 bp, Glycine max
gtttctgagtaatggcttcgtcgcgagtagatctggatgggaaccccataaagcccatcaccatttgcatgattggcgccggtggcttcattgggtcccacctctgcgagaagctcatgtcggagacccctcacagtgtcctcgccttggatgtctacaatgaca

SEQ ID NO: 146880 - DNA, 165 bp, Glycine max
ggccggtcggctctccgaaccctacaagggcattggagattgctttggcagaacaacgaaagacgaggggcttgtttcattgtggagagggaacactgctaacgttatccgttacttcccaacacaggccctgaactttgcatttaagactaatttaagaaagct

SEQ ID NO: 146881 - DNA, 161 bp, Glycine max
acgagaccgacctgatctttcagctcctgaaagcttgcaactgtatcttgatacaagatttgagcagctgaaaattgctactgaacttggactctggcaggaagccttcagatcagtggaggatatacatggactgatgtgcttagtcaagaaaacaccct

SEQ ID NO: 146882 - DNA, 163 bp, Glycine max
gtaagctcccaagcagtgggaggaggctcgggactctgaccgcgtgcctgttgaagaatgagccggcgactcataggcagtggcttggttaagggaaaccaccggagccgtagcgaaagcgagtcttcacagggcaattgtcactgcttatggacccgaacct

SEQ ID NO: 146883 - DNA, 163 bp, Glycine max
gtgaatgcgtataaaaggaaaataaagaaattagcgtcaaaatgttgggtgtgttcagcagctccatagtgtcgccgccggacgagctcgtggccgccggcagccgtactccgtcgccgaagatgacggcggcggcgctgcggaagcggttcgaggagaagaa

SEQ ID NO: 146884 - DNA, 159 bp, Glycine max
ataaaaataatatatataaggtacaaatagtaaatcgaggtacccattttatgataaactttccttccatttttgttcctctagtaggcctagtatttccggcaattgcaatggcttctttatttctttatgttcaaaaaaacaagattttttagatac

SEQ ID NO: 146885 - DNA, 157 bp, Glycine max
ggcttatggtggatacctaggcacccagagacgaggaagggcgtagtaagcgacgaaatgcttcggggagttgaaaataagcgtagatccggggattcccgatataggtcaacctttcgaactgctgctgaatccacgggcaggcaagagacaacct

SEQ ID NO: 146886 - DNA, 156 bp, Glycine max
ggccacgatcctgctcctgttcacggtcttcgcggtttcatcggccctagacatgtcgataatctcgtacgacaacgcccacgccgccacgtcgcgcagccagtgagctgatgtccatgtacgagcagtggctagtaaagcacggcaaggtgtaca

SEQ ID NO: 146887 - DNA, 160 bp, Glycine max
aaaaaaaacaactttgctgacatatatttgtttggtcagaagagtcctccgaatattctggtcttatattggtaattgttttcaatattttaaaaataaaaatagcgaagagaggataggctcattacataaaaaattggtaaatttcccataagtaatt

SEQ ID NO: 146888 - DNA, 160 bp, Glycine max
agaaaattaaagtgtttgaatgtgattcaataataaatgaggatcgtgatatccactatccagttgtggagatggctagcaggtcaaagttaagcagtatatgttggaatacatacatcaaaagtcaaattgcttcaagcaactttgaaggtgttgtaca

SEQ ID NO: 146889 - DNA, 163 bp, Glycine max
ctacgagattacccgatgggctcctctccctccggcgactacagacttcacggcgggtgcggcgcttggggtgttttcttcacgggattgtttgcgaagaaagtgtacgtggaggagatttacggtgttggaaggccgttcggggctttgatgggtggcggag

SEQ ID NO: 146890 - DNA, 161 bp, Glycine max
tgcaattgaagttgaagtcttgcccttctctcttcaactccaaacacgagacatcatcatccatggctgcctccgtctccactgtcggagctgtcaacagagctcttgtgaacctgaatgggtctggacctggggtttcagctcccagttcatccttcttt

SEQ ID NO: 146891 - DNA, 259 bp, Glycine max
ctcagtgaaagagaatccgaggcgaagagaagagaaaaattaagatggaggggaaggagcaggatgtgtcgctgggagcgaacaagttcccggagagacagccgattgggacggcggcgcagagccaagacgacggcaaggactaccaggacccgcgccggcgcaactggttgacccgacggagtttacgtcatggtccttttacagagcagggatagcagagtttgtgggcacttttctgtttctatacatcactgtc

SEQ ID NO: 146892 - DNA, 251 bp, Glycine max
gcaatatttgcccttagcagtaacaaaattgccgtggtcaagtattctctgttgggttctattctttcaaaccttcttctggttcttgggacctctctattatgtggtggcattgcaaacgttggagtggaacaaaaatatgatagaagacaagcagatgtgaactcacttatgctgttgttgggattgttgtgctacttgcttccaatgctgtccaattccagtggtgcctcagctgctctcactgtaga

SEQ ID NO: 146893 - DNA, 252 bp, Glycine max
caaggctctactctactgcttcaccttctgctctagaaaattcagtggtgatacatggcttcggctactctctctgtagccaaaccagcccttcaggcaaatgggaaaggcttctctgaattctctggcctccgcagctcatcaggcttccttcccttttctagaaaatcttcagaggatttccattctgtcagtgccttccagacctatgcagttggaagcagtggaggatacaagaagggtgtgacagaa

SEQ ID NO: 146894 - DNA, 246 bp, Glycine max
gaaacaccaaaatacacaaaggattagtaacgtatatttttaaaaatatccaaaagaacatttatatttatgtataatagaaaaagaatactaattggggctttccgttggtagaaaaaataaggcagtactccccagaattccgatccagagtatacttccatccaccgattaaataaataactatcagaaacgaaataatcctttaatttttggaagtccccttttattttacttacacaaaaa

SEQ ID NO: 146895 - DNA, 242 bp, Glycine max
ttcaagttcaagctggtgaaatcttggattagtgctcccactctcctatctggtataggacttcgtgggtagacttttctatttctctcctttctttcactctcttcttctcactgatccgcattgccgttcaaagtggtcttatttgaaaaacacttgggcgttggtgcaaatgtttgcttcgttaattttctctggggacaacaggctcactgagaaaacaatttttacttgcagagatt

SEQ ID NO: 146896 - DNA, 238 bp, Glycine max
cggtgatccgtatccttttgatggtccaggtgggatattgggccatgcattcgctcccactgatgggaggtgccactttgacgccgacgaatattgggtggcgtctggcgatgtcaccaaatcgccggtgacaagtgcgtttgaccttgaatctgtggcagtgcacgagatcgggcacttgctcggattaggccactcgtcggacctaagagccatcatgtatccttctataccacct

SEQ ID NO: 146897 - DNA, 235 bp, Glycine max
  unsure (1)..(235): unsure at all n locations
ctanatgggtcctcagttggcagatgcaaaggatgtaatgcaagcagttcataacctgggaggcattagattgccagttctgactcctaatttaaagggttttgaagctgctatagcggctggtgcgagagaagtagctgtttttgcatcagcttctgaatctttctcaaaatcaaacattaattgtagtattgaagagagccttgtccgctatcgagctgttactcatgcggct

SEQ ID NO: 146898 - DNA, 239 bp, Glycine max
agaagatgctgctgctcatgatcatgttcacaccaccagtgccactgcttctcccaaattctcacatgcttcttctgctgctagggttattaacttcaagaagaaaaagcaggactgggagattgatccttctaaactcatcatcaaaactgttatagctcgtggcacttttggcactgtccatcggggtgtctatgatacccaagatgttgctgtgaaattgttggactggggggaag

SEQ ID NO: 146899 - DNA, 182 bp, Glycine max
tccggctcgagcactcatcttagacgacattgacctacacctcttccatttctcttactttctcagcctatttcgattacccatttggttatttcgccctaatggctcttgctccatccaaagtttccaccttttctggtttttctcccaaacccagtgttgggggtgctcagaaaaaccca

SEQ ID NO: 146900 - DNA, 250 bp, Glycine max
gttacgcatgcgcaaggagttcataatgtagcaggagagaagaaccatgatgcgtacaattcttatgagttttttgatgcacacctaacctctctcggctgggaacaggttaataatctgcgaaacacgtgaaggcaagtggactttccaaaaatattgaacttgttgtcatttcccccttattaaggaccatgcaaacagcagttggagtctttggtggtgaagcatacactgatgggattggtgagcc

SEQ ID NO: 146901 - DNA, 251 bp, Glycine max
tgtccatccaaaccttaaaaagattcagtgaagaacaacgttaatggcatctcttggtgtgcaagcagttcatcctcctccattaacatccacctccgacccacctcctctttttgatggcaccaccaggttgtacatcagttattcttgcccctatgcacaacgtgtatggatcgctcggaacttcaagggactaaaagacaagatcaatttggtccctataaaccttcaagacaggccagcttggtata

SEQ ID NO: 146902 - DNA, 248 bp, Glycine max
atcaagcaaacgataagaaatgttatcagaaacattggccatccctgcagtactccttgtaatactcattttgattctatcctctgtcttgttccatcttcaagatgaaagaacaaatgcaccaggtcctaaacccctcccaattattggtaaccttcacatgctggggaaactcccacatcgttcccttcaagcccttgccaaaaattatggacccataatgttcataaagttgggacaagtcccaa

SEQ ID NO: 146903 - DNA, 250 bp, Glycine max
atggagtacataagaagacaccacaggcacgagcctggtgagaatcagtgtggctctgcgctcgttaagcatataagagcaccggttcctcaggtatggtccttggtgaggaggtttgatcagccacagacgtgcaatccatttataagtagatgtgttgtaaggggaaaccttgagattgggagtctgagagaagttgatgttaaatcagggcttcgtgccgactacaagtacagaaagattggagctc

SEQ ID NO: 146904 - DNA, 247 bp, Glycine max
cttctggttggtttgggtgtgggcatagcttctgtcactgctcgcgtttatattgcagaagcatcaccttccgaaataaggggttcattagtcagcacaaatgtcctcatgataaccggtggacagtttctttcctatcttgttaacctcgcttttactggtgttcctggtacttggcgatggatgcttggtgtttctggtgtgcctgctgttgttcagtttgttctcatgctcttcctccctgaat

SEQ ID NO: 146905 - DNA, 248 bp, Glycine max
cttggttcttcgtctccgtggtgggatgcaaatctttgttaagaccttgacgggaaagacaatcacccttgaggtcgagagctccgacaccattgacaacgttaaggctaagattcaggacaaagagggtatccctccagatcaacagaggctgatctttgctggaaagcagcttgaggatggccgtacccttgctgattacaacatccagaaggagtccactcttcatttggtactccgtctacgtg

SEQ ID NO: 146906 - DNA, 241 bp, Glycine max
tggaaacaggcatagcatgctacactcgcgggcctttcctgcctagtgtttcttccaagcactctccaccctccatctctccatcttttggcttgaggagtctgaaatcgagctctttatttggagaatctctaagagtggcatccaaatcaacactaaaggtttcaaagacaaagaatacttcactcgtgaccagatgtgaaattggtgacagtctggaagaattcctcacaaaagcaac

SEQ ID NO: 146907 - DNA, 244 bp, Glycine max
gcccaggtcatcgtcctcaaccaccctggtcaggtcggtgccggttacgcaccagtcctcgattgccacactgcccacattgcttgcaagttctccgagctcctcgagaagatcgaccgccgtaccgtgaaagtctgttgagaactctcccaagttcatcaagtctggtgacgctgccatcgtcaagatggttccctccaagcccatgtgcgttgaggctttcactgactacccccctcttggt

SEQ ID NO: 146908 - DNA, 149 bp, Glycine max
atgatatccaattttggaataaaaataaatctatggaaggactctctgcaaagaccgttgttgtgagctttgcttgtcagcttattatcttcctttatctgcttgacaatgacacctcttggatgattcttgcaagctcggaaagtggg

SEQ ID NO: 146909 - DNA, 250 bp, Glycine max
tgtcaggggatacacagcacctgagtatgcactccatggtcaattatcaaaaaaggctgatacatacagctatggaattgtagtgctagaaatcataagtggtcaaaagagtactgatgtgagagttgatgatgatggtgaggaagagtcccttcttcgacaagcatggaagttgtatgagagaggcatgcacttggagttggtggacgaaaccttgaatgataactatgatgcagaagaagtgaagaaa

SEQ ID NO: 146910 - DNA, 147 bp, Glycine max
tggccttctgtcctcaaaatatcccttccctgctttctctgtgtcccatatgtggttacttccatgattgcagacacaaccattctgtggaagccatgagcaaaacttgcatgttgtctccctttggatggaccaaggaccaaggac

SEQ ID NO: 146911 - DNA, 245 bp, Glycine max
tacaactacaaaggttgctgtaggagataagatattgaagtagtgctaagtgcctaacacctgcagtgaacaatggcctctgcatcagcatctcttctcaagtcttcacttgttcttgacaagtctgagtgggtgaagggacaaacacttcgccaaccttctgctgcatcagttgtgagatgcaaccccaccaccccatcaggcctcacaatcagagctggttcctatgctgatgagctcgttaa

SEQ ID NO: 146912 - DNA, 238 bp, Glycine max
agaatgcctctttctatagggggaggagctggtgcaaagaatgctattctcatgaatatgccaaatgctgttctttcaatgtggagatattttgttggagatctcgtctttgaagtttctaagatgacttctccctacattaaatgtacagtctctttcttcatagcatttggaaatttggctgatgacaccatcaattttgaggcttttccccacaagctggtgcagtttggagaga

SEQ ID NO: 146913 - DNA, 238 bp, Glycine max
gcagcttttcagatagtaaacgatgagttgatgttggatggtgcaccaaggctcaacttggcttcgtttgtgaccacttggagtggagcctgagtgtgacaagctcataatggcttcacttaacaaaaactatgttgatatggatgagtatcctgtcaccactgagctccagaaccgttgtgttaatataatagcaaatctattccatgctcctataagtgaagaggagactgcagta

SEQ ID NO: 146914 - DNA, 239 bp, Glycine max
acgagagctgcatgcagttcttgaaggacatggaagtcatccaggtccctacctttctcttcatcagagatggcaacattgaaggcaggtacgtcggttctggcaaaggggagctcattggggaaattctcaggtaccaaggtgttcgtgtcacttattaattttcttactacacatacttatttctacttctattaagttcagctcaacaaacacatgtttactaaactttctgagaa

SEQ ID NO: 146915 - DNA, 241 bp, Glycine max
tccgtccatgccatgcagccaaatatgggccaaggagggtgcatggctattgaggacagttatcaacttgcatgggagttggagaatgcatgggaacaaagtattaaatcagggagtccaattgacattgattcttccctaaggagctacgagagagaaagaagactacgagttgccattattcatggaatggctagaatggcggctctcatggcttcgacttacaaggcatatctgggtg

SEQ ID NO: 146916 - DNA, 252 bp, Glycine max
ggctgaagacagtattggtccagaagtagaaaagttggtggcttctcttccagatggaggtgttcttcttctagaaaatgtgaggttttacaaggaggaagaaaagaatgatcgcgagcatgcaaaaaagcttggcctctctggcagatctgtttgtgaatgatgcatttggtactgctcacagggcacatgcatcaacagagggtgttactaaatacctgaagccatctgttgctggttttcttttgcaaa

SEQ ID NO: 146917 - DNA, 248 bp, Glycine max
ttgataagatccttccatctagcagcaccttaggatggcatagccttaaagttaagggcgaggttcaaacgaagaaaggcttatggtggatacctaggcacccagagacgaggaagggcgtagtaagcgacgaaatgcttcggggagttgaaaataagcgtagatccggggattcccgatataggtcaacctttcgaactgctgctgaatccacgggcaggcaagagacaacctggtgaactgaaaca

SEQ ID NO: 146918 - DNA, 245 bp, Glycine max
aggaactatacctgaatctgaaatcatcagacacatgggttgctgaatacaggaagtggatggacaaagcggggcatggaatgccatatcattttggtcacagcactatctctttgcctaaagagcctgctgtggttgaacatgctcctgcgggactcgtcgcgggacaatcagcttcttcacctaccaaggggggcattggtacaatgcatgccccaaatttcgccaacagatattttaggcat

SEQ ID NO: 146919 - DNA, 241 bp, Glycine max
gtactacaaagctactgcttgcaatcccacccatattgaaatttgctgaaatgctttccctcaatgttagatctgtgaattacaccaggggaagtttcatctttcccggtgctcagccctatccccatcgcaacttttctgaggaagttgctattcttgatggctactttggcaagcttagtgcaggaagcaatgcttatattttgggtggccaagacaaatcacagaactggcatgtcta

SEQ ID NO: 146920 - DNA, 236 bp, Glycine max
gtgatcttgtcatccgacctttgccatgacaggtgcgcttgcttggcaggtcaaaatatgttaataaaaaaagttttattggtttagggagagatcgcacgggagttgcccggggtctctctctcgtgtggtgtgtggtgttcgctgtgctctccttttcgttatgccttttattattacctatctgtcgctccactccgtattacgactctggatcagagggatacatcagagga

SEQ ID NO: 146921 - DNA, 237 bp, Glycine max
acaaacaaagaaaaacaaaaaacccttagccaacacaaccatcatggccacctctgctattcagcaatcagcattcactggtcaaactgctctgaagcagctcaatgagttcgtccgcaagaccggtggcgccggcaaaggtcgcactaacatgcgccgcaccgtcaagagtgctcctcagagcatttggtatggccctgaccgtcccaagtacttgggtccattctcggagcagat

SEQ ID NO: 146922 - DNA, 137 bp, Glycine max
gaccaccactcactcctacaccggtgaccaaaggcttcttgatgcgagccaccgtgacctgaggcgtgcaagggcagcagcactcaacattgtccccacttcaacaggagcagcaaaggcagtggcccttgtcctcc

SEQ ID NO: 146923 - DNA, 246 bp, Glycine max
gtttttcattgtgcattattcaatggccaccacagcagctctatccggaaccatggtgagcacctccttcatgaggaagcaacctatgacgaccaagagcctaaagacattccccaacgctctttttggtctgaaaggtggacgaggtggtcgtgtaacttgcatggcctcgtacaaggtgaagctcataaccccagaaggagaagtggagtttgaatgcccagatgatgttttcattgttgacaa

SEQ ID NO: 146924 - DNA, 244 bp, Glycine max
gctatgcaatcaatccttgcaaaccctatgatccgcatttccagcgggtctagggagaaccattttggtgttcctgcttatcacatgagaaggaatgttggcctgagagttaggtccatggctgaggaagagcaaccaagtcagcctgcgaccccagttacaccaccaccagcagaacccaaaccacagccagtctctactccttcaccaaaggtgagcaccaagttttctgatgtgttggcgt

SEQ ID NO: 146925 - DNA, 243 bp, Glycine max
attggaatggacttgtggaatgcatcttctggtggcgctgaagctgcaaaaatgagacataattcaatctggtgccccgggagttgcccttggtgatcaatgggtacaagatgaacgtgagctgaaaagacagaagaggaaacagtcaaaccgagagtcagccaggaggtcaagattacgcaagcaggctgagtgtgaagagttacaaaagagggtggaatcgctgggaggtgagaatcaaac

SEQ ID NO: 146926 - DNA, 242 bp, Glycine max
gatcttctaagaatggtagtgattttgatagtgctcgttctgtgtttcttgaacggacatcctcatcaaattcccggaggagttctataaatggttctgccaagcatgcctacagtagtttcaacagaagtcatcgtgacaaggaccgtgacagagagaaagatagatccagttttggagatcactgggactgtgatggttctgacccattggccaacctctttcctggaaggatggagagg

SEQ ID NO: 146927 - DNA, 234 bp, Glycine max
cgcaaattttctcccccaaatcgtagatctacggttaaattggtgtagtgtggtaagatgggaggaggatttagagtgcttcacttagttaggccatttctctcgtttcttcctgaagttcaaactgctgacaggaaagtgccatttagagagaaggtcatatacactgtgatctctcttttcattttcctggtttgtagtcagctccctctatatgggatacactcaacaaca

SEQ ID NO: 146928 - DNA, 235 bp, Glycine max
gtgaagtatagaaaagaataattggaaaatctaataggagatggaaaaggagagcgcaaggaatatgataggatctatgattatgatgtctataatgatttgggtaacccagacaagagcaatgatctagctcgtcctgttcttggagggtctagtgcctatccatatcctcgcaggggaagaactggtagaaaaccaacaacaaaagactctaagagtgagtcaccatccagca

SEQ ID NO: 146929 - DNA, 235 bp, Glycine max
cttctcttgcggctagggttttagcgcagcttcttctagatttagggaagatgggtaaggaaaaggttcacatcagtattgtggtcattggccatgtcgactctgggaaatccactaccactggtcacctgatttacaagcttggaggcattgacaagcgtgttattgagaggtttgagaaggaagctgctgagatgaacaagaggtctttcaagtatgcctgggtgctggacaa

SEQ ID NO: 146930 - DNA, 237 bp, Glycine max
cagattagtaccacaaaaatggagaaatagaataactgaatatcgtatagctcagaataaagatttaaccaaatgcaattcatatgaaaaaagccaattaattctttacaaagaacaacaagtaaacgcattaaaaaaaggaattagaaaacagtatggatacgatcttttatcctataattttgtcaattatgcagataagaaagactcgtatatttatggatatagatccctatt

SEQ ID NO: 146931 - DNA, 238 bp, Glycine max
ggatgcaccttttgctgagttgtgctcacactgtgagaaggaagctgtgaatgtttcccttggaaaccttctaacatacccatttgttagagatggcttggtgaacaagacattgtcactaaaaggaggatactatgactttgttaagggatcttttgagctctggggccttcagtttggccttgcatcctctttctccgtatgaacatcaaccattatcaatgacctcatcttggtt

SEQ ID NO: 146932 - DNA, 238 bp, Glycine max
gggagctctaggaactctaaagagttgcttgaacaacgagttacatcaacgtactgtcagtgctaatattggcatgtttgggacgatgaaagaaaaaataactgattagtctttctattataaaatagagtataggcattatcgtgttcttctagcgaaataaaattaagaaattttcatggtaaccattcgtgcaggtgaaattagtgaaattatccgtgaacgcattgagcaatat

SEQ ID NO: 146933 - DNA, 238 bp, Glycine max
caaaatgcccacttttttttcttccaacgctcctcctcgttctcatagccttcgccacctctgtctccggccgccgtgacctcgtcggagactttctccggctgccctccgaaactgataacgacgacaacttcaagggcacccggtgggccgtcctcctcgccggttccaatggttactggaattacagacatcaggctgatgtttgtcacgcctatcaaatattgaggaaaggtgg

SEQ ID NO: 146934 - DNA, 232 bp, Glycine max
gtctgagaaagcatctgatgcattctataggcttaccaacacaagggagcagatccaatcatatgtttttgatgtcatcagggccagtgtaccaaagttggagttggattctgtctttgagcagaaaaatgatatagcaaaggctgtggaggaggagcttgagaaggccatgtcaacctatggatttgagatagttcagactctcattgttgatatagagcctgatgttaat

SEQ ID NO: 146935 - DNA, 233 bp, Glycine max
cagattagtaccacaaaaatggagaaatagaataactgaatatcgtatagctcaaaataaagatttaaccaaatgcaattcatatgaaaaaagccaattaattctttacaaagaacaacaagtaaacgcattaaaaaaaaaaattagaaaacaatatagatacgatcttttatcctataattttatcaattatgcagataagaaagactcatatatttatggatatagatccc

SEQ ID NO: 146936 - DNA, 232 bp, Glycine max
ggatattgctgaacttgtcacaatggaggctggcatcaatgtgaagaggctacattcagctgaaggtgcagaaattttaccacgtcctgcagttgtaacagtgatgggtcatgttgatcatggtaaaacttctcttcttgacgccttgcgtcaaacatcagtggcagccaaggaagccggtggcataactcaacatataggtgcttttgtggtggccatgccatcaggagca

SEQ ID NO: 146937 - DNA, 237 bp, Glycine max
  unsure (1)..(237): unsure at all n locations
ctcgagccgaatggccanagactacggagaagttgagttgtttggtgtggggggaagccatttgccagaagggtgcagattgccctggaactgaagggagtccaatacacttactttgaagaagatcttaggaaacaagagtgatcttcttatcaaatacaaccctattcacaagaaggtacctgtgcttgtccacaatggaagaccattggctgagtcccttgtgatccttgaata

SEQ ID NO: 146938 - DNA, 242 bp, Glycine max
gggagccagaatgtcagccaccgcagcctccagctacgcggctgccctggccgacgtggctgccgcgaacaacacgctcgacgcgacaaccgcggacatcgagaaaatcgacgagatattctcggaggcgcaggtgtcggactacttcgccaaccccaccttggccgtggagaagaagcggaagctgatagatgagattgcggaatcttcggggttccagccccacacgagaaacttcctct

SEQ ID NO: 146939 - DNA, 277 bp, Glycine max
ttgcaattgaagttgaagtcttgcccttctctcttcaactccaaacacaagacatcatcatccatggctgcctccgtctccactgtcggagctgtcaacagagctcttttgaacctgaatgggtctggacctggggtttcagctcccagttcatccttctttgggagcagcttgaagaaggttattggctcaagggtccccaacacaaagatttcctctggaagcttcaagattgttgctgtagaagagaagaaagagattgaagagacccagcaga

SEQ ID NO: 146940 - DNA, 258 bp, Glycine max
cttcctatttgtaggccatttatggcacgcgggaagagctcgcgcagctgccgcaggatttgaaaaaggaattgatcgagattttgaaccagttctttccatgactcctcttaattgagacatgagatcctatgaagtagaaatcacttttattttactataaatattactataaatattgggttgaattgagcgggtcgtatttaaataagaatttcttttcctttgttcttagtttctatcgaaaaaaaaaagatt

SEQ ID NO: 146941 - DNA, 257 bp, Glycine max
ttacaccgcgcgctgtaaatctgagtatcagacaacttcccctcaccaccacataacctcaaacaacacaacaccgccaacatgggtaaggagaagatgcacatcaacgtggtcgttatcggccacgtcgattccggaaagtccaccaccaccggccacttgatctacaagtgcggtggtattgacaagcgtaccatcgagaagttcgagaaggaagccgccgaactcggtaagggttccttcaagtacgcatgggt

SEQ ID NO: 146942 - DNA, 256 bp, Glycine max
atctcgagcgaatcggctcgaggaggaattgaacctgacaacttgccctacccgtttgtgactcaaggcatgctctctatacgttgctctcaaggaaggagtgcaaattcatgctcatgtttttaaggctggtcttgaggttgatgtctttgtgcaaaatggcttgattagcatgtatggcaagtgtggggcaatagagcatgctggtgttgtgtttgagcaaatggatgaaaagagtgtggcttcgtggagttcc

SEQ ID NO: 146943 - DNA, 255 bp, Glycine max
gtgggttcttcttcttctattacaacaacgtcgtccaagaccatgaccatggccatggccacgatcctgctcctgttcacggtcttcgcggtttcatcggccctagacatgtcgataatctcgtacgacaacgcccacgccgccacgtcgcgcagcaaatggcagctgctgtccatgtacgagcagtggctagtagagcacggcaaggtgtacaacgcgctcggagagaaggagaagaggttccagatcttcaag

SEQ ID NO: 146944 - DNA, 251 bp, Glycine max
tcgacctgcaatccctcccaaaggacctcatcagcagaggcatggccgtggaggaccccaccgcaccccacggcctcaagctaatcatcgaagactacccttacgccaacgacggcctcgtcctctgggacgccctcaaaacctggttcaccgaatacgtgaacctctactacgccgacgatggttctatagtgtcggacactgagctccaagcctggtgggaagagatcagaaccgttggacacggggat

SEQ ID NO: 146945 - DNA, 257 bp, Glycine max
ctcgctgaagcttcacgctctctcctacctcaacaacttggtcgacaccttctggcccgagatctccaccagtctcccgaagatagagagtttgcatgaagatgaggagtttgatcaacatcaaaggcaacttgctgcacttcttgtatcaaaggtcttttattacttgggtgaactttatgattcgtgatcctatgcccttggagctggacctctgttatatgtctcagaggattctgactacgtgcacacgcttc

SEQ ID NO: 146946 - DNA, 249 bp, Glycine max
ctcaggctgaccgttctctaggccaaaagatagcatctcgtctgagcatgaggccaaatatttaatgttgttgccaaccccagaatgattgttagagttgcagacgtgcaaagagtacgataaggatgtgattttcgatcaatttgaaagaacttatccatttcttgcaattttagttgtgtacccataactccatgcatgcaactcgttgagctatctcaataaatgccgtttgtatgtgttagtatt

SEQ ID NO: 146947 - DNA, 255 bp, Glycine max
gtttaatatagttgggtatggatgcaccacatgcattggaaattcaggggatattaatgaagctgttgcatctgcaattactgaaaatgatatagtagctgcagctgtactgtctggaaataggaactttgagggccgagttcacccattaacaagagctaattatcttgcttctcctcctcttgttgttgcctatgcccttgctggcacagtggacattgactttgacactgaacccattgggatagggaagga

SEQ ID NO: 146948 - DNA, 256 bp, Glycine max
ccctcaaccaacttttgacagaaatggatgggtttgagggtaacactggtatcattgtcgttgcagcaactaacagggctgacattcttgactctgccttattgagaccgggtcggtttgatagacaggtgacagttgatgttccagagataaggggaaggactgaaatcctaaaggttcatgctagcaacaaaaagtttgatgctgatgtttctcttgaagtgattgcgatgagaacgcctggctttagtggagc

SEQ ID NO: 146949 - DNA, 257 bp, Glycine max
tcatatcataccctttctatcctacttgctacttcccacttccattcttttcttaaccagctaggatggtgagtgttgaagagattcgtaaggcgcaacgtgcagaaggccctgccactgtcatggctattggcaccgccactcctcccaactgcgtggatcagagtacctatcctgactattatttccgcatcaccaacagcgagcacatgaccgagctcaaagaaaaattcaagcgcatgtgtgataagtcgatg

SEQ ID NO: 146950 - DNA, 256 bp, Glycine max
ctcgcagttccttgatctctcctctcaagatgcagatattcgtgaaaactttgaccggcaagaccatcacccttgaggtggaatcctccgacaccattgacaacgtaaaagctaagattcaagacaaggaagggatcccacctgaccagcagagacttatctttgcgggtaaacaacttgaggatggtcgcacccttgccgattacaacatccaaaaggaatcaaccctccatctcgtgcttcgcctcaggggtgg

SEQ ID NO: 146951 - DNA, 256 bp, Glycine max
ataacttctattcaagcagtttatgtacccgcagacgatttaaccgatcctgcgcctgctacgacatttgcacatttagatgctactactgtactatcaagaggattagcggccaaaggtatctatccagcagtagatcctttagattcaacctcaactatgctccaacctcgaatcgttggtgaagaacattatgagactgcgcaaagagttaaacaaactttacaacgttacaaagaacttcaagacattatag

SEQ ID NO: 146952 - DNA, 256 bp, Glycine max
tgatcatgacactctgactcttgatcagattgagagtaacattgttcgatgtccagacccggagtatgcagagaagatgatatctgcaattgatgctgtgcgagtgagaggtgattctgttggtggtgttgtgacatgcattgtgaggaactgtccacgaggtctcggttcaccagtatttgacaaacttgaagctgagctggctaaagctgcaatgtcattgcctgcaaccaagggctttcagtttggtagtggg

SEQ ID NO: 146953 - DNA, 256 bp, Glycine max
aaaagaaaaaaaagattctaaagaaatataactaatattctttagaataatcaaaaagaatattaaattcaaataaattttagatagaaaaaaagacttaaaaaggaggatttgaaatgcgagatctaaaaacatatctttccgtggcaccagtagtaagtactctatggttcggggctttggcgggtctcttgatagagatcaatcgtttttttccagatgcattgatattcccttttttttcattctagttatt

SEQ ID NO: 146954 - DNA, 254 bp, Glycine max
ctattgaattaactgaacaggcgggtacaaaaggagttcaagtacaaattgcaggacgtatcgacggaaaagaaattgcacgtgttgaatggatcagagaaggtagagttcctctacaaaccattcgagcgaaaatcgattattgttgctatacagttcgaactatttatggggttttagggatcaaagtttggatattttctaaataaagaaaaatatattattctttatcttaaatgtgctatattttatct

SEQ ID NO: 146955 - DNA, 251 bp, Glycine max
caaattcattttaatcctaattctgcacttcttgatcattcgatttttctcctcaagatgcagatattcgtaaaaactttgaccggcaagaccatcacccttgaggtggaatcctccgacaccattgacaacgtaaaagctaagattcaagacaaggaagggatcccacctgaccagcagagacttatctttgcgggtaaacaacttgaggatggtcgcacccttgccgattacaacatccaaaaggaatc

SEQ ID NO: 146956 - DNA, 255 bp, Glycine max
ggggattcgtggtagaggatgtgttgcacttaattacagatgatgatcaaacaaaagatgctgacacaagaattgcttttggttgtggccaagttcaaactggtgtgtttctaaatggggcagctccaaatggcctatttggacttggaatggataatatatctgttcctagcatcctagccagagaagggcttatttcaaattccttttcaatgtgttttggatctgacagtgctggaagaatcacgttcggtg

SEQ ID NO: 146957 - DNA, 254 bp, Glycine max
cttctaacttggtgcattgactcaccatctttgctttgaatcgacatggaagataaactagcaacaacaagtgaaggacaacccataagatgtaaagctgcgatttgtcgcaagccaggttctccattgagtattgaggagatcattgtggcaccaccaatgcctcgtgaagctcggattcgtgttatatgcacttctctttgtcacagcgatgttactttttggaaaatggaggttattaccatcattttctt

SEQ ID NO: 146958 - DNA, 247 bp, Glycine max
ctgaatggttctggagctggagcttcagctcccagttcagccttctttgggaccagcttgaagaaggttattgcctcaagggtccccaacagcaaggtttccggtggaagcttcaagattgttgctgtagaagagaagaaagagattgaagagacccagcagatcgacaaggacagatggaagggtcttgcctatgatatctcagacgaccaacaagacgtcacaagaggaaagggtttggttgact

SEQ ID NO: 146959 - DNA, 249 bp, Glycine max
acttacaccacttgctgaacgtgtgagcttcattacagagtaaggaacctcgatgaacttgttgcaccctttcttttctttggatgatttgttatacaacaagcttttgtttctgggttgattgctgatactttttctattttctctgttggtgattgtcccttcaaatgtcgcagacaagttgccttttacactggtcccacagttggaggacttctgaatgctacatgtgggaatgttactgagctc

SEQ ID NO: 146960 - DNA, 253 bp, Glycine max
gcttcaagttgttatgtctttccatcagtgtgggggaaatgttggagacaattgcagcattcctctaccaccatgggtgttggtagaaatcagcaagaaccctgagctggtttacacagacagatcagggaggaggaatcctgagtacatctccttgggctgtgattcggttcctgttctaaatggaagaactcctctccaagtgtactctgactacatgagaagctttcgtgacaaattcagagattacttg

SEQ ID NO: 146961 - DNA, 248 bp, Glycine max
ctttgatttgccattgaaggatgatgacagcctcacaagctgcccaccattttcagtgccaaactacatggctccaaccctttcagcccgggccaaagcacgtgctagtagtaatcctagagaaaggcttggtggaactccaactagtactgattcaaagaggaggctctcattccctttatcacaaggaattggatcattcaagtggtctaaagggttctcaagcaaggatcaaagggtgccagaca

SEQ ID NO: 146962 - DNA, 252 bp, Glycine max
cagaacatgagggatatgatccttttcttggtggaattcaaaaatatgccactcccatgatgcccctagatgaagaaattctttctaaagttgcacaagatatggttgaggaatggtttgattgtgttgatgaggaggattcctttgaggaagtttctttaagtgcagcacttaatggtgttgagggtttggactatatggaaagaattcctcttgccacatctgagggttttcctcatgtgctttcacgca

SEQ ID NO: 146963 - DNA, 250 bp, Glycine max
gtacaatcctccttggttctctgaggctattccatctgccccttatgatcctcttgttttaagacacgcctttgagcaggcagtcataaaaaggttgatgactgatgtgccttttggtgttctactctctggaggtttggactcttctttggttgcatccatcacttctcgttacttggccaacacaaaggctgctgagcagtggggatcaaagttacattcattctgtgtaggccttgagggctcacca

SEQ ID NO: 146964 - DNA, 254 bp, Glycine max
aacaaattgagcaatgaatttgtaaatagggcaaaagtaatggataaggaattaatttctctggatatattagaaaaccgaattcgattgtctaatgatgaaactaaaacaaaatatttaactaaaatatatgatcctttcctgaacggacgctttcgtggacaaatcgaaaatgttttttcaacctcaatccaatatgaaaaaaatgacaaaaaaaataccattttgataaataaaattcatggtatccttat

SEQ ID NO: 146965 - DNA, 251 bp, Glycine max
gcaggaactgggcataactgctcttcacatcaagctccgtgcgacgggtggaaacaagacaaaaacacctggtcctggtgctcaatcagctcttcgtgcccttgctcgttctggaatgaaaattggcagcatagaggatgtgacccccattccttccgatagcacacgtagaaagagtggtagaaggggtagaaggctttaaggttctcgtggtattttaatttccatgtcaaacagaattgtggcatttt

SEQ ID NO: 146966 - DNA, 286 bp, Glycine max
tacgcgtactcggcttgcggttcggctcgagtaattctcatttcttcatcgttcgattcttctcctcctaaagatgcagatcttcgtgaaaactttgaccggtaagaccatcacccttgaggtggagtcctccgacaccatcgataacgtgaaagctaagattcaagacaaggaagggatcccacctgaccagcagagacttatctttgcgggtaaacagcttgaggatggtcgaacccttgccgactacaacatccaaaaggaatccactctccagctcgtgctt

SEQ ID NO: 146967 - DNA, 248 bp, Glycine max
cgaaactgatgatattgaaaaaaaaagaattgtaaataaggttcaggttcgacttccatagagaatatagatgatattgtctataatgatagaaaaaaataaaaaactttcgaaagattttatccaattgaaattttaaaaatgactgggataaacttaagaattcaattattgaaattgaataagtaaacaatttaattggattggtcgaatggtatcaaaaaaatggagtactaactcccatttct

SEQ ID NO: 146968 - DNA, 246 bp, Glycine max
gtgaaagagaatccgaggcgaagagaagagaaaaattaagatggaggggaaggagcaggatgtgtcgctgggagcgaacaagttcccggagagacagccgattgggacggcggcgcagagccaagacgacggcaaggactaccaggagccggcgccggcgccactggttgacccgacggagtttacgtcatggtccttttacagagcagggatagcagagtttgtggccacttttctgtttctata

SEQ ID NO: 146969 - DNA, 246 bp, Glycine max
gttggagatgtgtgacagggagtggcatgcctggtgctggaaatcctgggggcatagctcctcctcctagacttgatcatgttgctgttagtcttccaggtgggagaattctaatatttggtgggtctgttgctggtcttcactctgcctctcagctttacattcttgatccaactgatgagaagcctacatggagaatcctaaatgtacctgggtgccctccaagatttgcttggggacacagta

SEQ ID NO: 146970 - DNA, 249 bp, Glycine max
gattgaattctgaaggaggagtgctgaaagtgagccctgatggtcttctccagcaaagctcaactgtagcagattcaatttctttcaaattttctgatggtataactgaatcagttccatgctcatacattgaatttgctgagcgactggtgctgccgcagtataaaaatttacctgacacagaggttaaagagttccatagaagagatggttttgaggtagcaagtgctgacaagatatttgaaagca

SEQ ID NO: 146971 - DNA, 250 bp, Glycine max
aaaaaacccacgctctgcagccgctacgttaaaacctacaaatacaccatggaaaacgacgccggtttccctctcatccccaacgtgttctccggcttcaactccctcgtggcctccgcggcacgtggctccctctccgctgcacgtttcttaacggggcagtttaaccccgctaacggcattggcctggccaacaccagcttagccttcttcgggaatcgtctcttcgcgcttggcgaatccgacctcc

SEQ ID NO: 146972 - DNA, 248 bp, Glycine max
aataaaccgaatgagagcattaacctcttcttcttccactttcattccaaagcgttattccttcttcttcttcctctccattctcttcgctcttcgatcctcgtccgggggctgctccgaatactaccaccaccacgcgccgatggccacgataggaggcttacgcgactcccaaggctctcagaacagcgtccaaaccgaggccctcgctcggttcgccgtcgatgaacacaacaagaagcagaatt

SEQ ID NO: 146973 - DNA, 248 bp, Glycine max
gtaaagaaagaaagagaagagaagaatcgaagacgaagatggaggacgcatcagcatcaaagttcattccacaccaaatcggaggggtccaaaacgacgcgcttcgattcggtctccatggagtcaagagcgacatcgttggttctcaccctcttcaatcttcactccaatctacaaggagaatggatgaagcgatgaagaggcaatgcaaagttaacctgtacggaactgcttttcccatgaaggag

SEQ ID NO: 146974 - DNA, 250 bp, Glycine max
ataagaataatatatataaggtacaaatagtaaatcgaggtacccattttatgataaactttccttccatttttgttcctctagtaggcctagtatttccggcaattgcaatggcttctttatttctttatgttcaaaaaaacaagattttttagatacagataacaaagtaaaattctggggttttttattccccaattataatactaaattcaaaaaaaggagagtaatgagtataatctttcgctca

SEQ ID NO: 146975 - DNA, 241 bp, Glycine max
cggagctcttcttctgtttttcatcctcttcaccctgctaggagccattggaggtttaggtgaccgtggaaaatttgttgatgacgaacctactactggaggtgttattcctccaggcaaaggcttcagggaagctcttggtcttggttcaggtcctttatttggattcacgaaagcaaacgagctatttgtgggaagattggctcaattgggtttcgttttctcattgattggagaaatt

SEQ ID NO: 146976 - DNA, 249 bp, Glycine max
gccgaaagcatcactagcttacgctctgacccgagtagcatggggcacgtggaatcccgtgtgaatcagcaaggaccaccttgcaaggctaaatactcctgggtgaccgatagtgaagtagtaccgtgagggaagggtgaaaagaacccccatcggggagtgaaatagaacatgaaaccgtaagctcccaagcagtgggaggaggctcgggactctgaccgcgtgcctgttgaagaatgagccggcgac

SEQ ID NO: 146977 - DNA, 245 bp, Glycine max
gaattttacaattccaactgaagcaagtgatttcagttcatggagaaatcttcccaacacggactttgagcttgagaggccacctcccccaatcaagaatggtcctaatgcacacccgaagaagctgcttaatggatctggacttaacggatctggtcttaacggatctggtcttaatggatctggacttcacctatctaaccacagtaatggtgatgggttggacctctctcctgtcagcagca

SEQ ID NO: 146978 - DNA, 249 bp, Glycine max
attaccaagaacttcatgaccctgcccaacatcaaggttcctctcattcttggtatctggggaggcaagggacaaggaaaatctttccaatgtgagcttgtctttgccaagatgggaatcaaccccatcatgatgagtgctggagagttggaaagtggaaatgcaggagagccagcaaaactgatcaggcagagataccgtgaagccgcagacttgatcaagaagggaaagatgtgtgctctcttcatc

SEQ ID NO: 146979 - DNA, 249 bp, Glycine max
ggtcaattgaccgaggcagttcggcgtcgtccttacactgttgtactgtttgatgagattgagaaagcccatcctgatgtgttcaacatgatgcttcagatcctggaagatggaagactaacagacagtaagggcagaacagtggatttcaagaacacacttcttataatgacatcaaatgttggaagcagtgtgattgagaaaggaggccgcaaaattggatttgatctggattacgatgagaaggat

SEQ ID NO: 146980 - DNA, 257 bp, Glycine max
ccaaaacaaaacttcaatttctgtttcagttcgcggagatcaatattttatctaggtccatcgtcgatagaagatacgagaaaccaaaggcaatgtttttgtgggattggttttatgggattctagcgtcgctcgggctgtggcagaaggaggccaagatcttattcttgggcctcgataacgctggcaaaactaccttgcttcacatgctcaaagatgagagattagtccagcatcagcctacccagtatcctaca

SEQ ID NO: 146981 - DNA, 255 bp, Glycine max
aagatgctgacctctcttcatcttctggacatgattctcaaataccaaacccccatctagcaaacgggcaaccgatgtctggtgagtttccatgtgctacttctgatgctcaatctatgcaaactacatctataggtcaatccgaaaaggttcactcactttcatatgctgatccaaagcaaccaggtcctgagagtgatgaagagataagaagagtgccagagattggaggtgaaagtgccggaacttcggcct

SEQ ID NO: 146982 - DNA, 254 bp, Glycine max
gagactacatgaagcaaaatgttcaatgtccagaagcaaattatccaacatttctttatgcaatgcccatgtcccatacaaaagtgttctttgaggaaacctgtttagcatcaaaagatgctatgccttttgatttactaaagaagaagctcttttcgagattaaatacaatggggatcagaattaagaaaacttatgaagaggaatggtcttatatcccagttggtggatccctaccgaacacagaacaaaag

SEQ ID NO: 146983 - DNA, 251 bp, Glycine max
gtcactttaatatttttgtcggtgaccttagtcctgaggttacagatgccacattgtatgcttgcttctctgtatatcctagttgttctgatgcaagggtaatgtgggatcagaagacaggccgttccaggggatttgggtttgtttcttttcggaatcagcaggatgctcaaagtgctataaatgatttgactggaaaatggcttggaagtagacagattcgttgtaattgggcaaccaaaggggccagt

SEQ ID NO: 146984 - DNA, 252 bp, Glycine max
atccaattgaaattttaaaaatgactgggataaacttaagaattcaattattgaaattgaataagtaaacaatttaattggattggtcgaatggtatcaaaaaaatggagtactaactcccatttcttatttattattgaattaaccgatcaacttgctttgttatcgaacatttctttttgatttcaaaaattttccggaaaaaatttgaatctatttttatatgcgaatcaatcctactacttctggtcc

SEQ ID NO: 146985 - DNA, 250 bp, Glycine max
taatgataatcatgtcattgctggtgcattactgggagttggaattgtgaattgtagtatcaagaatgactgtgatcctgcaatggcacttctaggtgactatatagataaagaagacacttcaatcaggattggtgcaattatgggtttgggaattgcatatgctggttcccagaatgagcagttacgggagaaattgacaggtgtactgaacgattctaaagcttcacttgaggtgcttgcatttgct

SEQ ID NO: 146986 - DNA, 251 bp, Glycine max
caaaagggggaaatagttatgaaaggagaagtgcgttattttgagttgaagcagcttattttgctgtcctattgccaagctataactttctaccttctcctcaagtctgaagggcagccagtttatgatcatcccataatagctcgccttgaagagatcaagaaattattggatcagataaaacaacttgacacaaaacttccatttgaacttgaggacattcttaaaggaaataatgggttagaaacagt

SEQ ID NO: 146987 - DNA, 252 bp, Glycine max
gttctaagaaaaaatagcttcaggtctggtattcctgctgaattgagttcatactatcagcttgagcgattggatatttcatcaaattcatttgtggggccttttcagccaggattgttgtcacttccttctattacttatctgaatatttctgggaacaaattaaccgggatgcttttcgagaatctttcttgcaattctgagcttgatgtagtggatttatcctcaaatcttttgactgggagcttacct

SEQ ID NO: 146988 - DNA, 249 bp, Glycine max
aaacgattagtcgttaggttggacaatttggtatatatagcttttggttattctgatggaattatgtgtggtacctgtgttggaagtgtaattgataaaacgtgttgtttatgttggtgtgattggcaataggtgcctacaagtatgtttcagagctatggcgcaagaagcagtctgatgtcatgcgcttcttgcagcgggtgaggtgctgggagtataggcagcaaccttccattgttcgtttgacaa

SEQ ID NO: 146989 - DNA, 247 bp, Glycine max
ctcgagcgctcgagccgcaatggaatacactattgtagtagctgaaacagcggattctccagcgacattacaatacctcgccccttatacaggagcagctctggctgaatattttatgtaccgtgaacgtcacactttaatcatttatgacgatctctccaaacaagcacaggcttatcgccaaatgtctcttctattacgaagaccacctggtcgcgaacttatccaggggatgttttttatttac

SEQ ID NO: 146990 - DNA, 250 bp, Glycine max
aatgcagttgctttgcctgctggtggaagaggagatgaggaggaacttgccaaggaaaacaacaagagtgcctcatcatccaaggggaaaatcaccttcagtgtcaccaagaccaagcctgagaccggcgaggttatcggtgtgttccagagtcttcagccgtccgacactgatttgggagcaaaggctccaaaggatgtcaagatccagggtatctggtatgctcagcttgagtcatagagtgtttttt

SEQ ID NO: 146991 - DNA, 248 bp, Glycine max
cgtgaatgcgtataaaaggaaaataaagaaattagcgtcaaaatgttgggtgtgttcagcagctccatagtgtcgccgccggacgagctcgtggccgccggcagccgtactccgtcgccgaagatgacggcggcggcgctgcggaagcggttcgaggagaagaacccctccgccgtgtcggtggaggtcggagagcatgtccagctcgcttatacccaccacaacgagtcgccgtttcagcccagatc

SEQ ID NO: 146992 - DNA, 274 bp, Glycine max
tagtcaacaacagctgactctctgtactcggctactgtgagcgttttacgctactgtcagctacacttctacattacatagtcatttccagccgttacataggaacatgataagcgtgtggggtaacacgcccttggcgacggtggatcccgagatccatgacctcatcgagaaggagaagcgccgtcaatgccgcggaatcgagctcatcgcctccgagaacttcacctccttcgccgtcatcgaggccctcggcagcgctctcacgaacaaa

SEQ ID NO: 146993 - DNA, 246 bp, Glycine max
tcaacccatactccatggaatggactggtttggccaatagattactgagtaagggcaacgatattctgtgttgcgattatgctagttttgatggtttgattaccaagcaagttatgagcaagatggcagaaatgataaacagtctttgtggtggtgatgaaaaattgatgcgtgaaaggacacacctgctgttggcttgttgttcaagaatggcaatttgtaagaaagatgtttggagagttgaat

SEQ ID NO: 146994 - DNA, 244 bp, Glycine max
gcaaaatctgcacaaaagttatgggcaaagaccccactatggaaacgtgctgagcttcttcacaaggcagctgctatccttaaagagcacaaaactccaattgcagagtgcctggtgaaagaaatagcaaagccagccaaagatgctgttatggaggttgtaagatctggggatctggtttcttacactgctgaagaaggtgtaaggattctgggagagggaaagttcttggtgtcggatagct

SEQ ID NO: 146995 - DNA, 248 bp, Glycine max
gaatagttgaaaatggggctgtctttcacgaagctgttcagccggctctttgcgaagaaggagatgcgtattcttatggtgggtctcgacgccgccggtaagaccaccattctctacaaactcaagctaggagagatcgtcacaaccattcccaccattgggtttaatgttgaaactgtggaatacaagaacatcagcttcactgtctgggatgttggtggccaggacaagatccgtcctctgtggag

SEQ ID NO: 146996 - DNA, 244 bp, Glycine max
ctccggcttgcctcgcgcctggacgccgtcgtggcccgcctcgacacgcaggcgaagatgacgacgatcagcaagtcgatgggcaacatcgtcaaatcgctggagtcgtcgctggccacggggaacctccagaagatgtcggagaccatggactcgttcgagaagcagttcgtgaacatggaggtccaggccgagttcatggagagcgccatggcgggatccacctccctctccactcccgaag

SEQ ID NO: 146997 - DNA, 242 bp, Glycine max
aagccatttacaaaaatggtaaccattaaagcatcttacacagtccttccaaatgaaccaactccggagggccttttatggctatctgatattgatcaagtggcacgtctacgccacacacccaccatctacattttccatgcaaaacacaaccctgatacattaattgagaggatgagaaactctcttagcaagattttggttcactactatccaatagccggtcgattgagaaggataga

SEQ ID NO: 146998 - DNA, 248 bp, Glycine max
cacaaacataacataaaaattcttcccgctgattcggaacattctgcaatttttcagtctatccaggggttgccaaagggtgcacttaggaaaatccttttaactggatcaggaggtgctttcagagaatagcctgctgaaaagatgaaagatattaagcttgctgatgcattaaagcatcccatatggagtttggggagaaaaataactattgactctgctacccttttcaataagggtctagaagt

SEQ ID NO: 146999 - DNA, 248 bp, Glycine max
agaagattaaacagcatgagcaggaggtttctactacgatgaatgcttttcacatcatttcgctctcggaggggttcgatttgtcgccgttgttcgaggaaaagaagagagaagagaaagagttacggtttgcgaccacgcgccccgcgagcagcgtgatttcgagattggaagatttggcgaaggcggtgaagttcgacgtgaagaagagcgagactaaggtgaggttgcagggtcaagaaaaaggg

SEQ ID NO: 147000 - DNA, 246 bp, Glycine max
atcacttcatcatggcttcctcgtgtgcttcctctgccattgcagctgttgccatctccacaccaagttcccagaagaatggatcactcttgggaagcacaaaagcttcttttcttagtgggaggaaactgaaggtgaacaactttacagcaccagttggagcacgatccagcactacagtttgcgcagttgctgagcctgataggcctctgtggttcccaggcagcacccctcctccatggctag

SEQ ID NO: 147001 - DNA, 247 bp, Glycine max
gtcatcgttgggatctccatacgccggatctgctaaaatacgcttgatccatatgggcctcctcgaccacttgtgggacgacaccgtcgccggcccaaggcggaaaacggtctcggcaagctccgaaaacaccacaccttcactttccgacctagctccggcaaggaaacggagggcgggagcgtgagatcgtacggagacgaatcgtcggaggaagcgacgagagtgacgcgtagtatcatgatcg

SEQ ID NO: 147002 - DNA, 242 bp, Glycine max
actcgagcgaatcggctcaggtcgccttctgcagaatgtgtactgttcgtaaagtcaacgatcctgaaagcccctaagtttgatcttgggaaactgatggaggttcatggagattactcagaggatgttggtgccaaggtagacagacctgctgatgaaatagtggcagaggaacccactgaaattgttggagcttgatttcatgatgcattcagtttgttctaggttttctttttcttacg

SEQ ID NO: 147003 - DNA, 246 bp, Glycine max
cttcaacctcaccaaaggaactaagaatttcattgaggctagagaaagtggtgatcaatatgtcaaagaatccaaaagttttctttgatattctaattggaaagatgaaagctggacgagtagtgatggagttgtttgccgatgcaaccccaaaaacagctgaaaacttcagggctctctgcactggggaaaaggggattggacgatctgggaaacctttacactacaaaggttctgtatttcatc

SEQ ID NO: 147004 - DNA, 235 bp, Glycine max
tcttctagtatttttcaagtaacttaaggtttcaaacctaggaagttggaagtcatggcagcaacattgatggcagcaacaagttctggcactcttaaagcaactcctttcctaggccaaggcaagggtgccaatgccaatgctcttagggatgttgtttcccatgggactgggaagtacaccatgggcaatgatttgtggtatggaccagacagagtgaaatacttgggaccct

SEQ ID NO: 147005 - DNA, 245 bp, Glycine max
tgccgctgaaagactgggtaggggtattgagactgatggaattaccacccctgtgctgaacacttctgcctacttttttaagaaaaccgctgatctcattgatttcaaggagaatcgtcaagtgagttatgaatacgggcgctatggaaacccaacgactgtggttctggaggagaagataagtatattggagggggctgaatcaactgtgataatggcatctggaatgtgtgctagcgtagtcc

SEQ ID NO: 147006 - DNA, 242 bp, Glycine max
cctcattaagccgccactttctctctctttccttttcgtcttctttttcttcttcgttgggtttgttgccacttagtaagaaagagggtgtgaagagagtggggagaagatttggtgttgtggccatggcggagtctaagagtactgtgcttgttacgggagcgggtggtcgcacaggacaaatagtttacaaaaaattaagagagaggccaaaccaatatgtggctagaggtctggttaga

SEQ ID NO: 147007 - DNA, 240 bp, Glycine max
caaggatcaaattcctgctgttgacaagttgtattctactaaggttaataagtttgcaaaaattatgaaccttagacaaagtgttgttggtgatcttaaacttcttactgatgggaagttatatgagggtaagcatattcctgtatctaatattagtgcaggggaaaatcatgtagttcaaatacccctaatggcacaggaggaaattctgtcttctagtgcaagtgatttcagaactgc

SEQ ID NO: 147008 - DNA, 239 bp, Glycine max
ccaaaggagaagagttgaaagcaatgcaagtagatacaaccgtgttgggcctttcaaaggatgaggctcagaagaaaccatacattgcttccatgggagtgtacgtcttcaagaaggagatacttcttaatctattaagaaatatgcaccgagaataaattgatcttgttccaaagcttgttttttaagtgctacaaattaatttaatttagatggcgatttccaacggcaaatgattt

SEQ ID NO: 147009 - DNA, 121 bp, Glycine max
attaagaaaaataaataaacttaacacaaaagcggaaaaagatataataataacttggtccagagcatctaccattatacctacaatgattggccataccattgctatccacacaacatac

SEQ ID NO: 147010 - DNA, 241 bp, Glycine max
gcgcctagttgtgagcaccaaaccaaaccacattgtttgcaaggcagcacagaagcaggttactgtccaagagggtgaggacactactactggccttgtctctcgcaggttggccctcactgtgctcattggtgctgctgctgttggctctaaggtggcacctgctgatgcagcctatggagaagctgccaatgtgtttggaaaaccaaagacaaacacagacttcctttcatacaatggg

SEQ ID NO: 147011 - DNA, 238 bp, Glycine max
gttttatttttaagtgtggagtgctgtgcaggtcaaggcccttttacttgttcgtccggttgttcccatcttctctctcgtaccaatcaaatcacacttttgtgttgtgttgggaaaccctaaaccccgttttcggtgagatcgagatcgatcgaacatggatgaggagtacgatgtgatcgtgttgggcacgggtctcaaggagtgcattctcagcggtcttctctccgtcgatggc

SEQ ID NO: 147012 - DNA, 239 bp, Glycine max
tgattataaaaacatgggtttaattagtcgatttattagtgaacaaggaaaaatattatccagacgcgtaaatagattgaccttaaaacaacaacgataaaatacgagcttgttttatagcaattgttattaatcgttgttgttttaaggtcaattgctataaaacaagctcgtattttatctttgttaccttttcttaataatgaaaaacaatttgaaaaaagcgagtcaaccgctag

SEQ ID NO: 147013 - DNA, 243 bp, Glycine max
gtcttgcaattgaagttgaagtcttgcccttctctcttcaactccaaacacaagacatcatcatccatggctgcctccgtctccactgtcggagctgtcaacagagctcttttgaacctgaatgggtctggacctggggtttcagctcccagttcatccttctttgggagcagcttgaagaaggttattggctcaagggtccccaacacaaagatttcctctggaagcttcaagattgttgct

SEQ ID NO: 147014 - DNA, 225 bp, Glycine max
ctcgagcgcggctacatccccaatgcaccacacttcgacgacaacttcgatgacaccctcgtatctgccatcaaaacctaccaaaagaattacaacctcaacgtcaccggcaagttcgacatcaacactcttaaacaaatcatgacaccccggtgtggcgtccccgacataataatcaacacaaacaaaaccacatcgtttggcatgatctcggactataccttc

SEQ ID NO: 147015 - DNA, 236 bp, Glycine max
ttatcttctttctctggctcgagcatccaaaagggttgtctttcttttttataagaagaagaggagagggaagatgacgatgatgacaatggaggggatgatggacaagggggtgttggatgatgtgataagaaggcttctggaagggaaaggagggaaacaggtgcaactctctgagtcggagatccgtcaactctgcgtcaacgccagacaaatcttcctctctcagccaattc

SEQ ID NO: 147016 - DNA, 235 bp, Glycine max
gtgtttctgtaaccatggcatccaccactctatcccctacaaccccttctcagctatgctcaggaaaaagtgggattttcagttcctcacaggcacttcttgtgaagccagtgaagaggcagatgatggggaagagcaagggattgagaattgcatgccaagccaccagcatttccgctgatagagtccctgacatgggcaaaagacagctcatgaatcttcttcttcttggtgc

SEQ ID NO: 147017 - DNA, 235 bp, Glycine max
atgataccagatgaaagggaaagcttgacaacaggccaaagatctttgaatgggcaacatggaaaatgctgaggtccaaattgatgctctatctatatgcctcaacatcaatggatgggaaatgatgatatcacttggtttcatggctgctgcaagtgttcgagtggcaaacgagcttggaaaaggaagctccaaagctgcaaagttctctatagttgtgacagtgcttacatcc

SEQ ID NO: 147018 - DNA, 237 bp, Glycine max
gttggttttgagttcaaactcacttcaatggatattgctaagaaacatgtgagtttttttagtggaacattaaagaatggaagcaatttcgataatagcccggttacattcagagggaagcaatcaaatattttgaaattcaatttgttccctcgaatatatcataatttacatgagctaaagctcatacagcctttatttcacgagttcctcccaggttcagcttctcgtgataca

SEQ ID NO: 147019 - DNA, 238 bp, Glycine max
gagcctgccacattaccatcttcactcagaccaaccttctctgagaaggtggacaccaccccattcgggactgtagttgagaatttctatatgactgatgccattacaagggcatcaaagataatggcacaatgcagtgccatgctgttgaagaagtgaaacatggattttttattttttggtttcaataaagaagattcacgtttttcccttcctggccatgcaagattgcttgcca

SEQ ID NO: 147020 - DNA, 239 bp, Glycine max
cctcgacatgggtctgcttgttgctggaactaaataccgtggtgagtttgaggagaggttgaagaaactgatggaagagatcaaacaaagtgacgagataatacttttcatcgatgaagtgcacactttgattggagcaggagcagcagaaggggcaattgatgctgctaacatactaaagccagctcttgcaagaggtgaactacagtgtattggagccacaacattagacgagtaca

SEQ ID NO: 147021 - DNA, 242 bp, Glycine max
cttcaagcttctggaagagacaaccgttccgggaatggtggacaagttcggttggtgcacgtgggacgccttttacctgacggtgcaccctgagggcgtcagagagggcgtgaagggcctggttgacggcggttgtcctccgggattcgtcctgatcgacgacggctggcagtgcatcagccacgattccgatccggagaaggaggggatgaatcagacggtggccggggagcaaatgccct

SEQ ID NO: 147022 - DNA, 240 bp, Glycine max
catcaatgtcagtcctattgagtatgggcatgttttgctgattccgcgcattttcgagtggttgcctcaaaggattgaccgtgagagcttcctccttgcacttcacatggcagtggaagctgataatccatattttcgattgggttacaacagtttgggtgcttttgcaaccattaaccatcttcacttccaggcttattatttggctctgcccttcccaattgagaaggcccccactaa

SEQ ID NO: 147023 - DNA, 240 bp, Glycine max
gcaaaaggtcgcttctagttaagggtgctgtggaaaatgtgttggacagaagctctaaaattcagttgcgtgatggttctatagtgaacctagatgataatgcaaggcaccttgtattgcaagctctccatgaaatgtcgactagcgcattgcgctgtttgggatttgcatacaaggatgaactccccaaatttgaaaactacagtggtaatgaagatcatccagctcaccagcttttgc

SEQ ID NO: 147024 - DNA, 245 bp, Glycine max
cagattgtcaaggccgaggacagtattggtccagaagtagaaaagttggtggcttctcttccagatggaggtgttctccttctagaaaatgtgaggttttacaaggaggaagaaaagaatgaccccgagcatgcaaaaaagcttgcctctctggcagatctgtatgtgaatgatgcatttggtactgctcacagggcacatgcatcaacagagggtgtgacgaaatacctgaagccatctgttgc

SEQ ID NO: 147025 - DNA, 244 bp, Glycine max
cttctcgcggcttctttctccaagattaagtttcagtagtaatgggtaaggaaaaggttcacattaacatcgtgggcattggccatgtcgactctgggaagtcaaccaccaccggtcaccttatctacaagctcggaggtattgacaagcgtgtcatcgagagattcgagaaggaagctgctgagatgaataagaggtctttcaagtatgcctgggtgcttgacaagctcaaggctgagcgtga

SEQ ID NO: 147026 - DNA, 244 bp, Glycine max
gaacaaggttgtaagagacaaccttagggttaggcttggagatgttgtttcagtgcatcagtgtcctgatgtcaaatatggaaagcgagtccacattcttcctgtggatgatactattgaaggagtaacaggaaacctctttgatgcctacttaaaaccttatttcctagaggcatatcgaccagtgaggaagggtgacctcttccttgtgagaggggggatgagaagtgttgaattcaaggtt

SEQ ID NO: 147027 - DNA, 245 bp, Glycine max
caactactgaaagtgtttgtgctggagtgccaatgttgtgttggccattttttgcagaacagccaacaaactgtagatacatttgcaatgagtgggaaattgggatggaaattgataccagtgcgaagagagaggaggtggagaagctagtgaatgacttgatggtgggagagaagggaaagaagatgagagaaaaggtcatggagttaaagaggaaggcagaggaggtcaccaagcctggtggt

SEQ ID NO: 147028 - DNA, 243 bp, Glycine max
gcttcatgtcgctggcggtggagccgttggggaagatggttgggggagtgaagaggctgtgggcgattgtgaactttattctggcaattgggttcggaatgacggtggtgatcaccaaggtggcggagaccagcgcaagatgaatcccgccgccgtgggtcacccctccgaaggggtggtggttgggtccatggttttctttggggttctcggagttcctcttgcgattactttcagtgttcc

SEQ ID NO: 147029 - DNA, 239 bp, Glycine max
cgcaaaccatcctgatacacatccggattgatagttcgttgcatgcaaccatagttttattaggattttttcttctttgttttcaattaggtttttttgttgctctccttcaaactccatctttccaaatcctctctttgcgattgtgttttgatctgcttcctactgcgatagtttctctactgttacatggccatggcggtttccgcaattggttttgaaggtttcgagaaaaggtt

SEQ ID NO: 147030 - DNA, 221 bp, Glycine max
tccaattgaaattttaaaaatgactgggataaacttaagaattcaattattgaaattgaataagtaaacaatttaattggattggtcgaatggtatcaaaaaaatggagtactaactcccatttcttatttattattgaattaaccgatcaacttgctttgttatcgaaccattcctttttgattccaaaattttccgggaaaaaattggatccaatttta

SEQ ID NO: 147031 - DNA, 239 bp, Glycine max
gaggatccttgtatctgccaaaggaatatttgaaacaactggggtgaaactatcagggaaagttgcaggaatccactggcattacagagtaagatctcacgcagctgaactaaccgctggctactacaacacacgaaataacgatggatatctgcctatagcaaggatgctcgcaaaacatggagttgtcttcatcttcacctgcatggaaatgaaggacagagagcagccagactttg

SEQ ID NO: 147032 - DNA, 243 bp, Glycine max
gagttgatcatgatgttttggctgaaatggatgtgctgtataggtgcatcaaagaagcgttgagactccatcctcctctaatcatgctgatgagaagctcacacactgattttagtgtcacaacacgagaggggaaagagtatgacattcccaagggtcatataattgccacatcacctgcttttgcaaacaggctaggtcatgttttcaaagaccctgataggtatgatcccgatcgatttg

SEQ ID NO: 147033 - DNA, 242 bp, Glycine max
gcactcatattgccaatctcttacacttacatagccatgatgggttctaaaggactcaccgatgcatcaaagatagccattttgaatgcaaactacatggcaaaacgattggagaattattacccggttcttttccgtggagtcaatggaacagttgctcatgaattcatcattgacttgagaggctttaagaatactgctggaattgagcctgaagatgttgcaaagcgcctcatggacta

SEQ ID NO: 147034 - DNA, 243 bp, Glycine max
cagaaaggagaagggtgtcactgcccttgaccctagagccaatgattttgatctcatgtatgaacaagttaaagctcttaaggatggaattgctgttgaaaaaccaatctacaaccatgtcactggtctcctggatccccctgagctgcattaaaccccccaaaatcttagtcattgaaggcttgcacccaatgtatgattctcgggtcagagatctcttggactttagcatctacctagaca

SEQ ID NO: 147035 - DNA, 245 bp, Glycine max
cagaaagagaagcattagcaaaagcaagaagaactagtctaagcagaaatggcctcttcagtgatggcatctgtggccctcaaacctgcccctttcactgttgagaagtcctcagttagaggccttccctccctctcaaggaactcctcttcattcagagttgtggccagtggtggcaagaagatcaagactgacaagccttatggaattaatggtggcatggctttgagggaaggagttgatgc

SEQ ID NO: 147036 - DNA, 244 bp, Glycine max
gtcgacctcatctaaagttccgtcgatggttgttcatgtgtccagcacccccgatgaggtcggcctcgccgtcagtcagctcatctttgacctgagcaagcaggctattgccaccaacggtcgatttaccgtggcgctctcgggtggctccttaccgaagatcctgaacaagggcctgcaaaccgttaaaaacgatgtggatttctccaagtggtttgtgtactttgctgacgaacgctgcgtg

SEQ ID NO: 147037 - DNA, 236 bp, Glycine max
caaaaacattgactgcagatgaactctattatctgagggagcaatttgcactgctagaaccaagcaaaaatggcagcatatctttagagaatgttaacaaggccttgatgaaatatgcaacagatgccatgaaagagtctcgcatccttgacttcctttcatcgctgaactcgttacaatatagaaggatggattttgaagaattttgtgcagctgcattgagtgtgcatcaactt

SEQ ID NO: 147038 - DNA, 235 bp, Glycine max
gagaaacaaagttagaagtaaagaagatcatggcttctctagcaaccttggctgctgttcaaccagctacgatcaatggccttgctggaagttccctctctggaactaagctctctttcaagccctctcgccacagtgtcaaatccaagaacttcaggagtggtgccgtggtagcaaagtatggtgacaagagtgtgtactttgatttggaggatctgggcaacactacagggca

SEQ ID NO: 147039 - DNA, 238 bp, Glycine max
gaaaaatggcagaaacaaagttgagctccttcaaagacaaaagatggtcactccatggcatgacagctctagtgacaggaggcacacgaggcatagggtacgcaatagctgaagagttagcagaatttggggcagctgtgcatatttgtgcacgtcaacaacaagatattgataaatgtttagaagaatggaataagaaaggacttcccataacagggtcggcatgtgatgtactatc

SEQ ID NO: 147040 - DNA, 239 bp, Glycine max
cagccatttacaaaaatggtaaccattaaagcatcttacacagtccttccaaatgaaccaactccggagggccttttatggctatctgatattgatcaagtggcacgtctacgccacacacccaccatctacattttccatgcaaaacacaaccatgatacattaattgagaggatgagaaactctcttagcaagattttggttcactactatccaatagccggtcgattgagaaggat

SEQ ID NO: 147041 - DNA, 240 bp, Glycine max
ccaggtcctaaaggccttccaataataggaaatttacatcaatttgatagttccattctttatctgcagctatggcaactctcaaagaaatatggccctatattttctcttcaattagggttaaggccagccatagttgtttcctctcctaaactagccaaagaggtactgaaaaaccatgacctagagtttagtggacgacctaaattacttggccaacagaaattgtcctataatggg

SEQ ID NO: 147042 - DNA, 240 bp, Glycine max
gggaactatgcgagtgacctacctaatcttattgtagaaattttcaggatcaatgattagaccatgcaaactagaaatgctttttcttgtataaaggaagggattactcgatccatttccatatcgatcatgatatatataataattcgagcacccatttcaaacgcatatccaatttttgcacagcagggttatgaaaatccccgagaagcaaccggtcgtattgtctgtgccaattgc

SEQ ID NO: 147043 - DNA, 240 bp, Glycine max
ggcgaactgatttcgttatcagaacaagaattggtggattgtgatactggatataaccaaggatgcaatggaggacttatggactatgcatttgagttcataatcaacaatggcggcattgattctgatgaggattacccataccgtggtgttgatggtagatgcgacacatataggaaaaatgctaaagtcgtttctattgatgactacgaagatgttcctgcctatgatgagttagcc

SEQ ID NO: 147044 - DNA, 233 bp, Glycine max
ttcttcttggaagagcagcttttgttttccccttatccttcatatccaacttggctaaaaaatcaccaaatgagaaaatcagcttcagacagcaagtgatcatttggtgggctggccttatgagaggtgctgtttcaatcgcacttgcatataatcagttcaccatgtcgggggcacacttccatgcggagcaatgccattcatgatcacaagcaccatcatggtggggcttt

SEQ ID NO: 147045 - DNA, 236 bp, Glycine max
aaaaaaaagaataataaatagaaaaaggagcatgttgattatatagaaagtaaagggcaacaatcatttttgtttaccatgggtaaggacaccatcgctgacataataacctatataagaaatgctgacatgaataaaaaaggaatggttcaaataccatttactaacataacagaaaacattgtaaaaatacttttacgcgagggttttgttgaaaacgtcagaaaacatagaga

SEQ ID NO: 147046 - DNA, 238 bp, Glycine max
tgctatgcctcgtttgtcaggtgaaaacaaggacagattagagaagcctgagctaagattgaccaagacagcagtcccttctaatatggatttgataaagcaacttgatagtaaggcagctaaacaggggaagaaggctgatacattctctctggttcgcacctctcaaccacagtctttgctacagctcaaagatgttgtcttgtctactgctatcgatttgaagcgaacagctcca

SEQ ID NO: 147047 - DNA, 236 bp, Glycine max
cttttggcatcaatatgggtgcaggcattcacagggacaaactttgacttctcatcctactcatctgagctcaaatctgtgcttaacataactcagcttcagctcaattacctctctgtggcctcagacatgggaaaggcctttgggtggtgttctggggtctcactcatgtacctccccttgtgggtggttatgttcatggctgcttttatgggactttttggctttggcttcca

SEQ ID NO: 147048 - DNA, 239 bp, Glycine max
ggcgatctggtaaggagcttgagaaggagcccaaatttttgaagaatggtgatgctggtatggttaagatggttccaaccaagcccatggtggttgacactttctctgagtatgcctccccttggtcgttttgctgtgagggacatgcgtcagaccgtagctgttggagtcatcaagagtgttgagaagaaagaccccaccggagccaaggtcacaaaggctgccgccaagaagaagtg

SEQ ID NO: 147049 - DNA, 232 bp, Glycine max
agctatccaaacaagcacgccatttgtctcatttgtgttcacttcaatgttgtcaaaagtgaaaattcatttctttgaacatgttggattttgtttgacaggttgcctcaaagaacaatgatgtgcaattggcagattttattgaaagcgagtttttgggtgaacaggtggaagccataaaaaaaatctctgagtacgttgctcagctcagaagagttggtaaaggacatgg

SEQ ID NO: 147050 - DNA, 232 bp, Glycine max
gctctatgtccatttgaagctgttaaagtgagggttcaagcacaaacctgttttgctaagggattgtatgatggctttccaaagttatatgcatcagaaggcacacgaggattctcccgtggactaattccacttttgggtcgaaacattccattttccatggttatgttctcaacatttgagcattccgttgattttttgtatcggaatgtggtcaaaagaaaaaaggagg

SEQ ID NO: 147051 - DNA, 237 bp, Glycine max
gttagcagagtgcagtgacttgagaatggccttgccagtggtcgtcgacgcagagtacctcaaagaggtcgacaaggctcgccgcgatctccgcgcactcatcgctaacaggaactgcgctcctctcatgcttcgattggcctggcacgatgccggaacttacgatgctaagaccaagactggtggacctaacggttcgatccgtaacgaggaagagtattctcacggcgccaacaa

SEQ ID NO: 147052 - DNA, 235 bp, Glycine max
tacgtgcgtatgggtcaatcagagatgttgttttcttgacggaagaaattgtttccatcttgatgcactctgtgagggaaattgtatgcagtggcctgccaagggatcgattggaaaagttgaaagcaaacaaagatggcataaaatatggacaggtttccctcgctgcttcaatgactcgggtgaagcttgctgctgccctcggggcctctttagtatggatatcaggagggtt

SEQ ID NO: 147053 - DNA, 234 bp, Glycine max
cggcaattgcctggcaggcatgaagaacgacgttaccatcatcggcatggaagaagaacccatggagcgtgtcatgggcaaaaaggttggaaagatcttccgtggattgctagagaagaacggcgtcagatttaagatgggagccagcgtggagaaagctacagcttcaaagagcgattcgtcgaaggtcggcgccgtgcatctgaaggatggcaccacacttgaggccgatct

SEQ ID NO: 147054 - DNA, 236 bp, Glycine max
caggattacaccggcgaagatgttactgttgataacttttttgctgctttacttggaaataagtcagcactgactggtggcagtgggaaggttgtggacagtggtcctgatgatcatatatttgtatactatactgaccatggaggtcctggggtgctcgggatgcctgctggtccttacttatacgcggatgatctgattgacgtcttgaagaaaaagcatgcttctggaacata

SEQ ID NO: 147055 - DNA, 230 bp, Glycine max
agaaggtggaaccggcattctgacctctgacgaggtcctccgcgcctacgccattgcccgaggtttctccacacaaggtctcggtcaaccagatgagtcccgagccgcacgctacatcctcaaggactacgtcaagggcaagatcctcttctgccatcccccacctaccgatcccccgctggaccccaagcacttcaaccgcgaactctacgacgtaaaccacctccccg

SEQ ID NO: 147056 - DNA, 217 bp, Glycine max
ctcgagcgaatcggctcgaggttggtgtctgcaagggaatttaccgcactgacaatgttacctgaggatgaaattgtcaagcttgttgacaccttccctggccaatctattgatttctttggtgcactcagggctagagtatatgacgatgaagtgaggaagtggattcctggtgttggtgttacttaattgggaagaagcttgtgaattccaagga

SEQ ID NO: 147057 - DNA, 232 bp, Glycine max
ttgaagttaaaagccttagccttccctacaactccaaacacaaagacatcatcatccatggctgcctccgtctccactgtcggagctgtcaacagagctcttttgaacctgaatggttctggagctggagcttcagctcccagttcagccttctttgggaccagcttgaagaaggttattgcctcaagggtccccaacagcaaggtttccggtggaagcttcaagattgttg

SEQ ID NO: 147058 - DNA, 233 bp, Glycine max
ctccaagtatgtttttacaatccttcaaaaattttttttctttgtgtgtgtatggtgatgataacttaattagtgttcatgaatatgtcaagccttactttagtggttctaaattgaaaagctttctagctggtcataatatcaccattactgatggtattgacaaaactagtgcaactttgcaatttagaaagttagcagattgtgattttctcaagagaaactttaagcag

SEQ ID NO: 147059 - DNA, 233 bp, Glycine max
acaaaattgaacaggagctggaaaagttatcacaaaagtttggggaaaatgttctggatgcaacaaagaagtttgaaaagctaatcactgataagacggaaattgaaggattacctgctactgctcttgggttggctgcacagagtgcagtatccaaggggcatgaaaatgccaccgctgagaatgggccatggataattacattagatgctcctagttttattgctgttatg

SEQ ID NO: 147060 - DNA, 235 bp, Glycine max
ctcgagccgaatcggctcgagaaaaaagcctcgtctctcgtgccgattctccaggacaaaccccttcacccaacctaatagcacttagtgtagaagatgagtacgttggatgcaacaagggctgaacttggtcttcttgttttatatttgggcaaggctgaagcaagggacaaaatatgcagggcaatacaatatggttccaaatttttgagtaacggggaacctggtactgctc

SEQ ID NO: 147061 - DNA, 257 bp, Glycine max
aaacctaactactaaaacaaataaactaacatataaaatcattccaagaaagtctttatagtaaaaataggggtaaaacactactttatcataagaactgataaggcccgacggattattagattcagaaaattttattgcagctaattctttagttactccccctcatattcagcctgagtggtattatttattttcttacgcaattcttcgttctattcctagaaaattggggggagtcttgtctcttatgggat

SEQ ID NO: 147062 - DNA, 259 bp, Glycine max
tcttcatcaacgatcttgatgcaggagctggtcgtcttggtggaaccacccaatacactgtcaacaaccagatggtgaatgccaccctcatgaacattgctgataaccccaccaatgtgcagcttcctggtatgtataacaaggaagagaatccccgtgtgcccatcatcgtcaccggtaacgatttctccacactctatgcgcctctcatccgtgatgggcgtatggagaagttctactgggcaccaacaagggatga

SEQ ID NO: 147063 - DNA, 256 bp, Glycine max
ccgcactgatggtattcctgaacaggacattgtcaagcttgttgacaccttccctggccaatccattgatttctttggtgcactgagggccagagtatatgatgatgaagtgaggaagtggatttctggtgttggtgttgacagtgttgggaagaagcttgtgaactcaaaagatggacctccaacctttgagcagcccaagatgactctggagaagctcttgctgtatggtaacatgcttgtccaagaacaagag

SEQ ID NO: 147064 - DNA, 260 bp, Glycine max
gttccccatacctcctgctatctgcagtggaaggcgtgaaaagtgtggaattgagaaggagaacaacttcaagcagcccggagagagataccggtcttgggcacctgacaggcaagatagatttgctcgccgatgggttgatgctttatctgacccacgggtcacccatgagatccgcagtgtctggatatcatactggtctcaggctgaccgttctctaggccaaaagatagcttctcatctcagcacgaggccaaata

SEQ ID NO: 147065 - DNA, 254 bp, Glycine max
aaacctaactactaaaacaaataaactaacatataaaatcattccaagaaagtctttatagtaaaaataggggtaaaacactactttatcataagaactgataaggcccgacggattattagattcagaaaattttattgcagctaattctttagttactccccctcatattcagcctgagtggtattatttattttcttacgcaattcttcgttctattcctagaaaattggggggagtcttgtctcttatgg

SEQ ID NO: 147066 - DNA, 251 bp, Glycine max
ggcagcaatgtcatctccgtggatggaaaggaaatcaaagttgtttctgaccgcaaccctgccaaccttccttggaaggacttggggatagacttggtgattgaaggaaccggggtgtttgtagacagagaaggtgcagggaaacacattcaagcaggagctaagaaggtgctcatcactgctcctggtaaaggagatatccccacctacgtggttggtgtcaatgagtatgactacagccctgatgaacc

SEQ ID NO: 147067 - DNA, 247 bp, Glycine max
ggctcgaggtgacatttgccaagacaagcacagcattcatattttgtcgttgaagacagagcactcttctgtcaggattgtgatgaaccaattcattcagccggaagcctttctgcgaaccaccagcgcttccttgctactggtatccgagtggcatcgagttctaattgcaccaaggacaatgaaaaaagtcacttggagcctcctactaggaatgcacaacaagtttctgcgaaaattcctcctc

SEQ ID NO: 147068 - DNA, 255 bp, Glycine max
ggctcgaggcagtggaagtagccaaagggcaaggtgtgttagaacaaatatccaatggtggcatcccatggttcttggggacaagtgtggtccttacccttgcttccttgattccactcttccaaggtgtcagcgtggagtctaagtccaaagggttcatgtcctcagatgcagaactgtggaatgggagatttgctatgttgggtttgattgctctggcttttactgagtatgttaagggtagtactttggtat

SEQ ID NO: 147069 - DNA, 257 bp, Glycine max
gtgccacaatccctctctctctccgacgtacatttccatctttttagggtttcatttcatggactccgattcctggatttccacgcgcctctcttcctcttcacgccgccaccattatcgatctgatctgtacgcggaggagagtgaagggaacgatgatttcagggcggagtttctatgccctttctgcgccgaggattacgacgtcgtttccctctgttgccacattgacgaccaccaccctatccaagccaaaa

SEQ ID NO: 147070 - DNA, 256 bp, Glycine max
agcatattgtctcatcctggactggtattcctgttgagaaagtctcaacagatgaatctgatcgcctcctgaagatggaagagactttacataagcgagtcattggtcaggatgaagcagttaaagccattagtcgggctatccgtcgagctcgggttggactaaaaaatcctaatcgtcccattgccagcttcatcttttctggtccaactggtgtggggaagtctgaattggccaaagcattggctgcatacta

SEQ ID NO: 147071 - DNA, 256 bp, Glycine max
ccagcgaaccccctatggtgcattataattccggcgggctacgattgaatcctaatttgtatgagtccgggaaagtctgtctgagtctcctaaacacgtggactggtacagacaccgaagtttggaaccctggagcttccacaattcttcaagtccttctttctctgcaggcccttgtacttaatgataagccttatttcaatgaggctggatatgatcaacaaattggtagagccgaaggggagagaaactcagt

SEQ ID NO: 147072 - DNA, 258 bp, Glycine max
cttccataaacgggtggtgcctctcttccatctccccagccaaaacctctctcaggaaggccacattacgcccttccgtcttcgcaacccttaacactccttcttctccttcctcttcatcttccttcccctctctcattcaagacaggcctgtttttgctgcccctgcccccatcatcaccccaactgtgagagaggatatggcaaaggaatacgagaaagctattgaagaacttcagaaattgttgagggagaaga

SEQ ID NO: 147073 - DNA, 252 bp, Glycine max
gtactgcgtttcggaagcagacacagatggctcgtactaagcaaacctctcgtaagtccacaggaggaaaggctcctaggaagcagcttgcaaccaaggctgcacgtaagtctgcaccaactactggtggtgtgaagaagccccaccgttatcgtcctggtaccgttgctcttcgtgagattaggaaataccagaagagtaccgagcttttgatccggaagctccccttccagaggctggttcgtgaaattg

SEQ ID NO: 147074 - DNA, 251 bp, Glycine max
tgaaaacattccaaatctcttcaagaaaataaagggcggtatttacactcttcccagtcatctatctcccaatgctagagatttgataccagggatgcttgtggttgaccctatgaggagaatgaccatacctgagatccgtcaacacccatggttccaagctcgacttccgcgttatttagctgtgccaccaccagatacaatgcaacaggccaaaaagattgacgaggagatccttcaggaagtggtga

SEQ ID NO: 147075 - DNA, 262 bp, Glycine max
ggacttcggctcgagcacaattgaatctggaaactggaattccctttatgaagcggagctcttcttctgtttttcatcctcttcaccctgctaggagccattggaggtttaggtgaccgtggaaaatttgttgatgacgaacctactactggaggtgttattcctccaggcaaaggcttcagggaagctcttggtcttggttcaggtcctttatttggattcacgaaagcaaacgagctatttgtgggaagattggctcaat

SEQ ID NO: 147076 - DNA, 249 bp, Glycine max
gacattaccagggtgtcgattcctaaagattatgagtctggtgctgtcaaggggtttgcttacgtagacttcagtgacgttgatagcatgggcaaagctctagaactccatgaaactgaacttggaggttataccttaacagtggatgaagccaaacctagagataatcagggttctggtggtagaggtgccggtggaaggagtggtggcggtcgatttggtggtaggagtggtggtggtggtggtggt

SEQ ID NO: 147077 - DNA, 248 bp, Glycine max
ccctaatgaagaatttggaattgcttttaatggaggttttaatcagccaattatgtgcggtggtgagccaagggccatgcttagaaaagatcgaggcaaagctgatgccccaatatattccattcagatatgcattcctaagcatgctttgaacttgatcttttcatttacaaatggagtagactgggatggtccatatagactacagtttcaagttcccaaggcattacaaaacaagccaattgact

SEQ ID NO: 147078 - DNA, 248 bp, Glycine max
gattgcagtagtgctaagtgctaacacctgcagtgaacaatggcctctgcatcagcatctctgctcaagtcttcacttgttcttgacaagtctgagtgggtgaagggacaaacccttcgccaaccttctgcatcagttgtgagatgcaaccccaccaccccatcaggcctcaccatcagagctggttcctatgctgatgagctcgttatcaccgcgaaaacagtggcttcaccagggaggggtatttt

SEQ ID NO: 147079 - DNA, 257 bp, Glycine max
ccctaatgaagaatttggaattgcttttaatggaggttttaatcagccaattatgtgcggtggtgagccaagggccatgcttagaaaagatcgaggcaaagctgatgccccaatatattccattcagatatgcattcctaagcatgctttgaacttgatcttttcatttacaaatggagtagactgggatggtccatatagactacagtttcaagttcccaaggcattacaaaacaagccaattgacttctttaata

SEQ ID NO: 147080 - DNA, 253 bp, Glycine max
tcttgttcttggacaagcatgttaccatacagcaagagcttctccagagtcatcttgggctgctcaaaggttggaggtccatcttttgagttcacaagcttcttcccaacactgtcaacaccaacaccagagatccacttcctcacttcatcatcatatactctggccctcagtgcaccagagaaatcaatggattggccagggaaggtgtcaacaagcttgacaatgtcctttcagggaaataccatcagtg

SEQ ID NO: 147081 - DNA, 248 bp, Glycine max
gaggaaaagtgctgctcttcaaatgcaacagtttgttggagaagaaaagaatgatttattggattacttgagatctcttcaacctgaacaggttgctcagctttcagaatttacatcccctgagctctaggacactatcctctctgttgtccatggtctcctagctactctttctcctaagatgcattctaaaccttccaccatgtcagaaaatacaacagttggagcaacaaatgctgggagtgagg

SEQ ID NO: 147082 - DNA, 198 bp, Glycine max
cattgactagtatcattaagatggctaattcctacttatccttgcttgtcttgatccttgtagctctgctcctcacccctcaagggcttgctgatgaatctgattcttactataagccaccagtttacaagaaaccaccagtgttacaagacccaatgctccaagccacgccatttcactaagtcccatagcgcaccc

SEQ ID NO: 147083 - DNA, 249 bp, Glycine max
attaaaatatattcaattttgcgtttctctgcctaaaaggattgaaagatgggtcaagcattcggttgctaccaagtcgatcagtcaaatgtggctatcaaggagcattttggaaaatttgatgatgtcctagagcctggatgtcactgcctgccttggtgtcttgggtaccaagattgctggtagtctgtcgctgcgagtgcagcaacttgatgttcgatgtgagacgaaaaccaaggacaatgtctt

SEQ ID NO: 147084 - DNA, 256 bp, Glycine max
aagacatctggctaccaacaaggaagtcagtcaaatggcatatccagccaatctgaagctgattctacaaacacaactatatttgtcggaggacttgactctaatgttacagctgaagatcttaagcaaccattctcccagtatggtgagatagtctctgttaaaatacctgttggaaaaggatgtggttttgtacaatttgcaaacagaaataatgctgaagaggcattgcagaagctaaatgggacaacgattg

SEQ ID NO: 147085 - DNA, 255 bp, Glycine max
cattgactagtatcattaagatggctaattcctacttatccttgcttgtcttgatccttgtatctctgctcctcacccctcaagggcttgctgatgaatctgattcttactataagccaccagtttacaagaaaccaccagtgtacaagcccaagcccaagccacccattcacaagcccaagccacccgtttacaagcccaagccacccgtttacaagaaacccccttatggtaagtacccaccagttcaagaca

SEQ ID NO: 147086 - DNA, 254 bp, Glycine max
attaatttcaggaaattccagcaagatagatgacgactttgaaagtgaagtaatgcttataagtaatgttcatcatagaaatctggttcagcttcttggttgttgcagtaaaggccaagatagaatccttgtctatgaatacatggcaaacaacagcctcgacaaatttttatttggtaacagaagatgttcccttaactggaaacaacgctatgatataattttgggcactgcaaggggattgacttatctac

SEQ ID NO: 147087 - DNA, 256 bp, Glycine max
gggatttccaaagtttttaatagagggtaagtctcaaaaaatcgaagaattacagacgaatatgcaaaaaaaactgaattgtgtgaatcgaaaactaaacattgctattgtaaaagttgcaaatgcttataaacaccctaatattattgcagaatttatagctggacaattaaagaatagagtttcgtttcgtaaagcaatgaaaaaagctattgaattaactgaacaggcgggtacaaaaggagttcaagtacaa

SEQ ID NO: 147088 - DNA, 250 bp, Glycine max
aaactttttgctgggtcttgttgattctgacacattgccacttaatgtatcgcgagaactgcttcagcaacatagtagtctaaagacaatcaagaagaaacttattaggaaagcccttgatatgatccgtaggattgctgatgaggatcctgatgagtccactgacaaagaaaagaaagaagatacgtcatctgacaataatgagaagaaaggtcaatattccaagttctggaatgagtttggtaaatcc

SEQ ID NO: 147089 - DNA, 248 bp, Glycine max
  unsure (1)..(248): unsure at all n locations
ctcttctcatttcattctncttccttcttttgtcttcccttagcntagtttgaagatcatggggagaggaagggttcagctgaagcagatcgagaacaaaatcagccgccaagtgacgttttccaaaaggagaactgggctgcgaaagaaagctaatgaaatctctgtgctctgtgatgctcaagtggcactgattgtgttcaatgctaaagggaagctttttgagtattcttctgaatccagcatgg

SEQ ID NO: 147090 - DNA, 254 bp, Glycine max
gtggagatattttgttggagatctcgtctttgaagtttctaagatgacttctccctacattaaatgtacagtctctttcttcatagcatttggaaatttggctgatgacaccatcaattttgaggcttttccccacaagctggtgcactttggagagattcaggaaaaagttgtattgaaattttcacaagaggaatttcttacagcttggtcaactcaggtgcgtcctgcaacaactctgttggctgatgggt

SEQ ID NO: 147091 - DNA, 252 bp, Glycine max
gagagagagaacttcaactgagggtgagagtgacacaaatctagggagcactactctaaaagttctattagattcttcaaaacatgaccatgcatcgcgagtcttgggcttttgtcttcggcgttatgggcaacatcatctcctttggagtgttccttgctccattgccaaccttttaccaaatctacaagaagaaatccactgaagggttccagtcacttccttatgttgttgcactgttcagtgcaatgc

SEQ ID NO: 147092 - DNA, 254 bp, Glycine max
gcactaaacctttaactggatactcatttggtcgggatgggaatataatggatgaaggtactgcttactatattacactctcagagctgaaagaagctactaataatttttcaaagaatattggcaagggaagctttggatctgtttactatgggaaaatgaaagacggaaaagaggtggcagttaagactatgactgatccatccagctatgggaaccagcaatttgtaaatgaggtagccctcttatcaaga

SEQ ID NO: 147093 - DNA, 253 bp, Glycine max
cggaaaatgtggaatttctgggtcaaaagattgaccttacacttttcaaaggcatccttacctctgtccaagacacagccacatcggtagtgaaaacaatttcaagtaggcctcccttgaagatcccaatttccaacagcaatgctcagtccgggttactcaccacatacctcgacgaagaattgcgtatctcaaggggcgatggtggcagtgtgtttgttcttatcaaagaaggaagctctcttttgacaag

SEQ ID NO: 147094 - DNA, 250 bp, Glycine max
gggctacgaaaaacgacgtcgttttcccaattttccccggcgaccgggaaatggtggagccggtggagcttcgcggcgaggagcagctctcgttgctgtcagattccagcaatggtgaccggtcgtggcggttgaacttcgacggagttcagctatcttcggagcacacggagaagcaagtgaaaccccctcgcggactccatgactgttatggggttcttggtcaagaagataatattgcggagtacta

SEQ ID NO: 147095 - DNA, 248 bp, Glycine max
aactagtcgaactcgaagttcgcgaccttcttacctcctacgaattccccggtgacgatacccccatcgtctccggctccgcactcttagccctagaagcccttatggcgaaccctgccatcaaacgcggcgacaacgagtgggtcgacaaaatctacaaactcatggacgaagtcgacgactacattcccatcccccagcgccagaccgacctcccattcctcctcgccgtcgaagagttttctcca

SEQ ID NO: 147096 - DNA, 242 bp, Glycine max
gggctacgaaaaacgacgtcgttttcccaattttccccggcgaccgggaaatggtggagccggtggagcttcgcggcgaggagcagctctcgttgctgtcagattccagcaatggtgaccggtcgtggcggttgaacttcgacgggtttcagctatcttcggagcacacggagaagcaagtgaaaccccctcgcggactccatgactgttatggggttcttggtcaagaagataatattgcg

SEQ ID NO: 147097 - DNA, 246 bp, Glycine max
ggcgcttacaaccaatcacaagtttctttccagatgggaaaggttggagagaagcttgatatcgactttgtagtttccactggagacaacttctatgacaatggactaactagtgaccatgacaacgcgtttcaagagtcattcactcaaatttacacagcaaaaagcttgcaaaagcagtggtacagcgtgttaggcaaccacgactataggggtgatgcagaggcccaattgagcccggtcctt

SEQ ID NO: 147098 - DNA, 250 bp, Glycine max
ggttgaggcaactgttaagactggaatcatgcgtcaaatggaagcatttagagcagggttcaatcaggtttttgacatctcatctttacaaattttttctccccaagaactggattacttgctttgtggccggagagaattgtggaagactgagacactagccgatcatataaaatttgaccatggttatactgccaagagccctgccatagttaatttactcggaattatgggagaattcacaccagag

SEQ ID NO: 147099 - DNA, 249 bp, Glycine max
ccgccgacgagaccacagaggcaccagcaaaagtagaggctgcaccggtcgggttcaccccaccagaacttgacccaaacaccccttccccgatcttcgggggcagcaccggcgggctcctgcgcaaggcacaggtggaggagttttatgtcattacgtgggactcacccaaagaacagatctttgaaatgcccactggcggcgccgctatcatgagggagggtcctaaccttctcaagttggccagga

SEQ ID NO: 147100 - DNA, 246 bp, Glycine max
gagtaatattcatatttccggcttattttacgacggcagatacaaattctggactaaacacgagaaaaatcttgctttgacagaagaggaaaagatggaggtgattagaaatagaggcattcctgctgatgttcttgcaaagcgagctcatgaatttgaaaaacatgttgctcatgaaagcctcaaggatcaaattcctgctgttgacaagttgtattctactaaggttaataagtttgcaaaaat

SEQ ID NO: 147101 - DNA, 245 bp, Glycine max
ggttcatcatcataaccttcaatgaaaagaaatggctgaggcaagcattggcagcaaaagcagcagatggtctttacagggaatgacagctctcgtcaccggtggatccaaaggaatcggttatgctatcgtggaggagttggcacagcttggagccactgtgcacacttgcgctcggaacgaagctgaactcaatgaatccttaaatgaatggaacacaaaaggatacagagtaactggttccg

SEQ ID NO: 147102 - DNA, 243 bp, Glycine max
  unsure (1)..(243): unsure at all n locations
cactgattgtgttcaatgctaaagggaagctttttgagtattcttctgaatccagcatggaaaacgtcctggaacgatatgagagacatactcatatagggaaacttgttggagatggtgatgaatcacagggaaactggtccttacaatgcttcaagctcaccggcaaagttgaagtcttagagaggaacttgaggaaacgngtgggagaagatctggatcccttaaacttgagagagcttc

SEQ ID NO: 147103 - DNA, 257 bp, Glycine max
tgaaattcgaacaatgattttttcattttctttttaatacttttttggtttagactccctaagaatctgtcgatatttccaattaaatcttcttgttcctgtgaaggtcctataaaaaaaagggctatgcctttctttactcagaagggccttattccaagttccaccaaacaagtttttattcatttgaaacatctttttttccgaatacaagaaaaaattcatttcaatttcaattatttctataagataaaatc

SEQ ID NO: 147104 - DNA, 257 bp, Glycine max
caaaggtgttcggatgcggaaatggggcaaatgggccgcggagattcgtgaccctttcaagggcacgcgaatctggttgggcactttcagcactgcagaagaggcttctcaagcctatgagaccagaaggcttgagtttgaggtcatggccaaggctctatctgatgagaagagcaacaatggcagcagcaacaacaatgttgttgcttctgctgaaactgaaactgtggctgcccctgaaaataacagttcaaact

SEQ ID NO: 147105 - DNA, 255 bp, Glycine max
attgatagttgcattgagagtttcaatttaggtgatattgacaaatacaatgatatttatttttatagttacatttttttgaagggcagaaattgtagtgaaagcgataattctagtactagtataataactagtacgaatgatacaaatgatagtgattccactataggagaaagttctaataatctcgatgaaagtcaaaaatataagcatttgtggcttgaatgcgaaaattgttatggattaaattataaa

SEQ ID NO: 147106 - DNA, 257 bp, Glycine max
tatcgagccgaatcggctcagcacaagaagactcctcaatcataccatagacatggccaccgtcacttctgcagcagttactattccctcattcactggcctcaaggcaagcgcaggcaaagtgagtgccgccgcagttaaagtctcagctccccaagccacaaggttctgcggcatcaaggcttccctcaaagacgttggagtcgctgttgtggccactgctgcgagcgcagttctagctagcaacgccatggcca

SEQ ID NO: 147107 - DNA, 255 bp, Glycine max
ggcttatggtggatacctaggcacccagagacgaggaagggcgtagtaagcgacgaaatgcttcggggagttgaaaataagcgtagatccggggattcccgatataggtcaacctttcgaactgctgctgaatccacgggcaggcaagagacaacctggtgaactgaaacatcttagtagccagaggaaaagaaagcaaaagcgattcccgtagtagcggcgagcgaaatgggagcagcctaaaccgtgaaaacg

SEQ ID NO: 147108 - DNA, 258 bp, Glycine max
cacatgtcctccacattttcaagtctaaatgtctctaccttgctgcaaaaccctgcagcccatgctgcagcgagttttgctgctacattttggccatatgcaaatgcagaaacttctgcagattctcccgtgtgcactccagattttccatcaagacaaattggctcgcctccaagtgtgacagctattgcagctgctacagtagctgctgcaactgcatggtgggctgcccatggactgcttcctttatgtggtcca

SEQ ID NO: 147109 - DNA, 257 bp, Glycine max
tcttgttcttggacaagcatgttaccatacagcaagagcttccccagagtcatcttgggctgctcaaaggttggaggtccatcttttgagttcacaagcttcttcccaacactgtcaacaccaacaccagaaatccacttcctcacttcatcatcatatactctggccctcagtgcaccaaagaaatcaatggattggccagggcaggtgtcaacaagcttgacaatgtcctgttcaggaataccatcagtgcggaa

SEQ ID NO: 147110 - DNA, 261 bp, Glycine max
ggagaaagcaaaggctcgtgctttgaaacgtgttgttggggatcccttcaaaaagggtgtcgaacaaggacctcagattgatgtggaacaattccagaaggtccttaggtacataaagtccggtattgaaagcaaggccacccttgaatgtgggggtgaccaaattggctcaaagggcttctttgtccagcccactgtcttctcaaatgttcaggatgacatgttgatagcaaaagatgaaatatttggccctgtacaaac

SEQ ID NO: 147111 - DNA, 240 bp, Glycine max
cagatgtcaagtccatggttcataccttttgcatatgtcatacttggcgattcctcctactgcctgttggagtttttgtggtcaggaggcacaatccagggttggtggaatgacacacggatgtggctttataagagaataagctcttacctccctgctttttttgatatcatcttgaagtttttcgggttttcagaatcagcctttgttatatctgcaaaggtagcagaagaaaatgtt

SEQ ID NO: 147112 - DNA, 254 bp, Glycine max
gcaattgaagttgaagtcttgcccttctctcttcaactccaaacacaagatctcatcatccatggctgcctccgtctccactgtcggagctgtctacagagctcttttgaacctgaatgggtctggacctggggtttcagctcccagttcatccttctttgggagcagcttgaagaaggttattggctcaagggtccccaacacaaagatttcctctggaagcttcaagattgttgctgtagaagagaagaaag

SEQ ID NO: 147113 - DNA, 252 bp, Glycine max
ggcagggaaggaggagaaggaggggaaacttcagaagggaatcgcggagttctacgacgagtcttctggcttatgggagaacatttggggcgaccacatgcaccatggcttttatgacccggattccactgtttcgctttcggatcatcgtcttgctcagatccgaatgatccaagagtctcttcgctttgcctctgtttctgaggagcgtagtaaatggcccaagagtatagttgatgttgggtgtggcat

SEQ ID NO: 147114 - DNA, 252 bp, Glycine max
tgaaattttaaaaatgactgggataaacttaagaattcaattattgaagttgaatgagtaaacaatttaattggattggtcgaatggtatcaaaaaaatggagtactaactcccatttcttgtttattattgaattaaccgatcaacttgctttgttatcgaacatttctttttgatttcaaaaattttccggaaaaaatttgaatctatttttatatgcgaatcaatcctactacttctggtcctgaggtt

SEQ ID NO: 147115 - DNA, 261 bp, Glycine max
gttgataccactgtcaagatttacaatgggaaaaccactattcgttgtaggatcactgagggaaaagtgggtcataagtttggagagtttgctctcaccaggaaacgcaagaccagagaacaagccaatgccaaaaatgttaaacaacttaagaaaaagaagtgatatttaccttctgtacttttggacaaaaataattttgcagatattttattttctgcaattatttacatcaatctgtatgtttcttaggttctctag

SEQ ID NO: 147116 - DNA, 197 bp, Glycine max
gctggtgcaaagaatgctattctcatgaatatgccaaatgctgttctttcaatgtggagatattttgttggagatctcgtctttgaagtttctaagatgacttctccctacattaaatgtacagtctctttcttcatagcatttggaaatttggctgatgacaccatcaattttgaggcttttcccacaagctggtg

SEQ ID NO: 147117 - DNA, 256 bp, Glycine max
aacacatgaggtcctttgcaaacatctgcaatgtagggataaagaatgaacaaatggctgaggcttcagcacaagcttgtgtcagtattccttccaatccctggagttctctgcaaaggggtttcagtgcataataactccctgtaatgtgcactagtaaagaccaaagtatgattattgttacattatgttacatggttgtacttgtatatacatatcttgtcccacctttgtaaatacatttgggacactacta

SEQ ID NO: 147118 - DNA, 253 bp, Glycine max
ctggcacgcggcgagttgcggtgcatcggtgcgacgacgctagacgagtatcgcgagcacgtggagaaggacaaggcctttgagcgtcggttccaacaggtgttggtgaacgagccgtccgtcccggacacggtgagcattctgcggggtgtgaaagagcgatatgaggcgcatcacggagtgcagatcatggattcggcgctagtcgctgctgccaagcttgcagaccgctacatcaaggggaggttcatgc

SEQ ID NO: 147119 - DNA, 254 bp, Glycine max
atttggaagacattgtcaatttaatatatgaaacgctgtcaaatccatcttacaaaggtgttatcaatggaactgcaccaaatcctgtgcgattggcagaattgtgtgatcagctgggacatgccttgggtcgtccctcatggctaccagtaccagactttgcgctcaaggctgtccttggagaaggtgctactgtggttttagaagggcagaaagtgcttcctactcaagctaagaagttgggtttcccattc

SEQ ID NO: 147120 - DNA, 253 bp, Glycine max
ctgcttcaccttctgctctagataattcagtgctgaaacatggcttcggctactctctctgtagccaaaccagcccttcaggcaaatgggaaaggcttctctgaattctctggcctccgaagctcatcaggcttccttcccttttctagaaaatcttcagaggatttccattctgtcattgccttccagacctatgcagttgtaagcagtggaggatacaagaagggtgtgacagaagcaaaactgaaggttg

SEQ ID NO: 147121 - DNA, 262 bp, Glycine max
gaataaaacaagaggaggaaatgcaacttacttgttgatataaacttcacagagagaaagttgttgtaaagccttgttgctgccatggccacccacgcggctcttgcttctacaaggatcccttcaaacacaaggttcccatccaaggcctctcactctttcccaacccaatgcgccttaaagagacttgaggtgacagaattctctgggcttagatccacttcatgtgtcacatatgctaacagtgctagagaatcttcct

SEQ ID NO: 147122 - DNA, 262 bp, Glycine max
tatgtttttacaatccttcaaaaattttgtttctttgtgtgtgtatggtgatgataacttaattagtgttcatgaatatgtcaagccttactttagtggttctaaattgaaaagctttctagctggtcataatatcaccattactgatggtattgacaaaactagtgcaactttgcaatttagaaagttagcagattgtgattttctcaagagaaactttaagcagatgtctaatgttttgtgggtggctcctgaggataag

SEQ ID NO: 147123 - DNA, 257 bp, Glycine max
attttgttttagttgtttgtcagaagcacactccccttgttcatgtctgatgtgggagctttgggctaagaagtgtcgagacgaatcagaaactgttaattggataactgttcatacaaaaccatgtccaaagtgtcacaaaccagtggagaagaatggtggctgtaacttggttagctgtatctgtggccaagctttttgttggttgtgtggtggagctaccggccgagagcatacttggtcaagtatagctggtc

SEQ ID NO: 147124 - DNA, 255 bp, Glycine max; identical to SEQ ID NO: 147068

SEQ ID NO: 147125 - DNA, 252 bp, Glycine max
gtgccacaatccctctctctctccgacgtacatttccatctttttagggtttcatttcatggactccgattcctggatttccacgcgcctctcttcctcttcacgccgccaccattatctatctgatctgtacgcggaggagagtgaagggaacgatgatttcagggcggagtttctatgcgctttctgcgccgaggattacgacgtcgtttccctctgttgccacattgacgaccaccaccctatccaagc

SEQ ID NO: 147126 - DNA, 252 bp, Glycine max
gtttaggatcagtgtttaagcgagatgaccagagacttcaacagctgagggagagagatgctcgtgaaaaagatcccaacttcatctcagagagttactctgaatgttacccagggtatcaagaatataaccgtgagatagtggacagtgatgatgaagatgacttatccaaaatggatatgggtggaagggcaaagggtcgtcttcatagatgggactttgaaactgaagaggaatgggcaacttacaatg

SEQ ID NO: 147127 - DNA, 255 bp, Glycine max
gaagatgactggggggggtatcactatgcaatcgacgccgggaagctcaggatacttggatttgtatccagagcggaagatgtcctttttcaaaaatccttacattctcggactggctgctgtcgccggcatcggtggtctcctcttcggctacgacactggtgtgatatcaggggctcttttatacattaaggatgattttgaggaggttagaaacagcaatcttctccaggaaacaatagtcagcatggctat

SEQ ID NO: 147128 - DNA, 260 bp, Glycine max
gctgtacagtgtggtaacctatatccctcttgatttactcaaatttgctatccgctatattctaagtgggaaggcttgggataatcttttggagaacaagactgccttcactacaaagaaagactatggtaaagaagagagggaagctcaatgggcggctgcacagaggacacttcacggtcttcagcctccggaaacttccaaccttttcaatgacaaaaatagctacagggagctttcagagattgcagaacaagcca

SEQ ID NO: 147129 - DNA, 257 bp, Glycine max
gtggagatattttgttggagatctcgtctttgaagtttctaagatgacttctccctacattaaatgtacagtctctttcttcatagcatttggaaatttggctgatgacaccatcaattttgaggcttttccccacaagctggtgcagtttggagagattcaggaaaaagttgtattgaaattttcacaagaggaatttcttacagcttggtcaactcaggtgcgtcctgcaacaactctgttggctgatgggtgtc

SEQ ID NO: 147130 - DNA, 249 bp, Glycine max
ggcgatctggtaaggagcttgagaaggagcccaaatttttgaagaatggtgatgctggtatggttaagatggttccaaccaagcccatggtggttgaaactttctctgagtatcctccccttggtcgttttgctgtgagggacatgcgtcagaccgtagctgttggagtcatcaagagtgttgagaagaaagaccccaccggagccaaggtcacaaaggctgccgccaagaagaagtgattgcattttg

SEQ ID NO: 147131 - DNA, 251 bp, Glycine max
atccaggacaaggaagaaattcccccggatcagcaacgtctcatcttcgccggaaagcagctcgaggacggccgtaccctcgccgactacaacatccagaaggagtcaacccttcaccttgtccttcgtctccgtggtggcatgcagatcttcgtcaagactctcactggcaagaccataaccctagaggtcgaaagctctgacaccattgacaacgtcaaggccatgatccaggacaaggagggaatccc

SEQ ID NO: 147132 - DNA, 251 bp, Glycine max
gagatacatttcccctcggatgtgcttttgatgagtcagatgttcaccacaagcatttcaaggacaatccggataacacaaatcctacttataacacgagaaatggaatctacaaagaaggaattggactagacaatgttgtgatgtcatggggacatgatgagtatatgtatttggttgcaaaggaaaacggcaccactttgcctccagtagcattgttcattatcaaataccattctttttacgcttta

SEQ ID NO: 147133 - DNA, 251 bp, Glycine max
agttgcgttacccttcgtacccagagcaaaatgggacatggaaattcccaggaattggtgctttccaatgctatgacaagtatatgttgagtagcttaaaagctgctgctgaagctcacggtaagcctgaatggggaagcacaggccctactgatgctggccactataacaactggccagaagacactcaatttttccgcaaagaaggtggtggatgggatggtccatatggtgagtttttcctcacttgg

SEQ ID NO: 147134 - DNA, 252 bp, Glycine max
cttgagagaaaaaatattccatttccagaattagtagcactagtgctctcttttgtttcgaaaaaaatggttcaacaggaagtgcgtaaaggtccttggacagaacaggaagacttcaaattggtgtcctttgttggattgtttggagaccgtagatgggactttatagctaaggtatcaggtttgaaggtggcgggagaaagtaaaataggcattagacaaaaaaaatcaaatgcttatttgggcatcatg

SEQ ID NO: 147135 - DNA, 256 bp, Glycine max
actcttgtgacttacacccaacttgccaactggggtcaatgctcctcatggcagaacttcactgcttctccattcactgctggtgctaaaacaatcacgtttgacaacagctgtgattacttttcgactggtaaagtgaaagctatgacactgtctctttctgtgttggtagccattgaaatgttcaactctctcaatgccctgtctgaggatggaagccttttgacaatgcccccttgggtcaacccttggcttc

SEQ ID NO: 147136 - DNA, 255 bp, Glycine max
ttcattctctttgcgcagttccctacctctcctttcaagatgcagatccacgtcaagaccctcaccggaaagaccatcacccttgaggtggaaagctctgacaccatcgacaacgtcaaggccaagatccaggacaaggaaggaattcccccggatcagcaacgtctcatcttcgccggaaagcagctcgaggacggccgtaccctcgccgactacaacatccagaaggagtcaacccttcaccttgtccttcgt

SEQ ID NO: 147137 - DNA, 248 bp, Glycine max
cgggattcgaggtcaagaatcacgtggggcccggtgtggttctgtcctacgttatctctggaatctctgccatgctctctgtcttttgctacactgaatttgccgtggagattcccgtcgctggtggttcatttgcttacttgagagtggagcttggtgatttcgtagcattcatagcttcaggcaacattcttctcgaatacgtgattggtggtgcagcagtggcacgctcatggacatcctacttc

SEQ ID NO: 147138 - DNA, 250 bp, Glycine max
ggtgactgtgctctgctctcatctcattcatattcatttcaatggcaactcaaggtcaagtcattacctgcaaagctgcggtggcctgggaacccaacaagcccttaaccgtccaagacgttcaggttgctccgcctcaggccggcgaggtccgtgtccaaatcctcttcaccgctctctgccacaccgatgcttacacttggggcggcaaggatcccgaaggtctcttcccctgtattctcggccacga

SEQ ID NO: 147139 - DNA, 249 bp, Glycine max
aaggcagaaagcaagctcatcctagagttttcaaaatggcagcagcctcctccatggctctctcttccccatccttggctggcaaggccgtgaagctgggcccatcagcccccgaagtcgggagggtcagcatgaggaagaccgtcaccaagcaggcctcctccggaagcccatggtacggcccagaccgcgtcaagtacttgggcccattctctggcgagcccccgtcctacctcactggcgagttcc

SEQ ID NO: 147140 - DNA, 255 bp, Glycine max
ggttaagcagatgataaagaaaatatctaggcatgcctcatctttaaaggttacaaatttgaatgaagtgttgatatctctaacttgcgctattatatgtagaattgcttttgggagaaggtacgaagatgaaggaactgaaaggagtaggttccaggagctactcaatgagtgtgaggccatgttgagtatcttctttgtttcggattatgttccattcttgggttggattgataaactgagtggactgcaagc

SEQ ID NO: 147141 - DNA, 257 bp, Glycine max
caacttcaagggcacccggtgggccgtcctcctcgccggttccaatggttactggaattacagacatcaggctgatgtttgtcacgcctatcaaatattgaggaaaggtggtctgaaagaagaaaatattattgtttttatgtatgatgacattgcattcaatggggaaaacccaaggcctggagtcatcattaacaaaccagatggaggtgatgtttataaaggagttccaaaggattacaccggcgaagatgtta

SEQ ID NO: 147142 - DNA, 258 bp, Glycine max
cgaaagtacgggatacattgactatgaccagatggagaaatcagcaacactcttcaggccaaaattaattgttgctggagctagcgcttatgcacgtctgtatgattatgaacgtgtacgcaaggtttgtgataaacagaaagctatattattggcagatatggcacacatcagtggattggttgcagctggtgtcatcccatcaccttttgatatgcagatgtagttactaccaccactcacaagtcacttcgggga

SEQ ID NO: 147143 - DNA, 259 bp, Glycine max
attgaaattttaaaaatgattgggataaacttaagaattcaattatggaaattgaataagtaaacaatttaattggattggtcgaatggtatcagaagaatggagtactgactcccatttcttatttattattgacttaaccgatcaacttgctttgttatcgaacatgtctagttgatttcaaaaattttccggaaaaaatttgaatctatttcatatgcgaatcaatcctactacttctggtactgaggtatctgcg

SEQ ID NO: 147144 - DNA, 253 bp, Glycine max
gctttggctttggaagaccttggatttttatattaagcttacttggacttacaccacttgctgaacgtgtgagcttcattacagaacaagttgccttttacactggtcccacagttggaggacttctgaatgctacatgtgggaatgttactgagctcataatagcaatatttgcccttagcagtaactatattgccgtggtcaagattctctgttgggttctattctttcaaaccttcttctggttcttggg

SEQ ID NO: 147145 - DNA, 252 bp, Glycine max
ggcttatggtggatacctaggcacccagagacgaggaagggcgtagtaagcgacgaaatgcttcggggagttgaaaataagcgtagatccggggattcccgatataggtcaacctttcgaactgctgctgaatccacgggcaggcaagagacaacctggtgaactgaaacatcttagtagccagaggaaaagaaagcaaaagcgatcccgtagtagcggcgagcgaaatgggagcagcctaaaccgtgaaaa

SEQ ID NO: 147146 - DNA, 253 bp, Glycine max
gcggtggatggagctccttatctaagaaaagtgctatgaagatgagttgcaagttggtgaaggtggcggtggatggagctccttatctaagaaaagtggatcttgaaatgtacgagacttatgagcatttgatgagggaattagagaccatgttttgtggcttagccattcgtaatcatttgatgaatgagaggaaactgatggagctggaaatgggattgaatacatgcccacctatgaggacaaagatggt

SEQ ID NO: 147147 - DNA, 254 bp, Glycine max
tgcctctcttccatctccccagccaaatcctctctcaagaaggccacattaggcccttctgtcttcgcaaccgttagcactccttcttctccttcttcttcttcttcttcttccttcccttctctcattcaagacaggcctgtctttgctgcccctgcccccatcatcaccccaactgtgagagaggatatggcaaaggaatacgagaagctattgaagaactccagaaattgttgagggagaagagtgaactc

SEQ ID NO: 147148 - DNA, 254 bp, Glycine max
ttaaaggagcaagtgggactagtattgattgaatgattgatagaggagtgagtctcggggcatcaaagaagaaagatgggagacgtagcagataaattggcgtatttccaagcgataaccggtttagaagatccggagctctgcacagaaatcctggctgcccacaattgggacctggaactcgctatctctactttcacctcttcctaaaccctaacaacctgccaccgcctcccgctctggcttggaaactc

SEQ ID NO: 147149 - DNA, 255 bp, Glycine max
actcaacgctgttagaccggcaggatcggcacttgttgatgattggcactgccttacaaccatggtgaggacttttgagacacattgtggatccttgtctcagtatggcatgaaacatatgaggtcctttgcaaacatctgcaatgtagggataaagaatgagcaaatggctgaggcctctgcacaagcttgtgtctctattccttccatccttggagttctctgcaaaggggtttcagtgcataataattcctg

SEQ ID NO: 147150 - DNA, 258 bp, Glycine max
tgaaagaatcatggcacttgatcttcctcatggtggccatctttctcacggatatcagactgataccaaaaagatatctgcagtctcgatattttttgagacaatgccatatcgattgaatgaaagtacaggatacatcgactatgaccagatggagaaatctgctacactcttcaggccaaaattaattgttgctggagctagcgcttagcacgtctctatgattatgaacgtgtacgcaaggtttgcgataaacag

SEQ ID NO: 147151 - DNA, 258 bp, Glycine max
gagcgttaagatgagtgagaaagagaaaggcaataatagtgagggacagtcgacgttgctgcacggcaagtacgagcttggtcgtgtgctggggcacggaacgttcgccaaggtgtaccacgcgcggaacctgaatacagggcagcacgtggccatgaaggtggtgggaaaagaaaaggtgataaaggtcggaatgatggagcaggtgaaagggagatctcggtgatgaagatggtgaagcaccaaaacatcgtcgaa

SEQ ID NO: 147152 - DNA, 255 bp, Glycine max
cggttgcggcaaccttcgatcttaatcccacggggcaacgttggatctgttgaacttcttcttttatatgcactctgtgatttcgctacaccctcactccgcttcgccaccctatgggggacaacaacagcaacaacgatgccttcatgcgcaaccaaaacgccgccgttcaggcccgcaccaaagcgcagaaccgttccaacgtccttcactcaaactgattggacagagtcacccaaccggtctaacagcgaa

SEQ ID NO: 147153 - DNA, 249 bp, Glycine max
agctcttgctgtatggtaacatgcttgtccaagaacaagagaatgtcaagagagtccaattggctgacaagtacttgaacgaggctgctcttggaaatgctaacgaggatgctattcagaggggaactttcttccagtcttgaattggaggcaaagcaaacttggcaagtaaatatttctgttcgtgaaggttgttgtactaatccagtgctagaagttgtgatggaacttgcgtgtaacattcttagc

SEQ ID NO: 147154 - DNA, 253 bp, Glycine max
gccagttctgatatttacaccatctgctctcaagactgtgaattgtggaatcctgcttgcacaaaagcaatgactatgtcatttaatccaaacccgtgttctgatgcatggagtttggaatttctgaagcgtaccggatttcattgtgatatcatttgtgtcactggatggactgccactccaatgcaggatgttcaggttacaattgattggtttatttcctctcaggaatgtgttcccaggacttattgtg

SEQ ID NO: 147155 - DNA, 252 bp, Glycine max
tatgcatccaagacgttttatgatcagaataaggagaggagagttttgtggggttggattggggagtctgacagtgaatatgctgatgtggccaaaggttgggcttcagttcagagtattcctagaactgtggagcttgataggaagactggcagcaacttacttcagtggcctgttgctgagatcgagagtttgagattgagaaggatgaatttaaaaatttgaaggctaaaccagggtcagtggtgtcat

SEQ ID NO: 147156 - DNA, 257 bp, Glycine max
cttgcaattgaagttgaagtcttgcccttctctcttcaactccaaacacaagacatcatcatccatggctgcctccgtctccactgtcggagctgtcaacagagctcttttgaacctgaatgggtctggacctggggtttcagctcccagttcatccttctttgggagcagcttgaagaaggttattggctcaagggtccccaacacaagatttcctctggaagcttcaagattgttgctgtagaagagaagaaaga

SEQ ID NO: 147157 - DNA, 259 bp, Glycine max
aggcagaggatgttattgaagacatcaaagcctggggattttccccaaacatagttacttataacactttgattgatgggcattgcaagaagggcagtgcccgaaaaatgtacagagctgatgccattttgaaggaaatgcttgctaataaaatttgtccgaatgagattacctttaacactcttattgatggtttttgtaaggatgagaagtgttggctgcaaagaatgcttttgaagagatgcaaaggcagggactg

SEQ ID NO: 147158 - DNA, 258 bp, Glycine max
atagagattttaagacttcaaatgtcttgctggattcagtatgtgaactttgaatctttttcattgaatgcataatgaaagaaaaaaagatctgacgagtgtagaaaccatttggatagcagatctgaaatatgtgttgttgatttgatcacagaaatataatgcaaaactttctgattttgggctggcaaaggacggaccaacaggagacaaagtcatgtctccaccagggtaatgggaacatatggatacgcagca

SEQ ID NO: 147159 - DNA, 247 bp, Glycine max
aaaagaggtgcaagatgagtggtagggtttctgggaaggtgaagtggttcaatgatcagaaggggtttggattcataagccctgacgatggcagcgacgatctcttcgttcaccaatctcagatcaaatctgacggtttccgaagcctcgccgaaggagagtccgttgagttcgccattgaatctgaatctgacggacgcgcgaagctgttgatgtcactggccccgacggcgccacgtccagggaa

SEQ ID NO: 147160 - DNA, 248 bp, Glycine max
caaagttggagttggattctgtctttgagcagaagaatgatatagcaaaggctgtggaggaggagcttgagaaggccatgtcaacctatggatttgcgatagtccagactctcattgttgatatagagcctgatgttaatgtcaagagagcaatgaacgagattaacgcagctgctagattgaggttggctgcagatgagaaggtgaagcagaaaaaatactgcagatcaaaaaagctgagggagaag

SEQ ID NO: 147161 - DNA, 248 bp, Glycine max
aatggaatcaattttataagtttaaaaaagacctaaagttagggatttctcaataggtaatgttgctccaatacctaaccaaagggcaactacagtaccaatcaaaaagatggtggttgctactggacggcgaaatgggttttggaatttattaacattctccaaaaagggtactgttaataatcctgtaggtaccgaaaccattaaagaacgcccaataacttattgggcactgtacgagtatttga

SEQ ID NO: 147162 - DNA, 252 bp, Glycine max
ggaagagtatgagaatatggacgatgtcggcacacttcaaacttgtggacatatctaccatgtgagctgcattattccatggctaacgatgaagagcttctgtcctatctgaaaagtatctgctttacctgaaagtacgaaggcatcatgcacttctggaatataaattactcccattatgtgtatagatttggacatccccaaaaatgacgacacgagcctgtatttggaaacgtaatcacaagcatgcta

SEQ ID NO: 147163 - DNA, 259 bp, Glycine max
cagcttttcaaagctgcagagctgatcgatgccggtaatctggaactcgcgcatgggatattggcgcggctcagtcaccaactttctcccattgggaagccttttcagagggctgctttttatttcaaagaggccttgcaattacttctccatccaaatgccaacaacagttctttcaccttctcacccactggccttttgctcaagattgggcttacaagtcattctcagaaatctcaccagttctgcagttcgccat

SEQ ID NO: 147164 - DNA, 253 bp, Glycine max
cttgaccaagattgacaggcgatctggtaaggaacttgagaaggagcccaaattcctgaagaatggtgatgctggtttggtcaagatgattcccaccaagcccatggtggttgaaaccttctccgagtatcctccacttggtcgttttgctgtgagagacatgcgtcaaactgtggctgtgggagtcatcaagagcgtcgagaagaggaccctactggagctaaggtcaccaaggctgcacagaagaaggcca

SEQ ID NO: 147165 - DNA, 247 bp, Glycine max
cttcgtttcttttcgtgaaacaacagaaaacacaagattaggacttgtgatgtcgggcatagagaggcttcagaggatgttcgcgggtgcatgtggagcgctgggccatcccccaccggattcccccaccctcgattcctccgagcaggtctacatctcctccctcgcccttctcaaaatgctcaaacacggaagagctggggtaccatggaagtgatgggtctgatgttgggggagttcgtggatg

SEQ ID NO: 147166 - DNA, 252 bp, Glycine max
aagaaaagcatggctaggagagcacattgtcttgtgttaccatatccacttcaaggacacatcaatcccatgcttcaattctccaagctattggaacatcaaggggtgagaataacacttgttacaactcgtttcttctataataacttgcaaaaagtgccaccttctattgtacttgaaacaatctctgatggttttgacctagggggcctaaagaggctggagggtccaaggcatatttagatcgctttt

SEQ ID NO: 147167 - DNA, 258 bp, Glycine max
cgtccttacactgttgtactgtttgatgagattgagaaagcccatcctgatgtgttcaacatgatgcttcagatcctggaagatggaagactaacagacagtaagggcagaacagtggatttcaagaacacacttcttataatgacatcaaatgttggaagcagtgtgattgagaaaggaggccgcaaaattggatttgatctggattagatgagaaggatagcagttataacagaatcaagagcctggtaactgagg

SEQ ID NO: 147168 - DNA, 253 bp, Glycine max
ggaagtagtggaggacaaggaaacgggattgcagaaatacaccgtagcaccgggagtgaacaagttatcaggggacaaggctgttgtgtgccacaagcagaactacccttatgctgttttttactgtcacaaaactgagaccacaagagcttactctgtgcctttggagggtgctaatggggttagggttaaagcggtagcagtgtccacactcacacgtcggaatggaaccctaaacatttggcctttcaag

SEQ ID NO: 147169 - DNA, 246 bp, Glycine max
ccagtgggttcttcttcttctattacagcaacgttgcccaagaccatgaccatggccatggccacgatcctgctcctgtacacggtcttcgcggtttcatcggccctagacatgtcgataatctcgtacgacaacgcccacgccgtcacgtcgcgcagcaaaggatgctgatgtccatgtacgagcagtggctagtaaagcaggcaaggtgtacaacgcgctcggagagaaggagaagaggttcca

SEQ ID NO: 147170 - DNA, 245 bp, Glycine max
ctccaagtatgtttttacaatccttcaaaaatcttgtttctttgtgtgtgtatggtgatgataatctaattagtgttcatgaatatgtcaagccttactttagtggttctaaattgaaaagctttctagctggtcataatatcaccattactgatggtattgacaaaactagtgcaactttgcaatttagaaagttagcgattgtgattttctcaagagaaactttaagcagatgtctaatgttt

SEQ ID NO: 147171 - DNA, 248 bp, Glycine max
ggaagtagtggaggacaaggaaacgggattgcagaaatacaccgtagcaccgggagtgaacaagttatcaggggacaaggctgttgtgtgccacaagcagaactacccttatgctgttttttactgtcacaaaactgagaccacaagagcttactctgtgcctttggagggtgctaatggggttagggttaaagcggtagcatgtgccacactcacacgtcggaatggaaccctaaacatttggcctt

SEQ ID NO: 147172 - DNA, 250 bp, Glycine max
tctgaagcagctcaatgagttcgtccgcaagaccggtggcgccggcaaaggtcgcactaacatgcgccgcaccgtcaagagtgctcctcagagcatttggtatggccctgaccgtcccaagtacttgggtccattctcggagcagattccatcatacctgaccggagaattccctggtgactacggatgggacactgctggatatcagctgacccggaaaccttcgccaggaaccgggagctggaggtga

SEQ ID NO: 147173 - DNA, 227 bp, Glycine max
tggaccacctagacaaccctgtggccaacaatgcttgggtctatgccactaagttttccccagggtcttaaaatgtatatgacttcttcttccctaatccctatgatcccatccctcgtgcttacctttgtgatttatgtgtagattatatgatcacaataattgttggattagtgtacttcttaaggactaaggttcaatttaaactcggatgtctcttgtttgtt

SEQ ID NO: 147174 - DNA, 256 bp, Glycine max
cagaacttgaagaagcttacggaggtcttcggtgtagagtgggccaacgatgctatcgttcccaaggtcatggctatggcccagcaccccaactacctctaccgaatgactacatgcttcgccgtctcaacactggcgcctgcactgagtctggatgtcattgaacagtccatcatccccatgatggacaagctggtcaatgacgattccccaacatcagattcaacgtggcgaagtcatatggtcagctcatcaa

SEQ ID NO: 147175 - DNA, 245 bp, Glycine max
gtcagggtgcacccattccatgttcttaggatcaacaagatgctttcgtgtgctggtgctgataggctccaaactggaatgagaggtgcttttggaaagccacagggtacttgtgctagagtggctattggacaggtccttctttctgtccgctgcaaggacagcaacagccatcatgctcaggaggctcttcgccgtgcaagttcaagttccctggtcgtcaaaagattatagttagcaggaaa

SEQ ID NO: 147176 - DNA, 244 bp, Glycine max
gtgacatttgggctgtttttggcgaggaagttgtcgttgcccagggcgattttctacatcgtgatgcaatgcttgggtgctatttgtggcgctggcgtggtgaagggtttcgaggggaaaacaaaatacggtgcgttgaatggtggtgccaactttgttgcccctggttacaccaagggtgatggtcttggtgctgaattgttggcactttcatccttgtttacaccgttttctccgccaccga

SEQ ID NO: 147177 - DNA, 244 bp, Glycine max
cgatcttcgatcttcgtcgctgaaaatgagagagtgcatttcaatccacatcggccaggccgggattcaggttggaaacgcctgctgggagctttactgcctcgaacacggcattcagcctgatgggcagatgccaagtgacaagaccgttggtggaggtgatgatgctttcaacaccttcttcagtgaaactggggaggaaagcacgtgccccgtgcgatttttgtagatcttgagcccactg

SEQ ID NO: 147178 - DNA, 246 bp, Glycine max
aaagccttagccttccctacaactccaaacattaagacatctccatccatggctgcctccgtctccactgtcggagctgtcaacagagctcttttgaacctgaatggttctggagctggagcttcagctcccagttcagccttctttgggaccagcttgaagaaggttattgcctcaagggtccccaacagcaaggtttcggtggaagcttcaagattgttgctgtagaagagaagaaagagattg

SEQ ID NO: 147179 - DNA, 243 bp, Glycine max
cctggatccccctgagctcattaaaccccccaaaatcttagtcattgaaggcttgcacccaatgtatgattctcgggtcagagatctcttggactttagcatctacctagacattagcaatgaggtcaaattcgcttggaaaattcagagagacatggcagagcgtggacacagtcttgaaagcatcaaggctagcatgaagcaaggaagcctgattttgaagcatatattgatccacaaaag

SEQ ID NO: 147180 - DNA, 245 bp, Glycine max
ccctactcattctccatacctcaacgattatgttaaagagacggcaacactttgctgtccgccttgaccgagcagagcttcgtcttggccctcgatcttgccctaaagtactctcagtcacaacagacaccgtcgtcgtcgtcgtcgtcatcaatggcaccgaagcagaccaaggctgagaagaagatcgcttacgatggaactgtgcgacctaatggaggagtacggccagatcctcgttgtga

SEQ ID NO: 147181 - DNA, 239 bp, Glycine max
gacaagataagtgagaagaagatgcttactccaatagaggtcttatgcaagtcatatccattggagtttacatcatacttccactactgccgaacgttgcggtttgaagataagcctgattattcttatcttaagagactatttcgggacctattcatccgagaaggttatcagtttgactatgtatttgattggactatctgaagtatcctcaaattggatccagttctagagcccga

SEQ ID NO: 147182 - DNA, 216 bp, Glycine max
gcatagcttcacagtagaacgatactatagctagctacactctttcaaatcacgctcccgatatcgctgctcgtcgtcattcaactcgtgtagcgcgaacctttcgatatcatgctccagtgtatgcaatctctgtgcagtagactcaaaatcgtgatgtctatagatgatgctgccggcatctcgagcatctatcgggaggaaacctattgacca

SEQ ID NO: 147183 - DNA, 249 bp, Glycine max
gttattgatgcgcctggacatagggatttcattaagaatatgattactgggacatcccaagctgactgtgctgttcttatcattgattcgaccactggtggttttgaagctggtatttccaaggatggacagactcgtgaacatgctctgctttcattcacccttggtgtgaaacagatgatttgctgctgtaacaaaatggatctactacacccaagtattccaaggccaggtatgatgaaattgtga

SEQ ID NO: 147184 - DNA, 274 bp, Glycine max
gttgacgcaatgtgatttctgcccagtgctctgaatgtcaaagtgaagaaattcaaccaagcgcgggtaaacggcgggagtaactatgactctcttaaggtagccaaatgcctcgtcatctaattagtgacgcgcatgaatggattaacgagattcccactgtccctgtctactatccagcgaaaccacagccaagggaacgggcttggcggaatcagcggggaaagaagaccctgttgagcttgactctagtccgactttgtgaaatgacttg

SEQ ID NO: 147185 - DNA, 261 bp, Glycine max
gaatgcatcaatgtggactataaatcaactagaaaggagtcattttatgaccttcagcttgatgtgaatcgctgtcctgatgtttatgcttcctttgacaagtatgttgaagttgaacgtcttgaaggggataacaaatatcatgcggaacaatatggtttgcaggatgctaagaagggtgtcctgttcattgatttccctcctgttcttcagcttcaactgaaaagatttgaatatgactttatgcgggatactatggtc

SEQ ID NO: 147186 - DNA, 262 bp, Glycine max
cttgtctttgccaagatgggaatcaaccccatcatgatgagtggtggagagttggaaagtggaaatgcaggagagccagcaaaactgatcaggcagagataccgtgaagctgcagacatgatcaagaagggaaagatgtgcgctctcttcatcaacgatcttgatgcaggagctggtcgtcttagtggaaccacacaatacactgtgaacaaccagatggtgaatgccactctcatgaacattgctgataaccccaccaatg

SEQ ID NO: 147187 - DNA, 264 bp, Glycine max
ggacaggtaaggaaatttcttgttgagttacgtgcttacttaaacacgaataaacctcaattcaaagaaatcatatcttctaccaagacattcactggggaagcagaagtccttttgaaggaagctattcaagaacagatggaactctttttactacaggaacaggtagaaaaaaattgattaatcatttaataactttataatttcactttcaaattcttataattagtatcttttaatatctttttatttcatttgaatata

SEQ ID NO: 147188 - DNA, 206 bp, Glycine max
taacatttatacaaaacaaaaaaacaagttctggccatggctgcatcatcatttaggcctccagccatagtggcggaagcagcgaggttcaaacccgaagtggcgaaggttcaaccatggtgaaactctgaaaggttcaggctaacaaaagggccttacacagcaagagatgtagtgtccctccgaggcaacctcagacaaaccta

SEQ ID NO: 147189 - DNA, 268 bp, Glycine max
ctcgagcgattcggctcggtgcgatgggatctcagggtagctgagcagtggatgcacgtgtgatagttgctcaaaatggcggaagttgcctgttgatgcacttattcccccaaagtggacatgtgtggagaatttatgggatcagagcaggtgttcatgtgctgctcccaatgaattgaacccaagggaactggataatcttctgaggctgaataaagaagtcaagaaacaaagactggcagcaagccagagaccggccctggaacgg

SEQ ID NO: 147190 - DNA, 264 bp, Glycine max
ctggggttggctatgggcagtggcttcatggagaggctgttgcagctggcacggtattttttaaaaaacaaaaatatcatgaattgtacttatatttgtgtttaatactaaagtctataggtctattctgatgaatctgtatgccaatgtacacaggtaatggctgttgacatgtcatatcgcctaggttggattgatgattctctagtgaagagagttggagatattttaaaacaggctaagttaccttcagcccctcctgag

SEQ ID NO: 147191 - DNA, 247 bp, Glycine max
gccgccgtcgccaccgccgcgatggcgtggcgcgtccgacgccgacgacatcctgatccgtcagtggtgccaatttggcgaacgaagaagtggacaacctgctgaacgccgagcaccacttcgcgacctccaaggccaagttcgccaagacctacgccaccaaggaggagcacgatcatcgcttcggcgtcttcaagtccaacctccgcagagccaggctgcacgccaagctcgacccctccgccgt

SEQ ID NO: 147192 - DNA, 261 bp, Glycine max
caggtaaattgtttacttggggtgatggagacaaaaatcgccttggacatggggacaacgaggcacgccttaaaccaacttgtgtggctgcacttattgattccaattttcataaaattgcttgtgggcacagtttgacagcaggcctgacaaaatctggacgtgttttcactatgggaagtactgtttatggtcagcttgggaatcctcaatctgacggaaaggttccatgcttggtcggagacaagattgccagggaat

SEQ ID NO: 147193 - DNA, 259 bp, Glycine max
gaaaaattgttctcaccgtgtgtgtgttgtgtgtgtgtgtgagagagagagagagagagagagagagagagagagagagagaggttaggctatggctgatgagagcgtcgttgagtccccagtgaagaggcagagagatgatgatgaagaatatgaggtctctgtctccatagatgtagagggtggcaaagactctcttagtaacggtttatcatctgtgattcctgggtggttctctgaaattagttcaatgtggcct

SEQ ID NO: 147194 - DNA, 259 bp, Glycine max
tagacatttcggtggagtttcacataagtctgatgtttatagctatgggatgatgttgctagaaatggtaggagggaggaagaacattgatgctgaagccagtcgcacaagtgagatatacttcccgcatttggcatacaagaggctagagttggacaatgatttaagaccagatgaggttatgaccacagaagaaaatgagattgcaaagagaatgaccataatggggttatggtgcattccaacattcccaatgatc

SEQ ID NO: 147195 - DNA, 269 bp, Glycine max
ggccagagtatatgatgatgaagtgaggtagtggatttctggtgttggtgttgacagtgttgggaagaagcttgtgaactcaaaagatggacctccaacctttgagcagcccaagatgactctggagaagctcttgctgtatggtaacatgcttgtccaagaacaagagaatgtcaagagagtccaattggctgacaagtacgtgaacgaggctgctcttggaaatgctatcgaggatgctattcagaggggaactttcttccagtctt

SEQ ID NO: 147196 - DNA, 264 bp, Glycine max
ctgatgctagtgatttgacaggtcctgctcagtcagtggtctgggatgccatggtgccttccaagaagaggacatgtgcaggtcgtccgaagccctcatctgttaagaagctcacaagagacctgtgcgatattcttcatgaacaacagtcttatatgtctgcatcttctgaagaggatcttctttttgaaagtgatacaccaatggtctctgttgagataggccatggaagcattctcatcaggcatcctagctctatagctc

SEQ ID NO: 147197 - DNA, 258 bp, Glycine max
ggcaaagaagccacactttgtgagaatggaagaagctcttgagaggctggaagaagtgttcaacaagtgcagtgaaggaagggcttattttggaggagatacaattggaattattgacattgcttttgggagcctttggggttgggtgagagtgatagaggagatgaatggaagaaaagtgtttgatgaagcaaaaaaccctgctttggctaaatgggctgataagttttctgctgatcctgctgtgaagggtgttct

SEQ ID NO: 147198 - DNA, 260 bp, Glycine max
ttggatttgccattgtgcaggcaattggccaagttcttttcctacgtccctatgtcaatgacttttctacagagtgggttatttcttctgttatcttattgactcttggctctgtgtttacaatgtacatcggagaacgaattacagacctaaaacttgggaatggcacctctcttttgatattcacaaacattatctcgtacttgccagcttcttttggtaggacaattgctcaagcatttaatgatgcaaactacatt

SEQ ID NO: 147199 - DNA, 262 bp, Glycine max
gattttgactttgggaaaaagaaatcatttccattccgtgaccagcatttctttgcatcaattgagaaagcaaagagagtgcttgggtgggaacctgaatttgggcttgtagagggtcttgcagactcgtacaacctggactttggtagaggaacataccggaaagaggctgatttctcaacagatgacataattcttggaaagagtcttgttagtgtataaacttttctatttcaattttcagtatttcacttatatgtag

SEQ ID NO: 147200 - DNA, 258 bp, Glycine max
tgaagttgaagtcttgcccttctctcttcaactccaaacacaagacatcatcatccatggctggctccgtctccactgtcggagctcttcacagagctcttttgaacctgaatgggtctggacctggggtttcagctcccagttcatccttctttgggagcagcttgaagaaggttattggctcaagggtccccaacacaaagatttgctctggaagcttcaagattgttgctgtagaagagaagaaagagattgaag

SEQ ID NO: 147201 - DNA, 254 bp, Glycine max
atctcttcactcttattattccttctcttctcaacgacgatggaggacccatcagcagcaacaacgttgttgctgaacagcgaatattcgaggctgttcgtcgaggacacggacttgtacaatcgcattgtgttgggaaccctcttgccgcacttcgtgtggggcccactcccgcacttcctccagacgtggcttcgcaattacctcggcggcgtcctcctctacctcctctccggcctcctgtggtgcttcta

SEQ ID NO: 147202 - DNA, 258 bp, Glycine max
ttccaatatattccattctctctgtgtatttccctacctctcccttcaagatgcagatcttcgtcaagaccctcaccggcaagaccatcacccttgaggtggaaagctctgacaccatcgacaacgtcaaggccaagatccaggacaaggaaggaatccccccggaccagcaacgtctcattttcgccggaacagcaacttgaggacggccgtacccttgctgactacaacattcagaaggagagtactcttcacctc

SEQ ID NO: 147203 - DNA, 255 bp, Glycine max
gctgtgttggtgagtgagttgtggtgcttttgaaagatgatgccgattctgatgaaaggtcatgagaggccattgacgttcctgaaatacaacagggacggcgatctcctcttctcctgcgccaaggaccacaaccctaccgtctggtttgccgacaacggcgaacgcttgggcacttatcgcggccacaacggcgccgtttggacctgcgacgtctcaagagattcggctcgactcatcacgggaagtgccgat

SEQ ID NO: 147204 - DNA, 255 bp, Glycine max
cagagcgtggacacagtcttgaaagcatcaaggctagcattgaagcaaggaagcctgattttgaagcatatattgatccacaaaagcaatacgcagatgcagtgatagaagtgttgccaacccaactcattccagatgacaacgaggggaagattttgagagtgaggttgatacagaaagaaggggttaagtactttagcccagtttacttatttgatgatggctctaccatttcatggataccatgtggaagga

SEQ ID NO: 147205 - DNA, 254 bp, Glycine max
tggtgggttgccatcacaagcctttgagtacatcaaatacaatggaggacttgagacagaggaagcatacccctacactggaaaagatggtgtatgcgcattctcagctgaaaatgttgccgttcaagtcattgactcggtcaatatcaccttgggtgctgagaatgaattaaaacatgcagttgcatttgttcggccggttagtgtggcctttcaggtggtgaatgggttccatttctacgagaatggagttt

SEQ ID NO: 147206 - DNA, 257 bp, Glycine max
caacaacatacctttcaatgttcttatctctgactgtggaaagcaagtctatctgttaccacagtgttatgcagagaaacaagctcttggagaagtggatgctgagcttcttgacacccaagtgaatcctgctgtgtgggaaattagtgggcacatggttctaaagaggaagaaggattatgatgaggcatctgaaggcaatgcttggaggcttcttgcagaggtgtccctctctcaagagaggtttcaagaagtca

SEQ ID NO: 147207 - DNA, 264 bp, Glycine max
caactctttcaaaagggagaagaaaaggaaaggaaacaaaacgcacaaaggattattatagcaatggcagaacaaaaccaaaaccagacaactgaagctggaaggcaccaagaggttggccacaagagccttctccagagtgatgctctttaccagtatattctggagaccagtgtctacccaagagaacctgaatccatgaaagaactgagagagttgacagcaaaacacccatggaacatcatgacaacctctgcagacgaa

SEQ ID NO: 147208 - DNA, 264 bp, Glycine max
tagaaacataactaaccttgtagtccactggaccagccgtaccagatatattagggacacagtccaacacacttctgaatttgcttcaagaaatcatttgccccatcgcattcaggatcaaatgttgtcacatctatgtttaaggttcataacagaaggactgaagcagcaagaaacattgaatgatcttccaaaggcaattcgttcaagcattgcacaccatctgttatcccctgtcgtgcaaaaggtctaccttttccaagg

SEQ ID NO: 147209 - DNA, 266 bp, Glycine max
gatatttcgtatctcactgggtcgcgctgctgtctacttggatatgggaaagtatgaggaatgcataaaagattgtgacaaggctgttgcatgaggaagagaactaagatcagattttaagatgatagcaagagctttgacaaggaaaggaaatgccttggtgaaattggcgaagtgctcaaaggattatgagcctgccattgagacataccagaaagcactcaccgagcaccgcaaccctgacactttaaagaaacttaatgaag

SEQ ID NO: 147210 - DNA, 265 bp, Glycine max
ggcttatggtggatacctaggcacccagagacgaggaagggcgtagtaagcgacgaaatgcttcggggaattgcaaataatcgtagatccggggattcccgatataggtcaacctttcgaactgctgctgaatccacgggcaggcaagagacaacctggtgaactgaaacatcttagtagccagaggaaaagacagcaaaagcgattcccgtagtagcggcgagcgaaatgggagcagcctaaaccgtgaaaacggggttgtggg

SEQ ID NO: 147211 - DNA, 257 bp, Glycine max
atcatcatttggtgcagatcaatttgatgatgctgatgaagctgagaaggagcacaagagctcttttttcaattggttctacttgttaataaatatttggtgctcttattgctgcttctgtgttggtgtgggtacaaaccaatgtcagttggggatggggatttggaattccagcagtggccatggcaattgctgtggtgagtttcttctcgggtacgaggttgtatcggaatcagaagccaggaggtagccccctc

SEQ ID NO: 147212 - DNA, 249 bp, Glycine max
atatcttgctagggttttaggaaaagacactgtctcgcgagtgaacacaggttacagcaatggctttctttggtagaattgggaatttattaagacagacagcaagcaggcaggttagttcagaattgcgatcatccccttcgttttttcaggctatacgcatatgtcatctgctccaagcacaaagctgtttatcggaggtgtttcatattctactgacgagcaaagtttgagggaagcttttcaaaa

SEQ ID NO: 147213 - DNA, 251 bp, Glycine max
gtttttaccaaggaagatgtgctgccctttgatatagaagggacatggaaagctatggaagagtgttacaagttgggaatagcaaagttcattggcatatgcaattatggtatcaaaaaactcactaaactcttggaaatagccaccattcctcctgcagtcaatcaggtggaaatgaacccatcttggcagcaagggaaactcagggagttctgcaagcagaaaggaattcatgttagtgcttggtcagc

SEQ ID NO: 147214 - DNA, 258 bp, Glycine max
gccaaagatcctgcggacattgtaagtaaatcttatgaagatggagatgataactaatgttaccgagtatgaggccattgcaaaggcaaaattgccaaagatggtttatgactactatgcatcaggggcagaggatcagtggactttgaaggagaaccgaaatgcattctcaaggattctgttccggccgcgtattcttgttgatgtgagcaagatagacttgactgcaactgtattgggcttcaaaatatcaatgcc

SEQ ID NO: 147215 - DNA, 259 bp, Glycine max
ccctatcatgatgagtgctggagagttggaaagtggaaatgcaggagagccagcaaaactgatcagacagagataccgtgaagccgcagacatgatcaagaagggaaagatgtgtgctctcttcatcaacgatcttgatgcaggagctggtcgtcttggtggaactacacaatacactgtcaacaaccagatggtgaatgccaccctcatgaacattgctgataaccccaccaatgtgcagcttcctggtatgtacaac

SEQ ID NO: 147216 - DNA, 261 bp, Glycine max
gacgtgagcaaaactcaaattggagaagaatatggtccgtgggttccttttattggaactttgtttctatttatttttgtgtctaattggtcgggggctcttttaccttggaaaatcatacaattacctcacggggagttagctgcacccacaaatgatataaatactaccgttgctttagctttacttacatcaattgcatatttctatgcgggtctttcaaaaaaaggattagcttattttaataaatacatccaacca

SEQ ID NO: 147217 - DNA, 260 bp, Glycine max
gataatccatattttcgattgggttacaacagtttgggtgcttttgcaaccattaaccatcttcacttccaggcttattatttggctctgcccttcccaattgagaaggcccccactaagaaaattgcaagtttaaatggtggggtgaagatatctgaactgttgaagtatccagttagaggtctcgtctttgagggtggcgatacgctggaagatttatcaaatgttgtttcagatgcctgtatatgtcttcagaacaa

SEQ ID NO: 147218 - DNA, 252 bp, Glycine max
aaacagcggaagtgaaataccactacttttaacgttattttacttattccgtgaatcggaagcggggcactgcccctctttttggacccaaggtcggcttcggccggtcgatccgggcggaagacattgtcaggtggggagtttggctggggcggcacatctgttaaaagataacgcaggtgtcctaagatgagctcaacgagaacagaaatctcgtgtggaacaaaagggtaaaagctcgtttgattctga

SEQ ID NO: 147219 - DNA, 251 bp, Glycine max
cttgactcggccttgttgagacctggccgatttgatagacaggtgacagttgatgttccagatataaggggaaggactgaaatcctaaaggttcatgctagcaacaaaaagtttgatgctgatgtttctcttgaagtgattgcaatgagaacacctggctttagtggagctgatcttgcgaatctgttgaatgaagctgctatattagctggtcgccgtggaaagacagctatttcatcgaaagaaattgc

SEQ ID NO: 147220 - DNA, 257 bp, Glycine max
cctggatccccctgagctcattaaaccccccaaaatcttagtcattgaaggcttgcacccaatgtatgattctcgggtcagagatctcttggactttagcatctacctagacattagcaatgaggtcaaattcgcttggaaaattcagagagacatggcagagcgtggacacagtcttgaaagcatcaaggctagcattgaagcaaggaagcctgattttgaagcatatattgatccacaaaagcaatacgcagatg

SEQ ID NO: 147221 - DNA, 257 bp, Glycine max
acttaaacagtataacttggataacaacatggacggtttttacattgctcctgcttttatggacaagcttgttgttcacatcaccaagaacttcatgaccctgcctaacatcaaggttcctctcattcttggtatttggggaggcaaaggtcaaggaaaatccttccaatgcgagctcgtctttgccaagatgggaatcaaccccatcatgatgagtgctggagagttggaaagtggaaatgcaggagagccagcaa

SEQ ID NO: 147222 - DNA, 248 bp, Glycine max
gcctctggtcgatggaacaatgtaggcaagggaagtcggcaaaatggatccgtaacctcgggaaaaggattggctctgagggctgggcacgggggtcccagtcccgaacccgtcggctgtcggtggactgctcgagctgcttccgcggcgagagcgggtcgtcgcgtgccggtcgggggacggattgggaacgggcccttcggggcctcttccccgggcgtcgaacagtcaactcagaactggtacgg

SEQ ID NO: 147223 - DNA, 248 bp, Glycine max; identical to SEQ ID NO: 139920

SEQ ID NO: 147224 - DNA, 246 bp, Glycine max
aattgaagttgaagtcttgcccttctctcttcaactccaaacacaagacatcatcatccatggctgcctccgtctccactgtcggagctgtcaacagagctcttttgaacctgaatgggtctggacctggggtttcagctcccagttcatccttctttgggagcagcttgaagaaggttattggctcaagggtccccaacacaaagatttcctctggaagcttcaagattgttgctgtagacgaga

SEQ ID NO: 147225 - DNA, 249 bp, Glycine max
cgaggaggaatatttggcaagagtcaattggatgcatggaaacattctcactgctcagatcttgaacaggcaccacactaaaataaagattgttaagtttgatattagaacaggtcaaaggaaaaatatattggtggaagaaaacagcagttggatcaatatacatgactgtttcacacctcttgataaaggagttaccaaattttcgggtggatttatctgggctagtgagaaaacaggatttagaca

SEQ ID NO: 147226 - DNA, 246 bp, Glycine max
gagactacatgaagcaaaatgttcaatgtccagaagcaaattatccaacatttctttatgcaatgcccatgtcccatacaaaagtgttctttgaggaaacctgtttagcatcaaaagatgctatgccttttgatttactaaagaagaagctcttttcgagattaaatacaatggggatcagaattaagaaaacttatgaagaggaatggtcttatatcccagttggtggatccctaccgaacacag

SEQ ID NO: 147227 - DNA, 245 bp, Glycine max
cggctcgagccttgatgggcttaccatcaaggttgtttcaagcagggaccctcttaagcttcattgggctgaacttggaattgacattgttattgagggaaccggagtgtttgtggatggccctggggctggtaaacacatccaagcaggtgccaagaaagttattatcactgctcctgcaaagggtgctgatattccaacttatgttgttggtgtaaatgaaggggactacactcatcagatct

SEQ ID NO: 147228 - DNA, 249 bp, Glycine max
ggctcgaggaattggaaactaattgtactgagtttccttatcctgatctactaatacgaactagtggcgagcttagagtgagtaacttcttgttgtggcaattagcctacacagaactttattttaatcgggaactctggccagattttgggaaggatgagtttgtagatgcattaagttcatttcaacaaagacaaagacgctatggtggtcgacattcataaacatttgtttgcaatatatagtgat

SEQ ID NO: 147229 - DNA, 248 bp, Glycine max
  unsure (1)..(248): unsure at all n locations
cggctcgatgcttgatgggtttaccatcgaggttgtttcaagcagggagcctcttaagcttccatcgggctagnatcttggaatgtgacatgtgttattgagtggaaccggagtgtttgtggatggccctgtggctggtaaacacatccaagcaggtgccaagaaagttattatcactgctcctgcaaagggtgctgatattccaacttatgttgttggtgtagatgaaggggactacactcagcaga

SEQ ID NO: 147230 - DNA, 229 bp, Glycine max
ggctcgagcttctcccgggaaaaaaagtagactaaaaaaatatgctaagtataaattgtctactgatgacatacgaaagctgatgatattgaaaaaaaaagaattgtaaataaggttcaggttcgacttccatagagaatatagatgatattgtctataatgatagaaaaaaataaaaaactttcgaaagattttatccaattgaacttttaaaaatgactgggataaa

SEQ ID NO: 147231 - DNA, 243 bp, Glycine max
ctttcttctgggaattcttgtgttgagttaaaattagaatcagagacagatgggggggacactgatcttttcatctccagacatcctctcatatttcctacacgacaccagcatgagtggtcttctcatgatattggctcaaagactttgattcttagctctaaagataaaaacatgggtgcagggacttacagcattggtgtatatggcttcaagggaattaccaggtataaaatatcagtt

SEQ ID NO: 147232 - DNA, 243 bp, Glycine max
aacatccttaaccctttgaacatcgttttgcagccatggaaacaggcatagcatgctacactcgcgggcctttcttgcctagtgtttcttccaagcactctccaccttccatttctccatcttttggcttgaggagtctgaaatcaagctctttatttggagaatcgctaagagtggcctccaaatcaacaataaagttttcaaagacaaagaatacttcactcgtgaccagatgtgaaattg

SEQ ID NO: 147233 - DNA, 248 bp, Glycine max
caaccatggcaatggcaacccaagcctctctcttaaccccacccctctccggtctcaaagccagcgaccgcgcctccgtgccatggaagcaaaactccagcctctccttctccagcccgaagcccctcaagttctccagaacaatcagagcagcagccgccgacgagaccacagaggcaccagcaaaagtagaggctgcaccggtcgggttcaccccaccagaacttgacccaaacaccccttccccg

SEQ ID NO: 147234 - DNA, 248 bp, Glycine max
cagattgtcaaggccgaggacagtattggtccagaagtagaaaagttggtggcttctcttccagatggaggtgttctccttctagaaaatgtgaggttttacaaggaggaagaaaagaatgaccccgagcatgcaaaaaagcttgcctctctggcagatctgtatgtgaatgatgcatttggtactgctcacagggcacatgcatcaacagagggtgttactaaatacctgaagccatctgttgctgg

SEQ ID NO: 147235 - DNA, 246 bp, Glycine max
acaaaattagccatttttgaaacaggaataaaagtagtagatcttttagctccttatcgtcgtggaggaaaaataggacttttcggtggagctggagtgggtaaaacggtactgattatggaattgatcaataacattgccaaagctcatggaggtgtatctgtatttggcggagtaggtgaacgtactcgtgagggaaatgatctttatatggaaatgaaagaatctggagtaattaatgaacaa

SEQ ID NO: 147236 - DNA, 247 bp, Glycine max
ccaaagaatgctcttgggaagcaatacaagaagatgttccaaatgaatggggtaaagctacattttacagaaaacgctctaagatcaattgccagaaaggcaatatctaaaaatactggtgctcggggattacgatcaatattagaaaatgtgttggtagatgccatgtatgagattcctgatattagaacaggcgatgatgttatagatgctgttgttgttgatgaagaggctgttggaggtgagg

SEQ ID NO: 147237 - DNA, 244 bp, Glycine max
aaagatattcattctaagggaaaaatgacagaggagcaatccaaaaaggtggctgagactgagagttttccctctaatcctgcacctgaacctgttgttgttccaaaggaggatgtggcagaggagaaatctgtaattccacaaccctctccctctcctgctgatgagtccaaagctcttgtcatagttgagaagactagtgaagttgctgaagagaaaccgattgaggggtctgtgaaccgag

SEQ ID NO: 147238 - DNA, 242 bp, Glycine max
cttcaaaacactcataacacaaagcacaaagcaaagctcatccttgagttaaaaaatggcagcagcttcttccatggctctctcatccccatccttggctggcaaggccgtgaagctgggcccatcagccccagaagtgggaagggtgagcatgaggaagaccgtcaccaagcaggtctcctcaggaagcccatggtacggcccagaccgagtcaagtacttgggcccattctctggcgagc

SEQ ID NO: 147239 - DNA, 242 bp, Glycine max
tggtgatgaaaaattgatgcgtgaaaggacacacctgctgttggcttgttgttcaagaatggcaatttgtaagaaagatgtttggagagttgaatgtggaatcccttctggatttccgctcacagttatttgtaatagcatttttaatgagatgctcattagatatagctatgaaaaattactgcgccaggctaaagctctaagtatgtttttacaatccttcaaaaattttgtttctttgt

SEQ ID NO: 147240 - DNA, 244 bp, Glycine max
ggcatcaaggcttccctcaaagacgttggagtcgctgttgtggccactgctgcgagcgcagttctagctagcaacgccatggccattgaagtgttactgggcactgatgacgggtctctggttttctctcccaactctttctccgtggcccctggggaaaagatcgtgttcaagaacaacgcaggtttcccccacaacgttgtgttcgacgaggacgagattcctagcggcgtggatgcaggga

SEQ ID NO: 147241 - DNA, 246 bp, Glycine max
gcactatcgtgacaccatgaatattaattcacttgcccgcaaatccttggtcaatgcagacggtattatagagaaaacatttttgtggggtaggtacgctttggaaatgtctgctgttgtttacaaggactgggtttttcctgatcaagcactgcccaatgatcttgtcaagagaggagttgccgttaaggatccatctgctccccatggagttcggcttttgattgaggactatccttatgcttc

SEQ ID NO: 147242 - DNA, 251 bp, Glycine max
tgaaattctaccagctacggaacgatctttgccatacactccttccatacatttgctgtatggtctgagagcttctcttgatccgatttttgaggaaggacttgaaaatgtgattgcaagacacagtcgtttaggcaaagcaaccagacttgctgtagaggcatggggtttgaagaattgcacccaaaaggaagagtggtacagtgacactgtgactgctgttcttgttcctgcttacattgatagtactg

SEQ ID NO: 147243 - DNA, 246 bp, Glycine max
tgcaattgaagttaaaagccttagccttccctacaactccaaacatcaagacatcctcatccatggctgcctccgtctccactgtcggagctgtcaacagagctcttttgaacctgaatggttctggagctggagcttcagctcccagttcagccttctttgggaccagcttgaagaaggttattgcctcaagggtccccaacagcaaggtttccggtggaagcttcaagattgttgctgtagaag

SEQ ID NO: 147244 - DNA, 242 bp, Glycine max
ggtagccctaggaacaggaaaaaaacaaatggaaaagcagcttgaggaacttgaaatatcataccctgataaggccagaggagtggcaaaattcaatgttcccctagcccacatgataatagctggagctgattttatattggttcctagcagatttgagccttgtggtctcattcagttacaagctatgcgctatggatctgtaccaattgttgcctcaacaggtggattagttgacactg

SEQ ID NO: 147245 - DNA, 240 bp, Glycine max
ctctcagaaaatccgtgttctttgtaatcgctcaatgcttcaccttttccgcatatgctgcaatgcttgaaatcacaaaccgatgcacatacactgtctgggctgcgtctgtgcctgttggcggtggcgtgcaattaaacccgggccagtcatggtccgtggacgtgcctgcaggaacgaaaggggcccgcgtttggacccgaaccggctgcaacttcgacggttcgggccgcggtggat

SEQ ID NO: 147246 - DNA, 238 bp, Glycine max
gcggttcttccatttgactcttgttctgaacgacttttcaagagaatcaaaccatggcagtgaaagtatacggtccccactgtgcttccaccaagcgggtgctggtttgtctggttgagaaggaagtcgaatttgaggttgtccctgttgatgtcactaagggggagcagaaggatcctgagtacctcaaactacagccatttggagttgttcctgtcatcaaagatggagattatac

SEQ ID NO: 147247 - DNA, 238 bp, Glycine max
ggaagatgccttttgttaaggtattgaaaaataaggcgtactttaaacgctaccaggtcaagtaccgtcgtcgtcgtgagggcaagacggactaccgagctcggaaacgtctgattacgcaggataagaacaagtacaactcgcccaaatatcgtttagtggttcgcattaccaatacaaaggtgatttgtcaaattgcgtacgctgaaattgatggggacaagattttggcgcaacg

SEQ ID NO: 147248 - DNA, 240 bp, Glycine max
tgttctagaggacttgaaagatggggtgcaaaggtttcatgaacaagatattgaggagaagaaagagctatatacccgtgaccatatgaaacctctggtgtataatagcaattttgatctgtacagttcaccagccctcaattggagggacagtttcatgtgttacctggctcctaatcctcccaaacctgaagacttgccagtagtatgcagggatatacttttggaatatgggacata

SEQ ID NO: 147249 - DNA, 242 bp, Glycine max
cgcccatacatgtgtgccactagtcatcgccattcaaactgttttgaacaatacaaaaagacatatacgaaagcaacttctgttcaaagcttgcagctagaagcaaacaattccaatattgatttaagcacaggtgaatctaaagacgatactgaagttcctgagcttctttgccccctttgtcgccggcaggtgaaaggttggacagtggttgaagtggcacggaagtgtctgaatgcgaa

SEQ ID NO: 147250 - DNA, 238 bp, Glycine max
gaaatggcgatggcaatggcgcttcgcaggctttcatcttcaattgacaagcctctgcgccctctcttcaatgccggttccctctactacaagtcgtctttgcctgatgaagctgtttacgacaaggagcgacccggagttacatggccgaagcagttgaatgctccacttgaggtcgtggatcctgagattgctgatattattgagcttgagaaagctaggcaatggaaggggctag

SEQ ID NO: 147251 - DNA, 238 bp, Glycine max
gccatggccacccacgcggctcttgcttctacaaggatcccttcacacacaaggttcccatccaaggcctctcactctttcccaacccaatgcgccctccagagacttgaggtgacagaattctctgggcttagatccacttcatgtgtcacacatgctaacagtgctagagaatcttccttttttgatcttgtagcttcccaactcactcccaagaccaatggatcaactcctgtga

SEQ ID NO: 147252 - DNA, 238 bp, Glycine max
ccgagcctcacgttccgccgctcgtgccgcgaggggatctgcggctcctgcgccatgaacatcgacggttgcaacggcctcgcgtgcctcaccaagatcccctccgaaggcgccgccaccacgatcacccctctgccacacatgttcgtgatcaaggacctcgtcgtcgacatgacgaacttctacaatcagtacaagagtatcgagccgtggctcaagaggaagaacccaccggagc

SEQ ID NO: 147253 - DNA, 236 bp, Glycine max
cttgactcggccttgttgagacctggccgttttgatagacaggtgacagttgatgttccagatataaggggaaggactgaaatcctaaaggttcatgctagcaacaaaaagtttgatgctgatgtttctcttgaagtgattgcaatgagaacacctggctttagtggagctgatcttgcgaatctgttgaatgaagctgctatattagctggtcgccgtggaaagacagctatttc

SEQ ID NO: 147254 - DNA, 238 bp, Glycine max
cttaattggtttcgggcaagggcagcccacatctcttgtgggcctgaaccacctaaccccatctcagatctctcagatccaggcccaaatccagatccagaatcacagcaacacgctgagcttcctagggccgaagcccatccctatgaagcacgtgggcatgcctccgaagcccacgaagctatacagaggggttcgacagaggcactgggggaagtgggtggctgagattagactc

SEQ ID NO: 147255 - DNA, 233 bp, Glycine max
cgaaacatggcaagagtggtggcactccaacagaaccaactatctttctctaccttagcttcctctctttctgacttcaatggaaccagacttcaaactcaacttcagttcaagagaaagcaatgccatccaaaaggggccttccacggcttcggatcgagcaaccaggaaatcctaataattggaggcaccaaggttaatgggggggttttggccaaggtccctgtcaaaga

SEQ ID NO: 147256 - DNA, 240 bp, Glycine max
aactgaagtcaagtctgtggagatgcaccatgaatctcttacagaggcacatcctggtgacaatgtgggattcaatgttaagaatgttgctgttaaggatttgaagcgtggttatgttgcctcaaactcaaaggatgaccctgcaaaggaggctgctaacttcacagcccaagtcatcatcatgaaccaccctggtcagattggaaatggctatgcccctgtcctcgactgccacacttc

SEQ ID NO: 147257 - DNA, 241 bp, Glycine max
cagaagaacacaagccaagttagaagacctcaatcttcacccaaacctcatcacctttgtccccatcaatgttcctcacgttgatggtcttccttatgatgcagaaaccacttcagatgttccctcctctttgttcccactcattgccactgccatggacctcacagagaaaaacattgaacttctcctccttgatctcaaaccacacatcgttttgttcgatttttccacatattggcta

SEQ ID NO: 147258 - DNA, 263 bp, Glycine max
gggtgtttgagttggctcgattcacaaccgagtcatagtgttgtgtttctgagtttcggaagcatggggagattctcgaggactcagttgagagagattgctattgggttggagaagagtgagcaaaggttcttgtgggtcgtaggagcgagttcgaagagggtgactcgggggagccaccgagtttggacgagttgttgccagaagggtttttggagaggacaaaggaaaaggggttagtggtgagggactgggccccacag

SEQ ID NO: 147259 - DNA, 264 bp, Glycine max
aagcaatttggcattttaaaggctggggcagttgggttggtatttcaagcgttacttctcagcatggctgttgctgtatattggagtggaacaatttctcatcagagccctcttcttactttcctatttctgattattctgtcaggttaggacacatgtcatatgatgttgtaggggctcagattctccagacaggaatcccatcatccaaagcaaatctcattgggacgacagagattgctgttgctagtttggcggagtcta

SEQ ID NO: 147260 - DNA, 268 bp, Glycine max
ctacagccctgatgaacccatcatcagcaatgcctcttgcaccactaactgccttgcaccctttgtcaaggtccttgatcagaaattcggtatcatcaagggtaccatgaccaccactcactcctacaccggtgaccaaaggcttcttgatgcgagccaccgtgacctgaggcgtgcaagggcagcagcactcaacattgtccccaattcaacaggagccgcaaaggcagtggcccttgtcctcccaaccctcaaaggcaaactcaat

SEQ ID NO: 147261 - DNA, 265 bp, Glycine max
ttcagtgcaaatgtcgttgtggatggaagcactgtgaatcttgggttgtgggatactgctggccaagaagattacaatagattgagacccttaagctatcgtggagcagatgtattcctgcttgctttctctctcataagcaggccagctatgaaaatgttgcccagaaatggattcctgagttgaggcattatgctcctggtgttccaattattcttgttggaacaaaacttgatcttcgggatgataagcagttctttcaaga

SEQ ID NO: 147262 - DNA, 137 bp, Glycine max
caatgcttgggcttatgccactaactttgtccctggacaatgaggatgcctacatgcaatgcaatcttctgctcccttttgcagttcccttgtgtttaactccattttcactaatgtaactacacctgtgtagcaga

SEQ ID NO: 147263 - DNA, 265 bp, Glycine max
gctctgcgagatcttgagtcgccgatttgaaaagatgagtaagcttcagagtgatgctttgcgtgaagccatctcaggaatcatggccgattccaaggagaagaatcgcaaatttgtggagaccatcgaactccaaatcggtttaagaactacgatccacagaaggacaagcgtttcagtggctccgtcaagttgccccacatccctcgccccaagatgaaaatttgcatgcttggtgatgctcagcatgttgaagaggcagaga

SEQ ID NO: 147264 - DNA, 263 bp, Glycine max
atttttcctttgatattaaatctcgctctagattggaaaaagtttcctctacaaaagcacaatttgttagtggaaaaaccttcaaatatgatataattggtgctggttcacattcttcagaagattttcctgaaaaggaagataagaaaaacccaaaaagattgataccagattgagacaaagaatagatcctcaatacaatgaggttcaggctcagatggaaacaaatttgtttaaattgtctcttgatgatgttgaaactc

SEQ ID NO: 147265 - DNA, 263 bp, Glycine max
gaaggagcctactgccaccacacaacatacgactcatctcttttgggaattactcgaatgctgcattgcagtatcctgttcttgcccacatgcaaagctactatggatttgtctgctgctgcaacaagtgcctcccccgtcttgttgctgctccagcagagaaaggccattttcttatagactttctcatgggaggtgtttcagcagctgtctcaaaaactgctgctgctcccattgaacgtgttaagcttttgatccagaac

SEQ ID NO: 147266 - DNA, 261 bp, Glycine max
cttccttcccctctctcattcaagacaggcctgtttttgctgccactgcccccatcatcaccccaactgtgagagaggatatggcaaaggaatacgaccaagctattgaagaacttcagaaattgttgagggagaagagtaactcaaagcgacagctgctgaaaaagtggagcagataacagcttctctagggacatcatcatctgatggcatcccatcatcagaagcctcagacaggatcaaagctggtttcattcactt

SEQ ID NO: 147267 - DNA, 260 bp, Glycine max
ctcgagccgctattatcatccgcagctgcttttattcgcaccgcaaacagtgagccatggccgtcggaaagaacaagcgcatctccaaggggaagaagggtggcaagaagaaggcagctgatccctttgccaagaaggattgtatgacattaaggctccttctgtttttcaagtgaaaaatgttggcaaaacgctcgtctctcgtactcagggtaccaagattgcttctgaaggactcaagcatagagtgtttgaggtct

SEQ ID NO: 147268 - DNA, 259 bp, Glycine max
ctccggcttgcctcgcgcctggacgccgtcgtggcccgcctcgacacgcaggcgaagatgacgacgatcagcaagtcgatgggcaacatcgtcaaatcgctggagtcgtcgctggccacggggaacctccagaagatgtggagaccatggactcgttcgagaagcagttcgtgaacatggaggtccaggccgagttcatggagagcgccatggcgggatccacctccctctccactcccgaaggagaggtcaacagcct

SEQ ID NO: 147269 - DNA, 244 bp, Glycine max
aggcagaggatgttattgaagacatcaaagcctggggattttccccaaacatagttacttataacactttgattgatgggcattgcaagaagggcagtgccggaaaaatgtacagagctgatgccattttgaaggaaagcttgctaataaaatttgtccgaatgagattacctttaacactcttattgatggtttttgtaaggatgagaatgtgttggctgcaaagaaaggctttgaagagatg

SEQ ID NO: 147270 - DNA, 264 bp, Glycine max
gtccagattagtaccacaaaaatggagaaatagaataactgaatatcgtatagctcaaaataaagatttaaccaaatgcaattcatatgaaaaaagccaattaattctttacaaagaacaacaagtaaacgcattaaaaaaaaaattagaaaacaatatagatacgatcttttatcctataattttatcaattatgcagataagaaagactcatatatttatggatatagatccctatttcaagtaaaaaaaaaccaagtgatt

SEQ ID NO: 147271 - DNA, 259 bp, Glycine max
caagtacaagaacaagaagaaacaatgtcttgctccaatctcacaatgttggtgtcctcaaaaccttccctttccgatccctccaatctctccttccgctctgtcctcaacccttttcagctcccttcacaaaacccacttcatgcactccttcacgctcctcaaccacccaaattcagtgtggtctgagagaactcagaacccgcattgattccgtgaagaacactcagaaaatcaccgaggctatgaagcttgtggc

SEQ ID NO: 147272 - DNA, 258 bp, Glycine max
ggaagagtacaagaatatggacgatgttggaacacttcaaacttgtggacatgactaccatgtgagctgcattaaaaagtggctatctatgaagaaattatgtcctatctgcaaagtatctgctttgcctgaggatacaaggataaataacttctgtaatataaattaatcccattttgtgtatatatttggacatccctaaaaaatgaggaaacgaacctgtttttggaaatgttataacaggaatgctactctata

SEQ ID NO: 147273 - DNA, 254 bp, Glycine max
attgtttgttgttgtaactcgttcttcttcttttgttgttctgtgtttgtgtttgttttttctctcacctgaaaatgtcttgctgcggtggtaactgtggttgcggaagctcctgcaagtgcggcaacggctgcggagctgcaagatgtacccagacttgagctacactgagtcaaccaccaccgagaccttggtcatgggagtggcactgttaaggctcatttgagggtgctgaaatgggtgtgccgctgaga

SEQ ID NO: 147274 - DNA, 255 bp, Glycine max
ggcttgtaatattttgcagggcaatctatattgaaaacgggagataggcaatggttctttttctgtcacagagataggaaatatcctaatggtggaaggtctaaccgagcaaccagacgtgggtattggaaagcaacagaaaggatcgtaacgtgatatgcaattctaggtcagttggagtgaaaaagaccctggttttctacgcaggcagagctcctagtggtgagcggactgattgggttatgcatgaataca

SEQ ID NO: 147275 - DNA, 257 bp, Glycine max
agtcgaataccttctaaggaaaggatggattccttgcttggaattcgagttggagcacggtttcgtgtaccgtgagcacaacaggtcacctggatactatgatggacgctactggaccatgtggaagctgcctatgttggctgcactgatgcttctcaggtgttgaaggagcttcaagaggctaagactgcataccccaatggcttcatccgtatcattggatttgacaacgttcgccaagtgcagtgcatcagctt

SEQ ID NO: 147276 - DNA, 257 bp, Glycine max
attggttgttgccaaagttggaaatcacaaacaaattgttggtttccatgttgctggaagcataggaagactgggatatgcttcattgataccatacgttgagccagttgtgcaagctcaaagtgctgaagtttacttgacttcttccctgtggaggttgatagtcaagagggagttgctcacattggtgaattgaaatctggtgtctatgttccactgcctacaaaaatctatttggtggaaactcccaaggaatg

SEQ ID NO: 147277 - DNA, 255 bp, Glycine max
tctggctcagagctttaccaagcgcccaatgaagggaatgcttactcgtcctgttaccattcacaactggtcctttgttagaaatgaccaacctagatctgagaccacctaccagattgctttgtctatcaagacgaagtggaagaccttgaaaaggctggcatcactgttatccaaattgatgaagctgctttgagagagggtcttccactgaggaaatcagagcaagctcactacttggactgggctgtccat

SEQ ID NO: 147278 - DNA, 254 bp, Glycine max
ctgctcgagcggctcgagcttcagtgcaatgctttggatcttttatgcctatgtgaagaccggagaaacgctacttatcaccatcaatgcattcggttgcgtgattgagacaatttaccttgccgtatttatcactactgcccgaagaaagctaggatgtcgacattgaggatgattgttttgttaaattttggggggatttgcacgattggtctcttaaacccactactagcaaaaggagagaagccgtgtca

SEQ ID NO: 147279 - DNA, 256 bp, Glycine max
gcttcggctactctctctgtagccaaaccagcccttcaggcaaatgggaaaggcttctctgaattctctggcctccgcagctcatcaggcttccttcccttttctagaaaatcttcagaggatttccattctgtcatgccttccagacctatgcagttggaagcagtggaggatacaagaagggtgtgacagaagcaaaactgaaggttgccatatacggatttggaaggattggaaggaacttcttgaggtgctg

SEQ ID NO: 147280 - DNA, 255 bp, Glycine max
gctagttccgacacagacaaagcaatggcaaagaccgagttagaggtgactgttgagagcaagaacaaagacctcaagcacctggggtttgtgaggattgctgctattcaaacatttgtgattgtgtcaaatctgatgagtacgcaaagcagaattctgggcctttgagatccgtcgtaggaacggttgagaacactgtaaccaccattctcggtcctgtctgcaacaaattcaaggacgtccctgatgatgtcc

SEQ ID NO: 147281 - DNA, 254 bp, Glycine max
tagagagagagagaaagaaattaagaaaaaatggcagcctgcactgtctactcaacacaatctctgtctgaaattgctccatctcaaccccatcaaagacacagctgagtttcttccaccaaaagcaggtactatctggaggaacagcaacaggggcaacagcagcagcagaagaagctatgtgataacatgtgcagcaggtgactcacagacagtggtgattggccttgctgcagactcagggtgtgggaaga

SEQ ID NO: 147282 - DNA, 253 bp, Glycine max
gaattattcatcacatcaaaactatggtccactgatgctcatcctgaccttgttgttccagctcttaagacctccctgcagaagttgggattggagtatgtagatctctatttgattcattggccagtgaggcgaaacctgaagccaaagggtaccataatatattaaaggagaatgtgcttccctcctttgacatgaaaggaatatgggaaggctatggaagagtgttacagattggggcttagccaagtct

SEQ ID NO: 147283 - DNA, 247 bp, Glycine max
cttagccttccctacaactccaaacattaagacatcttcatccatggctgcctccgtctccactgtcggagctgtcaacagagctcttttgaacctgaatggttctggagctggagcttcagctcccagttcagcttctatgggaccagcttgaagaaggctattgcctcaaggagtcccatcagcaaggcttccggtggaagcttcaagattgttgctgtagaagacgtgatagagattgatgaga

SEQ ID NO: 147284 - DNA, 253 bp, Glycine max
ctttcttcttcttctcttaaaagagcctttgctttttctttaggcctttccgaattaagtacttgtttcattttctctcgaagcaagaaaaatgttcatcgagagtttcaaggttgagagtcctaacgtgaagacacagagactgagattcagtccgtgtacaactatgaaaccactgatattgttcacgagaacaagaatggcacttatcagtgggttgtcaagcccaaaactgtcaaatatgaatttaaaa

SEQ ID NO: 147285 - DNA, 253 bp, Glycine max
ttcaagaataagtgtaatgtgggttatgcttttatcaatatggtgtctccttcacacatcatcgcctcttacaaggcctttaatgggaaaaagtgggagaagttcaacagtgaaaaggttgcttcactggcattgcacggatacaaggaaaggctgcgcttgtgatgcatttccagaattcaagcttaatgaatgaggacaaacggtgccggccaattctctttcattcagagggccaagatactggtgacca

SEQ ID NO: 147286 - DNA, 251 bp, Glycine max
gaagttaaaagccttagccttccctacaactccacacatcgagacatcttcatccatggctgcctccgtctccactgtcggagctgtcaacagatctcttttgaacctgaatgtttctggagctggagcttagctcccagttcagccttctttgggaccagcttgaagaaggttattgcctcaagggtccccaacagcaaggtttccggtggaagcttcaagattgttgctgtagaagagaagaaagagat

SEQ ID NO: 147287 - DNA, 250 bp, Glycine max
accggtgcggcaccgttgggaggggaactccaagaagccgttaaggctaggctaccacacgctacttttggacagggatatgggactacagaagcaggaccacttgccattagcatggcatttgcaaaagaccctcgaagattaaaccaggtgcatgcggaaccgttgtgagaaacgctgagatgaaaatcgtggatacagaaacgggtgattcacttccaagaaacaaatccggagaaatttgcataag

SEQ ID NO: 147288 - DNA, 253 bp, Glycine max
  unsure (1)..(253): unsure at all n locations
gtggctctcatcgtcttctccaccaaaggcaagcttttggactactccaaccaaccttgtacnncaaagaattcttgaacggtatgagaggtattcgtatgcggagaggcaacttgttggagatgatcaaccacaaatgaaaactgggttatagaacatgaaaagctcaaggctagggtggaggtactacagagaantcaaaggaattttatgggagaaganctggacagcttaaatcttagaggacttcaga

SEQ ID NO: 147289 - DNA, 252 bp, Glycine max
atctggtgctccaataagtagttgtttttggggatggaaacctaaactcaatgtgcactatgagaaggccgggtgcgaaaacgtcaatgatttgcctcgtgttctctttttaccaggttttggtgttggctctttccattatgagaagcaacttaaggatttggggcgtgactacagagtgtgggctctggattttctaagccaaagggatgtctatgcctttttgaagatcctgcacctttggtctaatga

SEQ ID NO: 147290 - DNA, 252 bp, Glycine max
aaactcttgaggaatctaatgcaaacttggatgatgtggttgcccttgctcaagagctccagactaaggctaaactaagagtgttatggggaacagctcagttgttcatgcatcctcgttacatgcatggtctgctactagctctgaattaaaggtctatgccatatgctgctgctcaagtgaagaaagccatagaggtgacacattatgtggggggagaaaattatgttttctggggtggtcgtgaaggtt

SEQ ID NO: 147291 - DNA, 249 bp, Glycine max
gtcttcctccgtcacctcgtggccacgtcggtcaaatttggtcgctctgctacacgctctatggcaacgtttgatcgtacgaaacctcatgtcaatgtaggtacgattggccatgtggatcatggtaaaacacgctcacagccgcgattaccaaggttctctcggagacaggtggggctgaattcacgagctatgcagatattgataaagctcctgaggaacgtgcgcgtggtattacaatttcgacgg

SEQ ID NO: 147292 - DNA, 249 bp, Glycine max
attaaaatatattcaattttgcgtttctctgcctaaaaggattgaaagatgggtcaagcattcggttgctaccaagtcgatcagtcaaatgtggctatcaaggagcattttggaaaatttgatgatgtctagagcctggatgtcactgcctgccttggtgtcttgggtaccagattgctggtagtctgtcgctgcgagtgcagcaacttgatgttcgatgtgagacgaaaaccaaggacaatgtctttg

SEQ ID NO: 147293 - DNA, 245 bp, Glycine max
gtggaagttcaggaccttcccttctttgacactgtgaaggttaagacttctaatgcacatgcaattgctgatgctgctctcaagagtggaataaatttgcgagttgtagatggaaacactatcactgttcttttgatgaaacaaccacattagaggatgttgataatcttttcaaagtttttgctggtggaaagccggtccccttcactgctgcatctcttgcaccagaagttcagagtgcgatt

SEQ ID NO: 147294 - DNA, 249 bp, Glycine max
acccaagcctgatccacgtccagagcatcctcgccatctgggccacacaagttatcctaatgggtgccgttgaaggttaccgtattgctggtggccccctcggtgaggtcactgacccaatctacccagtggcagcttcgacccattgggccttgctgatgacccagaggcttttgctgagcttaaggtgaaggaactcaagaacggacgattggccatgttctctatgtttggcttctttgttcaggc

SEQ ID NO: 147295 - DNA, 249 bp, Glycine max
cagaaactgcatcaatgctgtcatcagctacttgtaattcattggtggctctggatgagcttgggcgagggactgcaacttctgatgggcaagccattgcggaatcagtattagaacatcttgtgcggaggtgcagtgtcgcggattgttttctacccactatcatcgattagctgttgattatctcaaagatccgaaggtctgtctctgccacatggcatgccaagttggtagtggaattgcaggttt

SEQ ID NO: 147296 - DNA, 248 bp, Glycine max
agccaagtgaaattgagaaaaaataaaaatcaaagagcataatgtcagggatcattcacaagattggggagacccttcatgtgggagggcacaagaaggaggaggagcataagggtgagcaccatgctggagaatacaaaggggagaccatggtgaacacagtagtgagtacaaaggagagcatcatggtgaacacaaagctggagagtaccatggtgagcacaagccagagcacaaagaggggttcc

SEQ ID NO: 147297 - DNA, 251 bp, Glycine max
ctctcattcaagacaggcctgtttttgctgcccctgcccccatcatcaccccaactgtgagagaggatatggcaaaggaatacgagaaagctattgaagaacttcagaaattgttgagggagaagagtgaactcaaagcgacagctgctaaaaagtggagcagataacagcttctctagggacatcatcatctgatggcatcccatcatcagaagcctcagacaggatcaaagctggtttcattcacttca

SEQ ID NO: 147298 - DNA, 251 bp, Glycine max
gaacccaccaatcatctgatgcaggagcttcatagcaagtctgagatgcagatcaaacatgaattgcccagtgtaagaggaactgatcagctgaagttcaaagggactgttgctgatcagatggaagcttcttctggaacatcttacttattgatcctaataatatccaccagaacttcccacttcccaacttctgcatggatggggatgtccaatcacacccaagaaataatcttccatttgcctctaat

SEQ ID NO: 147299 - DNA, 252 bp, Glycine max
  unsure (1)..(252): unsure at all n locations
gagaagaaactagcaattactgtcttcagtttccctccagacaaaggaaacgtggggaactgctgcctatctcaatgtcttcgcctccatatactcagttatgaaagaactaaaaaaagatggttataatgttgacggccttccagagatccagaagcnttgattgaagatgtaattcatgacaaagaagctcaattcagcagcccaaatctgaatattgcttacaaaatgagtgtccgcgagtaccaaaat

SEQ ID NO: 147300 - DNA, 251 bp, Glycine max
ctttgcctctgaaagaaatgggtagtcttgaagcggaaagaacaacagtaggattggcagcaagagacccttcagggattctctccccatacacctacaatctaagaaacacaggccctgatgatgtttacattaaagttcactactgtgaatttgccattctgatctccaccagattaaaaatgatcttggcatgtccaactatcccatggtcccaggacatgaagtggttggtgaggtactggaggtgg

SEQ ID NO: 147301 - DNA, 252 bp, Glycine max
tgcagccatggccacccacgcggctctagcttctacaaggatccccactaacaccaagttcccatccaaggcttcacactctttcccaacccaatgcgcctcaaagagacttgaggtgacagaattctctgggctaagatccacttcatgttgacatatgctaacgatgctagagaatcttccttttttgatcttgtagcttcccaactcactcccaagaccaatggatcatcaactcctgtgaggggagag

SEQ ID NO: 147302 - DNA, 247 bp, Glycine max
ctctaacagccaaagcctggcttctctctcttgctccgccaacgaccttgccccactcttcaacgacaccgccgccgccaactacctctgcgcccaattcgattccatttctagaaagctcgccgaaacaacctacgccgtcgacacacctaccttctgttttcagcgtatcttgtcttcgccatgcagctcggcttcgccatgctctgcgccggctccgtcagagccaaaaacaccatgaacatca

SEQ ID NO: 147303 - DNA, 246 bp, Glycine max
cggctcgaggtcgtctgttgctgcgctgtgcttttccccattgtctggtccatcaagaacctccgtgaggccgctaggaccgacggcaaggccgctgttaatttgatgaagcttactctcttcaggcactactatgtcgtcgttactgttacatttacttcaccagggttgtcgtttatgccttggagactattacctcctatcgttattcttggaccagtgtggttgctgctgagttggccaccc

SEQ ID NO: 147304 - DNA, 249 bp, Glycine max
attttcttgccacctcactcccttcagtttcagctcatggcccatatgcatgggatggggaggccacatataaattcactacttaccaccctggccaaaactacaaaggtttatccaatgtcaaaaactacttccaccatctcggcacatccccaatgcaccacacttcgacgacaacttcgataccaccctcgtatctgccatcaaaacctaccaaaagaattacaacctcaacgtcaccggcaattt

SEQ ID NO: 147305 - DNA, 247 bp, Glycine max
gagaaaggcacaaaaagcttgctcaatattgtgattaagaatcagaaggcttgctcaatagtatgatttaagaaccagagattaataggaggtattgactgtctggccaacctttaatgctgcctctccattggtttttcttgtttggtcgctatcctttgtagcgagggcaggaagctgtgtatagtttggactgacatcttaggccttatgatcaatcacatgattactgcctttgtctcatttc

SEQ ID NO: 147306 - DNA, 247 bp, Glycine max
tttgcatttgatcccttggagtttggcattccacggtgcaatattgaaagcttaaaaggtggtggtccagaatacaatgcagaggttttgaagcgtgttctaggtggagagagagggccaattgcagatgctttgattctcaatgcgcagcagctctcttagtcagtggctgtgtaagtaacctagctgaaggggtttctgtggcacgtgaaacacaacaatcaggaaaggctctgaaaacactcaa

SEQ ID NO: 147307 - DNA, 244 bp, Glycine max
cgaaaactagaggccagggtctgtagtgtgcgggtgggtttgtttatctcaaacacagaacagaggtgtagagaagaaagctctcaaaagtatggcggcggagtcatcactgagggtggcgactcccactatttgcaacctcatggttctcagagaagaccaaccactctctctccgcttcgcttcatgggttttagccctcgaccctctcactctctcacttcctcttccctttcacacttct

SEQ ID NO: 147308 - DNA, 243 bp, Glycine max
  unsure (1)..(243): unsure at all n locations
acactgaggtgagggatcaaacactaagtcggataaaaagcaacatagaacttatggttgctactaatggtggaaataaggcagttattattccacattccatgggaggggtgtacttcctacattttatgaaatgggttgagcaccagctccaatgggtggtgggggaggaccagattggtgctccaaatatataagccnnctttgtaaacattggtggaccatttttaggtgttcccaagg

SEQ ID NO: 147309 - DNA, 242 bp, Glycine max
gtgcagtgacttgagaatggccttgccagtggtcgtcgacgcagagtacctcaaagaggtcgacaaggctcgccgcgatctccgcgcactcatcgctaacaggaactgcgctcctctcatgcttcgattggcctggcacgatccggaacttacgatgctaagaccaagactggtggacctaacggtttgatccgtaacgaggaagagtattctcacggcgccaacaatggcttgaagaaggc

SEQ ID NO: 147310 - DNA, 245 bp, Glycine max
gaaattttcacaagaggaatttcttacagcttggtcaactcaggtgcgtcctacaacaactctgttggctgatggttgtccatatttgtatgctatggtgcatgatagttcagtgtctacaataccaggtgattttgtcattgtgttaagttgacaaccataaacaatatgtgtgcatatgggctcaatcctggtatttcaggttctcgtcttttgggcaccattcctcagtctatttcacagca

SEQ ID NO: 147311 - DNA, 245 bp, Glycine max
aaaagaatatgttggaaggagatgggcagattgggttggaattgagaagtttttcaaggagaaaaaatggcaattcagtataactggaacgtcagagagagcaatggtcattggcctgggtggcctcaatctgtttggagttatattcttggaaccatgttgaaagatacggctgttgcacccagtagcttcattaaatttgtagccgacatatttcctcttcttcagatttatgctggttcctt

SEQ ID NO: 147312 - DNA, 245 bp, Glycine max
ggaacactgaatatggacagttctttctggaatggtactctggtaaattgctggaacacggtgagaggatcctcgtatctgctaaaggaatattccaaacaactggggtgaaactatcagggaaagttgctggaatccactggattacagagcaaggtcacacgcagctgaactaactgctggctactataacacacgacataacgatggatatctgcctatagcaaggatgctggcaaaacatg

SEQ ID NO: 147313 - DNA, 246 bp, Glycine max
cttgaatcttcgttatccttctttttttctccttgaactcgaatattcactatggcagatgaggtggttctgctagatttctggccaagtccatttgggatgagggtcaggattgcacttgctgaaaagggtatcaaatatgatccaaagaagaggacttgcagaacaagagccctttgctcctcaaaatgaacccggttcacaagaaaatcccggttctcatccacaatggcaaacccatttgtg

SEQ ID NO: 147314 - DNA, 247 bp, Glycine max
attgaagttgaagtcttgcccttctctcttcaactccaaacacaagacatcatcatccatggctgcctccgtctccactgtcggagctgtcaacagagctcttttgaacctgaatgggtctggacctggggtttcagctcccagtcatccttctttgggagcagcttgaagaaggttattggctcaagggtccccaacacaaagatttcctctggaagcttcaagattgttgctgtagaagagaaga

SEQ ID NO: 147315 - DNA, 249 bp, Glycine max
tgcaattgaagttgaagtcttgcccttctctcttcaactccaaacacaagagctcatcatccatggctgcctccgtctccactgtcggagctgtcaacagagctcttttgaacctgaatgggtctggacctggggtttcagctcccgttcatccttctttgggagcagcttgaagaaggttattggctcaagggtccccaacacaaagatttcctctggaagcttcaagattgttgctgtagaagagaa

SEQ ID NO: 147316 - DNA, 242 bp, Glycine max
ggcggctctcagaaaagccgtgttctttgtaatcgctcaatgcttcaccttttccgcatatgctgcaaggtttgaaatcacaaaccgatgcacatacactgtctgggctgcgtctgtgcctgttggcggtggcgtgcaattaacccgggccagtcatggtccgtggacgtgcctgcaggaacgaaaggggcccgcgtttggtcccgaaccggctgcaacttcgacggttcgggccgcggtgg

SEQ ID NO: 147317 - DNA, 242 bp, Glycine max
ggccaaaactacaaaggtttatccaatgtcaaaaactacttccaccatctcggctacatccccaatgcaccacacttcgtcgacatccacgatcccaccctcgtatctgccatcaaaacctaccaaaagaattacaacctaacgtcaccggcaagttcgacatcaacactcttaaacagttcatgacaccccggtgtggcgtccccgacataataatcaacacaaacaaaaccacatcgttt

SEQ ID NO: 147318 - DNA, 241 bp, Glycine max
gtgcgagacatggcgatggcaatggcgcttcgcaggctttcatcttcaattgacaagcctctgcgccctctcttcaatgccggttccctctactacaagtcgtctttgcctgatgaagctgtttacgacaaggagcgaccggagttacatggccgaagcagttgaatgctccacttgaggtcgtggatcctgagattgctgatattattgagcttgagaaagctaggcaatggaaggggct

SEQ ID NO: 147319 - DNA, 243 bp, Glycine max
tttttctccttgaactcgaatattcactatggcagatgaggtggttctgctagatttctggccaagtccatttgggatgagggtcaggattgcacttgctgaaaagggtatcaaatatgagtccaaagaagaggacttgcaaacaagagccctttgctcctcaaaatgaacccggttcacaagaaaatcccggttctcatccacaatggcaaacccatttgtgaatctctcgttgctgttcag

SEQ ID NO: 147320 - DNA, 243 bp, Glycine max
ggaaaaacttaccgacttcgtgtacataatgttggagtatcaacaagtctgaatttcaggatccagagtcataacttacttctagcagagacagaggggtcttacacagtgcaacagaactacactagcttagatattcatttggacaatcttattcttttctgttaagcacggatcaaaatgcaagtacagattactacattgtagcaagtgccaggtttgtgaatgaatcacgttggcaaa

SEQ ID NO: 147321 - DNA, 242 bp, Glycine max
aatttgaaaggtcgaaacttgagcatctgggatcgcgaaattggggtttttggttaaaagggtattatcttcggaactgattgatggcaaacctgtacgtgaaggcggtgccaccggcggatctgaacaggaacacggagtgttcacgtaccctggcgtttggaccacatacatcctcatccttttcttttcttggatcctcgtactctccgtcttcggttgttcccctggcatcgcttgga

SEQ ID NO: 147322 - DNA, 241 bp, Glycine max
gtgggcttgaacacgctagccccctggctactggaggaatattttcaaatggaggtgccgatgtgaacggatgggcatcacgatttcaatcagaaagacccagcttgttacagtcctcatcaacacaaaactggctgcgccacaaggtagctcatccggtattattgttaaaaagacggtcagagtagatattcctgtggacgcatatcctaattttaactttgttggtcgcctcctaggc

SEQ ID NO: 147323 - DNA, 238 bp, Glycine max
gttaatttgaagaacttgttgctttttggagccgcggatacatattgggggacatctagatccgttcatgggtcagcatcattggcaagggactattacgaagtgcttggtgtgagtaagaatgctagttcttctgaataaagaaagcatactatgggcttgcaaagaagctccatccagacacaaacaaagatgatcctaaggctgaaaagaagtttcaagaagtttcaatggcata

SEQ ID NO: 147324 - DNA, 237 bp, Glycine max
cttcaagaacaagctggacatctcattgggtgttgcattaggttcagcaactcagattgccatgtttgtggtcccattatgtgtaatcgttgcttggataatggctatcaatatggacatgaacttcaacctcttaggacaggttcccttgctttggcaataatagtcacaggcttcactttacaggatggaacttctcactacatgaaaggccttgttctcctgctgtgctacatt

SEQ ID NO: 147325 - DNA, 238 bp, Glycine max
gttcccatcattgtcaccggtaacgatttctcaacactctatgcacctctcatccgtgatgggcgtatggagaagttctactgggcaccaacaagggaagaccgcattggtgtttgcaccggaattttccgcactgatgtattcctgaacaggacattgtcaagcttgttgacaccttccctggccaatccattgatttctttggtgcactgagggccagagtatatgatgatgaagt

SEQ ID NO: 147326 - DNA, 241 bp, Glycine max
ctccagcattgtggacacaaatttcacagtaggcaccatctttggtgtgtggcctggagataagttgactgggatcaccggaagagatcaagttgctgcagccatgggggttttgggtcctagaacaacatatgtgcttctctaaaagacttccctggcacccatgaatttcttctgcttgatgaaggaaaatggcagcatgtcaaagagaccacagaaattggtgaaggaaaactgttct

SEQ ID NO: 147327 - DNA, 240 bp, Glycine max
cgcatatccaatttttgcacagcagggttatgaaaatccccgagaagcaaccggtcgtattgtctgtgccaattgccatttagctaataagcccgtggatattgaggttccacaagcggtacttcctgatactgtatttaagcagttgttcgaattccttatgatatgcaagtgaaacaagttcttgctaatggtaaaaagggagctttgaatgtgggggctgttcttattttaccggaa

SEQ ID NO: 147328 - DNA, 240 bp, Glycine max
actcactatgctgtcatgagctcctacgagtaccttagcactggacttcgccagtacttggacaacaacatggatggattttacattgctccagcttttatggacaaacttgttgttcacattaccaagaacttcatgccctgcccaacatcaaggttcctctcattcttggtatctggggaggcaagggacaaggaaaatctttccaatgtgagcttgtctttgccaagatgggaatca

SEQ ID NO: 147329 - DNA, 239 bp, Glycine max
ccaaaagtgatttattggatcaggagttcatgctgaaaggaaaatggtatcaacggaaggatgtagagataaaaaacagtcggggtgatgttcttcaatgcagccattacttgcctatagtcagccctgaaggaaagctctgccgtgtgtaatatattgtcatggaaatagcggatgtagggctgatgctagtgaagctgctataattttacttccctcaaacattacagtttttactc

SEQ ID NO: 147330 - DNA, 238 bp, Glycine max
tcttgttttggatggagtcattcagctcacagaaagggatgagtgtgcctaccaagagatgatcactcatcttcctctttgctctatttcaaaccccaaaaaggttttggttattggtggaggagatggtggagtcctcgggaagtagctcgtcatgcctcagtagagaagatagacatttgtgaaatagacaagatggttgtcgatgtctctaaacaatttttccctgatatagcag

SEQ ID NO: 147331 - DNA, 241 bp, Glycine max
gctgaagttatgcaaggaaagcctgaattcactgaccatttgactcataaactaaagcaccaccctggtcagattgaagctgctgctattatggaacacattttggaaggaagctcttacgtgaaagctgctaagaagtgcatgagattgatcctttacaaaagcctaaacaggaccgttatgctcttaggacttcaccacaatggcttggtcctctaattgaagtgattagattctctac

SEQ ID NO: 147332 - DNA, 242 bp, Glycine max
gtcttgcaattgaagttgaagtcttgcccttctctcttcaactccaaacacaagacatcatcatccatggctgcctccgtctccactgtcggagctgtcaacagagctcttttgaacctgaatgggtctggacctggggttcagctcccagttcatccttctttgggagcagcttgaagaaggttattggctcaagggtccccaacacaaagatttcctctggaagcttcaagattgttgct

SEQ ID NO: 147333 - DNA, 236 bp, Glycine max
ctctttgtgtgtctctttctctatttctgagtctcagtgttaggggggttattcattattcataataacttggctttatagcattttcccttttgatataaaatgggaaggcaaccttgttgtgacaaagttggttgaagaaggggccatggactgcagaggaggataagaagctcataagcttcatcctcactaatggccaatgttgctggagagctgtccctaagctagcaggg

SEQ ID NO: 147334 - DNA, 236 bp, Glycine max
gccaattgctgctgctagtctcggtcaggttcatcgtgctattctgcataatggagcaaaagtagtcatcaaagttcaaaggcctggtctgaagaagctgttcgacattggtttgaaaaacttaaagttgattgcgagtattttcagagaagtgaaacttttggtggtccacttagagattggattggaatatatgaagaatgtgaaactattttgtatcaagagattgattatat

SEQ ID NO: 147335 - DNA, 220 bp, Glycine max
ggctcgagctccgttggctgcgcacgaggtgggcttccaggattttcgatttgattttgtaaaggggttttcaccaaaatatgtgaaagaatatattgaaggagcaaagccattgttttggttggggagtactgggattcttgcaactacaagggttctaccttggactataaccaagatagccatagacagcgaataatcaattggattgatggcactg

SEQ ID NO: 147336 - DNA, 237 bp, Glycine max
ataagatgtaccagacatataaaggtctcaagcgcttcagcaagccaaaactttcccgaacaaatttcacgattaaccattatgctggagatgttacatatcaagcagattattttcttgataaaaacaaagatttgttgtagcagagcatcaagctcttttatgcgcttccaagtgtccatttgttgctaatgtcttccctcctttaccagaggagacatcaaagcaatcaaaatt

SEQ ID NO: 147337 - DNA, 259 bp, Glycine max
  unsure (1)..(259): unsure at all n locations
ggtttctccanaggtccctagtggcagctacaatattgcccatgtcacctatgagttgaatgtccttggtactagggggccacgaaggatgaattgcacaatgtactcaattcctgcatcatccatggagcctaatgcattgtcccgggccagccagagctccttccccgtgcccttgaggattctttccggagtacatccttctcaaaatcaattgacaattcaactgagtttagcagctctagattctccgacatca

SEQ ID NO: 147338 - DNA, 257 bp, Glycine max
atcgagataactagaaacagtgtgatgaaaatgaaggtccttgttttcttcgttgatacaatttaggtagcatggcaatgccatgcgtacgatatgttccctctccgaatgaacactggctatggtgcccgtactccgaggtgaaatgcgcaagttggaggcttgctgtggaagcacacaacatctttggctttgagaccattcctgaagagtgcgttgaagcaacaaaggaatacatccatggcgaacaatataga

SEQ ID NO: 147339 - DNA, 256 bp, Glycine max
aagatgagtagcgtgttggagcatggtgttgtgggatgttgcaaatcagggccaggctatgctaccccactggaagccatgtctggtccaagagagtctcttatttatgtaactgctgtctacacagggacaggaatgagaagccggactatttggccacagtggacatagatccaaactctccaacttattccaaagtcatccataggcttcgtgttccttatttaggtgacgaattgcatcacactggttggaa

SEQ ID NO: 147340 - DNA, 257 bp, Glycine max
ggagaacctattcccactaacaagaggcacgctgctgccaaggttttcagccatcctgatgttgttgctgaagtaaaatggtacggtattgaacaagaatacaccttgttgcagaaagatatccaatggcctcttggtggcctgttggtggtttccctggacctcagggtccatactactgtggtgttggcgctgacaaggcttttggccgtgacattgttgacgcacactacaaagcctgtatttatgctggcatc

SEQ ID NO: 147341 - DNA, 257 bp, Glycine max
caggaatgtgttcccaggacttattgtgttttaaatctacaaaatccttttgtgttgaataggtggatggggaaactgactttcccccagggcacttcccgaagtgttaagagaatgcctctttctatagggggagggctggtgcaaagaatgctattctcatgaatatgccaaatgctgttctttcaatgtggagatattttgttggagatctcgtctttgaagtttctaagatgacttctccctacattaaatgt

SEQ ID NO: 147342 - DNA, 256 bp, Glycine max
attcacgaaaaaacaaatcaatattcgaaaaaaaaaaagattattaattttaagatatgagaaaggctccattgtcgaattcagacctaaccattaatcgagaagtgatgggaacgacgaaacctgcaaatacttagattttattaaaaacaaatcttaatgattcattaggtgggatggcggaagaaaccaaaaagcaatcctttttttaggagttgtgccctacattacatctgaatttgattgataataaaag

SEQ ID NO: 147343 - DNA, 259 bp, Glycine max
ctatcctatcgtagcaaagaaagaaagatagaaaaccctagcttaccttttcaactttcaagatgcaaatcttcgttaagacactcactggtaagacaatcacccttgaggtggagagttcagataccatagataattaaagtccaagattcaagacaaggaagggatcccaccagaccagcaacgtctcattttagctggcaagcagcttgaggatggacgtacacttgctgattacaacatccagaaggagtccact

SEQ ID NO: 147344 - DNA, 258 bp, Glycine max
atgggttcatatgaccagctcatccagcaatatcaacagcaccaaaatcagtcccagttccgccttcaaatgtcagctgtaaatcagtcttttagggatcagggcatgaagtctattcaaactgcacaaccagcaccaatccatttggtttgcttggcctgttaagtgtgatcaggatgagtgatcctgacctgacatctcttgctcttggaattgatcttactacactggggttaaatttgaattcatcagaaaatc

SEQ ID NO: 147345 - DNA, 257 bp, Glycine max
ctcgagccgctcgagccgttcgaatctgattttcatcccttaacaccaacgccaacgccaattccatacagatcacagtcccttcgattcctgctgcaacatactttcaaagccctaaaatggaggggactgtctcactcctgcactgcaagaaattgagcatgtaaagtctgatcaaggagaaattctgagcaagcctttcttggatgcgtgcaaacacatattgcctgtaatagataagtttggagctgctatgg

SEQ ID NO: 147346 - DNA, 250 bp, Glycine max
caaccctatcatgatgagtgctggagagttggaaagtggaaatgcaggagagccagcaaaactgatcagacagagataccgtgaagccgcagacatgatcaagaagggaaagatgtgtgctctcttcatcaagatcttgatgcaggagctggtcgtcttggtggaactacacaatacactgtcaacaaccagatggtgaatgccaccctcatgaacattgctgataaccccaccaatgtgcagcttcctg

SEQ ID NO: 147347 - DNA, 253 bp, Glycine max
gaacccaacacaacaacacaacacaggataaataaattaaattaaaaactagctaaattcctctctctctctctttctcttcgagggtttgggtttctcttcctcccttggagaaaaagaagagccaccgctggacgccgttcgtgcatttttgaggtgccgctgtcatgtttgggcgtggtggaccaaggaggagtgataactccaaatattatgatattctcgggatttccaaaaatgccagtgaagatga

SEQ ID NO: 147348 - DNA, 254 bp, Glycine max
aaggagagaagatcgagccctgaaaagtgatcgtgcatgattccttcccctccaaaacctctcctcttcacaccgctgataaatcaactggtggaaactcaattaacacctctgcgttcgagaaacggattatcaggtcgaacaatcggtcaatatctttcttacggattccgtgataaagatacttgatactctgtaccatgatagacactatgcaaggttttttgtgcttgaaactattgcgagggttcctt

SEQ ID NO: 147349 - DNA, 253 bp, Glycine max
aagatgagtagcgtgttggagcatggtgttgtgggatgttgcaaatcagggccaggctatgctaccccactggaagccatgtctggtccaagagagtctcttatttatgtaactgctgtctacacagggacggaatagagaagccggactatttggccacagtggacatagatccaaactctccaacttattccaaagtcatccataggcttcgtgttccttatttaggtgacgaattgcatcacactggttg

SEQ ID NO: 147350 - DNA, 253 bp, Glycine max
gcggaatcttataatgaataacccgcagatgcaagaactaatggataggaaccccgagctggcacacatacttaatgatcccagcactcttcgtcagacacttgaagctacaaggaaccctgagatcatgccgaaatgatgaggaatacagatagagcaatgagcaacattgaatcttctcctgaaggattcaacatgctgaggcgcatgtatgaaaatgttcaagaaccgtttttaaatgccactacaatgg

SEQ ID NO: 147351 - DNA, 251 bp, Glycine max
attcattcaagattcagcaagtgcgttttggaagcagagaccgaaatacttcgagatggcccgtacaaagcaaactgctcgtaagtcaactggaggaaaagctcccaggaagcagcttgcaaccaaggctgacgtaagtctgcaccaacaactggtggtgtgaagaagcctcatcgttatcgccctggaactgttgctcttcgtgagattaggaaataccagaagagcactgagctcctaatcaggaagct

SEQ ID NO: 147352 - DNA, 253 bp, Glycine max
gttcctttaattctaggtatttggggaggaaaagggcaagggaaatcatttcaaacagaacttatatttcaggctatgggaattgaacctgtaattatgtctgctggggaactagaatcagagagagctgggagccaggaaaattgattcgtgaacgctatagaacagcatctcaagtggtccagaatcaaggaaaaatgagctgtttgatgatcaatgatattgatgctggccttggtagatttgggaatac

SEQ ID NO: 147353 - DNA, 248 bp, Glycine max
ggaatgtgtcttataagtctgatatttatagttacggaatgttgttgttagaaatggttggaggaaggaagaatgtagacacgtcttctccagaagatttccatgtgttgtacccagattggatgcatgactagttcatggagatgtacatatccatgttgaggatgaaggtgatgttaaaattgcaagaaaactagcaattgttggactttggtgcattcagtggcagccattgaaccggccatcca

SEQ ID NO: 147354 - DNA, 248 bp, Glycine max
ggggaatgaatgttttctttttgccctggtgtatctctttcacatttaagaaaagtctcgaatcttggtttattgattggtggaatactaggcaatccgaaattttcttgaatgatattaaagaaaagagattctaaaaaaattcatagaatttgaagaactgtttttcttagatgacatgttaaaggaatgtccggaaacacatctacaaaacctgcgtactggaatctataaagaaacaatccaat

SEQ ID NO: 147355 - DNA, 250 bp, Glycine max
gaagaatttggaattgcttttaatggaggttttaatcagccaattatgtgcggtggtgagccaagggccatgcttagaaaagatcgaggcaaagctgatgccccaatatattccattcagatatgcattctaagcatgctttgaacttgatcttttcatttacaaatggagtagactgggatggtccatatagactacagtttcaagttcccaaggcattacaaaacaagccaattgacttctttaataa

SEQ ID NO: 147356 - DNA, 252 bp, Glycine max
gtatccagttagaggtctcgtctttgagggtggcgatacgctggaagatttatcaaatgttgtttcagatgcctgtatatgtcttcagaacaacaacatacctttcaatgttcttatctctgactgtggaagcaagtctatctgttaccacagtgttatgcagagaaacaagctcttggagaagtggatgctgagcttcttgacacccaagtgaatcctgctgtgtgggaaattagtgggcacatggttcta

SEQ ID NO: 147357 - DNA, 253 bp, Glycine max
ctaagatggcttcctttgtatccttcctagtgctgcttcttgcagcccttatcctcatgcctcaagggcttgctacttactacaaaccaattaagaagccaccagtgtacaagcctccagtgtacaagctccagtgtacaaaccaccggtttataagccaaaaccaccggtttacaagccgaaaccaccggtttacaagccaccatataagaagccaccatacaagaaaccaccttatggaaagtaccctcca

SEQ ID NO: 147358 - DNA, 250 bp, Glycine max
tacatagagtaccgcaccagaaaggaaatggaaaacgtcagcttcaaaaaccatgtcattcagtggttcgaagtccttgatgggttacttggtccatattggaaagccctggggctagccttcaactgtctttccttctctttggatctgtgatacagcttatagcatgtgcaagtaacatatactacataaatgacaaattggataaacggacttggacttatatttttggagcttgctgtgccaccac

SEQ ID NO: 147359 - DNA, 246 bp, Glycine max
gtcaaggtccttgatcagaaattcggtatcatcaagggtaccatgaccaccactcactcctacaccggtgaccaaaggcttcttgatgcgagccaccgtgacctgaggcgtgcaagggcagcagcatcaacattgtccccacttcaacaggagcagcaaaggcagtggcccttgtcctcccaaccctcaaaggcaaactcaatggcattgcactccgtgtgccaacaccgaacgtctcagtggtgg

SEQ ID NO: 147360 - DNA, 249 bp, Glycine max
ttttgtcaaggcataggattggtgaggtaaacttgaattgaagtgaagaaggagatggctgcaacctcttccttgtgctcatcgaccctccaatcccagatcaatggattcttccttcacaaaaccttctttcccatactccttccctcactttctccaggaggaaaatttcaaccacagtgaaggctacatctcgagtcgacaagttttcaaaaagcgatatcattgtctctccgtccattctttctg

SEQ ID NO: 147361 - DNA, 248 bp, Glycine max
gcaggattacaccggcgaagatgttactgttgataacttttttgctgctttacttggaaataagtcagcactgactggtggcagtgggaaggttgtggacagtggtcctgatgatcatatctttgtcactatactgaccatggaggtcctggggtgctcgggatgcctgctggtccttacttatacgcggatgatctgattgaagtcttgaagataaagtcggttgctggaacatataaaaacctagt

SEQ ID NO: 147362 - DNA, 249 bp, Glycine max
ctggtgaatatggtttcgttgcccagcttaacgagggtcgtcacctcaagaagaggccaactgagttccgagttgataatgtgccttcaaccctttgatgaaaacaaattcaactttaccaaagtcggcaagaagaggtcctcttccaatttgaagctagcgaggatggacaagtccagttctttccaaatgctccagttgatgttgacaattctcccagctttgttgccatcaatgtcagtcctattg

SEQ ID NO: 147363 - DNA, 244 bp, Glycine max
gattagattaaatagattatctatatatatagatagatatctatttgaattgcttcattcgcgaggagccgtatgaggtgaaaatctcatgtacggttctgtaataaagatggaattgagaaacaccatcaattataacccccaaagaaccagatttcgtaaacaacatagagggagaatgacgagaatatcctatcgagggaatcatatttgcttcggaagatatgctcttcaagcacttgag

SEQ ID NO: 147364 - DNA, 248 bp, Glycine max
aacgtcccaccgattgaacatctcactcgacaaccactaaataacccggcaatacaacaaccatggtccggatcccccaattcctcaccgcggcactcgacatcaccggcgcctccgccgcgtccgagtcaaagacctcctcccctccaacttcgacgacatcgtcctcaactccggcaagcctcagctcgtcgagttcttcgcgccctggtgcggccactgcaagaccctcgcgcccatctacgagg

SEQ ID NO: 147365 - DNA, 154 bp, Glycine max
aaatcatgtagttcaaatacccctaatggcacaggtggaaattctgtcttctagtgtaagtgatttcagaactgcaatggtgagtaaatatagtcagtctctagctactgcaatgcatgtgggactatagaaattatcattgatagtttctcaa

SEQ ID NO: 147366 - DNA, 246 bp, Glycine max
gttcaatggtttggcatggctctttttgggtgtccctacaagcagctcattgctatataaggaggaatttgagaagatgcaagagaaatatcctgacaacttcaggcttgacttcgctgtgagccagagcaaacaaacgagaacggagagaagatgtacatccaaacccgaatggctcaatatgcagaagagctgtgggaattactgaagaaggataacacttttgtgtacatgtgtggactaaaa

SEQ ID NO: 147367 - DNA, 245 bp, Glycine max
gaggaaagaaaggagagctggaatcacatggacttgtctttctctttctgggtctccattaaatttttcttctctcccttctttctctctctctctctctgaccattctcttcttcttctttttctctcctctctctctctcccctccgccatggctgaggataaggagatgtctacctctgtcatcaatgggaatgattccctaactggtcacatcatatctacaactattggaggcaaaaatg

SEQ ID NO: 147368 - DNA, 246 bp, Glycine max
cggcttgcagcctaggcaggtggcgatttggtttcagaaccgccgcgcgcgctggaagaccaagcagatggaaaaggactatgattccctgcaggctagttacaatgatctcaaggctaactatgcaaccttctcagggaaaaggataaactcaaagctgaggtggcaaggctcactgagaaggtgcttggaagagagaaaaatgagagtcacttggaacaggctgaaaccaacggattgcaggag

SEQ ID NO: 147369 - DNA, 262 bp, Glycine max
tggacagatacaacatccaaggtctcatttgaataggtttgacatggtaattacacctcatcatgattattatcctttgactccagaaggacagaagcaggttcctaagtttcttagaaggtggataactccacgcgaacctccagatagtcatgtggttctgacattgggagccttacatcgaatagattttgcttcacttcgcagtgctgccattacatggcaagatgtgtttgcaaatgttccaaggccattgctcgtg

SEQ ID NO: 147370 - DNA, 254 bp, Glycine max
tgaatctcagaattctctaaaagagatctttttctgctctttgaagaaagaagggtctttgcttgattttggagatgtctctgctctcagatctcatcaaccttaacctctccgataccaccgagaaggtgatcgcagagtacatatggatcggtggatcaggaatggacctgaggagcaaagcaaggactctcccaggaccagttagcgacccttcagagcttcccaagtggaactatgatggttccagcaca

SEQ ID NO: 147371 - DNA, 257 bp, Glycine max
cttatttttctctctctaaaatcctctgtgagaaggtgcacagtgatggctacagaggtaagctctctgattagggtgatgggtggcggctacaaggaggagcagcatcggactgtggggaatgagtcacacggtgagaaatcaacggctctcattactcgggacttgctcggtgggtcctcgattgaatcacaggaattggacctcgatttgcaggttcctagtggctgggagaagagactcgaccttcagtcagg

SEQ ID NO: 147372 - DNA, 251 bp, Glycine max
tctgaatcttcaacaatggtgctcgaggcgacgatgatctgtatcgacaattctgaatggatgcgtaacggtgattactctgcttctcgatttcaagctcaagcagacgctgtgaatctcatttgcggtgctaaaacgcagtctaatccagaaaatacagtgggagttctcacaatggcagggaaaggcgttcgtgttttggtcacccctaccagtgatctgggcaagatcttagcctgcatgcatgggct

SEQ ID NO: 147373 - DNA, 226 bp, Glycine max
tgcaattgaagttgaagtcttgcccttctctcttcaactccaaacacaagacatcagaatccatggctgcctccgtctccactgtcggagctgtcaacagagctcttttgaacctgaatgggtctggacctggggtttcagctcccagttcatccttctttgggagcagcttgaagaaggttattggctcaagggtccccaacacaaagatttgctctggaagctt

SEQ ID NO: 147374 - DNA, 255 bp, Glycine max
cgaaaactagaggccagggtctgtagtgtgcgggtgggtttgtttatctcaaacacagaacagaggtgtagagaagaaagctctcaaaagtatggcggcggagtcatcactgagggtggcgactcccactatttgcaacctcaatggttctcagagaagaccaaccactctctctccgcttcgcttcatgggttttagccctcgaccctctcactctctcacttcctcttccctttcacacttcttcgggagcac

SEQ ID NO: 147375 - DNA, 257 bp, Glycine max
tctggggaaatcctgtgtcccttaagagtccagccgcaaaccctcccctcacactctccaaaccctagcggcactacacacgttatctgtctctctctctctctctctccctctctccttccccaatatgtcgagcgccgatcccgagcaccgagaagaggaggaggcacccgccgtcggcgacgacgaggacaccggagcacacgtcgctcccatcgtcaagctcgaggaggttgctgtcaccaccggcgaggagg

SEQ ID NO: 147376 - DNA, 248 bp, Glycine max
ctgccaccaacatcccaatcgctcctccataaccatattgaagaataagataaatacaacaaaacctagagatggaagaagcacaggtgcaggtatgggaagggtatgtagattggaggaacaggccaaccataaaaggacgtcatggtggcatgcttgctgcctcctttgttttggccgctgaggtattggagaacctagcatttcttgccaatgcaagcaaccttgttttatatctgtccaagttt

SEQ ID NO: 147377 - DNA, 250 bp, Glycine max
ccgcaagtccacagcatggctgccactgccgctgcaggcatagcttccttgttttcttcttctattaacagtgtcaaatgtcttcgttcctccaagaactgctccattatagacccccttataaccacagtgccctcaaaccgtggcatgtttgtgtcacacttggtggaacctttgtccattgggggtgccattaattcgcacaagttgtgggggcctagaatttctgctgctgttgcacaagaagagg

SEQ ID NO: 147378 - DNA, 246 bp, Glycine max
agagtgcagacaatgagctccagggaatcctctctgtgtgtgatgagccacttgtgtctgttgacttcaggtgcactgatgtgtcctcaaccgttgactcatcgttgaccatggtcatgggagatgacatggttaaggtgattgcttggtatgacaatgagtggggctactcccaaagggttgtggatttggctgacattgttgccaacaagtggaagtgagagccatcaaattctgaattggtaa

SEQ ID NO: 147379 - DNA, 250 bp, Glycine max
gtactccttctggaagtaagggagctcaacttagaaaacatattgatgccacgttgggtagtggaaatctgagggaagcagtaaagctacctcctggggaggatttaaatgagtggctagctgtcaacactgttgatttcttcaaccaggtgaatctgctttatggtacccttacagagttctgtactcctgagaattgtcggacgatgtctgcaggacccaagtatgaatatagatgggcagatggtgt

SEQ ID NO: 147380 - DNA, 252 bp, Glycine max
cttatttttctctctctaaaatcctctgtgagaacgtgcacagcagtggctacagaggtaagctctctgattagggtgatgggtggcggctacaaggaggagcagcatcggactgtggggaatgagtcacacggtgagaaatcaacggctctcattactcgggacttgctcggtgggtcctcgattgaatcacaggaattggacctcgatttgcaggttcctagtggctgggagaagagactcgaccttcag

SEQ ID NO: 147381 - DNA, 252 bp, Glycine max
gtcaaaattggcttgcctgcaaaggcaaatgtgaagacacaacatggggatgcaccttttgctgagttgtgctcacactgtgagaaggaagctgtgaatgtttcccttggaaaccttctaacatacccatttgttagagatggcttggtgaacaagacattgtcactaaaaggaggatactatgactttgataagggatcttttgagctctggggccttcagtttggccttgcatgctctttctccgtatga

SEQ ID NO: 147382 - DNA, 256 bp, Glycine max
agaagaacaagtagttgagaactaagaaggagaagcaaatggagtcctcaatgatctcttccctagctgctaccactgtcaaccgtgccggtgccggcatggttgctccattcactggcctcaagtccatggctggcttccccaccagaaagaccaacaatgacattacctccattgctagcaacggtggaagagtgcaatgcatgcaggtgtggccaccagttggcaagaagaagtgtgagactctttcctacct

SEQ ID NO: 147383 - DNA, 158 bp, Glycine max
gggaactatatgataaaattgttcagcagggaaagctttctgaaaatgaatctaggcgctactttcaacaacttatagacacagttgatcattgtcatagaaagggtgtgtaccatagagacttgaagcctgaaaatcttcttcttgatgcttacgga

SEQ ID NO: 147384 - DNA, 253 bp, Glycine max
tccggcggctccgcctcgcagtcccagcctccgatcgcaacgccggcgttccgcgccttcatctcccgcatctcctcgtccctccgtcacgcctttgcgcacgccgcccgtgggcgagctcatcgaccggagctccatgtcccgacctgacaccctcgccgaagcatactctcggatccgcaagaacttcggctacttccgcgtcaattatctaaccctaatcgcgctcgcgctggcggtctcgctcatcacg

SEQ ID NO: 147385 - DNA, 251 bp, Glycine max
tttgtcttcgccgcacgccgaaacaatggccggaaaaggagagggtcctgctatcggaatcgatctcggaaccacctactcttgtgtcggtgtgtggcaacatgaccgagttgaaatcatcgccaacgaccaagggaacagaacgacgccgtcttacgtcggcttcactgataccgagcgtctcatcggtgatgcggctaagaaccaagtcgccatgaaccccatcaacaccgtcttcgatgccaagaggt

SEQ ID NO: 147386 - DNA, 257 bp, Glycine max
gcagtgccggcgcgcgctgaagtttgctaggttcatgagcaggttcgggaagagttaccgaagcgaggaagagatgagggagaggtacgagatattctcgcaaaacctcaggttcatccgctcccacaacaagaaccgcttgccctacactctctctgttgatcattttgctgattggacttgggaggagttcaaaagacacagactaggcgctgcccaaagttgctctgccactcttaacggcaaccacaagctca

SEQ ID NO: 147387 - DNA, 250 bp, Glycine max
ccttaccgaaaactagaggccagggtctcggagtgtttgggtttgtttatcttaaacaccacaaacacagaacagaggtgtagagaagaaagctaaaaaatatggcggcagagtcatcactgagggtggcgactcccactctttgcaacctcaatgggtctcagagacgaccaaccaccaccactctctctccgcttcgcttcatgggttttcgtcctcgaccctcctctcactctctcacctcctcttc

SEQ ID NO: 147388 - DNA, 250 bp, Glycine max
ccgcaagtccacagcatggctgccactgccgctgcaggcatatcttccttgttttcttcttctattaacagtgtcaaatgtcttcgttcctccaagaactgctccattatagacccccttataaccacagtgccctcaaaccgtggcatgtttgtgtcacacttggtggaacctttgtccattgggggtgccattaattcgcacaagttgtgggggcctagaatttctgctgctgttgcacaagaagagg

SEQ ID NO: 147389 - DNA, 245 bp, Glycine max
gtggatgctgagcttcttgacacccaagtgaatcctgctgtgtgggaaattagtgggcacatggttctaaagaggaagaaggattatgatgaggcatctgaaggcaatgcttggaggcttcttgcagaggtgtccctctctcaagagaggtttcaagaagtcaatgatcttatttttgaagccattggctgtggtgaattggaggatgtcaacgttgaaagtgtcaaagaggttgatgcagtcag

SEQ ID NO: 147390 - DNA, 250 bp, Glycine max
attggaattagcacaattcgcagaattagaagcttttgcccaattcgcttctgatctcgataaagctactcaaaatcaattagcaagaggtcaacgattgcgcgagttgcttaaacaatcccaatcagctcctcttaccgtggaagaacagataataactatttatactggaacgaatggttatcttgattcattagaaattggacaggtaaggaaatttcttgttgagttacgtgcttacttaaacacg

SEQ ID NO: 147391 - DNA, 241 bp, Glycine max
  unsure (1)..(241): unsure at all n locations
ctgagtaccatatggattccacaggctttagtacagatancttgtatgatgcanggttcccatcggctctttctctgggtggtgttgtgtgtggaatggcatgtgttagagtaactgcaaaagacatggtattttggtttcggccacacactgctgcagaaatccgatggggtggtgcaaagcatgaggctggagaaaaagatgatagtaggaggatgcatccaagatcatcattcaaggc

SEQ ID NO: 147392 - DNA, 244 bp, Glycine max
ggatgaacttgccaaggaaaacaacaagagtgcctcatcatccaaggggaaaatcaccttcagtgtcaccaagaccaagcctgagaccggcgaggttatcggtgtgttccagagtcttcagccgtccgacactgatttgggagcaaaggctccaaaggatgtcaagatccagggtatctggtatgctcagcttgagtcatagagtgtttttttttgtttttttttttcatgcctttgttttctt

SEQ ID NO: 147393 - DNA, 213 bp, Glycine max
ataccttctataatgagcttcgtgtggccccagaagaacatccagttctgttgacggaggctcctcttaaccctaaggctaaccgtgagaagatgacccaaattatgtttgagacctttaatgcccctgctatgtatgttgctattcaggctgttctttcactgtatgccagtggccgtacgactggtattgtgttggattctggggatggtg

SEQ ID NO: 147394 - DNA, 243 bp, Glycine max
gcgattttcgtttttccaaattccaacagcgagagcaaagtccgttctgttctgcagagcagagaatatgtggcaccagaacttaggtgtggattccacgggaactgtgagagagactgtcttcagtgcgagtatatttgtgcttgttgctctagttctctccgtgtatttggtattcgagcatttagctgcctataatcaaccttaggatcagaagtttttgattggtctcattttaatggt

SEQ ID NO: 147395 - DNA, 246 bp, Glycine max
tagatcttgaacagtgttttcgtgttcggtgagatggaagaaaggaagcaatcgcgttatgtgaagttgactaaagatcagacacctctcgaagatattacccctggcgaactcaatcagccaattcaggttcctcagttggatgttcgtaagtgccctgaatgtagacagccgctacctgaaagctatgctcctcctgctgatgaaccttggatgactgggatctttggatgtgctgaagacaga

SEQ ID NO: 147396 - DNA, 248 bp, Glycine max
cttgaatcttcgttatccttctttttttctccttgaactcgaatattcactatggcagatgaggtggttctgctagatttctggccaagtccatttgggatgagggtcaggattgcacttgctgaaaagggtatcaaatatgagtccaaagaagaggacttgcagaacaagagccctttgctcctcaaaatgaacccggttcacaagaaaatcccggttctcatccacaatggcaaacccatttgtga

SEQ ID NO: 147397 - DNA, 257 bp, Glycine max
gtgcttgctgttgagcttttacaacgtgaatgccatgtgaagcagccactaagggtggtgccactgtttgaaaagcttgctgatcttgaggccgctccggctgcggtggcacgtctttctctatagattggtacagaaaccgcattgatgggaagcaagaagttatgatagggtactcagactcaggaaaagatgcaggccgtctttctgcggcttgggcgctttacaaggctcaagaagaacttgtgaaggttgct

SEQ ID NO: 147398 - DNA, 253 bp, Glycine max
atggtgcaatggcagctgcagatgtccagaaagctgtagagaaggagtttgaaatggctttgcaagatagagtgatggaggaaacaaaggataagaaaaatgcagtagaggcttatgtttatgacacgagaaacaagcttaatgacaaataccaagagtttgtcgttgattcagagagggaatcatttactgctaaacttcaggaggtagaagactggctatatgaggatggtgaagatgaaactaaaggtgt

SEQ ID NO: 147399 - DNA, 253 bp, Glycine max
ggagaagaacattgcgacggacctgttcaaactgttgcttaagtaccagccggagaccaaggctgctaagactctgcgtctgcgcaacatcgcttgtaggcaaggaggaagcctcggcccctcctgccgtcgtgaaatttggtctgaaccacgtgacttctctgattgagaacaagaaggccaaggtcgtggtcaccacccacgacgtggaccccattgagctggtggtgtttctgcctgctctgtgccgtca

SEQ ID NO: 147400 - DNA, 254 bp, Glycine max
gaccaagggagtaaattgtccttcaatgcctagaaaagataaacctagacgcgttgatgtgtactactctagttggtgcattagagcagtggaatcaaatagaggtaatggcagttaactgcctgtgaagtcttgctcttccatcatgaagaaatgggcattccatgggagattgcaaagcttggagtaaggaaaggaatgtggggaactgttcagaagattgaacccggtttgcgagcttatcaagaagcaag

SEQ ID NO: 147401 - DNA, 258 bp, Glycine max
taaagaagcaaaggctgtcaaagacaaacccactttgatcaaggtaaccactaccattggatttggttctccaaacaaggctaattcctacagtgttcatgggagtgcattaggtgctaaagaagtggatgctacaaggaagaatcttggatggccatacgagcctttccatgtgccagaagatgtcaagaagcattggagtcgccatacacctgagggtgctaaacttgaagctgagtggaatgccaagtttgtgga

SEQ ID NO: 147402 - DNA, 232 bp, Glycine max
ggctcgagtgtttcaaaagggctaaatcagagagcaatggaattgagatggtgaccgaaaagggacaaagagagttatcagctaaagatacgctttgtgcacttcctgtcagatgcttgtggtttggattcagaatcaactaaaacaaaagaagaccaaggagatagtatccaactatgtaaatcagctgtgcgagagcttgccaagtccaaatggagagtcagtagtagac

SEQ ID NO: 147403 - DNA, 249 bp, Glycine max
agaagaacaagtagttgagaactaagaaggagaagcaaatggcttcctcaatgatctcttccccagctgttaccactgtcaaccgtgccggtgccggcatggttgcccattcactggcctcaagtccatggctggcttccccaccaggaagaccaacaatgacattacctccattgctagcaacggtggaagagtgcaatgcatgcaggtgtggccaccagttggcaagaagaagtttgagactctttc

SEQ ID NO: 147404 - DNA, 253 bp, Glycine max
gagcaagaacactgttccaatacggaatctaaggcaaagcaaaccaaacatcttgaatcatgggttcaacaggtgagactcagattaccccaacccacgtatctgatgaagagcaaaccttttcgccatgcaactagccagtgcttctgtccttccaatgatcctcaaatcagcacttgagcttgatctgttggaaatcatagccaaggctggccctggtgttcatctttcccccactgacatttcttctcag

SEQ ID NO: 147405 - DNA, 244 bp, Glycine max
gcccaagaacaggagaatcatgggtgctggagggcctgatgatgaggacaataggtggccaccgtggttgaagccactgctgaaagagagcttctttgttcaatgaagttgcatgctgattctcacaagagagaatgcaacatgtattgcttggactgtatgaatggccctctctgctctctctgcctcgcccaccacaaagatcaccgagcaatccagattaggaggtcctcataccatgatg

SEQ ID NO: 147406 - DNA, 248 bp, Glycine max
gggaactatatgataaatatgttcagcagggaaagctttctgaaaatgaatctaggcgctactttcaacaacttatagacacagttgatcattgtcatagaaagggttgtaccatagagacttgaagcctgaaaatcttcttcttgatgcttacggaaatttgaaggtttctgactttggattgagtgcattgactaaacagggtgttgaccttcttcacaccacttgtgggaccccaaactatgttg

SEQ ID NO: 147407 - DNA, 249 bp, Glycine max
tttcaggaagaaagaagtgcaatggacatcggaacctatggctatcctacaccagcagtgaaaaagattgagtcttactatgatgtgccagagggagtggatattcggggatatatgatgcagagtttgcaaaaatcctcacaaaagatgctttgaaattcgttgctgacttgcaacgtgagttcaggaaccatatcaagtatgcattagagtgcagaagagaagcaaagaagaagtacaatgaagggg

SEQ ID NO: 147408 - DNA, 255 bp, Glycine max
tccatacgccggatctgctaaaatacgcttgatccatatgggcctcctcgaccacttgtgggacgacaccgtcgccggcccaaggccggaaaacggtctcggcaagctccggaacaccacaccttcactttccgacctagctccggcaaggaagcggagggcgggagcgtgagatcgtacggtgacgaatcgtcggaggaagcgactagagtgacgcgtagtatcatgatcgtgaaaccgccagggtaccagagt

SEQ ID NO: 147409 - DNA, 256 bp, Glycine max
gggaaaaccacttttgtcaagagacacataacgggagagtttgagaagaaatatgaaccaaccattggtgtggaggttcatccactagacttccataccaattgtggaagaattcgcttttactgctgggacactgctggccaagaaaaattcggtggtcttagagatggttattatattcatggacactgtgctatcattatgtttgatgtaacagctcgcatgacatacaggaacgttgctacatggcacagag

SEQ ID NO: 147410 - DNA, 255 bp, Glycine max
tgttactcaacgccaattgcgatctcaaggtgtgcgatttcggtctcgcacggtcagccgcctcgacagaagataatcagggcttcatgaccgaatacgtcgcaacgcgatggtacgcgcgcccgagatcatgcttacgttcaaggagtacacaaaagccatcgacgtctggtctgtcgggtgcattctcgccgagatgttgagcggcaagccattgtttcccggcaaggactaccaccaccagctcacgctcat

SEQ ID NO: 147411 - DNA, 252 bp, Glycine max
ctatcttgagatcaatgttaacactaattggttctgttatatgggttgggcactcctcaatagagattcaactggaagttactcagtccaatgaagagggcaatgattcagactcatagcactgacagccaacttcatattcgttgctcgagactcaaaaactgggaaagctgctccagtgaatcgactttcgccagaaactgctcatgaaaaacttctttttgtacaagctgaagcaagaagtaatttgag

SEQ ID NO: 147412 - DNA, 259 bp, Glycine max
agctaggtcacctagtaagggccaaggaagagaagttggaattcccagtggttgaaaatggtgataactggagtgtgggccaaaggcaattattttgccttggaagagccctgctgaaggaagcagcatattagtactagatgaagcaacagcctcagtggattctgcaactgatggggttatacagaacatcataagccaagagttcaaagataggactgttgtcacaatagctcatagaatccacacagttattgat

SEQ ID NO: 147413 - DNA, 249 bp, Glycine max
ggtcagatcaaacaggaattccatctcaagatcacttgattaatatatatgttgagagatattatcttatatggaggcttcctgatctgcaaaaactgcttagtggtctgcaaaactagtgattgaaacacttgaaagtaataaaagtgaacttaaggattgggcttgtgtcagaaaagaagcattttcatctgagaaaaatgagtatggacatttgttggtatccgagttctctgattcactttcatc

SEQ ID NO: 147414 - DNA, 251 bp, Glycine max
ccaatatattccattctctctgtgtatttccctacctctcccttcaagatgcagatcttcgtcaagaccctcaccggcaagaccatcacccttgaggtggaaagctctgcaccatcgacaacgtcaaggccaagatccaggacaaggaaggaatccccccggaccagcaacgtctcattttcgccggaaagcaacttgaggacggccgtacccttgctgactacaacattcagaaggagagtactcttcac

SEQ ID NO: 147415 - DNA, 250 bp, Glycine max
atctaagcttgcagctaatgccttcttggcccaaaggatttcatctgtcaatgccatgtcagcactttgttaggctaccggggcaaatgttcaacaggtgtcctattctgttgaacagactcaaggattggacccaagttcctcaacgccagtgttggttttggtggatcctgcttccagaaggatatcttgaaccttgtttacatctgcgatcgcaatggccttccagaggtggctgagtactggaaac

SEQ ID NO: 147416 - DNA, 254 bp, Glycine max
ctatcttgagatcaatgttaacactaattggttctgttatatgggttgggcactcctcaatagagattcaactggaagttactcagtccaatgaagagggcaatgattcagactcagtagcactgacagccaacttcatattcgttgctcgagactcaaaaactgggaaagctgctccagtgaatcgactttcgccagaaactgctcatgaaaaacttctttttgtacaagctgaagcaagaagtaatttgaga

SEQ ID NO: 147417 - DNA, 245 bp, Glycine max
ggtcagatcaaacaggaattccatctcaagatcacttgattaatatatatgttgagagaaattatcttatatggaggcttcctgatctgcaaaaactgcttagtgtgctgcaaaactagtgattgaaacacttgaaagtaataaaagtgaacttaaggattgggcttgtgtcagaaaagaagcattttcatctgacaaaaatgagtatggacatttgttggtatccgagttctctgattcacttt

SEQ ID NO: 147418 - DNA, 245 bp, Glycine max
gtcgaatggtatcaaaaaaatggagtactaactcccatttcttatttaatattgaattaaccgatcaacttgctttgttatcgaacatttctttttgatttctaaattttccggaaaaaatttgaatctatttttatatgcgaatcaatcctactacttctggtcctgaggtttctgcgcttgaaaaaaaaaatctgggacgtatcgcccaaataattggtccggtactagatgtagcttttccc

SEQ ID NO: 147419 - DNA, 250 bp, Glycine max
ctcagacacgcacagatctgatctgatctgatctatctgaagccgaaaacgccgacggtgatgatgaagatggggtgttcacgttgctccttcttcctcttcctcatctcttagtggcgctcttcccctcgtcgctctccgagatccgcttctccgatatccgaaacgacgaccgccgcatcatccccttcgatcagtatggattcacccacaagggtcgacttgagctcagcgtttccaaaatctcact

SEQ ID NO: 147420 - DNA, 250 bp, Glycine max
cagcgtacccgcttcaaggctatcgtcgtcatcggtgactccgagggccacattggtcttggtatcaagacctccaaggaagtcgctaccgccatccgcgccgccatcatcatcgccaagctctccgttgtccccatccgaagaggttactggggtaccaaccttggtgagcctcactcgctccccaccaaggagagcggaaagtgcggttccgtcactgtccgtctcattcccgctccccgtggtaccg

SEQ ID NO: 147421 - DNA, 168 bp, Glycine max
cagcgtacccgcttcaatgctatcgtcgtcatcggtgactccgagggccacattggtcttggtatcaagacgtccatggaagtcgctatcgccatccgcgctgtcatcatatcgccatgctctccgttgtccccatccgaagaggttgctggggtaccaaccttagtg

SEQ ID NO: 147422 - DNA, 243 bp, Glycine max
aaagtttttaatagagggtaagtctcaaaaaatcgaagaattacagacgaatatgcaaaaaaaactgaattgtgtgaatcgaaaactaaacattgctattgtaaagttgcaaatgcttataaacaccctaatattattgcagaatttatagctggacaattaaagaatagagtttcgtttcgtaaagcaatgaaaaaagctattgaattaactgaacaggcgggtacaaaaggagttcaagta

SEQ ID NO: 147423 - DNA, 243 bp, Glycine max
aacatggacgacgacgaggtcttcaccttcgccaagaacatcgctgcgccttatgacctcgtcatgcagaccaagcagcttggccgcctccccgttgtccacttcgccgccggcggagtcgccacccccgccgacgccgcgctcatgatgcagctcggctgcgacggcgtcttcgtcggctccggcgttttcaagagcggcgatcccgcgaagccgccagggcgattgttcaggccgtgactc

SEQ ID NO: 147424 - DNA, 250 bp, Glycine max
tagagaattaggcaataagctaaagatgtctgacgattgcaaaggtaagagctcatggcctgagcttgttggagtgcaagggacagtggcagaggctacaattgagaggagaatcctttggtgaatgctatcattgtgcctgaaggaaacagggtcatcactgattaccgctgtgatagggtttgggtttggatcaacaaagatggaattgtcaaggaagttccacacattggatagacacttttccctc

SEQ ID NO: 147425 - DNA, 217 bp, Glycine max
gcacgcgggaagagctcgcgcagctgccgcaggatttgaaaaaggaattgatcgagattttgaaccagttctttccatgactcctcttaattgagacatgagatcctatgaagtagaagtcacttttattttactataaatattactataaatattgggttgaattgagcgggtcgtatttaaataagaatttcttttccttttttcttagtttcta

SEQ ID NO: 147426 - DNA, 250 bp, Glycine max
ctgctcgagcggctcgagcacagaaatgggcagtgcttctctgattccagtttcctggttgccttggcggccactttctcctttcaagggaacggtgaaaaccttggtcgaaaaccatggctgaagaagattcagcaagcaagacccctcatttccgtggttaacaaggctgcctctctatcttcccccgtgacagcacccagcgtcggcgttcggtttcggctggacaatttggggccgcaaccgggtt

SEQ ID NO: 147427 - DNA, 258 bp, Glycine max
aatgatcaaaaccattcaagtgatcagtctgactcaagttcacttatcttccaacttggtcgggacatctcaattaattgtctcctacgatgctcaaggtctgactatggttcgattgcctcattgaaccaaagttttcgatctcttgtccgaactggagagctttataggctgaggcgacagatgggtatcatagagcattgggtttacttctcttgtaatctccctgaatgggaggcattcgatccaaacacccgt

SEQ ID NO: 147428 - DNA, 250 bp, Glycine max
ttagtagggttttattcattttgcgatggtttctgcagatgttgagtaccgttgctttgtcggtgggctcgcttgggccactgacgaccatgccctcgagagagccttctaaatatacggcgaaatcgttgaaacgaagattatcaacgatcgtgagactggcagatccaggggttttggatttgtgaccttcgcctaggagcagtccatgaaagatgcgatcggagcgatgaatggacagaacttggag

SEQ ID NO: 147429 - DNA, 253 bp, Glycine max
atacaccaaaacccaacatgaaaacccttaacaaagcctcacttattttattccctctcttgttcctttccctattcaagcattcccatgctgcaggaatcgctatctactggggccaaaacggtggagaaggcaccttagcagaagcttgcaacactagaaactaccaatatgtgaacatagccttcttgtccacttttggcaacggccaaactccacaactcaaccttgcaggtcattgtgaccccaacaa

SEQ ID NO: 147430 - DNA, 248 bp, Glycine max
gcccagagcatcctcgccatctgggccacccaagttatcctaatgggtgctgttgagggttatcgtattgatggtgggcccctcggtgaggtcactgacccaatctaccctggtggcagctttgacccattgggccttgctgatgacccagaggcttttgctgagcttaaggtgaaggaactcaagaacgggagattggccatgttctctatgtttgggctctttgttcaggccattgtcaccggtaa

SEQ ID NO: 147431 - DNA, 249 bp, Glycine max
ttcaaatgctgtgcccatgaatatgaaaagttttgctgcagtagcaaaacttttcaaatgctgtgcccatgaatatgaaactcaccaagaaatggcagctgctgctttggcatataaatgcatggaggtggcacacatgagagtggtttactgtaaaaattctagtacgaacagagatcgacatgagttgcaatcaactcttcaactggtttttcaaggcgagtctccttcatcttctgcatccgatgt

SEQ ID NO: 147432 - DNA, 255 bp, Glycine max
taacaagtgaagcacctcttgtgattgaagacagcagaccacctagcaactggccagaaactggaacaatatgtttcaaaaatttgcagatacgttatgctgaacatctgccatctcgtgttgaaaaacatcacttgcacatttcctggaaggaagaaagttggtgttgtagggcgtaccgggagtggaaaatcaactctcatacaggccattttcaggattgttgaaccaagagaaggaagcattataattgac

SEQ ID NO: 147433 - DNA, 251 bp, Glycine max
aaaaaatgaaaggtatgaatggctatggaaggtttaagacgacattgttaattaagttcataatcaggtgtctaactggtttataaatgcccgagttcggctatggaagccaatggtagaagaaatgtacttggaagaggtaaaacaagaaccaaacaatagctctcaggataacaccacaaaaagatcaaaagaatcaagcaaggagttatggtcagaagctaatgctactgcacaggaatctggtgcaa

SEQ ID NO: 147434 - DNA, 250 bp, Glycine max
ctaacaaccacttatcccctttctccttctaacgagtgaggaaaaatggcgcgtaagaagatcagagagtatgactcaaagaggttgttgaaggagcactttaagagactctctggcaaggagttgccgatcaagtctgcacaaattaccgcatcaactgatttcactgagctacaagagaaggaaccctggctttcatcttctaaattggttgttaaacctgacatgttatttggaaagcgtggcaaaa

SEQ ID NO: 147435 - DNA, 255 bp, Glycine max
ctcaagcaaccatggcaatggcaacccaagcctctctcttaaccccacccctctccggtctcaaagccagcgaccgcgcctccgtgccatggaagcaaaactccagcctctccttctccagcccgaagcccctcaagttctccagaacaatcagagcagcagccgccgacgagaccacagaggcaccagcaaaagtagaggctgcaccggtcgggttcaccccaccagaacttgacccaaacaccccttccccga

SEQ ID NO: 147436 - DNA, 249 bp, Glycine max
aatgacatggattgctaaaccaatttcctcgttaaagatcagggtcactgtggttcttgttgggcatttggtgctgttgaatcattgtcagatcgcttttgcattcattttgatgtaaatatctctctctctgttaatgaccttcttgcatgctgtggctttctgtgtggatctggttgtgatgggggatatcccttgtatgcgtggcaatacttagcccaccacggtgttgtcactgaagagtgcgac

SEQ ID NO: 147437 - DNA, 243 bp, Glycine max
ggagaacctattaccactaacaacaggaacgctgctgccaaagtcttcagccatcctgatgttgtcgctgaagtgatatggtacggaattgaacaagaatacaccttgttgcagaaagatatccaatggcctcttgggaggcctgatggtggttacactggacctcagggtccatactactgtggtgatcacgctgacaaggcattaggccgtgacattattgacgcacactacagagcctgt

SEQ ID NO: 147438 - DNA, 244 bp, Glycine max
atcatttctccatttccattttctctctcacttttcaagaatcgtaagctatgggaaagtcttacccaactgtgagtgctgattaccagaaggccgttgagaaggcgaagaagaagctcagaggcttcatcgctgagaagagatgcgctcctctaatgctccgtttggcatggcactctgctggaacctttgacaagggcacgaagaccggtggacccttcggaaccatcaagcaccctgccga

SEQ ID NO: 147439 - DNA, 247 bp, Glycine max
gaaaaacaacagaactttcaaggcgtgaaagagaggagatagagaaacagagagcccatgagcgctatatgaggctgcaagagcaaggaaaaacagaacaagcaaagaaggatttagaacgtttagctcttatacgtcagcaaagggaagatgctgctaaaaagcgagaagaagagaaagctgcgaaagagcagaagaaggctgaggcgcgcaagtgagtttcctggaaaatgtcatgccaccaaaa

SEQ ID NO: 147440 - DNA, 247 bp, Glycine max
gttgcattgtttctgataagagagaggtcaaggagtaattctctttggaagcattacttcagcgttctgcctaaggaaactgactctactatatattggtcagaggaggagctctcagagctacaagggactcaacttctgaacacaactaggagtgtgaaacaatatgtggagaatgaatataggagattggaggaagaaattatactccctaacaagaagcctttcccttctcctcttacacttg

SEQ ID NO: 147441 - DNA, 246 bp, Glycine max
aatttgggtgaactgttgtgcaccatcactgggttcgactccttctctttgcaaccaaatgctggtgctgctggagaatatgctggacttatggttattcgtgcatatcatttggcaaggggagaccaccaccgcaatgtttgcattatacctgtctcagcacacggaccaaatcctgctagtgcagctatgtgtggaatgaaaattgtctctgttggaactgatgccaagggaaacattaatata

SEQ ID NO: 147442 - DNA, 250 bp, Glycine max
tggatttgtaactgagtactatactagcaatgcatatagtccggtgcaagatcttgcagactcctgcaggactggtgctgcaactaatgttatatttggccttgccttgggatacaagtctgttattattccaatttttgctattgccattagtatttttgttagtttcacctttgctgccatgtatggtattgctgttgctgcgcttggcatgctgagtaccattgccaccggattggccattgatgca

SEQ ID NO: 147443 - DNA, 247 bp, Glycine max
cgccagcacggtctgacccaaacggacgtgattgcgctctctggggcccacaccgttgggttctcgcactgcgatcagttcgctaaccgtttatattccttttcatcctccaacccggtggaccccactctggaccccacctatgcccaggatctaatggcggggtgccctaggaaccccgacccagccgtagtgcttcccctggacccgcaatcccctgcggcgttcgacaacgcgtattaccaaa

SEQ ID NO: 147444 - DNA, 244 bp, Glycine max
gattgtttggtttggaagattagaaaattccctgggcagactgagtcaaccttaagtgcagaagttgaacttatttccacaataacagaaaagaaatcttggactagaccaccaattcagatggagtttcaggttcccatgttcacagcatctggtttacgtgttcgtttcctcaaggtgtgggagaagcgtgggtacaataccgttgagtgggttcgttacattacaaaagctggatcctacg

SEQ ID NO: 147445 - DNA, 241 bp, Glycine max
gttatattgacctcagtttcaacaagttgcaaggagatctcccaattccacccaatggaattcactactttttagtctcaaataatgagctgaccgggaacattccttcagcaatgtgcaatgcaagctccctcaaaatactcaacttggctcataacaacttgacaggccccattccttcagcaatgtgcaatgcaagctccctctatatactcaacttggctcaaaacaacttgacagg

SEQ ID NO: 147446 - DNA, 240 bp, Glycine max
agaagatgtcccaaattatgtttgagactttcaatgtgcctgccatgtatgttgcacttcaggctgtcttgtctctgtatgccagtggacgtactacaggtattgagcttgattctggtgatggtgtgagccacacggtgcccatatatggagggtatgctcttcctcatgcaattcttcggttggaccttgctggccgtgatttaacagagtacttggtgaaaatccttaccgagagag

SEQ ID NO: 147447 - DNA, 244 bp, Glycine max
attaggatgaattactaccctccatgtccccaaccagaacgagtcattggaatcaatccgcattctgattcgggtgcccttaccatccttctccaagtcaatgaagtggaagggcttcaaataagaaaagatggaaagtggattcctgttaaaccactctctaatgcttttgtcatcaacgttggagacatgttggagatactgaccaatgggatttaccgaagcattgaacatcgcgggatag

SEQ ID NO: 147448 - DNA, 241 bp, Glycine max
aaatcattttatctactaatagcggacaaattggagtattaccaaatcatgcgcctattgccacagccgtagatataggtattttgagaatacgtcttcttaaagaccaatggttaacgatggctctgatgggcggttttgctagtataaacaataatgagatcactgttttagtaaatgatgcggaaaagggtagtgacattgatccacaagaagcacagcaaactcttgaaatagcaga

SEQ ID NO: 147449 - DNA, 241 bp, Glycine max
atcactgctgatgcatctggtgctaagcatctgaacataacattgactagatcgaagtttgaggctttggtgaatcacttgattgaaaggaccaaggtaccatgtaaaagctgcttgaaggatgctaacatctctatcaaggatgttgatgaggttcttctagttggagggatgactcgtgttcctaaagtccaagaggtggtttcagagatctttggaaagtctcctagtaaaggagtaa

SEQ ID NO: 147450 - DNA, 245 bp, Glycine max
aaaagctaaaagatcatggaacaagtaaataccattttcaaattgtctcatcaattctattatcaaaaattataaaaaataaattataaagaaacgaaacacgggcaagaaaggggagtagagaccactcaataaatgaaatagctactaaaggctttgttctctttttagttatttgataattatccaatttgagttatggagttataaatatgaggagttttttttcaaaaagaaaatacgaa

SEQ ID NO: 147451 - DNA, 237 bp, Glycine max
aaattactctcatttctgcaagtatgcttgctctgaagaaaatcctgagctcctggacatgggaggtccagttgaaggtggatttagtgtcgcatttgatccccttgatggctccagcattgtggacacaaatttcacagtaggcaccatctttggtgtgtggcctggagataagttgactgggatcaccggaagagatcaagttgctgcagccatgggggttttgggtcctagaac

SEQ ID NO: 147452 - DNA, 237 bp, Glycine max
ggggacaggaacagcaaaccagtgtccaacaattgatggtggattggagtcatttgccttcaagcaagggaaatacaatgccaagaagttctgccttgagccaacttcattcacagtgaaggcagagggtgtggccaagaacgctccccctgagttccaaaacacaaagctcatgacacgtttgacctacactcttgatgagattgagggaccctttgaggtgtcttctgatggcac

SEQ ID NO: 147453 - DNA, 238 bp, Glycine max
caattacaaggccatcgaactcgacactgaatccgatggaaaagagctccaagcagcattagttgagtggacggaccagcgaaccgtgcctaatgtgtttattggtggaaaccacattggtggctgtgactcaacaactgccctgcacactcaggggaagctggttcctctgctgatatctgctggagctgttgccaaatcaactgcttaaaggatctcccatttctaggttatgcag

SEQ ID NO: 147454 - DNA, 244 bp, Glycine max
ccctcgagccgaatcggctcgagcttagccttccctacaactccaaacgcaaagacatcatcatccatggctgcctccgtctccactgtcggagctgtcaacagagctcttttgaacctgaatggttctggagctggagcttcagctcccagttcagccttctttgggaccagcttgaagaaggttattgcctcaagggtccccaacagcaaggtttccggtggaagcttcaagattgttgctg

SEQ ID NO: 147455 - DNA, 239 bp, Glycine max
ggacatcagtgatctgaatgatttctggtgttggaacagacgatagttcacttgtagcacaacctggtacttcctaagaggtgataagaaaatgcaattgtaccatcatccatttgatttggactcccagaaggtgagacttgcgttggaagagaaaggcattgattatacatctcaccatgccaatcccataactggcaagaacttggattcttcattcttcaacatgaatcccggtg

SEQ ID NO: 147456 - DNA, 240 bp, Glycine max
tcttgttttggatggagtcattcagctcacagaataggatgagtgtgcctaccaagagatgatcactcatcttcctctttgctctatttcaaaccccaaaaaggttttggttattggtggaggagatggtggagtcctgcgggaagtagctcgtcatgcctcagtagagaagatagacatttgtgaaatagataagatggttgtcgatgtctctaaacaatttttccctgatatagcagt

SEQ ID NO: 147457 - DNA, 240 bp, Glycine max
aagagaacccccgtgttcccatcattgtcaccggtaacgatttctcaacactctatgcacctctcatccgtgatgggcgtatggagaagttctactgggcaccaacaagggaagaccgcattggtgtttgcaccggaattttccgcactgatggtattcctgaacaggacattgtcaagcttgttgacaccttccctggccaatccattgatttctttggtgcactgagggccagagtat

SEQ ID NO: 147458 - DNA, 239 bp, Glycine max
gttcttcggaaatccttatcgtgctggggatcagcctaaccctggtggtggctccgtagagagcactccacatggtcctgttcatgcatggaccggtgatatcaaccaccctacaatggaggacatggggaatttatatgcagctgcaagagaccccattttctattgccaccattccaatgttgataggatgtggtccatatggaaaacacttggtgggaaaagaagggatttaacag

SEQ ID NO: 147459 - DNA, 238 bp, Glycine max
aaaaaactcaatcaccatgggtaaagaaaagggacacgttaacgtcgtcgttatcggccacgtcgattccggcaagtgcaccactactggacacctgatctacaagtgcggtggtatcgacaagcgaaccatcgagaagttcgagaaggaagctgccgaactcggcaagtcatccttcaagtacgcatgggttcttgacaagctcaaggccgagcgagagcgcggtatcaccatcgat

SEQ ID NO: 147460 - DNA, 221 bp, Glycine max
gaaggttcaatggatgcatattgacatggctggtccggtgtggaatgaaaagcagcgctgtgcaacaggatttggtgttgctactttggtggaatgggttttgaggaacgcatcttaaatgcgaactgaaatgaaatcttgttcaattgtagtgtgatatatatactaataacttatctgaagggatataaaaggtgtgtgccccgaggcagattttagcc

SEQ ID NO: 147461 - DNA, 237 bp, Glycine max
gagtcgctctgcaaagagacgatgttgaactcgttgccgttaacgaccctttcattaccaccgattacatgacatacatgtttaaatacgacagtgttcacggacactggaagcatcacgatgtcaccgttaaggacgagaagacccttctcttcggtgacaaggcagtcactgtttttggacacagaaaccctgaagagatcccatgggggtcaactggagctgacatcattgttg

SEQ ID NO: 147462 - DNA, 238 bp, Glycine max
gaaaaacaaaagagtagtggcctttaggtggtgaagaacaagagctcaaatcaaatcgaatcgaaaaaagaaagaaagatcatattcatggcgatggcaagcctggctcgacggaagggttacgccgtcgttttgtcgtcgaggtcgtcgatttgtctgacaagctggaggggattcgcgtccggatctgacgaaaacgacgtcgtcgtcatcggcggcggtcccggcggctacgtgg

SEQ ID NO: 147463 - DNA, 267 bp, Glycine max
gctcgagtacatagagtaccgcaccagaaaggaaaaggaaaacgtcagcgtcaaaaaccatgtcattcagtggttcgaagtccttgatgggttacttggtccatattggaaagccctggggctagccttcaactgtactttccttctctttggatctgtgatacagcttatagcatgtgcaagtaacatatactacataaatgacaaattggataaacggacttggacttatatttttggagcttgctgtgccaccactgtgttcat

SEQ ID NO: 147464 - DNA, 256 bp, Glycine max
gacagagcagcactcacattcacaacgaaggtttcctattcatcagacatggtgaaggcaatcagagttcacgaactcggtggccctcaagttctgaagtgggaggatgtggaaattggagatccaaaagaaggcgaggtccgtgtgaggaacaaagccattggggttaatttcattgatgtctactttcgcaaaggagtttacaaagccccttcttttcccttcactccaggtatggcagctgttggggttgtga

SEQ ID NO: 147465 - DNA, 253 bp, Glycine max
gtttcgaactcattttggtggtggcaagtccactgggtttggtttgatctatgattcagttgagaatgccaagaagtacgagcccaagtacaggcttatcaggaatggacttgatactaaagtagagaaatcaaggaagcaaatgaaggagagaaagaatagagctaagaagattcgtggagttaagaagacaaaggcttccgatgctgccaaggctggaaaaaagaaatgagttttcaaacatcctgtcttg

SEQ ID NO: 147466 - DNA, 256 bp, Glycine max
gaacttttgaagtagcaaaaaaggtctgggcagaggttttcttctaccttgctgagaacaatgtcctttttgagggtattcttcttaagcctagcatggttacacctggagctgagtccaaggacaaggccagtcctcagacagttgctgattacaccctcaagctccttcacaggagaattccccctgctgtccctggaattatgtttttgtctggtggacagtctgaggttgaagctaccctcaacttgaatgc

SEQ ID NO: 147467 - DNA, 240 bp, Glycine max
gatgaatatatgatcgataaatatacaggtttcggccacgtattcttattgatgtgagcaagatagacatcacaactactgtcctgggcttcaaaatatccatgccaatcatgcttgccccaacagccatgcagaaaatggctcatcctgagggagaatatgcaacagcaagagctgcatctgctgctggaacaatcatggtacttctcttttatgttcaaatcccccttaattagggac

SEQ ID NO: 147468 - DNA, 253 bp, Glycine max
atagcctttctttcgtagctactactacttgagtttcattaattcttgggttcaaagaagcttagttgttggtagcgattgaaaattaggaaaatggtgagtgttgaagagattcgtaaggcacaacgtgcagaaggccctgccaccgtgatggctattggcacggccactcctcccaactgcgtggatcagagtacctatcctgactattatttccgcatcaccaacagtgcccacatgaacgagctcaaag

SEQ ID NO: 147469 - DNA, 253 bp, Glycine max
aggattggcaattgaagatccctctgcaccccatggccttcgccttgtgatagaggactacccttatgctgttgatggacttgaaatatgggatgctattaagacatgggttcatgaatatgtctccttgtattacccaacagatgcagcagttcaacaagatactgaactacaagcatggtggaaggaagctgtggagaagggtcatggtgacttaaaagaaaagccttggtggcctaaaatgcagacaact

SEQ ID NO: 147470 - DNA, 254 bp, Glycine max
attgacagctttggagcttctatttgcattaagtgcgttaaataagcttggtgaattaactaaggtgggtagacggatggcagagttcccacttgatccaatgttgtcaaaaatgatagtggcttcagaaaattacaagtgttcagatgatatcatttctattgctgctatgctttcggttggaaactcaatattttaccgtccaaaagataaacaagtacatgcagacaatgcaaggctgaattttcacactg

SEQ ID NO: 147471 - DNA, 253 bp, Glycine max
gttgccatcacaagcctttgcgtacatcaaatacaatggaggacttgagacagaggaagcatacccctacactggaaaagatggtgtatgcaaattctcagctgaaaatgttgccgttcaagtcattgactcggtcaatatcaccttgggtgctgagaatgaattaaaacatgcagttgcatttgttcggccggttagtgtggcctttcaggtggtgaatgggttccatttctacgagaatggagtttacact

SEQ ID NO: 147472 - DNA, 250 bp, Glycine max
aggagatccagttgatgagatgctcttcatcatacggggtcgccttgagagtgttactacagatggtgggaggagtggattcttcaatcgtggttttttaaaagaggccgacttctgtggggaggagcttttgacctgggcactggatcccaaatctggctctaatctcccatcttctactcgaacagttaaagctttaacagaagttgaagcttttgccttaactgctgaagagttaaagtttgttgcc

SEQ ID NO: 147473 - DNA, 249 bp, Glycine max
ggttacttcccctatggctcgtcactccgtactctgagccctcctcctcttcgccgccgtgggcagcgccgcgatggcggtggccgcgtccgacgccgacgacatcctgatccgtcaggtggtgccagatgttggcgaaccgaagaggaggacaaccggctgaacgccgagcaccacttcgcgagcttcaaggccaagttcgccaagacctacgccaccaaggaggagcacgatcatcgcttcggcgtc

SEQ ID NO: 147474 - DNA, 253 bp, Glycine max
gaaagatataacaaatcagtggcacgggaagctactattaagtatcttgagttggccaagaagcatgggctaactcctgttcaacttgcacttggatttgcaagagatcgtccattcatgacaagttcaataattggtgcaacctctgtggaccagctaaaagaagatattgatgctttcacaacaactgagagacctttaccagcagaagtcatggcagatattgaagctatcttcaagagatacaaagatc

SEQ ID NO: 147475 - DNA, 255 bp, Glycine max
gtgggaagcccatttgtgtgcagggtccagattgcccttaagttgaagggagttgaatacaaatttttggaagaaaatttgggcaacaagagtgatttgcttctcaaatacaaccctgttcacaagaaggttccagtgtttgttcacaatgagcagcccatagcagagtctcttgtgattgttgaatacattgctgagacatggaagaacaaccccatcttaccttctgatccttaccaaagagccttggctcgt

SEQ ID NO: 147476 - DNA, 253 bp, Glycine max
ggttgctgtaggagataagattgcagtagtgctaagtgctaacacctgcagtgaacaatggcctctgcatcagcatctctgctcaagtcttcacttgttcttgacaagtctgagtgggtgaagggacaaacccttcgccaaccttctgcatcagttgtgagatgcaaccccaccaccccatcaggcctcaccatcagagctggttcctatgctgatgagctcgttaagaccgcgaaaacagtggcttcaccag

SEQ ID NO: 147477 - DNA, 248 bp, Glycine max
cacaaacaatagtgcatagcgtttttcattgtgcattattcaatggccaccacagcagctctatccggaaccatggtgagcacctccttcatgaggaagcaacctatgacgaccaagagcctaaagacattccccaacgctctttttggtctgacaggtggacgaggtggtcgtgtaacttgcatggcctcgtacaaggtgaagctcataaccccagaaggagaagtggagtttgaatgcccagatga

SEQ ID NO: 147478 - DNA, 166 bp, Glycine max
gtcaagggaaagactgtgatgtggaatgacagaattcaaaacccagatgcagtccaacatgtgctgaggagagctgaggagtatcgaggcacagtgcctcctgaaacgcgctactcagagtttgagcacgagggccaggagattggttagaggagagggtggggtg

SEQ ID NO: 147479 - DNA, 245 bp, Glycine max
gtcattattagtgcagtgctcaccagcagggcaattttccagaggatgaagaactatactatctatgctgtctcaatcaccattcgtattgtgtttggtttcttgtttattgcgttgatctggaagtttgattttgcacccttcatggttttgattattgccatactcaatgatggtaccattatgactatatccaaggatagagtgaaaccatctccacttcctgatagctggaaactgaggta

SEQ ID NO: 147480 - DNA, 247 bp, Glycine max
actgcttcaccttctgctctagaaaattcagtgctgaaacatggcttcggctactctctctgtagccaaaccagcccttcaggcaaatgggaaaggcttctctgaattctctggcctccgaagctcatcaggcttccttcccttttctagaaaatcttcagaggatttccattctgtcattgccttccagacctatgcagttggaagcagtggaggatacaagaagggtgtgacagaagcaaaactg

SEQ ID NO: 147481 - DNA, 245 bp, Glycine max
gcaaagcagaagttgccaaagatggtgtttgactactacgcatctggtgcagaggaccagtggactctgcaggagaacagaaatgccttttccagaattttgtttcggccacgtattcttattgatgtgagccagatagacatcacaactactgtcctgggcttcaaaatatccatgccaatcatgcttgccccaacagccatgcagaaaatggctcatcctgagggagaatatgcaacagcaag

SEQ ID NO: 147482 - DNA, 244 bp, Glycine max
ctcgagccgattcggctcgaggaagattgacatttacagtgataagcgtgaccaggaaacaatggaggattgggatcaagagaccttggagaaggtggtggagtcaaagaaaactgagtataatcagaataaaccaactgacatagtctgtaaatactttttggatgcagtagaaaagaagcaatatggttggttttgggtctgccccaatggtggtaagaattgccattatagacatgctctt

SEQ ID NO: 147483 - DNA, 245 bp, Glycine max
gttctcaaaccctaagaattttgatccatcctggcaagagcattgagtaggtgttaggaaccgtatagtctgtcagactaaattatttccttgaagttggttctcttcatgggtaagaagttttcatggagttttcgttgcatttgagcaattcaaccttgtaaaaataaataggctttccataaaccaaatgttacttttaaatgcccaaagcttatcaagcctcttttcttgaatggggattg

SEQ ID NO: 147484 - DNA, 243 bp, Glycine max
tttcggtttatatatgagactgagcggcatagtggtattggggagcttcttgagattctggggagtattattaatgggtttgctttgcccatgaaggaggagcataagttgtttcttgctagggcgcttctgcctctgcataagcccaagccggttggggtgtaccaccagcagttgtcgtattgcattgcgcagtttgtggagaaggattacaaactcgcggacacggttattaggggtttg

SEQ ID NO: 147485 - DNA, 246 bp, Glycine max
ctctcagaaaagccgtgttctttgtaatcgctcaatgcttcaccttttccgcatatgctgcaaggtttgacatcacaaaccgatgcacatacactgtctgggctgcgtctgtgcctgttggcggtggcgtgcaattaaacccgggccagtcatggtccgtggacgtgcctgcaggaacgaaaggggcccgcgtttggggccgaaccggctgcaacttcgacggttcgggccgcggtggatgccaga

SEQ ID NO: 147486 - DNA, 249 bp, Glycine max
cgcgttttccaattccccccaaatctcacgcctagggtttctatcgcaaaccctccctacctccaaccaggtcgcgtgcaaagggatttcgaagcttcggaagaaaaaaatgaaacctgttttctgtggaaacctggatttcgacgcgcgtcaatctgacgtggagaggctcttcagaagatacggcaaagttgatagagttgacatgaaatccgggtttgcttttgtctacatggaagatgaacgtga

SEQ ID NO: 147487 - DNA, 247 bp, Glycine max
gagagagcgagcgagcgagcagtttcaaagagaggatttgggattgggaaggcgagggattgcgctgcgtctcttcctcttctctttcgattcatccctcattcataatcttccaatccaacaacctcagcctcacactcacacatacacctctctgaacgcgtatcgtccctcccatggcttcaaagcgcatcctcaaggagctcaaggacttgcagaaagacccaccaacttcttgcagcgctgg

SEQ ID NO: 147488 - DNA, 246 bp, Glycine max
ggctggttgatgccacccaaggtttctctcctcaaggcaactcaaggtgatgctataagcaactattaccatgaaatgcatgtcatccaggacatgcttgttcctttgtacaaggtgggagatgctttagaatgggttcaccgtgagatggaggtataccccatttggctctgcccacacaaattgttcaagctgcctgtcaaaactatgatttaccccgagccaggattcgaactacaccgcagg

SEQ ID NO: 147489 - DNA, 243 bp, Glycine max
gttttgaacccaaaaagcggagaagcttctcttctcttctctctttctttcaaaccgccatctccttctccttctccttctccttcttcagctgttgaaaataaaaaatggcagacggtgaggatattcaaccactcgtctgtgataatgggacaggaatggttaaagctggatttgctggggatgatgctccaagggctgtgtttcccagcattgttggtcgtccccgtcacacgggagtga

SEQ ID NO: 147490 - DNA, 238 bp, Glycine max
ctggaaagcagcttgaggatggccgtacccttgccgattacaacattcagaaagagtccaccctccacctggtgctccgtcttcgtggtggcatgcaaatctttgtcaagaccctcactggaaagaccatcacccttgaggtggagagctctgacactattgacaatgtcaaagctaagattcaagacaaagaaggtatcccaccagaccaacagaggctcatttttgctggaaaaca

SEQ ID NO: 147491 - DNA, 241 bp, Glycine max
gcaaaaggtaacactagttcctcgtggtcaagctcggggtcttacatggttcattcctaatgatgatccaactctgatctccaaacaacaactctttgcaagacttgttggaggactaggtggaagggctgcagaagaaattatttttggtgagcctgaagttacaactggagcagctggtgatttgcagcaaatcaccggtttggcaaaacagatggtaaccacatttggcatgtctgat

SEQ ID NO: 147492 - DNA, 238 bp, Glycine max
tcagaaaggggttgactataatgggccgattcgggtttggggtaacttggttgctttcttagaaagaattgatgttgaatttttcaagagcttgcagtgcatagatcctcatacccgggactatgttgagagactcagggatgagcccttgtttctggttcttgcccagaatgttcaggaatatcttgaaagagttggaaatttcaaagctgcatctaaggtggccttgaggagggtt

SEQ ID NO: 147493 - DNA, 240 bp, Glycine max
ctttaaagcaggttattcaccccatccatgaccagaccttctatctgactatggagcataagaagaagcttaaggaggagtatggaattgagccctggacttttgctcagaagttaggagatgctgttttcattccagctggttgtcctcaccaagtcagaaatctgaagtcatgtattaaggttgctttggattttgtctctcctgaaaatgttggggagtgctttcgtttgacggagg

SEQ ID NO: 147494 - DNA, 240 bp, Glycine max
gcaaactacatggcaaaacgattggagaattattatcccgttcttttccgtggagtcaatggaacagttgctcatgaattcatcattgacctgagaggctttaagaatactgctggaattgagcctgaagatgttgcaaagcgcctcatggactacggttttcatgcaccaacaatgtcatggcctgtgcctggcacactcatgattgagccaactgagagtgaaagcaaggctgaacta

SEQ ID NO: 147495 - DNA, 240 bp, Glycine max
ctcagaggttctagaaagatccactccgaaatggacggtgcgccacaatccgccggtgccggaggtccggcgccgttccttctgaagacctacgacatggtggacgatgcctccaccaacgacatcgtttcgtggagctctaccaacaacagcttcgtcgtgtggaaccctcccgagttcgctcgcctccttctcccgacctatttcaagcacaacaacttctccagcttcatccgtcag

SEQ ID NO: 147496 - DNA, 236 bp, Glycine max
cgcggaagaacgctcgcccgcaccgtccagatcgtaatcaagagaagaggagcgagttctctttttccttgcagcccaagccatggcgcctctgatcctgcatggtggaaaaaccaacaaaaattcttacaagacactcattgcggcggagtatgccggcgtccaagttgactttgccccaaattttgagatgggtgtctccaataaaactcctgaatttctcaagatcaatccta

SEQ ID NO: 147497 - DNA, 236 bp, Glycine max
aaaaaaataaaattaagaaattttcatggtaaccattcgtgcagatgaaattagtaaaattatccgtgaacgcattgagcaatataatacggaagtaaaaattgtaaatacgggtaccgtacttcaagtaggcgacggtattgctcgtatttatggtcttgatgaagtaatggcgggtgaattagtggaatttgaagagggtactataggcattgctttgaatttggaatccaaaa

SEQ ID NO: 147498 - DNA, 238 bp, Glycine max
cagaaaatgaaggagtatggatgtaaaccaacgactagtacttataatactctcatcaaaggatttgggattgctggaaggccttatgaatctatgaaattgctagagatgatgggtcaagatgaaaatgtgaaacccaatgatagaacatataatattctcatccaagcctggtgtaccaagaagaaactggaagaagcatggaatgttttgcataaaatggtggcttctggcattc

SEQ ID NO: 147499 - DNA, 238 bp, Glycine max
accgtagataacgccgcgtttggttgttaagttgttccgtttcagccatggtggagaacaatctcttcgaggatatctttagggtcgaaaaattaaaccccgatgacaaaaaattattcgataaagtcactcgcattgaagcaagaagtgaaaagtttgacatgtttatgcacctggacattaattctgaggtatatccattaaaggtgggtcagaagtttgctcttgtgcttgtttc

SEQ ID NO: 147500 - DNA, 241 bp, Glycine max
  unsure (1)..(241): unsure at all n locations
ctctctctcaccctcctcttcacacattatctgtcccctctaanaaacattctcgttcanactttcagattgtctgaagatgggggcgggtggccgaactgatgttcctcctgccaacaggaagtcagaggttgaccctttgaagcgggtgccatttgaaaaacctccatttagtctcagccaaatcaagaaggtcattccacctcactgtttccgccgttctgttttccgctcattctcc

SEQ ID NO: 147501 - DNA, 270 bp, Glycine max
attgtttgttgttgtaactcgttcttcttcttttgttgttctgtgtttgtgtttgttttttctctcacctgaaaatgtcttgctgcggtggtaactgtggttgcggaagctcctgcaagtgcggcaacggctgcggaggctgcaagatgtacccagacttgagctacactgagtcaaccaccaccgagaccttggtcatgggagtggcacctgttaaggctcaatttgagggtgctgaaatgggtgtgcccgctgagaacgatggctgca

SEQ ID NO: 147502 - DNA, 253 bp, Glycine max
cacagcatgatgagactgtcacaaatgatgagattgcagctgatcttaaagaacacgtgattaagcctgtgattcctgagaagtaccttgatgagaagaccattttccatttgaacccttctggcaggtttgtcattggagggccgcatggcgatgctggtctcaccggccgcaagatcatcatcgacacctatggaggatggggtgcacatggtggtggtgccttctctgggaaggatcctaccaaggttga

SEQ ID NO: 147503 - DNA, 262 bp, Glycine max
gataccaaaaagatatctgcagtctcgatattttttgagacaatgccatatcgattgaatgaaagtacaggatacatcgactatgaccagatggagaaatctgctacactcttcaggccaaaattaattgttgctggagctagcgcttatgcacgtctctatgattatgaacgtgtacgcaaggtttgcgataaacagaaagctatactattggcagatatggcacacatcagtggattggttgcagctggtgtcatcccat

SEQ ID NO: 147504 - DNA, 247 bp, Glycine max
aaagaattggaagcacagcccgatgttgatggatttttggctggtggtgcatccctcaaggcggaatttgtggacatcataaacgctgctactgtgaagaagaattgaaattcgtagttaggaactgataatgctgcctttcaagctgcttcggaaattgctgtttttgagttttggttctgtgctttgtggccaatgtattgaactctgtttagtacctgaataaacatgctttcctttgatctca

SEQ ID NO: 147505 - DNA, 256 bp, Glycine max
gaattatttggacgctcaatattttggtgagattggaattggcacacccccacagcccttcactgtagtgcttgacactgggagttccaacctttgggttccatgcatcaaagtgctactttactcttgcttgctatacccataattggtacacggctaagaaatcaaagacacatgtcaaaaatggaacttcatgtaaaataaactatggaactggatcaatatctggtttcttcagtcaagataatgttaaagt

SEQ ID NO: 147506 - DNA, 258 bp, Glycine max
  unsure (1)..(258): unsure at all n locations
atggagcccagaagaggacgangccctgcgggcgctggttcaggcccacgggcctcgaaactggtcggtgataagcaagtccattccggggagatccgggaaatcgtgccgcttacggtggtgcaaccagctctcgccgcaggtggcccatcgccccttctacgcaggaggaggacgaggccatcatcatggcccacgccaagttcggcaacaagtgggccaccatagctcgcctgctcaacggccgcaccgataacg

SEQ ID NO: 147507 - DNA, 255 bp, Glycine max
ctatgcacctctcatccgtgatgggcgtatggagaagttctactgggcaccaacaagggaagaccgcattggtgtttgcaccggaattttccgcactgatggtattcctgaacaggacattgtcaagcttgttgacaccttccctggccaatccattgatttctttggtgcactgagggccagagtatatgatgataccgagaggaagtggatttctggtgttggtgttgacagtgttgggaagaagttgtgaac

SEQ ID NO: 147508 - DNA, 257 bp, Glycine max
cgcactatcagtacaacaactcactcactaagctaaacaatttcatcaagcctgccatggcttcctcgtgtgcttcctctgccattgcagctgttgccatctccacaccaagttcccagaagaatggatcactcttgggaagcacaaaagcttcttttcttagtgggaggaaactgaaggtgaacagttttacagcaccagttggagcacgatccagcactacagtgtgtgcagttgctgagcctgataggcctctg

SEQ ID NO: 147509 - DNA, 255 bp, Glycine max
aaaggatccaatttgagcaaggttcaaaaaaatggttggaattagtaaaactgttttgatcaaaagtgtagccgcaggaattaaccttctatttgtatgattctttcatagaaagaaaaaatggtatgttgctgccatttttgaaaagattgaagattcccgaagtaatgcctaaacctaatgattcaaagaaaagctaaaagatcatggaacaagtaaataccattttcaaattgtctcatcaattctattatc

SEQ ID NO: 147510 - DNA, 259 bp, Glycine max
gtcattattagtgcagtgctcaccagcagggcaattttccagaggatgaagaactatactatctatgctgtgtcaatcaccattcgtattgtgtttggtttcttgtttattgcgttgatctggaagtttgattttgcacccttcatggttttgattattgccatactcaatgatggtaccattatgactatatccaaggatagagtgaaaccatcaccacttcctgatagctggaaactgagggagatatttgctactg

SEQ ID NO: 147511 - DNA, 272 bp, Glycine max
ctctcaatgccggttaatgtatagccggaggcggaaaactgctgcatggctatgggagtgtgtattacagcttaggtccaactctcattaaacttggacagttatcatcaacaaggtcggatctatttccccgtgaatttgtagaggagcttgcaaaattgcaggacagggtccccgcattttctccacagtgagcaagaggctttattgagagtgaattaggagctcccattaatatattgtttaaagagtttgaagatcggcccattgct

SEQ ID NO: 147512 - DNA, 266 bp, Glycine max
attgtttgttgttgtaactcgttcttcttcttttgttgttctgtgtttgtgtttgttttttctctcacctgaaaatgtcttgctgcggtggtaactgtggttgcggaagctcctgcaagtgcggcaacggctgcggaggctgcaagatgtacccagacttgagctacactgagtcaaccaccaccgagaccttggtcatgggagtggcacctgttaaggctcaatttgagggtgctgaaatgggtgtgcccgctgagaacgatggc

SEQ ID NO: 147513 - DNA, 254 bp, Glycine max
gtcttgctccaatctgacaatgttggtgtcctcaaaaccttccctttccgacccctcgaacctctccttccgctctgtcctgaacccttttcagctccctacacaaaacccagcttcatgcaccccttcacgctcctcaagcacccaaattcagtgtggtctgagagaactgagaacccgcattgagtctgtgaagaacacgcagaaaatcacggaggcaatgaagcttgttgctgcagccaaagtgagaagag

SEQ ID NO: 147514 - DNA, 168 bp, Glycine max
tatgtaccatgccattgtaattttgtatgcttactactactactaccactacaacacttgttgcttcatttttcttttaaacttgtactgagaaacagaaccatcaattttctctgccttctcattgtgcaataaaattcttaccttgaaatctgaatgttgatgatc

SEQ ID NO: 147515 - DNA, 253 bp, Glycine max
ctcgagccgaatcggctcgagtccaattgaaattttaaaaatgactgggataaacttaagaattcaattattgaaattgcataagtaaacaatttaattggattggtcgaatggtatcaaaaaaatggagtactaactcccatttcttatttattattgaattaaccgatcaacttgctttgttatcgaacatttctttttgatttcaaaaattttccggaaaaaatttgaatctatttttatatgcgaatca

SEQ ID NO: 147516 - DNA, 257 bp, Glycine max
cgattacgctagaggtcgagtcctctgacaccatcgataacgtgaaagctaagatccaggacaaggaaggcattccaccagaccagcagcgcttgatcttcgccggaaaacagctcgaagacggcagaaccctcgccgattacaatattcagaaagaatcgacgcttcatctggtgcttcgactccgcggagggatgcagatcttcgtgaagacgctcaccgggaaaactattactctggaggtggagagttctgat

SEQ ID NO: 147517 - DNA, 261 bp, Glycine max
caccaaataattgtactctctccactcttcattctccaccaacacaaaaacatctgcaaactagttttgtttttggaacatatcgcattacattacattagattggtggcaaagcaatggcatcgtcactacaagcagcagctactttcatgcaacccaccaagtttttgcagctaaagtctactcaggccatatctaaggcttttggtttggaacctgctggagttaataaggtcacatgctcccttcaggctgatctta

SEQ ID NO: 147518 - DNA, 252 bp, Glycine max
cggctcgaggtttctcttcaatcttcctgaaaaaaacaaaaacacgaaaaatcatccaccctctcacattctctctctctctcctttcaactaatatggcaattgaaaaccaagacaacactgtcagagaaatcaagccaaagaacaggagaatcatgggtgctggaggccctgatgatgacgacaataggtggccaccgtggttgaagccactgctgaaagagagcttctttgttcaatgcaagttgcatg

SEQ ID NO: 147519 - DNA, 238 bp, Glycine max
aggttgtaaagccttgttgctgccatggccacccacgcggatcttgcttctacaaggatcacttcaaacacaaggttcccatccaaggcctctcactctttcccaacccaatgcgccttaaagagacttgaggtgacagaattctctgggcttagatcaaatcatgtgtcacatatggtaaaaggctagagaatcttccttttatgatcttgtagcttcacaactcaatcccaagcag

SEQ ID NO: 147520 - DNA, 252 bp, Glycine max
ggctcgagagagtgaatggggccatggtgctaagcttgatgttctggaatcaaagattgcttcagatacttcacacactataaaggcactttgcattgttcacaatgagactgcaactggggtcaccaatgacttggccaaagtgagacaaattcttgattcctaccagcatccagccctccttattgttgatggagtgtcttccatttgtgctcttgatttccgcatggatgaatggggagtggatgtggc

SEQ ID NO: 147521 - DNA, 275 bp, Glycine max
gctcggattcggctcaatcgagcgattcggctcagaacgcattgtgtttctctcttaccgcggcgtagatctaagcagtttgggaaaccctaactgctctcaccactctctttgctttttttcctctccgatcaacgacctctttcgtcgccctaagtcatggcaggacttgcacccgagggatcacagtttgatgctcgtcaaaatgataccaagatgaatgagttgcttacatctgatggacaggatctcttcacatcttatgatgaggttta

SEQ ID NO: 147522 - DNA, 245 bp, Glycine max
tgcaattgaagttgaagtcttgcccttctctcttcaactcctaacacaagacatcatcatccatggctgcctccgactccactgtcggagctgtcaacagagctcttttgaacctgaatcggtctggacctgcggtatcagctcccagttcatccttctttgggatcagcttgaagaaggctattggctcaagggtcaccaacacaaagattttctctggaagcttcaagattgatgctgtagaa

SEQ ID NO: 147523 - DNA, 250 bp, Glycine max
gtgcttcactcttcacttcgcagcttcagatcttctccatcctctgaatcaagttttgactttatttgaagagtttctcaactgcactttccttccaaaatgagccggacaatggaggaagatgctgcgggtaaaaatgaggaagacgtattcaacaccggacgcctatctgtactcatgatgagtgttaaaaataatactcaggtactgataaattgtcggaacaacaaaaagcttctgggtcgtgtaa

SEQ ID NO: 147524 - DNA, 252 bp, Glycine max
aaaaatagttgatattggtccaaagaattggcacaaagcctgttttgtgccaacaaagtcagatgcccttgttattggttatagaaattggttaaagaagtatgcaggtggtcaggttgattggagaggaaaatatagtggggctctccctccaacacctccaagagaacagcttatggacaggtactggtcccatgtggtgaattgcaagagttgcaattctgcttataagagcctcaatgtgattgaagt

SEQ ID NO: 147525 - DNA, 259 bp, Glycine max
tgaaggtcctggaaagggcaagagccatcagggctcagttaagtatggctttagcctagttaaagggaaagcaaaccacccaatagaggactatcatgtagcaaaaatcgtcaagcttgtagggcaagagttaggactttttgctatatatgatggacacttgggagacagtgtgcctgcctatttacaaaagcatctcttttctaatatcttgaaggaggaggacttctggactgatccagccagttccatcattaaa

SEQ ID NO: 147526 - DNA, 161 bp, Glycine max
gtagtaaatgattgttctacgaagctcccctcggatacagcatagaagacgttagaccaaacggtggaatcaagaaattcagatctgctgcttactccaactgcgctcgcaaaccttcctgatatccatccagattgatagttcattgcatgcaaccatag

SEQ ID NO: 147527 - DNA, 251 bp, Glycine max
actaaatggagagtttgaagatgtcaaacgcttaaatgatctcctaattgaaaagaacaaaataactgggtgggacactcctattcatgttgatgcagccagcggtgggttcatagccccatttatttacccagagcttgagtgggacttccggttacaactagtgaagagcatcaatgttagtgggcacaagtatggtttggtctatgctggaatcggttgggttatctggagaagcaagcaggacttgc

SEQ ID NO: 147528 - DNA, 252 bp, Glycine max
aaatgggcagatttatgcagcgcagggaagagctttaaatgccgttgcatcccgcaatgtcaaagttatagtagtgggaaacccttgcaatacaaatgcattaatatgcttgaagaatgctcctaacattcctgcaaaaaattttcatgctttaactcgtttagatgagaacagagcaaaatgtcagctagccctcaaggcaggtgtcttctatgataaagtgtcaaatgtgacaatatggggcaaccactc

SEQ ID NO: 147529 - DNA, 252 bp, Glycine max
cttcaattgggctagagaacactgaagctaaccgccaggcataccgtaccctcctcgtgacagttccaggccttggtcagtacatctctggtgccattctctttgaggaaacactctaccaatccacaactgatggcaggtagattgttgacgtgctgcttgagcaaaacattgttcctggtattaaagtcgacaagggtttggtgccccttgcaggttccaacgacgagtcatggtgccaaggtttggatg

SEQ ID NO: 147530 - DNA, 261 bp, Glycine max
cggctcgagatggtaacatgcttgtccaagaacaagagaatgtcaagagagtccaattggctgacaagtacttgaacgaggctgcacttggaaatgctaacgaggatgctattaacaggggaactttcttccaatcttgaattggaggcaaagcaaacttggcaagtaaatatttctgttcctgaaggttgtgctgatccaagtgctagaagttgtgatgggacttgcgtgtaacattcttagaattctcaatgtcttagg

SEQ ID NO: 147531 - DNA, 264 bp, Glycine max
caagaagcttatcttgtcaatctcgtaaatgtgttacgagaattgtatttgcacagtccagaggaagctcgccaattgagaaggaaagctctctctcgtattgaatggctgcaaaaagctgatgtgcctaccatagcacagattgaagagttccattcgatgcagaggatgatgaatgctcctgattcaaatgataatattgatctactgttgagcattgatttgttgggtttacaaggagcaggtaaagcttttccaaacaag

SEQ ID NO: 147532 - DNA, 257 bp, Glycine max
gataagcacaaggcggaaaactgctgcatggctaagggagtgtgtatatcagcttactccgactctcattatacttggacagcgatcaccaacaaggtcggatctatgtacgcgagaatttgtacagctacttgcaaaatagcaggacagggtccccgcattatctccccagtgagcaagaggctttattgagagtgaattaggagctcccattaatatattgtttaaagagtttgaagatcggcccattgctgctg

SEQ ID NO: 147533 - DNA, 254 bp, Glycine max
ctgcaaaggattctacccgccgctcgatgggaattgcgcttcaaggcgtctcgtagggctaatccgcctcacgagggtcaccaacggcacgtgcctttggggggccgaggcccctactgctggtcggcaaacggacggcgggcgcacgcgtcgcttctagcccggattctgacttagaggcgttcagtcataatccaacgcacggtagcttcgcgccactggcgtgccaaccaagcgcgatgaccaattgtgcg

SEQ ID NO: 147534 - DNA, 150 bp, Glycine max
ctcatgtacttcttaagaggaagtcttccttggcagggactaaaggctggcaccaaaaaacaaaaatatgataaaatcagtgagaagaaaatgtcaacttcaatagaggtgctctgcaagtcatatccctcagaatttgtatcgtatttt

SEQ ID NO: 147535 - DNA, 225 bp, Glycine max
aaagaattggcagcacagcccgatgttgatggatttttggttggtggtgcatccctcaaggcggaatttgtggacatcataaacgctgctactgtgaagaagaattgaaattcgtagttaggaactgataatgctgcctttcaagctgcttcggaaattgctgtttttgagttttggttctgtgctttgtggccaatgtattgaactctgtttagtacctgaata

SEQ ID NO: 147536 - DNA, 258 bp, Glycine max
atggagtatgatgagaagaggatttctgctttgcagcagaggctgcttaatgggattagagagaagcttgatggggtggtggtgaatgggagcttggagaggcgctatgtggggaatttgaatttgttctttgcttatgttgaaggggagagcttgctcatgggtttgaaggaggtggctgtgtccagtggcagtgcctgcactagtgctagtttggagccttcgtatgtgttgagggcgttgggagttgaggaggac

SEQ ID NO: 147537 - DNA, 125 bp, Glycine max
atcaacagtgctgccgagtaaggaaggtgaggcccttgaggagagcccttaagggtctcaaagcatggatcactggacagataaaagatcagtctcctggtactaggtctgaactccctgttgtc

SEQ ID NO: 147538 - DNA, 257 bp, Glycine max
cccaaatcgtagatctacggttaaattggtgtagtgtggtaagatgggaggaggatttagagtgcttcacttagttaggccatttctctcgtttcttcctgaagttcaaactgctgacaggaaagtgccatttagagagaaggtcatatacactgtgatctctcttttcattttcctggtttgtagtcagctccctctatatgggatacactcaacaacaggtgctgatccattctattggatgcgtgttattctcg

SEQ ID NO: 147539 - DNA, 256 bp, Glycine max
aaaaaaggaagactaaaactaaaactaaaaccccactcagtcttccagtgaaaaaagaaaggcagcgatggaagaagacttcgacatccccggcggcgaggaaatggatctcggcgaagacaaggtcggcgaggagcgggagatcggctcccgcggcctcaagaagaagctcctcaaagaaggtcaaggctgggaaacccccgaagtcggcgacgagtccaagttcattacacggggactttgctcgacggaacta

SEQ ID NO: 147540 - DNA, 249 bp, Glycine max
tacgtctccgcatcgagcaccaagaaaatactaataatgggaggcaccaggtttattggtgtgtttttgtctaggctccttgtcaaagagggtcaccaggtgactttattcacaagaggtaaagcgcctgtcactcaacagttgccaggtgaatcagacagtgattatgctgatttttcttccaagatcttgcatttgaaaggagacaggaaggacttcgactttgtaaaatccagtctctcagcagag

SEQ ID NO: 147541 - DNA, 247 bp, Glycine max
aaaagaatatgttggaaggagatgggcagattgggttggaattgagaagtttttcaaggagaaaaaatggcaattcagtataactggaacgtcagagagagcaatggtcattggcctgggtggcctcaatctgtttggagttattattcttggaaccatgttgaaagatacggctgttgcacccagtagcttcattaaatttgtagccgacatatttcctcttcttcagatttatgctggttccttc

SEQ ID NO: 147542 - DNA, 245 bp, Glycine max
aggtacaaatacttggttcggttgcatttctgtgatattgctagcatttcgcttggtttgctttacttcaatgtgtatgtcaatgggaatttggcttatgaagatttggatctctcttacgttttgaattcgctggcttcgccgttttacgcggactttgtggttgatggaggagatgatggggccttgagtgttggtgtaggtccttcgaagaggagcatgccgcatgtcatcgatgggatatt

SEQ ID NO: 147543 - DNA, 248 bp, Glycine max
gttaatttgaagaacttgttgctttttggagccgcggatacatattgggggacatctagatccgttcatgggtcagcatcattggcaagggactattacgaagtgcttggtgtgagtaagaatgctagttcttctgaaataaagaaagcatactatgggcttgcaaagaagctccatccagacacaaacaaagatgatcctaaggctgaaaagaagtttcaagaagtttcaatggcatatgaggtttt

SEQ ID NO: 147544 - DNA, 249 bp, Glycine max
aaaaaaacttaggaggacccagagagaatcaacaacaggctcgctctcgtcatgaagagtggcaaattcaacctcggttacaagaccgttctcaaatctcttaggagctccaaagggaaattgattatcattgctaacaactgcccccctttgaggaagtcagagattgaatactatgctatgttggcaaaggttggggttcatcattacaatgggaacaatgtggatttgggcactgcatgtggcaaa

SEQ ID NO: 147545 - DNA, 247 bp, Glycine max
cgtgaatgcgtataaaaggaaaataaagaaattagcgtcaaaatgttgggtgtgttcagcagctccatagtgtcgccgccggacgagctcgtggcaaccggcagccgtactccgtcgccgaagatgacggcggcggcgctgcggaagcggttcgaggagaagaacccctccgccgtgtcggtggaggtcggagagcatgtccagctcgcttatacccaccacaacgagtcgccgtttcagcccagat

SEQ ID NO: 147546 - DNA, 248 bp, Glycine max
cttttctctacagtcatgggcaaggtcaagatcggaatcaacggatttggaagaattggccgtttggttgccagagtcgctctgcaaagagacgatgtggagctcgttgccgttaacgaccctttcattaccaccgattacatgacatacatgtttaaatacgacagtgttcacggacactggaagcatcacgatgtcaccgttaaggacgagaagacccttctcttcggtgacaagccagtcactgt

SEQ ID NO: 147547 - DNA, 246 bp, Glycine max
tcgagttctgagtgggcaaatcaaacttcatggcacttgagtttccttattgacaatcccaaacagtctacagtttttgatattctcttgggaatttctcaagattttgaaattgctggtaatactcttatgccagctttttctgttccacaggctactgccagatcttctgaaaatgcggaatcctctgcatgatctggaatttgtgttttctttcgtttgttcgtttgtttaattcaataaagg

SEQ ID NO: 147548 - DNA, 244 bp, Glycine max
gatcattctcgcaaatcagctgaacaggctgtgaaggccatcaaggcagctgaggaaggaagaacagttgaggagtatgattaccttccatacttctattcccgttcatttgatctgtcttggcaattctatggcgacaatgtcggcgacacagtactattcggagacaacaatcctgcgtcgtcaaagcctaagtttgggacatactggattaaagatgggaaagttgttggggtctttctgg

SEQ ID NO: 147549 - DNA, 243 bp, Glycine max
cgcccagagaacgtgaaggcagcacaagatgcactcgcattccgtgccaagtccaactcactcgctcagcttgggaagtacactggtgagggtgaatccgaggaagccaagaaggagttgttcgtcaaaagctactcctactaagatgtttgcagtgaatatgatacttgttaggcagcaacaccagcagttacagtaggtgttgacggacgatgaagtggaagactaatttgtctaaaatgt

SEQ ID NO: 147550 - DNA, 245 bp, Glycine max
agaagaacaagtagttgagaactaagaaggagaagcaaatggcttcctcaatgatctcttccccagctgttaccactgtcaaccgtgccggtgccggcatggttgctccattcactggcctcaagtccatggctggcttccccaccagaaagaccaacaatgacattacctccattgctagcaacggtggaagagtgcaatgcatgcaggtgtggccaccagttggcaagaagaagattgagact

SEQ ID NO: 147551 - DNA, 244 bp, Glycine max
atatgtagtctacattgtctttcaactgtggacacacaggcagttatttgaagccgaagatgagggtgaggatggtgaggacggtgaagaagaacaagctgtgattggattatggagtggcattgcttggttggtagggatgactgtgttcattgctgtgttgtctgaatatgtggtggatacaattgaggatgcatcagattcgtggggtttgtctgtgagctttctcagcataatcttgcta

SEQ ID NO: 147552 - DNA, 246 bp, Glycine max
caatgttgtctttggcggtcaacagatcatcaacgggaatgagacattgccctatttcccaattgatcaccatgtcgatccatatggccgcagtaaatcaattgctgaacagttggttcttaagaacaatgcccgtactctcaagaacgactccgggaatcgtctttacacttgtgctgttcgtccagctgcaatctatggaccgggtgaagacaggcaccttccaaggatcgtaaccttggcaaa

SEQ ID NO: 147553 - DNA, 242 bp, Glycine max
tgagatttgggcagctcgttacatcttggagaggatcactgagattgctggtgtggtggtttcctttgaccccaagccaattaagggtgattggatggagagaaaggttctgatattgtgctctgttgtggccttcttggggctgttggctatgaaatgatcttagaggaataagcgacaaggattaaggtttctcaggttcattttgttacaccaaaccagtgcacgtatcctcgtagtcc

SEQ ID NO: 147554 - DNA, 247 bp, Glycine max
atagagcctgctcttgcacctcctgctctgaatcctctaccaatgcccaggcctaaaaggcctcgatctaatgtggttccatcatccccggattcctctgttcttactcgtgaagcttcatctaaagtcagcgtagatcctttgccaacaagtgggtttcaaagggtcttgcaaggtcaagaactgtcgaccttgagaggtaattttgctgaaacaacgaatctgatacggtcgagaagtctgctgt

SEQ ID NO: 147555 - DNA, 241 bp, Glycine max
ctcctacgagtacttaagcactggacttcgccagtacttggacaacaaaatggatggattctacattgctccagcttttatggacaagcttgttgttcacatctccaagaacttcatgaccctgcccaacatcaaggttcctctcattcttggtatctggggaggcaagggacaaggaaaatctttccaatgtgagcttgtctttgccaagatgggaatcaaccccatcatgatgagtgct

SEQ ID NO: 147556 - DNA, 240 bp, Glycine max
cttcaataaaaaaaggtggtccaagggaaccttggcacgacatccattctcgacttgaaggccctattgcttgggatgttttgttcaactttgagcagagatggaggaagcagggaggaaaggacttacttgttccactgagagaccttgccgatgtcattattcccccatccccggtaacttacattgatgatcatgagacatggaatgttcaattatttagatccattgatggtggag

SEQ ID NO: 147557 - DNA, 244 bp, Glycine max
aagagattgaagagacccagcagaccgacaaggacagatggaagggtcttgcctatgatatctcagacgaccaacaggacatcacaagaggaaagggtttggttgactcccttttccaagctccacaggatgctggaactcactatgctgtcatgagctcctacgagtaccttagcactggacttcgccagtacttggacaacaacatggatggattttacattgctccagcttttatggacaa

SEQ ID NO: 147558 - DNA, 247 bp, Glycine max
atttcatggagtcaaatacaaaaaacgtgcatgcaactaaagtattgtgggtttaccgatttggaacattttctttgcaaatgtcctatcagggtcagctctctatcgagtaaatgtctttcttgagccaaaagagattcccagaatactagcggaagctgtaccatcccaggcatccttcttcatagcttatgttgtgacttctggatggaccgctatagcatcagaactctttcgattgactaca

SEQ ID NO: 147559 - DNA, 185 bp, Glycine max
tggacatgcttggttcaaggcttgtgggatgtttggaattcctcaagccaggctatgactgcggaaatggttgcatgtatagcagtcggagtccctatcgatcctggagaagatgcatgcaagaggctatgtgcatggagatgtaaaaccagaaaactttttactaggtcaaccttccacacaac

SEQ ID NO: 147560 - DNA, 239 bp, Glycine max
cttttgtcaattttctattgaccttctcggtggaggaattttagtggacaaaactggagattggatcacacttatacaaaattctccaattagtaacttgttgagagttgctgcttggaagaaaggctgtttaatggttaatattgtgatgtctgggaatgcagcagtcaaaaggagtgattgggcctcattggtacaagtgtttttaacaaacagcaacagtacagagcatttcgatg

SEQ ID NO: 147561 - DNA, 242 bp, Glycine max
tgcggggatcagattatagattcaacaatggcctctgcttctgctactcttctcaagtcatctcctgttcttgacaagtgcgagtgtgtcaaaggccagacccttcgccaacctctcgtgagatgtaacccttcctcagcatcagctctcaccatcaaagctgcttcctatgctgacgagctcgtcaaaaccgccaaaacagtggcctcaccggggcgtggtattttggcgatggatgagtc

SEQ ID NO: 147562 - DNA, 241 bp, Glycine max
atccaaatcaacactaaaggtttcaaagacaaagaatacttcactcgtgaccagatgtgaaattggtgacagtctggaagaattcctcacaaaagcaacaccagataaggggttgatcaggttgttggtgtccatgggagaagcattaagaacaatttccttcaaagtgaagacggcttcttgtggtggaacacaatgtgttaatacttttggggacgagcagcttgcagtggatttgcta

SEQ ID NO: 147563 - DNA, 236 bp, Glycine max
  unsure (1)..(236): unsure at all n locations
ctcttctttctctctcacgttttccgcttcagttttctcgggaaaatcatggtgaaaggtccaggcctctactctgacattggcaagagagctcgcgatcttctgttcaaggattatcagaatgaccacaagttcaccatcaccacttacacttccaccggagtggaaatcacttcaactggagtcagganaggtgagatatattgggcgatgtcagcactaaggtgaagaacaag

SEQ ID NO: 147564 - DNA, 239 bp, Glycine max
gcaagcaccaacgtgaataccctaattcggagggtttcagttttcgccctcttttctcatctccaacatcttcgtcgtcacggaggctagtcttcctgttatcacaaacaatgtctgacggtcaagaatcagacaagaatattgagatatggaagatcaagaaattgataaaggcattggaagctgctcgaggtaatggtaccagcatgatttctctgataatgcctccacgtgatcaa

SEQ ID NO: 147565 - DNA, 237 bp, Glycine max
aaaatggccaaatcaatcaaattctttgagttgaacacaggggccaagattccttctcttgggttagggacttggcaagctgaacctggtgttgtagctgaagctctcaccacagccattcaggttggatacaggcatattgactgtgctagtgcgtataagaatcaagcagagattggttctgctcttaagaagctttttgatgatggtgtggtgaagcgtgaggacttatggatc

SEQ ID NO: 147566 - DNA, 240 bp, Glycine max
agctcaagccctatacaaccaaaccctaacacacacccatttgattcagtttccatggctagcctcaaggttgcatttttggctgcagtgctctgcatggttgtggtgagtgcacccatggcacatgcagctatcacgtgcgggcaggtgacgaatagcctgatcaattgcatcggttacctccagaacggaggaacgccgccgtcgggatgctgcaacggagtgaagagcctcaatgcc

SEQ ID NO: 147567 - DNA, 237 bp, Glycine max
atagctcagcattgaagccacccaatgtatatggaagcctcgagttaaaaaatgttgatttttgttacccatctcgtcctgaagtgttggtattgagcaattttagcctcaaagtcactgggggccaaacagttgctattgtgggagtttctgggtcaggaaagagcactataatatctttgattgagaggttttatgacccagttgcaggccaagttttcctggatggtagggact

SEQ ID NO: 147568 - DNA, 237 bp, Glycine max
gataaattatgctactgggtgcatatttgagtatgacaaagctcatccagagggttctggcattggctttaaggaggaagacaaacccaacttcattggttctttctattccaaaactaaggctatggtcgaagagctcttgaaagaatatgacaatgtgtgcaccctcagggttcgcatgccaatttcatctgacttgagcaatccgcgcaatttcatcaccaagatttctcgtta

SEQ ID NO: 147569 - DNA, 237 bp, Glycine max
gtcagttaaaagctttacttcaaaagatgaagcaatacaaagtaagagcaatggctgacatagttattaatcatcgtactggcaccacccaaggacgcggagggatgtataatcgttttgatggaattccattaggttgggatgaacgtgctgtgacatcagattctggaggactgggtaatcgaagcacaggagccattttccaagggtttcccaatattgaccatactcaagatt

SEQ ID NO: 147570 - DNA, 236 bp, Glycine max
caaaccgtgacgtccctgccgcgggccgggccgcgagctacggcggatccgacatagtgtggaccccatacgggcccgagtggccgatgctgcggaaggtgtgcgtggctaagatgctgagccacgccacgctggatacggtgtacgatctgcgccgcgaggaggtgcgcaaaacggtgtcgtatttgcacgaccgagtggggagtgcggtgaatataggggaacaggtttttctg

SEQ ID NO: 147571 - DNA, 237 bp, Glycine max
gattttgtaattgagttcgatcaaatagctcccagtactttaattgatttctgaatatcatcacttaatttgaaggaaagatggtgagcgtagctgagatccgccaggcacaaagggcagaaggcccagcaaccatccttgccattggaactgcaaacccaccaaactgtgttgatcagagcacctatcctgactactacttcagaatcaccaacagtgagcacatgaccgagctca

SEQ ID NO: 147572 - DNA, 240 bp, Glycine max
gaatcggccggttcgaccgttcgggccggtcggttgctttacgtggccacagcgcgtctttagttgtgcttggtacgtttttgttatggttcggctggtacggcttcaaccctggttcgtttctgacaatagccaaggggtatgaaagtggagggtattatggtcaatggagcgctatagggaggacagctgtcacgacgacattggctgggagcactgcggctctgacgacgttgttca

SEQ ID NO: 147573 - DNA, 268 bp, Glycine max
aataccccctcttttgctgcatcagaggagttgtaaattaagagcatggctgcacaagctcttgtatcatcatcttctcttaccttctcagcggaggctgcaagacaaagtcttggaccaagatcactccaatctccatttggcttctccagaaaagcctcctttcttgttaaggcagctgctaccccccctgtcaagcaaggatcagacagacctttgtggtttgcatcaaagcaaagtctttcttacttggatggcagccttcggg

SEQ ID NO: 147574 - DNA, 260 bp, Glycine max
aaaccaactccctccaaactttaaacagtgtccgtgcgtctctctttattttctctgagaaaattcagcaagaaaaatttgcaaatgtcgaatttcctgagcaacactaatccgaaccctaacaagtcctttgaggtgaatcagcctcccactgattccgtgtccagtctcagcttcagtcccaaagccaacttcctcgtcgccacttcttgggacaatcaggttcgttgttgggaggtagcacagaatggagttaatgt

SEQ ID NO: 147575 - DNA, 254 bp, Glycine max
tcttgaaccacctctccgtcttcattgaaggttatggtcctgctggatatgcattattcgttgccgtttatgctggattggagatccttgcaattcctgccattcctttaaccatgtcagctggacttctatttggatctgttgtcggcactatcatagtctctatcagcggaacagtggcagccagtgttgcttttctaattgcacgatattttgctcgtgagcgaattgtaaaactagtggacggaaataag

SEQ ID NO: 147576 - DNA, 251 bp, Glycine max
cccatttccatttctgctgtttttctcaaaccaacaactctgtcgtcgtctcgcgtcgttccccacgtcgtggtgtcgtcggatttggggcaggaggaggacaccttcagtgacggagacggccccagcttctcccccgaccttaagctctttgtcgggaatcttccgttcaacgtcgacagcgcgcagtcgcggagtgctttgagagtgccgggaatgtggaggtggttgaggtgatttatgataagact

SEQ ID NO: 147577 - DNA, 250 bp, Glycine max
tgtgggagtcatcaagaacgttgagaagaaggatcctaccggagccaaggtcaccaaggctgcccagaagaagaagtgaatcgtgcgggctggttcatcaggggatgttggttacaataaatgttggtttcttttctgtactcttgtgtcttcttttctaggtagcttgtttttcggacaaagtttgaagtctccaccatcatctcgcaactgttgttcccagaactgggttcttgatcgacggtggcaa

SEQ ID NO: 147578 - DNA, 254 bp, Glycine max
aaataactcaaacaggagcagccatggataccgcaaatgcagctcctttgcacatagcaatatttccatggtttgctactgggccatctggtccccatctcttcacctctccaacaagcttgcacagagaggccacagaatctccttcataggccccaaaaaaacacaaaccaaactacaacacctcaatcttcaccctcatctaatcacctttgttcccatcaaagttcctcatgtcaatggtcttcctcacg

SEQ ID NO: 147579 - DNA, 250 bp, Glycine max
gttgagaactaagaaggagaagcaaatggcttcctcaatgatctcttccccagctgttaccactgtcaaccgtgccggtgccggcatggttgctccattcactggcctcaagtccatggctggcttccccaccaggaagaccaacaatgacattacctccattgctagcaacggtggaagagtgcaatgcatgcaggtgtggccaccagttggcaagaagaagtttgagactctttcctacctgccagac

SEQ ID NO: 147580 - DNA, 247 bp, Glycine max
tccagccacacgcttcagaagacatggcctcattgggtgggttacaaaatgtgagcggcatcaattttcttatcaaagagggtccaaaagtcaatgcaaagttcgagctgaagccgccaccatatccactgaatggtttggagccggtgatgagccagcagacacttgagtttcactgggggaagcaccacaagacttatgtggaaaatctgataaaacacgttgttgggacagagcttgctgggaa

SEQ ID NO: 147581 - DNA, 254 bp, Glycine max
ttttctttttgaattaagagttgagaattcacgtgccccagttggttgatctaccttgcagcttgagatagtaaagttgcaaactttgaagcaattagtgtagaagatgagtacgttggatgcaacaagggctgaacttggtcttcttgttttatatttgggcaaggctgaagcaagggacaaaatatgcagggcaatacaatatggttccaaatttttgagtaacggggaacctggtactgctcagaatgtcg

SEQ ID NO: 147582 - DNA, 257 bp, Glycine max
ttggatcttaccctcttgtttgctaatattctcattcttctgtctctgcttcttctccttctgaactaagagatggggttgtctttcaccaagctttttagccggctctttgctaagaaagagatgcgtattctcatggtaggtcttgatgctgctggtaagactaccatcttgtacaagctcaagctgggagaaattgtcacaaccattcccacaattggattcaatgtggagactgtggcatataagaatattag

SEQ ID NO: 147583 - DNA, 253 bp, Glycine max
tgagtcttgcaattgaagttgaagtcttgcccttctctcttcaactccaaacacaagacatcatcatccatggctgcctccgtctccactgtcggagctgtcaacagagctcttttgaacctgaatgggtctggacctggggtttcagctcccagttcatccttctttgggagcagcttgaagacggttattggctcaagggtccccaacacaacgatttcctctggaagcttcaagattgttgctgtagaag

SEQ ID NO: 147584 - DNA, 249 bp, Glycine max
tggaagcttaagagggaacgggagtgtttgtggatggccctggggctggcaaacacatccaagcaggtgctaagacggtgatcatcactgctccagcaaagggtgctgatattccaactgatgttgtcggagtaaatgaaggggactacactcatgagatctctaacattataagcaacgcttcctgcaccacaaactgtcttgctccctttgtgaagatcctggatgcagagtttggaattgtgaagg

SEQ ID NO: 147585 - DNA, 249 bp, Glycine max
ggattgcctcctcgctccaactacttattcttaggcgattatgtcgaccgtggaaagcaaagccttgagacaatatgtcttcttttggcatacaagataaagtaccctgagaacttcttcctccttagaggcaatcatgaatgtgcttccataaaccgcgtctacggcttctacgacgaatgtaaacggcgattcaacgtcaggctatggaaaatatttgcagattgcttcaactgcatgcctgtggca

SEQ ID NO: 147586 - DNA, 245 bp, Glycine max
gccaaagcatggcttctctctcttgctccgccaacgaccttgccccactcatcaacgacaccgccgccgccaactacctctgcgcacaattcgattccatttctagaaagctcgtcgaaacaacctacgccgtcgacaacacctaccttctgttttcagcgtatcttgtcttcgccatgcagctcggcttcgccatgctctgcgccggctccgtcagagccaaaaacaccatgaacatcatgctc

SEQ ID NO: 147587 - DNA, 251 bp, Glycine max
acgccttgttgctgccatggccacccacgcggctcttgcttctacaaggatcccttcaaacacaaggttcccatccaaggcctctcactctttcccaacccaatgcgccttaaagagacttgaggtgacagaattctctgggcttagatccacttcatgtgtcacatatgctaacagtgctagagaatcttccttttttgatcttgtagcttcccaactcactcccaagcagaccaatggatcaactcctg

SEQ ID NO: 147588 - DNA, 249 bp, Glycine max
gttgagaactaagaaggagaagcaaatggcttcctcaatgatctcttccccagctgttaccactgtcaaccgtgccggtgccggcatggttgctccattcactggcctcaagtccatggctggcttccccaccagaaagaccatcaatgacattacctccattgctagcaacggtggaagagtgcaatgcatgcaggtgtggccagcagttggcaagaagaagtttgagactctttcctacctgccaga

SEQ ID NO: 147589 - DNA, 102 bp, Glycine max
tcttcattcagagttgtggccagtggtggcaagaagatcaagactgacaagccgtatggaattaatggtggcatggctttgagggaaggagttgatgcatct

SEQ ID NO: 147590 - DNA, 259 bp, Glycine max
gtggagggcttgaaaaatgcactagccgctggtgctgacaaggatgaagacgattcagagggaagaactgctttgcattttgcctgtggatatggtgaggtgaaatgtgctcaagttctccttgaggctggagcaaaagtggatgctttggataagaataagaacactgctctccattatgcagctggttatggcagaaaggaatgtgtggcccttctccttgaaaatggtgctgcagttactctccagaatatggatg

SEQ ID NO: 147591 - DNA, 247 bp, Glycine max
gcaaaaatgcaggagctgatttggtgggtggagaggatctgatagaacagataaaagcaggattcatggagtttgataaactaattgcttctccagatatgatgcctaaggttgctagcctagggaagattctgggaccaagaggactgatgccaaacccaaaagctggcactgtaacacccaatattccccaggctatagcagaattcaagcagggaaaagttgaatacagggcagacaaaactgg

SEQ ID NO: 147592 - DNA, 246 bp, Glycine max
cggatctagagtcttcagtttctcctcgttgttcttcgctttcctgttttcaatttcgattctttcgttaatttaataagatgtttgggagggcaccgaagaagagcgataatacgaggtactacgaaatcctcggcgtctccaagaacgcttcgcaggatgatctgaagaaggcttacaagaaagccgccattaagaatcaccccgacaagggcggtgatcccgagaagtttaaagagctggcgc

SEQ ID NO: 147593 - DNA, 250 bp, Glycine max
gtgactgtgtctcccgatggatcaatttgtgcttcgggtggtaaggacggtactgccaacctttgggacctaaacgatggcaagcgtctctatgcactcgtggctgatgatgtcattcacgcgctcgtgttctcacccaatcgctactggctatgtgctgccacgatcatcgggcattaagatctgggaccttgagtcgaagattatggtgcacgacctgcagccggacattgaagagcctaagggtcag

SEQ ID NO: 147594 - DNA, 247 bp, Glycine max
aaatgaacgaataattcgaggtcttctcaaactcacaccaaatcgatcgatgtcttaactgtaacagcttgggaccacaatatgtttgctcaaatttctggacgtttgtttgcattaactgtagcggaatacaccgagaatttacacatcgggtaaaatcagtttcaatggctaaatttagtgcacaggacgttagtgcacttcaagaaggaggaaatcagcgtgcacaggaaatctatcttaaaga

SEQ ID NO: 147595 - DNA, 244 bp, Glycine max
caaaacattgtcactgaaaggaggatactatgactttgttaaaggatcttttgagctctggggccttcagtttggccttgcatcctctttctccgtatgaacatcaaccattatcaatgacctcatcttggttccctaagttaaagatgtggccaccattctccattggaagctataggggccatgcttagaggtcgtgtgtatctgcaatgaagaggcctagccaccttcatcaccatatgat

SEQ ID NO: 147596 - DNA, 245 bp, Glycine max
gtggaagttctggggcaagctgagaagtgtgccaagtgcccaaggtagaaccagtatcgcggaatacgtcagcgtctatggggaaagtgggctgctgagattcgcgacccaagatagggggttcgtgtttggcttggtactttcagcactgctgaagaagctgcaagagcttacgatgctgaagcaaggaggatccgtggcaagaatgccaaggtgaatttccctgatgagccttcaggcgctgc

SEQ ID NO: 147597 - DNA, 246 bp, Glycine max
caagaacttaaagaagcagagagtgcagaagagagagcaaaggaacaaagctgaaggacttcttggccacaattgagtcatcttctacctttcaatcggagatagcaaagctccgccttgatgttgaggagtatgcaaaacaatttccaaccattggttttgataaagcaaccatgaagcacaagaattgagaaaagaaaattttccattaggtcatcccatggtcttactggcaagcaattcaac

SEQ ID NO: 147598 - DNA, 219 bp, Glycine max
gagagaaagatgggtagtagtgaatatcagactctgcacattttactactttcccttcttggctcatggccacatgataccaaccgtggacatggccaaattatttgccgaaaagggtgtgaaggccactataatcaccacacccctcaacgaatctttgctctacaacgccattggaaaatccaaaactaatggcaacaaaatccacatcacatacaa

SEQ ID NO: 147599 - DNA, 253 bp, Glycine max
ggtagctagaccacggtagttcaattgccatggatattggtggtggagtggaagagccagtgagagagttgaggcaatacttcaaaactggaaaaaccaagagtgtaacatggaggaaaaaccagctcacatctctcatagaccttgttcatgagaatgaagatgctatatttaaggccctccataaagatcttgggcagcaccctgttgaggcttaccgtgatgaggttggacgggtagaaaaatcagccag

SEQ ID NO: 147600 - DNA, 253 bp, Glycine max
ctaggacagaaatcaagcattgggtcgaactcttctttgatgtcaaagtaatagctatgaatagtcatcgactcccggtaaagggtagaagagtacgacctattatgggacatacaatgcattacagacgtatgattattacgcttcaaccgggttattctattccacctcttagaaagaacaaaacttaaatcaaaatacttaatagcatggcgatacatttatacaaaacttctaccccaagcacacgtaa

SEQ ID NO: 147601 - DNA, 251 bp, Glycine max
gagaaaagaaggaatgatggaacaaatcaaacgcgaaatttccgtgatgcgtttggtgcgacacccaaacgtggtggaaatcaaggaagtgatggccacaaagacaaaaatcttcttcgtgatggaatacgtgcgtggcggggaactcttcgccaaaatctccaaaggcaaactcaaagaagatctcgcccgcaagtattttcagcagttaatcagcgccgttgattactgccacagcagaggtgtatccc

SEQ ID NO: 147602 - DNA, 247 bp, Glycine max
aaagaagaagaagaagaaaaaggaaaaggagaaggagaagaaggcagctgcggcggcagagcagcagcagcagcagtagcaggaactgtaccagaaaatgaaacagcagaagataaagctgaggtaattgaaccaaagaagaatgattcaaaggctaaaaaagcagctgataagaaagtgccaaagcatgttagggagatgcaagaggcactagctcgaagacaagaggctgaagaaaggaagaaaa

SEQ ID NO: 147603 - DNA, 240 bp, Glycine max
cttcaacaggacctggcattcgctttttccagctatatgtgtacaaggacaggaatgtggttgctcagcttgtgagaaaagctgaaagggctggattcaaagccattgcccttactgttgataccccaatactaggacgcagagaagctgatatcaagaacagattcacattgccgccatttttgacattgaagaactttgaaggattggaccttggaaagatggacaaagctgatgact

SEQ ID NO: 147604 - DNA, 239 bp, Glycine max
atggcgtactgttgtgagcatccccaacggtccctctgctctggcagtgaaggaagctgcctggggtctagctcgctatgctgcaatttcacaggagaacgggttggtcccaattgtggagccagagatcttgcttgatggtgagcatgggattgacaggacattcgaagtagcccaaaaggtgtggtcagaggtattcttctacctggctgagaacaatgtcctgttggcaggtattc

SEQ ID NO: 147605 - DNA, 244 bp, Glycine max
ggaatgggtttcacttgtatgtgatggagacaaacaccccagaatacgtactgctcgtcctcttaatactttacaatatgaaggaacaagaaagagacgtagagctgctatgggagattatgcatggtctgttggggatagagttgatgcatggatacaagaaagctggtgggaaggagtcatcacagcgaagaataaaaaagatgaaacaacatttactgttcactttcctgctagtggagaa

SEQ ID NO: 147606 - DNA, 251 bp, Glycine max
cttttctccgagacgaactcggaggaggagcggcgcgtgaggtagcaacctagcattggggcgtcggggatttcctccggggtgaagctcgaaaacgtggggaaagcctacaagggcgtgacggtgctgaaggacgtgagctgggaggtgaagaagggggagaaggtgggcctggtcggcgtgaacggcgccgggaagacgacgcagatgaggataatcgcgggccttgaggagccggatttcgggaacgt

SEQ ID NO: 147607 - DNA, 245 bp, Glycine max
gtggaatgcgaagtttgcagaatatgagaagacatacagtgaggaagctgcagagctgaaggctattattactggtgaattaccagctggttgggagaaagcacttccgacatacactccagaaagccctgctgatgctacaagaaatctgtctcagcaaaatctaaatgcccttgttaaggttcttcctggtctacttggtggcagtgcagatcttgcctcttccaacatgaccttgttgaaat

SEQ ID NO: 147608 - DNA, 243 bp, Glycine max
attgaagttaaaagccttagccttccctacaactccaaacacaaagacatcctcatccatggctgcctccgtctccactgtcggagctgtcaacagagctcttttgaacctgaatggttctggagctggagcttcagctcccagttcagccttctttgggaccagcttgaagaaggttattgcctcaagggtccccaacagcaaggtttccggtggaagcttcaagattgttgctgtagaaga

SEQ ID NO: 147609 - DNA, 239 bp, Glycine max
aaataggatggggtcaaatgatgtatggggcgaaggcattggtgtaaatactaatgctgatttcagatcaggatatattatgaatactagcattgctggtcttgaaaaagcggatgcgatcctgttggttggcacccagccacgggtggaagctgccatggttaatgccagaatacgcaaaactgtcagagcaaaccaagccaaagttgggtacattgggcctgccactgatttcaact

SEQ ID NO: 147610 - DNA, 238 bp, Glycine max
ggcttgttacccccttgaatcaaccaaaaccaaaagcaaagaatagatctttttgtagagcacactttgtcccttaccgaggccttgtgtggcttccaatttgtgctgactcacttggatagccgtcagcttcttattaaatcaaatcccggggaagttgtgaagcctgattcatacaaggctataaatgatgagggaatgcccatgtatcagaggccattcatgaaggggaaacttt

SEQ ID NO: 147611 - DNA, 239 bp, Glycine max
tctactgcttcaccttctgctctagaaaattcagtggtgatacatggcttcggctactctctctgtagccaaaccagcccttcaggcaaatgggaaaggcttctctgaattctctggcctccgcagctcatcaggcttccttcccttttctagaaaatcttcagaggatttccattctgtcattgccttccagacctatgcagttggaagcagtggaggatacacgcagggtgtgacag

SEQ ID NO: 147612 - DNA, 240 bp, Glycine max
gtttctattcctcactaggagctcctgtccactggttcttcatctgcatgcacacagttgcatagttttggaaaccaagaattcctgaagaagggtagcatcaacaagcagttctgacaatggagatcaccaatgtcagtgcgtatgaggctattgcaaagcagaagttgccaaagatggcgtttgactactacgcatctggtgacgaggaccagtggactctgcaagagaacagaaatg

SEQ ID NO: 147613 - DNA, 267 bp, Glycine max
gcagccatggccacccacgcggctctagcttctacaaggatccccactaacaccaagttcccatccaaggcttcacactctttcccaacccaatgcgcctcaaagagacttgaggtgacagaattctctgggctaagatccacttcatgtgtgacatatgctaacgatgctagagaatcttccttttttgatcttgtagcttcccaactcactcccaagaccaatggatcatcaactcctgtgaggggagagacagtggccaagttg

SEQ ID NO: 147614 - DNA, 262 bp, Glycine max
aaatgacttacaagtttctcaacaccataattgatgacctttttgcctttgtcattaaaatgccaacactccatcggctttctgtcttccgtgatgatcttatctttgtcatatacttataccagaggtggatttataaagtggacaagaaacgtgttaacgaatttggttttggaggtgaggatgatcaggctgtggcagagacagacgctgcaaaggaagaagagaagaaaactaattgatttggttttctctcaacaat

SEQ ID NO: 147615 - DNA, 260 bp, Glycine max
ttttgtcattggtgttaagttgacaaccataaacaatatgtgtgcatatgggctcaatcctggtatttcaggttctcgtcttttgggcaccattcctcagtctatttcacagcaaactgtttggaatcaaatggcaacagtgagaacaccattgaattttgattctagcaagcagagcttttgtcaattttctattgaccttctcggtggaggaattttagtggacaaaactggagattggatcacacttatacaaaatt

SEQ ID NO: 147616 - DNA, 269 bp, Glycine max
tcggctcgagggcttatggtggatacctaggcacccagagacgaggaagggcgtagtaagcgacgaaatgcttcggggagttgaaaataagcgtagatccggggattcccgatataggtcaacctttcgaactgctgctgaatccacgggcaggcaagagacaacctggtgaactgaaacatcttagtagccagaggaaaagaaagcaaaagcgattcccgtagtagcggcgagcgaaatgggagcagcctaaaccgtgaaaacggggt

SEQ ID NO: 147617 - DNA, 259 bp, Glycine max
aactcttcaaaagggagaagaaaaggaaagaaaactctcaaaaaactattatagcaatggcagaacaaaaccaaaaccaaacaactgaagctggaaggcaccatgaggttggtcacaagagccttctccagagtgatgctctttaccagtatattctggagacaagtgtctacccaagagaacctgaatccatgaaagaactgagagagttgacagcaaaacacccatggaacatcatgacaacctctgcagacgaagg

SEQ ID NO: 147618 - DNA, 259 bp, Glycine max
caagattgttggaagcaaaggaaaggccataggcattgatcgatttggagcaagtgctccagctggaaaaatatacaaggagtttggtatcaccaaggaagctgttattgctgctgccaaagaactttcgtagatatatttgttgagtttcttttatctcatctagaacttgtggttttcacttgtggctttgggttactgttacatgacttgttttttgagatatcactttagccacaataaggaagattagattgtt

SEQ ID NO: 147619 - DNA, 215 bp, Glycine max
ttgccacagccgtagatataggtattttgagaatacgtcttcttaaagaccaatggttaacgatggctctgatgggcggttttgctagaataaacaataatgagatcactgttttagtaaatgatgcggaaaagggtagtgacattgatccacaagaagcacagcaaactcttgaaatagcagaagctaatttgaataaggcggaaggcaagaga

SEQ ID NO: 147620 - DNA, 259 bp, Glycine max
ttttgtcattggtgttaagttgacaaccataaacaatatgtgtgcatatgggctcaatcctggtatttcaggttctcgtcttttgggcaccattcctcagtctatttcacagcaaactgtttggaatcaaatggcaacagtgagaacaccattgaattttgattctagcaagcagagcttttgtcaattttctattgaccttctcggtggaggaattttagtggacaaaactggagattggatcacacttatacaaaat

SEQ ID NO: 147621 - DNA, 258 bp, Glycine max
ggcttatggtggatacctaggcacccagagacgaggaagggcgtagtaagcgacgaaatgcttcggggagttgaaaataagcgtagatccggggattcccgatataggtgaccctttcgaactgctgctgaatccacgggcaggcaagagacaacctggtgaactgaaacatcttagtagccagaggaaaagaaagcaaaagcgattcccgtagtagcggcgagcgaaatgggagcagcctaaaccgtgaaaacgggg

SEQ ID NO: 147622 - DNA, 260 bp, Glycine max
aactcttcaaaagggagaagaaaaggaaagaaaactctcaaaaaactattatagcaatggcagaacaaaaccaaaaccaaacaactgaagctggaaggcaccaagaggttggtcacaagagccttctccagagtgatgctctttaccagtatattctggagacaagtgtctacccaagagaacctgaatccatgaaagaactgagagagttgacagcaaaacacccatggaacatcatgacaacctctgcagacgaaggg

SEQ ID NO: 147623 - DNA, 256 bp, Glycine max
caagattgttggaagcaaaggaaaggccataggcattgatcgatttggagcaagtgctccagctggaaaaatatacaaggagtttggtatcaccaaggaagctgttattgctgctgccaaagaactttcgtagatatatttgttgagtttcttttatctcatctagaacttgtggttttcacttgtggctttgggttactgttacatgacttgttttttgagatatcactttagccacaataaggaagattagatt

SEQ ID NO: 147624 - DNA, 257 bp, Glycine max
ctactaatagcggacaaattggagtattaccaaatcatgcgcctattgccacagccgtagatataggtattttgagaatacgtcttcttaaagaccaatggttaacgatggctctgatgggcggttttgctagaataaacaataatgagatcactgttttagtaaatgatgcggaaaagggtagtgacattgatccacaagaagcacagcaaactcttgaaatagcagaagctaatttgaataaggcggaaggcaag

SEQ ID NO: 147625 - DNA, 251 bp, Glycine max
tgcaattgaagttgaagtcttgcccttctctcttcaactccaaacacaagacatcatcatccatggctgcctccgtctccactgtcggagctgtcaacagagctcttttgaacctgaatgggtctggacctggggtttcagctcccagttcatccttctttgggagcagcttgaagaaggttattggctcaagggtccccaacacaaagatttcctctggaagcttcaagattgttgctgtagaagagaag

SEQ ID NO: 147626 - DNA, 253 bp, Glycine max
gcaaaaatgcaggagctgatttggtgggtggagaggatctgatagaacagataaaagcaggattcatggagtttgataaactaattgcttctccagatatgatgcctaaggttgctagcctagggaagattctgggaccaagaggactgatgccaaacccaaaagctggcactgtaacacccaatattccccaggctatagcagaattcaagcagggaaaagttgaatacagggcagacaaaactggaatcgt

SEQ ID NO: 147627 - DNA, 252 bp, Glycine max
cataaaatttgacttattttgattttttatgattgatactagtgtgagcagttgataagagagatgatgatcaacgtgaaggaatcgaccatggtgcggccggcggaggaggtggcgcggttggtggtgtggaactccaacgtggacctggtggtccccaatttccacacgcccagcgtctatttctataggtccaatggcgcccccaactttttcgacggcaaggttatgaaggaggcactgaccaaggtg

SEQ ID NO: 147628 - DNA, 251 bp, Glycine max
cgtcatcttaggtgatccttcacccgttttgttttatcccatcagtagcactgagattcgctgtttggttgatgtgcccggcctaaaattaccttccctaggtggtggtgaaatggcctgttatttgaaaactgtggtggctcctcaggttcctccagagctgtatgattcttttatagcagctattgacaaaggaaacataagaaccatgccaaatagaagcatgcctgcctcaccttatcccacaccag

SEQ ID NO: 147629 - DNA, 246 bp, Glycine max
gtaaaatacaacatacagtctatcatagtcagaattgagaacaatcgttggtgtggaacgtgacaatggtggcgacgaacgtgaaggcagaaaccatgtctctgatggacaagcgcaggccttggaggctgagatgaactccatcatcgcccgcctctcccagccaggcgctcctggcctctccggaaatctcgtcgattccgaggattttccccattccgatatcgacgtccccgttgttcgagc

SEQ ID NO: 147630 - DNA, 248 bp, Glycine max
ggaggtggttgaggttatttatgataagactactgggaggagcagggggtttgggtttgtgaccatgtcttccgttgaggaagctgaagcggctgctaagcagttcaatggctatgaacttgatggaagatcattgagagtgaattctggaccacctcctgctcggaatgagagtgctcctcggtttagaggtggttcttctttcggttccagaggtggtggtccttcagatagtgaaaaccgtgttc

SEQ ID NO: 147631 - DNA, 250 bp, Glycine max
tggtagtaaccattgtagcttctcattgtgttgttccaaaccaagaaacacccaaggttcgtttatggttatcagatagtgaccaagtagtgcgtttaggtcatacacccactatatatgtttacaaagcaaaacacaacaccaaaaccatagagagaatgaaaacctcacttggcaagattttggtgtactactatccagttgctggaagattgaacttatcagatagtggtcgaatggaattggattg

SEQ ID NO: 147632 - DNA, 250 bp, Glycine max
tgttactcaacgccaattgcgatctcaaggtgtgcgatttcggtctcgcacggtcagccgcctcgacagaagataatcagggcttcatgaccgaatacgtcgcaacgcgatggtatcgcgcgcccgagatcatgcttacgttcaaggagtacacaaaagccatcgacgtctggtctgtcgggtgcattctcgccgagatgttgagcggcaagccattgtttcccggcaaggactaccaccaccagctcac

SEQ ID NO: 147633 - DNA, 250 bp, Glycine max
tgcatttccactacaaaaccagttgatgagtgcttcacaccatgcccaacttccaagaaatgaaaatgggcagactattggtcctccacaatcatccacgcacggctttgagcctgtaagcatttcaaatcctacgtacagaggagttgaagagtacttcccagaggaggaaattcgtattagaagtaatgagatgctagaaaatgaagatatgcagcatctactccgtatttttaacatgggaggccaa

SEQ ID NO: 147634 - DNA, 248 bp, Glycine max
tttccatgctggcataagcagaaaatttggtggagaatctcttgggcgatttcgagtatgaagttcaggttccatatttgctgtatagaaatgctgctcaagaagtgaatggtatctggttctataatgcacgtgaatgtgaagaggttgccaatctttttagcaggatccttaatgcgtatgctaaggttcctcccaagtcgaaggtttcttccacaaagagtgagtttgaggaactagaagcagta

SEQ ID NO: 147635 - DNA, 241 bp, Glycine max
ggccaagattccttctcttgggttagggacttggcaagctgaacctggtgttgtagctgaatctctcaccactgccattcaggttggatacaggcatattgactgtgctagtgcgtataagaatcaagcagagattggttctgctcttaagaagctttttgatgatggtgtggtgaagcgtgaggacttatggatcacttccaaactctggtgttcagatcatgcaccagaagatgtgcca

SEQ ID NO: 147636 - DNA, 245 bp, Glycine max
gtttcccgccatatatccaataagctttaaccatgtctgcctttgttggaaagtacgcagatgagcttatcaagaatgccaagtacatagccacacctgggaagggcatcttggcagcagatgagagcactggcaccattgggaagcgcctatcgagcattaacgttgagaacattgaggccaaccgccaagctcttcgcgagcttctcttcaccgctccagatgccctccaatacctctctggt

SEQ ID NO: 147637 - DNA, 243 bp, Glycine max
  unsure (1)..(243): unsure at all n locations
gttctataaggaggaagagaagaatgaccctgagtttgcaaagaagttggcttctcttgctgatctctacgtgaatgatgctttcggcactgcccacagagctnctgcttctacagaaggagtggccaaatacttgaagccctctgttgcaggattccttatgcagaaggaacttgactatctagttggagctgtgtcaaaccccaagagaccatttgctgctagcgttggtgggtcaaggtg

SEQ ID NO: 147638 - DNA, 244 bp, Glycine max
gatcaaagattttgcaagtggggaaataaagcaggcttcgagcttgtttgattgtgatgtacaacttgatgagtatctaattaagagctattacaagacagcgtcgttgattgctgccagcacaaaaggagctgcgatctttagtggttctgacagcagtgtcactgagaaaatgtatgaatatggaaagaatcttggtctatcctttcaagttgtggatgacatattggatttcacgcaatca

SEQ ID NO: 147639 - DNA, 244 bp, Glycine max
gttttccttgacactcctgggcatgaggcatttggagcaatgagagctcgcggagaagtgttacagacatggctattattgttgtggctgccgatgatgggattcgtcctcaaacaaatgaagctatagctcatgccaaagcagcgggagtacccataatcattgcaataaacaagatagataaagatggagcaaatccagaacgagtcatgcaagagctttcttcaattggtttaatgccaga

SEQ ID NO: 147640 - DNA, 245 bp, Glycine max
tggggtttgaggaaactgagttaaggcttggactgcctggaaacggaggcactgaagaagtgctcatcaggaagaggggtttctctgagactgaaactggtcatgaagatgagtctgccaccactgtggatttgatgcttaatctttcttctaaggaggccgcaaccactgctgctgctgctgcagatccaactgataagcacaagactttgcctaaggagaagacccttctgccagcagatcct

SEQ ID NO: 147641 - DNA, 247 bp, Glycine max
ctcagagaagagagaaaagaaaaagaaaaatcccagtgagagagagaaaagaaaagaacgaaaaaccaagaagcttcgaaacgatcgtgtgagatgaacaagtgcgaactgtgcaaagttccggcgaggatcttctgcgagtcggaccaggcgagcttatgctgggactgcgacgctaaggttcacagcgccaacttcttggtcgcgagacacgcgcgaaccttactctgccgcacgtgccgctctc

SEQ ID NO: 147642 - DNA, 241 bp, Glycine max
tgggttctaaaggactcaccgatgcatcaaagatagccattttgaatgcaaactacatggcaaaacgattggagaattattacccggttcttttccgtggagtcaatggaacagttgctcatgaattcatcattgacttgagaggctttaagaatactgctggaattgagcctgaagatgttgcaaagcgcctcatggactacggttttcatgcaccaacaatgtcatggcctgtgcctgg

SEQ ID NO: 147643 - DNA, 241 bp, Glycine max
attgggccaaatctctgaaagactgaccgttcaggtttctgatgtaaagaatgtcattatctggggcaatcactcatcaacccagtatcctgatgttaatcatgcaactgttgcaacctcagctggggagaagcccgtccgtgagcttatagctgatgatgcctggttgaatggggaattcattactactgttcaacaacgtggcgctgcaattatcaaagctagaaagctttcaagtgca

SEQ ID NO: 147644 - DNA, 240 bp, Glycine max
atctcaagattctaagagagattttgctgctctttgaagaagggtgtttgcttgattttggagatgtcgctgctctcagatctcatcaaccttaacctctcagacactactgagaaggtgatcgcagagtacatatggatcggtggatcaggaatggacctgaggagcaaagcaaggactctcccaggaccagttagcgacccttcaaagcttcccaagtggaactatgatggttccagc

SEQ ID NO: 147645 - DNA, 242 bp, Glycine max
ggaagttattgaagaatgcaagcttttctactttgcagggcaggacaccacttcagttttgcttgtttggacaatgatattattgagtaggtaccctgattggcaagcacgcgcaagggaggaagtctcacaagtttttggcaaccaaaaaccgacttttgatggactgaatcaattaaagattgttactatgattttgtatgaggttcttagattataccctccaggagttggtgttcctc

SEQ ID NO: 147646 - DNA, 243 bp, Glycine max
gagctcttatgagtaccttagcactggacttaaacagtacaacttggataacaacatggacggtttttacattgctcctgcttttatggacaagcttgttgttcacatcagcaagaacttcatgaccctgcccaacatcaaggttcctctcattcttggtatctggggaggcaaaggtcaaggaaaatccttccaatgcgagcttgtctttgccaagatgggaatcaaccctatcatgatgag

SEQ ID NO: 147647 - DNA, 245 bp, Glycine max
gcaaaaggtaacactagttcctcgtggtcaagctcggggtcttacatggttcattcctaatgatgatccaactctgatctccaaacaacaactctttgcaagaattgttggaggactaggtggaagggctgcagaagaaattatttttggtgagcctgaagttacaactggagcagctggtgatttgcagcaaatcaccggtttggcaaaacagatggtaaccacatttggaatgtctgatattg

SEQ ID NO: 147648 - DNA, 240 bp, Glycine max
cttggcgaactgtcggagcaggcggacggtacgaggagatggtggagttcatgcagaaggtggtggtccggtcgacgccggcgtcggagctcacggtggaggagcgcaacctcctctcggtggcctacaagaacgtcatcggctcgctgcgtgccgcgtggcgcatcgtctcctccatcgagcagaaggaggagggccgcaagaacgacgaccacgtctccctcgtcaagcactacagat

SEQ ID NO: 147649 - DNA, 241 bp, Glycine max
gtaagctcccaagcagtgggaggcggctcgggactctgaccgcgtgcctgttgaagaatgagccggcgactcataggcagtggcttggttaagggaaaccaccggagccgtagcgaaagcgagtcttcacagggcaattgtcactgcttatggacccgaacctgggtgatctatccatgaccaggatgaagcttgggtgaaactaagtggaggtccgaaccgactgatgttgaagaatcag

SEQ ID NO: 147650 - DNA, 240 bp, Glycine max
cagagtgagaaagagagagagagagagagaaactgagagaaattcgcaaaccctaatttcggaaagatcggcgatggctgcctccaaggatcgcgagaacttcgtctacatcgccaagctcgccgaacaggccgagcgatacgaagagatggtggaatcaatgaagaacgttgcgaatctcgacgttgaactgactgtggaggagcggaatttactttctgttgggtacaagaatgtgat

SEQ ID NO: 147651 - DNA, 237 bp, Glycine max
ccgacgcgcttttgatttgcaacggcttcaaggacgcggagtacatttctcttgccctggttgccaacaaacttgccctcaacaccgtgattgttgtggagcaggaggaggaggttgatttgatcgttgaattgagcaagaagctctgtattaagcccgtgattgggcttcgtgcgaagttcggaccaagcattccggccatttcggtgggacttcaggagagaaggggaagtttgg

SEQ ID NO: 147652 - DNA, 236 bp, Glycine max
ggctctgtttggatttcatcagaaatgaaaggcctgaatgatgattgtgaacactttgagtgttttccacctggtcacttgtattctagcaaagaaagagggttccgcagatggtacaatcctccttggttctctgaggctattccatctgccccttatgatcctcttgttttaagacacgcctttgagcaggcagtcataaaaaggttgatgactgatgtgccttttggtgttct

SEQ ID NO: 147653 - DNA, 240 bp, Glycine max
ttccgtttccagagttggatcggcggctcaaattaaagccatgaaacaagtagctggtaaattaaaattggaattagcacaattcgcagaattagaagcttttgcccaattcgcttctgatctcgataaagctactcaaaatcaattagcaagaggtcaacgattgcgcgagttgcttaaacaatcccaatcagctcctcttaccgtggaagaacagataataactatttatactggaac

SEQ ID NO: 147654 - DNA, 240 bp, Glycine max
ttcttgatctacatactgggtggggttgcttgcaacttcacaagttttctacatacatcagatcccactgttggtggaactggacctgtatttgcaataattggtgcttggctcatgtatcaaattcaaaacaagcatgttattgcaagtgatgcttcagagaacctgttccagaaggcagttattatgacagctcttattttcatattaagccactttggtccaattgacgaatggtca

SEQ ID NO: 147655 - DNA, 279 bp, Glycine max
cttccattcacaaccttaaacctttctttcttgtaaactttattgattgattctgagaatagaactaagagggtatagacatggctagcgcaattgcagcttcttttttggttctgcttctggctttccccactgtatttggagctgaccatgaagttggtgacactagtggatgggccctcggagttaattacaacacctgggcctctgggaaaactttcacagttggtgacactttggtgttcaagtatgactccactcatcaagttgatgaggttg

SEQ ID NO: 147656 - DNA, 272 bp, Glycine max
cttccattcacaaccttaaacctttctttcttgtaaactttattgattgattctgagaatagaactaagagggtatagacatggctagcgcaattgcagcttcttttttggttctgcttctggctttccccactgtatttggagctgaccatgaagttggtgacactagtggatgggccctcggagttaattacaacacctgggcctctgggaaaactttcacagttggtgacacttggtgttcaagtatgactccactcatcaagttgatg

SEQ ID NO: 147657 - DNA, 274 bp, Glycine max
ggaaatttggctgatgacaccatcaattttgaggcttttccccacaagctggtgcagtttggagagattcaggaaaaagttgtattgaaattttcacaagaggaatttcttacagcttggtcaactcaggtgcgtcctgcaacaactctgttggctgatgggtgtccatatttgtatgctatggtgcatgatagttcagtgtctacaataccaggtgattttgtcattggtgttaagttgacaaccataaacaatatgtgtgcatatgggctcc

SEQ ID NO: 147658 - DNA, 256 bp, Glycine max
aacaatttcatcaagcctgccatggcttcctcgtgtgcttcctctgccattgcagctgttgccatctccacaccaagttcccagctgaatggatcactcttgggaagcacaaaagcttcttttcttagtgggaggaaactgaaggtgaacagttttacagcaccagttggagcacgacccagcactacagtgtgtgcagttgctgagcctgataggcctctgtggttcccaggcagcaccctcctccatggctaga

SEQ ID NO: 147659 - DNA, 278 bp, Glycine max
tggcatgctcagccacctctgcttctctcttctccgcaaaccccacacctctcttctctcccaaatcctccctctccctccctaacaactctctccacctcaaccctctccccacgcgcccttctctctccctcacgcgcccctcgcacactcgccgctccttcgtcgtcaaagcctcctccagcgagcttccgctagttggaaacaccgcaccggatttcgaagcagaggctgtgtttgaccaggagtttatcaacgtgaaactatctgattacatt

SEQ ID NO: 147660 - DNA, 275 bp, Glycine max
tcgatcggcttctattcggttctggttttgttttttcgtgctgttttgctttagatctgataattgttttactgtcttatgttcagattatcaacgatcgtgagactggcagatccaggggttttggatttgtgaccttcgcctcggagcagtccatgaaagatgcgatcggagcgatgaatggacagaacttggacggccgtaatatcactgtcaatgaagctcagtcccgcggtggcggcggcggcggcggcggaggaggaggaggatacaat

SEQ ID NO: 147661 - DNA, 275 bp, Glycine max
atagcctttctttcgtagctactactacttgagtttcattaattcttgggttcaaagaagcttagttgttggtagagattgacaattaggaaaatggtgagtgttgaagagattcgtaaggcacaacgtgcagaaggccctgccaccgtgatggctattggcacggccactcctcccaactgcgtggatcagagtacctatcctgactattatttccgcatcaccaacagtgcccacatgaacgagctcaaagaaaagttcaagcgcatgtgtga

SEQ ID NO: 147662 - DNA, 277 bp, Glycine max
cgcagccatggccacccacgcggctctagcttctacaaggatccccactaacaccaagttcccatccaaggcttcacactctttcccaacccaatgcgcctcaaagagacttgaggtgacagaattctctgggctaagatccacttcatgtgtgacatatgctaacgatgctagagaatcttccttttttgatcttgtagcttcccaactcactcccaagaccaatggatcatcaactcctgtgaggggagagacagtggccaagttgaaggtggca

SEQ ID NO: 147663 - DNA, 277 bp, Glycine max
ctactaatagcggacaaattggagtattaccaaatcatgcgcctattgccacagccgtagatataggtattttgagaatacgtcttcttaaagaccaatggttaacgatggctctgatgggcggttttgctagaataaacaataatgagatcactgttttagtaaatgatgcggaaaagggtagtgacattgatccacaagaagcacagcaaactcttgaaatagcagaagctaatttgaataaggcggaaggcaagagacaaacaattgaggcaaa

SEQ ID NO: 147664 - DNA, 272 bp, Glycine max
ggcgcccatcctccccaccaaggatctccccaaggatttcgattggcgagacaaaggagccgtcactaacgtcaaggaccaaggggcgtgtggttcgtgttggtctttcagtacgacgggagcgttggaaggagctcattatctggccactggtgagctcgtgagccttagcgagcaatagcttgtggattgcgatcacgtgtgtgatccagaagaatatggagcgtgtgactcaggctgtaatggtgggttgatgaacacgcatttgagta

SEQ ID NO: 147665 - DNA, 264 bp, Glycine max
aaagagatcacatagcagaatggcttctactcaatgtttcttgcaccaccatgctcttgccacccctgccagatcgccatcacaacgcatcatggttagcaccaagcctaaccagcttgtttgcaaggcacagaagcaagaggatactgatgtcagcccaatctctcgccggttagctctaaccgtgctcattggtgctgctgctgttggctccaaagtccaacctgctgatgcagcttatggggaagctgccaatgtgtttgg

SEQ ID NO: 147666 - DNA, 270 bp, Glycine max
cttgaatcttcgttatccttctttttttctccttgaactcgaatattcactatggcagatgaggtggttctgctagatttctggccaagtccatttgggatgagggtcaggattgcacttgctgaaaagggtatcaaatatgagtccaaagaagaggacttgcagaacaagagccctttgctcctcaaaatgaacccggttcacaagaaaatcccggttctcatccacaatggcaaacccatttgtgaatctctcgttgctgttcagtac

SEQ ID NO: 147667 - DNA, 274 bp, Glycine max
cagcgacaatccaagatatggatataatgctgccaccggaaaatatgaagatttgatgtctgctgggatcattgatccaacaaaggtggtcagatgttgcctggaacatgcagcctctgtagccaaaaccttcttaatgtcagattgtgtggttgtcgagataaaggaacctgagcctgtacctgctggaaaccccatggacaattcaggatatggtatctagagcaacggctgcttcagtgagaagagtattttttttctcctcggatgaaat

SEQ ID NO: 147668 - DNA, 273 bp, Glycine max
  unsure (1)..(273): unsure at all n locations
aaattctctttagagagatagagagaggaagaaagaatggcagcttgcactgtctactcaacacaatatctgagtttaaattgctccatctcaaccccatcaaagacgcaactcagttttttccaccaaaagcaggtatttatctggaggaacagcaagaagggcatggnagtcagcagaagaagctatgtgatatcatgtgcagcaggtgactcacagacagtggtgatggccctggctgcagactcagggtgtgggaagagcacttcatga

SEQ ID NO: 147669 - DNA, 275 bp, Glycine max
aaaaaaactaagaagacccatgagagcatcaacaacaggctcgctctcgtcatgaagagtggcaaattcaccctcggttacaagaccgttctcaaatctcttaggagctccaaagggaaattgattatcattgctaacaactgcccccctttgaggaagtcagagattgaatactatgctatgttggcaaaggttggggttcatcattacaatgggaacaatgtggatttgggcactgcatgtggcaaatattacagagtgtgctgccttagcat

SEQ ID NO: 147670 - DNA, 260 bp, Glycine max
cagtggtggttacaagcgtcgtcttgccttagcaatacaattagtgcaaacccctgatctattgatattggatgaacctcttgcaggacttgattggaaagcacgtgcagatgttgtgaagcttctgaagcatctaaaaaaggaattaactgtgttagttgtcagccatgatttgagagagttcgcaagtcttgttgatcgatcatggagaatggaaatgggtggcaacttagagaggaattctaccattatgattatgt

SEQ ID NO: 147671 - DNA, 264 bp, Glycine max
ggttgtgataaaaagagtgttaataaggaatcaacgggtatttctagatatataactaaaaagaatcgacagaatacgcctagtcgattggaattgagaaaattttgtccccgttgttgcaaacatacaattcacgcagaaataaagaaatagatcaaattgatcgcttgtgtgttacccttcgaaccaaagaacttaacatgtaaaatgatctattttacttatctatatagatagatctatctgtattctatcatttacagt

SEQ ID NO: 147672 - DNA, 273 bp, Glycine max
  unsure (1)..(273): unsure at all n locations
gaaataataataagtattatcttagtttgggtgcttatatatataattgcatattaataattaatggtgagggagcaccagaactactgagagatgctatgcatagtttaattacttgttttggtactcacgttgtgtgcagatccaagtgctgaagttattgctttatcaccgaccacactaatggctacgnncaggttcatatgtgaaatctgcaacaaaggatttcaaagagaccaaaaccttcagttgcaccggcgaggccacaacttg

SEQ ID NO: 147673 - DNA, 252 bp, Glycine max
tttgtgtttatgatatatatgcagatgagagttatctgacaaatgggtatttggactccaaagtggactggattcctggtatgaagatcttccggctgaaggacatacctgacttcataaggacaacggatctaaatgatgtgatgttgcaatttctcattgaagttgcaaatagaattcaaagaaacactactattcttttcaacacttttgatggacttgagagtgatgtaatgaatgctctacctctat

SEQ ID NO: 147674 - DNA, 274 bp, Glycine max
gcaagcaaaaagaaagaatcccaggcgaggagaaagatggaggggaaggagcaggatgtgtcgttgggagcgaacaagttccccgagagacagccgattgggacggcggcgcagagccaagacgacggcaaggactaccaggagccggcgccggcgccgctggttgacccgacggagtttacgtcatggtcgttttacagagcagggatagcagagtttgtggccacttttctgtttctctacatcaccgtcttaaccgttatgggagtcgccg

SEQ ID NO: 147675 - DNA, 267 bp, Glycine max
cggcctcatagcctcacccgaaagcactaaactttcccccgcgacagcaatcgcaggagcaatattcacaaccctcggaacctgcgacgccgcattcgctgttcaacaaatagccgacatagcagaaggcgacaaccgcggactggcactgttgctgcccataatcccagcaatagggtgggttctgttcaacattctgcagccggcgctgaaccagctgaaccgaatgcgcacaccaaaggcgtgatcattggcttagggcttggc

SEQ ID NO: 147676 - DNA, 266 bp, Glycine max
gtgaaactgggaaaatggggagagcctttgtgtatgtgattcttggaggaggcgtggctgctggctatgctgctcttgaattcgtcaagaaaggagtctctcatggtgaactctgtattatttccgatgaaccagttgctccttatgaaaggcctgcattgagcaaaggatttttgcttccagaagctgctgcccggcttccatcctttcatacctgtgttggtgcaaatgaggagaggctaactccaaaatggtataaagagcat

SEQ ID NO: 147677 - DNA, 267 bp, Glycine max
atgagatcaggtttacggaatcacttttcacaatcccgtgtacctgtatctgaatctggcaatcttgctgcttctattaataccccacatgatggatttgatatgcaaaccatcgtaagtcgaattcagtcagaacttgccacatcagtggctgcaacagctgcagagttgccttgcactgtgaagttaagagtgtggtcacatgacataaaaaatccctgtggcccacttaatgctgatagatgtcgtctaaccgtaccgcatgct

SEQ ID NO: 147678 - DNA, 271 bp, Glycine max
ttaaaatatattcaattttgcgtttctctgcctaaaaggattgaaagatgggtcaagcattcggttgctaccaagtcgatcagtcaaatgtggctatcaaggagcattttggaaaatttgatgatgtcctagagcctggatgtcactgcctgccttggtgtcttgggtaccagattgctggtagtctgtcgctgcgagtgcagcaacttgatgttcgatgtgagacgaaaaccaaggacgatgtctttgtcaatgtggttgcatctgtgca

SEQ ID NO: 147679 - DNA, 265 bp, Glycine max
caggagtcatgctcagaaattctttacaaagttggagaaagaggcctttgtaaaaggtgttccaataggacaagctcttgatatagacatcccccctccacggccaaaaagagatccaagcaatccttatccccggaagaccaatgttggtgccccaacattacatagcgaacagaagcatggaaagtctctcatttcaattgcatcttcacatggtaagcaagccctggacttggagacagagccacttccagagcatactgtc

SEQ ID NO: 147680 - DNA, 262 bp, Glycine max
caggagtcatgctcagaaattctttacaaagttggagatagaggcctttgaaaaaggtgatccaataggacaagctcttgatatagacatcccccctccacggccaaaaagaaagccaagcaatccttatccacggaagaccaatgttggtgccccaacattacatcgcgaactgagcatggaaagtctctcatatcaattgcatcttcacatggtaataaagcactggacttggagaaagaaccacttccagagcataatg

SEQ ID NO: 147681 - DNA, 269 bp, Glycine max
ctttctcctaaaacatctccagtgggttcttcttcttctattacaacaacgtcgcccaagaccatgaccatggccatggccacgatcctgctcctgttcacggtcttcgcggtttcatcggccctagacatgtcgataatctcgtacgacaacgcccacgccgccacgtcgcgcacgagaggagctgatgtccatgtacgagcagtggctagtaaagcacggcaaggtgtacaacgcgctcggagagaaggagaagaggttccagatct

SEQ ID NO: 147682 - DNA, 267 bp, Glycine max
gaattgctgttgaaaaaccaatctacaaccatgtcactggtctcctggatccccctgagctcattaaaccccccaaaatcttagtcattgaaggcttgcacccaatgtatgattctcgggtcagagatctcttggactttagcatctacctagacattagcaatgaggtcaaattcgcttggaaaattcagagagacatggcagagcgtggacacagtcttgaaagcatcaaggctagcattgaagcaaggaagcctgattttgaag

SEQ ID NO: 147683 - DNA, 258 bp, Glycine max
ctcttgagcacccgtgccggaggtcttggtttgaacttacaaacagcagatactgttataatctttgacagcgattggaacccacaaatggatcaacatgccgaggatcgagcacatcgcattggacaaaaaaaggaagttagagtttgtgtgttagttagtgtgggatctattgcagaggtgattttagagcgtgctaaacaaaagatgggcattgattccaaagtcattcaggcagggctctttaacacaacttct

SEQ ID NO: 147684 - DNA, 264 bp, Glycine max
gcaaactacatggcaaaacgattggagaattattatcccgttcttttccgtggagtcaatggaacagttgctcatgaattcatcattgacctgagaggctttaagaatactgctggaattgagcctgaagatgttgcaaagcgcctcatggactacggttttcatgcaccaacaatgtcatggcctgtgcctggcacactcatgattgagccaactgagagtgaaagcaaggctgaactagacaggttctgtgatgctcttatt

SEQ ID NO: 147685 - DNA, 266 bp, Glycine max
ctgttgaatcgcgtcgattaaggttttgagatttctaggctttcatctcagacagtgaaaaaatgatagatataagtacacttaatgctgcacagattactgtgctgggatctgccttttgtgctatgctttccatgcatttcacgtcgcagttactgtctcagcatctcttttattggaagaatccgaaagagcaaaaggctattatcattatcatcctcatggctccaatctatgcagctgtctcctttgtgggtctcttggat

SEQ ID NO: 147686 - DNA, 264 bp, Glycine max
gccttgattggactaatgtgggccgtttgcattgtttcttgccttggtgggatgatgctactgtggattttatgacaagtggtggttacaatgtttctccattgataggaaaggtaaaacagaaaacactgataatatggggtgaaaatgaccgcatcatcagcaataagtttgcagtgcgactccactgtgaattacctgatgcaattatacgccaaataccagattgtggacatcttcctcatctggaaagaccagattcta

SEQ ID NO: 147687 - DNA, 262 bp, Glycine max
tgaacattttgcaggaaagacaacctttgtgaaaaggcatctcaccggagaattcgagaagaaatatgagccaaccatcggtgtggaggttcacccattggatttttttcacaaactgtggaaagattcgattctactgctgggatactgctggacaggagaagtttggtggcctcagagatggatactagtaagtcaccttttatagtgtatcagattgtgtttgttatgacgattaagatggtttgtcaatctcaacttc

SEQ ID NO: 147688 - DNA, 268 bp, Glycine max
cgttacttcactcaaacaagatagtccatcgaaacattcaaccagagaacatcctgttgaggaaattgaaggatggatctatgcaagtgtctctcgcagattttgggaattcatcaaaagatgcgcctgatctaattcctattgcgaagaatcctcagtacactgcacccgaagttttcctgagagcaaatccgaaagaaccgtacgatggctacaaagccgatgtgtggagcatgggatgcatcctcacacaaatgctcactgggat

SEQ ID NO: 147689 - DNA, 273 bp, Glycine max
atcattttgttagaagcgactttctcaaaccaatagtagatgcctttgttgctaatggtaatcgctacaatctgctcaactctgctgttcttgaacttttcgagtatattagcaaggagaatctgaaattattattgaagtatttagttgattctttctgggaccagttagtgaaatttgagtatttggtttccattcattcactgaaagtaaaatatgagcagtgtttggataatgatgggacaaaaggtactgctattatgattgaccttc

SEQ ID NO: 147690 - DNA, 262 bp, Glycine max
cagtactaccattagccgcgtttttcaaaagtgattttcgagaattagcgatgggaattgaaagaggaggcttcaagggattcaggagcgcctggagcgtgccgcccaagccgtgcgattcctgcaagctggcctcggcggcgcttttctgccgccccgattccgcgtttctctgcatcgcctgcgattccaacattcactgctcgaacaaactcgcgtcgcgccacgagcgcgtgtggatgtgtgaggtgtgcgagcaggc

SEQ ID NO: 147691 - DNA, 263 bp, Glycine max
ggtgattgaaggaaccggggtgtttgtagacagagaaggtgcagggaaacacattcaagcaggagctacgaaggtgctcatcactgctcctggtaaaggagatatccccacctacgtggttggtgtcaatgagtatgactacagccctgatgaacccatcatcagcaatgcctcttgcaccactaagcgccttgcaccctttgtcaaggtccttgatcagaaattcggtatcatcaagggtaccatgaccaccactcactcct

SEQ ID NO: 147692 - DNA, 264 bp, Glycine max
gaaggaactcatcaaatataaaggcttccaggtgccccctgcagaacttgaagggcttcttgtaagccatccctccattgcagatgcagctgttgtcccacaaaaggatgttgctgctggtgaagttcctgttgccttcgttgtgagatcaaacggctttgatctaactgaagaggctgtaaaagagtttatagctaaacaggtagtgttttacaaaagactgcacaaagtttattttgttcatgctattcccaagtctccatc

SEQ ID NO: 147693 - DNA, 264 bp, Glycine max
cttcaagaacaagctggacatctcattgggtgttgcattaggttcagcaactcagattgccatgtttgtggtcccattatgtgtaatcgttgcttggataatgggtatcaatatggacatgaacttcaacctcttagagacaggttcccttgctttggcaataatagtcacaggcttcactttacaggatggaacttctcactacatgaaaggccttgttctcctgctgtgctacattgttattggggcatgcttcttcgtaca

SEQ ID NO: 147694 - DNA, 203 bp, Glycine max
atgctccccatcaagcaagatctctggctccacaattgggaccatggtattgatagaacttttgaagtagcccaaaaggtctgggcagaggttttcttctaccttgctgagaacaatgtcctttttgagggtattctccttaagcctagcatggttacacctggagccgagtccaaggacaaggccagtcctcagacagttgc

SEQ ID NO: 147695 - DNA, 266 bp, Glycine max
tcaagtttgagggctgttaccgtggccatgctgatccttttcttgttaaggcaggtagtggagttgccaccttaggacttcctgattctcccggtgtccccaaagctgccacttttgaaacccttacagccccctacaatgacaccgaggccattgagaaactcttcgaggccaacaaaggagaaattgccgcagttttcctcgaacctgttgttggaaacgctggtttcattgttcctaagcctgattttcatagtttcttgcgc

SEQ ID NO: 147696 - DNA, 266 bp, Glycine max
taaaggtcttgtagactctggattgacaaagatccctcgcatgttccattctggcaggttggatatcattgaaacctcagtcagtgactctaagttcggtatccccatcatagacctccaaaatatccactcctatcctgctctgcattcagaagtaattggcaaggttcgaagtgcatgccatgactggggatttttccaggtgattaatcatggaattcctatcagtgtgttggatgagatgattgatggaattcgtagatttc

SEQ ID NO: 147697 - DNA, 263 bp, Glycine max
  unsure (1)..(263): unsure at all n locations
gtgcatctaattccanattcacccataaaaatncttccttttgctcaccagccatntattatgatggagggagtgagaatattcaagcatcatcaaagggaaaatatgttgaaagcttcaactgctcggaggcaccaaggaagaaaagcaagangatagaaaacaagaggaggtttagtgatgaacagataagatcactagaatgcatatttgagtcagagtcaaagcttgagccaaggaagaagatgcactggctagagatc

SEQ ID NO: 147698 - DNA, 265 bp, Glycine max
cctcactcagtttaactcagcctctctcaacaggcacattgctcgcgcttccaactctggtaatggagtcacctttggagatggctacgtagaggttcttgcagcaacccaaactccaggggaggcaggtaaaaagtggtttcaaggtactgctgatgcagtgaggcagtttcactggctctttgaggatccaagaagtaaggatattgaggatgtcttgattctttctggagatcacctctaccgaatggactatatggacttt

SEQ ID NO: 147699 - DNA, 270 bp, Glycine max
gccggaaagggagaggaagacttcgaagttgtgctaatatccagcgaccgcgaccaagcatcctttgactcctactacagcaccatgccttggttagccttacctttcggtgacccagaaatcaagaacctcgttagacactacaacgtgcaagggattccctggttggtgatcataggccctgatggtaaaacaataaccgtacatggcaggagtttgataaacttgtaccaagaaaatgcgtaccctttcaccaacgccaaagtggag

SEQ ID NO: 147700 - DNA, 272 bp, Glycine max
aaagaaaaaagcgatcatagtttcacttcggccttatccagtttagggtttcggttctctaccctatctttcacgtatcgaaaccttaaatttacgatcaggtctgagcaatctggttggtagaacctttggtcttagtgagtcaagttttatgtctgaattagacgatcagattcctactgccttcgatccttttgctgatgcaaatgctgatgactcgggtgctgggtcaaaggagtatgtgcatattcgtgtacagcagcgaaatggta

SEQ ID NO: 147701 - DNA, 259 bp, Glycine max
atcagcaagtccatcccgggccgctccggcaagtcctgcaggctccgctggtgcaaccagctagtccccccaggtggagcaccgggccttcacccacgaagaggacgacaccattatccgggcccatgcccgctcggcaacaagtgggccaccatcgcccgcctcctccacggcagaactgacaacgccatcaaaaaccactggaactccaccttgaagcgcaagtgcacttcaaccatgattgacgacgacaacactc

SEQ ID NO: 147702 - DNA, 262 bp, Glycine max
gccaaatattcttatctgccgatctattcaatgctggaatcagacccgctattaatgtaggtatagacgtttccagagttggatcggcggctcaaattaaagccatgaaataagtagctggtaaattaaaattggattagcacaattcgcagaattagaagcttttgcccaattcgcttctgatctcgataaagctactcaaaatcaattagcaagaggtcaacgattgcgcgagttgcttaaacaatcccaatcagctcct

SEQ ID NO: 147703 - DNA, 246 bp, Glycine max
cttaattctctcatttcttgaagctctatttattctagatcaaaaacgaaatgacccctcccccagaattctttcggattgtcgggcacattaaaaaaggaatggataagttcctaaaaataaagaaaactatacacattataaggaggggtcaaatattaattaagataaaagatatagaatatctatctgtatatatatatatatagatataatttattaataattagaactttcttttttctt

SEQ ID NO: 147704 - DNA, 259 bp, Glycine max
cagaaaaacaatgatcagtattctagccagtagaggggcaaatagtacaatccccacactttgttccataaaatcatctaattttacaggcgggtcatgtcctgtgaaggatgattctacttttgaaaaaacagtaacacaagtaagttacttgagcgtgaccagcactgttgatccacttaaagagtgttgtaggcctgtttgccaacctgcgataatggatgcagcactacagatttctggaagacaaatgatgatt

SEQ ID NO: 147705 - DNA, 250 bp, Glycine max
cttctaaaaaaataaaattaagaaattttcatggtaaccattcgtgcagatgaaattagtaaaattatccgtgaacgcattgagcaatataatacggaagtaaaaattgtaaatacgggtaccgtattcaagtaggcgacggtattgctcgtatttatggtcttgatgaagtaatggcgggtgaattagtggaatttgaagagggtactataggcattgctttgaatttggaatccaaaaatgtaggtgt

SEQ ID NO: 147706 - DNA, 258 bp, Glycine max
aaagaattggcagcacagcccgatgttgatggatttttggttggtggtgcatcactcaaggcggaatttgtggacatcataaacgctgctactgtgaagaagaattgaaattcgtagttaggaactgataatctgcctttcaagctgcttcggaaattgctgtttttgagttttggttctgtgctttgtggccaatgtattgaactctgtttagtacctgaataaacatgctttcctttgatctcatccataggcgat

SEQ ID NO: 147707 - DNA, 258 bp, Glycine max
attgaatctcagaattctctaaaagagatctttttctgctctttgaagacagaagggtctttgcttgattttggagatgtctctgctctcagatctcatcaaccttaacctctccgataccaccgagaaggtgacgcagagtacatatggatcggtggatcaggaatggacctgaggagcaaagcaaggactctcccaggaccagttagcgacccttcagagcttcccaagtggaactatgatggttccagcacaggt

SEQ ID NO: 147708 - DNA, 262 bp, Glycine max
ccggcgcgcgctgaagtttgctaggttcatgagcaggttcgggaagagttaccgaagcgaggaagagatgacggagaggtacgagatattctcgcaaaacctcaggttcatccgctcccacaacaagagccgatacgccttaactctctctgttaatcattttgctgattggacttcggaagagttcataacatacagactatgcgctgcccaaaattgctctgccactcttaacggcaaccacaagctcactgatgctgtt

SEQ ID NO: 147709 - DNA, 254 bp, Glycine max
aaagaattggcagcacagcccgatgttgatggatttttggttggtggtgcatccctcaaggcggaatttgtggacatcataaacgctgctactgtgaagaagaattgaaattcgtagttaggaactgatatgctgcctttcaagctgcttcggaaattgctgtttttgagttttggttctgtgctttgtggccaatgtattgaactctgtttagtacctgaataaacatgctttcctttgatctcatccatagg

SEQ ID NO: 147710 - DNA, 258 bp, Glycine max
aaaaaaaaaacgaaaatgctgagaatcgccgcaagcgcaaagagaattgttcaaacggcgtcgttggaggcgccaccgttggggattagggttctgccgcgtctctaccacgagagggtggtggaccactacgcaacccccgcaacgttggatccttcgacaagaacgaccccaccgtcggaacgggtcttgttggtgcacccgcgtgtggcgacgtcatgaagctccagattaaggttgacgacaaaacggggaaga

SEQ ID NO: 147711 - DNA, 257 bp, Glycine max
ccttacactgttgtactgtttgatgagattgagaaagcccatcctgatgtgttcaacatgatgcttcagatcctggaagatggaagactaacagacagtaagggcagaacagtggatttcaagaacacactcttataatgacatcaaatcgttggaagcagtgtgattgagaaaggaggccgcaaaattggatttgatctggattacgatgagaaggatagcagttagaacagaatcaagagcctggtaactgagga

SEQ ID NO: 147712 - DNA, 249 bp, Glycine max
ctggatattcatcatgctttcgtaaagaagctggatctcatggtcgagacactctaggaatattccgagttcaccaatttgagaaagtggagcaattttgcctcactagtccaaatgacaatgattcacggacatgcatgaggaaatgctgaagaactctgaagatttctacaaagcgttaaatcttccctatcaagttgtttccattgtatctggtgctatgaatgatgctgcagcaaagaagtatga

SEQ ID NO: 147713 - DNA, 255 bp, Glycine max
ctactcttccattctatcgtcactcattcccaaacgaaacgaaaacgcgcgtttcttcagattcagacccaaactcatggcaaatacgttgcggttatacttgacctgcattcggaacacgctcgaggccgaatgtgcctccagaactttccgtgtcaagaagtcgaaaggcataacaagcccgaggttgaactcaagaccagccccgaactcctgctcaatcccgttttgatatgccgaaatgaggctgaaaaa

SEQ ID NO: 147714 - DNA, 255 bp, Glycine max
atctagatgctgttgaagctcttgctgatcagaacacagtggcgttggcgatcataaaccctgggaatccttgtgggaatgtgtacagttaccaccatttggagaagattgctgaaactgcaaaacgggtggaacaattgtgatctctgatgaagtttatggtcaccttgcatttgggagcaagccttttgtaccgatgggagtttttggctctactgttcctgttctcactcttggctcactttctaagagatg

SEQ ID NO: 147715 - DNA, 256 bp, Glycine max
caggtttcttcgtcgtcgcttgatgtcggagtggtgccggacgggaacacagtgtcggacatgtcgtattcgagtgggattgtggtgtcgggtggacaaggcgcgacgcagttgtgtgggatggatcgggagcgagggtgctgcgatacagagagaaaaggaagaaccgaaaatttgagaagatgattcgatacgcatcgcgaaaggcttatgcggaaacccggcccaggataaaaggccggttcgcgaaacgaac

SEQ ID NO: 147716 - DNA, 244 bp, Glycine max
  unsure (1)..(244): unsure at all n locations
tgactatgtaaatccgggaaggccgtggtgtaggacccctgaaagatcacatctatctccacttgaatcactctactctcagatgttcttaaggagaggctacctggtatctctgaaacagctgctatttttgtggtgtggatgttactaaggaacctattcctgttttgccaacagtgcattataacatgggtggtattcccacaaatcatcatggacangtgatctactataaaggtgatga

SEQ ID NO: 147717 - DNA, 252 bp, Glycine max
caaccctatcatgatgagtgctggagagttggaaagtggaaatgcaggagagccagcaaaactgatcagacagagataccgtgaagccgcagacatgatcaagaagggaaagatgtgtgctctcttctcaacgatcttgatgcaggagctggtcgtcttggtggaactacacaatacactgtcaacaaccagatggtgaatgccaccctcatgaacattgctgataaccccaccaatgtgcagcttcctggt

SEQ ID NO: 147718 - DNA, 242 bp, Glycine max
gcagcataaccagcgaggattcgagcttgttggtgtacgagtatttgcccaatgggagcttgtgggaccggcttcacacgagtaggaagatggagcttgattgggaaaccaggtatgaatcgcggttggggcagcaaaagggttggagtatttgcatcatgggtgtgagaagcctgtgattcatagagatgttaagtccagtaatattttgttggatgagtttttgaaacctaggattgcag

SEQ ID NO: 147719 - DNA, 173 bp, Glycine max
gtcttttttcaagtgttcttgtatgtcatgtctgttatgttcaatttctcccttgaacttgtttgctgttctggtttaggtgctgctttttatgttttaatatgatgtattgagctcgtttcgccaaagaattaaatatcaatatcgtatcatagttaaaaaaaaaaaaataa

SEQ ID NO: 147720 - DNA, 253 bp, Glycine max
cttgaatcttcgttatccttctttttttctccttgaactcgaatattcactatggcagatgaggtggttctgctagatttctggccaagtccatttgggatgagggtcaggattgcacttgctgaaagggtatcaaatatgagtccaaagaagaggacttgcagaacaagagccctttgctcctcaaaatgaacccggttcacaagaaaaatacggttctcatccacaatggcaaacccatttgtgaatctct

SEQ ID NO: 147721 - DNA, 256 bp, Glycine max
ggaaggtattgacgaaatttgcaagattattcatgataatggaggccaagtatatatggatggtgccaacatgaatgctcaggtgggactcacaagcccaggttggataggagcagatgtatgccatctaatctccacaagacattttgcatccctcatggaggaggtggccctggcatgggtcctataggtgtaaagaaacacttggcaccatttttaccatcacaccctgtgatagcaactggtggaattcctg

SEQ ID NO: 147722 - DNA, 258 bp, Glycine max
ctcgagccgtgcaaagtgtcactttgttgcaattgatatttttaatgggaaaaagcttgaagatattgttccatcatcccacaactgtgatgttccacatgtgaatcgcactgactatcagcttattgatactctgaagacggctttgtgagtctgttgactgataatggaaataccaaggatgatctgaagcttcctactgatgaggcattgcttgctcagattaaagatggattttctgaaggaaaagatcttgtg

SEQ ID NO: 147723 - DNA, 231 bp, Glycine max
tgaatctctgaattctctaaaagagatttttttctgctctttgaagaaagaagggtctttgcttgattttggagatgtctctgctctcagatctcatcaaccttaacccttccgatactaccgagaagtgatcgtagagtacatatggatcggtggatcaggaatggacctgaggagcaaagcaaggactctcccaggaccagttagcgacacttcagagcttcccaagtg

SEQ ID NO: 147724 - DNA, 253 bp, Glycine max
aaatgttataattcatcgagacctaaagccaaggaatgttcttttagtcaattctagtgccgaccatttaaaagttggagattttggattgagtaagcttatcacggtccagagttctcatgatgtatcaaaatgactggtgaaactgggagctaccgctacatggctcctgaagttttcaaacatcggagatatgataagaaggttgatgtgtactcctttgcaatgattttgtacgagatgcttgaaggtg

SEQ ID NO: 147725 - DNA, 253 bp, Glycine max
ccaacaggtgctagcgacacttggaccaagcttatacgattttactcggagaaacagttatcgttcatttcgcattgatcttgtccgtgagattggctggcaactgtcggaatgtgtagcatctatgatgatttacgcatgatccatactgacctgaagcctgaaaacatacttctagtttcaccagagtatctaaagattcctgactactagagtactaccagatcaccatgctcctgttgcaagagagtgc

SEQ ID NO: 147726 - DNA, 246 bp, Glycine max
cttaattctctcatttcttgaagctctatttattctagatcaaaaacgaaatgacccctcccccagaattctttcggattgtcgggcacattaaaaaaggaatggataagttcctaaaaataaagaaactataacacattataaggaggggtcaaatattaattaagataaaagatatagaatatctatctgtatatatatatatatagatataatttattaataattagaactttcttttttctt

SEQ ID NO: 147727 - DNA, 178 bp, Glycine max
tctggcaactagttggtatgaaagagaggcttgaagcaaaaaaaaaaaaaaaaacaaaaaaaaaaaaaaaaaaaaaaaaaaagaaaaaaaaaaaacaaaaacaaaaaaaaacaaaaaaaaaaggaaacacaacgccgccggggccccccccccgccgccgcgcaggtcggcgccggcc

SEQ ID NO: 147728 - DNA, 249 bp, Glycine max
gtgtttacaatgtacatcggagaacgaattacagacctaaaacttgggaatggcacctctcttttgatattcacaaacattatctcgtacttgccagcttcttttggtaggacaattgctcaagcattaatgatgcaaactacattggacttggtaccattgttttgtccttctttttgttggtagttggtattgtttatgttcaggaagcagagagaaaaatcccgcttaactatgcttctagattca

SEQ ID NO: 147729 - DNA, 252 bp, Glycine max
gctcctttgaaagatttttttttctatggaaaaaggaaagactgtgagtaaatatgtacaagatggaactgtagatctcaaaggaaaacctgttctcaaatctaaaagaggtggttggaaagcatctctttgcttcttgtgtatgaggtattcgaaagaatgacttattatgggatatcatcaaacttggtcctgtatctaacaaggaagcttcaccaaggcactgtcactgcttccaacaatgtaaacaat

SEQ ID NO: 147730 - DNA, 251 bp, Glycine max
gttccatggtattcctcaagttcacctgcttcaaacctcaagtctccaagctcgagtcccaattctccaactttggggaagcactcgcgggacagtgacatgattaagcaagactctttgcacaagaagaagcttcaacgccaagaaacgggagtgttttggtcccaaaaacgttgagaattgatgatccaagtgaggctgcaaagagttctatatgggcaactctaggaattaagaatgagtcagtgagt

SEQ ID NO: 147731 - DNA, 248 bp, Glycine max
aaaatatattcaattttgcgtttctctgcctaaaaggtagacttcttctctgcttcttccgattgaaagatgggtcaagcattcggttgctaccaagtcgatcagtcaaatgtggctatcaagggcattttggaaaatttgatgatgtcctagagcctggatgtcactgcctgccttggtgtcttgggtaccagattgctggtagtctgtcgctgcgagtgcagcaacttgatgtacgatgtgagacg

SEQ ID NO: 147732 - DNA, 253 bp, Glycine max
ataaaatcccactccaccctatcatagtattataaaatgtcaaactttagagccacaatccctttcctccctttcttcttttgtttcatatgatgaaaacattcaaaagctatgatagtattatctatattaacttatccgacactgaagtactttgagattcaccaatcaaagagggcacaacagttttcatcctatttgcaaaagcctctgtaatgaccttgaaaattacattacaaaggcttatggccta

SEQ ID NO: 147733 - DNA, 257 bp, Glycine max
ttgggatgttgtatgttggacgaggagccatagtcacaaccttcattgtttgctatgctctcacatctttcatttctggttatgtgagtggggggatgtactcacgtaatgggggtaaaaattggattaatccatgatccttacagcatcactgttccctttcatgtgctttggaattggttttattttaaacactattgctatattctatggatctctagctgctattccctttggtacaatggttgtcgtctttg

SEQ ID NO: 147734 - DNA, 249 bp, Glycine max
ggtattagcaacgagaaggagaggaggggtttgcgtgtgtgagagagaatcagaatcagaagatgaagaaagaagacacagtgaagctgatcagttccgaaggtttcgaatttgtggtcgacaaagaacctgcaatagtttcacagaccatacataacatgcttacttctccagggagtttcgctgagaggcagcacggcgaagttacctttcctgagatcagcaccaccattctcgagaagatttgcc

SEQ ID NO: 147735 - DNA, 250 bp, Glycine max
ggacaattggtcagcttattgagtgtatcatggggaaggtggcatcccacatgggaaaacaaggagatgcaactccttttacagatgttactgtggacaatatcagtaaagctctacacaaatgtgggtaccaaatgcgtggttttgagactatgtacaatggtcatacagggaaacgtctaagtgcaatgattttccaagggcctacatattaccagagactgaagcatatggttgacgacgggatcca

SEQ ID NO: 147736 - DNA, 250 bp, Glycine max
gtatgtttcatccaaatatttatgctgatggaagtatttgtttggatatattacaaaatcagtggagtcctatttatgatgtggctgctatactcacatctatccagtcattgctttgtgatcccaacccaaattctcctgcaaactctgaagcagctcgaatgtttagtgagaacaagcgtgagtacaatcgaagagtgagggaaattgtggagcagagttggacagcagattaagttcatccttatat

SEQ ID NO: 147737 - DNA, 254 bp, Glycine max
cttaacattagctcaaatttcatttatgggggaattccagaatctctatcctcgatgaggaatctaaggagtcttgttttggttgataatctcttcaatggaagtgttcctgacctccaaaggctaacttctctagaagagctcaacttgggaggcaataaagtgggtgctcaattcccttcagtgggaaagaatcttgtcactattatgttgagaaataattcactgagatctcatatccctccacaacttgt

SEQ ID NO: 147738 - DNA, 235 bp, Glycine max
cgcgacgtgttcgggctgcagaggatccgcgagtgcgagctcattcacgggaggtgggccatgctcgccactctcggagctctcactgttgagtggctcactggtgttacatggcaagacgccggaaaggtgaagctagtggaaggttcatcatagttagggcaaccacttccattctcaatcaccacactgatctggatcgaggttctcgaaatggggctacatagagttccag

SEQ ID NO: 147739 - DNA, 249 bp, Glycine max
gtttatctcataaaacttctcttgattggcgatagtggtgttggaaagagttgccttcttctacgattctctgatggttctttcacaactagtttcatcacaaccataggcattgattttaagataagaaccattgagcaggatggaaaacggatcaagctccaaatttgggatactgcaggtcaggagcggttccgaacaattacaactgcttactatcgtggtgctatgggcatattgctagtctat

SEQ ID NO: 147740 - DNA, 241 bp, Glycine max
gatcatctgcaaggacttgttctccttccttcccaacagccatgcgttcatttcttcccgcctcagccgagcacgttgatctggcagtggaggccaaagacccgtctgagtccatctccattctttatcaggtacttgatgatccttcttcttctccagatgctctgcgcatgaaagagcaggccatcacaaacctcactgagcatctcagggaacagaatagggcagaggatttgcacag

SEQ ID NO: 147741 - DNA, 252 bp, Glycine max
gtgctaggaaagtgagtgagagaaagagatcacatagcagaatggcttctactcaatgtttcttgcaccaccatgctcttaccacccctgccagatccccatcacaacgcatcatggttagcaccaagcctaaccagcttgtttgcaaggcaccaaagcaagaggatattgaatgtcagcccaatctctcgccggttagctctaaccgtgctcattggtgctgctgctgttggctccaaagtccagcctgct

SEQ ID NO: 147742 - DNA, 125 bp, Glycine max
ggacttcggctcgagccggtttggtgtacacagtctacgccactgccgttgaccccaagaagggcaatttgggaattactggtcccatcgccattgggttcattggtggcgctaacattttggtg

SEQ ID NO: 147743 - DNA, 251 bp, Glycine max
tgtgagagagagagagagacgtatcacagtgatacgaagaagccctaactatgcacgcactcactcttgagaaagctcaatattcattcgtcgatggcactctcttctcgtctcttttccaaatccaaattgatctatggctgtcaaatacttctgcaaaaggagcatgctattccagttcgtcactttgctacagagtctgaccctcctgcccttaagggagatcagatgctgaagcacatttttgtgga

SEQ ID NO: 147744 - DNA, 244 bp, Glycine max
gtaagcagtgcaatgttgccaacaagcaccatgatcaggacccttgaattttcctccccttgtctatgatcgaggaagaaaatctgtaatatattatgcaaaaaataattaaggtcttttcctttaaatgggctggttcaatgaaccgagaccactgcaggttcatggggatgggaggattaagaggctatgctttttaatcttccgatgttactgttgttttttttttaatttcaataaggat

SEQ ID NO: 147745 - DNA, 251 bp, Glycine max
ctctgatcccttacacctaccactccatcacagagcgacatgatgatgatgtagcagatgagcttgctgcttccatcccagtcatcgacttgtctctcctcacttcgcatgaccctcaaatccacgccaaagccgtgcaccaactcggcaaggcctgtgcagagtggagtttcttcatgctcacaaatcatggaattcccgagagcctggtggaggagttgatgaaaaagtctcgcgagtttcatgatttg

SEQ ID NO: 147746 - DNA, 251 bp, Glycine max
ctgcccgagaagaagtgccaggaagacgtggttatcctggatatatgtatacagatcttgcaacaatttatgaacgagctgggagaattgaggggcgtaaaggctctattacacaaattccaattctaaccatgcccaatgatgatattacgcacccaactcctgatctaacaggatatatcactgaggggcagatatacatcgacaggtagctgtataatggaccgatatacccaccagtcaatggcctc

SEQ ID NO: 147747 - DNA, 250 bp, Glycine max
gttcggtgtatctaggtgtgcttgaagatggcactcaattggctgtaaaaaaattggaaggtgttggacaaggtgcaaaagagtttaaagcggaagtgtccatagttggaagtattcatcatgttcatttggttaagctatcagttattgttcaagttgaagagatcttccctcatatgacagagttaacaagtttttgttcaagtcacctatgtaacaaggatatactctagctagagtagttgcaaat

SEQ ID NO: 147748 - DNA, 249 bp, Glycine max
ttctctctctctgtctctctctctctagacttagattttgtgaatggctgaagtggaagagggacaggtcatcggcgtccacaccgttgatgagtggaagctgcaactccagaatgcaaaagactccaaaaaactgattgtggtggattttactgcttcctggtgtggtccatgccgttttatggccccagttcttgcagagattgcaaagaacactcctgaattgatcttcctcaaagtggatgtgga

SEQ ID NO: 147749 - DNA, 250 bp, Glycine max
  unsure (1)..(250): unsure at all n locations
cgagcccaccgtcatcgacgaagtccgttcgtggcacttaccgtcaactcttccacacagcataccacaccacncgcaaggaagatgccgccaacaactttgccagaggccacctctccggtggcaaagagatcgtagatctgtgcttggatcgcgtccgaagtctcgcagacaactgcactggtctccagggcttcctcgtcttcaacgctgtcggcggtggcaccggttccggtctcggatctctctt

SEQ ID NO: 147750 - DNA, 246 bp, Glycine max
ctccacttatctatgctgtaatgggaacttctagagagatagcaattggtcctgtggcagtggtttctctgctgttatcatcaatgatggtgaaattagtagaccctgctactgatccagtgggttatacaaagctgattttgcctgctactctctttgctggtatctttcagacttcctttggactcttcaggcttgggttccttgtggatttcctatcccatgctgcaatagtaggatttgtag

SEQ ID NO: 147751 - DNA, 251 bp, Glycine max
agattgtggaagtaatgacccggatctgaaggaggagatggagaagcagtttgtggaccttctcagtgaggagttgaagttgcaagagtctgttactgaagcaaacacccggcacatgaacataactttggctgaagcaaaaagagtggcttctcagtaccagagagaggcagataaatgcattgctgcaactgaaacatgcgagcaggcaagagaacgtgctcaggccatacttaccaaggagaaaaaga

SEQ ID NO: 147752 - DNA, 228 bp, Glycine max
gtgttcctcaatctgtaagtcaatgcagtcgaccccaagaggctattcatggtatcagctgtggttacgaggataaaactgattggggaagtgagataggatggatttatggttctgtcacagaagatattcttaccggatttaagatgcatgcccggggttggcggtctatatactgcatgcctaagcgcccagcgtttaaaggttctgctcccatcgatctttcgg

SEQ ID NO: 147753 - DNA, 245 bp, Glycine max
  unsure (1)..(245): unsure at all n locations
ctgaggaagatcagggaaaanctgtaggttgagatggttcaatcaattggacccaagaataaacagaagtcctttcacggaggaagaagaagagcgtcttctagcttctcaccggattcatggcaatagatgggcagtaattgcaagacacttcccaggacgaactgataacgctgtcaagaatcattggcatgtgatgatggcaaggattcggagagaaaggtctaaaaattatagtccaaaac

SEQ ID NO: 147754 - DNA, 243 bp, Glycine max
gtaaagatagcggcaagtgttccaaaatgaaattaaaccaaacccatcatgttatggtgttattatacgatgcccgcataagcaagcttcaacacaaaaggaagaggcgctgttgcttgatcccgctagcttttacgtattttctcttacgtaacaaccgtgtataagttaccagtgtgattttcttacagaactatcttctgtaaagatttcaatctgtcaaggactttcaccttctataat

SEQ ID NO: 147755 - DNA, 245 bp, Glycine max
atacgacacacacaataaaaagctttagtttaggatgatccaagtgaggtacaagcaagtggttctaagagattatgtcaccggattccctaaagaatccgacatgaacattgttgaaggcaccataatattgaaggttccagaaggttccaatgatgtccttctaaaaaatctctacttgtcatgtgatccatacatgcgactcctcatggccaaggaccgttctttcggagatggctccttca

SEQ ID NO: 147756 - DNA, 78 bp, Glycine max
ctacgggtgcgtaatgcgtgggaatctgccgaacagttcgggccaaatcctgaacaaagctataaagcgctgtttgat

SEQ ID NO: 147757 - DNA, 241 bp, Glycine max
gtcaagtgaaagtgagataaaataaaaatcaaagagcataatgtcagggatcattcacaagattggggagacccttcatgtgggagggcacaagaaggaggatgagcataagggtgagcaccatgctggagaatacaaaggggagcaccatggtgaacacagtagtgagtacaaaggagagcatcatggtgaacacaaagctggagagcaccatggtgagcacaagccagagcacaatgag

SEQ ID NO: 147758 - DNA, 247 bp, Glycine max
gtataaaaagacttccttttttgcaattgtcatttgtcaccaaacaattgttgttagctctcacaagcaagcttcagcaacgacagtgaagaaagtagtcttacagttggacttacatggtgatagaatcaagcaaaaagctatgaaaacagcatctggcctttcaggggttgaatcagtttctgttgatatgaaagacatgaaaatgatcgtgttgggggacattgatccagtgagtgcagtgtcg

SEQ ID NO: 147759 - DNA, 246 bp, Glycine max
gtcaatttttctcaggataagtcatggcgtgttcgttacatggttgctaatcaactatatgagctatgtgaagctgttggtcctgaccccaccagatcagaattggtccctgcatatgttcgtctgctgcgtgataatgaggctgaagtacgtattgctgctgctgggaaagtaactaagttttcccgcatattaaatcccgatcttgcgattcagcatattctaccatgtgtgaaggagttatca

SEQ ID NO: 147760 - DNA, 244 bp, Glycine max
gtcttacatcaaaactccaacctgtgtcattctcgctgtgacgccggcgaattcggatttggcgaactcggatgctcttcagatggctggaattgccgatcctgatgggaacagaacgcctggtgtcatcacgaagttggctatcatggatagatgcactgatgcgcggaatctgttgctaggaaaagttattcccctccgacttggatatgtcggtgttgtgcatcgtagtcaagaggatatt

SEQ ID NO: 147761 - DNA, 246 bp, Glycine max
ttattctctgtctctctctctctctctcgatcaatcatggctttgcccaatcagcaaaccgtcgattaccctagtttcaaactcgtcatcgtcggtgacggtggtacaggaaagacaacgttcgtgaaaaggcatcttaccggtgaatttgagaagaaatacgaaccgaccattggagtggaggttcacccattggatttcttcacaaactgtggaaagattcgcttctactgttgggatactgcc

SEQ ID NO: 147762 - DNA, 235 bp, Glycine max
gttaattgcaagaatggcacttcgttgcttggtgatgtccctttctgttctcttcactcttggtcttgcgagagaaagccatgccagagacgaagatttttggcatgctgtttggccaaacactcccattccaagttcattgcgagatcttctaaagcctggccctgcaagtgttgaaatcgaagatcaccctatgcaaattgaagaaacacagtacccgaaaaccttcttctat

SEQ ID NO: 147763 - DNA, 243 bp, Glycine max
gacaaacttggttctccatacaggatttgcattcccagacttaacaactttggtgcaatatttgctattatgatcaatccacccaacagcaaacacatgacgcttccaaagtgaggttgaaagctggagtccatgtgcagatatcaagcagacctccacccatataatccccatagaaagtgcaggaaagaaaaaatgagatgttcaagggatgatgtctccgataagcttctttagataagg

SEQ ID NO: 147764 - DNA, 240 bp, Glycine max
gtaagttttggaggatctaatattgatccaacggcttgggcggataagaagtgccctggtgaatctcgtttccctgctcaggttcaagtgattactaggaaagtttgtgagccactagaggaagattccttcagaccaattcttcacgactacgacggccctaagttccgtcttgagctgagtgtgcctgaggcactgtctcttctggatatctctgcaaaccagaacagtttcgatgac

SEQ ID NO: 147765 - DNA, 244 bp, Glycine max
atcaaaggcaaaggttgtggttgcatctgttgaagataaactagagattgtggcatcgcgcaaagttaaactggaggcagacatgctcctcgatgaagcaaccaaactttcatatgaccttattgtgttacctggtggacttggtggtgcccaaacttttgcaaactcagaaaccttggtgagtttgctgaaaaagcaaagagaatcagacaaatattacggagcaatttgtgcatccccggct

SEQ ID NO: 147766 - DNA, 251 bp, Glycine max
gtacactcataacacaaagcacaaagcaaagctcatccttgagttaaaaaatggcagcagcttcttccatggctctctcatccccatccttggctggcaaggccgtgaagctgggcccatcagccccagaagtgggaagggtgagcatgaggaagaccgtcaccaagcaggtctcctcaggaagcccatggtacggcccagaccgagtcaagtacttgggcccattctctggcgagcccccgtcctaccta

SEQ ID NO: 147767 - DNA, 256 bp, Glycine max
gtccgaattgtgaaagtaagcaaagatggctttcacggaatcgtctctcctccttccttcggtttcaggaaccaacaagaacaagaacaaggttccagaagacaaatggtatttagcctacattgtgtattttacctgggtctcggttaccttctcccatggaacgctttcatcaccgccgttgattacttctcctttctctaccctgacgccagcgttgaccgcatcttcgccgtggtttacatgatagtcgggc

SEQ ID NO: 147768 - DNA, 253 bp, Glycine max
ctcctttaccaccattctagatatcagagaactttgcagctctcttaggtttttaaaaaacaccacgcaaacagcaagatggccacttccgacagtaacatgctactaaattatgttccagtttatgtgatgctccactcggagttgtcaatgttgacaatgtttttgaagacccagatggccttaaagaacagctcttgcagcttcgagctgcgggtgttgacggggttatggttgatgtgtggtgggggat

SEQ ID NO: 147769 - DNA, 255 bp, Glycine max
gtgactcgttcttcttcgtcgttatcttcttcttttgttgtttgtgtgtttgttttttctctcacctgaaaatgtcttgctgcggtggtaactgtggttgcggaagcgcctgcaagtgcggcaacggctgcggagctgcaagatgtacccagacttgagctacaccgagtcaaccaccaccgagaccttggtcatgggagtggcaccagttaatgctcaattcgagagtgctgaaatgggtgttcccgctgagaa

SEQ ID NO: 147770 - DNA, 256 bp, Glycine max
gtttctcttcctcccttggagaaaaagaagagccaccgctgcgacgccgttcgtgcatttttgaggtgccgctgtcatgtttgggcgtggtggaccaaggaggagtgataactccaaatattatgatattctcgggtttccaaaaatgccagtgaagatgaaatcaagaaggcctatagaaaggcggctatgaagaaccatccagataagggaggagatcctgaaaagtttaaggagttaggtcaagcatatgaag

SEQ ID NO: 147771 - DNA, 254 bp, Glycine max
gtatggaggagattggctttaacatctctcacctttatggcctcacagaaacatatggtccaggaactttctgtgcatggagacctgagtgggacttgttgccccatgaagagagatcaaagatgaaagcaaggcaagggtgccccatgtggctttggaggaaattgatgtgcaagatccttccacaatggaaagtgttccatctgatggcaaaacaatgggggaggtaatgtttagagggaatacagtgatga

SEQ ID NO: 147772 - DNA, 256 bp, Glycine max
gttgaaagtttcattaattatgtcatttacaagctatcaagaagtggacttcaaaatgtggagggaaaacggattcatgatttctttctgacactggcaacctgcaacaccattgtgcctcttgttgttgagtgttacacacctgaccctgatgtcaagctgatagattaccaaggagaatcaccagatgaacaagcactggcttattctgctgctgcctatggttttatgctcatagaacgaacctctggccatt

SEQ ID NO: 147773 - DNA, 254 bp, Glycine max
cgagggtcgctctccaagggacaagcgcgtcgtcaaggatgatcttactaagaacgacctttggtggggaaagggttctcctaacatcgagatggacgagcacagtttcatggtgaacagagaaagagctgttgttacttgaactccttggacaaggtcttcgtcaatgaccaattcttgaattgggacacagagaacagaatcaaagtccggattgtatctgccagagcttaccattcattgttcatgcacaa

SEQ ID NO: 147774 - DNA, 251 bp, Glycine max
agagaatggctcccaagggtttaacctttctggctgtgttaatatgcgtttcagcactgtcactgagtccttctgttgcgggggaagggcaaaataatggccttgttatgaacttctacaaggaatcatgccctaggctgaagacatcatcacagaacaagtcaagcttctctacaagcgccacaagaacactgctttctcctggctcaggaacatcttccatgactgtgctgttcagagttgtgatgctt

SEQ ID NO: 147775 - DNA, 255 bp, Glycine max
tttaggtgaggcttaccaagttctgagtgacccagctcaaagacaagcttatgatgctcatggtaaatcaggaatttcaactgaagcaattattgatcctgcagcaatctttgccatgctttttggtagtgagcttttgaggaatatataggtcagttagccatggcatcaatggcttcaatggacatctttactgaaggagaacaatttgatagtaaaaagttgcaagagaaaatgagggttgttcagaaggag

SEQ ID NO: 147776 - DNA, 252 bp, Glycine max
atagtctacacctaattagccaaacacaccacagcaccaaactagttggctcaattctctttgaatggctttggaggctttgaattcaccaacagcagccaccactcccttccgtggttaccaagaagaggaggagaggttgaccttcacctacgcgagccttgggccaagagcaaacgctccaaacgacctcgttttgagtcggaggaagagtacttggctctttgcctcatcatgcttgcacaaagcggt

SEQ ID NO: 147777 - DNA, 253 bp, Glycine max
gaccaagctagtccgaggaagtcctctattcagaaccagatatggagacaaaacccaccgagatcagcagcggcaagatgttcggaggctacaacaagaggttcagacatttcagccctaccctcggctgctccagaacttccacatctacttccctccatctccttctccctctcacaaattcccagtcttgtactttctctctggcctcacatgcacggacgagaacttcattttcaagtcgggtgctcaa

SEQ ID NO: 147778 - DNA, 256 bp, Glycine max
cttgctactgagtttccacactgcataccttaggtcttccgaattcgaagttaatttgcaagatggctaaggaaaaggctcagatcaacattgtggtggttggtcatgtggaccctgaggaggcaaccaccattacgagctgaagaagcctgttgtggagaaagaagctccagggcatgccatatgagggcatgcacgtacggcctcggaggggaaccagaaaattatgttaacaaaataatctggaaccctaatg

SEQ ID NO: 147779 - DNA, 250 bp, Glycine max
cgtgcgtttactcggaactactcttccactcttcgtttaaaatgtctgacgtggaagagtatcgttgtttcattggtggccttgcgtggtcaacatctgatagaaagttaaaggatacgtttgaaaagtttggaagcttattgaggcaaaggtggttgttgacaagttctctgggcgttctcgtggttttggatttgtcacatttgatgacaagaaagcaatggacgaggctattgatgctatgaatggg

SEQ ID NO: 147780 - DNA, 250 bp, Glycine max
ctcatttccatggccactgcggcacccactgtcgcggtggaacccgctcccgaacctgcctccgccgaccctcccccagaggagaaggaggagaccaaacctgaagccaaggctaagagaaccaaggagcccaacctaaaaaggtttccagacctcgcaaccctcccactcatccttcctacgaagagatggttaaagatgcaattagctcgctgaaggagaaaaccggttcgagccaatacgcgattgc

SEQ ID NO: 147781 - DNA, 254 bp, Glycine max
gccttctttcatgactagagtggccatgagaatatctagatcaagatggttcactttcttgagaagagtattccattaccaaaacggaccaagatccaatctcggctccaaccctttcaattccagcacttggagatgctggagttgattgcgttgttggtctaaatagtaagcacaacattcactttggccatttcgacgagtgtgaagccaatttggcctatgagagtgtggatagcaggttatgatattgg

SEQ ID NO: 147782 - DNA, 254 bp, Glycine max
gtggtgttagatctgtacccgcctagccattgatttggaaaagtccaagcttcaaagatgagtaagcttcagagtgatgctcttagagaagctatctcaggaatcatgactgattccaaggaaaagaacaggcaattgtggagaccattgaactccaaattgggctgaaaaactatgatccccagaaggacaagcgttttagtggctctgttaagttgcctcacattcctcgccccaagatgaagatttgtatg

SEQ ID NO: 147783 - DNA, 249 bp, Glycine max
ctagcattgaattcaaaaacttaagttcattccttgtgttttgctttcttcctcaaaaccaaacatgtcgaacacatgcggcaactgcgactgcgctgacaagactagctgcaccaagggaaacagctatgggttattgtagagactgagacgagttacatcgagactgttgtcatggatgttccagcagctgagcatgatgggaagtgcaagtgcggcactaactgcacttgcacggactgcacctgt

SEQ ID NO: 147784 - DNA, 251 bp, Glycine max
gtaatgttatttgtttatggacggattctgagtcaacgcctggttaacacagtaacttcagacatggttttatatcggctagtgagcaatcttattaagtatcatatggttatctgctactccctatacattctggatttatgtggttcattctcacattgcagaagaagatgtacaagtaccaatttggccagtatgcttggacacacatgattctaattgttgtatttggccagtcctccttcactgtg

SEQ ID NO: 147785 - DNA, 252 bp, Glycine max
ctttcttctttggagcctccgacatagctgccctacgtcgcttggttccccactaccatagaaaatgcaccagtttcgatctcatcacggcatgcttctggcgctgtcgcacaaaagcattggagatagatgagacgaggatgttcgcatgatggtcatagtcaacgcacgtgctaggtttaatcctccattacctgctggttactacggcaatgcctttgcataccccgcggcagttaccaccgcagggaa

SEQ ID NO: 147786 - DNA, 247 bp, Glycine max
agtaagactttgtgattgatgtgctgcaatggcgtcaagtcaggaagaggtgactcttttgggagtaattggaagcccatttgcttgcagggtgaagattgcccttaagttgaagggagttgaatacaatatgtggaagaaaatttggccaacaagagtgatttgcttctcaaatccaacccagttcacaagaaagttccagtttttattcacaatgagaagcccatagcagagtctcttgtgattg

SEQ ID NO: 147787 - DNA, 248 bp, Glycine max
gttaattactttgtgactgcttcacttgatggctcttggtgcttttatgaactttcttcagggacgtgtttgactcaggtttatgacacttcaggttcttcggaagggtacacatctgcggcttttcatccgatggtctcattcttggaaccggcaccacagaatctcttgtcaagatttgggatgtaaaaagtcaggcaaatgttgctaggtttgacggacatgctgggccagtaactgccatatct

SEQ ID NO: 147788 - DNA, 252 bp, Glycine max
cacgcgcttccattttcaaaggactctccgccgcccaaacccaaggaggctcatttccggggtgtccgcaagcgtccctggggccgctttgccgctgagatccgtgacccctggaaaaagacccgaaagtggtcggcacctttgacactgccgaggaagccgccagggcttatgacgccgccgccagaacactccgtgggcccaaggccaagaccaacttctcctacatccttgctcccgctttccacctcc

SEQ ID NO: 147789 - DNA, 252 bp, Glycine max
gcattgcttcgcctcacaacagcagctgcagcagcaatggctcccaaacgaggtggaaaggctccggctcttgccgctaagaagaagcctgagaaggtcacgaatccgttgttcgagaagcgtccgaagcagtcggaatcggaggggcgttgcctccgaagagagacttgactaggttcgtgaagtggccaaagaatgttcaaattcagaggaagaagaggattctgaagcagaggttgaaggttcccccag

SEQ ID NO: 147790 - DNA, 250 bp, Glycine max
tggagacaggaggaaggagtcaaaggacttggaagaaaaggccgagatgaagaagatgtacggcctgatcgagacctacaagttgaacggccaattcagatggatttcatcgcagatgaaccgtgtgaggatggagagctctaccgcgtgatctgcgacaccaggggtgctttcgtgcagcctgctgtatacgaggcttttggtttgacagtggttgaggccatgacttgcggcttgccaacattcgcca

SEQ ID NO: 147791 - DNA, 204 bp, Glycine max
ccgcaaactcactgcaatgaccaagttgttgatggaggagaatgatcggttgcagcagcaggtgtcacagcttgtttgtgagaatggttttatgaggcagcaattgcatactccatcggcaacaactactatgctagttgtgattcggtggttaccactcctcagcataccctgagagatgctagtcatcctgctggcctccta

SEQ ID NO: 147792 - DNA, 250 bp, Glycine max
ctacaggcttctccgaaaccatttgtgtgaccggcgctggtggcttcatcgcctcttggatggtcaaactcctcttggagaaaggctacactgtccgaggaaccctcagaaacccagatgatcccaagaacggcacttaaaagagtttgaaggagcttcccagagactaactctgcataaggttgatctctctcatcttgactccgttagatctgttattaacggctgtcatggtgtctttcacactgct

SEQ ID NO: 147793 - DNA, 247 bp, Glycine max
ctgttgatgtgtttgttagtacagtggatcccctcaaagagccacctcttgttactgcaaacaccgttttgtctatactttctgttgattaccctgtcgacaaagtttcctgctatgtatcagatgatggtcagctatgttgacctttgaagcactatctgaaacagctgagtttgcgaagaagtgggtgcccttttgcaaaaagcacaatattgaaccaagagccccagagttttattttgcccag

SEQ ID NO: 147794 - DNA, 243 bp, Glycine max
gttctagatcgcgagcggccgccctttttttcttttgttgttccgggtttttgtttaggtttgctctcacctgaaaatgtcttgctgcggtggtaactgtggttgcggaagctcctgcaagtgcggcaacgctgcggaggctgcaagatgtacccagacttgagctacactgagtcaaccacccgcccgaccttggtcatgggagtggcactgttaagctcaatttgaggtgctgaatgggtg

SEQ ID NO: 147795 - DNA, 246 bp, Glycine max
tgctcttcgtgagattaggatataccagaagagcactgagctcctaatcaggaagcttcctttccagaggttggttcgtgaaattgcccaggattacaagactgatctgcgtttccagagccatgctgtgctgcattgcaagaggctgctgaggcataccttgttgggctctttgaggacactaacttgtgtgccattcacgccaagcgtgtgactattatgcccaaggatattcagctggcaaga

SEQ ID NO: 147796 - DNA, 249 bp, Glycine max
atcgaagaagaagatggcttcaggtgttcctgctcttccgttgacatacgtggctcacgttctggcagttgttgccagcgtcttggtcgtggtctgggtcgtcaatttcaggggtggcttggcttgggatctgataacaagtccctcatcttcaacattcatccagttcttattgttattggcttactagttcatgggggtgaagctattataagttacaaagcttttcccctaaagaaggaagtgaag

SEQ ID NO: 147797 - DNA, 247 bp, Glycine max
gtaacttctggagagggtctctatgagggtttggactggctttctaacaacattgccagcaaagcatgagacatttgaaaaattttggtcttgtctggtgatttcatgcgagtctggcggttcttggagaagatgcttatcttttctagcgaatgttgtaatagcagaatgcttgctagaagtattctcttttgtgtaacttgggtttgtatgattgcttaaattagctaatacttgtagctataat

SEQ ID NO: 147798 - DNA, 234 bp, Glycine max
ctaaatttggagctgaggcttatcatttttacggtgtgggtgcttcctcggatttgaggggtgtggggaagaggtcctcagagtgggatttgaatgattggagatgggatggtgatctgttcatcgctaccggctgaatccggtgccggccgatggtgttggagtgggacagcaatttttccctattgggtccgggatcccggtggccggaggccactccaacagttcttccac

SEQ ID NO: 147799 - DNA, 249 bp, Glycine max
attattattaagatgatcaacattattggagcacttgttctactctttgcatttctcttcctcagttgtgtgtatgcacaagacacaacaacccttgtgcctgcaatcataacttttggtgattctgcttggatgtagggaacaatgactatcttcccacccttttcaaggctgattaccctccttatgggagggactttgttaaccaccaacctactgggaggttttgcaatggcaaattagctactg

SEQ ID NO: 147800 - DNA, 250 bp, Glycine max
ctcgagccgttttgacgcaacacactttcactgagaaaggatctctatctaccaaggagcagaataaaacccttctctctggtaagtgaataagagaatggcttcagatcggaaacttcacactttcgagaggtggcaaagcacgaccagaccaaggattgctggctcatcatttctggcaaggtgtatgatgtcacccctttcatggaggatcatcccggaggtgatgaggttttgttatctgcaacag

SEQ ID NO: 147801 - DNA, 246 bp, Glycine max
gtagaacaatgctgggacaaagttgttttgtgtgtcggggcatgtgaacaagccttgcactgttgaggaggaaatgagtattccactgaaggagttgatagagaggcactgtggaggtattcgaggagatgggataatttacttgcagtgattccgggaggatcatctgttcctctgattccaaagcatgtatgtgatgatatctttatggattatgatgcattaaaggctgttgggacagggttg

SEQ ID NO: 147802 - DNA, 247 bp, Glycine max
cgacaccgacgtcggtatcgtcggagccggctcggcggggctctcctgtgcgtacgagatcagcaagaaccccgccgtgagcgtcgccataatcgagcagtccgtgagccccggcggcggcgcgtggtcggcggacaactcttctccgccatggtggttcgcaagccggcgcacctcttcctggacgagctcggcgtggcgtacgacgagcaagaggactacgttgtgataaagcacgcggctttgt

SEQ ID NO: 147803 - DNA, 192 bp, Glycine max
cgtgttttttttcaagtgttcttgttttaagcgtgtcttttttcaagtgttcttgtatgtcatgtctgttatgttcaatttctcccttgaacttgtttgctgttctggtttaggtgctgctttttatgttttaatatgatgtattgagctcgtttcgccaaaagaattaaatatcaatatcgtatcatagtt

SEQ ID NO: 147804 - DNA, 247 bp, Glycine max
gtgaaccacaacggaccgggttttctagaccggttcactgaagccttgcattactattccagtcttttcgactcgcttgagggttcgtcttcttcttcgaccgggttgggctcgccgagtcaggatctttgatgtccgagttgtaccttgggagacagatttgcaacgtggtggcttacgagggcccggaccgggtcgagcggcacgagactttgactcagtggagggggagattggactcggccgg

SEQ ID NO: 147805 - DNA, 248 bp, Glycine max
gtaagactttgtaattgaggtgctgcaatggcttcaagtcaggaagaggtgactcttttgggagtaattggaagcccatttgcttgcagggtgaagattgcccttaagttgaagggagttgaatacaatatgtggaagaaaatttggccaacaagagtgatttgcttctcaaatccaacccagttcacaagaaagttccagtttttattcacaatgagaagcccatagcagagtctcttgtgattgtt

SEQ ID NO: 147806 - DNA, 248 bp, Glycine max
gtggcaaaataaaaacagtgtttaatatctattttagcagcggctcttgcagccaacagcttcttcaacagtcagaaagactctgccaccgattttgccgacaaagttggacacctttagcttgtgtacacttgccacctagagttcgcaatggctaactgttttccttgtgaagacaaactcttatgcagttcctctagagcagtaattccagaggtgtcaatgttcaccaaattggaggtgtcaag

SEQ ID NO: 147807 - DNA, 217 bp, Glycine max
cttgagcctgcttctaatggtgcatcctgatgatgttgtgtttgggggatgatgatatcagcatacttggacctagctcatgccatggccacggccagggtgtttgatatcgatctgccacctacaccgacgccgtacatagtatccatcgatccactcaccgcgatctatgtcccttattgcatagctggcaaccaaggagaccgagtcaataacg

SEQ ID NO: 147808 - DNA, 232 bp, Glycine max
tttgtatgttcttgatttagagttaagggggaatgctagaggcccttgtatactaaaattggactttgtatataacaatgttgatagcatgcaggttattaattcaattaaagtcaaaaaaaaaaaaaaaaaaaaaaaaaaaaaaaaaaaaaaaaaaaaaaaaaaaaaaaaaaaaaaagaagtaaataaaaaaaataaaaaagcaaagataagagggttgcactgtaagtgc

SEQ ID NO: 147809 - DNA, 244 bp, Glycine max
gtttgttgttgtaactcgttcttcttcttttgttgttctgtgtttgtgtttgttttttctctcacctgaaaatgtcttgctgcggtggtaactgtggttgcggaagctcctgcaagtgcggcaacgctgcggaggctgcaagatgtacccagacttgagctacactgagtcaaccacgaccgagaccttggtcatgggagtggcacctgttaaggctcaatttgagggtgctgaaatgggtgtg

SEQ ID NO: 147810 - DNA, 245 bp, Glycine max
cgtaaagcatggccttgttggtggagaaaaccacgagtggtcgcgagtacaaggtcaaggacctttcccaggccgacttcggccgcctcgagatcgagctggccgaggttgagatgcccggcctcatggcctgtcggaccgagttcggcccctcccagcccttcaagggggcccgcatcaccggctccctccacatgaccatccagaccgccgttctcattgagaccctcaccgcccttggcgcc

SEQ ID NO: 147811 - DNA, 245 bp, Glycine max
ttctaattcaccgaccaactgcaaaggagactgctgtagctgctaagttcaaaacaaaaggtggttctcaggtgaggcaatactgtgacatactgacaaaagaggattgtcgacgtcaatctggtcctttatagcatgtgaaaaggttcattttagacggatcattgcacctcatactgacatcaatttaggagattgttcttttcttgatacctgccgacacatgaagacatgcaagtatgtgc

SEQ ID NO: 147812 - DNA, 243 bp, Glycine max
ctacaatctaagacacacaggccctgatgatgtttacattaaagttcactactgtggaatttgccattctgatctccaccagattaaaaatgatcttggcatgtccaactatcccatggtcccagacatgaagtggttggtgaggtactggaggtgggatcaaacgttagcaggttcagagtgggagagttggtgggagttggactcctcgtaggttgctgcaaaaactgccagccatgccaa

SEQ ID NO: 147813 - DNA, 245 bp, Glycine max
ggccttttccctctctttctctggaaaattcccccgattttctcgagaaagtgaaacggaattatgagctttcaggacatcgaggctgggcggcccttcagttcgaggcgcgggttgatgaacgggagcaagacccgacgcaagcggtggctgccggaatattccagatcaacaccgccgtctccaccttccagagactcgtcaacaccctcggaacccccaaagacaccccgacctccgcgaaa

SEQ ID NO: 147814 - DNA, 252 bp, Glycine max
gttcctatgacaaggcttcggaaacgagttgctacacggctgaaagattcccaaaacacatttgctatgctgactaccttcaatgaagttgatatgactaatttgatgaagctccgttctgattataaggatgcttttgttgaaaagcatggagtcaaattggggcttatgtctggctttgtcaaagctgctgtcaatgcactccaacatcagccgattgtcaatgcagtcattgatggtgatgatattata

SEQ ID NO: 147815 - DNA, 241 bp, Glycine max
actttgactaatgaaaaggaagttgatgcccatcccattcgagctatgaagttttctgtctcacctgttgttcgtgttgctgttcaatgtaaggttgcatcagatcttcccaagcttgttgaaggtcttaagcggttggccaagtcagatcctatggttgtttgtaccattgaggagtctggtgaacacattgttgctggtgcaggagagcttcatcttgagatctgtttgaaggacttgc

SEQ ID NO: 147816 - DNA, 251 bp, Glycine max
gagagagggagaaagggtgtgagaatggagagcaaagaggaagatgtaagggttggagcaactaagttctcagaaaggcaaccaattggtacagcagctcagggtgacaaggactacaaagaaccacccccagcacctttgtttgagcctggtgagctaaagtcatggtccttctacagagctggaattgctgagtttgtggccactttcttgttcctctacattaccatcttaactgtcatgggtgtcaa

SEQ ID NO: 147817 - DNA, 253 bp, Glycine max
aacgacgacgttgtatagcagtccttcttcttctttctgtgttgacggtggcgttgatctgattggaattcaggatcaatggcaggggcagcctctgctctgttcctcctcgacatcaaaggccgcgtcctcatctggcgcgactaccgcggcgacgtctccgccctcgacgccgaacgcttcttcaccaaactcatcgaaaaacaggccgatccgcaagctcaagatccggttgtgcacgacaacggcgtga

SEQ ID NO: 147818 - DNA, 252 bp, Glycine max
cggatcttttctctttaagctcaccaaagcttgatgagaagccactcttccctttgcttcctactaaagacgggatttgctcgtcggggcagaaagctgttgtttctggcaacaaaagaggttttgctgataccatggatgggttttctcaggggaagtttgctggtaatacagggatgaacgcggtgctatcacctagaccttctggagctcaaccttctgctatgaaagaaacaccaagcaaattgtcag

SEQ ID NO: 147819 - DNA, 253 bp, Glycine max
tggctaatccctcactcttgttcttcagtctcctcctattatccgccaccgtagccgccgccgaacggatcgacgatgaagacgaccttctgatccgtcaagtggtgccggatgcggaggaccaccacctgctcaacgcggagcaccacttctccgccttcaagacaaagttcggcaagacctacgccacgcaggaggagcacgaccaccgcttccgtatcttcaagaacaacttgctccgcgccaagtcaca

SEQ ID NO: 147820 - DNA, 254 bp, Glycine max
ctctttctctctttctagttcgtgttcttcgtcgcaaatccgcagtaggatctctcttgttttttctctaggtttttcgcgatggcgtcgaagcgaattttgaaggagcttaaggatttgcagaaggatcctccaacatcttgcagtgccggtcctgttcatgaagatatgtttcattggcaagctacaattatgggtcctccagacagtccctatgctggaggtgttttcctagtgactattcatttccctcc

SEQ ID NO: 147821 - DNA, 251 bp, Glycine max
aggctcgagtgaacagtctgcctggatccagttactgcttgttttggtatgatttcaggtaacatgtggatctcatggaattctgggcagggagatgctgaatgaaaccaagctgaaggaccttcttcatggatcagaatatgttcttacatatgaggacagagagggcgattggatgcttgtgggtgatgttccctgggagatgtttattgaaacatgcaagaggctgaggatcatgaagagttctgatg

SEQ ID NO: 147822 - DNA, 249 bp, Glycine max
tcagaatgggcagacaacaatatggatgcttacacagctgctgctattaaagttggcccttgcagcctatcaggatcctgtgttggaaactttggcggtcaagttatactccccctagcacacacaattgagcatgaggagtttttggaagtcattaaattggaaggaatagctcattctcctgaagacacaataatgcccagagaaatgtttcttttgcaactctgcagtggaatggatgagaatgct

SEQ ID NO: 147823 - DNA, 249 bp, Glycine max
cagcaccaccttggtacatcttggcaatgataggattgcagatgctggggcagccgaggatgattatgctgctccttctggtggaagtggtgctggccccaagattgaggaagtggactaaatgtgtagttgctttcatccatttatctgtttaaaacttatttgatgcttttttattgaattttaacttttatgatttttgttggatgggatactaattgttttgcccgtgtgatatgaacgttgctt

SEQ ID NO: 147824 - DNA, 250 bp, Glycine max
gctgagattaagatgtataggaatgagattgcatcactacaagaagataagaaagctttggaacgactcacaaagtcaaaagaggcagcattgcttgaagcagagaagattttaagaagtgcactagagagagttttaatagttgaggaagttcaaaatgaaaattttgacttgaagagacagattgaaatctgccaggaagagaacaaaatcttagagaaaacacatcgccaaaagattttggaagttg

SEQ ID NO: 147825 - DNA, 250 bp, Glycine max
ctcaaatttctcagtctccggaactcgtttctaccttcacttcgcacatctcgaaccctctctttccggcaactaggttaaagttcatcaatggcaggtcgtggcaaaaccctaggatccagcgccgccaagaaggccacctcaaggagcagcaaagccggcctccaattccccgtcggccgtatcgcccgtttcctcaaggccggaaaatacgccgagcgcgtcggcgccggtgctcccgtttacctcg

SEQ ID NO: 147826 - DNA, 244 bp, Glycine max
cggctcgagcaacactgtgttcctgtttttgttcttcgatggcggcaacctcaacatcactggcttctcaactctacattggcctgcgccgcccctgcctcaagctcgattctttcaattctcaatctttctctctcttcgaccctaatcttcgcctatccctctctccacccaaaccctcacgcgccgtcatcgccatggccggcaccgggaagttctttgttggtggcaactggaagtgtaa

SEQ ID NO: 147827 - DNA, 247 bp, Glycine max
gccatttttgaaacaggaataaaagtagtagatcttttagctccttatcgtcgtggaggaaaaataggacttttcggtggagctggagtgggtaaaacggtactgattatggaattgatcaataacattgccaaagctcatggaggtgtatctgtatttggcggagtaggtgaacgtactcgtgagggaaatgatctttatatggaaatgaaagaatctggagtaattaatgaacaaaatattgcag

SEQ ID NO: 147828 - DNA, 247 bp, Glycine max
tctcgagcgaatcggctcgaggacaaatttatggagttcctctctgtggaacaatagtactgcaaccttttgctatcggcggatctgggtccagttacttgtatggtttctttgaccaagcctggaaagagggaatgaccaaggatgaagccgaggatttagtaaaaaaggcagtttcactggctattgctcgtgatggtgcaagtggtggggtggtgcgaacagtcataataaactcagagggagt

SEQ ID NO: 147829 - DNA, 248 bp, Glycine max
ccaagatccaggacaaggaaggtatccctcctgaccagcaggttgatttttgctggtaagcagctggaagatggtcgcactcttgctgattataacatacaaaaggaatcaacacttcacttggtcttgaggctaaggggaggtaacatgattaaagtgaagactttaactgggaaagaaattgaaattgacattgaaccaactgatacaatcgaccggatcaaggaacgtgtagaagaaaaagaggg

SEQ ID NO: 147830 - DNA, 250 bp, Glycine max
gtgagatctctctattcctggaacgtgcgtttgttcgattggaagcatggttccattggttcaatacaactcagtcagggaaacagatgggcagctactattggcacggacgggacgataggacaatgcgtgaagtaaatcctaagacactgtcctctggtttggatgattatccacgagcttcacacccaagtgaagatgaacgccacttggatcttagatgttggatgttacttgcagcagactgtat

SEQ ID NO: 147831 - DNA, 244 bp, Glycine max
tgccactcaaatacttctggaatgaatcatcaaatgcttcatcaacttatgggagttgatcctggaactaaccctgtttgccatttccttggaagcaaggccattttatgggtacccaatttatctgtggacactgcctatcagaccaacattgttgcttaattagtccatgcatcttgagcaccatgagaatgagattgtgtataaaataaattatcatgtgctgtgtgttgtgcaagtacta

SEQ ID NO: 147832 - DNA, 249 bp, Glycine max
gaaccactatgttcaagagtttaagagaaagaacaagaaggacataagtgggaaccccagagcacttagaaggttgaggactgcttgtgagagggccaagagaacattgtcatccactgcccagaccaccattgaaattgattctctctatgagggaattgatttctactccactgttactcgtgccagattcgaggaactgaacatggatctctttaggaagtgtatggagccggtggagaaatgttt

SEQ ID NO: 147833 - DNA, 245 bp, Glycine max
gtattctgcttgtttgagggagcccttgacaatttgggcaacttgagacaacaatatggattggccaagtcaaccaatgaagtattgttggtcattgaggcttacaaagcattgcgtgacagagcaccctaccctgctaatcacgttgttggccatctcagtgggagctttgctttcatagtttttgacaaatctacttctaccctctttgtggcctctgatcaatatggtaaggtacctctata

SEQ ID NO: 147834 - DNA, 248 bp, Glycine max
tgacgatggtcgaaagctgtgcctggagtgtcttgactcagctatcatggatactcatgaatgccaacctctctatgtcgaaatacaagagttttatgagggtttacatatgaagatagagcagcaagttccgatgcttttggttgagagacaagcactgaacgaggctatggagggagagaagaatggtcatcatcacttacctgaaaccagaggactttgcttgtccgaagagcaaactgttccca

SEQ ID NO: 147835 - DNA, 251 bp, Glycine max
gtctcaacaacccagttgagtaactaagatggcgcaagtgaggaacaagcaagtgcttctaaaggactatgttaccggttttcccaaagaatccgacatgaatattgtcgaaagtaccataacattgaagcttccacaaggttccaatgaagtcttgctcaaaaatttgtacttgtcttgtgatccgtatatgaggaatctcatgaacaagcccgaaggccctcccaatagtcgtgcttacactcctggct

SEQ ID NO: 147836 - DNA, 251 bp, Glycine max
cattggagttcggagttgttatgatgagggcaagcgtgttgcagaaactttgatgtttgattatcataggcagcatggaatcgaaatacgcattgcgagaatcttcaacacatatggaccacgcatgaatattgatgatgggcgtgttgtcagtaacttcattgctcaagcaattcgtggtgaacccttgactgtccaagttccaggaactcaaactcgcagtttctgctatgtctctgacatggttgatg

SEQ ID NO: 147837 - DNA, 247 bp, Glycine max
ctcgagccgaatcggctcgagaggaattgacggaggcattcgaactcggtgaagatggtacgctatgtggtttcatcagagccaggtggtgggaagggctcttcctaccgaatccgatgagcatcctaagatctaccgcatgaaactctgggcaactaacgaggtccgtgccaaatccaagttctggtattttttgagaaaattgaagaaggttaagaaaagcaatgggcaagtgctagccataaat

SEQ ID NO: 147838 - DNA, 246 bp, Glycine max
attcattctcatctttctctcttctctctccacccaaaccctaactcccgaccctgttcccctctcgtatccgtcatgaaaggaggaaagtccaagaccgaatctaagagagccgatcccaaacttgctgtgaataagaagggagccgccaccaaggctaggaaacccgccggcaaggggaaggcagcgaaagaccctaacaagccaaagaggcctccaagtgctttcttcgttttcatggaggag

SEQ ID NO: 147839 - DNA, 246 bp, Glycine max
ttactacacaggttttgatgcactcatgtcctcaacattttcaggtgagtgtgcatcttgtgtgtgcaggaaagaggccttggttgtgggagggaaactagtgaggtataggggttggtcaatgaccatattttttgttgtgggggtgttgtgtttgaggattatgtgcaaaatctcaggagaaaactatgcagggaaatttttgttcatcaaagccttgatggaaaggtttagctggattttaat

SEQ ID NO: 147840 - DNA, 246 bp, Glycine max
ctaagaatttacaacaagggaggatgttgcaattgtgctgattagccaatatgttgcaaatatgataaggtttttggttgatagctataacaagcctgttcctgcaatacttgaaatcccttctaaagaccatccttatgatccagcacatgattcagttctgtcacgagtgaagtatctcttcaataccgaatcagttgcatctgggagacgctgaattcaccgtttacagttgcagctttttgg

SEQ ID NO: 147841 - DNA, 247 bp, Glycine max
gtgtccttgaagcttcagaagctcctcgccgctagcgtcctaaagtgcggcaagggcaaggtctggcttgatccaaatgaagtcaatgaaatctccatggccaattctcgacaaaacataaggaagttggttaaggatgggtttattatcaggaagccgactaagattcactctcgctcccgtgctcgtcgaatgaaggaggccaagagaaaggggcgtcactctggttatggtaagcgtaagggta

SEQ ID NO: 147842 - DNA, 241 bp, Glycine max
gtttatcccacttgggtcagctggataaacacagtcattctgaacatttcagtgtcactggcattgtattctcttgttgttttctaccatgtgttttctaaagagctggagccacataagcctcttgccaagtttttatgcataaaggggattgtctttttctgcttttggcagggaattgtgcttgatctcctggcagcactaggaataatccgatcccgttattcctggctagctgtgg

SEQ ID NO: 147843 - DNA, 248 bp, Glycine max
tgttgctgctcatcctccgtaacctccgagctctgcaccgaagaacgaagccatggggaagacacatggaataggatctgctcgcaagctcaagtcccaccgcaggaggcaaaggtgggctgacaagtcatacaagaaatcacatcttggaaatgaatggaagaaaccttttgctggttcatcccatgccaagggaattgtccttgaaaagataggtattgaggctaagcagcccaactctgccattc

SEQ ID NO: 147844 - DNA, 237 bp, Glycine max
agcgtggccaaacaactatcagtggatcatgaaccaagcatagaaagtgaagatataagaaacagaggtggttttgtgtcaaacttcccaggggatgttccacgtgtcgatggtcagttggcggtgtcaagggcatttggtgacaaaagcctgaagatacatttgagctcagaaccatatgtaactttggagatgatagaagatgatgcagagcttcttatactagccagtgatggg

SEQ ID NO: 147845 - DNA, 241 bp, Glycine max
ctgaattgcggaggaagatgattcagcttctgttcacggtgatattttcggaggattcgatgatagcgttgctgctgttcaagacacctttgaggaagctcgtgataatgggcttggatcggttgaagcgaggtcgtggacccttgatggtgaagaccgttgcagggaccgttctcgtggtgttgttgtcgagtgtgtatagcatgttgaagattcagaagcgtgggatccaagagggtgc

SEQ ID NO: 147846 - DNA, 244 bp, Glycine max
gataaaaagaatattcagagaattccaaagacagagatgactgtcattaaggaagagcaacaaccaaaccaaatagctggccacaaagaacttggtcacaaaagtctccttcagagcgatgcactctatcagtatatacttgaaaccagtgtgtacccaagagagcatgagagcttgaaggagctacgagagttgacggaaaaacacccttggaacctgatggctacaccacctgacgaaggac

SEQ ID NO: 147847 - DNA, 233 bp, Glycine max
gtctggaatggtggtgacttttgcaccaactggactgacaactgaagtcaagtctgtggagatgcaccatgaatctcttacagaggcacatcctggtgacaatgtgggattcaatgttaagaatgttgctgttaaggacttgaagcgtggttatgttgcctcaaactcaaaggatgaccctgcaaaggaggctgctaacttcacagcccaagtcatcatcatgaaccaccctg

SEQ ID NO: 147848 - DNA, 244 bp, Glycine max
gaaggcctcaacgaccacaacgtcgtcctcaaatgcgccgaaatccataacgccatttccgaaggagcaacctctttccttttcactgagtataagtacgtgggaatcttcatggtggcttttgccattttgatattcctcttccttggctctgtggaaggattcagcacaagctaccagccctgcacctatgaccaaactaaaatgtgtaagccagctcttgccactgctgttttcagcacca

SEQ ID NO: 147849 - DNA, 244 bp, Glycine max
atttcctataactttatggctaataagtatccaatgttcttttattttccttcaggtaagtccacagctatatggagacaactatccaaggttcttcacttattggactactgatgcatatcaaacaactgggtgctacaacttactctgttcaggctttattcaaaccaacaataggatagcaataggtgctgcaatttccccaagatccgctttcaacagaagacaatttgatattggccta

SEQ ID NO: 147850 - DNA, 244 bp, Glycine max
tgttgctgctcatcctccgtaacctccgagctctgcaccgaagaacgaagccatggggaagacacatggaatgggatctgctcgcaagctcaagtcccaccgcaggaggcaaaggtgggctgacaagtcatacaagaaatcacatcttggaaatgaatggaagaaaccttttgctggttcatcccatgccaagggaattgtccttgaaaagataggtattgaggctaagcagcccaactctgcc

SEQ ID NO: 147851 - DNA, 248 bp, Glycine max
gcttcagctcccagttcagccttctttgggaccagcttgaagaaggttattgcctcaagggtccccaacagcaaggtttccggtggaagcttcaagattgttgctgtagaagagaagaaagagattgaagagacccagcagaccgacaaggacagatggaagggtcttgcctatgatatctcagacgaccaacaagacatcacaagaggaaagggtttggttgactcccttttccaagctccacagga

SEQ ID NO: 147852 - DNA, 241 bp, Glycine max
tctcgagccgattcggctcgagggaattgcagccctgatatctaactctttctatcctccagtatattactcttttatgtgttacccatttttctgcaacctttacttgggatttatcactgtattgggcatctccaccatcttgttttctctactcccagtgttccaaaatccagaattccgcaccatccgagcatctctcttctttggaatgggtttatctggcgcacacctattctgc

SEQ ID NO: 147853 - DNA, 242 bp, Glycine max
gaggcattaggattttgagcagacctagaattccagtccctttcgatgatcctgccggtgattacactgtcctcattggagattggtacaagctcaaccacacggatttgatgtctctgcttgatagcggtaggaagctgcctttccccaatggaatcctaatcaatggtcgtggttctaatggtgcatatttcaatgtggaacaaggaaagacctacaggcttaggatatcaaatgtgggg

SEQ ID NO: 147854 - DNA, 234 bp, Glycine max
gcagtgggcctccgtctcctacggcgtcttcatgtgcgtcgaatgctccggcaagcatcgtggcctcggcgtcgagatctccttcgtccgatcggacaccatggactcctggtcagacattcagatctcgactatggcagccggcggcaacgacaagctcaacgcattcgtcgcacagtactccatatacgaagatcccgacatcgctacgggtacaacaccaacgcagcttct

SEQ ID NO: 147855 - DNA, 244 bp, Glycine max
caactcttcaaaagggagaagaaaaggaaagaaaactctcaaaaaactattatagcaatggcagaacaaaaccaaaaccaaacaactgaagctggaaggcaccaagaggttggtcacaagagccttctccagagtgatgctctttaccagtatattctggagacaagtgtctacccaagagaacctgaatccatgaaagaactgagagagttgacagcaaaacacccatggaacatcatgacaa

SEQ ID NO: 147856 - DNA, 242 bp, Glycine max
gtttgttgttgtaactcgttcttcttcttttgttgttctgtgtttgtgtttgttttttctctcacctgaaaatgtcttgctgcggtggtaactgtggttgcggaagctcctgcaagtgcggcaacggctgcggaggctgcaagatgtacccagacttgagctacactgagtcaaccaccaccgagaccttggtcatgggagtggcacctgttaaggctcaatttgagggtgctgaaatgggt

SEQ ID NO: 147857 - DNA, 243 bp, Glycine max
cagacccgtgagcatgctcttcttgctttcaccctaggtgtgaagcagatgatctgttgctgtaacaagatggatgccactacccccaagtactctaaggctaggtatgatgaaatcgtgaaggaagtctcttcttacttgaagaaggttggttacaacccagacaagattccctttgttcccatctctggttttgagggtgacaacatgattgagaggtccaccaaccttgactggtacaag

SEQ ID NO: 147858 - DNA, 240 bp, Glycine max
cagacccgtgagcatgctcttcttgctttcaccctaggtgtgaagcagatgatctgttgctgtaacaagatggatgccactacccccaagtactctaaggctaggtatgatgaaatcgtgaaggaagtctcttcttacttgaagaaggttggttacaacccagacaagattccctttgttcccatctctggttttgagggtgacaacatgattgagaggtccaccaaccttgactggtac

SEQ ID NO: 147859 - DNA, 243 bp, Glycine max
attggccagctgataagattaagggagaagagtgttggacggaccttgaatactgcaagcaaaaggggttgtattatcccattgcaaagactctagcagagaaagcgggttgggactttgcgaaggagacaggttttgatgttgtcatgataaaccctggtacagcattgggccctctgcttcctccaagaatcaattcaagcatggctgtgcttgttagtgttctcaaagggggcaaagaga

SEQ ID NO: 147860 - DNA, 247 bp, Glycine max
gaaggtcttgctgaggccattgatgatggcaagattggaccaagggatgaccccaaggttcgttccaagatcttgtctgaagagttcggttgggacaaggatcttgccaagaaaatctggtgctttggccctgagacccttggacccaacatggtggttgatatgtgcaagggagtccagtatttgaatgaaatcaaggattctgtggttgctggattccagtgggcatcaaaagaaggtgctttgg

SEQ ID NO: 147861 - DNA, 250 bp, Glycine max
tttcattctgagcaggtatctcttagagttccagcatgtaactatgttgtaagcaccattgcctatgagttgaatgttctccgtgcaagagggccaaggagaatgcactgcaccatgaactccatatctgtctcagctgttcaggaagggggcaatgctccaactcctacatcttttcctcaaatcattgacgagcctttttctccctcaccagcactgaaaggaaaaggtccaattagagatctagaca

SEQ ID NO: 147862 - DNA, 255 bp, Glycine max
ctccgctccaacacaggggaaaatgagggagatccttcacgtgcagggagggcaatgcgggaaccagatcggttccaagttctgggaagtggtgtgcgacgagcacggcatagatccgacggggaagtacgtcggaaactcagatctgcaactcgagcgcgtgaacgtctactacaatgaagcctcgtgcgggcgcttcgtgccacgcgcggtgctgatggacctggagcccggaaccatggacagcgtgcggac

SEQ ID NO: 147863 - DNA, 252 bp, Glycine max
ctaaaccctactcattctccatacctcaacgaagaggttaaagagacggcaacactttgctgtccgccttgaccgagcagagcttcgtcttggccctcgattttgccctaaagtactctcagtcacaacagacaccgtcgtcgtcgtcgtcgtcatcaatggcaccgaagcagaccaaggctgagaagaagatcgcttacgatgcgaactgtgcgacctaatggaggagtacggccagatcctcgttgtgaa

SEQ ID NO: 147864 - DNA, 255 bp, Glycine max
ggtatatctataggcatagttactgccattgcagctccagcaagtctaacggttgaatttgaaggcaatggtggccatgcgggtgctgcccttatgcctaacagaaatgatgctggtctggctgcttctgaattagccctggctgtagagaggcatgtgtgggattctggaaaaattgacactgtgggaactgtgggtatcctggaactgcatcctggagcaatcaacagcatccccagcaaatctcacctagaa

SEQ ID NO: 147865 - DNA, 245 bp, Glycine max
  unsure (1)..(245): unsure at all n locations
ggtttntgttaatgggcttgtaagtgttgtggtgaatgtgatgggtgatagtttcccggagctaaaacaacaggaaacacacattcggaatataattgaagaggaggaggaaagttttgggagaaccttaattaagggaattgagaaatttgaggcagctgttcgacaagttcagggaaacatactgaacggggaggaagcatttgtcttgtgggatacatatgggattccattagatctcactc

SEQ ID NO: 147866 - DNA, 249 bp, Glycine max
cgctgtctccgacatggacccggtgaaattgaattctccgtgaagatgcggagtaccaacggctagacggtaagaccccgtgcaccttaactatagcttcgcagtgacaaccttgatcgaatgtgtaggataggtgggaggtgatgacacagaacgaccaatcctgaaagaccactctttcgtctaaggatgcctaaccgccgcaccgaaaattcgggggggggcgggacactgcgaggtgggtagttt

SEQ ID NO: 147867 - DNA, 251 bp, Glycine max
aggggttcctagacaaagtcaaggacaagatccatggtgagggcggcgccgccgagggcgagaagaagaagaaggagaagaagaagaaggagcatggccatgagcatggccatgacagcagcagcagcagtgacagtgattaaactgctgcatcacctatatatttaaaaggtttatgggaccatagtagcgagggctgtgccttaatttctctctctctctctctccctatctctctctctctctctttt

SEQ ID NO: 147868 - DNA, 252 bp, Glycine max
atttgatttttcaacgattcttcttctacgcgtcttcttcttcacactctcactcccaagtcccaatggcctcttctcctccctcttcctccgctattaaggatgccaaggtgcttatggttggcgctggcggaattggctgcgagcttctcaagaccctcgccctctccggtttccctgacattcacatcattgacatggacaccatagaagtcagtaacctgaacaggcaatttttatttcgacaattcc

SEQ ID NO: 147869 - DNA, 254 bp, Glycine max
catctctacattcccaagggctcctactacgcaataactccaagcccgatctcaaattaatatttcatttactcatcttaatcaatattaaataagaaaagatgggagagatgtcaaacttccaattgggtgtgattggtgcactatttctctctgtggcttcttctgtctccattgtcatctgcaacaaagccttgatgagcaatcttggcttcccttttgccacaacgcttactagttggcatttgatggtc

SEQ ID NO: 147870 - DNA, 141 bp, Glycine max
cttctcttcactctgcccgctgcatcaatggcttcagagaagaaactttcgaacccaatgagggagataaaagtgcagaagctcgtcctcaatatctctgttggcgagagtggagatcgtctcaccagagcctccaaggtg

SEQ ID NO: 147871 - DNA, 245 bp, Glycine max
gattttgcattatgggagccacctcatggtccatacaaaacattcaattatccttggagaagctatgttaaagtcagtggagctttgaggcattgtgctttcatggtcatggcaatgcatggatgcatactttcagaaatacaggcacccccagaaaagaggctggttttcagcattgaacttcagaaggttggcactgaaggagctaaagtattacgccaacttggaagcaaagtggaaaatat

SEQ ID NO: 147872 - DNA, 242 bp, Glycine max
ccttgccttgccatggcctcaaactccatggctggcttgatcaccggttcgaattctcacttctcgcgtgactccgatgagcatcagactcctcctacccgacaggcttcatcgaaaactacttgtcgagtttgtggcgatgagattggatacaaggaaaatggggagctgtttgtggcttgtcatgtgtgtggatttcctgtttgccgaccgtgttatgagtatgagaggagtgaagggaa

SEQ ID NO: 147873 - DNA, 245 bp, Glycine max
aatggattcacttgcaaagaagcatccaaggtaaatgcctcagatttcttctcaaacatactagccaaaccaggagccaccaacaacacatttggctccttggtgactggagccaacgttcagaaagtcccaggactcaacacacttggtgtctctctgtcaagaattgactatgccccaggtggcatcaacccccctcacacccacccacgtgccacagagcttgtgtttgtccttgaaggcca

SEQ ID NO: 147874 - DNA, 248 bp, Glycine max
aggacattcattcatctatggctacccttattgctcccagcaaccactctccccaagaagatgctgaagctctcagaaaggcttttgaaggatggggaactgatgagaacactgtcatagtaattttgggtcatagaactgtgtatcagaggcagcaaatcagaagagtttatgaggaaatttaccaggaggatcttgtgaagcgcctagagtctgagatcaaaggagactttgagaaagccgtgtac

SEQ ID NO: 147875 - DNA, 250 bp, Glycine max
gagagagagagagatggcagcttctggttcgtggaagagtgggagtggttcttcgatgggtctggagaggatgagcgtggagcagctgaaggcggtgaaagagcaagccgatctggaagttaatcttctccaagacagcctctccaacattcgcaccgccaccacccgcctcgagatcgcctcctccgccctcaacgatctctccctccgcccccagggcaaccacatcctcgtcaccctcaccgcctcc

SEQ ID NO: 147876 - DNA, 248 bp, Glycine max
gtgaaattggagagaaaaaaaaaaatacactcaaacatggagggctatgagatcctcaaagatattggttctggaaattttgctgtggccaagcttgttagagacaactgcaccaatgagctttttgctgtcaagtttattgagagaggccagaagattgacgagcatgtccagagggaaatcatgaaccacagatcattgaaacaccccaatattattagattcaaagaggttctgttgacaccaac

SEQ ID NO: 147877 - DNA, 147 bp, Glycine max
gccgatcagaaacatcgccgtcggaaggcctgaagaggcgactcaccccgacacgttgaaggcggctttggctgagttcatctcaaccttcatcttcgtgttcgccggctcaggctccggcatcgcctacaacaagctcaccgacaa

SEQ ID NO: 147878 - DNA, 124 bp, Glycine max
gtcagctgccgtggaggttatgctacttggtttagcagcaaaaggagcgacccgaacctgctcactggtgctcttgttggtggacctgatgcatatgatgactttgctgatgaaagagataact

SEQ ID NO: 147879 - DNA, 177 bp, Glycine max
gttgggagtgacgatagtgaaccggggtccagacacagaacttctggttgctaatcctgtggagctgagtggaaaggggagaccccgtgtattctatgatgttacgttgactttaaaagcgttgggagtaggcattttctcggctgaagttgttagacattcaacacaagaacgtca

SEQ ID NO: 147880 - DNA, 124 bp, Glycine max
cgtccacctgcgagactaacctttggctttcgtctcggtaggtgtattcttatacattttcccaaaagaacattcattcatttctttcttccccgtcgaccacgacgactgaaacgacgcaaaa

SEQ ID NO: 147881 - DNA, 246 bp, Glycine max
atcaatgattgcaatgagtatgatgttgaagggggtgacgatgagccaaactttgacgtcgaagatcgcaaacctgagaatcttcatgcaccgaatcttgggatggacagaatgatgggaagactgccttctttcccaatcaagggagaggctgttacaaatttggatttcattcggaagaggaagatctctggtgacttcaacatgataatggatcagaaaatttacacatgcgaacaacctcag

SEQ ID NO: 147882 - DNA, 248 bp, Glycine max
ggtctgttaaatggctggaagatatcaatatcattgaagaagaatgtcaggagttcttcatgcaaaaggactacaaaatgtttcccaccatcagtgaaattgggttaaaattgattggtctacccggagaccccaaatggatttcccagttcagtgtgttatatgttctcttgaagacgtgagcacaataaagcctgggaaggtaaaaattagtggatatgcagcatcaggaggtggcagaggcattg

SEQ ID NO: 147883 - DNA, 245 bp, Glycine max
caatggaggaagaagccaaggtggttttgttgggtgcacggttcagtatgtttgagatgagagttaagatagctttggcagagaaaggaatcaaatatgagtacatggaacaagatctcaccaacaagagtactttgcttcaagaaatgaacccaattcacaagaagattccagttctcatacatcatggaagacctatctgtgagtccctcataattgttgagtatattgataatggttgggac

SEQ ID NO: 147884 - DNA, 182 bp, Glycine max
agctcatttacacacctctccaacctatcactttcagctttatttgaatccctctctctcctttccaaatggccagcgttgaggtcgcacatcaaacaccaacaacagttccagaaaatgaaacaacagaggtaatcaagacccaggaaacaaccccggaaccagtaccagccactgaggcc

SEQ ID NO: 147885 - DNA, 248 bp, Glycine max
cacttgccaaaggaaaaggctaaagagaagaaaaggcaaagcaagggaccaaccaaaacacacacagagaaacatgtcttccccaagcaagcgccgagagatggacttgatgaaactgatgatgagtgattacaaggtggagatgattaatgatggaatgcaagaattttatgtgcaatttcatggacccaatgacagtccttatcatggtggtgtgtggaaagtaagagttgagttaccggatgctt

SEQ ID NO: 147886 - DNA, 247 bp, Glycine max
agccatgctccctggaaaaactgtctatgatgtgatcaaacaatacagagaattggaagaagatgtttgtgaaatagcagcagggaggattccagttcctggatatcctacctcttctttaacattggagatggttgacaaccaatgttatgatgcatgcagaaagaagcctgcaactctcaggagttctgatcaggagaggaagaaaggggttccttggacagaagaggaacatagacgttttctt

SEQ ID NO: 147887 - DNA, 239 bp, Glycine max
caagactttgcctaaggagaagactcttctgcctgcagatcctgctaagcctccagccaaggcacaggtggtaggttggccacctgtgcggtccttccggaagaacatgttagctgtacaaaagagcgtcggagaagagaacgagaagaacagcagcagccctaatgcaagctttgtcaaagttagcatggatggagcaccttaccaccgcaaagtggacttgaagatgtacaagagtt

SEQ ID NO: 147888 - DNA, 238 bp, Glycine max
gtgatttcagtgagtgatcggtgttcacttgatctcatcataatcgtcagcgtcaattgaagaagatgccgatcagaaacatcgccgtcggaaggcctgaagaggcgactcaccccgacacgttgaaggcggctttggctgagttcatctcaaccttcatcttcgtgttcgccggctcaggctccggcatcgcctacaacaagctcaccgacaacggcgctgccacccctgccggcct

SEQ ID NO: 147889 - DNA, 241 bp, Glycine max
tcttcctcttcctcagtagtgcgattttcgattctcttctctgcaactatgcctaaccctaaggtcttcttcgacatgactatcggcggtcaacctgccggccgcatcgtgatggagctctacgccgacgtgactccgagcaccgccgagaacttccgcgcgctctgcaccggcgagaagggcgccgggcggagcggcaagcccctccactacaaaggctcgtccttccaccgcgtgatcc

SEQ ID NO: 147890 - DNA, 235 bp, Glycine max
cagcttaaatattggttgaaccagaggcaacaatgggtttgacggtgtcacggctattgagattgttttatgcaaggaaagaaatgaggattctgatggtgggtcttgatgctgctgggaaaacaacaatactctacaaactgaaacttggagaaatcgtcactacaatacccacaataggcttcaatgtggagactgttgagtacaaaaatgtcagcttcaccgtctgggatgt

SEQ ID NO: 147891 - DNA, 243 bp, Glycine max
gagccatgtctagcaccgttggccagaccatcaagtgcaaagctgcgattgcatgggaggctgggaagccgctggtgattgaagaagtggaggttgcgccaccgcaagccggtgaagtccgtttgaagatcctctacacctctctttgccacactgatgtttacttctgggatgcgaagggccagactccattgtttcctcgcatttttggccatgaagcttcggggattgtggagagcgtag

SEQ ID NO: 147892 - DNA, 241 bp, Glycine max
cagaagcccatttggatgagaaagcctgaggagatcacaaaggaggagtattctgctttctacaagagtctcaccaatgactgggaagagcatttggctgtcaagcacttctcagttgagggacagttggagtttaaggctatcctctttgttcctaagagggcaccttttgacctctttgacacaaggaagaagcctaacaatattaagctttatgtccgccgtgtctttatcatggaca

SEQ ID NO: 147893 - DNA, 236 bp, Glycine max
attgaagagggaattgaaggaattgacaatgagaaatcatcattaatgtctcaatcgaagtttgagaagaagtttgggcaatcatctgttttcatagcttcaacactcttggaagatgggggtgttccaaaagcagcaagttccgcaacactcttgaaagaggccatccatgtaattagttgtggttatgaagataagacagaatgggggaaagaggttgggtggatatatggctc

SEQ ID NO: 147894 - DNA, 239 bp, Glycine max
gtagatgtgcttgatgatggttataaatggaggaagtatggtcagaaagttgtcaagaatagccttcacccaagaagctactaccgctgtacccataacaactgtagggtgaagaaaagagttgaacgactctctgaagattgtcgtatggtaataactacctatgaaggcagacacaaccactctccttgtgatgactcaaattcatcggaacatgaatgtttcacctctttttgaac

SEQ ID NO: 147895 - DNA, 244 bp, Glycine max
aaccaagctagtccgaggaagtcctctattcagaaccagatatggagacaaaacccaccgagatcagcagcggcaagatgttcggaggctacaacaagaggttcagacatttcagccctaccctcggctgctccatgaacttccacatctacttccctccatctccttctccctctcacaaattcccagtcttgtactttctctctggcctcacatgcacggacgagaacttcattttcaagtc

SEQ ID NO: 147896 - DNA, 241 bp, Glycine max
cacggcacgacttgttcaccgaccagagctgattttcgcggcggttaccactcatcggagattctatccaaaatcgttttccgatgacgataaaaactgttaaagtcagtaacgtttccttgggagcaactgaacaagacattaaggagttcttttcattttctggtgatattgaatatgttgaactacagagccatgatgaacgatctcaaattgcttttattaccttcaaggattcaca

SEQ ID NO: 147897 - DNA, 242 bp, Glycine max
gtccatcttcttcttctcttcctcttcgcacaaagcagcaagcatccttgagatggaaactttcctcttcacctcagaatctgtaaacgaaggccatcccgacaagctgtgtgaccaggtttcagatgccatcctagatgcatgcttggagcaagacccagaaagcaaggttgcttgcgagacctgtacaaaaactaacatggttatggtctttggtgagattacaaccaaggccagcgtga

SEQ ID NO: 147898 - DNA, 243 bp, Glycine max
atcgcctcgaatccacacagttctactcttcgctctaaaccctctctctctctctctctcgatctatcatggctttgcccaatcagcaaaccgtggattaccctagtttcaaactcgtcatcgtcggtgacggcggtacaggaaagacaacgttcgtgaaaaggcatcttaccggtgcattcgagaaaaaatacgaaccgaccattggagtggaggttcacccattggatttcttcacaaact

SEQ ID NO: 147899 - DNA, 255 bp, Glycine max
gaaggtcttgctgaggccattgatgatggcaagattggaccaagggatgaccccaaggttcgttccaagatcttgtctgaagagttcggttgggacaaggatcttgccaagaaaatctggtgctttggccctgagacccttggacccaacatggtggttgatatgtgcaagggagtccagtatttgaatgaaatcaaggattctgtggttgctggattccagtgggcatcaaaagaaggtgctttggctgaagaa

SEQ ID NO: 147900 - DNA, 261 bp, Glycine max
tttcattctaagcaggtatctcttagagttccagcatgtaactatgttgtaagcaccattgcctatgagttgaatgttctccgtgcaagagggccaaggagaatgcactgcaccatgaactccatatctgtctcagctgttcaggaagggggcaatgctccaactcctacatcttttcctcaaatcattgacgagcctttttctccctcaccagcactgaaaggaaaaggtccaattagagatctagacaatgcaagcctc

SEQ ID NO: 147901 - DNA, 253 bp, Glycine max
gttgattcctgagtatttgggctttgtcaagggtattgttgattctgaagatctcccactcaacatttcaagagaaatgttgcaacagaacaagatcttgaaggtcatccgtaagaacttggtcaagaagtgccttgagctcttctttgaaattgcagagaacaaggaggattacaacaagttctatgaggcttgctctaagaacttaaagcttggtatccatgaggattcccagaacaagggaaagattgct

SEQ ID NO: 147902 - DNA, 261 bp, Glycine max
ctccgctccaacacaggggaaaatgagggagatccttcacgtgcagggagggcaatgcgggaaccagatcggttccaagttctgggaagtggtgtgcgacgagcacggcatagatccgacggggaagtacgtcggaaactcagatctgcaactcgagcgcgtgaacgtctactacaatgaagcctcgtgcgggcgcttcgtgccacgcgcggtgctgatggacctggagcccggaaccatggacagcgtgcggaccgggcc

SEQ ID NO: 147903 - DNA, 261 bp, Glycine max
ctaaaccctactcattctccatacctcaacgaagaggttaaagagacggcaacactttgctgtccgccttgaccgagcagagcttcgtcttggccctcgattttgccctaaagtactctcagtcacaacagacaccgtcgtcgtcgtcgtcgtcatcaatggcaccgaagcagaccaaggctgagaagaagatcgcttacgatgcgaactgtgcgacctaatggaggagtacggccagatcctcgttgtgaactccgataa

SEQ ID NO: 147904 - DNA, 261 bp, Glycine max
ggtatatctataggcatagttactgccattgcagctccagcaagtctaacggttgaatttgaaggcaatggtggccatgcgggtgctgcccttatgcctaacagaaatgatgctggtctggctgcttctgaattagccctggctgtagagaggcatgtgttggattctggctcaattgatactgttggcactgtcggtatcctggaactgcatcctggagcaatcaacagcatccccagcaaatctcacctagaaattgac

SEQ ID NO: 147905 - DNA, 132 bp, Glycine max
tgcaaatggatggatacaagggatgtccttatcgtaaatcctactggttctaatcaagttgatcctgactatttggaatctgagcaaagacttgaaaaatggtactctttgaatccatgtaaggtaatcatt

SEQ ID NO: 147906 - DNA, 258 bp, Glycine max
cccaacacaaatcttagccgccattgatttttcctcttccatttctcttactttctcagcctttttcgattacccatttggttatttcgccctaatggctcttgctccatccaaagtttccaccttttctggtttttctcccaaacccagtgttgggggtgctcagaaaaacccaacttgctctgtttctctgagctttttgaatgagaaacttggaagcagaaaccttagggtttgtgcctcaacggtgcctctcac

SEQ ID NO: 147907 - DNA, 257 bp, Glycine max
gacctttctaactaatctacagtccatcctgtaataatctccgtttcaacaccaaacaccaagcgaaacctgaattaagcctcttcttcttcatcgaatcgaaacaacctcgtccgtgctaaggaaactcaacgacagagactgcaacaatgtacgtagatcacgcgttctcgatttcggacgaggatatcatgatgggaacctcgtacaccgtcaacaacaaaccccccatcaaggagattgccctcgccgtttcc

SEQ ID NO: 147908 - DNA, 258 bp, Glycine max
cagggttcctccgtcggtggtgatttcggggagtacaagcctcttcattccgctgttgacgccaagcttcaggccatttgcgaaggcctggctgagctgcagaaacaggggaagaccgagaagcctccgaggaagtcgcgttccaaactcgcggagaaggttgtttccgacaaggagaacaacaactcttgtaaggtggaagctgcgtcctggtcgtcggaaggttcttcgccgctttcggatctgacgtttgctgac

SEQ ID NO: 147909 - DNA, 257 bp, Glycine max
atatgttgattctatagaaggaatcacgcatgcccttcgatctagtgaataccatgatcgcaatgcccagtattactggattcaagaggacatgggtcttagaaaagttcttatctacgaatttagccggttgaatatggtctacactcttctgagcaaacgaaagcttttgtggtttgtacaaaatgggaaagttgatggatgggatgatgcacgatttcctacagtgcaaggaattgtgcgtagaggtttgaaaa

SEQ ID NO: 147910 - DNA, 257 bp, Glycine max
atggttctctctatggtgatctcaagcgtatttgtgaaaccgaccttggtttaatttctcaatgttgtttgacaaagcatgtctttaagatcacaaagcagtatttggctaatgtgtctctgaaaatcaatgtcaagatgggaggtagaaacaccgttcttgttgatgctgtaagctgtagaataccattggttagtgacataccaactataatatttggagcagatgttacccatcctgaaaatggagaagactcc

SEQ ID NO: 147911 - DNA, 257 bp, Glycine max
atcactctcaactttactcctcttcaatcagttgcatattctttgctattccaatggccactgttgaggttgtgtcagccaaggttgccctcccagaggacacaaaagaggcatcattgaaggttgacgaggagaagaacacagaagaagttgttgagactccaacaccagaaactgtggtcactgagcaaaccatggcggaaagtactgaggccccacgacctgcagcttcagaagacaagccctcggttgaagtt

SEQ ID NO: 147912 - DNA, 255 bp, Glycine max
gcactgcaacttagccacttgaacccccttcgtaagcctcttcacatcttcacttcttcacttcttcttccgcactaatacgaaaccagagggaattcacaaaagaggttaccatgtcggacgatgagagagaggagaaggagttggatctcacttctccggaagttgtcaccaagtacaagagcgccgcggagattgttaacagggctttgcagttagttatttcagaatgtaaaccgaaggcaaagattgttg

SEQ ID NO: 147913 - DNA, 255 bp, Glycine max
aattgggacttgatcccagaaaggtcaatgtcaatggtggtgccattgctcttggacatcctttgggtgttacaggtgcacgctgtgttgcaactttgttgaatgagatgaaacgtcgtggcaaggattgtcgctatggtgtaatctcaatgtgcatagggtcaggtatgggagctgctgctgtatttgaaaggggagacttttgaagatttgtgcaagtttagaagagttcatacaaataacgatcttttgtca

SEQ ID NO: 147914 - DNA, 256 bp, Glycine max
ggttccttagggagctggatctgcaagaaaatgaagttgaggatcacaaaggtcaatggctaagttgctttcctgatgactgcacatcagttgtttctcttaattttggttgccttaaaggagaggttagtttgggagcactagagagatttgtggccagatctaagaagcttaagagtttaaagctgcatcgttcggtgcccgttgatgcactgcaaaggataatgatgcgagcacctcaactatcggatttggg

SEQ ID NO: 147915 - DNA, 254 bp, Glycine max
agccctcattgaagctgtggaaaggtctgacagaattcatgttatcgatttcgatattgggtttggagtgcagtggtcatcttttatgcaagagattgccttgagaagtagtggtgcaccttcactcaaagtcactgccattgtgtcaccctccacttgtgatgaggttgagctcaatttcactagagagaatttgattcaatacgcgaaagacatcaatgtgtcatttgaattcaatgttttgagcattgaat

SEQ ID NO: 147916 - DNA, 256 bp, Glycine max
cgaatacgatgaatgcaagtccgttagttgccaagaagcatacttcaaacggcgagattaggcaggcgcggcttcaagaatttcttagatcaagtgacacagtaagactaatgttaaaagcttcaactgtgaagctatcttcgtatcgagcatggccaaatatgcatgacagtcggtttgcgctttacaagttgccattgcgggttcccaaagatgaccaagaatatgctggtttatggggaggaacttttggttg

SEQ ID NO: 147917 - DNA, 254 bp, Glycine max
ctttgggtggcttatacacatatgggtggagcaaatatggccaattaggacatggaaattttgaggattctcttgtgcctcaaaagcttcaagccttgagtgataagttaatcagtcaggtatcgggtggttggaggcatagtatggcactgacgtctactggactactatatggatggggttggaataagtttggacaggttggagttggtgacaatgttgatcgttgctctcctgtgcaagtgaagttcccc

SEQ ID NO: 147918 - DNA, 256 bp, Glycine max
tagagaaagaaaaaagtccttgtgagtctttgattctagcatccttcctttgtgcaagtttaaagaatggagaaccaacaagaaatgatgaaagtagaaaaggtatgtgaaatctatgaaaaaatctccaaactagaagacctcaacccttcaaaccatgtcaacaacctcttcacccaacttgtcacaatttgcaccaccccatgccaaatagatgttaccaaactaagccaacaagttagagaaaccatagcca

SEQ ID NO: 147919 - DNA, 256 bp, Glycine max; identical to SEQ ID NO: 138727

SEQ ID NO: 147920 - DNA, 254 bp, Glycine max
gcctattccaaagccagttcccgtgtataagcctataccaaagccagttcccatttttaagccaataccgaaaccagttcccatttataagcgaattcccatttttaagccagtaccaataccaattcctttttttaagcctataccaaggcgagtggcaatgcctagaccgaagccagtgtgtaagcgtattccaaagcctgtaccagtgtctaagcctattcctatgccagttcctgtggatatgcctattg

SEQ ID NO: 147921 - DNA, 256 bp, Glycine max
ggcggttgagtctcttgtgtttgctcccttctttgctacacatggtggcctactcttcaagatctaaaggatttgatagaaaaagagtatcgtccatcatttttctacaacgacagaacaaggaaaagccgtccctttaccaatgccttctcgtttttgtgttagtctttaactcatctgtcatgtcaattccattgtttttgaaaccttttcctcccccaccttgaaacaaagtatattttgtctcatgtagttt

SEQ ID NO: 147922 - DNA, 255 bp, Glycine max
tcctccgtcgctgcattgagccaaatcagtgagaatgagaagaatggattcacaagcctcgttgctcgttacctcagtggcgaagacagcatgttgagtggagtaagatcgagacgcctacggatgaagtagtggtgccttatgactctttggcaccgactcctgacggttctttggaggtgaagaacctcttggacaagcttgtggtgttgaagctcaatggaggcttggggacaactatgggttgtactggcc

SEQ ID NO: 147923 - DNA, 245 bp, Glycine max
gggatattgccccagccaagaatattgatggctatggcaagggatgggttgctgccaccatttttttctgacataaacaagtgcagccaagttcctgttaagagcacaatagttactggccttgttgcttcactcttagcattttctatggaagtctctgaactggctgggatggtcagtgtgcggtacacttcttgcattcaccatggtggcaatatctgtgctaatactaagatatatcccac

SEQ ID NO: 147924 - DNA, 251 bp, Glycine max
aacgtcgcggtcatggcacgccaatatgtccgcagtgtgatttcctccgtgcagagggttgccatggctatatctccatctggtataaacccatcaattggagctaaactttctcctggttctccagaggctgttacactagctcactggatctgccaaagttatagttactatttagggtccgacttactgagatcagattctcttgttggtgacatgatgctgaaacaactgtggcatcaccaggatgc

SEQ ID NO: 147925 - DNA, 254 bp, Glycine max
ctcacacctcatcgtttctctctctagatctctgtttcttctttttctccaaccttcgtttcaccaccacacttacattactacatcgaaatggctccaccaattgagaccccaaacaaggtttccagctatcaacagtccccaaaccctcgtcttaacgagaggattctttcatccatttccaggagacacgttgctgcacacccgtggcacgatcttgagataggacccgaagctccaaagatcttcaactg

SEQ ID NO: 147926 - DNA, 241 bp, Glycine max
gtttcccagttccacagcgttccgcgaagaaaaccagagaccaagaaagagtgcttacctgaaattgaattcaatggcgacgagaaatcgaacaatagaatttagaaaacacagagacgccgtgaagagcgtgcgcgctcctctatcctcctcggcatctgcctccaccggccccgtcatcgaaatggttaccacttcgcttcttcctcccaatcgatcctcctcctatgctcttctaagc

SEQ ID NO: 147927 - DNA, 252 bp, Glycine max
agccgtacaacaatcttctcccccgaaggacgtctttaccaagtggagtatgcaatggaggccattgggaatgctggaactgcaatagggatcttgtcaaaagatggggtagttctggttggtgaaaagaaggtcacatccaagctgctgcaaacctcaacctccactgagaaaatgtacaagattgatgatcatgttgcatgtgctgtggctggaattatgtctgatgccaacatcttaatcaatactgct

SEQ ID NO: 147928 - DNA, 254 bp, Glycine max
gcttgatcaagtgaatcaggttataggaattgatctgttatctcagtctttgttaccagccattgttgagcttgctgaggataggcattggagggtccggcttgcaattatagaatatatacccttattggcaagtcaattgggggttagttttttcgatgacaagcttggtgctctttgcatgcagtggttacaggataaggttcattcaattcgtgaagcagctgctaacaacttgaaacgccttgctgaag

SEQ ID NO: 147929 - DNA, 254 bp, Glycine max
cacaaggcagaaagcaagctcatcctagagttttaaaaatggcagcagcctcctccatggctctctcttccccatccttggctggcaaggccgtgaagctgggcccatcagcccccgaagtcgggagggtcagcatgaggaagaccgtcaccaagcaggcctcctccggaagcccatggtacggcccagaccgcgtcaagtacttgggcccattctctggcgagcccccgtcctacctcactggcgagttccca

SEQ ID NO: 147930 - DNA, 251 bp, Glycine max
ctttgtcgagtggattcccaacaatgtcaagtcgagtgtgtgtgacattgctcctagagggctctccatggcgtccacattcattggaaactcgacctcgattcaggagatgttcaggagggtgagcgagcagttcacggccatgtttaggaggaaggctttcttgcattggtacactggtgaaggcatggacgagatggagttcacggaggcagagagcaacatgaatgaccttgtgtctgagtaccagc

SEQ ID NO: 147931 - DNA, 249 bp, Glycine max
tctctctcccttccttccatcccaaccacaaggttgctgagaagacataaaaaatggtgaagatttgctgcattggagctggctatgttggtggcccaaccatggctgtaattgccttgaagtgtcctgagatcgaggtggtcgtggtggacattgctgcaccgcgaatcaacgcgtggaacagcgaccacctcccgatatatgagcctggccttgatgatgtggtgaagcagtgcagggggaagaatc

SEQ ID NO: 147932 - DNA, 253 bp, Glycine max
ggaaaacaaagtatagagtgaaagaatgggtgagaaaagcaagattttgatcataggaggcaccggctacatcggcaaacatatagtggaagcaagcgcaaaggctggaaatcccacttttgctttggtgagggaatccacactctctgacccctccaaggcaagcatcatccacaattttgaggctttgggcgttaatttggtccggcggggatctgtacgatcatgagaagttggtgaaagctatcaagca

SEQ ID NO: 147933 - DNA, 254 bp, Glycine max
gcgttaaacaaaacgtaacggagggtcgacggtttttggtgcaagccaacgtgcgtgaactcgccgccgtgctctccgccgggaataacaagcgtccctggctgacgtggagccaccaacctgtcccccacccgaggctccggtcggaaaccgggtcgggttgtccgctgttaagtgattacggctgcaacgttccggcgccggaagttccaccggcgagttcattcatgtcggagtggtttgatattcggggc

SEQ ID NO: 147934 - DNA, 249 bp, Glycine max
aagatagtgacaggtgaactgatttcgttatcagaacaagaattggtggattgtgatacaggatataacgaaggatgcaatggaggacttatggactatgcatttgagttcattatcaacaatggcggcattgattctgaagaggattacccttaccgtggtgttgatggtagatgtgacacatataggaaaaatgctaaggttgtttctattgatgactacgaagatgttcctgcctatgatgagtta

SEQ ID NO: 147935 - DNA, 251 bp, Glycine max
cgaggagaagtccaagttatacaaagaagtctccttgcagcacttgttcttaatgaacaacctgcattatatggctgaaaaggttaaggggtctgaactcaggctcatacatggagatgaatggattcgaaagtgcaattggaagtttcagcagcatgcaatgaaatatgagagagctagttggagtcccattctcaacttgcttaaggatgagggaattcatgttccgggtacaaattcggtctcaaaaa

SEQ ID NO: 147936 - DNA, 251 bp, Glycine max
gttccttacaggaatgcagactggtgaactgtagaaacccatcagctgttttggatgtacgcgttgagattttggcaactgtaggcgaagatggagttactcgttggcttgaatagagtgattgtaggtctgtaatactcaaaagggaggagcttgtaaattactccagtcccgtgacttaatgatctttcaaatgtctctttgtgaaagattggaatgtattcatagtgtagagcataattttttatttt

SEQ ID NO: 147937 - DNA, 251 bp, Glycine max
  unsure (1)..(251): unsure at all n locations
caacagcaaggccttgagggaagctatgtgctttatgatggatcccaatcttggtaaacatgtttgctatgtccagtttccgcagaggtttgacgagattgataggaatgatcgatatgccaatcgtaatacagttttctttgatataaacttgagaggtttggatggcattcaaggtcctgtttatgtgnggtactggatgtgtcttcaacaggacagctttatatggttatgaacctcctcttaaaccc

SEQ ID NO: 147938 - DNA, 251 bp, Glycine max
gaaattgtttggtgaggttgttgctgttactggtgatggaactaatgatgctcctgcactgtgcgaggcagacattggacttgcaatgggcatagcaggaactgaggttgccaaagaaaatgccgatgtcattataatggatgataacttcacgactattgtcaatgttgtcaaatggggacgtgcagtatacataaacattcaaaaatttgtgcagtttcaattgacagttaatgttgttgctctggtta

SEQ ID NO: 147939 - DNA, 251 bp, Glycine max
ataaaacctcactctcactcgcagatcttcactcacccaaaaccaacctactccaaggaagtcccctaatcagaaccagagatggacaccaaacccaccgagatcagcagcggcaagatgttcggaggttacaacaagagattcaagcatttcagccttaccctgggatgctccatgaacttccacatctacttccctccatctccttctccctctcacaaattccctgtgctgtactttctctctggcct

SEQ ID NO: 147940 - DNA, 251 bp, Glycine max
ttcatgctttcctcctatgcaccagttatctctgctgagaaggcctaccatgaacagctctcagtggcagaaattaccaacagtgcttttgagccatcgtccatgatggccaagtgtgatcctcgtcacggaaagtacatggcgtgttgcctgatgtaccgtggtgatgttgtgcccaaagatgtaaacgctgctgttgccaccatcaagaccaagaggaccattcagtttgtggattggtgccctactgg

SEQ ID NO: 147941 - DNA, 252 bp, Glycine max
ctcgagccgcgcgcagtgctgatggacctggagcccggaaccatggacagcgtgcggactgcgccgtacgggcagatattccggcccgacaacttcgtgttcgggcagtccggcgcgggcaacaactgggccaaggggcactacacggagggcgccgagctcatcgactccgtccttgacgtcgtgcgcaaggaggccgagaactgcgactgcctccaggggttccaggtctgccactcgctcggcggagga

SEQ ID NO: 147942 - DNA, 250 bp, Glycine max
gaaattgagtttccgagataaccagttttctctttgattcatcaatggcaactgcgaggaccgtgaaggatgtttcgcctcacgatttcgtgaaggcttatgcttcccacctcaagcgttccggcaagatggagcttcctgagtggaccgatattgtaaaaacagcaaaatttaaggagttggctccatatgatcctgactggtactacattagggctgcctcaatggcaagaaagatctatttgagagg

SEQ ID NO: 147943 - DNA, 246 bp, Glycine max
agagaagagaagagctgaggctgctaggattagagagaaatacccagaccgtatcccggtgattgtggagaaggcagaaagaagtgatatcccaagtattgacaagaagaagtaccttgtccctgctgatctgacagttggacagtttgtctatgttatccgcaaaaggattaaattaagtgcagaaaaggcaatctttatctttgtggacaacgtccttccacctacaggagcaattatgtcttc

SEQ ID NO: 147944 - DNA, 246 bp, Glycine max
cactcttggtcgtaaattgggacagggccaatttggcaccacttatttatgcaccgagaattctacctccattgaatatgcctgcaaatccatctccaaaaggaagttgatttccaaggaggacgtcgaggacgttaggagggaaattcagataatgcatcatttagctggtcacaagaacattgtcaccatcaagggtgcttatgaggatcctctctatgttcatattgtcatggagctttgttc

SEQ ID NO: 147945 - DNA, 249 bp, Glycine max
gtggaatgttcaccaaacaagagattgatgaaattgtggagattggctatctgaatggcctctttgtgctggcacgctccattggtctgattgggcacacctttgaccaaaagcgattgaagcaaccactttaccgtcacccatgggaggatgttctctacacaaagtgagaaagttttgtgcgactgtaagaactttggcatgcttcaaattagcaatcttttgggaaatcatgcacatctgaaatat

SEQ ID NO: 147946 - DNA, 116 bp, Glycine max
aaatggcctatttcattcccaatccgtttcctccagtctctgggggatttgattgatgagaattgcttatggtgggtgtatttccttttccaatgaaatgctacaacatttactgc

SEQ ID NO: 147947 - DNA, 248 bp, Glycine max
cggcaacgaaaggctcttggtgtacgagtatatgcctcaagggacattaacgcaacacctgtttgattggggtgaaaatggctgtgctcctttgacttggaaacaaagagtagcaatagctttggatgtagctcggggagtggaatacttgcacagcttggctcagcaaagcttcattcacagggacttaaagccctcaaacatattgttgggtgatgacatgagagccaaggttgcagattttggtt

SEQ ID NO: 147948 - DNA, 250 bp, Glycine max
ctccagtgtctgcgtctcttcctcctctctctgcatcgctgcgttttccgaatcgaaaggtgaggttagtaagtaacaatggtggagaaggccaagggtaggaaggaggaggttgtcactcgagagtacaccatcaacctccacaaacgcttgcatggctgcacatttaagaagaaggctcctaaagcaattaaggagataaggaagtttgctcagacagcgatggggacgaatgatgtaagagtggatg

SEQ ID NO: 147949 - DNA, 248 bp, Glycine max
gagctctgcgagatcttcattcgccgattttaaaagatgagtaagcttcagagtgatgctttgcgtgaagccatttcaggaatcatggccgattccaaggagaagaatcgcaaatttgtggagaccatcgaactccaaatcgggttgaaaaactacgatccacagaaggacaagcgtttcagtggctctgtcaagctgccccacatccctcgccccaagatgaaaatttgcatgcttggtgatgctca

SEQ ID NO: 147950 - DNA, 248 bp, Glycine max
gttggaggtgacatgttcgtgtccattcctagtgctgatgctatttacatgaagtggattctgcatgactggagcgacgagcactgcatcaagatcttgaagaactgcaggaaggcaataccagagaagacaggaaaagtcataatcgtggatcacgttcttcgacccgaaggcaacgaactcttcacagacgttggcatcgcattcgacatgatgcttctcgctcacaacgccggtggcaaagagag

SEQ ID NO: 147951 - DNA, 243 bp, Glycine max
tagcaagctagctaggttgaaaatagtttggttttgtagtaagtgaggtgaggtgccaaaatggtgaagataactcttggtactttcgatgactcttttggtgttgcctctcttaaggcttatttggcagagttccatgcaactctgattttcgtgttcgctggtgttggttcagccatcgcttacaacgagcttacaaaagatgcagccttggatccaacggggctggtggcagtagctgtg

SEQ ID NO: 147952 - DNA, 252 bp, Glycine max
gagaattagaagaataaacataataccccagatggcttcaaaaacttgttcctcccttgcccttttcctcacactcaacctcgttttcttctcacttgtctctgcatgcggttatacaccatgccctggtccaaacccaaagccaaggcccaacaaacgacactaaccctaaccccagcgcaagtggctcgtgcccccgtgacgcactcaaactaggtgtatgcgccaatgtgctaaacttggtgaacgcca

SEQ ID NO: 147953 - DNA, 185 bp, Glycine max
ctcggggtaactgtcgcttataacaaagatccaagtccagttaagctcaactcgggagttggtgcttaccgaactgaggacagaaaacctcttgttttgaatgtagtacgcgagttgaacagcaactcataaatgacgtgtcacgcaacaaggaatatattccgatcgttgggcttgctgatttt

SEQ ID NO: 147954 - DNA, 185 bp, Glycine max
gaactgcttgatcagataaccaggaaaggtcgtctatcagagcatgaggcacgattctatgcagctgaagttatcgatgctcttgaatacatacataatttgggagtcatacatcgtgatattaagccagagaacttattacttaccgctgaaggacatattaaaatagccgattttgggagtgt

SEQ ID NO: 147955 - DNA, 183 bp, Glycine max
accgtctcgtttcccaggtgatttcatccctcaccgcctcgttgacgtgtgatggagcactgaacgttgatgtgactgagttccaaaccaacttggttccttagcctaggatccatttcatgctttcctcatacgcccctgttatctctgctgagaaagcataccatgaacagctttccgttg

SEQ ID NO: 147956 - DNA, 188 bp, Glycine max
gtcaaatatgaatttaaaaccaacacgcatgtccctaaactaggggtaatgcttgtggcgtgggggggaaacaatggctcaacactcactggtggtgttattgctaactcgagagggtatttcatgggcaacaaaggacaagattcaacaagccaattactttgggtcgctgacccaggcatcagcta

SEQ ID NO: 147957 - DNA, 187 bp, Glycine max
ggttcagatggcatccaaggacgaatatatgtgggaactgggtgtgtcttcaggaggcaggcattttatggatgtgatgcccctacttcgaagaaagcaccaaggacggacatgtaactgttggcctaaatggtgctgctgtctgtgttgtcgatctacgaagacaaagattaaagcaaagtccagt

SEQ ID NO: 147958 - DNA, 202 bp, Glycine max
ggaatccggctcgagctcttcaaaaggtagaagaaacggaatgaaaactctcaaaaaactattacagcaatggcagaacaaaacctaaaccaaacaactggagctggaaggcatcaaaatgttggtaacaagagccttctacacagtgatgcactttaccagtatatgctggcgactcgtgtctacccaagagaacctgaat

SEQ ID NO: 147959 - DNA, 181 bp, Glycine max
ctgattccagagcaatagttgctgttccagctaccacagaaacattagctgtggttcctgtgagtcagaaaaccaagcgctctgagtttgtacagcgtcgaaccaggagaccattctctgtgactgaggtagaagcacttgttcacgcagttgaggaacttggaactgggaggtggcgtga

SEQ ID NO: 147960 - DNA, 181 bp, Glycine max
cgaaaattctcagtttgcagagaaaatctgaatcatgtcgtggcaagcgtatgtcgacgatcaccttctgtgtgacatcgaaggtaaccacctcactcacgcgctatcatcggccaagacggcagcgtttgggctcagagtaccgacttccctcagttcaaacctgaggagataactgcca

SEQ ID NO: 147961 - DNA, 182 bp, Glycine max
cttctactgtggctcttctctctatgggcggttaaaccctcagagcgtgagggattggatcgcttgccacgtgatgttcttcgggccaaagtcggatgtcggtcttcatgatgctggtggggtgcatgaggaggtgcttgaggtgctgaagcggtgcctggaactagggtttgtgacattgc

SEQ ID NO: 147962 - DNA, 183 bp, Glycine max
ctatagcgaccatttccttatctatattcacctccatcttaaaacagtgcccctagaaacttcgatctgaagatggttggcattgcatttggacgctttgacgattctttcagtttaacctcaatcacggcctatattgctgagtaccattcgaccttgctctttgtttttgccggtgttggt

SEQ ID NO: 147963 - DNA, 183 bp, Glycine max
cgcactttggtggccacagcaacaataacaatggcagcctcactacaagctgcagctaccttcatgcaacccaccaaggtgggcatggccactcgcaacctcaaatcgacacaatgcatttctaaggcttttggcttggaacccgctgcagcttaactcatttgctcccttaagcccgatctc

SEQ ID NO: 147964 - DNA, 180 bp, Glycine max
caaaatggcttcagtagcgactaagcagcaagatggtgagaaaccggccaagagaaaaccggttttcaccaaagtggatcagctgaaaccgggaaccaacggtcacactctggttgcaaaggtgttgtcctccaacactgtgttgcagaagggacgaccctcttcttcgcacaacattcg

SEQ ID NO: 147965 - DNA, 183 bp, Glycine max
cagcctcagttcagctcggaggactatatgatgctatacacgaccatatacaatatgtgcactcagaagccgccttatgactattcccaacaacagcatcgctcgtacaaggaatcgtttgaagactacatcacatcaacggtattaccttcgttgagacagaagcatgatgaatttatgtta

SEQ ID NO: 147966 - DNA, 182 bp, Glycine max
ctcctcaatccattccaagcttcaatcttttctctcttctgccctctgcacctcccctcacacccttcctcattcgcaggaggtgaagatgtctaccccggcaaggaagagactgatgagggattttaaaagcttgcaacaagatcctcctgctggcatcagtggggctccccaagacaata

SEQ ID NO: 147967 - DNA, 181 bp, Glycine max
cactgatggtgccagcaaggtggtgatgcagatattaaatactatcatcagacgtcaagacgatgggattttggatacagtcccacaatacccactctactcggcaacaattgctctgcttggtggtacccttgttccatactaccttgaagagacagcaaattggggtcttgatgttaat

SEQ ID NO: 147968 - DNA, 182 bp, Glycine max
gtcaagctcaattctggtgttgatcacataggtatacctgcttgcctagatggctatatgaatattgcaatggaccagacagaggaatacgtcaatggacaagtgaagaacaagtatggtgacgctttcatccgagggaataatgttctatacattgacagctcaaagaggactctagcaga

SEQ ID NO: 147969 - DNA, 181 bp, Glycine max
actctctctctctctctgaaaattaaaactaagcgtgtgctctgccatatcccaagtggaacaagaagagttgctcgccaaattagaggtgttcaagatccgagcgagggacaagcatggccgcaagatcgttcgcattatcgccaaactcgtcccaggtagattgattaattaattaatt

SEQ ID NO: 147970 - DNA, 182 bp, Glycine max
caagaagctaagtgtccagtgtgcatggcacaccctcacaatgcagttctcctcatatgttcatcccatgagaagggctgccgcccttacatgtgcaacactagttctcgccactcaaattgtcttggtcagttctgcaagtcatttgcaggcaccttatcaaccattcctcaagtagaaag

SEQ ID NO: 147971 - DNA, 181 bp, Glycine max
gacacaaccattctgtggacgccatgagcaaaacctgcatgttttctccctttggatggaaaggaacagttatgcttttcttagtaggatttggtcctctctctctttttaccttttgattggtactatggttggtgccttgttggttggtgcaactaactggcaagggttgttcattgtt

SEQ ID NO: 147972 - DNA, 178 bp, Glycine max
ctccactttactcatcttcaatcagttgcatattctttgctattccaatggccactgttgaggttgtgtcagccaaggttgccctcccagaggacacaaacgaggcatcattgaaggttgacgaggagaagaacacagaagaagttgttgagactccaacaccagaaactgtggtcac

SEQ ID NO: 147973 - DNA, 180 bp, Glycine max
ctcatcatgggttgtgaaagcagagaagtgagatacactaagttatcctcataaatacactctaattaggtggcaagataagtgtctaaccatagtaacacgtgccacatatagtgttcattttggaattgtgccactaaaattctattcaagtcatctatagctgcctcttcttatgct

SEQ ID NO: 147974 - DNA, 182 bp, Glycine max
ttgctatatatccacgttataagattgaaaacgcttgcattcaaatatcaagctagttccttctggagacttgcacaaaggtgctctcctgactggcatgatcattaattggctctatagggtctgtagtatctggaccccttagtgcattcattgcttatgttctaagtgctgtcctcagt

SEQ ID NO: 147975 - DNA, 180 bp, Glycine max
gaccttgaaagttgctttttcaagtgtcagtagcgggacgttctgtcaatcggggaaggtttttggtgacaacacctggagatatcagaagtgagaatgctgacatgagtaacgataaatcctgtgaaaaacacgatcgcctgccagtggaaggctttctgcgttcagtcaatctacgca

SEQ ID NO: 147976 - DNA, 178 bp, Glycine max
tattaccattgatgtgggtacaaacaatgagaagctgctgaatgatgaattatacattgggctaaagcaaagacgagcaactgggcaggaatatgctgacttatgcacgaatttatgacagcagtcaagcaaacttatggggaaaaagttctaattcagtttgaagactttgcaaacc

SEQ ID NO: 147977 - DNA, 179 bp, Glycine max
tggcaaaggccagaggacatgacaaccgaccgtcatgcctacaagatcgatccaagcaatcccgggtcggatcttgccggagaaaccgccgccgctatggccgctgcctccattgttttccgacgctctgaccctgcctatgccgccgaactcctccgccatgcctaccagctatttga

SEQ ID NO: 147978 - DNA, 185 bp, Glycine max
gcacgtgctgggtaggccacttgcgtggtccttccggaagaacatgtcgcatgtgcaaaagcacgttgaagaggacagcgtgacgaacagcagccctgatgctaggttggtcaaagttagcatggaagtagcaccttaccttcgcaacatggacttgaagatgtacaagagttaccgagagctct

SEQ ID NO: 147979 - DNA, 186 bp, Glycine max
cttacctttctctcttctctctagccgcccaaaccctaactgcctaccctattccgctttctctcatccatcatgaaaagaggatagtccaagaccggatctaagacagccgatgccaaacttgctgtgaataagatgggcgccgccaccaagactaggaaacccgccggaaaggggaaggcagcg

SEQ ID NO: 147980 - DNA, 184 bp, Glycine max
tgacagtgaaagcaaggctgaactagacaggttctgtgatgctcttatttccattagacaagaaattgctgagattgacaaaggtaatgctgacattaacaacaaagtacttaagagcgcccctcatccaccatcactgctcatggctgatgcatggacaaaaccatactccagggaatatgca

SEQ ID NO: 147981 - DNA, 179 bp, Glycine max
cttcaaggagttaggaagacaacggtttgcgcatagttggcaaattatctcaagaaacagggaaaaagttgcatgctagttgctggggacgtttacaggcctgctgctattgaccaactggctatattgaggaaaacaggtggatgtgcctgtctatacagcaggtaccgatgttaaac

SEQ ID NO: 147982 - DNA, 179 bp, Glycine max
aaagattccaccagctgatactcgctataggacagcggatgtcacggcatctaaaggaaatgagtttgaggattactttttgaagcgtgactgctcatatggactatatgagaagggttttgaaaggccttctcccatccaataagaaatcatagcgattgctcttactggtagtgaca

SEQ ID NO: 147983 - DNA, 179 bp, Glycine max
gtccttgaagggggtattccatttaacaaagcatatggaatgacagccattgaataccatggaacggatccaaggtttaacaaggttttcaacaagggcgatggctgatcactctaccattacaatgaagaaaattcttgagacctacacaggctttgagggacttaaatccctggttg

SEQ ID NO: 147984 - DNA, 177 bp, Glycine max
tactgaggagagcatcatcaaatcaaccatggctaccctcattgctcccatcaccttttcgcctggtatagatgcacaagctcttaggaaagctttcgaacgatgggggactgatgagtagaccgttatagcaatattgggtcacagcaatgatcatcagaggcaacaaatcagaaa

SEQ ID NO: 147985 - DNA, 177 bp, Glycine max
atagtccaaagaatcgatggcggctttgcactgtgactcaagtggaggaagccaaatgtgtgttaagaatgttaccagtttggctatgcaccattgtatacacagttgtgtttacacaaatggcttctctttttgttgagcaaggggatgtcatgaactcctacataggaagttttc

SEQ ID NO: 147986 - DNA, 176 bp, Glycine max
ccttatttggtgaccaagcatttgggaagagttgtcccctccgacgacaactactacgccgcgttgaactccgccgtcttcagcgacgggtcgttttgctacattccgcaggacaccaagtgtcctatgcagatttcgacttacttcagactcaacgcgttggagacagggcagtt

SEQ ID NO: 147987 - DNA, 186 bp, Glycine max
tgctactctctttgctggtatctttcagacttcctttggactcttcaggcttgggttccttgtggatttcctatcccatgctgcaatagtaggatttgtagcaggagagccattgtgattgggcttcaacagttaaagggactcttaggaatcacccattttacgaccaaaaccgacatagtctct

SEQ ID NO: 147988 - DNA, 185 bp, Glycine max
cttcttccttattttcttccctagtcaaggagattcatctctgcaggttgttttagaacagaaaaaatggtgaagatttgctgcattggtgctggatatgtggggggccaacaatggcagtcattgctctgaagtgcccctccattgaagtggctgttgttgacatctccaaatcccggattgca

SEQ ID NO: 147989 - DNA, 243 bp, Glycine max
agccaaatggtgaaagggttttctcgtttggcagaatccctagatgatcttgctcttgatattccatcagctaaggcattgtcttagtcatttgtccccaaggcaatatctgatcgatggcttgatgcttcacttaccaaacctgcaactgaagttggggaaatccaagatcatgagaaggtgaggtcttacaaaaaggaatctgtaactataattcatgagtattttccttctgatgacatt

SEQ ID NO: 147990 - DNA, 102 bp, Glycine max
ctccttactactatcagagtgctcctccaccatctcccactgctcatcctccctattactacaaatcccctccaccaccatcgtgatagcctccacctcctt

SEQ ID NO: 147991 - DNA, 233 bp, Glycine max
gtttgaaaatgagttgaagtggtattggactgagccacaacaaggaaatttcaattacaaagatgctgataatctgctatgcttgtgtcagaagcacaagatacaaactcgcggtcattgtatcttctgggtagtggatgaaactgttctgcagtggatcaagttactgaacaaaaacgatttgatgacggctgtccaaaaccgcctatacggcctgctgattcgctacaagg

SEQ ID NO: 147992 - DNA, 232 bp, Glycine max
  unsure (1)..(232): unsure at all n locations
attgtttgttgttgtaactcgttcttcttcttttgttgttctgtgtttgtgtttgtattttctctcacctgaaaatgtcttgctgcggtggtaactgtggttgcggaacntcctgcaagtgcggcaacggcttcggaggctgcaagatgtacccagacttgagcttcactgagtcaaccatcaccgagaccttggccatgggagtggccctgttaaggctccatttgagggt

SEQ ID NO: 147993 - DNA, 236 bp, Glycine max
cacaaatgatgagattgcagctgatcttaaagaacacgtgattaagcctgtgattcctgagaagtaccttgatgagaagaccattttccatttgaacccttctggcaggtttttcattggagggccgcatggcgatgctggtctcaccggccttaagatcatcatcgtcacctatggaggatcgggtgcacatggtgtgtgtgccttctcttggaaggatcctaccaaggttgata

SEQ ID NO: 147994 - DNA, 240 bp, Glycine max
agccagcttggagctaggctcaccaagctttccaaagaccaagctgattacatcagtgtgcctgttgagggtccatacaagccttctcactacaggtactgatccatcctattgtgggagaataaacctaaactattctatcaattcccgaggcttcattgttacactttcctttttggattttttccattacaatttacatttgtggtagcataggagcttctttttcctttttttagt

SEQ ID NO: 147995 - DNA, 238 bp, Glycine max
aaaagttgcaactacttcctcagaaaaaaagtttctaagttaaggaaatccagagagacaaaaatggccggtgacggtgcctttacatgcatagacatcctccttgccatctttctccctcctcttggagtctctctcaaatatggctgccacgtggagttctggattcgtttggtgctgaccttctttggttatatacctggaattatctctgctgtctatgctatcaccaagtgat

SEQ ID NO: 147996 - DNA, 235 bp, Glycine max
agaaaagttagggttcacaacttttccttttccttttgcttgcgaatctgaatcaaataatcaatcatccattcattatccaacatgtcgtcggcgaagaaaatcacgctgaagagttcggacggcgaggctctcgaggtggaggaggcggtggcgctggagtcggagacgataaagcacatgatcgaggacgactgcgccgacagcggtatccctctgccgaacgtgacgagca

SEQ ID NO: 147997 - DNA, 232 bp, Glycine max
ggagggtctctttctgagattgttagggcttatcctcacatcaatgccatcaactttgacttgcctcatgtggttgccactgctcctaagtatgatggaatcacccatgttggaggtgacatgttcgtgtccattccagatgctgatgttatttacatgaagtgcattctgcatgactggagcgacgagcactgtgtcaagatcttgtagaactgcaggaatggaataccag

SEQ ID NO: 147998 - DNA, 101 bp, Glycine max
cttgtggcagccaagcgttcatagcgacgttgctttttgatccttcgatgtcggctcttcctatcattgtgaagcagaactcaccaagtgttggattgttc

SEQ ID NO: 147999 - DNA, 241 bp, Glycine max
agggggtttgccaatcagataactactatagaagaagcaaaacgattctacccactgtttggacttggggccaatgtagccctctttttctctggccggacagtgaaatacttctctaatctgaggcagaatttaggtcttggagttgatggttctgccatctctctgaaattaatgatgagcatagttgtgggtatggggtctgcaatttgttttctgtactggtgggtgaacaattatg

SEQ ID NO: 148000 - DNA, 230 bp, Glycine max
gttaccattctcaactggtcctttgttagaaatgaccaacctagatctgagaccacctaccagattgctttgtctatcaaggacgaagtggaagaccttgaaaaggctggcatcactgttatccaaattgatgaagctgctttgagtgagggtcttccacttcggaaatcagagcaatctcactacttggactgggctgtccatctcttcagaatcacctttgttggtgt

SEQ ID NO: 148001 - DNA, 230 bp, Glycine max
ggcgggcaaaggtgttagttcggtggctaaggcggtagcagaatatcagtatccttggcgtgagaagttggggaaatataaggatgagcttgccaagggtgtgtggtgatactgggagctgggggcatggaagccgctgagtatcattgctcggcatcgtgttagaattcgcaaggctgtcctccttgctggtgaagattggccctacgatcctgaaagttaggagatga

SEQ ID NO: 148002 - DNA, 235 bp, Glycine max
  unsure (1)..(235): unsure at all n locations
gttaccatttgctcccagcactgagcttaaccgagcttcacaaagatgaatcgggaaaaattgatgaagatggccnttcggttagaactgggggaaagggcacctnagaagaaagaagaaggctgttcacaagacaacaaccacnnatgacaaaaggcttcagagcaccctgaannaataggggtgaatnccatcccggctnctgaggaggtcaatntctttaaggatnncgtag

SEQ ID NO: 148003 - DNA, 229 bp, Glycine max
gtttgttgttgtaactcgttcttcttcttttgttgttctgtgtttgtgtttgtgttttctctcacctgaaaatgtcttgctgcggtggtaactgtggttgcggaatctcctgcaagtgcggcaacggcttcggaggctgcaagatttacccagacttgagctacactgagtcaaccaccaccgagaccttgttcatgggagtggtacctgttaaggctcaatttgaggg

SEQ ID NO: 148004 - DNA, 233 bp, Glycine max
aaaacaactggtcctgtgctgctccatgttgtcactgaaaaaggccatggatatccatatgcagaaagagcagcagattagtaccatggagttactaagtttgatccattaactggaaaacaattcaaattcaatgctgccacccagttatacacaacatactttgcagaggctttaatttctgaagcggaagcttacaaagacattgtcggaatccatgctgcaatgggagg

SEQ ID NO: 148005 - DNA, 234 bp, Glycine max
ctggaagctacgggcttcctttctttggacccatgagtgacacacatgactatttctacaaccaaggacgcgacaagctctttgccgaacgaattaaaaagtacaacctcacggttatacgaaccaacatctcaccgggtcctttcattccctctaatcctagagtcatcgctctcctcctcggtgtctccttcctcattctattcgaccaatccaaggtcgataagcgcgatg

SEQ ID NO: 148006 - DNA, 103 bp, Glycine max
atcaaggacaatgaagaagctgtcaaggcttatggaattcacctgggaactgaaatgtgcaaaaagattttagctcatttaattaagacattgcatctttata

SEQ ID NO: 148007 - DNA, 227 bp, Glycine max
agattatcgtgaatgcgtataaaaggaaaataaagaaattagcgtcaaaatgttgggtgtgttcagcagctccttagtgtcgccgccggacgagctcgtggctctcggcagccgtactccgtcgcccaagatgacggcggcggtgctgcggaagcggttcgaggagaagaacccctccgccgtgtcggtctaggtcggagagcttgtccagctcgtttatacccacc

SEQ ID NO: 148008 - DNA, 223 bp, Glycine max
gtttgttgttgtaactcgttcttcttcttttgttgttctgtgtttgtgtttgttttttctctcacctgaaaatctcttgctgcggtggtaactgtggttgcgttagctcctgcaagtgcggcaactgctgcggaggctgcaatttgtacccagacttgtgctacactgagtcatccaccaccgagaccttggtcatgggattggccctgttaatgtcaatttg

SEQ ID NO: 148009 - DNA, 233 bp, Glycine max
gatagctagaagcaataagatgaaaatgaaagtgcttgttttgtttgttgctacagttttggtagcatatgaatgctatggctcagactaccagaagttccctctcctaatgaaaactgggtttggtggtcaatacagcaatgaggttgcatgtgccagttggtggcttggcgtggaatcaaacaacgtagtcatatggcaaactgttcctgcagcttgcgtagagtacatag

SEQ ID NO: 148010 - DNA, 227 bp, Glycine max
agccttccatggcttccgcttgtgcttcctctgcaattacagctgttgccatctctacgccgagttccgggcttaagaatggatcaggaggttgttttcttattggaaggaaattgagggtgaaacaggagagagcagcaatttgaggacgatcgatgtgcactacagtgtgcgcagttgctgagcctgtcagacctctatgtttcccaggcagccctcctcctcca

SEQ ID NO: 148011 - DNA, 225 bp, Glycine max
actcgagcgattcggctcaggagaagaatgatgcaaatggagaggctgcaagcgtaaaagggatggatgattacaaagaggtgttgatgtcccaaatgaatcttgagaagaaatttggacaattctctatttttgtgacttctaccttgatggaagttggtggtgtgcctccttcttcaagtccagttgccctgcttaaagaagccattcatgtgattagctgtg

SEQ ID NO: 148012 - DNA, 228 bp, Glycine max
gtgaatctcaaaaaggagtacaagggcattttctggcaagaagagatcattccattcttccaaagtgccacctttccaaaagaatgcacttctgtccaaaaattctacattgaactctccaagcactgtcaaagagaagcttggtgctgttgatccctatttcaccaagcttgcatatgccatggtgactctgattgaagctctggatgagcttacttgcaccacatc

SEQ ID NO: 148013 - DNA, 225 bp, Glycine max
gtgtaatattcttaaacgtgtacccaacagtgcactctggctcctcagatttcctgcagctggggaaatgattctgagagcatatgctgctgcacaaggggtataaccggatcaaattattttcccagatgttgccacgaattatgaacacatcagatgaagttctttagcatacttattccttgacccgcctttatgcattgcacatacaacatgaacagatat

SEQ ID NO: 148014 - DNA, 231 bp, Glycine max
acaaaccagtttttggaatcattgaaagcagaaggtgaggtcattcttgaagatgttcagccaaaactctcccactctcgggtttctgccccaccacctactgattctatcactttgactgttgaggataaactaaatgtgacactttaacgagatggtggtctcagtaattttgatgttcaaggcacattgtctctccaaattcttaaccaagaggatgcacatattcaa

SEQ ID NO: 148015 - DNA, 224 bp, Glycine max
agaaaagaaaatcctcacccattttcttcgtagccaaacactctgaaattctcagttatgtcgtggcaatcgtatgtggatgatcacctactgtgtgaattcgaaggtaaccacctcactcactccgctatcatcggccacgacggaagcgtttctgctcagagcaccaacttccctcagttcaaacctgaggaaataactgccatcaatactgactttaatga

SEQ ID NO: 148016 - DNA, 236 bp, Glycine max
tcgtcgatcaccgtacttcggcccgaaggcaacgaactcttcacagacgttggcatcgcattcgacatgatgcttctcgctcacaacgccggtggcaaagagaggaccgaagagaactggaagtggctgttcaaggaaaccggtttcgcgcgtcacaacatcatcaagatcaacgctctcccttccatcattgacgcgtttccaatctgaacaagatgccactaccacaactgcat

SEQ ID NO: 148017 - DNA, 239 bp, Glycine max
gtacaccaacagtcgcagtgtgaggttgccgcggttctggcaagatgccttcgaggctgcctatgaggatttgacgagcgatgtcgctgaggtcagatacgctgccgtcgccgagatcgccaagatgtctgttcgctccattcatttttatccacctcctcttcaatccacgagtgcccgatatttcagcaagagcctggaggaagccgagataggtaaagatgcaacaacctcaaggc

SEQ ID NO: 148018 - DNA, 243 bp, Glycine max
gtctgctgttagatctgtacccgcctagccattgatttggaaaagtccaacttcaaggatgagtaagcttcagagtgatgctctaagagaagctatctcaggaatcatggctgattccaaggaaaagaacaggaaatttgtggagaccattgatgtccaaattgggttgataaattatgatccccagatggacaagcgtttcagtggctctgttaagttgcctcatattcctcgccccaagat

SEQ ID NO: 148019 - DNA, 241 bp, Glycine max
gtcagaacgtccttgctcaactgataatggaaccggtcataaccatacaggtgcttctatcagtggcagcgcaccggcttctaaggcacaggttgttggttggcctcctattagatcatttaggaaaaactcaatggctaccaccactaacaagaacaatggatgaagtcgatggaaaaccaggtgttggcgcactctgtgtaaaggtcagcatggatggtgctccgtatctaaggaaggt

SEQ ID NO: 148020 - DNA, 238 bp, Glycine max
attacaatgaagccagcggcgtaaggtacgttccacgcgccgtcctcatcgatctggagcccggcaccatggactccgtcagatccggcccctacggccagatcttccgccccgacaacttcgtctttggccagtccggcgccggcaacaactgggccaaaggtcactacaccgaaggcgccgagctcatcgactccgtcctcgacgtcgtacgcaaagaagccgagaattgctactg

SEQ ID NO: 148021 - DNA, 248 bp, Glycine max
caaaagggtaaaagctcgtttgattctgatttccagtacgaatacgaaccgtgaaagcttggcctatcgatcctttagtccttcggaatttgaagctagaggtgtcagataagttaccacagggataactggcttgttgcagccaagctttcatagcgacgttgctttttgatccttcgatgtcggctcttcctatcattgagaagcagaattcaccaagtgttggattgttcacccaccaataggga

SEQ ID NO: 148022 - DNA, 278 bp, Glycine max
gcatgcatgagtacgtaattcggctctagcaagaatgacactatggagaatcgggttcctggatttggcactacaatgaacattctctatggggatggtgtttgtggacaaggtgatgtggactcaatgaacaatattgtttcccattacctgtattatcttgaccttcttggtgttggtcgagaacaggctgggccccatgacatccttacatgcgctgagcaggttcctttcaacccatcttccaaacctgcttcatcatcttaagattattatat

SEQ ID NO: 148023 - DNA, 243 bp, Glycine max
ggctgcttctcttgttcctgcttctttctcggttcttaaagagggaaagagtggtgtgtctctcaaggactccaccttgttcggtctttcattttcagaacctatcaaagctaacttcagctcttctgcattgaggtgcaagagggaattcgaacaaaagctctgtgctgtgagggccgaaacagtggctacagcctctccagcagttaccaagtctacaccagaagggaagaaaacattgag

SEQ ID NO: 148024 - DNA, 243 bp, Glycine max
aacaacagcacaaagcgggttactgtctgttcaagctaccatctctctctctctttcttagtgcctccttgccagaagttaaaatggcccaagaaactttcctattcacatctgaatcagtgaacgaggggcaccctgacaagctctgtgaccagatctccgatgctgtgctcgatgcatgcttggagcaggaccctgacagcaaggttgcctgtgaaacctgcaccaagaccaacatggtga

SEQ ID NO: 148025 - DNA, 238 bp, Glycine max
ggttctactcctttctctcttcgtttccgatcgatccaattttcttcccatggctacgatcggacacaacaatctcaatgccaaattggttcttctcggggacatgggtgctgggaaatccagcctcgttttgcgctttgtcaagggtcaatttctcgaatttcaggaatcaacaataggggcagcgttcttttcacagacgctggcagtaaatgacgcgacggtaaagtttgagata

SEQ ID NO: 148026 - DNA, 240 bp, Glycine max
atcttcatattcatcaaactcatcaaaatgaatctgtaccactcctccaccaccaccaccaccaccaccatcttcaccgtcatattcctcctccttgcaatattattcactctcacaccccacaaggccaacggtgccacgtgtcaccctgaggaagaagcgggcctgttgggcttcaaatccggtatccgatccgacccgtccggcctgctcagtaactggatatcgggtacggactgc

SEQ ID NO: 148027 - DNA, 237 bp, Glycine max
agaagcttgcaaattttgatagggaacgtatcccagaacgtgttgtccatgccaggggcgctagtgcaaagggtttctttgaggtcacccatgacatttctcacctgacatgtgcagatttccttcgagcccctggagttcagacgcctgtaattgttcgtttctcaactgtcattcatgagcgtggtagccctgaaaccttgagggaccctcgaggttttgccgtgaagttttaca

SEQ ID NO: 148028 - DNA, 241 bp, Glycine max
gagatagtgatgggacgaacactgagacggaacgaagcaagcttgtgtttttcgataggaggaaccagtttgagttggaggatctgcttcgagcttcggcggagatgctcggaaaaggaagcttgggaacggtttacagagcggtgctcgatgatggttgcactgtggctgtgaagagactcaaagacgctaacccctgcgagaggaacgagtttgaacagtacatggatgttgtagggaa

SEQ ID NO: 148029 - DNA, 247 bp, Glycine max
cctgatttggtgagaaagcatttgggaagagttgtcccctccgacgacaactactacgccgcgttgaacgccgccgtcttcagcgacgggtcgttttgctacattccgaaggacaccaagtgtcctatgcagatttcgacttacttcagaatcaacgcgttggagacagggcagtttgagaggactttgattgtcgccgatgatcggagctctgtggagtatctggaagggtgcactgcgccttcct

SEQ ID NO: 148030 - DNA, 250 bp, Glycine max
ctcgagcgcatcaatgttgctgttgctgtggcaattaatggtggtttgatcacccctgttcttcaggatgcggataagttggacttgtatctattgtcccaaaaatggaaggagctagtggaaaaagctcgtgcaaagcagttgcaacctcatgagtataattcaggaactttcacgctttccaatttgggtatgtttggagttgacaggtttgatgccatacttccaccaggccagggtgctatcatgg

SEQ ID NO: 148031 - DNA, 250 bp, Glycine max
gcccattccaacttcgatcccaaaacctacgtggacatgcctctcaagtccgccctcacggttaccgaggacgcgttccagaagcttccgaggaacgccaacgggtccgtgccggttgaggatttgaagcgtttcatagaggcctactttgaaggtgcaggggatgatctggtgtaccgggacccacaggatttcgttcccgagccggagggtttcttgctcaaggtgaaccaccctcaggttagggcct

SEQ ID NO: 148032 - DNA, 232 bp, Glycine max
gtcaaatagatgatgctctggatattatgtgcgagcttgcagttgctttagaaaagcattgacttgttcatgccttttctgtttttttgctttgtataccatttttagttttaacctttgttggctttcttagacagaacggagtcatcaaaaaaaaaaaaaaaaaaaaaaaaaaaaaaaaaaaaaaaaaaaaaaaaaaaaaaaaaaaaaaaaaaaaaagaaaaaaaaaaca

SEQ ID NO: 148033 - DNA, 240 bp, Glycine max
ctcgagtggagggtgatgaagatgaagatgactctgatgatatcgagaatgagttcaattatgcccaaggaaaagccaaggccaggcgccagtgggaagatgacgctgacctgtcgtcgtcttctagacgcgaatctcaacagccaattcccctcctcaccaatggccaaacgatgtctggtgagattccgtgtgccacacctgatactcaatctgtgcgaactacttcaggtcctttgg

SEQ ID NO: 148034 - DNA, 236 bp, Glycine max
ctttccttaaaggattccctcctaatttggtgggattatcccaagtttcagctgctaccactcatcagcattgccatttcctgtttcactcaccacatggaaaagcttattcgcatgttccctttgcttcttcttcttcttctgttccccacttttgccttcgctggccatgactatggccaagctctgagcaagagccttctcttctttgaagcccagagatctggctaccttcc

SEQ ID NO: 148035 - DNA, 234 bp, Glycine max
tgttgaaagtgatcccagctggatcttctagcggtgcaaagaaggcttttactggaatgtgagctttgatttccagtttttattgaagataaatgttaccttattaattattatatctgatttcttttctggatgataacaaatatgaaaaccttgtcaattttggattttctttgaggtttcgttctggctttatgtttaggatcttgttataatacattatggttttcgaat

SEQ ID NO: 148036 - DNA, 241 bp, Glycine max
atcgtagcaaagaaagaaagatagaaaaccctagcttaccttttcaactttcaagatgcaaatctttgttaagacactcactggtaagacaatcacccttgaggtggagagttcagataccatagataatgtaaagtccaagattcaagacaaggaagggatcccaccagaccagcaacgtctcatttttgctggcaagcagcttgaggatggacgtacacttgctgattacaacattcaa

SEQ ID NO: 148037 - DNA, 242 bp, Glycine max
tctgattccaggaatatgctgaacttatgcacgaatttatgacagcagtcaagcaaacttatggggaaaaagttctaattcagtttgaagactttgcaaaccacaatgcttttgatctgcttgagaaatatagatctacacatctggtctttaatgatgatattcagggaacagcatccgtggttcttgctggacttgttgcagctctgaagttggttgggggtaacttagctgatcacaga

SEQ ID NO: 148038 - DNA, 245 bp, Glycine max
gggaatgttactgagctcataatagcaatatttgcccttagcagtaacaaaattgccgtggtcaagtattctctgttgggttctattctttcaaaccttcttctggttcttgggacctctctattatgtggtggcattgcaaacgttggagtggaacaaaaatatgatagaagacaagcagatgtgaactcacttatgctgttgttgggattgttgtgctacttgcttccaatgctgttcaaata

SEQ ID NO: 148039 - DNA, 239 bp, Glycine max
ctccgatgaagcccacgcacaatcagatagaaaaaagataatcaaaattttacttccaaacccaaccaaatcaaagaaatgaaggataaggagacattccctattgcgaaaaaggaagcctctgattcaggtttattcggaagaggaagctacaaattctgggcactagctgccatgctgctcttggcattctggtccatgttcaccggcacagtctctctccgctggtccggcaccct

SEQ ID NO: 148040 - DNA, 239 bp, Glycine max
gacacaattgacaatgtgaaggcaaagatccaagacaaggagggtatcccaccagaccaacagaggctcatttttgctggcaaacagcttgaagatggccgaaccttggctgattacaacatccaaaaagaatctaccctccacttggtgctccgtctgcgcggtggtatgcaaatctttgtgaagacccttactgggaagaccattactttggaggtagagagctcagacacaattga

SEQ ID NO: 148041 - DNA, 238 bp, Glycine max
tgctcatttacacacctctccaacctttcactttcagctttatttgaatccctctctctcctttccaaatggccagcgttgaggttgcacatcaaacaccaacaacagttccagaaaatgaaacaaccgaggtaatcaagacccaggaaacaaccccggaaccagtaccagccactgaggctcctgcaacagaacaagcagcagctgaggttcctgctcaagaagaacaacaagcaac

SEQ ID NO: 148042 - DNA, 236 bp, Glycine max
ggaaggttggaccataggactcacgatttttgcaaaaactgcaataactaatggaatgagtccatttgtgttcattgtttataccaatgctctggccactataatactgttcccttgtttctttttaccacaccaagaggacagaaaggagaggccatcttttactttctctttgttcatgcggttcttgttcctcggttttatagggatgacgatgactcaggcctttttattcc

SEQ ID NO: 148043 - DNA, 238 bp, Glycine max
actaattcgccttggttttgagggatatagaaacgtgatggaaaactgcagagacaacatgttggtgctgaaagaaggactagagaaaacagggagattttcaattgtgtccaaagacaatggagtgcctttggtggcattcacactgaaagaccacacccactttgatgaattccaaatctctgacttcttaaggcgctttgggtggatagtgccagcatacaccatgcccccagat

SEQ ID NO: 148044 - DNA, 234 bp, Glycine max
gtggacctgaagttcccttccatcctggaagagaggacaaacctgagccaccaccagagggtcgcttgcccgatgccactaagggttctgaccatttgagagatgtgtttggcaaagctatggggcttagtgaccgagatatcgttgctctgtctgggggtcacactattggagctgcgcacaaggagcgttctggattcgagggtccctggacctctaatcctcttattttcg

SEQ ID NO: 148045 - DNA, 234 bp, Glycine max
cgacaaattaggccgaattctgataacttttacgccgaccgtacagcactgtagcatggccacggttattggactttgtctcagagttaaactgaagcactacttccctcctcattacaaagtggacatcaaggtttctcctggatctcatgccaacgaagaatcagtcaataagcagttgaatgataaagaaagagtcgctgctgccttggagaatcctaacctccgccagct

SEQ ID NO: 148046 - DNA, 242 bp, Glycine max
caaggacatcagaagtacgacaaattaagacagggcctaagagaaagtgttgtagataggatacagagagaaagagaaatggattctcattgggttcgaatggtgcttctcattgcttgcattcttccagctttggttgaatgcagagtgaggcactacaaatttcatgtggtgtctaaacaaaccaatagattgtgttcaagcaaatctattgtcaccattaatgggaagttcccaggacc

SEQ ID NO: 148047 - DNA, 241 bp, Glycine max
agaggttgaagagtattgggatgattgatagcgttcctggaatgaaggctttggatatgaatgctgctgaggacgctattgtcaggctcactagggagattgtgcctggcatgattgtcactggcatggaggttgcagaaattgatggctccccgagaatgggtccgacgtttggggcgatgatgatatcagggcagaaggcggctcatttggcgttgaaggctttgggtaggaacaatgc

SEQ ID NO: 148048 - DNA, 242 bp, Glycine max
ggaatttatatgatggaagttgatcgagttctaaggcctggtggttattgggtgctttcgggtcctccaatcaattggaaggctaactacaaatcctggctgagacctaaggaagaacttgaggaagagcaaagaaagattggagagactgctaagcaactttgctgggagaagaggtcagagaaggctgaaatggccatttggcaaaaggttgtagactctgaatcatgtcaaaggagaaa

SEQ ID NO: 148049 - DNA, 245 bp, Glycine max
tcaagatgaagttcaacattgcgaatcccaccaccggttgtcagaagaagctggagatcgatgatgacctgaagctgcgagcattttgggacaagaggatctcacaagaggttgttggtgatgctctgggtgaggaattcaaaggttatgtcttcaaaattactggaggttgcgacaagcaaggatttccaatgaagcaaggagtgttgacccctggtcgtgttcgcctcttgctgcatagagga

SEQ ID NO: 148050 - DNA, 231 bp, Glycine max
ctacacacacctcagaagaacagaacagaaccaccacataacagtgcttttcaaaggcggtttgagcaatggcgttcttaaataaaattgggaatctgctcaagaattctgctgtcaagcacatcaatcaggatttttcggcgtctaccacttcacttttccaagcaattagatccatgtcatctgcaaagcttttcgtcggaggtatttcttacagcactgatgatatga

SEQ ID NO: 148051 - DNA, 233 bp, Glycine max
aaaacaaagagtgtgtgttgttgttgtgtggtttggttttcacttttgttcatcgtttgcgagacacacaggagagaagagatggcgacgagggtggtggcggaacagaagccgaagacgaagattgtgtgcacgctggggcccgcatcgcgctctgtcccaatgatcgagaagcttctgcgggcgggcatgaacgtggctcgcttcaacttctcccatgggtcccacgagta

SEQ ID NO: 148052 - DNA, 236 bp, Glycine max
ctgttatgtcactagattttcaccctaataaagatgatcttatctgctcttgtgatgttgatggtgagataagatattggagcattaacaatggcagttgtgctagagtctcaaagggtggcacagctcaaatgagatttcaacctcgtctagggaggtacctagctgcagctgcagagaatgttgtttctatactcgatgtggaaactcaagcatgtcgatattcattaaaagga

SEQ ID NO: 148053 - DNA, 245 bp, Glycine max
attcattctcatctttctctcttctctctccacccaaaccctaactcccgaccctgttcccctctcgtatccgtcatgaaaggaggaaagtccaagaccgaatctaagagagccgatcccaaacttgctgtgaataagaagggagccgccaccaaggctaggaaacccgccggcaaggggaaggcagcgaaagaccctaacaagccaaagaggcctccaagtgctttcttcgttttcatggagga

SEQ ID NO: 148054 - DNA, 235 bp, Glycine max
cccttcacctcgtcctccgtctccgtggtggcatgcagatcttcgttaagaccctcaccggcaagactattaccctagaagtcgaaagctccgacaccatcgacaacgtcaaggctaagattcaggactaggagggaatccccccagaccagcagaggctgatcttcgccgggaagcagctcgaggacggacgcacccttgctgactacaacatccagaaggagtcaactctcca

SEQ ID NO: 148055 - DNA, 233 bp, Glycine max
ctcagagaaccttaataattactcattcaaatcaggctttgaatgacctgttcgagaagataatgcagagagatgttcctgcacgttatcttcttcgacttggtcaaggagaacaagagctagcaactgatcttgattttagccggcaaggtcgtgttaatgcaatgcttgttagacggttagaattgctgagtgaagtggagaggctagcaagatctcttcaattgcccgag

SEQ ID NO: 148056 - DNA, 231 bp, Glycine max
tgtgcttcttgccgagcattattccccaagctatgcagaacagctgaagaacaccctgaaattcttttcctcaaagtaaattttgatgagaataagccaatgtgtaaaaggttgaatgttaaagtacttccttacttccacttttatcgtggggctgaggggcagcttgaatcattttcatgttcacttgccaagtttcaaaaaataaaagatgccatggagatacataac

SEQ ID NO: 148057 - DNA, 233 bp, Glycine max
agaagattgcacttagtcgtcgtgttgagaagcattggcgtcttattgggtggggacaaatccaagctggaatcactcttgatgtccctcccgccccccaactgagttgaacactgataagagacagatcacaagaaacaccagcagctataaaaacctgagacgaatttagatgtgggaagggagacaagtgttgggaaccatttttgtgaggtggagaagaaaacgttttg

SEQ ID NO: 148058 - DNA, 231 bp, Glycine max
ggcaattctgcaaaggtcttcagtgtactatcatggagtaggtattcaaaatcacccccatccaccaaagatggtgctgaattttctggtcgtagtgaaccatgcaagcctggagctcattgtgccacacttaaaaaattatatgcagcagagaagaaacttttcaaggcattaaaggaggagggaattgttgcattggagtttgacaggaagtccatgttattgcgtaaa

SEQ ID NO: 148059 - DNA, 235 bp, Glycine max
gtgagagctctttgagggatcttctccatggatctgaatatgttcttacatatgaagacaaagatggagattggatgcttgatgttcactgattcatgtcggagactaaggatcatgaaaggctctgaggcaattgggctagctccaagggccatggaaaaatctaggagccaaaactaatgcagaaaaaacctgtttgaccgaagctggttattactgaagcatataaagattt

SEQ ID NO: 148060 - DNA, 238 bp, Glycine max
atctccttcaaaaagcttctcatccatggcgaaaacgctcatttcgtctccatcgttcatcggcacgccgctcccctcgctccctcgccaccacctcccccaccgcaccaggtttgtcactaccaaagtccacgtcagcgtccatgaactttcccctattcaatccttaattcactccattgacttctccggaatcgttaccagatccgaagccttctctacacgctcgccgatgccg

SEQ ID NO: 148061 - DNA, 284 bp, Glycine max
ctcgcatccaacaatgtctctcaccattccctccaacctctccaagcccgccgccctccgccccaaactaagcccaaagctaaggtccgccgccacaaccaccatcgtctgcagcaccaccaacaacaacaacaacaacaacgtgtcctccgacctgaaggcgttctccgccgcgctggccctctcctccatcctcctctccggccctctccccgccggcgccgacatctcgggggtcaccccatgcaaggagtcgaagcagttcgcgaagtcgagtaagcagt

SEQ ID NO: 148062 - DNA, 274 bp, Glycine max
cggctcgagctttttcaccccaaactctttgtattgtggtgaatgtttgagtgcagaaggtataaaaaatggtggtgaagattcgattggcaaggctcgggtgcaggaaccacccattctatcgcgtggttgttactgatagcaaaacaacaagagatggcaagcaacttgaagttttaggtttctacaatcccgtcgcaggcaaggatgatgagaaaagaatgagcctcaaactggaaagagtcaagtattggctttctgtcggagctaagcc

SEQ ID NO: 148063 - DNA, 265 bp, Glycine max
aggctatgtgatttaccgtgttcgtgttaggaggggtggccgaaagagaccagttcccaaaggtattgtttatgggaagcccacaaaccagggagttacccaactgaaatttcagcgaagcaagaggtcagttgccgaggagcgagctggacggaagctgggtggacttagggacctcaattcttactgggtgaatgaggtttgttattgtattacttctgttgaaattgaaatttggttgtgaatcatgtgttgatttggtaaa

SEQ ID NO: 148064 - DNA, 270 bp, Glycine max
gcacaggacagttgaagtaaatggcataaaaatgcacattgcagagaaaggagaaggccctgtggtgttgtttctccacggcttccccgaactctggcactgttggcacaaccagattgtggctcttggttccctcggataccatgcggtggcaccagatctccgaggctacggtgacaccgatgcaccaccttcaatagacagctacacatgctttcatatagtggctgatctcgttgcgcttattgattctcttggtgcagagcaagt

SEQ ID NO: 148065 - DNA, 268 bp, Glycine max
agacaatatgttcgtagtatcattgcatctgttcaaagggtttcattagcactttctccttcgcgctttggttctcacaatgctttccacttaccacctggcactcctgaggcacaaacacttgctcgatggatctgtaacagctaccggttctatcttggggtagaacttctaaaatgtgaaggcagtgaatccattctcaagtctctttggcatcactcagatgcagttttgtgctgctctttaaaggcattacccgttttcacgt

SEQ ID NO: 148066 - DNA, 266 bp, Glycine max
ggtgaataagtgtcgtttaaagatgcagagtctgcaacagaaggcttccgaatggagcggtgtttccatagacgacgctttcggcatcgacgacaccaatctcttccagaaactcggcctccaaaccttcattaacctctccaccaatttctacaacagggtttacgatgacgaggaagaatggtttcgttcaatattcgcgaattctgagaaggagaatgccattcaaaaccaatacgagttcttcgtgcagcgaatgggtggtc

SEQ ID NO: 148067 - DNA, 265 bp, Glycine max
ggctgaggcttcagcacaagcttgtgtcagtattccttccaatccctggagttctctgcaaaggggtttcagtgcataataactccctgtaatgtgcactagtaaagaccaaagtatgattattgttacattatgttacatggttgtacttgtatatacatatcttgtcccacctttgtaaatacaattgggacactactaggattgggaagaagggtctttacatttatagtttggcaaatagatattgcaactacctttgtat

SEQ ID NO: 148068 - DNA, 264 bp, Glycine max
ggcctcgagagcagtgctattgttggctatgtgtgtgcttccggccatggttgtggccattcgcccagcaaagaaccctttttgcgtgaagggtcgcgtctactgtgacccttgccgtgctggttttgagacctcagcaaccacctacattgccggtgctgagattatgttgcaatgcaagagcagggttagcaacgaggttgtgtacaccaagaaggggtacactgactcaactggagcatacacaatgtacgtggacgagga

SEQ ID NO: 148069 - DNA, 270 bp, Glycine max
ccttttcaggcttatcatttgcttttggttggactttgctgaatggagagtgcaagaatcagccaatggttaaatcttcttgtttgtgtactgctattgctcaaggcagaaggatctttagttccattgattttggtcgagaatgcagaatcaaaaggagctgtttgtttggatggaagtcccccagcttaccactttgataagggatttggggaaggtattaatagctggattgttcacattgagggaggaggatggtgcaacaatatc

SEQ ID NO: 148070 - DNA, 266 bp, Glycine max
gatttctcaatctatggctctgcattttcttctcctgctgctttttgcagtgtctgttgttgcagctgatgaagaaccatttataggagtgaatattggaacggatctctcagatatgccacaccctactcaagtactagctctactaaaagcccagcaaattcggcatgttcgattatatgatgcagaccaagctatgctccttgcacttgcaaagacaggcattcaggttgctgtgactgtcccaaatgaagagatcctagcaa

SEQ ID NO: 148071 - DNA, 268 bp, Glycine max
gcagaccaattgtcatgggttgttcttgattttgcgacttcctcaattttgggtccagcaccgcttccactgccagcagcaggaccatcctcatccatggctccacccgcatcaccaccagctccttggtacatctttgctatgatggggttacaaatgctctccaactccttcatcttgtcctcgaattcgtcagcttcagcaagttggtttccatcgagccattggatagcctgctcaattgcatcctcaattttcttcttatcat

SEQ ID NO: 148072 - DNA, 268 bp, Glycine max
tacgagtaaacctttttcttttagatcagagtctttttatagattttgaaagtgaaaaccctttgtattttttatttgttataactacttgagccggatgaaaggaaaccttcacgtccgattttgaaagggggagatcttattggattggatcctatctcaatttttcgtttgctagacccgtagttaaaaaacccactttcttacgattacgaggttcattcgaatatgaaatccaatcttggaaacacagcataccacttttttt

SEQ ID NO: 148073 - DNA, 262 bp, Glycine max
agaactggaccctagggtgcttatacctcattggacactgcttgtcgtggtctggttggcttgtgttgcaagcaccggttctcaagaagtacccggctcgcctctctgtcacttcctacacctgtttctttggactcttgcagtttctcgtcattgctttgctccttgaaagagacgcgcaggcatggcttttccactctggtggagaagctttcactattttatacgcgggagtggtggcatctggaattgccttcgctgt

SEQ ID NO: 148074 - DNA, 262 bp, Glycine max
caaaacagagcaaagagagagtgtgtgaaaagtgaaacaaaaaacagaacaacaatggcgacacttaaggttcctcagcctcttccccccgttgcagatgattgtgagcagctccgaaaagccttctcaggttggggaactaacgaggagctgattgtatcgatcttggctcataggaatgctgctcagaggaagcttatcagagaaacttatgcccagacctatggagaagatctcctcaaggccttggacaaagaatcac

SEQ ID NO: 148075 - DNA, 261 bp, Glycine max
attgagggagaagagaagttttgtgcaaaatccttgggaacagtaattggttttgccatttcaaagctgggaaagaacattcaagtactttcaagttcctttgtcaataagcaagaccaatacactgtggaaggagtgcagaatcttggagacaaagcagtgatgtgtcataggctaaatttcagaactgcagtattttactgccatgaagtccgtgaaacaacagctttcatggttccattggtggctggtgatggaacc

SEQ ID NO: 148076 - DNA, 274 bp, Glycine max
gagaagagaagctaaagaaagaaaggagatgggagtggagaagcagttgttgaggtctggcaccggtccgaagccaattcccggtcagaacgtaaccgttcactgcactggtttcgggaagaacggtgacctttctcagaaattctggaggttacctacctatatcatttctcttcctttcctttcctttccttctttattaattaactctccttatcttacacttacttacagcacaaaggatcctggccagaacccattcactttcaaaatc

SEQ ID NO: 148077 - DNA, 268 bp, Glycine max
gttccatccttatttgtgaatccatctgaccatatctgctctgagtatgttggatactttgagcacagaagaaaaatggaggagattggtgcaggaaacattgaaaagttagccactcaaacttcccttaattgtctactgatgggtgtgttggggaaggaatctgatgaacccctgcacctcattccttcagcttctctgacagttaatcatactccttcaaaggatttcaaagaagctcatgggattcaccaatggtggaaacctg

SEQ ID NO: 148078 - DNA, 161 bp, Glycine max
tatgagagtcacactgccttcacccttccaggactctaccgtgttgttcacggtattgatccctttgatccaaagttcaacatcgtctctcccggtgccgacatgagcatatacttcccatacactgaaactgaacgtaggttaacagagttccacacaac

SEQ ID NO: 148079 - DNA, 269 bp, Glycine max
tgcatctcaatctgaaccaagttacaagagctacccaaaacttctcagaaacattacaaataggagaaggaggttttggaactgtctacaaggccaagttggaagatggcctggttgtggctgtaaaacgtgcaaagaaggaacattttgatagtttgagaacagaattcagcagtgaaattgaacttttggccaaaattgatcatcgaaacctggtgaagctactaggttatattgacaaaggaaatgaacgccttcttattacagag

SEQ ID NO: 148080 - DNA, 260 bp, Glycine max
attggtgtgcctgagcctttgtctgtgtttgttgacacctatggcactgggaagatctatgataaggagattctcaacattgtgaaggaaaactttgatttcaggcctggtatgatctccatcaaccttgatctcaagaggggtggaaataacaggtttttgaagactgctgcctatggacactttggaagagaagaccctgacttcacatgggaagtggtcaaacccctcaagtgggagaaggcctaagtaattcattc

SEQ ID NO: 148081 - DNA, 261 bp, Glycine max
ggcccggagaaggaggaggaggcatacggcggaggagtggcggtggaggagaaaccgacggagacggaaacggagaagctgaagaaggctttggtggattcgttttatggcacggatcttggactgaaagcaacgagtgaaacgagagcagagatcgttgaactcatcactcagctagaggccaagaaccctaaccctgctcccactgacgccttgactctcctcaacggaaaatggattctcgcgtatacgtcctttgca

SEQ ID NO: 148082 - DNA, 259 bp, Glycine max
gttactcacatggggggtgcacctacagtgttaaacatgataatcaattcatcacctaaagtccagaagccgcttccgggaaaggtccaagtgatgacaggtggtgcaccacctcctccggatgtgattttcaggatggaagaactaggatttaatgtgactcattcatatggtttgacagaaacttttggtccggcatcaatttgcacttggaaaccagaatgggacaatctgcctcaagatgcacaagcaaaactca

SEQ ID NO: 148083 - DNA, 261 bp, Glycine max
aaaaataattaactctgatttgaaaagaaaagatggtttgtgtcctttaacacctgaggagactgcccttacacttagggcccttgacatcggtcaaagcattcaaatctacattgcagctggggaaatatatggtggggacaagagaatggcaagtcttgcgaagaactatccaaaattggtcagaaaggaaacactgttggaaccatctgatcttcagttcttccaaaatcattcctctcagatggcggctttggatta

SEQ ID NO: 148084 - DNA, 271 bp, Glycine max
gcttggtcttcccggattccaatcgcctgaaagggaaccggatcttttctctttaagctcaccaaagcttgatgagaagccactcttccctttgcttcctactaaagacgggatttgctcgtcggggcagaaagctgttgtttctggcaacaaaagaggttttgctgataccatggatgggttttctcaggggaagtttgctggtaatacagggatgaacgcggtgctatcacctagaccttctggagctcaaccttctgctatgaaagaa

SEQ ID NO: 148085 - DNA, 263 bp, Glycine max
tacaagttgaacggccaattcagatggatatcctctcagatgaaccgtgtgaggaacggagagctctaccgtgtcatcttcgacacaaggggtgcctttgtgcagcctgcagtttatgaggcctttgggttgactgtggttgacgccatgacttgtgggttgccaacgtttgccacatgcaatggtggtcctgctgagatcattgtgcatggaaaatctggttaccacattgatccttaccatggtgaccatgctgctgagat

SEQ ID NO: 148086 - DNA, 263 bp, Glycine max
acaaaaaaggcaatggactccattggggtctctatggctatgtagtgctcatgtagttcttcttgctgtagaatgtaataataaacaaagttggtcttccttttgagaagttaccagcttttgctgtccaaaattactcaatttgcagctgactagaattcctttctctcttcagtttctgcagatgagtaggtaggcaatttgtgatcactcccttcccttttcatgtcttctgtgttcccttttccatgcttgtttgtgtt

SEQ ID NO: 148087 - DNA, 264 bp, Glycine max
gcaaaagctagcggagaactgatgcagataatgctgcttccatttgctgtgattgcatttgttggtggatatgtcatggcttctttccaaatgatgattctcatatatgctgggggtgtggttttcaccaccttgctcactctccccaattggccccttttcaatcggcatccacttacgtggttggatccaactgaggtggaaaagcatcccaagccacaaccatctgtcaatgtaactcaaaagaagaaacccgttaagaag

SEQ ID NO: 148088 - DNA, 259 bp, Glycine max
cctaaaatggccactctttcctcctacgaccacttcatcttcactgccttagctttcttcatatctggcctaattttcttcctcaaacagaaatccaaatccaaaaagttcaacctccctccaggaccccccgggtggcctattgttgggaacctcttccaagttgctcgttctgggaaacctttctttgagtatgtgaacgatgtgagactcaaatatggctcaatcttcaccctcaagatgggaacaaggaccatga

SEQ ID NO: 148089 - DNA, 256 bp, Glycine max
ccgagtatctccgccgggccgaggagatccgggccgtcctcgacgatgggcccagcggcccggcctccagcggggacgccgcggtcgccacaaggcccaagacgaagcccaatgacggaggcaaagacggagacggcgaggatcccgagcaggccaagctacgggccgggctcaactccgcgatcgttagggaaaagcccaacgtgaagtggaacgacgtcgcggggcttgagagcgccaagcaggctttgcagga

SEQ ID NO: 148090 - DNA, 260 bp, Glycine max
ctctctctctctctcatggcgaatctagcacacttctccaagagagccctaagaagcgcacacgcgctcgcaaggcaccacgtgcagccgcagctgctggcagcggaacgcgcttttgcgacggaggcggcgaaatcgatatccccgtcggcggatcgcgtgaagtgggactaccgagggcagaggaagataatcccgttagggcagtggctccccaaagtggccgtggatgcttacgtagcacccaacgtggtcctcgc

SEQ ID NO: 148091 - DNA, 287 bp, Glycine max
gaacgtcggcattcggttcggctcgaggaaccacaagagtaaaatgcttaagtgatgctggattattccttgattctgctgatgtatctggtcgtcgcagcttaaggaatttgttcggaggtgtggttaccttgcagggagtgcaaagaagtcttccaaggagttgtactagtcgcctcaatccaattttgtgctattttcctcagcacttaattgctggtgtcaggacaccactgtttcttctcaatgcagcttatgatacttggcagattcaagcgagtcttgct

SEQ ID NO: 148092 - DNA, 266 bp, Glycine max
ccggaatatctcagttctctgatcagatccatccgacgtcgtttcagtgataatggctccgttcagcggcgatgagctcgcaccgtttttcggcttccttggagccgcagctgccctcgtcttctcctgtatgggagctgcctatggcacagcgaagagtggcgttggcgtggcttcgatgggtgtgatgagaccagagctggtgatgaagtctattgtccctgttgttatggctggagttttgggtatttatggccttattattg

SEQ ID NO: 148093 - DNA, 265 bp, Glycine max
gaagccctgaatattcagcctgtgatatggggtacctcaattcagttttgtcctcttcaagccaggttcatgctgcagaagattcacctgtcagtggagggggcctcagtcagaatggaaaattcagctatgggtatgctagctcccctggcaagagatcttcaatggaagatttttatgagacaaaaattgatggtgttgatggtgaaattgttggcctttttggagtttttgatggccatggtggtgctcgtgctgctgagta

SEQ ID NO: 148094 - DNA, 260 bp, Glycine max
gagcaagacccaacttctggcaactttcaaccgctacagagatgaccatggcgcttctataactaagaaattgttggataatgcatccactgactttcagaaggcattgcacactgctattagatgtatcaatgaccacaaaaagtactatgaaaaggttctgcgcaacgctctaaaaaatgttggaactgatgaggatgcactgacccgtgtggtggtctcaagggctgagaaggacctcagggacatcaaagagcgat

SEQ ID NO: 148095 - DNA, 260 bp, Glycine max
gggattggccttatagaaaagaaacttaaaaatcgaattcaatggaagggactagatgtttcaagaccgggtgaggctgatgatagttttgccagtttacaggcagaagttgaaaatttaacgatgaaggagcgccagttagacgaacaaataagggagatgcaagaaagactgcgggatcttagtgaagatgaaaataatgacaagttgctttttgttactgaggaagatataaagaatttgccctgcttccagaatga

SEQ ID NO: 148096 - DNA, 257 bp, Glycine max
ttcctttcattttccctcactttctcgctccccaaacgcccctctctctcctccaatggccgaccagctcaccgacgaccagatcgccgagttcaaggaggccttcagcctcttcgacaaggacggcgatggttgcattactaccaaggaacttgggactgttatgaggtcacttggtcaaaacccaactgaggcagaactgcaggatatgataaacgaggttgatgctgatggcaacggaaccatcgatttcccag

SEQ ID NO: 148097 - DNA, 256 bp, Glycine max
cagctggagggtggactgcatttagatttagagcagataatccaggagtttggttcatgcactgccacttggaggtacacacaacatgggggctaaagatggcctttttggtggacaatggcaaaggtccaaagcaatcagtgataccaccacctaaagatcttcccaaatgctaatgcgtcaatcatcaattaattatgcaatacacaaaagaaaggccttccaatgccgaaacaaaagaagctttggagggata

SEQ ID NO: 148098 - DNA, 255 bp, Glycine max
taaagatgataagattgcttccaagctgtctgctgatgataagaagaaaattgaggatgcaattgagcaggctatccaatggctcgatggaaaccaacttgctgaagctgacgaattcgaggacaagatgaaggagttggagagcatttgtaaccccatcatagcaaagatgtaccaaggagctggtggtgatgcgggtggagccatggatgaggatggtcctgctgctggcagtggaagcggtgctggacccaa

SEQ ID NO: 148099 - DNA, 256 bp, Glycine max
ggacgaggaggtttccatctggggcgtccctctctttaaggatgacaggactgacgtcattctcctcaagtttctcagagctcgtgagctcaaagtgaaggacgcccttgtcatgtttcaaaacactctccgatggaggaaggacttcaacatcgacgcccttctggatgaagatctgggcgaccacttggagaaggttgtcttcatgcacggacacggcagagagggccatcccgtctgttacaacgtctacggc

SEQ ID NO: 148100 - DNA, 257 bp, Glycine max
gcgaaacaagtcggtgtccccaacatggtcgtgttcttaaacaagcaagaccaagtcgacgacgaagagcttctccaactagtggagctcgaagtccgcgaccttctgagctcctacgaattccccggtgacgatacccccattgtctcgggctccgcgctcttagccctagaagcactcatggccaaccctgcaatcaaacgcggcgacaacgagtgggtcgacaagattttccaactcatggacgaggtcgacaa

SEQ ID NO: 148101 - DNA, 260 bp, Glycine max
ctcgagccgaatcggctcgaggtgacatagttgtaaaggaccaggaatttattgaagcaactagagaacctggagttacatttgtggctgctaagtttgatggtatactaggacttggatttcaagagatatcagttggatatgctgttccagtgtggtacactatggttgaacaaggtcttgtaaaggatccagtattttcattttggctaaatcggaaaccagaagaagagaatggtggggagcttgtttttggtggt

SEQ ID NO: 148102 - DNA, 259 bp, Glycine max
gaatactgtgttgtgccagcaaatggagtgtctgtgttaccagactcattgccatatacagagtctgcaattctaggatgtgctgtttttactgcttacggcgctatggctcatgcagctcaagtgcgtcctggtgattctgttgctgttattggaactggaggtgttggttctagttgtttacagatagctagagcctttggtgcctcagatataattgctgtggatgtacgggatgaaaagctacagaaagcaaaga

SEQ ID NO: 148103 - DNA, 261 bp, Glycine max
cacagatgattgtatctcaacatctgaggctgcagaattggctgcaaagcttgatgagaaggaaataagtagtttaccaatgcctggacaagttgatttcattaatggtggtcctccatgccagggtttctctgggatgaataggtttaaccagagcagttggagtaaagtccagtgtgagatgatattggcattcttatcctttgctgattatttccggccaaggtatttcttgttggagaatgtgaggaactttgtgtc

SEQ ID NO: 148104 - DNA, 259 bp, Glycine max
tatgaattcatgcaaaagggcagtttggaaaaccatctatttggaaggggttctgctgttcaaccacttccttgggacatcaggcttaagatagcaattggagcagctcgtggcctcgcattcttgcatacatccgagaaagtaatttacagagacttcaaggcctccaatatattgcttgatgggtcctataacgcaaagatatcagattttggcttggcaaaactgggtccttcagctagtcaatcccatgtgacaa

SEQ ID NO: 148105 - DNA, 254 bp, Glycine max
tttcaatataagattttgtttaatttatagaaggtacaaaatcttgtgttaatagcaattgggtggcgaagatgattgaggtggttttgaacgatcgattggggaagaaggtgcgcgtgaagtgcaacgacgatgataccatcggcgacctgaagaagcttgtggcggctcagactggcacaagagccgacaagatccgcatccagaagtggtacaccatctacaaggatcacatcactctcaaggattacgag

SEQ ID NO: 148106 - DNA, 244 bp, Glycine max
tctatggaggatttgctgcagctttgagagatttgaatgtttgggtcatgaatgtggttacaatagactccccagatactcttcctattatttatgaacgaggtctttttggtatatatcatgattggtgtgaatcatttagcacctatcctaggacctatgatctcctccatgctgatcatttgttttcaaagcttaagaaaaggtgcaatttggctgctgtagtggctgaggctgatcggat

SEQ ID NO: 148107 - DNA, 245 bp, Glycine max
atggtcgctatggagtaggagattggtcattccttaaatgccgagagcacatggcaaatgagagggacaagcgcaaagcattccaggaagtttgcaataatttcaggcctgttatgcattattttttcttggagagatttttacagccagctgagtggtttgaaaagagacttgcttatacccgaagtgttgctgctagttctatggttggttacattgttggccttggagatcgacatgcaatg

SEQ ID NO: 148108 - DNA, 244 bp, Glycine max
ggaggaggatggtgcaacaatgtagagagttgcctttaccgtaaggatagtcgcttaggttcatctaagcaaatggaggatctttacttttctgcaattttaagcaacgaacaagagtataatccagatttctacaattggaatagagtcaaggttaggtactgtgatgggtcatcgtttactggtgatgtggaagaagttgatcaaacaaccaatttgcacttcagaggagcaaggatttttt

SEQ ID NO: 148109 - DNA, 244 bp, Glycine max
tttcaatataagattttgtttaatttatagaaggtacaaaatcttgtgttaatagcaattgggtggcgaagatgattgaggtggttttgaacgatcgattggggaagaaggtgcgcgtgaagtgcaacagcgatgataccatcggcgacctgaagaagcttgtggcggctcagactggcacaagagccgacaagatccgcatccagaagtggtacaccatctacaaggatcacatcactctcaa

SEQ ID NO: 148110 - DNA, 241 bp, Glycine max
gttggtgatgttatctctcttttgtggtttaaacgaagccttccccgttactgtactcaatttattgagatatgcatcatgctatgtgccgaccatggtccttgtgtctctggtgctcacaatactattgtgacagcaagggctgggaaggacctagtttctagtcttgtatcaggtttgcttacaattggtcctcgatttgggggtgccattgatgatgctgctcgctacttcaaggatg

SEQ ID NO: 148111 - DNA, 242 bp, Glycine max
caatttaagagatacagtttctcgttccacagttcaggtgtatcccaagtcatggactgcaatttacatgcctttggataatgtgggaatgtggaatgtgaggtctgagaattgggttcatcagtatttgggccagcaattttatcttagagtgtattcccctgcaaattcatggagagatgagtacccaattccaagcaatgctattcggtgtggcaaggctgtgggacactactaatgcc

SEQ ID NO: 148112 - DNA, 242 bp, Glycine max
atttgcttcttcgagtttcacagccaagtcgtaaaagggtttcaagggatggaaaacatgcagagcttctggcaattgggtgatgaactccgtgggcactcaaaagcatcggaggatcacaagtggttaatggttgcctcgaaactggccgaacagacaagattgaagggggagcgtgtgaacaaccttgatctttcaaagggacccattgaaacaaggtcaagggataaatttgggttcca

SEQ ID NO: 148113 - DNA, 240 bp, Glycine max
cggtgattgacatgaagcacatctatggcggggatgagaggcggagggcggagacgctccggctcgtgtcggaggcatgccgggaatggggtttttttcaggtggtgaaccatggggtgagccatgagttgatgaagggggcgagggaggtgtggagggagttctttcagcagccacttgaggtgaaagaggtgtatgccaatacacccctcacttatgaagggtatggaagcaggttgg

SEQ ID NO: 148114 - DNA, 238 bp, Glycine max
actgtggccactccacagcacttctttactgcagagccgattcagcaaaactctgtttctcgtgcgatcgcgaggttcactccaccaaccagctcttctcgaaacacacgcgcacgctgctctgcgacgcatgcgatcattcccctgccaccatactctgttccaccgacacctctgttgtgtgccagaactgcgactgggagaagtacaaccctgcgctctccgattcccttcacga

SEQ ID NO: 148115 - DNA, 233 bp, Glycine max
agaagttaaagaagagggtatttttactcgtaccagtacttttgagagtatcgtttatctggaaagcatagaacaggggtttattcccttgactcgtattgaagataatttgaatgggacacaaattgcggatgaagctggcgagttatctgtatttttgggtggaccacttttttactggtgggaattgaacttaattagagattagattgcgcaaaaagcttcaggattgt

SEQ ID NO: 148116 - DNA, 238 bp, Glycine max
acaagtttgattgggaccaccctattcacttgcagccaactagtcctacaactgagaagaaagttagtgtggtttgggatgcttatggggcaacaaaggatgcagatggtgtttgcattctaactgagtgggatgagttcaagagtcttgattatcagaaggtgtatgacaacatgagaaaaccagcatttgtttttgatggaaggaacattgtggatgtggagaagctacgtgagat

SEQ ID NO: 148117 - DNA, 236 bp, Glycine max
gaaaattctgcaaaaggatccaagatgtctcaaccatatgtttgttgctgaaatctttatgcaccggtttctcttatccagccctgtccgaacccttaatcctgaagaagctgattggttttatacccctgtatacaccacttgtgacttgacaccaaatggcctccctttaccctttaagtcaccacgaatgatgagaagtgctatacagcttatttcttcaaactggccttatt

SEQ ID NO: 148118 - DNA, 239 bp, Glycine max
gtacgagggccaatttccaaaaaccttttgtctcgcaacctcacctcttcctccttcaatctctttcggaatttcccaaaatccttagtgggaggaagagatggttctgactcagaagattcacgaagctttcaaaggcaccgtcgagaggatcactggcccccgaaccgtttccgccttcaaagaaaaaggagttctcagtgtctccgagttcgtcaccgccggcgataatctcgttg

SEQ ID NO: 148119 - DNA, 235 bp, Glycine max
ctttcagctgctgccatccaaaattcaggttggagtgttctctgctacaatgccaccagaagcccttgagattacaagaaagttcatgaataagccagtgagaatcctggtaaagcgtgatgaactgaccctggagggtatcaagcagttttatgtcaatgttgacaaggaagagtggaagctggagacattatgcgacctttatgagactctggctatcacccagagtgtcatt

SEQ ID NO: 148120 - DNA, 239 bp, Glycine max
taacatcactcagtgatgatatatttgccttagccaagaaggaggaccatgtgccattcagaaactcaaagcttacatatctgcttcagccttgtctaggtggagactccaagacactaatgtttgtgaacatatcacctgatccttcttcagttggtgagtcactatgctcactcaggtttgcatcaagagtcaatgcttgtgagattggaacacctcggcgtcaaaccaatggacgt

SEQ ID NO: 148121 - DNA, 240 bp, Glycine max
tggtgaatgcgtagaaaaggaaaataaagaaattagcgtgaaaaatgttgggtgtgttcagcagctccatagtgtcgccgccggaggagctcgttgccgccggcagccgtacaccgtcgccgaagatgacggcggcggcgctgcggaagtggttcgaggagaagaacccttccgcagtgtcggtggaggtcggagagcatgtccagctcgcttatacccaccagaacgagtcgccgtttc

SEQ ID NO: 148122 - DNA, 236 bp, Glycine max
gcgtcttcttgttcctctcgcccagaatccgagatcaaccctgacccctaaggccaggggtttttctcggcttcttcagattcctgaaatggcgtctgtttcagctttagccaagtacaagctcgtcttcttgggtgaccaatccgtgggcaaaaccagcatcatcactcgcttcatgtacgataaattcgataacacctatcaggctacaattggtattgattttctatcaaaaa

SEQ ID NO: 148123 - DNA, 236 bp, Glycine max
cacttctggatgcagaccttgaaagtgatatcttgggttggcaatatatctcaggaggcttaccagatggccatgagcttgagcgcttggacaatcctgagattcaaggggctaaatttgatccagaaggtgaatatgtgaggcaatggctacctgagttggcaagaatgccaactgagtggatccatcatccttgggatgcaccacttactgtgcttcgagcagcaggagttgag

SEQ ID NO: 148124 - DNA, 228 bp, Glycine max
cgacgcccaatcctggggcgtcaacgtccagccctactccggctccccggccaacttcgccgcctacaccgccgtcctcaacccccacgaccgcatcatggggctagatctcccctccggcggccacctcacccacggctactacacctccggcggaaagaagatctccgccacctccatttacttcgagagtatcccttacaaggtaaactccaccaccggctacat

SEQ ID NO: 148125 - DNA, 237 bp, Glycine max
gacagaatgatgctcacattctctgttttcccatccccaaaggtctctgacacggttgtggagccttacaatgctactttgtccgttcaccaactagtggagaatgcagatgagtgcatggttcttgacaatgaagcactctatgacatttgcttcaggaccttaaaactcaccactcctagttttggtgatctgaaccacctgatttctgcgacaatgagtggagtgacatgttgc

SEQ ID NO: 148126 - DNA, 236 bp, Glycine max
gggcggttactacgtccaagagcagctgtctaggcatcgaactctgatggacatatttgataaggctcctgttgttgatgaggatgtatttgttgcgcctagtgcctccgtcattggagacgttcaacttggaagaggatcatccatttggtatggagttgtcttgaggggtgatgttaacagcatcagagttggaactggaactaacatacaggacaactctctggtgcatgttg

SEQ ID NO: 148127 - DNA, 233 bp, Glycine max
aaaataggtcttcttcttctctgatctaccaaagcttcaaattctccttagtttggtttgtctgtgagtttggagtgtaatgtcgccgccgacgctggtaacggaggaggaggggcgtacaccgtggcgtccgattcttcgcaatccttggactgtttctctcagaatggtgctggattgagaaaacggaattacttagggttgtctgattgctcatcagtggatagctgtgc

SEQ ID NO: 148128 - DNA, 234 bp, Glycine max
attttggcagtcaaagggcagaacttgcctgcaagtttaggcaccgatgaagagaaagacaagactagtaccgttccggaccgtgatcagtataacaaagctgattttccagaagaatatactgatgctaaattttttgtcatcaagtcttacagtgaggatgatatccataagagtattaagtataacgtgtgggccagtacccaaaatggcaacaagaagcttgatgctgca

SEQ ID NO: 148129 - DNA, 235 bp, Glycine max
tgaatattcaacctgtgatatggggtacctcaattcagttctgtcctcttcaagccaggttcatgctgcagaagattcacctgtcagtggagggggcctcagtcagaatggaaaattcagctatgggtatgctagctcccctggcaagagatcttcaatggaagatttttatgagacaaaaattgatggtgttgatggtgaaattgttggcctttttggagtttttgatggccat

SEQ ID NO: 148130 - DNA, 234 bp, Glycine max
gcttcttcagttagtagaattggaggtccgggagcttctttccaagtacgagttccccggagacgatgttccgattatctccggttccgctttgctgtctttggaagctttgatggccaaccctgccatcaagcgcggcgaaaaccaatgggttgataaaatttacgagctcatggaagctgtggatgactacattcccatccctcagcgccaaactgaacttccctttttgct

SEQ ID NO: 148131 - DNA, 232 bp, Glycine max
gaaaaggggaggagagctcatttatgctggtccacttggccctaaatcttgtgaacttattagttatttcgaggcaatcgaaggagttccaaagatcaggtctggatataaccctgctacgtggatgctggaggctacttcttcagttgaagaaaacagactgggagtggactttgcagaaatctaccgaaaatcaagtttatgtcaatataacctagagttggttgaaagg

SEQ ID NO: 148132 - DNA, 232 bp, Glycine max
gtaattaataacaagctagctattagttcgattttgtagtaagtgaggtgccaatatggtgaagatagctcttggtactttggatgactcttttagcgctgcctctcttaaggcttatttcgcagagttccacgcaactctgattttcgtgttcgctggtgttggatcagccatcgcttacaacgagcttacaaaagatgcagccttggatccaacggggctggtggcagta

SEQ ID NO: 148133 - DNA, 232 bp, Glycine max
ctcgtcttcgtcgtgtttctcttctctgttctgattcgagatctgccagccatgttcgtgctcttcagattctctctcctccctctcttcctctctctggtcttcgcttccgagtcagatcacaggtatcaacaagatgacccagttaccctttgggtgaacaaagttggtccttataacaatccacaagaaacgtacaattattacagcctaccattttgccgtccacctg

SEQ ID NO: 148134 - DNA, 231 bp, Glycine max
tttacttcccctatggctcgtcactccttgctcttagccctcctcctcttcgccgccgtggccaccgccgcgatggcgtggcgcgtccgacgccgacgacatcctgatccgtcaggtggtgccagatgttggcgaagcgaagaggaggacaacctgctgaacgccgagcaccacttcgcgagcttcaaggccaagttcgccaagacctacgccaccaaggaggagcacgat

SEQ ID NO: 148135 - DNA, 225 bp, Glycine max
tggttcgatgcggtcgagtaataataagaacgggaagaagaaaaaggagaaacctgaattggctgttcttgatcatcctggtcttggaagggttccaaagggtttagaaggagagcaagttgcagcagggtggccaacttggttttcttctgttgctggtgaagctgtccaagggtggataccgcggaaggcggatacttttgagaggtttcataaaattggcca

SEQ ID NO: 148136 - DNA, 232 bp, Glycine max
cggaaaccagaagaagagaatgggggggagcttgtttttggaggtgctgatcctgctcactacaagggcaaacatacttatgtaccagttacacggaaaggatattggcagtttgacatgggagatgtgcttattgctggtaaacccactggatactgtgctgatgactgctcagcaattgcggactctggaacttctttattggctggtccaacgactgtggttactatga

SEQ ID NO: 148137 - DNA, 172 bp, Glycine max
caactctttcaaaagggagaagaaaaggaaaggaaacaaaacgcacaaagggttattatagcaatggcagaacaaaaccaaaaccagacaactgaagctggaaggcaccaagaggttggccacaagagccttctccagagtgatgctctttaccagtatattctggagacca

SEQ ID NO: 148138 - DNA, 230 bp, Glycine max
gcaatttgagatgacgggtttggatcctgagtataataggttgttcaatgagggcatggtgtgcactgctagggttgtgtccaaggctgtgatcactggctacaaagatgggttcaaccagattaagtccttggttgatgttggaggtggcattggagggtctctttcggagattgttagggcttatcctcatatcaatgccatcaactttgacttgcctcatgtggttg

SEQ ID NO: 148139 - DNA, 231 bp, Glycine max
gatatttacatcaacctcccagctttgcagaagcttgacacaatgctcatagaaatattggatagtttccaggatactgaattttggtatgcggacaagggagcatatcagggaattcaactcggtcacggggaggctcatttcgaaggattgttcagaggaaagatgagaagtggtggctgccggttccttgtgttcacactgggggcctctctgataagtcaaggaagc

SEQ ID NO: 148140 - DNA, 232 bp, Glycine max
ctacttttcttcccttctttccagaacaacaccacaacacaaacagagcaaaaaaagctccaccaatggcgggttacagagccgacgacgactacgactacctcttcaaggtggtcctgatcggcgattccggcgtgggcaagtccaacctcctctctcgcttcaccaagaacgagttcaacttggagtccaagtccaccattggcgtcgagttcgccacccgcaccttgaa

SEQ ID NO: 148141 - DNA, 232 bp, Glycine max
gttgagtagccttttactcctagagaaattttgtagctatagagaggaagccaaagagaccttgattatctttattataataataatggaccaggcgaccacgttcaacaaatatgcctttgcttgtgctgcagttgcttcaatggtatccatcatatctggctatgacacgggtgttatgagtggagcaatgatattcatcaaggatgacattggaatcagtgacacccaa

SEQ ID NO: 148142 - DNA, 232 bp, Glycine max
cccatctcaaaactcattcctttcctattcttaacaacccttttagtgtctctccaagttaatgccagagacagccaattcttcagcaaagtcacccctctcaacaacaacattaaacagactgaggttcccaaaaatgaaggccaagtaaacaagccagaacaacaaccagttttcaccccagaaacagaaaacagctatggtctatatggtcatgagactggtctgcacc

SEQ ID NO: 148143 - DNA, 231 bp, Glycine max
ctgtgcttggctgaggccagatggcaagacacaagtaactgttgagtactacaatgacaatggtgccatggttccagttcgtgtccacactgtcctaatttccacccaacatgatgaagatgtgagcaatgaccaaattgctgctgaccttaaagagcatgttatcaagcctgtcattcctgagaagtacctggatgagaagaccatcttccaccttaacccttctggccg

SEQ ID NO: 148144 - DNA, 232 bp, Glycine max
ggctaactcagaggcaactctgggaacctacaagggtaactcacagcttgctgatggtgcctcagagagcctccatgtttcgaactacagctactgatcaatcgaagttggtgttgtttgaagagactagtgcgagtaggaatcggtattatgggtacaacaaccgaatttcttgttgataagtattattgtggtttgactcttcccagaataatcgtttggaattttgctt

SEQ ID NO: 148145 - DNA, 225 bp, Glycine max
cgccgtcgtcgctgtttttgtgtgtcgcttcttcgtaggtgcagctgcaatggtgaagggacgccaaggagaacgtgtcagactctacgtgaggggtacaatccttggatacaaaaggtccaagtcaaaccagtatccaaatacatccctgatccaaattgagggtgtgaatgccaaagaagaagtagcatggtatgctggcaagaaaatggcctatatctacaa

SEQ ID NO: 148146 - DNA, 230 bp, Glycine max
aaccgaaccacttccaaggttgtaaacagaaatgggaaagcctttctcagcaatattgagtgccagattttggcccataacagccaatccagcaaggcctattcttgttgtgggttgagccataattaatctcctgaaatttgaagcaaatgacagaaaaaataaggtctgggaatcacagagcacggatcaaaagatgcgggggaataagttatatatatatgtatgta

SEQ ID NO: 148147 - DNA, 229 bp, Glycine max
ggtgttttcaacagcagctgacaatcagaatcaggttggtatcaaggtgctacaaggtgagagggaaatggctgtagacaacaaatcgcttggagaatttgagcttgttggcattcctcctgccccaagaggcatgcctcagattgaagtcacatttgacatagatgccaatgggattgttactgtctctgccaaagacaagtctactgggaaagaacaacaaatcacc

SEQ ID NO: 148148 - DNA, 228 bp, Glycine max
atcaaaccttaataaaaagtcccccaaaatggctccaacaagaaaccaccttcttcacattgccatgttcccatggtttgcaacaggtcacatgactccattcctccacctttcaaacgagttagccaaaaggggtcacaaaatcacgttcttgctacctaaaaaagccaaactacaactccaacacctcaacaaccatcctcacctcatcacattccataccctcac

SEQ ID NO: 148149 - DNA, 230 bp, Glycine max
ccaagtatcaaggcaacattgatggggcttactttggaactacatttccacacctcttcttgatgacttatggacaactgaagccacagaaaccagcacaaggctatgttccaagagtttttgggttcaaagttcacaagccataaagctgaagttgaagctttcatgaaagtaaaaatctgcccgtgtctcatttaactcttccttatggttctctttgcaacatccgg

SEQ ID NO: 148150 - DNA, 226 bp, Glycine max
tggtgaagggtttttggtggataagattttggataagaccgggatgaaggggaccgggaaatggacggtgcagcaggcggcggagctttcgatagcggcgcccacgattgcggcttcgttggattgccggtacttgagtgggttgaaggaggagagggagagtgccgcagcggtgttgaaggaggcgggattgagtgatgaattggggagggttagtgtgagtggg

SEQ ID NO: 148151 - DNA, 230 bp, Glycine max
gcataggggaggaggagggtaaaagcaatgtcactttgttggtttcctcatcaaccaccatggaaagtgtgtgtctcaagagcttagaatttaaagagcgcaactacatgggattatctgattgttcttctgtggacagctcggttccgtccttctctgaagagactaaaagtaatctgaacctgaaagccactgaactcaggctcgggcttccaggatcacagtctcct

SEQ ID NO: 148152 - DNA, 279 bp, Glycine max
gaagggacttaacgaggtatgaggaactggacaaagagactcaagctcagatgaacgaggagctctctggatggaaacttgttgtgggtgatgtgtttagggagcctgattgctcgaagcttctctgcgtgatggttggagatgggattcaaattcttggaatggctggtgttactattgtttttgcagcacttggcttcatgtcacccgcgtcccgaggaatgctactaacagggatgatcgtcttatatcttatcctgggaattgctgcaggctatg

SEQ ID NO: 148153 - DNA, 278 bp, Glycine max
atcaaaccatttacttcccccacactgaaaccagccgtaggttgacatccttccaccctgaaatcgaagaactcctttacagctcagtggagaatgaagaacacatatgtgtgctgaaggaccgcagcaagccaattatcttcgccatggcaaggttggatcgagtgaagaacatcacaggacttgtggagtggtacggtaagaacgcgaagctgagggagctggtgaaccttgtggttgttgctggagacaggaggaaggagtcaaaggacttggaa

SEQ ID NO: 148154 - DNA, 275 bp, Glycine max
caatttctaattagggtttcgcttagagtaaccaataaccatgggagtcttcacctttgtcgtccgcaaatccggcagcgaatggagcgccaagcaacattccggcgacatcgaggcctccgccgattccaccttcgatctccaacggaagctcgtgcaagccgctctcgccgttgattcctccggtggagttcagtcctctttctctcccgtgtctcctacctccgctgtgttccaggtgatagtgggtggtgcagtattcgttggaggtggtg

SEQ ID NO: 148155 - DNA, 275 bp, Glycine max
cgaaccgtagttgttccgtttcagccatggtggagaacaatctcttcgaggatatatttagggtcgaaaaattaaaccccgatgacaaaaaattattcgataaagtcactcgcattgaagcaagaagtgaaaagtttgacatgtttatgcacctggacattaattccgagatatatccgttaaaggttggtcagaagtttgctcttgtgcttgtttcaacacttaatcctgatggaactccagacactggatattatacccagatcagtcgacaa

SEQ ID NO: 148156 - DNA, 278 bp, Glycine max
cagacacagaagtggtaggtctcacgtctcatcataaggtcgaaaactccattgaaacaagtcttccacataattccaatttgccagaagaaccaatggtgtcaacgaaaaaggaagcaacatgttatgcaacaaggcgttacagaggtgtgaggagaaggccatgggggaagtttgcggcagagattcgcgaccccaaaaagaaagggagcagggtgtggcttggcacatttgacactgagattgatgctgctaaggcttatgattgtgctgccttc

SEQ ID NO: 148157 - DNA, 272 bp, Glycine max
aaagaaggcgtcttcataaacgcctttcttctccgtttccgtttcctcgttcgaattcgctttttgatctgcgaaaatgagagagtgcatctcgatccacattggtcaggctggtatccaggtcggaaatgcttgctgggagctctactgcctcgagcacggcatcgggcccgatgggcaaatgccaagtgacaagacagttggcggtggtgatgatgctttcaatactttcttcagcgagactggtgctggaaagcagtgccacgtgcagt

SEQ ID NO: 148158 - DNA, 263 bp, Glycine max
ctcgagccgattcggctcgagttccaatcctgccaaccaccacacttggatccttccctcagactgtagaactgaggagggtacgccgtgaattcaaggctaacaagatctccgaggaagagtatgtaaagtcaattaaggaggaaattcgcaaagttgttgagcttcaagaagagcttgatattgatgttcttgttcatggagaaccagagagaaatgatatggttgagtactcggtgaacaatgtcaggctttgcttcacg

SEQ ID NO: 148159 - DNA, 279 bp, Glycine max
aacaaagtgtagagtgaaagaatgggtgagaaaagcaagattttgatcataggaggcaccggctacatcggcaaacatatagtggaagcaagcgcaaaggctggaaatcccacttttgctttggtgagggaatccacactctctgaccccgccaaggcacaactcatccacaattttgaggctttgggcgttaatttggtccgcggggatctgtacgatcatgagaagttggtgaaagctatcaagcaagtagatgtcgtcatatccacgctgggtcac

SEQ ID NO: 148160 - DNA, 278 bp, Glycine max
gatgccctggggctatggctaacctctatcatatgtgaaatctggtttgctttttcatggattctggatcagtttcccaaatggtttcccattgatagagagacctaccttgaccgtctttccatcaggtatgagcgcgaaggtgaaccaaacatgcttgctcctgtagatgtttttgttagtaccgtggatcccatgaaggaacctcctctggttacagcaaacactgtctgttcaatcttggccatggattacccggctgatacaatatcatgcta

SEQ ID NO: 148161 - DNA, 279 bp, Glycine max
  unsure (1)..(279): unsure at all n locations
atgagagtgggcatggagggagtnagaagagggaagggatgaaaaggagtgctgggggtgagattgcaccaactacaaggcactataggagtgtctccatggatagtttcattgggaagttgaatttcggtgacgagtcgccgaagctgcctccttcgccggggcagagaggtggtttgatgtcgcctgcgggtggaattgatgggaattcggcggccttcagcttggagtttggaaatggggagtttagtgggcctgaattgaagaaaatatggccaa

SEQ ID NO: 148162 - DNA, 274 bp, Glycine max
gcctttttggcacagagaatttcatctgtgaatgctatgtcagcactttgtgaggccactggggcaaatgtcacacaagtttcctatgctgttggcagagacacaaggattggaccgaaattcctcaatgctagtgttggttttggtggatcctgcttccagaaggacatcttgaaccttgtctacatctgtgaatgtaatggccttccagaggtggctgagtactggaaacaagtgatcaaggtcaatgattatcagaagagccggttcgtga

SEQ ID NO: 148163 - DNA, 272 bp, Glycine max
gatattgatccatctgtatatgctagctattactgggtatcatctcagtttcataagacacgtcaagaatttgctgagttctacaaaagtgcccttctctatttggcatacacatcagtggaatctctctctgattcattcaagctggatctggcatttgatttgtccctctctgcccttcttggggataacatctacaacttcggagagctacttgcccatcctataattaagagccttatggggacaaaggtggaatggctttactacat

SEQ ID NO: 148164 - DNA, 272 bp, Glycine max
gttcatatttcaccagaacaggcagacgctctaagacatgctcctggagtgaaatctgttgagagggactggaaagtgaggagacttacaacacataccccacaatttttagggcttccaactggggtttggccaacaggaggtggctttgatcgggctggagaagacattgtgattggatttgtggactcagggatctatcctcatcacccaagttttgcagctcataatgctgagccatatgggccagttccaaagtatagaggaaaatg

SEQ ID NO: 148165 - DNA, 274 bp, Glycine max
ggtttactggggaggctgttgagggagacgagtttgaagacctggaagatgatgaggatggagatgacgatgagtatgatgaagaggaggatgaggacgaagatgatgatgacggcgatgaagaggaggaagacagtaagactaaaaagaagtcatctgctgttaagaagagtggaagggcacaggctggtgatggtgagcgacctccagagtgcaagcagcagtaattgtttatttcttcggagtgtcatgtggctgatgggtgtttttgagg

SEQ ID NO: 148166 - DNA, 274 bp, Glycine max
tttttgtacaaagcaagtaacattaagttggattcggatacacggtatacttcacattgtctgaagtacttcaccacacacaaatctacaaactctcaaaagtcatttcgttctttgacgctcactttccggggacgaattggtggcataggcccaggcgttgttgttgacatggtcagcaaggtgatcggcgacgttctccaatggaccctttccggtgacaatggcctgatcaaagaagctaaacatagagaacatggccaatcgtccgttc

SEQ ID NO: 148167 - DNA, 274 bp, Glycine max
caaatttctcattctcccatttcctctcagaaccctcgatcactcccacgcgctcctatatcctctccttcaccgtcgctctctccaacgatcacaacaacatcgtcatcccatggcaaacgccgcatctggtatggcagtccatgatgactgcaagttaaggtttttggagctgaagacaaagaggacacaccgtttcatagtttttaagattgaggagcagcagaagcaggtcattgtggagaagcttggtgagccagcccaaggctatgaa

SEQ ID NO: 148168 - DNA, 277 bp, Glycine max
gccgccaacaacttcgcgcgtggccactacaccatcgggaaggagatcgtcgatctctgcctcgacaggatccgaaagctcgccgacaactgcaccggtctccagggtttcctcgtcttcaacgccgtcggtggcggcaccggttctggcttgggctcgcttctcttggagcgtctctccgttgactatggaaaaaagtcaaagctcggtttcaccgtttatccatcccctcaggtttcgacctcggtcgtggaaccctacaacagcgtcctttcaa

SEQ ID NO: 148169 - DNA, 265 bp, Glycine max
cttgggagtgaagttcccatttaaccaaccaatgaagatatacaacagtttgtggaatgctgatgactgggccacaaggggtggtttggagaaaacagattggtccaaagcccccttcatagcctcctacaagggcttccacattgatggttgtgaggcttcattgattcccaattccgttgcacaccaaggaaaaagttgttggatcaaccttagtttcgtgatctctgatgctgctcagtggcgaaaatctcctgggttcgcc

SEQ ID NO: 148170 - DNA, 265 bp, Glycine max
gaccgacagttggattgtagtggaaaagatgaaatgagagaattattatgtgtctataataatagttattgaaagttgtgaggaaggaggaggatggtgtccccgatgtcaacggttctggtgacgggaggggcaggcttcatcggatcccacacggtgcttcagcttctgaagcagggcttcagggtttccatcatcgacaaccttgacaattccctcatcgaagccgttcacagggttcgccgcctggtcggtcctcatcttt

SEQ ID NO: 148171 - DNA, 271 bp, Glycine max
ggcagactagtatccgatcctctgtcctctcgaagctttcatcgttcaacatattctcaccatctcagtcatgggcctgctatcttgttttaggtctaccgtcctgagaaaatgttccaaaggaagctctggcatgtcaagattcctgtatacgaacaattttcaacgaaacttgatttcgtctggtggcaatgaatcgtattatgggtattttaacaggagatcatacacttcactttatatgggaactggaactgtgggtgggattaca

SEQ ID NO: 148172 - DNA, 272 bp, Glycine max
ctaatccctatttttcttcctcagtagtgtcatttacgcttctcttctctgcagcaactatgcctaaccctaaggtcttcttcgacatgaccatcggcggtcaatctgctggccgcatcgtgatggagctctacgccgacgtcactccccgcaccgccgagaacttccgcgcgctttgcaccggcgagaagggcgtagggcggagcggcaagcccctccactacaagggctcgtccttccaccgcgtgatcccgagtttcatgtgtcagggt

SEQ ID NO: 148173 - DNA, 273 bp, Glycine max
atggaaaatacaaaaattatagagtattgggttgtgtctatactttgcatgcttttgtcgggtcattggatctctgttcaagctgcccctgcaccctctctcatcacacaactccctggctttaacgccaatttcccatccaagcactattccggatatataagtattgatggaaatactgaaagtgggaagaacctgttctactacttcgttagttcagaaagaagtccagagaaggacccagttgtgctatggctgaatggtggacctggg

SEQ ID NO: 148174 - DNA, 271 bp, Glycine max
gaagagcatcactgaactaacaaagcaaccctatgtcgaaggtggtttgtgtcaccggagccagcggcgccatcggatcatgggtggtcctactcctcctccagcgtggttacaccgtccatgccaccgtccaagatatcaaggatgaaaatgagacgaaacatttggaggaaatggaaggagcaaagagtcatctccatttttttgaaatggatcttcttgacatcgactccattgccgctgccataaagggttgttccggcgtaatcca

SEQ ID NO: 148175 - DNA, 273 bp, Glycine max
tcaggcgctgctgcttcctcaaaacgcctcaaggtgaatccagaggctcagccaatgaaggaaaatctgaacaccgtgaagccgaaaatgaaccagatgttcaattttggtcacaatctggagggctactacagcccaatagatcaggtggaacagaaaccactggttaaccagtatgttaaccctgccccgttccctggaaacggagttcaagtctcacctgttactccatctgctgatgttactgcttacttcagctctgagcattcgagc

SEQ ID NO: 148176 - DNA, 271 bp, Glycine max
cgcaccttcacgggacattcaacatctgttatgtcactagattttcatccaaataaagatgacctcatctgctcttgtgatggtgatggtgagatacggtattggagcataaacaatggaagttgtgctagagtctccaagggtggcaccacacagatgagatttcagcctcgtctcgggaggtaccttgctgcagcggcagagaatattgtgtctatttttgatgtggagacacaagtgtgtcgatattcactaaagggacacacaaaac

SEQ ID NO: 148177 - DNA, 275 bp, Glycine max
caagccccactcaaccaccacacctctcctcgttcacgctacccctttctgctcttcttctacctttcaagttttaaaagtataaagatggcagagacattcctatttacctcagagtcggtgaacgagggacaccctgacaagctctgcgaccaaatctccgatgctgtcctcgacgcttgcctcgagcaggacccagacagcaaagttgcctgcgaaacatgcaccaaaaccaacttggtcatggtcttcggagaaatcacgaccaaggccaa

SEQ ID NO: 148178 - DNA, 270 bp, Glycine max
aagagcacgacacaggttgctgtaattgttgctttggtcgtcaaaagaagcatgcatcactggcaagcaccccagaagagaaccgtgcactgaggatgggtgattctgatgatgaggaaatgaatctatcattgttccctaagaagtttggaaactctactttcctcattgactcaattccagtggcagagtttcaaggtcgaccactagccgatcaccctgctgtgaaaaatggacgtccacctggtgctctcaccatagcccgcgatc

SEQ ID NO: 148179 - DNA, 269 bp, Glycine max
atcattctgatgggctcaggttatggccgccttctcggcatctacatgggacctcatacaaacattgaccaagggctgtttgcagtacttggtgcagcctccctcatggctggttccatgaggatgactgtatccctttgtgtgatcttccttgaactcaccaacaatcttctcctactaccaataacaatgattgttctcctaatagccaaaactgttggagacagtttcaacccaagcatctatgagattatactgcacttgaaagg

SEQ ID NO: 148180 - DNA, 268 bp, Glycine max
gagcacgatctattgggtcttatttgcgatgggtccggcattgctgctaaggttctgaagtcaatgggaattagtcttaaagatgctcgggttgaagtggagaaaattattggaaggggcggtggatttgttgccgttgagattccgtttactccccgggcaaagcgtgttttggaattctcactggaggaagctcgccaacttggtcataattatattggatctgagcacttgcttcttggtctccttcgagagggtgagggtgtag

SEQ ID NO: 148181 - DNA, 251 bp, Glycine max
ttggttgcccctcttgggtaaagcaatgtttgttgtgcattgtgcaacacaattacctctgttcctccccctgggatggaaatgtctcaactttattgtggagggtgtaggacattgctaatgtacacacgtggagctacaagtgtgagatgttcctgctgtcacactgtaaaccttgttccaccagcatctaatcaagtagctcatgtccattgtgggaactgccggacaacatcatgtatccttatgga

SEQ ID NO: 148182 - DNA, 270 bp, Glycine max
ctcaccgattgctagaatggaatttcgatgctcagtcatctcttttaccattctcttctctcttgctcttgcaggagagagccatgtccatgcatcgctacctgaggaagattattgggaagctgtttggccaaacactcccattcccactgcactgcgagagcttctaaagcctctccctgcaggtgttggaatcgatgaactccctaagcaaattgatgatacacagtacccaaaaacattcttctataaagaagaccttcatccagg

SEQ ID NO: 148183 - DNA, 269 bp, Glycine max
aagattctaaagaaatataactaatattctttagaataatcaaaaagaatattaaattcaaataaattttagatagaaaaaagacttaaaaaggaggatttgaaatgcgagatctaaaaacatatctttccgtggcaccagtagtaagtactctatggttcggggctttggcgggtctcttgatagagatcaatcgtttttttccagatgcattgatattcccttttttttcattctagttattgacacggaaaggggtgaagaagatt

SEQ ID NO: 148184 - DNA, 267 bp, Glycine max
agaagaggttgcataactgaacaaacaaagcaaccctatgtcgaaggtggtttgtgtcaccggagccagtggcgaccttggatcatcggtggccctcctcctcctccagcgtggttatacggtccatgccaccgtccaagacatcaaggatgaaaatgagacgaaacatttggaggaaatggaaggagcaaagagtcgtctccattttttttgaaatggatcttcttgacatcgactccattgccgctgccataaagggttgctccg

SEQ ID NO: 148185 - DNA, 270 bp, Glycine max
atatggttgagtacttcggtgagcaattgtcaggctttgccttcactgttaatgggtgggtgcaatcctatggttcccgttgtgtgaagccaccaatcatctatggtgatgtgagccgcccaaagccaatgactgtcttctggtcatctctggctcagagctttaccaagcgcccaatgaagggaatgcttaccggtcctgttaccattctcaactggtcctttgttagaaatgaccaacctagatctgagaccacctaccagattgctt

SEQ ID NO: 148186 - DNA, 273 bp, Glycine max
cattcacaggctcgacagcagttgggaagaaattgatggctggttcagctgaaacagttaaaaaagtatctcttgaactcggtggcaatgcaccttgcatagtttttgatgatgctgacctggatgttgcagtaaaaggaactcttgcagcaaagttccgtaacagtggacaaacatgtgtttgtgcaaatagaattattgtgcaagaaggtatatatgagaagtttgcaaatgctttacgtgatgctgttcagaatatgaaagttggggatg

SEQ ID NO: 148187 - DNA, 272 bp, Glycine max
taagcggtgagatttgcgaatctgagaaatggcggattcttctcgggaggagaacgtttacatggcgaaattggcggacaggccgagcgttacgaggagatggttgagttcatggagaaggttgcaaagactgtggaggttgaggagttgacggtggaggagaggaatctcctctctgtggcttacaagaacgtgattggtgcgaggagggcttcgtggaggatcatatcctccattgagcagaaggaggagagcaggggcaatgaggacca

SEQ ID NO: 148188 - DNA, 262 bp, Glycine max
aaaactcagtggaatcagagcattccagagtcgtggaatgcctttgtttatataattgaaggtgaaggagttttcgggtctccaacatcatccccaactgtgccacaccatgtccttgtattgactcaaggtgatggcctcagcgtatggaataactcttcaaagcctttgagatttgttctgattggaggccaaccacttaatgagccagttgttcagcatggcccttttgtgatgaacacgagtctgagattgagaacac

SEQ ID NO: 148189 - DNA, 268 bp, Glycine max
gtccaacctacccctttttcttctcccaccaacttcaccgtcttcttcctcgatcatgtctcacttcaagggcaagtaccatgatgagcttattgccaatgctgcttacattggcactcctggaaagggtattcttgctgctgatgagtcaacagggacaattggcaagcgtttggccagcatcagtgtagagaatgttgaatccaacaggcgtgctcttagggagctgcttttcaccgctcccggtgctcttaaatatctcagtggt

SEQ ID NO: 148190 - DNA, 265 bp, Glycine max
ctcttaactcacttcttaaattgtgctattattgtggccattgctttcacttcattgcctaaagagagtccccagctcaactctctagttgttgttgctgcatttttcattttctaggcttagtcattagatagaaagagaaggaaaaaaaaggctattatggcaggaggaggagctccagctaaagcagatgagccacagccacatccaccaaaggatcagttaccaaatatttcttactgtattactagtcctcctccatggc

SEQ ID NO: 148191 - DNA, 267 bp, Glycine max
acggagactccgtcgccggcgtccccgccggctccctcctcgtgctcaaccgcgacgacaagaaaatcttcgaagcattcgagaacgccggaactccgatgagcgactccgacgcggcggggttctgctcgcagagcagcgtgtaccgtccggggatggatgtaacgaaagcagagctcgtcggaagaaccaattggagaagacaagaaaagatggaaaatgttggagaatggaaagctagggttttcgaagtgcataacgtggttt

SEQ ID NO: 148192 - DNA, 270 bp, Glycine max
ggccggcgcccccgtcgaccaaaccatcgccgccctctccgaccacctcgaccccggcgactgcatcatcgacggcggcaacgagtggtacgagaacaccgagcgccgcatgagcctcgtcgccgacaaaggcctcctctacctcggcatgggcgtctccggcggcgaagacggcgcacgccacggcccctccctcatgcccggtgggtcccaccaggcctactccaacgtccaggacatcctccacaaaatcgccgcccaggtcgacga

SEQ ID NO: 148193 - DNA, 269 bp, Glycine max
tctttatatcccccggcgcttgtgtgcggtcattctgttttgctgttgaagtcggtcctagccagtgggcaccgatcgtttgacccgggttcacagtctccgtgagaggcttgatgaaaccctcactgccaacaggaatgaaattttggcccttctgtcaaggatcgaagccaagggcaagggcatcgtgcaacaccaccaggtcattgctgagtttgaggaaatccctgatgagaacagacagaagctcactgatggtgcctttggag

SEQ ID NO: 148194 - DNA, 252 bp, Glycine max
gatccatcctacaacgccagtgcattaaatatcttggaccaaaagaaagggaagagtatgaagtaattgttgaaaaagggaagctggtgtacaaacaagatgggaggcttgtggatactgacggaaagtccaaatggatatttgttcttagcaccacaaggtccttgtatgtggggcgcaacagaaaggtgcatttcaacactctagcttctagctggggctgctacaacagctgaggagattatggctcac

SEQ ID NO: 148195 - DNA, 260 bp, Glycine max
attgacctattcttttttcaagctcttttaattgtcttgggaagaaaatgaacccagaaatgaatggggttgaggctgagaagaggcaagagaatggacatgagaaagtggattatgatgtgcaagagaaaatagactatgtttttaaggtggtggtgataggggactcagcagttggaaagactcaaatactctcaaggtttgcaaagaatgagttctgctatgactcaaagtccaccattggggttgaatccagacta

SEQ ID NO: 148196 - DNA, 233 bp, Glycine max
gcggtgacaagatcctgatcgcgaatagaggcgagattgcggttcgcgttattcgaaccgctcatgaattggggattccgtgtgtggctgtgtactccaccattgataaggacgcccttcatgtcaaactggctgatgaagctgtatgcatcggcgaacgccgagtagccagtcgtacttgctgatcccggatgttctgtcggctgctattaagccgaaatgcacgatgttgc

SEQ ID NO: 148197 - DNA, 264 bp, Glycine max
ctcgagccgctcgagccgcgcagacaagtactggcaaacccttaggaattctactgaaatattccctaaggccttcccacatgattacaaaagcattgaggttcttgagggtgatggcaagtctcctggttctatccgccacataagttatggtgaaggttcaccacttgtgaaatcatcctttgagaagattgaggctgttgatgaggaaaagaaggtagtgtcgtacactatcattgatggggaatcctccagcactacaaa

SEQ ID NO: 148198 - DNA, 268 bp, Glycine max
gtcgaaattgaaagcagcaaggatgcacatctttgtgaggagagggggtcccaactaccagaagggtctagctttgatgcgagcacttggagaggagattggcatccccattgaggtttatggacccgaagccacaatgactggtatatgcaaagaggcaatacagttcattacagccgctgcttaaggtcaacaacaccttcatttatagtattttcatggtgagtctgaagtgaacgttgattcttaatttccttttccattcctg

SEQ ID NO: 148199 - DNA, 249 bp, Glycine max
gtggggtctttccaaggggaagaaatatatgctccattcaagagcctgcttccaatggtgaaccctgatgatgttgtgtttgggggatgggatatcagtaacttgaacctggctgatgccatggccagggccaaggtgtttgatatcgacctgcagaaacagttgaggccgtacatggaatccatggttccactccccggaatctatgacccggatttcattgctgccaaccaaggagaccgtgccact

SEQ ID NO: 148200 - DNA, 242 bp, Glycine max
caactttttcacctctgaaacccgcccctcttgtttcagtggaaatggccgaaactcgagacgccgccgccgatggggtgcccggaactcccgccataagggaaatgagacccgagaccgcgacccatgcgggaatcgggtcgggtgggattcggagggtgaatttccgagcggagattgatacgtcaccgccgtttgggtcggtgaaagaggccgtgacccgttttggaggtagcgggcct

SEQ ID NO: 148201 - DNA, 241 bp, Glycine max
tgactatccacttcatattgtggaacaccaaggtttcattgattttgttcgagcactacaaccccagttcaatccactgagctttaatgctattcaaggggattgtgtctctatgtacctcagagagaagcaaaacctattgaatcttattgatgggattcctggacgagtcaacctcaccttggacttatggacttcaaaccaaacatcggcctatgtttttgttcgagggcacttcgtt

SEQ ID NO: 148202 - DNA, 242 bp, Glycine max
taatcgagcagtccgtgagccccggcggcggcgcgtggctcggcggacaactcttctccgacatggtggttcgcaagccggcgcacctcttcctggacgagctcggcgtggcgtacgacgagcaagaggactacgttgtgataaagcacgcggctttgttcacgtccaccatcatgagcaggcttctagcgaggcccaacgtgaagctcttcaacgcggtggcggcggaggacttgatcgtg

SEQ ID NO: 148203 - DNA, 242 bp, Glycine max
ggtcgcaacaaacacggccgcggccacgtcaagttcattcgatgctccaactgcggcaaatgctgccctaaggacaaggctatcaagaggtttctggtgaggaacattgttgaacaggctgcagtcagagatgtgcaggaggcttgtgtctacgaacaatacacgcttccgaagctgtatgtgaagatgcagtattgtgtttcctgtgctatccactctcatgttgtgagggttcgatcccg

SEQ ID NO: 148204 - DNA, 242 bp, Glycine max
gcagcatgaagattaaggttgtggctccaccagagagaaagtatagtgtttggattggaggatcaatccttgcatccctcagcaccttccagcagatgtggatatcgaagggtgaatatgatgagtctggtccatccattgtccacaggaagtgcttctaagtccaaaagaaatgctttaatggtgagttatgtttttgctatggcttttttggtgtctgtgtcatgtcgtgcgaactatgt

SEQ ID NO: 148205 - DNA, 240 bp, Glycine max
ggcaaccagatcggcgccaagttctgggaggtggtttgcgcggagcacgggatcgaccctaccggaaggtacggtggggactcggagttgcagctcgagaggatcaatgtcgactacaacgaggccagttgcggtcggttcgtgccgcgcgcggttctcatggacctcgaaccgggcaccatggacagcgtccggtccgggccgtacgggcagatcttcaggcccgacaactttgtgttt

SEQ ID NO: 148206 - DNA, 244 bp, Glycine max
ccctaattgaatccaagcaagcaggggaagtgggggtattatttgatcagaagtacaaagctcttcaaaacccaaacaacagctccacggaccacccctactgctctgctctgcaatggccgacgaggaacctgttgatcagaagagatatcttgaagagtcttgcaaaccaaaatgtgtaaaaccattactggaataccaggcgtgcattaaaaggatacatggtgatgattctgggcagaaa

SEQ ID NO: 148207 - DNA, 239 bp, Glycine max
ctcaaacctgaattcggttgtgatataaacctgcgttgcgctaaacgacaccgttttcactgtctctgagaatggaggcacgaagtcgctccgtggaagaaatattcgaggatttccagggccgaagagccggcatcatcaaagcccttaccaccgatgttgaagatttctacagccaatgtgatcctgagaaggagaatttgtgcttatatggatttcctaatgagcaatgggaggta

SEQ ID NO: 148208 - DNA, 241 bp, Glycine max
ccttattcggtctggaaattactttgtggttgtgggtcttgggacacccaagagggacttgtcactcattgttgacactggcagtgatctcacttggactcagtgtgaaccttgtgcgcgttcttgctacaagcagcaagatgtaatatttgatccatccaagtctacatcatattccaatatgacatgtacatctgccctctgcactcagcgctcgactgctacaggaaacgatccagga

SEQ ID NO: 148209 - DNA, 240 bp, Glycine max
cactcataacacaaagcacaaagcaaagctcatccttgagttacaaaatggcagcagcttcttccatggctctctcatccccatccttggctggcaaggccgtgaagctgggcccatcagccccagaagtgggaagggtgagcatgaggaagaccgtcaccaagcaggtctcctcaggaagcccatggtacggcccagaccgagtcaagtacttgggcccattctctggcgagcccccgt

SEQ ID NO: 148210 - DNA, 247 bp, Glycine max
tgatgggcaagttatcaccattggagctgagagattccgttgccctgaagttcttttccagccttctatgattggaatggcagctgctggaattcacgagaccacctacaactccatcatgaagtgtgatgtggatattaggaaggatctgtatggtaacattgttcttagtggtggctcaactatgttccctggtattgctgaccgtatgagcaaagaaatcactgcacttgctcctagcagcatg

SEQ ID NO: 148211 - DNA, 253 bp, Glycine max
tttttgtaaaaagcaagtaacattaagttggattcggatacacaagataattcacattatctgaagtacttcaccaaacacaaatctaaaaactctcaaaagtcatttcgttctttgacgctcactttccggggacgaagttggtggcataggcccaggcgttgttgttgacagggtcagcaaggtgatcggcgaggttctccaatggaccctttccggtgacaatggcctgaacaaagaagccaaacataga

SEQ ID NO: 148212 - DNA, 238 bp, Glycine max
  unsure (1)..(238): unsure at all n locations
ctctactggtctaccaattgaccattctaacatggtcgatctttcaactcaaacttctggcactttgaccagggattggagcccaatgagtatatgtcctcctcatggaagggtgtcatcntcagangcaaatgcttttaatcacgaggcaagtcatttccttattggaagcagttctagtaatgctcctgtagatgttggaggttttcataatgaatttggaatagtagaaatccta

SEQ ID NO: 148213 - DNA, 244 bp, Glycine max
gggcattgttccaaggaatccacatcccccagaagaagagtttcgttatgattcttcagtttctgttgatgctgggggagctggacgacaaacgccaagtcttcagttccctcgaacaaaagaagttgtagtcaatggcattgctgtaaaggtgaaatattgtgagacttgtatgttgtatcgtcctcctcgttgctcgcattgctccatttgcaacaactgtgttgagcgttttgatcaccat

SEQ ID NO: 148214 - DNA, 242 bp, Glycine max
agctcttcctcgagaagttgatccagtggtttacaatatgttgcatgaagatcctggtaatatcagctattcagctgttggtggcttatctgatcagatcagggaattgagggagtcaattgaactacctctgatgaatcctgagctctttcttcgagttggaattaaacctccaaagggtgttctcctttacgggcctcctggtactggtaaaacattgttagccagggctattgccagta

SEQ ID NO: 148215 - DNA, 239 bp, Glycine max
gttttcttcatatcttccttgtcactgcccgtgtgtcgccgccatggccaccgtcaccacccaagcctccgccgcaattttccggccatgtacctcgaaatcgaggtttttgaccggctcttccggtaaacttaaccgggaagtgactatgcggccaatggggtgccctccttctgcctctttcaaggttgaagccaagaagggagagtggttacctggcttggcctccccaacttacc

SEQ ID NO: 148216 - DNA, 239 bp, Glycine max
gggtgatcaaaagcaatttgtacacattgacccgaatgatctgtatccctatcttcttgttaatattgggtctggtgttggcatgattaaggtggaaggagagggaaaatttgagcgagttagtggaacaagtataggcggaggcactttctggggtttaggaaagcttttaaccaagtgcaagagttttgatgagctgctggaattaagttatcgggggaacaatagagcggtagata

SEQ ID NO: 148217 - DNA, 239 bp, Glycine max
ctcgagccgcgagacagttatgcgagctcttggtgattacttgggagttaaggtccatgcttgtgttggtgggacaagtgttcgtgaggatcagcgcattctccaagctggtgtccatactgttgttggcactcctgggcgagtgtttgacatgctgcggaggcagtctcttcgcccagattgcataaagatgtttgttttggatgaggctgatgaaatgctttcacgtggtttcaagg

SEQ ID NO: 148218 - DNA, 242 bp, Glycine max
ggtttgatggtgccttgaacgttgatgttaatgaattccagaccaaccttgtgccataccccaggattcacttcatgctttcatcttatgctcccgtgatttcagctgagaaggctcaccatgagcagttatcagttggtgaaatcacaaacagcgcattcgagccatcatctatgatggccaagtgtgatcctcgtcatggaaaatacatggcttgctgtctcatgtaccggggtgatgtt

SEQ ID NO: 148219 - DNA, 242 bp, Glycine max
gattgtttgttgttgtaactcgttcttcttcttttgttgttctgtgtttgtgtttgttttatctctcacctgaaaatgtcttgctgcggtggtaactgtggttgcggaagctcctgcaagtgcggcaacggctgcggaggctgcaagatgtacccagacttgagctacactgagtcaaccaccaccgagaccttggtcatgggagtggcacctgttaaggctcaatttgagggtgctgaaat

SEQ ID NO: 148220 - DNA, 247 bp, Glycine max
tattaattggagttttctcgctcctttttctttccctgaaaacatttcatcttcgtattgatgtcggaaaagggtcggccacttcccaaatttggtgaatgggatgtcaatgatccagcctcagctgaggggttcacagtgatttttaataaggccagggatgagaaaaagacaggtggcaacccagagtcaccaggaaagactgctactgatcctcatagcaaacctgcagtagagcctggcaaaa

SEQ ID NO: 148221 - DNA, 233 bp, Glycine max
ctttgttcactcttcttctcttgcggctagggttttagcgcacgtcttctagatttaaggcagatgggtaaggaaaaggttcacatcagtattgtggtcattggccatgtcgactctgggaaatccactaacactggtccactggttttccaagctgggaggccttgaccagcgtgggattgagaaggttgagaaggaagctgctgagatgcaccagaggtctttcaagtatg

SEQ ID NO: 148222 - DNA, 243 bp, Glycine max
aaaaattactcgatttttatttctccaaaatgatcaattttataagattgaatcgactaaaaaatgaaatgaatcaattcatattgatagtattgctatgcttagtccccaaagaaccagatttcgtaaacaacatagaggcagactgaaaggaatatcctatcgagggaatcatatttgcttcggaagatatgctcttcaagcacttgagccagcttggataacatctagacaaatagaagc

SEQ ID NO: 148223 - DNA, 240 bp, Glycine max
gcgattgcgactctctcttcctacgataaccgtttcctctcgccggaaaaccgacattgatctctctctccggcgatccccgcccatccctccgccatgagttccggcgagctcctccacatacagccccaggagctgcagtttccctttgaattgaggaagcagatctcgtgctctttgcagttgtctaacaagactgacaactatgtggcttccaaggtcaagacaacaaatcctaag

SEQ ID NO: 148224 - DNA, 239 bp, Glycine max
caataacatagcatagagtgagaagtgagaagagaaaaatggcaatctccatacccagtagacaacttttcatagatggagagtggaaagtccctcttctcaacaatcggtttccgatcatcaaccccgctactgaagacatcatagggcatattccagcggttattaaggaaattgttaactttgcggggaatttgctaaaaaaagccttttcccataacaaaggcaaagattggtct

SEQ ID NO: 148225 - DNA, 239 bp, Glycine max
accacgtgcaagttgggtctacagtgcaaacaaacaatcctattgtcaatgaagttttcaacagtcctcgagctatgcggataccaccaacctgtccactggccaggatcagacctcttgtgggaagatatgtgccgcctgaagttgttgctgttcgggtgccacttctaaatttgtccaattttcaaatcaacgattggcccgatatgtcagcaaaaagctatgcaatcatggttctc

SEQ ID NO: 148226 - DNA, 241 bp, Glycine max
acaaacaccaccacccattgatcggtttttgcttcatccaaactcaatgggtgccgacgaagactacgattacttgttcaagctggtcctcatcggagattcgggtgttggcaagtccaacctcttgtcccgattcacccgaaacgagttcagcttggagaccaaatccaccatcggcgtcgaattcgccacgcgaagtgccccgttgatagcaagctcgtcaaggcacaaatctgggaca

SEQ ID NO: 148227 - DNA, 237 bp, Glycine max
gaaacatggcacgtgtgcacattggaccatactgagttacctaacaaatatggcaagtattggtgctggtgcttctggtctttggaggtggaggtgcttgacctacttggggccaaggagattgcggttcgagcttgggatgaaggtctcaacactcagcctgaacacctcatttggactgttatgggcctgatgaataactgctggttcagagtgaaaaccaatgtgtgcaagccc

SEQ ID NO: 148228 - DNA, 251 bp, Glycine max
atttctccatttccattttctctctcacttttcaagaatcgtaagctatgggaaagtcttacccaactgtgagtgctgattaccagaaggccgttgagaaggcgaagaagaagctcagaggcttcatcgctgagaagagatgcgctcctctaatgctccgtttggcatggcactctgctggaacctttgacaagggcacgaagaccggtggacccgtcggaaccatcaagcaccctgccgaactggctcac

SEQ ID NO: 148229 - DNA, 241 bp, Glycine max
gcagtcgagcctcccgaagaaaaagcgaaaatgccgtcgcacaagacattcagaatcaagaaacagttggcgaagaagatgaggcagaacaggcccatcccctactggatccgcatgaggaccgacaacaccatcaggtacaacgcgaagcccgtcactggcgtcgcaccaagcttggattctgaggtgcttgctttgcctcgattcagtttatccaattaattagtgttttattttcttg

SEQ ID NO: 148230 - DNA, 237 bp, Glycine max
ccctcggtgaggtcactgacccaatctacccaggtggcagcttcgacccattgggccttgctgatgacccagaggcttttgctgagcttaaggtgaaggaactcaagaacggacgattggccatgttctctatgtgtggcttctttgttcaggccattgtcaccggaaagggtccattggagaacctcgccgatcaccttgctgaccctgtcaacaacaacgcctgggcctatgcca

SEQ ID NO: 148231 - DNA, 234 bp, Glycine max
aaagacggcgtcttcataaacgcctttcttctccgtttccgtttcctcgttcgaattcgctttttgatctgcgaaaatgagagagtgcatctcgatccacattggtcaggctggtatccaggtcggaaatgcttgctgggagctctactgcctcgagcacggcatcgggcccgatgggcaaatgccaagtgacaagacagttggcggtggtgatgatgctttcaatactttctt

SEQ ID NO: 148232 - DNA, 238 bp, Glycine max
ctttactcgtcatattaccaatattgacatttgcattccacaaattctgccagagacgttttgagccagcatttaggaagtaccctcttgaggaagcaatgtcaaaggatttattagagaagagcacagaacctgacttgaacatagaggcttatttggctgatgcttacttgcacccaatcttcaggtcatttgaggtagacgacgaattggttgaagtcagagtagataatcacca

SEQ ID NO: 148233 - DNA, 237 bp, Glycine max
caattttctagggtttatacaattttcgatggcttcttcagatgttgagtaccgttgctttgtcggtgggctcgcttgggccactgacgaccaagctctcgagagagccttctctcagtacggcgaaatcgttgaaacgaaggtctgtttgttgcaggcatcacatctgatctcacacgattcggattcggaattttctcgatccctttctgatctgtgatctctgatctgtttgcg

SEQ ID NO: 148234 - DNA, 238 bp, Glycine max
ctcgagccgcaaattccaagcacaagttctctgagttgttttgtgagatagcacatagcatagcaaggcaggagtattacaaccgaaaccctgaagaaaaaaagagtagaggaagaaaaaacacctgcaccaccaacgatgggtgtggattactacaagatcttgcaggttgataggagcgccaaagacgacgacttgaagaaggcttataggaaacttgctatgaaatggcaccctg

SEQ ID NO: 148235 - DNA, 237 bp, Glycine max
ggccgcctcagcgatggtgttggatccgccgcccttcctcccgtcgacaaagtccgcctacctccaaggcggcgacgcacggccttcgatgaggaagatctctacagccgcctcaaatccctagtgcgtcactcgagttcgtcgacatccaggaggagtatgtgaaggacgaactgaagaatctcaggcgcgagctcctccgcgcgatggaggaggtgaagcggatccagtcggtgc

SEQ ID NO: 148236 - DNA, 215 bp, Glycine max
cttattgcgaaccagttgagcaggccaattcaagccattctttatcagcaggactggctcacagtgttggtctcaggaaacagccattgagggtgtacagcatagtgaaatccgcagcaatagctcgtcgggacgctgaggttctcatgaagtttgcaagggccggttaccaggagatactatgggatcatgctgcaggcgtgatcatcatacaa

SEQ ID NO: 148237 - DNA, 241 bp, Glycine max
cccggattccaccgtttctgtttctgatcatcgcgctgctcagatccgaatgatccaagaatctcttcgttttgcctctctgctttctgagaacccttctaaatggcccaagagtatagttgatgttgggtgtggcatagggggcagctccagatacctggccaagaaatttggagcaacgagcgtaggcattactctgagtcctgttcaagctcaaagagcaaattctcttgctgctgct

SEQ ID NO: 148238 - DNA, 236 bp, Glycine max
catgtatatagctggcctggccgcgaactgagacaaacaatggaccttggtgattcagggcttatacccttagagataaggtttttgcatgatcctgctaaagatacaggttttgtcggcagtgcattgacaagtaacatgatacgattttttaagacccaagatgaatcatggagccatgaggttgccatatcagtgaaaccattgaaagtgcaaaactggattcttcctgaaat

SEQ ID NO: 148239 - DNA, 237 bp, Glycine max
gtttgctttgtcattggatccgatgacagccatgtccttccatgacgaaaccctgccagcagatggtgcaaaagtggctcatttctgctcaatacgtggccctaaattctgctctatgaagataacggaggatgtgaggaagtatgctgaggaacatggctatggaactgatgaagctttgcagcgtgggatggatgctatgagtgctgaatttcaagctgccaagaaaactatcag

SEQ ID NO: 148240 - DNA, 235 bp, Glycine max
cctctctctatctctcacacacactttctccctctctctctctcacccagatcttgtagcaatggcgagcgctcccactccacgcgaagagttcgtgtacatggcgaactggcggagaggccgagcgctacgaggagatggtggagttcatggagaaggtctccgcctccgccgagagcgaggagctgaccgtggaggagcgtaacctcctctccgtcgcctacaagaacgtgat

SEQ ID NO: 148241 - DNA, 219 bp, Glycine max
gttagccccaaacacccacacgggcacacccctgcaggtacaaaagggggagttcacaacaaaaagataacaatgagaaaaccttgttgtgacaaggaaaacatcaataaaggtgcctggtccaagcaagaagaccaaaagctcattgactacatccaagtccatggtgaaggctgttggcgttccattcctaaaactgctgggctgcatcgttgtggc

SEQ ID NO: 148242 - DNA, 239 bp, Glycine max
acaaaccctcccctcacactctccaaaccctagcggcactacacacgttatctctctctctctctctctctctccctctctccttccccaagatgtcgagcgccgatcccgagcaccgagaagaggaggaggcacccgccgtcggcgacgacgaggacaccggagcacacgtcgctcccatcgtcaagctcgaggaggttgctgtcaccaccggcgaggaggacgaagatgcaatccta

SEQ ID NO: 148243 - DNA, 244 bp, Glycine max
ggaggagcataagggtgagcaccatgctggagaatacaaaggggagcaccatggtgaacacagtagtgagtacaaaggagagcatcatggtgaacacaaagctggagagtaccatggtgagcacaagccagagcacaaagaggggttcctagacaaagtcaaggacaagatccatggtgagggcggcgccgccgagggcgagacgaagaagaaggagaagaagaagaaggaccatggccatgag

SEQ ID NO: 148244 - DNA, 244 bp, Glycine max
ataacactcatcgtacttatacttttcacttttatctctatctatccattccattttctaattctgaaatttgttgatccagggtgttttcactggccgttttgggacaaacctaaaccatggtgttgaagcagttgggtatggaacagaaaacggcactgattactggctagtgaggaactcatggggctcagcatggggggagaatggttacatcaagctagagagaaatgtgcaaaatact

SEQ ID NO: 148245 - DNA, 248 bp, Glycine max
ccaatcatctttagttcttcagtaatttattgtgggattctattctaagattttgagaatgtctagctgtgggtgtggaagcagctgcaactgtggcagcaactgcggttacaacaagtactcttttgacttgagttacgttgagaagacaaccacagagactctagttttgggtgttgggcctgtgaaggccaattggagggtgctgaaatgggtgttgcatctgagaacggtggctgcaactgtgg

SEQ ID NO: 148246 - DNA, 251 bp, Glycine max
ggaaaggagatcagtgatgctgatatcctgaaatgggtgaacagaaaagtgaagatcattggtagaacttctcacatagagagcttcaaggagaagagcttgtcaagtggactctttttccttgagcttctgagtgctgttgagcctatggttgtcaattggaaccttgtcaccaagggtgaaagtgatgatgagaagaggttgaatgccacttatataatcagcgttgcacggaagctcggttgttctat

SEQ ID NO: 148247 - DNA, 243 bp, Glycine max
agctaatagagtagctgttgaaagctgtcatagggttctgagtttgttgtctcaaccaagggatcaggttcagcataggaatttaatggtggaaactggggaagctgtggtgaggttcaagaaagttgtttccttgcttcacagtggtatgggtcatgcaagagtgaggaaggttaaaaaccctcaaatccccttttcccaccaaagcatcttcttagacaaccccaattgcaaaaccatcaa

SEQ ID NO: 148248 - DNA, 234 bp, Glycine max
cgaatatcttgttgtttggagcgatccgagaaaaactctgtaaacatgttggtttaccaggacctccttacaggtgatgagcttctctctgactccttccgttacaaggaaattgagaatggaatgctgtgggaagttgaggggaagtgggttgttaaaggagcagttgatgtagacattggtgcaaacccttctgctgagggtggaggagaagatgagggagttgatgatgca

SEQ ID NO: 148249 - DNA, 237 bp, Glycine max
gattttcgccaaagcaacaggttgcaggaaacaatggatcggttggctgcaaagttagaatcaatttataatgctgcaggagggaagagaataaacattataactcattctatgggcggtcttttggtgaaatgtttcatgtgcctgcaaagcgatatttttgagaaatatgttaagaattgggttgcaatttgtgcgccattccagggtgcaccaggaaccatcaattctaccttt

SEQ ID NO: 148250 - DNA, 238 bp, Glycine max
cggctcgagcggttcgagaagcaatttgcagctggcctaagagctttgaagctcgtaggagttgaaggtgttgagctccctatttggtggggaattgttgagaaagatgccatgggacaatatgactggtcaggctatcttgttattgctgagatggtccagaaagtgggtctcaagcttcatgtgtctctttgctttcatgggtctaagaaaccaaatatccccctacctaaatggg

SEQ ID NO: 148251 - DNA, 239 bp, Glycine max
gagaaggagacccagttcagagaatgctatttgtagtaaggggtcatcttgcaagcagccaagtcctaagggatggtgtgaagagttgttgcatgttaggtccaggaaacttcagtggggacgagctcctttcgtggtgtttgaggaggcctttcatagaacgccttccgccgtcttcatccacactcatcacgttggaaaccaccgaggcgttcggccgtgaagcccaggacgtgaag

SEQ ID NO: 148252 - DNA, 247 bp, Glycine max
gccaaacccaggcttcttgagcctgtctacctggttgaaatacaggctcctgaacaagctcttggtggaatctacagtgttcttaaccagaagcgtggacacgtgttcgaggaaatgcagaggccaggtaccccactatacaacatcaaggcatacctccctgtcatcgagtcctttggtttctcgagcacattgagggctgcaacatcaggccaggccttcccacaatgtgtgtttgatcactggg

SEQ ID NO: 148253 - DNA, 202 bp, Glycine max
tatatatccctatatgtataggactgcctctttaatgaagacagggaatgttcaaggtgcactggctgaaatcaaccggattcttggctttaaactttcgttagagtgcttggaattacggttttgtatctatctggcccttgaggactacaaagcagcagtccgagatgttcaagcaattcttaccctgtgtccatcttat

SEQ ID NO: 148254 - DNA, 236 bp, Glycine max
ggaaaagaaaacacaacacacacacaaaggataaaacagaaaaaccatgtcttctccaagcaagcggcgagagatggacttgatgaaactgatgatgagtgactacaaggtggagatgattaatgatggaatgcaagagttttatgtgcatttccatggacccaatgagagtccttatcatggaggtgtgtggaaagtgagggttgagctgccagatgcttatccttataaatctc

SEQ ID NO: 148255 - DNA, 233 bp, Glycine max
cgcttttacgttggtttattcggtttgtgttgctctgttatgctgctcctccctgtttgatttcaaggtatttgcccgaatcttctttctcgaagggtaaaggataaagggatgatctacacagcaattgacacgttctacctcacagatgagcagctagcaaactcaccttctagaaaagatggcatagatgaagccactgagaccacccttagaatctatggttgtgatct

SEQ ID NO: 148256 - DNA, 234 bp, Glycine max
gttgaatgtgagtcatcatcatcatttgaatctactgagtcatcatcatcatgagtacagaaaccttctgaaagatctcattgttcagtgtttgcttagactgaaagaaccttcagtcctattgagatgtcggaaagatgacctgcacttggtagagcatgtgctggattcatctgcacaggagtatgctgagagagcaaatgttgatcccccagagatcattgttgacaacca

SEQ ID NO: 148257 - DNA, 237 bp, Glycine max
atcctccttctgtcccatctgacaaactaactcatgtatacactgcaattctgaagcccgataatgaattgcaaattttgattgatggtgaggagaagaaaaaggcaaatttcttgtcttctgaggactttgagcctcctcttatcccttccaagacaatccctgatcctgatgataagaaacctgaggactgggacgaaagagccaaaatcccggacccaagtgctgtgaagccag

SEQ ID NO: 148258 - DNA, 210 bp, Glycine max
ttcttcgggaatttggtgcttataatgatcattgggtagtggcaaaaatggaagaggaagctcagaaagaggctagccagaggtataatggaaagcagtttcatttaagccaggatcctgacgttcttgatacatggttttcttctggtctgttcccattatctgagctgggatggcttgttgacacagagggcctgtaagacattctat

SEQ ID NO: 148259 - DNA, 241 bp, Glycine max
gtcaacaccaaaaatatctgctactctttgctctgctctgcttagggttccaacttcaaacccaacagcacttatcgttctcatgcaacaagggaaaatgaggcctattttctgtggaaattttgaatatgatgcccggcagtcagagctggagcggctttttagacgatatgggaaggttgatagggtggatatgaagtctggatttgcttttatctatatggcagacgagagagatgct

SEQ ID NO: 148260 - DNA, 241 bp, Glycine max
ctcgagcgattcggctgagggattaacgagattcccactagccctggtcgcggggacaggagatcagagacccaggcacgggcttggcggaatcagcggggaaagaagaccctgttgagcttgactctagtccgactttgtgaaatgacttgagaggtgtaggataagtgggagctggaaacagcgaaagtgaaatactacaacttttaacgttattttacttattccgtgaatcggaagc

SEQ ID NO: 148261 - DNA, 245 bp, Glycine max
aagatgatctagaattagggcaattacgtttactagaagtggacaatagagtggtagtgccagctaaaactcatctgcgtgttattataacatcagctgatgtacttcatagttgggcagtaccttccctgggtgtcaaatgtgatgctgtgcctggtcgtttgaatcagatctctacttttatacaaagagaaggggtttactatggtcaatgcagtgagatttgtggaactaaccatgccttt

SEQ ID NO: 148262 - DNA, 248 bp, Glycine max
cagactcaggaaaagatgcaggccgtctttctgcggcttgggcgctttacaaggctcaagaagaacttgtgaaggttgctaaggagtatggtgttaaacttacaatgtttcatgggagaggagggactgttggaagaggaggaggtccaactcatcttgctatattgtctcagccaccagacaccattcatggctcacttcgggtaacggttcagggtgaagtcattgagcagtcttttggagaggaa

SEQ ID NO: 148263 - DNA, 235 bp, Glycine max
ggccctgatgatgtttacattaaagttcactactgtggaatttgccattctgatctccaccagattaaaaatgatcttggcatgtccaactatcccatggtcccaggacatgaagtggttggtgaggtactggaggtgggatcaaacgttagcaggttcagagtgggagagttggtgggagttggactcctcgtaggttgctgcaaaaactgccagccatgccaacaagacattg

SEQ ID NO: 148264 - DNA, 236 bp, Glycine max
ctcactcatctcttacaacgaaaccctcttcatcttgttctatctgtgacgagcatcatggcctcaagagcagtgttattgttggctatgtgtgtgcttccggcgatggttgtggccattcgcccagcaaagaaccctttttgcgtgaagggtcgtgtctactgtgacccttgccgtgctggttttgagacctcagctaccacctacattgctggtgctgagattatgttgcaatg

SEQ ID NO: 148265 - DNA, 247 bp, Glycine max
ctccaagttgcatacagatgaggaatatcattctaagtgcatttccacgtagtatgaggctgccagatccatctactcctaatctgaagattgatttgcttcaagaaataacccaatcgcctcgcattctttcggaggttgatgcagcactcaaagcaaagcagatgaaggttgatgtagatgaataccttaagacaaggcaacagagttcgccgtttttatctgaactgaaggataagctgcttct

SEQ ID NO: 148266 - DNA, 248 bp, Glycine max
cttgttggtattggagtctatggctaaatatggtgtgaagacattaatatattctagtacgtgtgcaacatatggggaaccggaaaagatgcctattatagaaacaacagaacagaaaccaattaatccatacggaaaagccaagaagatggcagaagatatcatccttgatttttccaaaaattctaagatggcagtaatgattctgagatacttcaatgtgattggatcagacccagagggcagat

SEQ ID NO: 148267 - DNA, 250 bp, Glycine max
gggtgaagagcactgtgagagtgccggcgattagttcaaaagtcgccgatattccaccggacgagtactcctggaggaagtacggtcagaaaccgatcaagggttccccatacccaaggtgagtgatatttaattttgaccgttgatttagttgacttttatctcatcaagactcgttccctgacgtcgattttttttatcatcaggggttactacaagtgcagcacgattagagggtgcccagcgagga

SEQ ID NO: 148268 - DNA, 251 bp, Glycine max
ctcaaggcaagaatgccaggcctaaaggcatgatcacatgtggcatgactttcataattataggaaccgaggtggctccatggtgcaaaactggtgggttgggagatgttcttggaggtctaccaccggcattggcaggttttgggcatcgagtaatgactattgtgccgcgctatgaccagtacaaagatgcatgggatacaagtgttgtaattgaggtgaaagtaggagatagaacagaaaaggttcgc

SEQ ID NO: 148269 - DNA, 239 bp, Glycine max
atggaagctggccgtcctgttgctctggagaattggcgcctctgccccaccaatggttgctgcagaggctccaattctccagcagtattcaccatacatggactctggcctgactataatgatggaagctggccgtcctgttgctctggatctagacttgatccaaaagagatatcaacattgactaatgctttagagcaatattggccatcattgagctgtagcaagccatcattatg

SEQ ID NO: 148270 - DNA, 237 bp, Glycine max
cctaaagcacatagatgagagaaacaaggtggtcagcaactactggcttggcttgaatgagtttgctgatttgagccaccaagagttcaagaacaaatatctggggcttaaggtggactactctagaaggagagagtcccctgaagaattcacttacaaagatgttgaattgccaaagtcagtggattggagaaagaaaggtgctgtaacccaagtcaagaaccaaggttcatgtgg

SEQ ID NO: 148271 - DNA, 234 bp, Glycine max
tgtggacagccaacacagagaggtacagcaacgtagttgtgaggactaaacgacaccatggaaaacctctttgcttccttggacaggaatgaggctgagatttccccttccaccttgtatgccattgcttgtgttatggaaaatgttcctttcatcaatggaagccctcagaacacctttgccccaggactcattgatctggccatcaaaaggaatagtttgattggaggagat

SEQ ID NO: 148272 - DNA, 233 bp, Glycine max
tgattgtttgttgttgtaactcgttcttcttcttttgttgttctgtgtttgtgtttgttttttctctcacctgaaaatgtcttgctgcggtggtaactgtggttgcggaagcgcctgcaagtgcggcaacggctgcggaggctgcaagatgtacccagacttgagctacactgagtcaaccaccaccgagaccttggtcatgggagtggcacctgttaaggctcaatttgagg

SEQ ID NO: 148273 - DNA, 237 bp, Glycine max
gtgtatttccctacctctcccttcaagatgcagatcttcgtcaagaccctcaccggcaagaccatcacccttgaggtggaaagctctgacaccatcgacaacgtcaaggccaagatccaggacaaggaaggaatccccccggaccagcaacgtctcattttcgccggaaagcaacttgaggacggccgtacccttgctgactacaacattcagaaggagagtactcttcacctcgtc

SEQ ID NO: 148274 - DNA, 234 bp, Glycine max
ggaaaacaaagtatagagtgaaagaatgggtgagaaaagcaagattttgatcataggaggcaccggctacatcggcaaacatatagtggaagcaagcgcaaaggctggaaatcccacttttgctttggtgagggaatccacactctctgacccctccaaggcacaactcatccacaattttgaggctttgggcgttaatttggtccgcggggatctgtacgatcatgagaagtt

SEQ ID NO: 148275 - DNA, 250 bp, Glycine max
gattgctagaatggaatttcgatgctcagtcatctcttttaccattctcttctctcttgctcttgcaggagagagccatgtccatgcatcgctacctgaggaagattattgggaagctgtttggccaaacactcccattcccactgcactgcgagagcttctaaagcctctccctgcaggtgttgaaatcgatgaactccctaagcaaattgatgatacacagtacccaaaaacattcttctataaagaa

SEQ ID NO: 148276 - DNA, 252 bp, Glycine max
tgaactttttgtgtgcttccggatacgaccaacaactcatctccgcactcaatttcaatggcacattcatttgtaaagggtctcacagcgtaacagacttgaactacccttcaatcacattaccaaatcttggcctaaaacccgtaaccattactcgcacagtcacaaatgttggaccaccagccacatacactgcaaatgtccactcgcctgctggatataccattgtcgttgtgccaagatccttgactt

SEQ ID NO: 148277 - DNA, 237 bp, Glycine max
caacaagaaggcgtccagcagccgagccggccgaattcgcaccctctccgatctgaaccgtccctccgccgattccgacagcgactccgatggccctcaggagtattacaccggcggcgaaaagagtggaatgcttgtccaggatccttcaaagggaaatgatgtggatgaaattttcaatcaagctaggcaacttggggctgttgaaagagcctcttgatcagcttcaggagcctc

SEQ ID NO: 148278 - DNA, 233 bp, Glycine max
atcaactcttcaaaagggagaagaaaaggaaagaaaactctcaaaaaactattatagcaatggcagaacaaaaccaaaaccaaacaactgaagctggaaggcaccaagaggttggtcacaagagccttctccagagtgatgctctttaccagtatattctggagacaagtgtctacccaagagaacctgaatccatgaaagaactgagagagttgacagcaaaacacccatgg

SEQ ID NO: 148279 - DNA, 239 bp, Glycine max
attccattgccacccagttttgaatatatttttattccttctttgtttcttcactttcttccatacacataaccatgtcttctcagactgttgtcctcaaagttggtatgtcatgtcaagggtgtgctggagcagtgaacagggttttgggaaaaatggaaggtgttgagtcatttgacattgatctgaaggagcagaaggtgacagtgaaaggcaatgtggagccagatgaagttctg

SEQ ID NO: 148280 - DNA, 241 bp, Glycine max
atgtgaacaccgtcattggccctgctttgattggcaaggacacaactgagcagactgctattgacaacttaatggttcaacagcttgatggaactgttaacgaatggggttggtgcaagcaaaagctaggagcaaatgccatattggcagtgtctcttgcagtctgcaaagctggtgctagcgtcctgaaaatttcctctttacaagcttagtgctaatatcgcgggtaacaaaaagttgg

SEQ ID NO: 148281 - DNA, 242 bp, Glycine max
ctctaactcaatctctctctctctctctctctgaatttcctcctctctccgattccttttattaattggagtttactcgctccttttcctttccctgaaaacatttcctcgtcgtattgatgtcggaaaagggccggccacttccaaaatttggtgaatgggatgtcaatgatccaacctcagctgaggggttcacagtgatttttaataaggccagggatgagaaaaagacaggtggtaac

SEQ ID NO: 148282 - DNA, 245 bp, Glycine max
gaaggctgtcgagatgttcagtggttacgaactaaatggaagagtgttgactgttaataaggctgctccaaaaggagcacagcctgaacgcccaccacgcccaccacgttcctttagttctggtttaagagtctatgttggcaacttgccatgggaagttgacgatgctcggctggagcaaattttcagtgaacatggtaaggttgaggatgctcgggtggtctatgacagagagactggtcgat

SEQ ID NO: 148283 - DNA, 256 bp, Glycine max
gttcagagaggatcaaagaaattattgttcagttcaaagggagctttgtgctagaattgcagcagagagctattgaattcaattcgattattgcaaagcatcaaaatattaggtctacacttgtagataggatgccagttttggatgaggcaacttcccattggtaggagggctgggtctctaccaggttgcagcttcaattcaaatggaacttcattttaatcttccaaatggaccggcaaacctgtggctcctc

SEQ ID NO: 148284 - DNA, 248 bp, Glycine max
attctaatcttcgcaaatcaacaacgtctctctctgttactctgaaaactgacttcaagttagtgtaactagctgccaagttgtgatggcattggtctctggaagaagttctgctctgaacccaaatgcacctatgttcatacctgctgcacttcgtcaggtggaggatttttcacctcaatacagcgatcttgtgaaatcttcaacatggtttcgtgattattggttgagccaacataaggaggaag

SEQ ID NO: 148285 - DNA, 249 bp, Glycine max
tgtatagacagctagaatattttaaggagtatcaaaaccgagtgagtgctctaattggagcttcagaggctacgaatttggtgaaacaagcactagtgctcatcactgtagggggcaatgattttgtaaacaactacttcttggtgcccaattcagcaaggtcccgccagtacccactacctcaatacgttaagtatcttatctctgagtaccagaaaattttgcagaggctatatgatcttggagctc

SEQ ID NO: 148286 - DNA, 249 bp, Glycine max
ctctcttgtgttagtgagagacagttctctctgcttctctctcttagactcagaaccctattgcgtgctttgcaatcgaccccgattatggccaacagtaacctccctcgaagaatcatcaaggaaacgcagcgtttgctcagtgagccagcacctggaattagtgcgtccccttcggaagacaatatgcggtatttcaatgtgatgatccttggcccaactcagtcgccttatgaagggggagttttc

SEQ ID NO: 148287 - DNA, 244 bp, Glycine max
cggctcgaggagagcgcgtcttaataaacgctcttctctgaaaacccccatttcttttcttctttcttcttctctttcgcttcttcgatcttcgatcttcgtcgctgaaaatgagagagtgcatttcaatccacatcggccaggccgggattcaggttggaaacgcctgctgggagctttactgcctcgaacacggcattcagcctgatgggcagatgccaagtgacaagaccgttggtggagg

SEQ ID NO: 148288 - DNA, 242 bp, Glycine max
ctaccacttggctttcacgtttaccttcgcagcgctctttctctctgaaccctaatttacacacactccctttattcgatccctctctccaaccatggcgatcaactcttccaagaatccagatggttctgtccaaaatgcaatgccttcgtatttttattctccaccactagatgtttctgctgcatttccacaagcaacaccagcatcaacgtttcctccttgtgcttcagattattttc

SEQ ID NO: 148289 - DNA, 242 bp, Glycine max
tttcagctccggtaacctctccttctccgccgccgttgctatctccgccgtgaccttccatccctcaacgccccacagatcttcaatttgattgcttgggtcaacaatttctgtcattctcaatcatggcaactagacttcagtttgaaaataattgtgaagttggagtcttctctaaactcaccaatgcttactgtttggttgcgattggaggttctgaaagcttctacagtgtatttgaa

SEQ ID NO: 148290 - DNA, 246 bp, Glycine max
ttgggaatagtgctgcaatggcttcaagtcaggaggaggtgacccttttgggagctactggaagcccatttgtgtgcagggttcatattgccctcaagttgaagggagttcaatacaaatatgtcgaagaaaatttgaggaacaagagtgaactgcttctcaaatccaacccagttcacaagaaggttccagtgtttattcacaatgagaagcccatagcagagtctcttgtgattgttgaataca

SEQ ID NO: 148291 - DNA, 247 bp, Glycine max
gtctccgaggccgacatcttcgtcaccaccacagggaacaaggacattatcatgcttgaccacatgaagaagatgaagaacaatgccatcgtgtgcaacattggccacttcgacaacgaaatcgacatgctggggcttgagacctgccctggtgtgaagcgcatcaacatcaagcctcaaacggacagatgggttttccccgataccaagagggggatcatcgtgttggcagagggtcgtttgatga

SEQ ID NO: 148292 - DNA, 250 bp, Glycine max
ccgattgctagaatggaatttcgatgctcagtcatctcttttaccattctcttctctcttgctcttgcaggagagagccatgtccatgcatcgctacctgaggaagattattgggaagctgtttggccaaacactcccattcccactgcactgcgagagcttctaaagcctctccctacaggtgttgaaatcgatgaactccctaagcaaattgatgatacacagtacccaaaaacattcttctataaag

SEQ ID NO: 148293 - DNA, 247 bp, Glycine max
tctttcttcctcttcctcagtagtgcgattttcgattctcttctctgcaactatgcctaaccctaaggtcttcttcgacatgaccatcggcggtcaacctgccggccgcatcgtgatggagctctacgccgacgtgactccgagcaccgccgagaacttccgcgcgctctgcaccggcgagaagggcgccgggcggagcggcaagcccctccactacaaaggctcgtccttccaccgcgtgatcccg

SEQ ID NO: 148294 - DNA, 240 bp, Glycine max
gggatctggtgggtttgccttccatgaacatcatgagaaaaagacccagagcatgctcacaggcacaagatagaagaggaggttgcagcagcagctgcagtgggatctggtgggtttgccttccatgaacatcatgagaaaaaggaagcaaaggagcaagatgaggaagctcatggaaagaagcaccaccatctctttggctgaagcataagcaaccaattatgagcatattccttctac

SEQ ID NO: 148295 - DNA, 149 bp, Glycine max
gtggcgccggcaaaggtcgcactaacatgcgccgcaccgtcaagagtgctcctcagagcatttggtatagccctgaccgtcccaagtacttgggtccattctcggagcagattccatcatacctgaccggagaattcccgggtgactac

SEQ ID NO: 148296 - DNA, 247 bp, Glycine max
atttgactcaactgtaaagctatgggatgtggaacttgggaaactcatctacagcttggatggacacaggcatcctgtatattctgttgctttcagtcccaatggcgattatctagttagtgggtctcttgacagatccatgcacatatggtcattgagggacggcaagattgtcataacatacacaggcaatgggggcatttttgaggtctgctggaataaggagggtgacaagattgctgcatgt

SEQ ID NO: 148297 - DNA, 248 bp, Glycine max
gcttgggcttgcaaagcgagtaggagcaaggattttgcttacatcaacttcagaggtatatggggatcctcttgtgcatccccaacctgaaagttattggggcaatgttaaccctattggagttcgtagttgctatgatgaggggaaacgggtggccgagacattgatgtttgattaccataggcagcatgggattgaaatacgcattgcaagaatctttaacacatatggaccacgcatgaatattg

SEQ ID NO: 148298 - DNA, 248 bp, Glycine max
ctttaaaatccgcactgtggagcaggatgggaagactattaaacttcaaatttgggacactgcgggtcaggaacgtttccgaacaatcactagcagctattatcgtggggctcatggcattattgttgtttatgatgtcactgaccaagagagctttaataatgttaagcagtggctgaatgaaattgaccgttatgcaagtgaaaatgttaacaagcttctagttggaaacaagtgcgatctcacgg

SEQ ID NO: 148299 - DNA, 246 bp, Glycine max
tacaaagcattgaattcaaaaactaagttcatttcttgtgctttgctttattcctcaaaaccaaacatgtcgaacacatgcggcaactgtgactgcgctgacaagactaactgcaccaagggaaacagctatggtgttatagtagagactgagaagagctacatcgagactgttgacatggatgttccagcagctgagcatgatgggaagtgcaagtgtggcactaactgcacttgcacggactgc

SEQ ID NO: 148300 - DNA, 241 bp, Glycine max
agaacatctcattgcagcattccaatattttgacaaggatggtagtgggtacattacagttgatgaacttcaacaagcttgtgcagaacaaaacatgactgacgcttttcttgaagacatcattagagaagttgatcaagataatgatggaaggattgattatggtgaatttgctgccatgatgcaaaaaggcaacgctggaattggtaggagaactatgcgcaacagtctgaatttaagc

SEQ ID NO: 148301 - DNA, 238 bp, Glycine max
ctcctcatctctctccaccaccgccaatctcctcccatgtcgccgcttcaccgcattcccccgccgccgcgcctcttcattctccgtgcaagctaagatccgcgaaatcttcatgcccgcactcagctccaccatgaccgagggctaaatcgtctcctggatcaagtccgatggcgacatgctctccaagggctacagcgttgtcgtcgtcgaatccgacaaggccgacatggacgtc

SEQ ID NO: 148302 - DNA, 236 bp, Glycine max
acgcctcagtagaccatggcctcattgggtgggttacaaaatctaagcggcatcaattttcttatcaaaaaagagggtccaaaagtcaatgcgaagttcgagctgaagccgccaccatatccactgaatggtttggagccggtgatgagccagcagacacttgagtttcattgggggaaacaccacaagacatatgtggaaaatctgaaaaaacaaattgttgggacagagcttga

SEQ ID NO: 148303 - DNA, 240 bp, Glycine max
cgcataattcaatcaaccatggctaacctcattgctcccatcacctgttcgcctggtcttagatgcagaagctcttagacaagctttccaagaatggggactgatgagaagaccgttatagcaatattgggtcacagaaatgttcatcagaggcaacaaatcagaaagatttatgaggaaatttaccaagaggacctcatcaaacgcctagagtctgagctctctggtgactttgagaga

SEQ ID NO: 148304 - DNA, 237 bp, Glycine max
ggttctaccagaattcccaaggttcaacaactgctgcaggacttctttaatggaaaagagctttgcaagagcattaatcccgatgaggctgttgcatatggtgcggctgttcaggctgcaatcttaagtggtgagggcaatgagaaggttcaggatcttctcctcctggatgtcacccctctgtctcttggtttggagactgccggtggtgtgatgactgtcctgatccctaggaac

SEQ ID NO: 148305 - DNA, 244 bp, Glycine max
agaagcgcaacaattgcagacggtggaggtgaaagtgaagatggactgcgaaggatgcgagaggaaagtgaggaaggcggtggaggggatgaaaggcgtgaaccaggtggatgtggagcgtaaggccaacaaagtcactgtggtcggctacgtcgaggcctctaaggtggtcgcccgcatcgctcaccgcaccggcaagatagcagagctctggccctacgtcccctacgacgtcgttgctcac

SEQ ID NO: 148306 - DNA, 243 bp, Glycine max
acttgaacgtgcaagacagcagggaatgtatataggtggtgggttggattctaatcatctgggttttgctggatcagtaaattcaggaattacaacctttgagatggagtatggacactgggtgaatgagcaaaatagacaaatcacagaactgagaaatgctttaaatgctcataatggtgacgtagagctcaggattttagtagatggtatgatgagccactatgccgaaatgtttcgcat

SEQ ID NO: 148307 - DNA, 245 bp, Glycine max
cacaatgattcttctaatggtggatttctcaaaagagaagttcaaccaagcctaagttctgtcagtgatggatcaataacaaatttgtcttgtcggaaccatgttcttgatccacagggggcaacacttcagaagtggaacaaaatttttgtaatcacaagtgtgatggcaatctctgtggaccctcttttcttttacatcccaatgattgatgacaagatacaatgccttgctttagatggaac

SEQ ID NO: 148308 - DNA, 239 bp, Glycine max
ctttttgtgcaaccaactctattattgcttgatgaacccacaaatcatcttgacctgagggctgttctctggttggaagagtatttgtgccgttggaagaaaactctggtggttgtctcacatgatagggattttctcaatacagtgtgtactgagattattcatctccatgatttgaaacttcatttctatcgtggaaattttgatgattttgagagcgggtacgaacagcgtcgtaa

SEQ ID NO: 148309 - DNA, 235 bp, Glycine max
gtaacgactgtagagtcgcagaactctgtcagcgccggagatgcgctacgtgtaatttatgagcgcaatgtgatacatggagactttgtccttatcagtggagatactgtaagcaatatgtcgcttactcaggcacttctagagcataaagagaggaagaagaaagatagtaatgctgtaatgactatggtcattaaacggtcaaaacctaatccagctatccatcagtctcgac

SEQ ID NO: 148310 - DNA, 241 bp, Glycine max
cctaaacctatctttcttctctctctgtgtgtgcgcttcaacggcaaccagaagcagccatggccactgcaaggactgtgaaggatgtttcacctcatgagttcgttaaggcgtactcctctcacctcaagtgatccggcaagatggagctgccagagtggactgatattgtgaaaactgcaagatttaaggagttggctccttatgatcctgactggtactatgtcagagctgcttccat

SEQ ID NO: 148311 - DNA, 245 bp, Glycine max
ctcgagctctgcgagatcttcattcgccgattttaaaagatgagtaagcttcagagtgatgctttgcgtgaagccatttcaggaatcatggccgattccaaggagaagaatcgcaaatttgtggagaccatcgaactccaaatcgggttgaaaaactacgatccacagaaggacaagcgtttcagtggctctgtcaagctgccccacatccctcgccccaagatgaaaatttgcatgcttggtga

SEQ ID NO: 148312 - DNA, 244 bp, Glycine max
ggacacacagcacaaccaacacctccacagcctctcctacctcccggagccatggccgccgccgactcctccgccgctccatcgcaccagttgtcgcagagggagacggacatccagatgatgctcgccgccgacgttcacctcggcaccaaaaactgcgactttcagatggaacgctacgtcttcaagcgcagaaccgatggtatttacataattaaccttggcaagacatgggagaagctcc

SEQ ID NO: 148313 - DNA, 237 bp, Glycine max
gttatcgatccctttggggagataagaaaatgtggcttgtgcagctctcaaccccatttctgaacggccatggccatggctccagccttctctggaaacccagttcggcggtgactcagacccactgggccccgccgagtttgctgcctcaaatcaatgcgatgaagacgatgcagggaaaagtggtgtgctccacgaacgacaagacggtggcagtggaggtggtgcggctggccc

SEQ ID NO: 148314 - DNA, 236 bp, Glycine max
ggaatttcagtcagcggcttcggaatttctctttaaccctctttgcgtggcttggcaagattactttggagacatacatttcccagtttcatatttggttaaggtctacatgccaaacggacagcccaagtggcttctttctcttatcccggagtatcctatgctcaacttcatgctaacaactgctatatacgtctttgtatctcatcgactttttgaattaacaaatacactca

SEQ ID NO: 148315 - DNA, 236 bp, Glycine max
caagctcgttggagatttgtgaattctgatgagtgtttattgacaagaatgcaagagctgtccctggattaccatttcacagtagagcaagatgttggatcagccactcacgctttcttcggtttcaacggaactgctggcatttggagaatagctgctatcaatgaagctggagggtggaaagacagaacaacagtggaagatatggaccttgctgttcgtgctagtcttagggg

SEQ ID NO: 148316 - DNA, 240 bp, Glycine max
ggtttggaagattagaaaattccctgggcaaaccgagtcaaccttaagtgcagaagttgaacttatttccacaacaacagaatagaaatcttggactagaccaccaattcagatggagtctcaggttcccatgttcacagcatctggcatacgtgtccgtttcctcaaggtgtgggagaagagtgggtacaataccgttgagtgggttcgttacattacaaaagcaggatcctacgagat

SEQ ID NO: 148317 - DNA, 238 bp, Glycine max
gaagattccagttggtaaagggtgtggacttgttcaatttgcagacagagagaatgctgaggaagcaattcacgcattgaatgggacagtaattgggaagcagacagtgcgactttcctggggtcgcagtccaggaaataagcattggagatctgattccaatggaggctattttggtggtcagagttatggaggccatggatttgctgtgagacagaatcaggatatagccatgcaa

SEQ ID NO: 148318 - DNA, 233 bp, Glycine max
caattcaataccatttaccagactcactcatcaattctcatctatcttctcactaactattaattcatcatgtcgagcacagctggccaagtcatcacatgcaaagctgcggtttcatgggaggcagggaagccacttgtgattgaagaagtagaggttgcgccaccacaagctggtgaagtgcgtttgaagatcctctacacctctctttgccacactgatgtttacttctg

SEQ ID NO: 148319 - DNA, 201 bp, Glycine max
gtctcaggccacagcacctgcttcttctgaggctgtggcagtgacacctgtgtcttctgagatgaaggcatgggtctatggggaatatgggggtgtggatgttctgaagctggactccaatgttactgtgcctgatgtgaaggaagatcaggttctaatcaaagttgttgatgctggtcttaaacctggtgatgccaagag

SEQ ID NO: 148320 - DNA, 190 bp, Glycine max
gaagccagaagaaatggggattgaggaagacaatatcaggaagtacacaacccctgcctacagggcccctgagatgtgggatctgttcctgagagaagtcattaatgagaaggtggacatatgggcaattggaatgtcctctttttcgcatatgctacttcaaaagtgttattgatggggtatcaaagct

SEQ ID NO: 148321 - DNA, 262 bp, Glycine max
gtgcagaagagcgtcgcagtcgcaaccctaatcagaagaagcgcagcttcaagcgagtgacagccaccagccatgggtcgtatgcacagccgcggtaagggtatatcctcttctgctttgccctacaaaaggacacctcctagctggctcaagatctcttcgcaagatgtcgaagaaaatatctgcaagtttgcgaagaaaggtttgaccccgtctcagattggtgtcattctcagagattctcacggtattgctcaggtca

SEQ ID NO: 148322 - DNA, 258 bp, Glycine max
tgaacaatgacttgttccggaagaccatgggtccagtgaagaaggctatggaagatgctggattacagaagagtcagattgatgagattgttcttgttggtggaagcacaaggattccaaaggtacaacaacttttgaaggactactttgatggaaaggagccaaacaagggtgtcaaccctgatgaagcagttgcctatggtgctgcagtgcaaggaagcattttgagtggagagggtggtgaagaaaccaaagata

SEQ ID NO: 148323 - DNA, 255 bp, Glycine max
atcttctgctgtgccaagaaagcagtaatctccatgagcttctattgaattgatactttgatcaagatggatgggaaaaactctcttcaaataactagaagtggtattggtgcttatgatgatgatggacatgccaaaaggactgggaatttgcagagtgctgtagctcatatcattactgctgttattggttctggtgttctttctcttgcatggagcacttcccaattaggatggattggagggccattttcc

SEQ ID NO: 148324 - DNA, 254 bp, Glycine max
cgggaatattgagcaacaaacctgaagaaaaccctgatttctttaactggaatagagttaaattacggtactgtgatggagcatctttcagtggagatagtgaagatgagcctgcacagctccagtttcgaggacaaaaaatatggctagctgcaatggaggaattaatgtccaaaggaatgcagaaagccgatcaggcacttctctctggatgctctgcgggtggtctggcatccataatacactgtgatgag

SEQ ID NO: 148325 - DNA, 254 bp, Glycine max
gcaccaacaatgtcatggcctgtgcctggcacactcatgattgagcctactgagagtgaaagcaaggccgagttagacaggttctgtgatgctcttatttccattagacaagaaattgctgagattgagaaaggaaaggttgacattaacaacaatgtacttaagggcgcccctcatccaccatcactgctcatggctgatgcatggacaaaaccatactccagggaatatgcagccttcccagctccttggct

SEQ ID NO: 148326 - DNA, 253 bp, Glycine max
gcttatatctcttattagtactattgtatgtagaattgttttggggagaaggtatgaagaggagggatctgaaggtagcagattccataagttgttcaatgagtgtgaagctatgttgggtaacttctttgtttcagattatattcctttcatgggttggattgataaactcaggggactggatgcacgtcttgaacgcaatttcaaggagatggataagttctaccaagaagccattgatgaacacatgaat

SEQ ID NO: 148327 - DNA, 253 bp, Glycine max
gtgatttcagtgagtgatcggtgttcacttgatctcatcataatcgtcagcgtcaattgaagaagatgccgatcagaaacatcgccgtcggaaggcctgaagaggcgactcaccccgacacgttgaaggcggctttggctgagttcatctcaaccttcatcttcgtgttcgccggctcaggctccggcatcgcctacaacaagctcaccgacaacggcgctgccacccctgccggcctcatctccgcctccat

SEQ ID NO: 148328 - DNA, 253 bp, Glycine max
gacggatttgtcattcggaacaaagctagggaaaatcctgaaaacccttctattgaactgggaccagaatttaagaaggttagcaacttcttgagtcgctacatcaccgttcctagtaacggacatcatgcttccctaaaagttgctaatcatctatagttctgagcctcgttcatcctcaaggggaccatcatcattgtatcaaaacccggtgttaagctataagttcccgacggtgttgccattgtagaca

SEQ ID NO: 148329 - DNA, 255 bp, Glycine max
gtttgatacagtgatgcatctccacagatatttgagtaaagctatatgccgtgccctagatttttactatgtacttaaatgcaagttatgacgttgagcattcacattctacacaaagaatacaggcatgagctgtggcctctagatccaattgatccaaagaaggcaaagtttccatgttgtttggtttggaatccacttcctgtggtgtcatggttggctcccttcattggtcatgttggcatttgcagggag

SEQ ID NO: 148330 - DNA, 251 bp, Glycine max
cattccactcacacctcatcgtttctctctctagatctctgtttcttctttttctccaaccttcgtttcaccaccacacttacattactttgtcgaaatggctccaccaattgagaccccaaacaaggtttccagctatcaacagtccccaaaccctcgtcttaacgagaggattctttcatccatttccaggagacacgttgctgcacacccgtggcacgatcttgagataggacccgaagctccaaaga

SEQ ID NO: 148331 - DNA, 250 bp, Glycine max
aaaatatggtttcttgctattatctacttcatagcaggaattcctggagcatatgtcttgtggtatcgcccattatatcgtgcttttaggactgacagtgctttgaattttggatggtttttcttgttttacctgcttcacctaggattctgtatcttagctgcagttgctcctcccatagttttcaaaggaaaatccttgacaggcattctgtcagccatagatgtggtgggtgaccatgcagtgattg

SEQ ID NO: 148332 - DNA, 255 bp, Glycine max
aaaatgcccactttttttcttccaacgctcctcctcctcctcatagccttcgccacctctgtctccggccgccgtgacctcgtcggagactttctccggctgccctaccgaaactgataacgacgacaacttcaagggcacccggtgggccgtcctcctcgccggttccaatggttactggaatcacagacatcaggctgatgtttgtcacggctatcaaatattgaggaaaggtcgtctgacagacgaacatat

SEQ ID NO: 148333 - DNA, 252 bp, Glycine max
caacagcgttttgaaaacagttgacccgacacaaacctctttgcggagatccaactccgaggatgttgggtctctgggagaaaagcccaccatcctggtctccgagaaacttggagaggcagggctgcaggtgttacgtggcgttgggcacatggaatgcgcgtatgagctctcacaggaggagctatgcacgaagatctcgtgctgtgacgctctgatagtcaggagcgggacgaaggtgacgagggaagt

SEQ ID NO: 148334 - DNA, 250 bp, Glycine max
ccagtacaaaattgttgttcttgacaaacttgattattgctcgaatctgaagaatctcattccttcaaaatcatctcccaacttcaagtttgtgaagggggatattggaagtgctgaccttgtcaactaccttctcatcaccgagtccattgacacaataatgcactttgctgctcaaacccatgttgacaactcgtttggtaacagctttgagttcaccaagaacaacatatatggtactcatgtccta

SEQ ID NO: 148335 - DNA, 250 bp, Glycine max
ctttcttctccgtttccgtttcctcgttcgaattcgcttttagatctgcgaaaatgagagagtgcatctcgatccacattggtcaggctggtatccaggtcggaaatgcttgctgggagctctactgcctcgagcacggcatcgggcccgatgggcaaatgccaagtgacaagacagttggcggtggtgatgatgctttcaatactttcttcagcgagactggtgctggaaagcacgtgccacgtgcagt

SEQ ID NO: 148336 - DNA, 251 bp, Glycine max
gaatccgagatcaaccccgacgaaggcaaggggtttttctcggcttcttcagatttctgaaatggcgcctgtttcagctttagccaagtacaagctcgtcttcctgggtgaccaatccgtgggcaaaaccagcatcatcactcgcttcatgtatgatcaattcgataacacctatcaggctacaattggtattgattttctatcaaaaactatgtatcttgaagatcgaactgttcgactgcagttgtggg

SEQ ID NO: 148337 - DNA, 252 bp, Glycine max
ctcgagccgtgccacctccaccagctgcgacatttcttgcatttcatcctcaagacaataatattattgctattggcatagaggactcttccatacaaatctataatgttagagtggacgaggtcaaaaccaagctaaaaggtcatcagaagagaattactggtcttgccttttctcatgttctaaatgtgcttgtctcatctggagctgactctcagttgtgtgtttggagcacagatggatgggaaaagc

SEQ ID NO: 148338 - DNA, 250 bp, Glycine max
agaacacctttgtcccaggactcattgatctggccatcaaaaggaatagtttgattggaggagatgactttaagagtggtcagaccaaaatgaaatcggtgttggtggatttcctagtaggggccggcatcaagccaacatctatagtgagttacaaccatttgggaaacaatgatggcatgaatctctcagcccctcaaaccttccgctcgaaggaaatttccaagagcaatgttgttgacgatatggt

SEQ ID NO: 148339 - DNA, 252 bp, Glycine max
cttaatccaaatatcatcatctgaaacgatggctgccatggcaaccacaaccctctcttcaaacccgaaactctcatttttccacggaaagcccgttacatattcttcccgcgtcgcacccaccaccaagttattctcatccaaacaaggcacaatctccatgtccctaacccaacccccatacgacctccaatccttcaaattccaacccatcaaagaatccatcgtctcacgcgaaatgacgcgccgcta

SEQ ID NO: 148340 - DNA, 248 bp, Glycine max
gaagaacgaatcgaaaaaagaaagatcatggcgatggcaaacttggctcgacggaagggttacgccgtcgttttgtcgtcgaggtcgtcgctttgtctgacaaggtgtagggggttcgcgtccggatctgacgaaaacgacgtcgtggtcatcggcggcggtcccggcggctacgtggcggccattaaagcggcgcagctgggtctgaaaaccacttgcatcgaaaaacgtggcactctcggcggtac

SEQ ID NO: 148341 - DNA, 248 bp, Glycine max
tgtgaatcaagaaccgctctgctatggctgctctgcaatacttggaatcgctgcgtaattcgcaccctgagctctccgattggtacaattcgctggcggatctgtaccagaagaagctctggcaccagctcactctcaagctcgagcagtttgtggctctcgccgtcttccaggctggtgatgctttaatacaattatatcacaatttcatcacagactttgagacgaaaatcaaccttctcaagctt

SEQ ID NO: 148342 - DNA, 247 bp, Glycine max
atccaatcttgggatggaaagagtgagggtaactctgccagttcaacagccctctttttcaataaagggagagactgttacaaatttggatttcattcggaagaggaaggtttctaatgacttcaacatgatggatctgaaaatttacacatgtgaacaccctcagtgcccttacagtcaagttcgccttggtttccctgaccgaatttcaagggacaaccatcagttgatttgtgcttatagaggt

SEQ ID NO: 148343 - DNA, 223 bp, Glycine max
cccatttgatgtgggagatagatgtgaaattgatggggttcagatggtggtagaagaaatgaacatattgacaaccatatttctgagatatgataatcaaaaggtcatcatccctaacaatgtccttgctaccaaggccatatataactattaccggagtcctgacatgggagatgctatcgaattctgtgtacatatatctcccccagttgaagagatttca

SEQ ID NO: 148344 - DNA, 255 bp, Glycine max
gtacaactgaagtcacaacaatctgggccatgactgaactaataaaaaatccaagcattatgaagaaagtgcaagaagaaattagaggcttaagtggtaagaaagatttcttggatgaagatgatattcaaaagttttcctacttaagggcagtgataaaagagacacttagattgcacttaccagcaccactacttataccaagagaaacaaataaaaaatgcatgttagatggctacgaaattccagccaaga

SEQ ID NO: 148345 - DNA, 251 bp, Glycine max
tatcacttctcatgccaatttactgctgatctttttgcaatgaaccacacagactttatcatcaccagcaccttccaagagattgctggaagcaaggacactgttggacagtatgagagtcacactgccttcacccttccaggactctaccgtgttgttcacggtattgatccctttgatccagagttcaacatcgtctctcccggtgccgacatgagcatatacttcccatacactgaaactgagcgtag

SEQ ID NO: 148346 - DNA, 246 bp, Glycine max
ccgatctccgacaatggcgacccaaatgagcaagaagagaaagttcgtagctgatggagtgttcttcgctgaactgaacgaggttctgacaagagagttggccgaggacggttactccggcgtggaagttagggttacgccgatgcgcaccgaaatcataattagagccaccagaacccaagctgttctcggtgagaagggaaggagaataagggaacttacctctgtggttcagaagaggttcaa

SEQ ID NO: 148347 - DNA, 250 bp, Glycine max
cacctttgttcactcttcttctcttgcggctagggttttagcgcagcttcttctagatttaaggaagatgggtaaggaaaaggttcacatcagtattgtggtcattggccatgtcgactctgtggtatccactaccactggtcacctgatttacaagcttggaggcattgacaagcgtgttattgagaggtttgagaaggaagctgctgagatgaacaagaggtctttcaagtatgcctgggtgctggac

SEQ ID NO: 148348 - DNA, 246 bp, Glycine max
gcgaatccctctctctctttctctttctctctcatccagatcttgcaaaaaaaaagaaacacaatggcagcgagcgctcccactccacgtgaagattccgtgtacatggcgaatctggcggaccaggccgagcgctacgaggatatggtggatttcatggagaaggtctccgcctccgccgagagcgaggagctgaccgtggaggagcgaaacctcctctcggtcgcctaaaagaaggtaatcggc

SEQ ID NO: 148349 - DNA, 248 bp, Glycine max
cagcgactcacactggtcttcgcttctcattcatcatttctcacctaaccttctcttcctctcagtctcagatcagaaacctcaaccagccatggcagcgttccagaagatcaaggtcgtcaaccccatcgtcgagatggacggagatgaaatgactagggttatctggaagtcaatcaaggacaagctcattttgcccttcttggagttggacatcaagtattatgacttaggccttccttaccgtg

SEQ ID NO: 148350 - DNA, 245 bp, Glycine max
tctcgagcgctcgagcggctcaggttggtcctctggaattagtgagtttcctagcaattggtgcaatgtttgctgcaacagattctgtttgcacattgcaggtgctaaatcaggatgagacacctttgctgtacagtcttgtatttggggagggtgttgtgaatgatgctacatcagtggtgcttttcaatgcaatccaaagctttgacctcaaccaaattgactcttcaattgctgtacacttt

SEQ ID NO: 148351 - DNA, 245 bp, Glycine max
gaagaaaccaccgaagcaccaacaacagaaacagtagaaacaacaactacagaggaagccaagccagaggagcctaaagaagttgcagttgagaccgaggaggtggtgacaaaggagacagaggaagagaagccagcagcagaagagaaatcagaggagaaaactgaagaagtgaaagaagaagcagaagagcctaaagaaactactgaaacagaaacagaatcagcaccagcagcaaccacaga

SEQ ID NO: 148352 - DNA, 244 bp, Glycine max
gtttgtttgatttttttttgaacaaaacgcatggaaatatattcaatcaaaaatcaaacaaacaagatgtaagcaacacagcacgcacgcacaagagggtgcaagagttccaattatagctaaaagtattagctaatttaagcaatcatacaaacccaagttacacaaaagagaatacttctagcaagcattctgctattacaacattcgctagaaaagataagcatctttctccaagaaccgc

SEQ ID NO: 148353 - DNA, 245 bp, Glycine max
gattgtttgttgttgtaactcgttcttcttcttttgttgttctgtgtttgtgtttgttttttctctcacctgaaaatgtcttgctgcggtggtaactgtggttgcggaagctcctgcaagtgcggcaacggctgcggaggctgcaagatgtacccagacttgagctacactgagtcatccaccatcgagaccttggtcatgggagtggcaactgttaaggctcaatttgagggtgctgaaatggg

SEQ ID NO: 148354 - DNA, 249 bp, Glycine max
tattacaacattttaggcttgcacgaatttgacggcatctatgtattaagtgtatcagcttgagctgctcccctatttgtgaaatacgagtcatatagtatttgaccaacttactacacacatgagtgggtaagagttgatggaaattacgcaaccatcggcataactgatcatgcccaagatcattttggtgatgttgtatatgttgaattgccagaagtggtagcagctgtgacacaaggaggtagt

SEQ ID NO: 148355 - DNA, 248 bp, Glycine max
acttgaggttagctttgcagaatgcaatgactgtctgcttcaaggcaaagaaccttgccactgctgcaaactttgcccggaggctacttgagacaaatcctaccaatgaaaaccaagctagggcatcaaggcaagtggtagcagctgctgaaaaaactatgactggtgctacccagttgaactaggatttccgcaacccatttgtaatttgtggtgcaacttacgtgccaatctatcgaggacagaag

SEQ ID NO: 148356 - DNA, 245 bp, Glycine max
atggaaagtaccctccagtatatgacaacacccatgcctaaagcaagcaatgaggtctattatctacttaataaataagaggaactgctttgtgttttctagcattgtgatttacaacttcgtagcaatgcatattcttgactcttgcatgcacttcaatccttcgtagcattaatgatgtggccaagtcatcatgagcatcatacttatttctttgtgaatgtaaatcagaattataagagaga

SEQ ID NO: 148357 - DNA, 246 bp, Glycine max
gagagctctttcttgattctatgggtggtggtgcatggccgttcttagttggtggagcgatttgtctggttaattccgttaacgaacgagacctaggaagcacgacgacaacaacactcgtcctcacaccgactgccaccgcgtccaaagatgattgatgatcaagatctgggtttctttgccaattttcttggcgtcttcatctttgtactggtcatagcgtatcattttgtcatggctgaccca

SEQ ID NO: 148358 - DNA, 251 bp, Glycine max
aaagcattgaattcaacaacttaagttcattccttgtgttttgctttcttcctcaaaaccaaacatgtcgaacacatgcggcaactgcgactgcgctgacaagactagctgcaccaatggaaacagctatggtgttactgtagagactgagacagagttacatcgagactgttgtcatggatgttccagcagctgagcatcatgggaagtgcaagtgtggcactaactgcacttgcacggactgcacctgt

SEQ ID NO: 148359 - DNA, 247 bp, Glycine max
cagttccaatctaaaatcaaccatgggttcagcagctgagactcagattactccaacccatgtatctgatgaagaggcaaacctttttgccatgcaactagccagtgcctctgtactccctatggttctcaaatcagctcttgagcttgatctgttggaaatcatagccaaggctggccctggtgttcatctttcccccactgacatttcttctcagcttccaacacagaaccctgatgcacccgtt

SEQ ID NO: 148360 - DNA, 245 bp, Glycine max
ggcaagtaccatttttatcaatcttatcacccttttgcattgcacctacaaaagggccaccccttcttcccttctcaacttgtacttcatctaattcaatactacaacttctgaatcacttagttgaattgaattatcttcaaaatgagagaaatccttcatgttcaagctggtcaatgtggcaaccaaattggaggcaagttttgggaggtgatgtgtgatgaacatgggattgatgccactgg

SEQ ID NO: 148361 - DNA, 244 bp, Glycine max
cacattttctgtgcgctctaacaaacattctcgttcacactttcagattgtgtgaagatgggggcgggtggccgaactgatgttcctcctgccaacaggaagtcagaggttgaccctttgaagcgggtgccatttgaaaaacctccatttagtctcagccaaatcaagaaggtcattccacctcactgtttccagcgttctgttttccgctcattctcctatgttgtttacgacctcaccatag

SEQ ID NO: 148362 - DNA, 244 bp, Glycine max
gtcaaatatgaatttaaaaccaacacccatgtccctaaactaggggtaatgcttgtggggtgggggggaaacaatggctcaaccctcactggtggtgttattgctaaccgagagggtatttcatgggcaacaaaggacaagattcaacaagccaattactttgggtcgctgacccaggcatcagctatcagagtggggtctttccaaggggaagaaatatatgctccattcaagagcctgcttc

SEQ ID NO: 148363 - DNA, 246 bp, Glycine max
atcgaggtcatgggcctcatgcagggcaagaccgacgccgacgccatcatcgtcatggacgccttcgccctcccagtcgaaggcaccgagactcgcgtcaatgcccaggccgatgcctacgagtacatggtcgattattcccagaccaacaaacaggctgggcggttggagaatgttgtgggatggtatcactctcatcctggttacggttgctggctgtcggggatcgatgtttcgacgcagatg

SEQ ID NO: 148364 - DNA, 260 bp, Glycine max
ctttcaagtatgcctgggtgctggacaaacttaaggctgagcgtgaaagaggaatcaccattgatattgctttgtggaagtttgaaacaacaaagtattattgcacagttattgatgcgcctggacatagggatttcattaagaatatgattactgggacatcccaagctgactgtgctgttcttatcattgattcgaccactggtggttttgaagctggtatttccaaggatggacagactcgtgaacatgctctgctt

SEQ ID NO: 148365 - DNA, 257 bp, Glycine max
atcgagccgcacgagccgtccggtgaccctctccaccctcagggcgccaccacccacgtccaggaagacgccggcagcaaccccacgtggaactaccccgtgaaattctctgtcaacgaatcgctggcgaaggaaaatcgtttatctcttgagatcaagctcatctccgaccgcaccctcggcgacaccgtcatcggctatgtccatgttccgtgcaaggaactcctggataaccccggtgatgacagctccttccg

SEQ ID NO: 148366 - DNA, 253 bp, Glycine max
ctctcgcattccgtggagatctagtgctgccaaacctcgctgaaaattagggtttcgtttcggaggtagacgaagatgttcggaagggcaccgaagaaaagcgacagcaccaggtactacgaaatcctcggcgtttcgaagaacgcttcgccggatgatttaaagaaggcttacaagaaagccgccattaagaaccaccctgacaaaggcggtgatcctgagaagttcaaagagcttgctcaagcctatgagg

SEQ ID NO: 148367 - DNA, 253 bp, Glycine max
attaattgcaagaatggcacttcgttgcttggtgatgtccctttctgttctcttcactcttggtcttgcgagagaaagccatgccagagacgaagatttttggcatgctgtttggctcaacactcccattccaagttcattgcgagatcttctaaagcctggccctgcacgtgttgaaatcgatgatcaccctatgcaaattgaagaaacacagtacgcgaaaaccttcttctataaagaagaccttcatcca

SEQ ID NO: 148368 - DNA, 246 bp, Glycine max
gcaatacagcttggaaaactagatgttgcaaagagtattgcaatagaattgcagagcgagcctaaatggaagcagttgggagaattagctatgtctactggaaagttagaaatggctgaggaatgtttgaagtatgcaatggatttgagtggcttgttactgctatattcttctttaggagatgctgaaggaatatcaaaacttgcaatccttgccaaggagcaagggaaaaacaatgttgcattc

SEQ ID NO: 148369 - DNA, 246 bp, Glycine max
cttgttggtattggagtctatggctaaatatggtgtgaagacattaatatattctagtacgtgtgcaacatatggggaacctgaaaagatgcctattatagaaacaacagaacagaaaccaattaatccatacggaaaagccaagaagatggcagaagatatcatccttgatttttccaaaaattctaagatggcagtaatgattctgagatacttcaatgtgattggatcagacccagagggcag

SEQ ID NO: 148370 - DNA, 254 bp, Glycine max
  unsure (1)..(254): unsure at all n locations
agtttcaccgagtttgggcgtttagatcagaaccaaatcgtgttctcttccattggcaaacatggcaactcaaatgagcaagaagagaaagtttgttgcggacggagtgttctttgccgaactgaacgaggttctgacacgtgaattggcggaggacggttactccggcgtcgaagttagggttacgccgatgcgcaccgagatcatcatcagagccaccagaacccaagccgttctangtgagaagggaagga

SEQ ID NO: 148371 - DNA, 246 bp, Glycine max
ccgatacagtatgtaacaaacgttataatccatgggattaacattcatgattgtaagcaaggtgggaatgctatggtgcgggactcaccacggcactacgggtggaggaccatatcggacggtgatggcgtgtcgatctttggagggagtcacgtatgggttgaccattgctctttgtctaactgcaatgatgggttgatcgatgccattcatgggtctactgggattaccactccaacaatacat

SEQ ID NO: 148372 - DNA, 257 bp, Glycine max
gcggcgcaataacgctagcacaaaccctgctccaaaccggaaccaagcgtgacctaatcctcctcctggacacctccatctccgtcgcgaaacgccgctccctcgaactctccggctggaagatccgactcataacccggatccgaaatccgcgggccgagaatggcacctacaacgagtacaactacagcaagttccgactctggcagctcacggattatgagagagtgatcttcattgatgctgacatcatcgtc

SEQ ID NO: 148373 - DNA, 253 bp, Glycine max
gagaaacctgcagcaaccaaagtctcaagtatgtttggtggaactagagataaatgtgccggttgtcaaaaaacagtgtatcccactgaaaaggttactgtgaatggaactccttatcacaagagttgtttcaaatgcactcatggagggtgtgttattagtccctccaactacattgcacacgagggcaaactctactgcaagcaccaccacgtccaactgatcaaggagaagggtaatttaagccaacttg

SEQ ID NO: 148374 - DNA, 249 bp, Glycine max
ctgaccaaggcccctctggttccaccgagtacgccagtggttaatgcactgtcaaagcagcgagctatgctggaaaacatcctaagggcttgtgttggattagctcctgagaacaacatgatcctggagtacaagtgaagttcaaagtcttaagagtaatggtttgggatactgtagttgaatgagatcaaaacttaactcatatcccataccctcttttctgttatatatttatggcaaatgtgaaat

SEQ ID NO: 148375 - DNA, 246 bp, Glycine max
gcactcttcatcaagctccgctccaacacaggggcaaatgagggagatccttcacgtgcagggagggcaatgcgggaaccagatcggttccaagttctgggaagtggtgtgcgacgagcacggcatagatccgacggggaagtacgtcggaaactcagatctgcaactcgagcgcgtgaacgtctactacaatgaagcctcgtacgggcgcttcgtgccacgcgcgatgctgatggacctggagcc

SEQ ID NO: 148376 - DNA, 259 bp, Glycine max
ttcggctcgagtcataaacgcctttattctccgtttccgtttccttcccggaattcgatttttcatctctgaaaatgagagagtgcatctcgatccacattggtcaggccggtatccaagtcggaaatgcttgctgggagctctactgtcttgagcacggcatcgggcccgatgggcaaatgccaagtgacaaaacagttggcggaggtgatgatgctttcaacactttcttcagtgagactggtgctggaaagcacgt

SEQ ID NO: 148377 - DNA, 248 bp, Glycine max
ggaaagacggatacagttcgacatgaagctggaagaaagaatgtatgcagaggaagcagagattaatcaaatgcaagcaatgtcacaggtcaagacagatgctgatattaaaaaactccggaagagtctcaactttaaagcaacaccaatgccttcattttactgcacaccttcaccgtcacaaccacatgggaataagtttcaacctcaggctgtgtcaaataacaccagaagtaagacagaacata

SEQ ID NO: 148378 - DNA, 248 bp, Glycine max
ctctcaccaaaacaatttgctcacaaaggaggaaaaatggcacctttcgtttccctctctttgttgcttctctttctcaaccaccccctcctttccctctcaaccaaccctgaagggaacgctctgcatgctttgagaagcaggctttctgatcccaacaatatgttgcagagttgggacccaacactggttaatccctgtacttggtttcatgttacctgtgactccaacaatcatgtgattcgctt

SEQ ID NO: 148379 - DNA, 248 bp, Glycine max
cttctttccaccaacaagaaagaagacagagagaaactttcatttcatagattttcatcatctcagcaaaggaatcaatcaatcaagccatggcaggcttcagtggcgacgaaaccgctcctttcttcggcttcctcggtgccgctgcggccctcgtcttctcctgtatgggagcggcgtatggaatcgcgaagagtggggtgggggtggcgtcgatgggagtgatgaggccggagctggtgatgaag

SEQ ID NO: 148380 - DNA, 253 bp, Glycine max
atcctcacaaatacaattacgcaaacacatattcagtctcctcacataccaaaaatgaattatttttcttgttattttccctttgctaacggaaagccatgaaattcgggaagagcctgagcagccagatcgagaaaaccctgccagagtggcgcgacaagttcctctcctacaaggagctcaagaagaagctcaagcaattcgaccctcccgcccccgcctccgccgccgatgaacgccccggcaagcgcct

SEQ ID NO: 148381 - DNA, 253 bp, Glycine max
aaaatcctcaattttctgagcagccaaacactctctctctgtctctcgaaaattctcagtttgcagagaaaatctgaatcatgtcgtggcaagcgtatgtcgacgatcaccttctgtgtgacatcgaaggtaaccacctcactcacgctgctatcatcggccaagacggcagcgtttgggctcagagtaccgacttccctacagttcaaacctgaggagataactgccatcatgaatgactttaatgagcctg

SEQ ID NO: 148382 - DNA, 247 bp, Glycine max
ggtcttgaggcagaacaggttacctttttccagcaaggaacaatcccttgtgtttccaaggatggcagatttattatggagactccatacagggtagcaaaagctcctgatgggaatggtggagtgtattcagctctgaaatctaccaaattattggaggatatggcctcaaaaggaattaagtatattgattgctatggagttgacaatgcactggttcgagttgctgatccaacttttttaggtt

SEQ ID NO: 148383 - DNA, 253 bp, Glycine max
attcatttccttgatatcttagttatctaattacctcaattaatcccttaattgcaagcatcatggctgaggagaaacaccaccaccacttccaccaccacaagggcgatgatgtgcctggcgaggttgattataagaaggaggagaagcaccacaagcatcttgagcaccttggggaacttggtgctgcggctgccggtgcttatgccttgcatgagaagcatgaggccaagaaagacccagagcatgctca

SEQ ID NO: 148384 - DNA, 249 bp, Glycine max
actaacacaaacatggatgcatccaaactcaatcaattgaagcatttcatcgaacagtgcaagtccaacccttccctcctctccgatccttcactctccttcttccgcgactatctcgaaagtctcggggcgaaactccctgaatctgcttattccgaatcgacgggcgtggagagcgatgaggacatagaagatgttacggaggagcaagagaaggtagaagaagaagaagaagatgatgaaataatt

SEQ ID NO: 148385 - DNA, 249 bp, Glycine max
acgctcgccttgcttcgccacacaacagcaactgcagcaatggctcccaaacgaggtggaaaggctccggctcttgccgctaagaagaagcctgagaaggtttcgaatccgttgttcgagaagcgtccaaagcagttcggaatcggaggggcgttgcctccgaagagagacttgactcggttcgtgaagtggccaaagaatgttcaaattcagaggaagaagaggattctgaagcagaggttgaaggtt

SEQ ID NO: 148386 - DNA, 248 bp, Glycine max
ctaattttgttaagcaactgtttaatacactaaggaagaagtttccagctgcgtcgtttattggtttgccagttttatctgagcttggatttgacttgttgcagcagctgctaacttatgaccctgaaaagaggataacagcagaagatgctctccttcatgattggttccatgaagcccctcttcccaaatctgatttcaagccaatttttccttcttggcagtgataggacaggtactcttgctgg

SEQ ID NO: 148387 - DNA, 247 bp, Glycine max
cgagaacagcatcgaacccgtcgtagcagaaaaacttgtcaccatggtttcttccgacaaggatccacgagaggatgtccttcaagcctggtacatggatgatagtgatgaagatcaaagactcccccaccacaaagaacccaaggagtttgtctcgttggaccaacttgctgaacttggagtccttagctggaaactagatgctgataaccacgggcatgatccagagctgaagaagattcgtgaa

SEQ ID NO: 148388 - DNA, 250 bp, Glycine max
cttcggaagtcgtttccttgcaaaccctagggccttctcctccgctgcttccactccgatccgcgccactctcttccccggcgacggcatcggccccgagatcgccgattccgtcaaacagatattccaagcagctgatgtcccaatagactgggaagagcactatgtaggaactgaaattgaccctagaacgcagagctttctgacatgggaaagtttagaatctgtaaggacaaataaggttggcttg

SEQ ID NO: 148389 - DNA, 255 bp, Glycine max
tggaatggagagctctaccgcgtgatctgcgacaccaggggtgctttcgtgcagcctgctgtatacgaggcttttggtttgacagtggttgaggccatgacttgcggcttgccaacattcgccacatgcaatggtggtcctgctgagatcattgtgcacggcaagtctggcctccacattgacgcttaccatggtgaccgtgctgctgatctccttgttgacttctttgagaagtgcacgcttgacccaactcac

SEQ ID NO: 148390 - DNA, 253 bp, Glycine max
gtcttatttagaaactcatgctgaaccatatatgaggcagctatcagtaggcgatgtagtcacaggcccacttcagacatttaatggggttgagaaggtttgcaacatagtgtttattctcagaactacgggacataatgggtttcccgttatagacgagcctcctatttcgcaagctccagttttatttggcataatcctccgtgaccatcttctcacattgttgaagaagaaagcttttatgtcctcacct

SEQ ID NO: 148391 - DNA, 243 bp, Glycine max
agacaacttgtatgggtgccgtcactctctccctgatggtctcatgagggctaccgatgttatgattgctggaaaggaggctgctgtggctggatatgttgatgttagcaacggttgcgctgctcgcaatcaagcacgctgatggacgccccaccgtgaagcagagtcacattcatcgctggcgcagcactctctcacggccggcccctaggtgcctacctcattcagtaggagtgtactctt

SEQ ID NO: 148392 - DNA, 248 bp, Glycine max
caaaactgtttttgcatctgcaactgagagagatatatacaccggagataaggttgaaatcgtcatcctaaatgccagtggtattcatcgtgaatacatggacctaaggaaagactaatgctttacaggaaattgttgttggagatacctgtcttggattgagaatgtttgaaatgcttctaaaatttaaaatgacgtagtgggtttttcccatgaggcgaaattaagaatagcatttccagtgaaat

SEQ ID NO: 148393 - DNA, 247 bp, Glycine max
ctaaaattagggtttttgtcgtagcaggaagaagcagcaatggcgccgaagataacacgcaaggtcagcagaaaccccgaattgataaggggaatcggaaagtactcgaggtcgcagatgtaccacaagaggggcatttgggctatcaaggccaaaaacggtggcgttttacctcgccacgaccccaaacccaaacctgaaactcccactgataaaccagccaaattttaccccgctgatgatgtca

SEQ ID NO: 148394 - DNA, 245 bp, Glycine max
cacgcttcgtcgtttgtggttactgagtcctgagtgatcttgtcatccgacctttgccatgacaggtgcgcttgcttggcaggtcaaaatatgttaataaaaaaagttttattggtttagggagagatcgcacgggagttgcccggggtctctctctcgtgtggtgtgtggtgtttgctgtgctctccttttcgttatgccttttattattacctatctgtcgctccactccgtattacgactct

SEQ ID NO: 148395 - DNA, 246 bp, Glycine max
gtccaagccccactcaaccaccacaccactctctctgctcttcttctacctttcaagtttttaaagtattaagatggcagagacattcctatttacctcagagtcagtgaacgagggacaccctgacaagctctgcgaccaaatctccgatgctgtcctcgacgcttgccttgaacaggacccagacagcaaggttgcctgcgaaacatgcaccaagaccaacttggtcatggtcttcggagagat

SEQ ID NO: 148396 - DNA, 251 bp, Glycine max
atgatagggtgtcggaaagagttgtctgcttttgcgattttctgatggttccttcacaaccagttttatcaccaccattggcattgattttaagataagaaccattgaacttgatggcaaacgcattaagttacaaatctgggatactgctggtcaggagcgatttcgaactattaccacagcttattaccgtggagccatgggcatattgcttgtttatgctgttactgatgaagcatctttcaacaata

SEQ ID NO: 148397 - DNA, 248 bp, Glycine max
tttgtcgtccatcccgtaaccatgtctcaggtgtggaatcatatgacattgatttgaaggaacaaaaggtggtagtgaaaggaaatgtccagccagacacagttctgcagaccgtttccaaaactgggaagaagactaccttctgggaaggtgaagcagcaacatctgaaactagcacagcaactgcctaaaacatttgcctctattctgtgcagaagaagtagctgtgtgaatcaaatactatttga

SEQ ID NO: 148398 - DNA, 240 bp, Glycine max
cctccccaattctcaagccaaccatgtcttccttcaagagcaagtaccaagatgaactcattgccaatgctgcttacattggcaccccagggaagggtatccttgctgctgatgagtcaactggtacaattggcaagcgattggccagcattaatgtcgagaatgttgaagcaaataggcgtgctcttcgtgaactcctattcaccacacctggtgcttttgagtgcctcagtggtgtga

SEQ ID NO: 148399 - DNA, 245 bp, Glycine max
ataaaaagctctttcccttcccctaaatccctcacactcattccatttttacctttctctctcgctcgcaaacgcaaataataaaaaacaaggttttagccatggcatcgaagcggatcttgaaggaactcaaggatctccaaaaggatcctcctagctcatgcagcgccggtcctgttgctgaagacatgtttcactggcaagtaacaattatgggtcctccagacagtccttattctggaggt

SEQ ID NO: 148400 - DNA, 245 bp, Glycine max
ctggagaagaaccgcaaggagatctgcaaatacctcttccaagagggagtttgcttcgcgaagaaggacttcaatttggccaagcgccctgagatcgacgtgccgaatctgcaggtgattaagctgatgcagagtttcaagtctcgcgagtacgtgagagaaacttttgcttggatgcactattactggttcctcaccaacgatggcatcgagtttctcagaacttaccttaaccttccttccga

SEQ ID NO: 148401 - DNA, 245 bp, Glycine max
gtcaaggttgccgtgacaaatttcaactacaggatgaattactccctctggactcttgctgttcagcatccaaatcttaacaatgtcacccaagttttcagctttgattacaagcctttacttccctatgagtccataaatgacactggtatgttctatggcatgaaatactttaatgatctcttaatggaagctggaccaactgggaatgttcaatcagaaattcttcttcagaagaaccagga

SEQ ID NO: 148402 - DNA, 242 bp, Glycine max
cgcttgtggaggccaaaagggttggtgttgcaaaagagagtggcctaattgatgacccaaaagcagtgttaccaatcagcatttggtggctgcttcctcagtacatgatcactgggatctctgatgcattcacaattgtggggctacaagagttgttttatgaccaaatgcctgaggcacttaggagtttgggggctgcagcatacattagcattgtgggggttgggagctttgttggcaac

SEQ ID NO: 148403 - DNA, 252 bp, Glycine max
cagaattagggttttccaattcacagagcaacacaacgaaccaacaatggcgcacctcagccgcagtcgcagccgcagcacgggcaagcagcgctggagcaggtgcagtgcttcggtcgcaagatgaccgccgtggccgtgacctactgcaagcgcgggcgcggtctcatcaagatcaacggctgccccattgagctcgtggagccggagatcctccgcttcacggccttcgagcctatcctcctgttgggt

SEQ ID NO: 148404 - DNA, 248 bp, Glycine max
tctcgagcgaattcggctcgagtgagaatcttggcttaagctaaggatacatcactaaggcactgaatgcgtgggcatggagaaaatgccttcttatggcaccaaggtgagccactaccctccatgtccccatccagagctcgtgaagggtctgcgagctcacaccgatgcaggaggcgtaatcctactcttccaagatgacaaggttggtggccttcagatgctgaaagaagggcaatggattgatg

SEQ ID NO: 148405 - DNA, 249 bp, Glycine max
cattctctctgtgtatttccctacctctcccttcaagatgcagatcttcgtcaagaccctcaccggcaagaccatcacccttgaggtggaaagctctgacaccatcgacaacgtcaaggccaagatccaggacaaggaaggaatccccccggaccagcaacgtctcattttcgccggaaagcaacttgaggacggccgtacccttgctgactacaacattcagaaggagtctactcttcacctcgtcct

SEQ ID NO: 148406 - DNA, 244 bp, Glycine max
ggaatttgctccatctattcccgagaagaacatttcttgtttgactagattggatcacaacagggcattgggccaaatctctgaaagactgaccgttcaggtttctgatgtaaagaatgtcattatctggggcaatcactcatcaacccagtatcctgatgttaatcatgcaactgttgcaacctcagctggggagaagcccgtccgtgagcttatagctgatgatgcctggttgaatggggaa

SEQ ID NO: 148407 - DNA, 245 bp, Glycine max
atgtcaatgcacaacttgtgaccacaaaatctggaggaggtttaaccattctagcacctgatgatggtgccttctcacaactcaaagcaggttacttcaactctctcggcgatcgccaacagaaagcattgatacagttccacgttcttccagtttatgtctcaagctctaactttgactctcttagcaatccagtgatgacactggccagtgatagccccaatgggtatcaaataaatgtgaca

SEQ ID NO: 148408 - DNA, 243 bp, Glycine max
gatcgagataactagaaacagtgtgatgaaaatgaaggtccttgttttcttcgttgctacaattttggtagcatggcaatgccatgcgtacgatatgttccctctccgaatgaacactggctatggtgcccgtactccggaggtgaaatgcgcaagttggaggcttgctgtggaagcacacaacatctttggctttgagaccattcctgaagagtgcgttgaagcaacaaaggaatacatcca

SEQ ID NO: 148409 - DNA, 245 bp, Glycine max
agtggatggctacacacccttgtttggtgaccataatttggccatccatagagatggcaaatcagttcacctttcacttgatgaaagaacaggttctggatttgtgtctcatgacctttaccttcacgggtatttcagtgcctcgatcaagttgcctgccgattacactgctggagttgtggtcgcattttatatgtcaaatggtgacatcccccagaacaaccatgatgagatagactttgagt

SEQ ID NO: 148410 - DNA, 241 bp, Glycine max
gtaagcactaaggttgacaaggtggttgtcctgtggacagccaacacagagaggtacagcaacgtagttgtgcggactaaacgacaccatggaaaacctctttgcttccttggacaggaatgaggctgagatttccccttccaccttgtatgccattgcttgtgttatggaaaatgttcctttcatcaatggaagccctcagaacacctttgtcccaggactcattgatctggccatcaaa

SEQ ID NO: 148411 - DNA, 247 bp, Glycine max
gttctagatctccggcggccacgtcaaccccgccgtcaccttcggcgccttcgtgggcggcaacatcaccttactccgcggcatcgtctacgtcatcgcccagctcctcggctccatcgtggcctccctcctcctcgccttcgtcactgcctccgtaagaccgttattaccgttacttacctatctttattttaattaacgaactataactgatagtaagagttttgttctgctgttacgcatcgca

SEQ ID NO: 148412 - DNA, 247 bp, Glycine max
ggaatgcttaccggtcctgttaccattctcaactggtcctttgttagaaatgaccaacctagatctgagaccacctaccagattgctttgtctatcaaggacgaactggaagaccttgaaaaggctggcatcactgttatccaaattgatgaagctgctttgagagagggtcttccactgaggaaatcagagcaagctcactacttggactgggctgtccatgccttcagaatcaccaatgttggtg

SEQ ID NO: 148413 - DNA, 250 bp, Glycine max
atcactcatctcttacaacgaaaccctcttcatcttgttctatctgtgacgagcatcatggcctcaagagcagtgttattgttggctatgtgtgtgcttccggcgatggttgtggccattcgcccagcaaagaaccctttttgcgtgaagggtcgtgtctactgtgacccttgccgtgctggttttgagacctcagctaccacctacattgctggtgctgagattatgttgcaatgcaagagcagggtta

SEQ ID NO: 148414 - DNA, 229 bp, Glycine max
gcagagttccaacgatgcatggtacccttgttccgccaaataagtcgttgcttgagcagttcacatttccaggtagctgagagggctttgttcttatggaataatgatcacattgagaccttaatcaagcagaactacaaaattatacttcccgttgtcttacctgctctggagtataacgcccgaaaccactggaaccaggctgtccagagcttgacaataaatgtcc

SEQ ID NO: 148415 - DNA, 221 bp, Glycine max
ctcaggagtatataatctgagcgatgtcagatctcgaggctcccttgcgccctaagaggaagaaggtttgggtggactattttgttcagtttcgatggatccttgttatttttgtggtccttcccatctccttcaccatttatttccttacataccttggggatgtaagatccgagtggaagtcctataagacgcgtcagaaggaacatgatgagaatgtg

SEQ ID NO: 148416 - DNA, 229 bp, Glycine max
ttttgatcccaaaatatcagacttcggcttggctcgatcttttttgggagatcaattcgacgcaaagacaaatagagtggctggcacatatggttacatacctcctgagtatgctgcacgtgggcatttctcagtgaaatcagatgtctttagttatggtgtgatactactagagattgtaagtgggaagaaaaacagagaattttcagacccacaacactacaataat

SEQ ID NO: 148417 - DNA, 225 bp, Glycine max
gaattttgtgattccaagctggcttgtagaagagtccactgggtctacaaaagacaatccattcacgttaccagatgcgtatatggcatctcagcataaaaatcacaaaaatttagaggagataaggcaactcttacgagaagcatctttagaagaaagtcgcaaacgagaattggtctctgcgctccacgtctactttcaaaggtcgggttatatgcttcggga

SEQ ID NO: 148418 - DNA, 212 bp, Glycine max
tgcaagagtggcacttcgttgcttggtgatgtccctttctgttctcttcactcttggtcttgcgagagaaagccatgccagagacgaagatttttggcatgctgtttggccaaacactcccattccaagttcattgcgagatcttctaaagcctggccctgcaagtgttgaaatcgatgatcaccctatgcaaattgaagaaacacagtacc

SEQ ID NO: 148419 - DNA, 218 bp, Glycine max
ccaaccactcttaatttctctctgccttgctcatttacacacctctccaacctttcactttcagctttatttgaatccctctctctcctttccaaatggccagcgttgaggttgcacatcaaacaccaacaacagttccagaaaatgaaacaaccgaggtaatcaagacccaggaaacaaccccggaaccaataccagccactgaggctcctgcaaca

SEQ ID NO: 148420 - DNA, 217 bp, Glycine max
tcgggactttcactagccgcagcagcctcaggaggagaataaggatgtctcacaggaaattcgagcacccaaggcacgggtcactgggatttctccccaggaagcgtgctgctcgtcacaggggacaagtgaaggcattccccaaggatgacccatccaaggcacccaagctcactacattcttgggttacaaggctggtcatgactacacattgtt

SEQ ID NO: 148421 - DNA, 225 bp, Glycine max
cacaggggaaaatgagggagatccttcacgtgcagggagggcaatgcgggaaccagatcggttccaagttctgggaagtggtgtgcgacgagcacggcatagatccgacggggaagtacgtcggaaactcagatctgcaactcgagcgcgtgaacgtctactacaatgaagcctcgtgcgggcgcttcgtgccacgcgcggtgctgatggacctggagcccggaa

SEQ ID NO: 148422 - DNA, 220 bp, Glycine max
ctggcattaacccagctaggagtctcggagctgccatcatcgacaacagagaccatgcatgggatgaccaatggattttctgggttggacctttcattggagctgcccttgctgctgtgtatcaccagatagtcatccgagccatccctttcaagacaagggcttaggctcttgtttttgtatgtgcttgcttgtattagttgttatttatgtatctgga

SEQ ID NO: 148423 - DNA, 92 bp, Glycine max
cggatgttgcagtcaaggatctcaagcgtggttttgttgcatccaactccaaggatgaccctgccaaggaagctgccaacttcacatctcaa

SEQ ID NO: 148424 - DNA, 217 bp, Glycine max
cgtacatggaatccatggttccactccccggaatctatgacccggatttcattgctgccaaccaaggagaccgtgccactaacgtaatcaggggcacaaagaaagaacaagttcaacaaatcatcaaagacattaaggagttcaaagaaagcactaaggttgacaaggtggttgtcctgtggacagccaacacagagaggtacagcaacgtagttgt

SEQ ID NO: 148425 - DNA, 214 bp, Glycine max
tggttggactcttgagaatctaaaccttgatggttgcaaaaatatcagtgatgctagcttgatggcaattgctgaaaactgtgcattgctatgtgatcttgatgtctccaagtgcacaatcactgatgctgggattgcagtcctggcacatgccgaacagattaatctgcaaatcctttctttgtcaggttgcactttggtctcagacaggagc

SEQ ID NO: 148426 - DNA, 212 bp, Glycine max
tcgagaaactttcgaaagattttatccaattgaaattttaaaaatgactgggataaacttaagaattcaattattgaaattgaataagtaaacaatttaattggattggtcgaatggtatcaaaaaaatggagtactaactcccatttcttatttattattgaattaaccgatcaacttgctttgttatcgaacattgctttttgatttcaa

SEQ ID NO: 148427 - DNA, 214 bp, Glycine max
gtcaatgggtggtttccctcactatggtgttgttaaggatgattttatcatggtcaagggatgctgtgttggtcccaagaagagggtcattacattgcgtcaatccctccttaagcagacttctcgtgttgctcttgaggagatcaaactcaagtttatcgatacctcttcaaagtttgggcatggtcgcttccagaccacacaggagaagcag

SEQ ID NO: 148428 - DNA, 220 bp, Glycine max
ctgtagccaaggcttacaaccatcaagcttcttctcttactgaatgtgtttggattcggggccatgcttctatcaactctctacctgtcaaagggagcaaagcgtcttgctatcataggatggatttgccttgttttcaacatcagtgtctttgctgcacctctcttcattattaggcgagtcataaagacgaggagcgtcgaatacatgccatttactt

SEQ ID NO: 148429 - DNA, 225 bp, Glycine max
tgcgaaagcagttgaaatggtagatgagaacaccatctgtgttgcagccattttggggtcaactatgaccggagagtttgaggatgtgaagcttctcgatgaacttcttactaaaaagaacaatgagacaggttgggataccccaattcatgtagatgctgccagtggggggtttattgccccatttctatatcctgatttagagtgggacttccgtttgccgtt

SEQ ID NO: 148430 - DNA, 217 bp, Glycine max
gatagcacaaagcgggttactgtctgttcaagctaccatctctctctctctttcttagtgcctccttgccagaagttaaaatggcccaagaaactttcctattcacatctgaatcagtgaacgaggggcaccctgacaagctctgtgaccagatctccgatgctgtgctcgatgcatgcttggagcaggaccctgacagcaaggttgcctgtgaaac

SEQ ID NO: 148431 - DNA, 211 bp, Glycine max
tggacaacaagggcttgttgatagtggatcaccaactagccaatgacaagaggaccaagccttatgtgaagaaaatggccaagagccaggactatttcttcaaggaattttctagagccattactttgctctctgagaacaaccctctcactggcacaaagggtgagatcagaaagcagtgcaatgctgccaacaagcaccatgaggagcc

SEQ ID NO: 148432 - DNA, 215 bp, Glycine max
actgagccacaaggtgctgatgaccagcattgctcagcaggttgacggtgataatcccaacctctattaccactgccacgacaccatcctctgcgtgcttcccctctttcacatttactctctcaactccgttcttctctgtggcttgcctgccaaggctaccattctcctcatgcccaagttcaatattaactccttacttactctcattcaca

SEQ ID NO: 148433 - DNA, 214 bp, Glycine max
cgcgagaccgtgcagcggcggtacttcaccgtcaccggcgagagtcccgatgatacgacgctcgatctcttgatctccaccggtgagagtgagaccttccttcagaaagccattcaagagcaaggcaggggtagaattctggacaccatcaatgagattcacgagaggcatgatgccgtcaaagagatagacaagaatcacaaggagttgcacc

SEQ ID NO: 148434 - DNA, 214 bp, Glycine max
gtcaaagtatagagtgaaagaatgggtgagagaagcaagattttgatcataggaggcaccggctacatcggcaaacatatagtggaagcaagcgcaaaggctggaaatcccacttttgctttggtgagggaatccacactctctgacccctccaaggcacaactcatccacaattttgaggctttgggcgttaatttggtccgcggggatctgt

SEQ ID NO: 148435 - DNA, 219 bp, Glycine max
gggaagcatttccactttgacagggagtgggtctgggagtaggaatagtagtggaattggggactctcacatcattgaagctggaaatctaaggatatcagttcaggttctgaggaaagtgaccgagaactttgcgcctgagaatgagcttggccgtggtggatttggggttgtttataagggggagttggatgatggtactaaaattgcagtgaaacg

SEQ ID NO: 148436 - DNA, 227 bp, Glycine max
agtcgagcgaatcggctcgagggccaggcaagccccactcaaagtccacacctctcctagttcacgctacccctttcaggtcttcttctacctttcaagttttaaacgtataaagatggcagagacattcctatttacctcagagtcggtgaacgagggacaccctgacaagctctgcgaccaaatctccgatgctgtcctcgacgcttgcctcgagcaggacccag

SEQ ID NO: 148437 - DNA, 210 bp, Glycine max
tgcgtgtgtttgcgaattgtgcaattttcaagatctgaatcagagaatagataataatggctacaccggaccacctgttcaacctccgcaacaacttgtatctcggggcgtaccaagccgccatcaacagcggcgacgtcaccaacctctcccaagaagactccctcgagcgcgacaccctcgtccaccgctgctacatcgccctcggcc

SEQ ID NO: 148438 - DNA, 212 bp, Glycine max
ggctcaagttgtctttgctggaaatttaattgagatacctcacagacttcttaatggacagaatttggcttcaaaggatctctcaagaatggctgagccaataaaggagctagatattctgttgagtcagatagctgctggtttgcctttggatatcatgccagggcccagtgaccctgctaatttctcattaccacagcagtcattgcata

SEQ ID NO: 148439 - DNA, 208 bp, Glycine max
gctctgtttctgtctctgtgtttgcggctgaggattccgaacgagcgaccttcttcgtttctcgcaaagtttaagtcatcatgggtaaggaaaagactcacatcaacattgtcgtcattggacatgtcgactctgggaagtcaactaccactggtcatttgatctacaagcttggaggtattgacaagcgtgtgattgagaggttcga

SEQ ID NO: 148440 - DNA, 208 bp, Glycine max
gtgattctctctatcagaattggagatggcagcccagagattgctctttgcccaagttcaaaccaagacttttgcttgagaagcttagagggaggaggcttatgtttattggagactcactgaacaggaaccagtgggaatcaatgatttgtctggtccagtctgttgttcctcaaggcaaaaaaagtttgagcaagaatggttctct

SEQ ID NO: 148441 - DNA, 209 bp, Glycine max
cttgaagatggtagcctcgaattagaaatgggaaaattcaacctccatggaattttgggagagattattgaactgataaaaccaatagcatccgtgaaaaagttacctatcaccttaattctgtctcctgatctgcctactcatgccattggtgatgaaaagcggcttacacaaactcttttgaatgtcgtgggtaatgctgtcaaatt

SEQ ID NO: 148442 - DNA, 206 bp, Glycine max
aaacttaaatagggtatacccaacaagattaacataattactctatcatttattcgtaaaggctcagatcttattaatatccgcaaggttctggggccacatgcaaagaatattcagttgatatcaaaggttaagaatcaggagagaatcctaaattttaacgaaatcctacgggagactaatacattcataatggcacgtgatga

SEQ ID NO: 148443 - DNA, 216 bp, Glycine max
ctcgagcgaccgccctgccatagtcgcgagtctgtttataatcgcgactgttgtcaacgtcaacaaggttgaaacttccaggaaaaaacttcgaattgggagggcgatcctcccggtgaactgagccgtaccccaaaccgacacaggtgaacaagtagagtatactagggcgcttgagagaaccatgtcgaaggaactcggcaaaatgaccccgta

SEQ ID NO: 148444 - DNA, 221 bp, Glycine max
  unsure (1)..(221): unsure at all n locations
gccccgattaaatccgtccaagtgccacatgttagccctgaagaaaggttcttggtgggtagagttggcccaaaggagtatagactttaccggtgcatagcgcggtatggctaccgcgacattcaccaggatgacattgagcttgagcgggatcctctttgnagnatagctgaattccccanatcanatgnatctcaatatagcttaggatttgggagctt

SEQ ID NO: 148445 - DNA, 195 bp, Glycine max
gcaccaccgttttcctttgctttgcgttctacaatgtcgaaaacctcagagattattacatgcaaagctgctatttgctggggaataggaaaacctgtgactgtggaagagatacaagtagaccctcccaagccaccgaagttcgagttaagatgctttgtgccagtatatgctccacagacatctctagcacaa

SEQ ID NO: 148446 - DNA, 234 bp, Glycine max
gccatttgggagttaggttctgcacgctctgcttccagcgagtgttctttcttcgtttcaacaccttaatttgcacacgctgcttcttcagcttgagaaatggcacaagaaacctttctattcacactgaatctgtaaacgagggtcaccccgacaagctgtgcgaccagatctctgatgcagtgctcgatgcgtgccttgaacaggaccctgacagcaaggttgcctgtgaga

SEQ ID NO: 148447 - DNA, 231 bp, Glycine max
ggcaccataacacatggaggctactctgacttgatggttgcggatgaacactttgtggttagaattccggataacctaccacttgatgctgctgctcctctcctctgtgctgggatcactgtgtaagccctttgagatactatggacttgacaagcctggtctgaatcttggtgtggttggtcttggtggacttggtcacatggctgtcaagtttgccaaagctcttggag

SEQ ID NO: 148448 - DNA, 230 bp, Glycine max
gggaggagtacatatgagtcaaggtgcatctcggaaagctcctcccattgagagtaaattgccctgcactcttgaggagatatataaagggactacaaagaagatgaagatctctagagaaattgagatgctagtggaaaaaccatgccagtagaggaaatcttgaccattaatgtcaagcctggctggaagaaaggaacaaagatcacattccctgaaaagggaaatga

SEQ ID NO: 148449 - DNA, 231 bp, Glycine max
ctctgccaaatgtttatcataaatgctggccctggatttaggttgctatggaacactgtcaagtctttccttgatcccaagacaacttcaaagattcatgtatgtagaaatgctatattgtagcgcctaaggctcttttcatgatggcttatggctgctgacattgcttggtgcctctatggaaatattacttaggttctcggaaacaagtaccaaagcaaattgtttgaa

SEQ ID NO: 148450 - DNA, 204 bp, Glycine max
tgctcgtcatgaccggtggaggtctggacactcgtcgaggctgtgttggaggtggcgcacatttgggtgaaggcgttgtccgaaccattgctatggatccaccgaaggtgtcgttagaggctggcgcgttctcaacactggctcccctattaccgttccagttggtagggctacccttggccgtatcataaatgtcattggaga

SEQ ID NO: 148451 - DNA, 229 bp, Glycine max
tgcggaatcagctagaattttctaataatggccaaagacgttgagcaggttacagagcaaggtgaatactccgcgaaggattaccatgacccacctccggcgccgttgatcgacccagatgagtcactaagtggtccttgtacagagccgccatagctgagttcatagcaacactccttttcctttacatcaccgtgttgaccattattggctacaagagacagagtga

SEQ ID NO: 148452 - DNA, 228 bp, Glycine max
aaggaaagggaaaatgggtaaggatctgagcgaggaacaagtgtcttccatgaaggaagccttctctctattcgacactgacggagacggtcggatcgctccgtcggagctggggatcctgataggtctctgggaggtaacccgacgcaggcccaactcaaagccatcgtggctgaagagaacctcacggcccccttcgacttcccccgattcctcgatctaatggcc

SEQ ID NO: 148453 - DNA, 231 bp, Glycine max
tctcgagcgattcggctcaggaatttcttgaaggagttactaggcaaaacttggtatcaaaatcacttgttctcaagaaactgaaccgctaggtactgcaggccccttggctcttgcgagggatagctaatagatgactctggagagccattttttgttctcaacagtgatgttatcagtgagtacccacttaaagaaatgattgaattccacaaaacccatggagtagag

SEQ ID NO: 148454 - DNA, 234 bp, Glycine max
acaaggtgtgctggaagggaggatgcttcagctccgacattcttgccgctatcgagagggcaatattggacaacgtaaacgttctgtctctgtcgctcggtggtggcatgtcggattattacagaacagtgtcgctattggagctttttccgctatggagaatgggattttagtttcatgctccgctgggaacgcgggccccagtccctacagtctctccaatgtggctccatg

SEQ ID NO: 148455 - DNA, 234 bp, Glycine max
caaatttctcagtctccggaactcgtttctaccttcacttcgcacatctcgaaccctctctttccggcaactaggttaaagttcatcaatggcaggtcgtggcaaaaccctaggatccagcgccgcaagaaggccacctcaaggagcagcaaagccggcctccaattccccgtcggccgtatcgcccgtttcctcaaggccggaaaatacgccgagcgcgtcggcgccggtgct

SEQ ID NO: 148456 - DNA, 230 bp, Glycine max
cttgaaaccacagaatttgttgatagatcgccgtactaattcactgaagcttgcagattttggattggctagggcatttggcattcctgtcaggacctttacacatgaggtggtgacattatggacagagctccagaaatattgcttggatctcgtcattattctacgccagttgatgtttggtcagtgggatgcatatttgcagagatggtaaacagacgacctctatt

SEQ ID NO: 148457 - DNA, 227 bp, Glycine max
tctcgagcgattcggctcagatgaacaaatggctgaggactcagcacaagcttgtgtcagtattccttccaatccctggagttctctgcaaaggggtttcagtgcataataactccctgtaagtgcactagtaaagaccaaagtatgattattgttacattatgttacatggttgtacttgtatatacatatcttgtcccacctttgtaaatacaattgggacacta

SEQ ID NO: 148458 - DNA, 231 bp, Glycine max
ctcagaaccttctgaggttaaagcaaaaaacaaagagagagagagagagaaaatgatgaagccatcgatgctcagatctctccactccgccgccacccgcggcgcctctcatctcttccgccgtggtacgcctccgagccggtgccggagcgcaaggtagccgttctcggcgccgccggcgggatcgggcagcctctctcccttctcatgaagctcaatcccctcgtttcg

SEQ ID NO: 148459 - DNA, 230 bp, Glycine max
gttcaccgatggccccacatcgatgcaactcaaagccatcctccactacgcgacctctcagattgtccctcaacaatctctttccgagattacaataaccttcgacgtgctccaaagcctccacgccccgccaacttcctcgtgtttgggctgggccgcgattctctcatgtgggccagcctcaacccccacggcaccacgctgttcctcgaggaggaccctaaatggtt

SEQ ID NO: 148460 - DNA, 229 bp, Glycine max
gagaaaaacacagagacagaaacagagggtagtagttgagttgagcgagtggggggaagtagcgaagaatgagtatgttgaaaggaggtgaaatgggtggagaaggagggagagaaggggatgggagtgcagcagttgcaacaacaggaactacgccttcagatcattctgcaacagatgcaagcaaccccgcctcctcgtcgattccaaaacccccgctgattccaag

SEQ ID NO: 148461 - DNA, 230 bp, Glycine max
gtttgacgttgttcacaatcactttctgcgcttcactcactcccttcgtgcggttttctttctttgtcgaactcgtgcgaaaatgcgtgagattcttcacatacagggagggcaatgcggaaccagatcggagcgaagttctgggaggtggtgtgcgcggagacgggatcgattccacggggaggtaccagggggacaacgagttgcaactcgagcgagtcaacgtctat

SEQ ID NO: 148462 - DNA, 231 bp, Glycine max
ctggatcagatctctcctttgacgtttagcattggaaacaccatgaaacgtatatctgtcattgtgtcttccattattatcttccacacaccagttcaacccatcaatgctcttggtgccgccattgcttccttggaaccttcttgtattcacaggcgaaactatagagttggggaactaagattcctctagggacttgtttgttacagttcttcatgctcaaccagggac

SEQ ID NO: 148463 - DNA, 232 bp, Glycine max
ggaggagaatgtggaggtgaagtacttctggggaagcacgttgtatcacgtggacgatttgccttttcaattggaggacatgccttccaattacggagggtttagggatagggttcagaaattgaggtaaggaagacaattgaagctttagatcatcttaagggaatgccttctcgcggtgattttgagcttggggagattccttccttaatggaccttggccttaatccat

SEQ ID NO: 148464 - DNA, 228 bp, Glycine max
ggatctgatctgctgaaacacgccacactcttcttaccatgggcctcctcgatcacttgtgggatgacaccgtcgccggtcctcgcccggagaacggccttggcaagctccgaaagcaccacccttcgctttccgatctgcctccggcaaggaatcagacagcggaagcgtgaaatcgtacggtgaagatttgccggaggatgcggtgagagtgacgcgaagtatcat

SEQ ID NO: 148465 - DNA, 226 bp, Glycine max
ctcactcacaaacacacactgaactaaaaaacatcaaaagagacatggctgagcaaaccttcatcatgatcaagcctgatggcgtccaaagaggccttattggcgagatcattagcagatttagaagaaaggtttctacttgaaaggtttgaaacttgttactgtggaccgtccttttgctgagaagcactatgctgatttgtctgccaagcctttctttagtggt

SEQ ID NO: 148466 - DNA, 228 bp, Glycine max
cagagcttgtggaattcccgttgttgctgacaccaatcgattccaactacagagcttgcaccattccttacagattcccctccgataaccctcgcaagcccactcccaccgaaatctcttggttgatctcttcctcaactcaatcccctctttcaagaagcgtgcagagagtgatacttctgttcctgatgctgcagctaaagctgaaaaatttgctcaaagatatgc

SEQ ID NO: 148467 - DNA, 226 bp, Glycine max
gtgcgtcggagctgtctgtgcaaatttgcgttgttcttcgcggcacacctcactcactgaacggtaagtatggcggacaaggctgttacaatccgaacccgaaagttcatgaccaacaggctctttccaggaagcagtttgtcgttgatgtccttcatccagggagggcaaatgtttccaaggctgaacttaaggagaagctggctaggatgtatgaagtgaaaga

SEQ ID NO: 148468 - DNA, 227 bp, Glycine max
gactagttctggatcgcgggcggccgcccttttatagaggcgcggattgctgtgttcttgtgtatgatgtgaatgtgatgaagtcgttcgatacccttgagaactggcatgaggagtttccaaacaggcaaaccctcctgatcccagggcatttccatttattttacttggaaacaagatcgatattgatggtgggaatagtcgagtggtttctgagaagaaagcaa

SEQ ID NO: 148469 - DNA, 228 bp, Glycine max
cagagttggttctttctttccccaatttgtgagtgttactattgaatcgattggattgacatggcgagcgcgatggttgaggacgccaacttcgaagatgaccagctcgccaatatgaccccgacgacgtcgtcagagcttctcgtcttctcgacaacgagattcgcatcctcaaagaagagttgcagaggaccaatttggagttggaatcgtacaaggacaagatca

SEQ ID NO: 148470 - DNA, 228 bp, Glycine max
aagcaattgacaaagaaatacgagaatcacttatggtaatcatcaaccgaagattaaaagcaatcaaagcaggggagcctactaacaatgacttgttaggcatactcttggaatcaaattaaaggaatctgaaaaaagtagtggtggaggaatgagtttaagggaagtagtggaagaagtgaagctattttacttggcagggcaggaagcaaatgcagaattgctggt

SEQ ID NO: 148471 - DNA, 228 bp, Glycine max
acgctttctcgttcgagatccctcaagggatccactaactgaaggagaaatggggttgacattcacaaagcttttcagccggcttttcgccaagaaggaaatgcgaattctgatggtgggttcgatgcagctggtaagaccaccatcctgtacaagctcaaacttggagagatcgttaccacaattcccaccattgggttcaatgtggagactgtggaatacaagaac

SEQ ID NO: 148472 - DNA, 235 bp, Glycine max
ctgataaattctactgcgatgactactacaaattaacctacccttgtactcctggtgcagcatactatggccgtggtgccatcccactttactggaactacaactatggaaaagctggggaagctgaaggtggatctgttgaaccatccagaatacatagaacaaaatgccaccttagccttccaggctgcactctggcagtggatgaacccaccagagaagcacctaccatcac

SEQ ID NO: 148473 - DNA, 235 bp, Glycine max
catttacgcttctcttctctgcagcaactatgcctaaccctaaggtcttcttcgacatgaccatcggcggtcaatctgctggccgcatcgtgatggagctctacgccgacgtcactccccgcacgccgagaacttccgcgcgctttgcaccggcgagaagggcgtagggcggagcggcaagcccctccactacaagggctcgtccttccaccgcgtgatcccgagtttcatgtgt

SEQ ID NO: 148474 - DNA, 231 bp, Glycine max
gaaggaaccaacaatgagaagacatccaatctgactcaaacaaagttggagaagaggtttggacagtctccagtatttgtagcctccacacttttggatgatggtggagttccacatggcgtagtcctgcatcacttttaaaagaagccatccaggtcatcagttgtggttatgaagacaaaacagaatggggaaaagaagttgggtggatatatggttctgtgacagagg

SEQ ID NO: 148475 - DNA, 228 bp, Glycine max
ggcctgattccaagagcttcagtgataatggatttggctccgtctcatcaaaatggcgagggggtaacgtttgtcaaattaacaaactccctggctccaagaaaaatccatgcaacaggaattgattggagcaagattctttaacaaagctttcgaggcatacaatgggaaacttgatccatctagcgatacagcacgtgattttgtggggcatggaacccatactct

SEQ ID NO: 148476 - DNA, 229 bp, Glycine max
aggaaaggtggcctgaaagaagaaaatattattgtttttatgtatgatgacattgcattcaatggggaaaacccaaggcctggagtcatcattaacaaaccagatggaggtgatgtttatgaggagttccaaaggattacaccggcgaagatgttactgttggtaacttttttgctgctttacttggaaacaagtcggcacttactggtggcagtgggaaggttgtgga

SEQ ID NO: 148477 - DNA, 226 bp, Glycine max
ttcacttttgtggatgaaaactccttatggtcaccttcaaaaccagtcaaccaacgtgatgctgatctcatccatttttgggataagttccgcaaagctcctgagggttctctcaggaaaatacagctcagaaacaagttttggaagcaatgtctcacagaatgcatgtagacaacagtgtaaaactgattgggaagcttttatttggcattgaaaagggtccaga

SEQ ID NO: 148478 - DNA, 224 bp, Glycine max
gcaaaattctcttccgtttcaggattagtgtttcaccgttacagtgaaacatggcaaaaccaaagcgaatctctctgcgtatctttgcgctgctcctcttgatttccacctcttcgtttcgcttctccgcgcttccgatgacgccgatgatgatgcgatcttctatgattcgttcgacgaggattttgaagaccgttgggttgtgtctcagaaagatgagtaca

SEQ ID NO: 148479 - DNA, 226 bp, Glycine max
gagattacgaatcagcgttggagcatcttgtgcttgctagcatggctatgattgcaaatggtcaagataatgaggttgcgtcaattgatgttagcattgggaacatttacatgtcacttttcgatttgatgaggcgattttctcttaccagaaggcactaactgtgtttaagtctgccaagggtgagaaccacccttctgttgcatctgtttttgtgcggctggct

SEQ ID NO: 148480 - DNA, 226 bp, Glycine max
cttcaattcattctagttctggattccgactagccgcgttgactcggttccgtttttcattctcgcggatctaatattaaggaatagcttaagggcacattacaatgaaggcattgattcggttgggggatttggaacaaggctgaggccactgacactcagtttccctaagcctcttgttgattttgctaacaagcctatgattttgcatcagatagaagccctt

SEQ ID NO: 148481 - DNA, 225 bp, Glycine max
tgagttccaagctagtgatctgggtctgcttgttgaaaacacctcagtggagcagcttggtttggctaggaaaattaccatctccaaggattctaccactgtcattgctgatgctgcgcaaaggatgagttgcaagccagggttgctcagttaaagaaggagctgtctcagacagactcagtatatgatactgagaaactggctgagaggatagctaaactgtct

SEQ ID NO: 148482 - DNA, 224 bp, Glycine max
gtgatttcagtgagtgatcggtgttcacttgatctcatcataatcgtcagcgtcaattgaagaagatgccgatcagaaacatcgccgtcggaaggcctgaagaggcgactcaccccgaccgttgaaggcggctttggctgagttcatctcaaccttcatcttcgtgttcgccggctcaggctccggcatcgcctacaacaagctcaccgacaacggcgctgcca

SEQ ID NO: 148483 - DNA, 226 bp, Glycine max
ctcctcctcaatcttcattgtcctgttctttcccttggtgacaaaccaagactaacacacacagaacatagcttgtgttggtgaggtgagaagataaagaaagaatggcatttgcaggacaacacagaagtgtatggcctgtgacaaaaccgtttatctggttgataagttgaccgcggataaccgagttttccacaaagcttggcttcagatgccatcactgcaa

SEQ ID NO: 148484 - DNA, 227 bp, Glycine max
ttcaaatcatgagacaaatctcttggtgtatgagtacatgccaaatggaagtttaggtgaggttcttcatggcaagaaagggggccacttgcattggtacacaaggtataagattgcttggaggcttcaaagggcccttgctatctacaccatgactgttcaccactcattgtccatagagatgttaaatccaacaacatccttcttgattccaattttgaagcaca

SEQ ID NO: 148485 - DNA, 230 bp, Glycine max
ctcagttggggacttcaatttagattccaagtggcttgtagatcccaaacaactatttattggtccaaaaattggggagggtgctcatgccaaagtatatgaaggaaaatataaaaataaaatgttgctgttaagattatcaacaagggagaaactctggaagagatttctaggagagaggctcggtttcgcaagagaggttgctaatgttgtcgaggagttccaacaca

SEQ ID NO: 148486 - DNA, 223 bp, Glycine max
gtttttcataaaaaactagcagccctttctaagaaacaaagcagtgctaaagatggcaatgagcaacaatgtgatcggatgcataaacttcgtggcggtgatcctctcaatcccaatatcggcgccggaatctggcttttaaacggggaaatcgattcctgcgtccagttcctgcaatggcccgtcatcatcctcggagtcctcatcctcgtcgtggccctcg

SEQ ID NO: 148487 - DNA, 223 bp, Glycine max
ggatcagatgctcaccaagcaaaatgtcttcgcctacaaatattctcctgtggtcttggcattcatcatcttgtcttgcttgatagctgtttctgtgaacttcagcacatttctggcataggcaaaacatctcctgtaacatatcaagtgctaggccacctcaagacatgccttgtcctaggatttggctacacattactgcatgaccctttcacgggaggga

SEQ ID NO: 148488 - DNA, 223 bp, Glycine max
gattgcttgctaacccttccatgaagcaagcaatgcttttcccacagcctgctcaacccggagacgcgttccatcaagttttaaatggacatgcacgtaagctgcctcacgacaacccgtgttcttgaaaccaggggagaagatcttgaattggactgctggacctgtgggagaccttaaaccttggtaacaattatattacttttatgaggccattatagga

SEQ ID NO: 148489 - DNA, 223 bp, Glycine max
gtgcctgttccctccatacattgcgactgccaaggagcagtatgaatgattccattgtggaacagattgctgggaggctttctatgatttctttcttggatgtgagctactgtataaaattggtccctatgcgcttgagatgattggcaagaactgcaagcttctagaagggttgtgtcgaaacatgcacccattggatactgcggagaagccgcatcaagac

SEQ ID NO: 148490 - DNA, 227 bp, Glycine max
caaagagtgttgtgttggtaattaagaaagagaggaaaaatgccgctcaagttggcgggaggagccactgtcggttcccttctcctatgtgttgctatttctctctttcacatcgctgggccgaagatccctacaggttcttcaactggaatgttacttatggtgacatttaccctcttggtgttcgccaaacgggaatattgatcaacgggcaattcccaggtcca

SEQ ID NO: 148491 - DNA, 242 bp, Glycine max
aactgacaaagttttctgagaaaataaggattattattgagagaatggctggctcatcggaagagggacaagtcattagctgccacaccgttgaagaatggaacgatcaactccagaagggcaacgaatccaagaaactcattgttgtggattttactgcttcttggtgtggaccatgccgtttcattgcaccattcttggctgagctggctaagaagttcacaagtgtcatattcctaaag

SEQ ID NO: 148492 - DNA, 235 bp, Glycine max
aaattgaaaaccgctcaacttatctctcagctataaaatcagaagttcaaagacaaggggagttcatcagtttcttaattaaggaggtagagtccacctcttttgcagatgtttctgaggtggaatcatttgtcaaatggctagatggggaactatcttcattggtggatgaaaggtcagtgctaaaacattttcctcaatggccagaacaaaaagtagatgcactcagggaagc

SEQ ID NO: 148493 - DNA, 236 bp, Glycine max
gagaaaaacacagagacagagacagagggtagtagttgagttgagcgagtggggggaagtagcgaagaatgagtatgttgaaaggaggtgaaatgggtggagaaggagggagagaaggggattgggagtgcagcagttgcaacaacaggaactacgccttcagatcattctgcaacagatgcaagcaaccccgcctcctcgtcgattccaaaacccccgctgattccaagtggctc

SEQ ID NO: 148494 - DNA, 239 bp, Glycine max
ctcaaagaacttgggccaagatagtagtgtgagtgaattggactcagttacactaccagccaagtctggtagccttattgggtctgggaattactttgtggttgttggtcttggaacacccaagagggacttgtcactcatctttgacactggcagtgatctcacttggactcagtgtgaaccatgtgctcgttcttgctacaagcaacaagatgctatctttgatccatcaaagtcta

SEQ ID NO: 148495 - DNA, 231 bp, Glycine max
cgaatagattatcctaagtctttgggaatagtgctgcaatggcttcaagtcaggaggaggtgacccttttgggagctactggaagcccatttgtgtgcagggttcatattgccctcaagttgaagggagttcaatacaaatatgtcgaagaaaatttgaggaacaagagtgaactgcttctcaaatccaacccagttcacaagaaggttccagtgtttattcacaatgaga

SEQ ID NO: 148496 - DNA, 230 bp, Glycine max
attgggacgtgatcatggtggatgcacccaccggctacttcgatgaggcgccagggaggatgagtgcaatctacactgctggcttgattgcccggaacaaggaacgcggccaaaccgatgtttttgtgcatgatgtggataggaaagtggaggacatgttctctaaggcttttctctgtgaagggtatttcaaggagcaagaagggaggatcaggcacttcaacattcca

SEQ ID NO: 148497 - DNA, 231 bp, Glycine max
atcatcacacacacatactaagaagcaacaattcttctacaatggatctcctccttctggaaaagaccctcataggtctcttcctcgctgcggtggtcgccatcgccgtctccaccctccgcggccggaaattcaagctcccaccgggcccactccccgtcccaatcttcggcaactggctccaagtcggcgacgaactcaaccaccgcaacctcaccgatttggccaaaa

SEQ ID NO: 148498 - DNA, 235 bp, Glycine max
agagtagttactgcgaactcctctcaaagatccactccaacttttagggcttcttcaagcttgcatttgggacgtgtgataccttctgatgatggattgcatatggtggctgaaagttactcttctagacatccaatgccattgaccactgttgtctatcattgctctgccagccaacagtggtcaatggccttggatgtctagaagagcaatgatagacatggaaggtcaagaa

SEQ ID NO: 148499 - DNA, 230 bp, Glycine max
attgtttgttgttgtaactcgttcttcttcttttgttgttctgtgtttgtgcttgttttttctctcacctgaaaatgtcttgctgcggtggtaactgtggttgcggaagctcctgcaagtgcggcaacggctgcggaggctgcaagatgtacccagacttgagctacactgagtcaaccaccaccgagaccttggtcatgggagtggcacctgttaaggctcaatttgag

SEQ ID NO: 148500 - DNA, 227 bp, Glycine max
ccttttagcaagttaacaacacttttgtcttcgttccattatctagttctcaattctcttcaccctttgcctctgaaagaaatgggtagtcttgaagcggaaagaacaacagtaggattggcagcaagagacccttcagggattctctccccatacacctacaatctaagaaacacaggccctgatgatgtttacattaaagttcactactgtggaatttgccattc

SEQ ID NO: 148501 - DNA, 229 bp, Glycine max
cagagagaagctatggttgcagctgaaagacgacaggttgatgaaaaagttaaaaaaatcattgaactgaagaataaggtttgttctggtaatgatagcaattttgttgtcctcaatcaaaaaggaattgatcccccatctctggacctgcttgcaagggaaggaataattgctcttcggagagcaaagaggagaaacatggaaagattggttttggcctgtggagggg

SEQ ID NO: 148502 - DNA, 233 bp, Glycine max
ggaacaagcttgtcttgatgctgaaaaagagggaatttcttgtgaattgattgatctgaagacactaattccttgggataaggaaacagtagagtcctcagttaacaagacaggaagattgcttgttagtcatgaagctcctataaactgggaggttttggtgctgaaatttcagcttctattgttgagcgttgcttctcaaggttagaggcccctgtagcaagaatttgtgg

SEQ ID NO: 148503 - DNA, 228 bp, Glycine max
caaaagggagaagaaaaggaaagaaaactctcaaaaaactattatagcaatggcagaacaaaaccaaaaccaaacaactgaagctggaaggcaccaagaggttggtcacaagagccttctccagagtgatgctctttaccagtatattctggagacaagtgtctacccaagagaacctgaatccatgaaagaactgagagagttgacagcaaaacacccatggaacat

SEQ ID NO: 148504 - DNA, 232 bp, Glycine max
gttttctgattaactctttcttctcataactctgccgccgcaacagccccaaatccaatggcttcagagaagaaactttcgaacccaatgagggagataaaggtgcagaagctcgtcctcaatatctccgttggcgagagtggagatcgtctcaccagagccgctaaggttttggaacagcttagtggccaaacccctgtgttttccaaagcaaggtacacggttcgttcct

SEQ ID NO: 148505 - DNA, 226 bp, Glycine max
aacaaagccactctctcgttttatatggcgtaccaccataacccccaagagcttccacttcaccatttcactgaccaacaacaacaccataaccaacctctcgttgacaactccttgctctccgaccctgcttccaaacctgcctccgatcctcatcaacccgcgccaaattggctcaacaacgcccttctccgcacgcactacactgacaaccacaacaacaaca

SEQ ID NO: 148506 - DNA, 224 bp, Glycine max
cggcggccctctagtggcgtcgcgttgaagaatttggttccttgccttgtggaggctctggggagtgaggactgggccaccaggaagggcgcggcggaggcgttgaagaagctcgcgagcgtggagaaggacctcttgccggagttcaagggtggatgcttgaaggttttcgagaatcggcgatttgataaggtaaagttggttcgggaggttatgaatgagat

SEQ ID NO: 148507 - DNA, 228 bp, Glycine max
ggtcaggaacgtttccgaacaatcactagcagctattatcgtggggctcatggcattattgttgtttatgatgtcactgaccaagagagctttaataatgttaagcagtggctgaatgaaattgaccgttatgcaagtgaaaatgttaacaagcttctagttggaaacaagtgcgatctcacggcaaataaagttgtgtcctatgagacagcaaaggcttttgcagat

SEQ ID NO: 148508 - DNA, 233 bp, Glycine max
cacccctgacttgaacctcttaccgtgcgcatcttctcaatccataacaacttcgccaccgttgcaccgaaaccaatcgccacaaactcgggatctcagattcgacgcgccaaaccatgtcgaaggcgcgtgtctacacagatgtcaatgtccttcgccctaaagagtattgggattacgagtctctcacccttcaatggggtgatcaagatgattatgaggttgtgcgaaaa

SEQ ID NO: 148509 - DNA, 231 bp, Glycine max
gtagatttgttgacaaatatgatgtgacccttgatgtttgtttatcttcagtgttctcacaaaccaaagtcctcaatccccagcaagtaactgaaaccatagatgtatgtgtggaagatgaaacagtcaattatctgaacaggaaagatgtgcagtcagctatgcatgcacatcttgttggagttcaaagatggtctgcttgcagcaatgtcctggattatgagctgcgtg

SEQ ID NO: 148510 - DNA, 232 bp, Glycine max
atcaattcagttctctcccactcagataggaatgggaatatatctcagcagtccaaaaactgaaaagttttctgaagatggtgaaaatgactgtcttagatatggtttatcgtccatgcaagggtggcgtgcaacaatggaagatgctcatgctgcatatactgatctggatgagtccacttcattttttggtgtctatgatggtcatggaggtaaggtggttgcaaagttt

SEQ ID NO: 148511 - DNA, 226 bp, Glycine max
cttccttcaaaccacaaggtggccgattaggggaaaatgatatggattatgatacagatgagaagtcaatggcaacactaaggcgtcatcttcggggagctcgtgaggagtattatagatataaaagtgaatatatgacttatgtattggaggcacttgaattggaagatacaataaagaattatgaacgccgcaactcaactggatgggaatataattcaagcat

SEQ ID NO: 148512 - DNA, 227 bp, Glycine max
agacgatgggggagaacgagaaaggagagcgatggagcggacgtgtgacaaatctgacggagatggcctccaatctcgactctctccagaagcttctcctcaccaaagccgtcttcgtcgacgacgacaccttctccaaagcctccctcgccgccgaccaggcccgcaccatcaagctcctccagcaacgagtccagaccttggagagagaggtcgacgccgccatc

SEQ ID NO: 148513 - DNA, 225 bp, Glycine max
gcattgcgttgctctctctataccttctaattcccaaatttctagggtttggtacagagagaaaaaggaacataagatgtctcagaacgggaagctgatgccaaatctagaccagcatagcaccaagcttctcaatctcactgttcttcaacgaatcgacccttttgtcgaggaaattctcatcaccgctgcgcatgtcaccttctacgagttcaacatcgacct

SEQ ID NO: 148514 - DNA, 225 bp, Glycine max
ggcgctggtggcttcatcgcctcttggatggtcaaactcctcttggagaaaggctacactgtccgaggaaccctcagaaacccagatgatcccaagaacgggcacttaaaagagtttgaaggagcttcccagagactaactctgcataaggttgacctccttcatcttgactccgttagatctgttattaacggctgtcatggtgtctttcacactgcttctccc

SEQ ID NO: 148515 - DNA, 223 bp, Glycine max
cgaagagaatggctcccaagggtttaatctttttggctgtgttatgcttctcagcactgtcactgagtcgttgtcttgcggaggataatggacttgttatgaacttctacaaggaatcatgccctcaggctgaagacatcatcaaagaacaagtcaagcttctctacaagcgccacaagaacactgctttctcctggctcagaaacatcttccatgactgtgc

SEQ ID NO: 148516 - DNA, 223 bp, Glycine max
ggcaatgttgggtgctgctggcattttcattccagaattcctaacaaagattggtgtcttgaacactccttcatggtactcagctggagagctggaatacttcacggacactactaccctcttcatagttgagctctttttcattggctgggccgagggtagaagatgggctgacataatcaagccaggctgtgtcaacactgaccccatctttcccaacaac

SEQ ID NO: 148517 - DNA, 223 bp, Glycine max
ggactaccaggtatgtgctatcacagtgggtgtggttggtgatgtatgcagagccttggaggagaaagtactgccttattgtgatgggataatgacccaacttcttaaggatttgtccagcaatcagctgcataggtctgttaagcctcctattttttcatgttttggagacatagccttggcaattggagaaaactttgagaagtacttgttatatgcaatg

SEQ ID NO: 148518 - DNA, 229 bp, Glycine max
tgcataagagctctggacaatgaccaaggacacatccctttcagaggcagtaaactgactgaagttttgagggattcatttgttggcaactcccgcaccgttatgatttcatgcatatcaccaagcactggttcatgtgaacatactctgaatacattaagatatgctgacagggtaaaaagcctatcgaaagggaacaattcaaagaaggatgttttatcgtcaaatt

SEQ ID NO: 148519 - DNA, 226 bp, Glycine max
gttaactcctctcagaaacctgctctcaagttcttgatctatggcagaacaggttggattgggggtttgctggggaagttgtgtgaaaagcaaggaattccctatgaatatggaaaaggacgcctggaggaccgatcatcacttgtggctgatattcagaatgtgaagccaacacacatttttaatgcagctggagtaactggcagacccaatgtcgattggtgtg

SEQ ID NO: 148520 - DNA, 221 bp, Glycine max
atcaccgtttgacaatcccatcgttaaaggcttatatgacaagtggcttgagcagcctggttctgtgaaagctgggagatacatgcacacacaatatcatcctgttgaaaaaagcattacttctcagttgcataattggtgaggtgttgaaactgaacttttcatattgtttcttctcaaggtcattttgtggtattaggcggaagagtactttaatcctt

SEQ ID NO: 148521 - DNA, 222 bp, Glycine max
ctcattcataatcttccaatccaacaacctcagcctcacactcacacatacacacatctgaacgcgtatcgtccctcccatggcttcaaagcgcatcctcaaggagctcaaggacttgcagaaagacccaccaacttcttgcagcgctggtccagtagctgaggacatgttccattggcaagcaacgattatgggtcctgctgatagtccttatgctggagg

SEQ ID NO: 148522 - DNA, 224 bp, Glycine max
ctttgactcttcttcgtctcaaatctcttcgttccttcgattcgttccatttcttccaaaatggccaaagacccagttcgcgttctcgtcactggagctgcagggcaaattgggtatgctcttgtccctatgattgctaggggagtgatgttgggtcctgaccagcccgtgatcctccacatgcttgacattcctccggcagcagagtcattgaatggggttaa

SEQ ID NO: 148523 - DNA, 223 bp, Glycine max
gatggaggttgtggaaatggaaaagctaactgattacactagtaatcctgaatacatgagtgagtataacgagctaatggccaaccaggatgaattcgtggagaaagttaatacaggcaactatcatgaagttgcccttgatggttttgagcaggcgattaaggttggtcatctgagtcagtactcaactttacttccgcaggcatttgacttgaaaatgaga

SEQ ID NO: 148524 - DNA, 228 bp, Glycine max
ggcgttgttgccgttgaggtcaccggtggacctgaagttcccttccatcctggaagagaggacaaacctgagccaccaccagagggtcgcttgcccgatgccactaagggttctgaccatttgagagatgtgtttggcaaagctatggggcttagtgaccgagatatcgttgctctgtctgggggtcacactattggagctgcgcacaaggagcgttctggattcgag

SEQ ID NO: 148525 - DNA, 230 bp, Glycine max
ctttcttcttcttctcttaaaagagcctttgctttttctttaggcctttccgaattaagtacttgtttcattttctctcgaagcaagaaaaatgttcatcgagagtttcaaggttgagagtcctaacgtgaagtacacagagactgagattcagtccgtgtacaactatgaaaccactgaacttgttcacgagaacaagaatggcacttatcagtgggttgtcaagccca

SEQ ID NO: 148526 - DNA, 247 bp, Glycine max
gatgaagggagattaccacaggtacctcgccgagttcaagaccggcgccgagcgtaaggaggctgccgagagcacctctctgcatacaaagccgctcaggacattgcaaatgccgaactgcctccaactcatccaattaggcttggccttgcacttaacttctctgtattttactacgaaatccttaactctcccgatcgtgcctgcaaccttgcaaaacaggcttttgatgaagctattgctgaat

SEQ ID NO: 148527 - DNA, 242 bp, Glycine max
gagacagaagaaaacaatggctgttgccaacaatgtgctttgcattgctttcattatcactttaacgtgggcagttgaagctcgaattccggggatttactctggtggtgcatggcaaagtgctcacgccaccttctacggaggatccgacgcttccggcaccatggggggagcgtgtgggtatgggaacctgtacagccaggggtacggtgtgaacacggcggcattgagcacggcactct

SEQ ID NO: 148528 - DNA, 241 bp, Glycine max
gaaagatttggtattcaaagtgcaatactgtggaatatgccactcagatctacatatgttaaagaacgagtggggcaacacaacctatcctctggttcctgggcacgagattgctggtgtggtaacagaagttggaagcaaggtgcaaaagttcaaagttggagaccgggtaggtgtggggtgcatgattggatcctgtcgttcatgtgaaagctgtgatgaaaatcttgagaattactgc

SEQ ID NO: 148529 - DNA, 240 bp, Glycine max
gaaagtacttgaagttgttgtggagaagggaatgcagaatggacagaagattacattccctggtgaagctgatgaagcacctgatacagtcactggggatattgtctttgtcctacagcagaaggaacacccaaagttccaaacgaaaggccgatgacctttttgtagaacacacattgtctcttactgaggcactgtgtggcttccagtttgtgctggctcacttggatggccggcagc

SEQ ID NO: 148530 - DNA, 238 bp, Glycine max
ggttatgttaaaaaaccaaattttctattggagactggtccagatgacgaggtcttcaatcctaaagctaagttacctgtgaagactactttgaaggtgactgtatatatgggggaaggatggtactatgatttcaagcatacacactttgatcaatattcacctccagacttctacacaagagtggggattgctggagtccctaatgatactataatgaagagaactaaggcaatag

SEQ ID NO: 148531 - DNA, 203 bp, Glycine max
gcaacaacaacaacaacagcaacaacagcagcaacaacaacaacagcaacaacagcagcagctgcagtcattgttgcaaataccaatgaaccagctccagcagcagaggcaacagcagctgcctgaaccacaaaatctgccattgttgcagcaactgcctcagcatctaggacagcaacctcagaaacaacaacagtcaagtc

SEQ ID NO: 148532 - DNA, 237 bp, Glycine max
catctttctcttttttagcttttcttttcctctaaaagtgagtccttccttcttcgatcacttgttaaattcacatatcatagcaatggcagcacgttcctacagccccatcatggttgccctctctttgcttcttttggtcacattctctaatgtagctgaggcttatacacgcatggaacacttcgtccttcagattgtaaaccaaagtgtacttaccgttgctctgcaacttca

SEQ ID NO: 148533 - DNA, 238 bp, Glycine max
cacaagtgttcttcctctgtaaacacacaaactctgttcctatttcagagtactgtccctttacctcgtacacatcaaacaatggaaggagatgggtattgtgggagtttctttcagaggtgcaagccttacatagccatgatttctctgcaattcgggtttgcgggtatgaacataatcaccaaggtttccctcaaccgtgggatgagccactatgtgcttgtggtttatagacacg

SEQ ID NO: 148534 - DNA, 242 bp, Glycine max
ctgcttcttccgattccggcacgcccccatcaccatggtgaacgttccgaaaacaaagaagacatactgcaagagtaaggagtgcaggaagcacaccctgcacaaggttacccaatacaagaagggtaaagatagcattgctgcccaaggaaaacgccgttacgatcgcaaacaatctggttatggcggacaaactaagcccgtcttccacaagaaggctaagaccaccaagaagattgttc

SEQ ID NO: 148535 - DNA, 237 bp, Glycine max
cacaatgtccgattcagccagggcagagctatgtctacaacttcaccatcaatggtcaaagaggcacacttctctggcatgcacacatcacgtggctaagagccacggtgtatggtggcattgtcatattgcctaaacgaggcatttcttatccatttcctaaacctgacaaagaaaagataatcattctaggtgagtggtggaaatcagatgttgaagcaattctcaatcaggctg

SEQ ID NO: 148536 - DNA, 237 bp, Glycine max
tgaatttaaaaccaacacccatgtccctaaactaggggtaatgcttgtggggtgggggggaaacaatggctcaaccctcactggtggtgttattgctaaccgagagggtatttcatgggcaacaaaggacaagattcaacaagccaattactttgggtcgctgacccaggcatcagctatcagagtggggtctttccaaggggaagaaatatatgctccattcaagagcctgcttcc

SEQ ID NO: 148537 - DNA, 236 bp, Glycine max
tcggcacatctctttgctgttttccaaggcttgctcaaagtgcttgctggaattgacaccaacttcactgtcacctccaaggcctcggatgaagacggagactttgccgaactatacatgttcaaatggaccacccttcttattcctccaacaacccttctcataataaacttggtgggggtggttgctggcatctcctatgccatcaacagtggctaccaatcttggggacccct

SEQ ID NO: 148538 - DNA, 239 bp, Glycine max
gaaacttaatcgatcatcacttcacttcactaatacatcatggcagacgagacccagaacaagtatgagagctctgaggttgaggtccaggatcgtggtgtttttgactttctcggtaagaaaaaggatgaagaagacaagcctcatcctcaggaggaggtcatcgccaccgagtttcaaaaagtcactgtctcagaccaaggagagaacaagcacagcctcttagaaaagcttcaccg

SEQ ID NO: 148539 - DNA, 238 bp, Glycine max
caggaatttgctagagaggtgattgccggtgtaaacccaaatgtgatccgtcgtcttcaagaattcccaccaaagagcacactctgatcccacactctatggtgatcaaaccagtaccataacaaaagaacaattggagattaacatgggaggggtcacagtagaagaggcacttagtactcagagattattcatattagattaccaagatgcattcatcccatatttgacgaggata

SEQ ID NO: 148540 - DNA, 238 bp, Glycine max
tctttttccgagtcttccagtgaaagaaaggcagcgatggaagaagacttcgacatccccggcggcgaggaaatggatctcggcgaagacgaggtcggcgaggagagggagatcggctctggcggcctcaagaagaagctcctcaaggaaggtcaaggctgggaaacccccgaagtcggtgacgaagtccaagttcattacacggggactttgctcgacgggactaagttcgattcga

SEQ ID NO: 148541 - DNA, 237 bp, Glycine max
gtgcatgccaccaaagtgtccctctctgccctgtgagggtgaagttgtacacaaaggccacacggaaaaagtcatcatattgagtgaatggtggaaatcagatactgaagctgtaataaatgaagctttgaaatctgggtcggctccaaatgtctctgatgctcacacaatcaatggtcatcctggatctgttcaaaattgtgcatcacaagggggatacaaactccaagttcaacc

SEQ ID NO: 148542 - DNA, 239 bp, Glycine max
ctcttttttgttgttgtggtgtttcatttgtgaaactaacaacaacacaaggccatcatcatggcagctgcttccccaatggcaagccaactcaagtccaccttcactaggactcttgtagctcccaagggcctctctgcctcttcaccacttcacctcgtgccttctagaaggcaatttagcttcactgttaaggccatccaatcagagaagccaacctatcaagtgattcagccaat

SEQ ID NO: 148543 - DNA, 242 bp, Glycine max
catacttctcctcagtactcttcaaagttgatcaaggtgggtgggttccacttgccattgctggagcatttcttattattatgtctgtttggcattacggcaccgtgaaacggtatgagtttgaaatgcatagtaaggtctcaatggcatggattcttggtcttggcccaagtttaggacttgttcgtgtccccggaattggactagtctacacagaacttgcaagtggagtgccccacatt

SEQ ID NO: 148544 - DNA, 232 bp, Glycine max
tgttgttgtaactcgttcttcttcttttgttgttctgtgtttgtgtttgttttttctctcacctgaaaatgtcttgctgcggtggtaactgtggttgcggaagctcctgcaagtgcggcaacggctgcggaggctgcaagatgtacccagacttgagctacactgagtcaaccaccaccgagaccttggtcatgggagtggcacctgttaaggctcaatttgagggtgctga

SEQ ID NO: 148545 - DNA, 236 bp, Glycine max
caaggacccaactgagcagactgctattgacaacttaatggttcaacagcttgatggaactgttaacgaatggggttggtgcaagcaaaagctaggagcaaatgccatattggcagtgtctcttgcagtctgcaaagctggtgctagcgtcctgaaaattcctttacaagcatattgctaatatcgcgggtaacaaaaagttggttttgcctgttcctgctttcaatgtcattaat

SEQ ID NO: 148546 - DNA, 237 bp, Glycine max
attacaatagcctctattcaaagaggagaactaggtctagatattatgatgattcaaaatcagaagaatttaattcttctaggcttaaggaaaaagaaaaataacaaatttatgaaaaaagaaatatttgttatcgaaccagttcgcctgtctagaaaaaacaataaacaattttttatgtatcaaaccataggtctttcattaattcaaaagaataaacgaaaaatttatcacaaa

SEQ ID NO: 148547 - DNA, 235 bp, Glycine max
gctaaacggaaccctctagaacccaaagtttttctctttcaattcttcctcagtcaattcaactccctttcaatttcaaccctatctctgctctcttcttcttcttcttcttcattttttgggtctctctgtttacaagcttttcagttatggcatcgaaacgcatcgtcaaggagctcaaggatttgcagaaggaccctcctacttcctgcagcgcaggtcccgtggcggagga

SEQ ID NO: 148548 - DNA, 233 bp, Glycine max
atttcttagcacaccagaatcatgcattgactggaattcacttctggagcgtttcctgcccagacaaatttcaatgacacgagcaaaacgggaatgggagtatgacattctttctcgttatcgttcattggagaatctgacaaaagatgatgcgcgacaacaatttctgcgtatattgagagcacttccttatggaaattctgttttcttcaatgttcgcaagattgatgatc

SEQ ID NO: 148549 - DNA, 235 bp, Glycine max
gcacttaccagcaccactacttataccaagagaaacaaataaaaaatgcatgttagatggctacgaaattccagccaagacattattatatgtgaatgcttgggcaattcatagagatcctaaggcttggaaagatccagaagagtttatacctgagaggtttttaaattgcgacatagatctttatggacaagattttgagtttattccattcggtgctggtcgtagattgtgc

SEQ ID NO: 148550 - DNA, 237 bp, Glycine max
agacagctgcaaacaagccaacggattccaaatgggaatcttgtacttgtcactgtaccttattgcactaggaactggtggcctcaagtccagtgtttcaggatttggttctgaccaattcgatgagaaagatgagaaggagaaatcgcaaatggcctattttttcaacaggtttttcttcttcatcagttttggaactctggcagctgtcacagtacttgtctatctgcaagatga

SEQ ID NO: 148551 - DNA, 234 bp, Glycine max
attgtttgttgttgtaactcgttcttcttcttttgttgttctgtgtttgtgtttgttttttctctcacctgaaaatgtcttgctgcggtggtaactgtggttgcggaagctcctgcaagtgcggcaacggctgcggaggctgcaagatgtacccagacttgagctacactgagtcaaccaccaccgagaccttggtcatgggagtggcacctgttaaggctcaatttgagggtg

SEQ ID NO: 148552 - DNA, 236 bp, Glycine max
cggactatgttgcatcactacttatgcccctgtataaggcaaggaaactagacaaggatggatacaaggctataatgaagaaaagtgcaacaaaggtcatggagcaagccacagatgcagaaaaagccatggctgttcgtgagtttctagattttaagcgaaagaataagattcgctcctttgtggatgtattgattgagagacacatgacaacgaaaccagacatgaaatcttaa

SEQ ID NO: 148553 - DNA, 235 bp, Glycine max
agctaagtattcataattaacaatatattcctcacaggtggaagctttagcagttaagttaacccaaaatgaaggagaattgattcaagagaagtttgaagtgaagaagcttgtaaactttctcaaacaggcttctgaagatgctaaaaatttggttaatcaagagaagtcttttgcttgtgccgaaattgaaagtgctagagctgtggtgctgagaattggggaggctcttgaa

SEQ ID NO: 148554 - DNA, 234 bp, Glycine max
tatcactgtgttgcgagcagtgatcgattctgcgaactgcgattcgcattgccaatttcaacagcgtgcgttcgtacgtcggagatggagtcgctaccgacgacgaagcgaggaggagcgagatcgaagcccgttcagacctcgaaatcgtccctcgtcatggccttcttctcctgcgtcgcgtggctctacgtcgctggaaggttatggcaagacgcagagaatcggaatttg

SEQ ID NO: 148555 - DNA, 237 bp, Glycine max
gcaaagatgtttgggatcttcgacaaggggcaaaagataaaggggacagtggtgttgatgccaaagaatgtgttggacttcaacgccataacctccatcggtaaaggtggtgttattgacacagccaccggcatcttaggccaaggcgtcagcttagttggtggagtaattgatactgccacttccttcttaggccgtaatatctccatgcaattgcatcagtgctactcagactga

SEQ ID NO: 148556 - DNA, 239 bp, Glycine max
gtgacttgagaaaaagaaatttagggtcttaagggtttcattctgcggcatcagacatgggaggaggcaatgggcaaaaggcaaagatggcacgcgagaagaacctcgagaagcagaaggccgcctcaaagggaagccagctggattcaaacaagaaagcaatgtcgattcagtgcaaggtgtgcatgcaaacatttatgtgcaccacatcggaagtgaagtgtagggagcatgctgaa

SEQ ID NO: 148557 - DNA, 235 bp, Glycine max
cgagcttcaacttctctgcgaatatgtaaaagagatccttattgacgagtccaatgtgcagcctgtcaatagtccagtgactgtttgtggtgatattcatggtcaattccatgatctaatgaaacttttccagactgggggtcatgtgcctgaaacaaattatatttttatgggagactttgttgatcgaggttacaatagtcttgaagttttcaccatccttttacttctaaaa

SEQ ID NO: 148558 - DNA, 235 bp, Glycine max
ccaagccccactcaaccaccacaccactctctctgctcttcttctacctttcaagtttttaaagtattaagatggcagagacattcctatttacctcagagtcagtgaacgagggacaccctgacaagctctgcgaccaaatctccgatgctgtcctcgacgcttgccttgaacaggacccagacagcaaggttgcctgcgaaacatgcaccaagaccaacttggtcatggtctt

SEQ ID NO: 148559 - DNA, 233 bp, Glycine max
tgttgttgtaactcgttctctcttctcttgttgttctgtgtttgtgtttgttttttctctcacctgaaaatgtcttgctgcggtggtaactgtggttccggaagctcctgcaagtgcggcaacggctgcggaggctgcaagatgtacccagacttgagctacactgagtcaaccaccaccgagaccttggtcatgggagtggcacctgttaaggctcaatttgagggtgctga

SEQ ID NO: 148560 - DNA, 234 bp, Glycine max
attccagccacacgcttcagaagacatggcctcattgggtgggttacaaaatgtgagcggcatcaattttcttatcaaagagggtccaaaagtcaatgcaaagttcgagctgaagccgccaccatatccactgaatggtttggagccggtgatgagccagcagacacttgagtttcactgggggaagcaccacaagacttatgtggaaaatctgaaaaaacaagttgttgggac

SEQ ID NO: 148561 - DNA, 230 bp, Glycine max
ctcgagcgcaatttgtcgggggagattccggttgagataggcgagttcaaacgcctcgaggctctgtctttgtacaggaacagattgataggtcctattcctcagaaggttggttcctgggcagagtttgcttacatcgacgtgtcggagaatttcttgacggggacgattccgccggatatgtgtaaaaagggagccatgtgggcgcttctcgtgcttcaaaacaagct

SEQ ID NO: 148562 - DNA, 230 bp, Glycine max
gagacaacaatatggactggccaagtcagtcaatgaagtattgttggtcattgaggcttacaaagctttgcgtgaccgagcaccctaccctgctaatcatgttgttggccatctcagtgggagctttgcttgtatagtttttgacaaatctacttctaccctctttgtggcatctgatcaatatggtaaggtacctctgtattggggaataactgctgatggctacgtag

SEQ ID NO: 148563 - DNA, 232 bp, Glycine max
ctggttgaaagccatgagcatgatggctgcgtatttgcgtgtacccacatccacgcccattactccgcaatctcccacagctacgaggaccaaatgcagaaatctgaaaacctcttgctccgttaatgccgccaaaattccaatgccccctctaaaccctaaagaccccttcctctccaagctcgcttccatcgctgcctcttcccccgacacgctcctcaacactcccaaa

SEQ ID NO: 148564 - DNA, 134 bp, Glycine max
  unsure (1)..(134): unsure at all n locations
ctaatgtggagtgatcctgaagatattgaaacatgggcagtcagtccccgtggcagcaggttcggcttttgtggatcgagggggttacttctagagttcaagtcacagtaaatagatctagggnatcttgtttg

SEQ ID NO: 148565 - DNA, 228 bp, Glycine max
ctcgagcgattcggctcagtaagtttattatggctaatgccaatttggtgcgagctctcatacatactgatgttactaagtatctctctttcaaagctgtggatgggagctttgtgtttaataaaggaaaggttcataaggtgcccgcaaatgacatggaggccttgaagtctccacttatggggctatttgaaaaacgccgagcacgcaagtttttcatttatgtgc

SEQ ID NO: 148566 - DNA, 230 bp, Glycine max
cttagtcccaattttctagggttttattcattttccgatggcttctgcagatgttgagtaccgttgctttgtcggtgggctcgcttgggccactgacgaccatgccctcgagagagccttctctcagtacggcgaaatcgttgaaacgaagattatcaacgatcgtgagactggcagatccaggggttttggatttgtgaccttcgcctcggagcagtccatgaaagatg

SEQ ID NO: 148567 - DNA, 231 bp, Glycine max
ctcttcaaaagggagaagaaaaggaaagaaaactctcaaaaaactattatagcaatggcagaacaaaaccaaaaccaaacaactgaagctggaaggcaccaagaggttggtcacaagagccttctccagagtgatgctctttaccagtatattctggagacaagtgtctacccaagagaacctgaatccatgaaagaactgagagagttgacagcaaaacacccatggaac

SEQ ID NO: 148568 - DNA, 230 bp, Glycine max
gatttcagctgagaaggctcaccatgagcagttatcagttggtgaaatcacaaacagcgcattcgagccatcatctatgatggccaagtgtgatcctcgccatggaaaatacatggcttgctgtctcatgtaccggggtgatgttgtgcctaaagatgttaatgcagctgtgggaattatcaagaccaagcgcactattcaatttgttgactggtgccccactggtttca

SEQ ID NO: 148569 - DNA, 262 bp, Glycine max
gctgtggataactacattcccatccctcagcgtcaaactgaacttccctttttgctggccattgaggatgttttcaccatcaccggtcgcggaactgtcgccaccggaagggttgagagaggtaccattagggttggagagactgttgatattgttggtgttaaggaaactacgaacaccactgtgactggggtggaaattgttcagaagattttggatgaggctttggctggggacaatgtggggttgttgcttaggggta

SEQ ID NO: 148570 - DNA, 264 bp, Glycine max
ggctcgtcactccttgctcttagccctcctcctcttcgccgccgtggccaccgccgcgatggggtggcgcgtccgacgccgacgccatcctgatccgtcaggtggtgccagatgttggcgaagccgaagaggaggacaacctgctgaacgccgagcaccacttcgctagcttcaaggccaagttcgccaagacctacgccaccaaggagggagcacgatcatcgcttcggcgtcttcaagtccaacctccgcagagccaggctg

SEQ ID NO: 148571 - DNA, 263 bp, Glycine max
ccaaaacaaaatgaagagcctcctcttctctctcttcctcttcctcttcttagcctcctccgccgtcgccaccgtccccgcccacaacatcacccgcatgctggccgcacaccccggcttctccaccttcaaccactacctctccgtcacccacctggccgaagagatcaaccgccgccagaccatcaccgtcctggcccctcgaaatgccggcatgtcctccctcctcgacaagaactctccctccccaccatcaaagacgt

SEQ ID NO: 148572 - DNA, 260 bp, Glycine max
ggttggaaacgcctgctgggagctttactgcctcgaacacggcattcagcctgatgggcagatgccaagtgacaagaccgttggtggaggtgatgatgctttcaacaccttcttcagtgaaactggggcaggaaagcacgtgccccgtgcgatttttgtagatcttgagcccactgtgattgatgaggttaggactgggacataccgccaactattccatcctgagcagctcattagtggaaaggaggatgcagcaaaca

SEQ ID NO: 148573 - DNA, 259 bp, Glycine max
cttcctgaaaatgatcagctgaatgttgcatttgttgatgttggacatgctagcatgcaagtatgcattgctggatttaaaaaggggcagctgaaagtgttgtcccaatcatatgataggtccctaggtggtagggactttgacgaggttctgttcaaccattttgctgcaaagtttaaggaggagtacaagattgatgtattccaaaatgccagggcttgtctgaggttgagggctgcctgcgagaagctgaagaagg

SEQ ID NO: 148574 - DNA, 261 bp, Glycine max
cgagactgcccagggcattttcgtcaattttaaggatttgtattattacaatggcaacaagcttcctttcgctgctgcgcagattggccaagcgtttaggaatgagatatctccacgacaggggcttctgagagtgcgggagttcacgttggcggagattgagcactttgttgaccctctagataagtctcatcccaagtaccctgaggtagctgacttggagttcttgatgttcccgagggaggagcaaatgtcgggtca

SEQ ID NO: 148575 - DNA, 263 bp, Glycine max
agagattgcaaataaacgacggaaaaccatgtcacaagttgctataaattggtgcatatgcaaaggtacggttccaattcctggagttaaaacaattaaacaagcagaggaaaatttaggtgctcttggttggcgcctctcctcagacgagttgcttcagttggaggatgcagcaaacgaatcacctcgcaggatgatccaaaacattttccaaaccagataaaacctgtggcgagacctcagcactcggttcgaaggaatgc

SEQ ID NO: 148576 - DNA, 259 bp, Glycine max
atttctactttctttagctgccaaacgaaacttcccttgttcctgttcctgtgttctccttgcagctccaaaattctatgtggtggtggagatggtgatgattactgcttggatcactgaccttttcgcttgtatgggtggttgttttggatgctgtgtgaaacccacaccaattattgccgtggatgagccagcaaagggactaagaattcaggggcagacagtaagaaaaccacacatatcagatggtttctggagt

SEQ ID NO: 148577 - DNA, 263 bp, Glycine max
cttttgctttaccaaattccattttccaattcaaaaccctaactccgttcgaagcaccaaatcgtgatggcaccaaaggcagagaagaagccagcagagaagaagcctgtggaggagaagaaatcgacggtgggagacaaggctccggcggagaagaagccaaaggccggaaagaagcttccgaaggagggaggcgccggcggagaaggtaagaagaagaagagaaacaagaagagcgtggagacatacaagatctacatctt

SEQ ID NO: 148578 - DNA, 262 bp, Glycine max
gagaatttcttccatgttacagatgctatcttctcttaaaaggatcatgtctttgccagatgatacaagtatttactgtggtcatgaatataccttgaacaattcaaagtttgccttgtctatagaacctgaaaacaaggaacttcaatcctatgctacccatgtatctaaccttagaaataaaggcttgcccacggtaattttcagaacttggcttctttaatggatggtttcaagtgccctctgtaggggctcttccttc

SEQ ID NO: 148579 - DNA, 261 bp, Glycine max
gcgaagagaatggctcccaagggtttaatctttttggctgtgttatgcttctcagcactgtcactgagtcgttgtcttgcggaggataatggacttgttatgaacttctacaaggaatcatgccctcaggctgaagacatcatcaaagaacaagtcaagcttctctacaagcgccacaagaacactgctttctcctggctcagaaacatcttccatgactgtgctgttcagagttgtgatgcttcactgttgctggactcc

SEQ ID NO: 148580 - DNA, 260 bp, Glycine max
gcagtactggatggacgagaactatctctatacctgctttgctcacaccggcgaggttacatcggttaaagtaattcgaaacttgcaaactagtcaatctgaaggttatgggtttattgagtttaatagtcgtgctggagctgagagaattcttcaaacatataatggggcaataatgccaaatggggggcagagtttcaggttgaattgggcaacttttagtgctggtgagaggtcgcgccacgacgattctccagatt

SEQ ID NO: 148581 - DNA, 257 bp, Glycine max
aaccttgccttgccatggcctcaaactccatggctggcttgatcaccggttcgaattctcacttctcgcgtgactccgatgagcatcagactcctcctacccgacaggcttcatcgaaaactacttgtcgagtttgtggcgatgagattggatacaaggaaaatggggagctgtttgtggcttgtcatgtgtgtggatttcctgtttgccgaccgtgttatgagtatgagaggagtgaagggaaccagagctgtcct

SEQ ID NO: 148582 - DNA, 257 bp, Glycine max
cgcttctgattccgtcttcaatcacctcgttcgtgctcccgaagatcctatcctcggggtaactgtcgcttataacaaagatccaagtccagttaagctcaacttgggagttggtgcttaccgaactgaggaaggaaaacctcttgttttgaatgtagtgaggcgagttgaacagcaactcataaatgacgtgtcacgcaacaaggaatatattccgatcgttgggcttgctgattttaataaattgagtgctaagc

SEQ ID NO: 148583 - DNA, 258 bp, Glycine max
gaaacatgagtgagaatagtaaaaccctgcgtttcggcatcttaggctgcgccaacatcgccagaaaagtggctcgagccattgctctcgctccgaacgccactctctgcgccatcgcgagccgttccagagagaaggcggagaagttcgccgccgagaacgggtttccggcgaccgtgagggtttacgggagctacgatcaggtgttggaggatccatgcgtggacgccgtgtacctccccctccccacgagtctga

SEQ ID NO: 148584 - DNA, 257 bp, Glycine max
gcagtactggatggacgagaactatctctatacctgctttgctcacaccggcgaggttacatcggttaaagtaattcgaaacaagcaaactagtcaatctgaaggttatgggtttattgagtttaatagtcgtgctggagctgagagaattcttcaaacatataatggggcaataatgccaaatggggggcagagtttcaggttgaattgggcaacttttagtgctggtgagaggtcgcgccacgacgattctccag

SEQ ID NO: 148585 - DNA, 258 bp, Glycine max
caaatgataagaatgattccgatcttggttgctacatttgtgcctagtacaatgatggctcagataaataccctttttgtgaagcaaggtactactcttgacagacacctcggaagcttcaaaattcccccagcaagtttggctgcatttgttactgtgtccttgcttgtttgcattgtgctctatgatcgcttctttgtgaagatcatgcaaaggtttaccaagaaccccagaggcattacccttcttcagaggatg

SEQ ID NO: 148586 - DNA, 258 bp, Glycine max
ccgtggtggcatgcagatcttcgttaagaccctcaccggcaagactattaccctagaagtcgaaagctccgacaccatcgacaacgtcaaggctaagattcaggacaaggagggaatccccccagaccagcagaggctgatcttcgccgggaagcagctcgaggacggacgcacccttgctgactacaacatccagaaggagtcaactctccacttggtgttgcgtcttcgtggtggtatgcagattttcgtgaagac

SEQ ID NO: 148587 - DNA, 259 bp, Glycine max
gcgaagagaatggctcccaagggtttaatctttttggctgtgttatgcttctcagcactgtcactgagtcgttgtcttgcggaggataatggacttgttatgaacttctacaaggaatcatgccctcaggctgaagacatcatcaaagaacaagtcaagcttctctacaagcgccacaagaacactgctttctcctggctcagaaacatcttccatgactgtgctgttcagagttgtgatgcttcactgttgctggact

SEQ ID NO: 148588 - DNA, 259 bp, Glycine max
ttttgagtaatggggaacctggtactgctcagaatgtagacaaaacaaccagcttggcacgaaaagtcttccgtctctttaagtttgtcaatgacctacatgctttgataagtccaacaccacaggggacacccctccccctagctctgttgggaaagtccaagaatgctctactctccactttcttgtttcttgatcaatttgtgtggcttggcagaacaggcatctaccagaataaagagcgcaccgaactaattgg

SEQ ID NO: 148589 - DNA, 254 bp, Glycine max
cagggatcgtgatcatagggaggataggcaccacagagaccgggataggaacagggacagagaccgagacagggaaagagatagagatcgtgggcgtgatcgagatagaacacgggaccgtgatcgtgagcgagggagggaccgtgatcgggatcgagaatatgatcgacatcgtgagagggatagagattatgaagttggtgaccctgatcgaggacgctcacgtgatagggagtctgattatgatcgtgttg

SEQ ID NO: 148590 - DNA, 258 bp, Glycine max
cctaatcgcactccgctctccgcactccgctattgcacctccctcgacggcacctcaggcgcactcgttttcggttccgattgcattgaatcaaatctgagaaccattctcattgcccgtctgtaatcatgtcaggaaagtatatcatttctgctattcttggatcatttggagttgcatgggtttgtgattattatgtttcagagaaaaagctatttggaggttctacccctggcactattacgaacaatgagtggg

SEQ ID NO: 148591 - DNA, 258 bp, Glycine max
aagaggtcaagccactgatagtcatagtcttgcagaaagagttcggagggagaaaatcagtgaaagaatgaagcttctccaagatcttgtcccaggttgcaacaaggtcacgggtaaagcactaatgcttgatgaaattataaactatgttcagtcattgcagcgccaagttgagtttctgtctatgaagttggcttctgttaacaccaggctggattttagtattgagagtctaatctcaaaagatatatttcaatc

SEQ ID NO: 148592 - DNA, 256 bp, Glycine max
tttacaacaacaatggcttctgtgcctcaaccaaaaatctcccttctaaccttattcttcttctcgtccttcaccatcattgcgcatgcaattgttcctcaaaacgaaaccttcaaatttgagaactcaggtgaacttggaccctacatcgttgagtacggtgcagattacagaatgataagcatcttcaactctccattccaagttggtttctacaacaccaccccaaatgccttcactctagctttgcgtgtag

SEQ ID NO: 148593 - DNA, 254 bp, Glycine max
agactgttttcactattgcaaataggtatggtgattacattcggacagggtggaggaatattcttgattgcatcttaaaatttcacaagttaggtcttcttcctgctcgtatggccagtgatgcggctgaagagtcagagctttctacagaaactgaggatggggggaagcagaatactaattctttatctttatctcgtcttccatctgttaatactccgaagagaccctcaggattgatgagcaggtttagt

SEQ ID NO: 148594 - DNA, 255 bp, Glycine max
accggttgttgcctgggtcagtgggacatgtgcacgactattcaaatctgaagtacaatttggtcatgcaggagccaaaagtggtggtgagttggagtctgctcaagcaaagaatcaggcactaagggatgctggagctgttgttcccacatcatatgaagcttttgaagtttcaattaaggaaacatttgataaattggttgaagatgggaagatcacaccaatcaaggaaatcacacctccaccaatccctga

SEQ ID NO: 148595 - DNA, 257 bp, Glycine max
  unsure (1)..(257): unsure at all n locations
agaagattgaagaggacatgtntgatagaatagctagagaaaaagcggaagaagaggcaaggcagcaggcattgcttagaaagcgatcaaaagtccttcaacgggaacttcctaggcctcctacagcatcattggagcttataagaaattccttgatgagaactgacgtggacaagagttcctttgttccaccaacctctattgaccaagctgacgagatgattagacgggagcttctaagtttactggagcatgac

SEQ ID NO: 148596 - DNA, 256 bp, Glycine max
cttttgcttccttaacctattttgttatcctcaattttcaatggctcaatcccattctggaaaaacctcttccatgacttcaatactcctcctgtttatgcttcttatcagtaatacaggcacaacaggtgcacaatctggtgtatgctatggaagagttggcaacaatctgccatcgccacaagaagtagtttccctttttaaacagtacggcttccaaaggatgagaatctatgatcgaaaccatgaagtcctc

SEQ ID NO: 148597 - DNA, 256 bp, Glycine max
ctcgagccgctcgagccgcacaagccaagtgaaagtgagaaaaaataaaaatcaaagagcataatgtcaaggatcattcacaagattggggagacccttcatgtgggagggcacaagaaggaggaggagcataagggtgagcaccatgctggagaatacaaaggggagcaccatggtgaacacagtagtgagtacaaaggagagcatcatggtgaacacaaagctggagagtaccatggtgagcacaagccagagc

SEQ ID NO: 148598 - DNA, 254 bp, Glycine max
cacgcttcagaagacatggcctcattgggtgggttacaaaatgtgagcggcatcaattttcttatcaaagagggtccaaaagtcaatgcaaagttcgagctgaagccgccaccatatccactgaatggtttggacccggtgatgagccagcagacacttgagtttcactgggggaagcaccacaagacttatgtggaaaatctgaaaaaacaagttgttgggacagagcttgatgggaagtcactagaagagat

SEQ ID NO: 148599 - DNA, 255 bp, Glycine max
agaagaagcaaagatgatattgcagttcttcgtgctttcacagagaggcgataacatcgtctaccgcgactatcgtggtgaagctcaaaaaggaagcgctgagacatttttccgaaaagtaaagttctggaaagaagatgctgagggagatgctccacctgtttttaatatagacggtgtgaactacttccacgtaaaggttgctgcattgctatttgttgctactactagagtcaatgtctccccttctcttgt

SEQ ID NO: 148600 - DNA, 248 bp, Glycine max
actaattcaataacatagaagaatatggaagatggaagcgtcaaccttcctcctgggtttttcttctctcctactgatgaagaacttgttcttcactttctctattgcaaggcttctctcattccatgccatcctaacatcatccccgatctccatccgtctcagcttgctccttgggaattaaatggtaaggcgttgttaagtggaaatcagtactatttctttaccaaagtgaatgaaaacagagc

SEQ ID NO: 148601 - DNA, 246 bp, Glycine max
gccagagatggcattgtttcgctaggaggtccccatatccctcttaagactggaagaagggatggtagaaggagcagagctgatgtggttgagcagttcctcccagaccacaatgagtccatttctgcagttcttgacaagtttggtgccatgggaattgacacccctggcgtcgttgcactgcttggagcacacagtgttggtcgaacccattgtgtgaagttggtgcaccgtttgtacccagag

SEQ ID NO: 148602 - DNA, 248 bp, Glycine max
ctagttctagatcgctcgcgatctagaactagtcatagagcccaacctctcaagcccaagcccaagcccaagcccaagcccgttcataaaatactcctgcagcagcacccagtacccagccctctgcgtctcatccctctccgtctacgcctccagcatccaacaggaccctcaccaactggttcagacagcactctccctctccctgaaccgcacccaagccaccaaaaccttcgtggctaactgca

SEQ ID NO: 148603 - DNA, 247 bp, Glycine max
ctataggcgaaggactttaggttgggatttgggaattagggttattcgcgtggcgaagatgattgaggtggttttgaacgatcgattggggaagaaggtgcgcgtgaagtgcaacgaccgatgataccatcggcgacctgaagaagcttgtggcggctcagactggcacaagagccgacaagatccgcatccagaagtggtacaccatctacaaggatcacatcactctcaaggattacgagatcca

SEQ ID NO: 148604 - DNA, 248 bp, Glycine max
ccggattcgagtacctgtcgaggttccaatctcgctccctcgacgccaacgccagagaagaatccgttgcatggattctcaaggtacacgcgtattatggctttcagcctttgacggcgtacctcgccgtcaactatatggatcggtttttggattctagccagttgccggaaacaaatgggtggcctctgcaacttctatctgttgcatgcttgtctttggcagcaaaaatggaggaacctcttgtt

SEQ ID NO: 148605 - DNA, 246 bp, Glycine max
ctcgttcttcttcttttgttgttctgtgtttgtgtttgttttttctctcacctgaaaatgtcttgctgcggtggtaactgtggttgcggaagctcctgcaagtgcggcaacggctgcggaggctgcaagatgtacccagacttgagctacactgagtcaaccaccaccgagaccttggtcatgggagtggcacctgttaaggctcaatttgagggtgctgaaatgggtgtgcccgctgagaacgat

SEQ ID NO: 148606 - DNA, 244 bp, Glycine max
ctccggaagcccatggtacggcccagaccgcgtcaagtacttgggcccattctctggcgagcccccgtcctacctcactggcgagttcccaggtgactacggctgggacactgctgggctttcggccgacccagaaaccttcgccagaaaccgtgagctcgaagtgatccactccaggtgggccatgctcggggccttgggctgcgtcttccccgaactgttgtcccgcaacggggtcaagttt

SEQ ID NO: 148607 - DNA, 244 bp, Glycine max
tatagcccaagccctatacaaccaaaccctaacacacacccatttgattcagtttccatggctagcctcaaggttgcatttttggctgcagtgctctgcatggttgtggtgagtgcacccatggcacatgcagctatcacgtgcgggcaggtgacgaatagcctgatcaattgcatcggttacctccagaacggaggaacgccgccgtcgggatgctgcaacggagtgaagagcctcaatgccg

SEQ ID NO: 148608 - DNA, 242 bp, Glycine max
agcccttcaggcaaatgggaaaggcttctctgaattctctggcctccgcagctcatcaggcttccttcccttttctagaaaatcttcagaggatttccattctgtcattgccttccagacctatgcagttggaagcagtggaggatacaagaagggtgtgacagaagcaaaactgaaggttgccataaacggatttggaaggattggaaggaacttcttgaggtgctggcacggtcgcaaag

SEQ ID NO: 148609 - DNA, 245 bp, Glycine max
gtggatccggctgatgtggatgctatatcaaagactgtcaaaagggcccttgcagtctatggaactccagcttttacagaaattatcaagaactgcatggctcaagatctttcatggaaggtgagtaaaggaagaacctgagtaatacaccataagctgtgatgagatttaaatatattttttgaatttaatttctatgcactgattatcagtgtcaatcaataagaaatcatgataaatatgac

SEQ ID NO: 148610 - DNA, 243 bp, Glycine max
gacgggtcaaaagcagatatctggtcatgcggcgtcgttttgtacgttcttctcgctggatttcttcctttccaacacgagaatctcatgacaatgtattacaaagttctcagagccgagtttgagtttccaccgtggttttcgcctgagtcaaagaggctaatctccaagattctagtggcggatcccgcgaagagaaccaccatttccgccataactcgcgtgccgtggttccggaagggc

SEQ ID NO: 148611 - DNA, 245 bp, Glycine max
gtgagcttcccagtactttgagagccttcagattccagcagcacagatggtcatgtggtcctgctaatttgttccgcaaaatggtgatggagattgtgaggaacaagaaagttaggttttggaagaaagtgtatgttatatacagctttttctttgttcgcaaaatcatcgcccacatggtcaccttcttcttctactgtgttgtgattccccttacaatcttggtcccagaggttcatgttcca

SEQ ID NO: 148612 - DNA, 247 bp, Glycine max
tctcgagccgaatcggctcgagggccagatggggacgggccatataacataaacattcaaaaatactgtgcagtttcagttaacagtcaatattgttgctctgattattaactttgtttctgcatgcatcacaggatctgctcccctcacagctgttcagttgctttgggtcaacttgattatggacactctgggtgcattggctttggccactgaacctcccaatgatggacttatgctaagaccc

SEQ ID NO: 148613 - DNA, 240 bp, Glycine max
gcctcatggtgcaaattgtggtcctccagtgcatcatttggtacaccttgatgctcttcttgtttgagtttagaggtgccagaatgctcatctctgagcagttccctgacactgctgcctccattgtctccatccatgtggactctgatgtcatgtcattggatggaagacaaccacttgagactgaagctgagatcaaggaagatggtaaactccatgtcactgtgaggaaatccaatg

SEQ ID NO: 148614 - DNA, 241 bp, Glycine max
cctctctgttcgcactctgtctttcccctgtttccgcgtcactgagtcattgcgattcgcaactcgctcaccggccaattcctccgccgcagctccgtcgccggagcaaggctcatgtcttcttcgtcctcatggttccggagcatcgagcccgttcccaaggatcctatcctcggagtcactgaagctttcctcgccgatcagagtccaaacaaagtcaacgtcggagtgggtgcgtatc

SEQ ID NO: 148615 - DNA, 241 bp, Glycine max
gaaagcactaaggttgacaaggtggttgtcctgtggacagccaacacagagaggtacagcaacgtagttgtgcggactaaacgacaccatggaaaacctctttgcttccttggacaggaatgaggctgagatttccccttccaccttgtatgccattgcttgtgttatggaaaatgttcctttcatcaatggaagccctcagaacacctttgtcccaggactcattgatctggccatcaaa

SEQ ID NO: 148616 - DNA, 243 bp, Glycine max
gctagatcggttgcttaggccaggaggttactttgcatactcatctccagaagcatatgctcaggatgaagaggatcaaaggatatggagagagatgagcgcccttgtgggacgtatgtgttggagaattgctgcaaagaggaaccaaactgtcatctggcaaaaacctctaacaaatgaatgctatatggagagagaacccggcactcgccctcctctttgccagtctgatgatgacccaga

SEQ ID NO: 148617 - DNA, 240 bp, Glycine max
ttcctgttgtgtgaagcaaaaattaaggaaaggcttatggtcccctgaagaagatgagaagctatttaattacataacaagatttggagtcggatgctggagctcggttcccaaactagctggattgcaaagatgtggaaagagttgcaaggtgggaatggataaactatttgaggcctgatttaaagagaggcatgttctcacagcaggaggaggatcttataatcagtcttcatgaag

SEQ ID NO: 148618 - DNA, 235 bp, Glycine max
ctgggactgtgtacaagattgagttgaaaagtggtgatattgttgcggtgaagaggctgtggagtcacgcgtccaaggattcggctccggaggatcggttatttgtagacaaggcattgaaagcagaggtggagaccctgggaagcataagacacaagaacattgtgaaactgtactgctgcttctccagttatgactgcagccttttggtttatgagtacatgccaaatggtaa

SEQ ID NO: 148619 - DNA, 232 bp, Glycine max
cttcgccgcggtggccaccgccgcgatggcgtggacgtccggcgccgacgacatcctgatccgtcaggtggtgccagatgttggcgaacgaaggaggacgagcaacctgctgaacgccgagcaccacttcgcgagcttcaaggccaagttcgccaagacctacgccaccaaggaggagcacgatcatcgcttcggcgtcttcaagtccaacctccgcagagccaggctgcac

SEQ ID NO: 148620 - DNA, 238 bp, Glycine max
cagcatttgatcaaggcaatacaaggccacttagggaacaagaatataaaagaaggaaaaagaagaagacgacatagcaaagcctagaaacatgggtcaccattcttgctgcaaccaacagaaggttaaaagaggactttggtctcctgaggaagatgaaaagctcatcagatacattactactcatggatatggctgttggagtgaagttccagaaaaagctgggcttcaaaggtgt

SEQ ID NO: 148621 - DNA, 234 bp, Glycine max
ctcgagccgagatcggctcgagatactgacttcctgctttgtttatcggatctatggcttccacggagttctcgggtctttgctccttggctccttcactatctgagacgattttgtgcactactcggttgaagatgtatatgctggagagcaaaggaggtgccatatcatgcatgttcttgtctcttttcttcttggggacatggcctgctcttttgactatgttagagaggc

SEQ ID NO: 148622 - DNA, 237 bp, Glycine max
ttttgatttgcctcatgtcattgaagatgccccatcttatcctggagtggagcatgtaggtggagatatgtttgcgagtgttccgaaagctgatgctatttttatgaagtggatttgccacgattggagtgatgagcactgcttgaagtttttgaagaactgctacgaggcactaccagacaatgggaaggtgattgtggcagaatgcattcttccagtggctccagactctagctt

SEQ ID NO: 148623 - DNA, 242 bp, Glycine max
cagttttccaagggtcagttgggagtcaaatttaagccattttcaaagtatcctccttgttacaaggacatgagtttctggatcagtgaatcatttactgaaaacaatctgtgtgaagttgttagaggaatagccggggatcttgtagaggaggtgcaattaatagacaacttcaccaacaagaaaggaatgaccagccactgctataggattgcatataggtctatggaacgttctctcac

SEQ ID NO: 148624 - DNA, 229 bp, Glycine max
caatcagagaaattgagcgtgagcggcaaggattgcaaacacaagaaaagaaattgattgcggagataaagaaaagtgccaaacagggccagatgggagctgttagagttatggcaaaagatcttgttagaacaaggcatcaggttgagaagttttataagctaaaatctcagctccaaggtgtatcactcagaattcagactttgaaatctacacaagcaatgggtga

SEQ ID NO: 148625 - DNA, 234 bp, Glycine max
gcactatagtaaaaaaaggacattcattcatctatggctacccttattgctcccagcaaccactctccccaagaagatgctgaagctctcagaaaggcttttgaaggatggggaactgatgagaacactgtcatagtaattttgggtcatagaactgtgtatcagaggcagcaaatcagaagagtttatgaggaaatttaccaggaggatcttgtgaagcgcctagagtctgag

SEQ ID NO: 148626 - DNA, 233 bp, Glycine max
gaagatgaccctattactcttggtttcgttgacaaacccaagaatgaatggtctcttcgccgtcaatatttcccaagcaaaactggtggagtcccggcttggcttgaccctctgaatataccatcagggagatcatctgtgtgtgacatttgtggagatcctttacaactcttgcttcaggtttatgcaccaactgacaaggaaaccacatttcaccgaatgttgtttgtttt

SEQ ID NO: 148627 - DNA, 233 bp, Glycine max
ggaatcccaccggaccagcagaggcttatttttgctggcaaacagctagaggatggaaggaccctcgctgactacaacatccagaaggagtcaactctgcacttggtgttgcgtcttcgtggggggttttaagctggagctgatttctgtgtgatgttcgatgttggattttcccaaacattttaagaagaaatgtgatgtgtaatgggtctgtaatgacctttgaaaataag

SEQ ID NO: 148628 - DNA, 234 bp, Glycine max
ggagattattgagactgagcatggaaaaagtgagataacattttatggaaactccttcatagcaggacctactggagaaattgtttcaattgctgatgataaagaggaagctgttcttattgctcaatttgatttggacaatatcaaatccatgaggcattgctggggtgtattccgtgataggcgtcctgatctatataaggtgcttttaacattagatggcaacaatcccgt

SEQ ID NO: 148629 - DNA, 239 bp, Glycine max
accgcgttgtgcatggtattgatgtctttgatccaaaattcaacattgtctcccctggagctgatcaaaccatttacttcccccacactgaaaccagccgtaggttgacatccttccaccctgaaatcgaagaactcctttacagctcagtggagaatgaagaacacatatgtgtgctgaaggaccgcagcaagccaattatcttcaccatggcaaggttggatcgagtgaagaacatc

SEQ ID NO: 148630 - DNA, 189 bp, Glycine max
gtgagagccgccgctatctcgagatgttctatgctctcaagtaccgcaaattggccgagtctgtgccccttgctgttgagtaaactgaggatgaagagttggataaagaaatggaggaaccggctttttgtttctcatttggagtttgtcttacttgagttctataaataatatgtccctgatgatttt

SEQ ID NO: 148631 - DNA, 243 bp, Glycine max
ggaatcccaccggaccatcagaggcttatttctgctggcaaacagctagaggatcgaaggaccctcgctgactacaacatccagaaggagtcgactctgcacttggtgttgcgtcttcgtggggggttttaagctggagctgatttctgtgtgatgttcgatgttggattttcccaaacattttaagacgcaatgtgatgtgtaatgggtctgtaatgacctctgaaaataagtttggattgt

SEQ ID NO: 148632 - DNA, 183 bp, Glycine max
gtgacaccaagtgaaccccagataagagagatagctttgtggttgtctgagtaccatatggattccacaggctttagtacaaatagcttgtttgatgcagggttcccatcggctctttctctgggtgatgttgtgtgtggaatggcatctgttagagtaattccaaaagacaggtatttgggt

SEQ ID NO: 148633 - DNA, 236 bp, Glycine max
ggcaaactgaagggtattttgggatacaccgaagatgatgttgtgtctactgattttgttggtgataacaggtctagcatatttgacgccaaggccggaatttctttgaatgaaaactttgtaaaacttgtttcctggtatgacaacgaatggggttacagttcccgtgtgattgatttaattgcccacattgcatccggggcttaaacagttgaggctgatcttggatatcaccg

SEQ ID NO: 148634 - DNA, 235 bp, Glycine max
cggctcgagcgtaaccaggctctggttttgcggttagggtagctctttctactcaaaacaaaacaaaacatcaatttctgtttcagttcgcggagatcaatatttgtcgctgaggtcgatcgtcgataaaaggcaatgtttttgtgggattggttttatgggattctagcgtcgcttggcctgtggcagaaggaggccaagatcttattcttgggcctcgataacgctggcaaaa

SEQ ID NO: 148635 - DNA, 234 bp, Glycine max
ctagttctagatcgcgatcctagaaactagggatactcagattcagggagagatgctgggaggttctctgcagcatggcagctatgtaaggctcaggaggaacttataaatgttgccaagaaacttggtgttagctaagccatgttccatggtcgcggtggaactgttggaagaggaggtggacctactcatcttgctattctgtctcaacctccagacacaatccatggatca

SEQ ID NO: 148636 - DNA, 231 bp, Glycine max
gcaccagtttcaccgcacgaatatcttgttgtttggagcgatccgagaaaaactctgtaaacatgttggtttaccaggacctccttacaggtgatgagcttctctctgactccttccgttacaaggaaattgagaatggaatgctgtgggaagttgaggggaagtgggttgttaaaggagcagttgatgtagacattggtgcaaacccttctgctgagggtggaggagaag

SEQ ID NO: 148637 - DNA, 232 bp, Glycine max
caagttcttcgatgggcccttggatcagttgaaattttcttcagcagacattgccccctctggtatggttttgcgggaggtcgcctcaaatggctgcagagacttgcttacataaacaccattgtctacccctttacatcccttcctcttgttgcatattgtactttgcctgcaatttgccttctcacaggaaaattcatcataccaacgctttcaaaccttgcaagtgccc

SEQ ID NO: 148638 - DNA, 235 bp, Glycine max
gctagccaacctcaaataacccttgttatctctctttcattctcacttgtactcatctgtttttcacaactttttttgtagcttctgatctaatggcagttccagtgattgatttttcaaagctgaatggtgaagaaagaaccaaaactatggcacagattgctaatgggtgtgaagagtggggattttttcagttgatcaaccatggtattccagaggaactccttgagagggt

SEQ ID NO: 148639 - DNA, 238 bp, Glycine max
aataataatggcttgcgggctaaccaaactccacgaatgcgaacatatactaaggttcaaaagcgtggctctgttggaagatgtattgatgttacccgttacaagggatatgatgaactccggcatgatttggctagaatgtttgggattgaagggcagctagaagatcctctaaggactgattggaaattagtatatgtggatcatgaaaatgacattcttcttgttggtgatgacc

SEQ ID NO: 148640 - DNA, 239 bp, Glycine max
gcaggttgtttgcgaagaaggaaatgaggattctgatggtaggtctcgatgctgctggtaagacaaccatcttgtacaagctcaagcttggagaaatcgtcaccaccatccccaccatcggatttaatgttgagactgtggagtacaagaacatcagcttcactgtgtgggatgttggtggtcaggacaagatccgtcctctgtggaggcattatttccagaacactcagggtctcatt

SEQ ID NO: 148641 - DNA, 238 bp, Glycine max
acacaacaccttttccttttcccttccgttggtgccattcgtgcagcaccggatcctctcatttctccggcgataactctcccttttccggcgaattcaccgcttcctcgatatgaatcccgagtatgactatctgttcaagctccttctgattggagactctggtgttggtaaatcatgccttcttctaagatttgctgatgattcatacattgagagctacataagcaccatcggg

SEQ ID NO: 148642 - DNA, 235 bp, Glycine max
gatgaattgaggttggaatgagctactggtggatttagatcatggtgcatatactgaagacaataagccgtgcccataataaccctcatccttgcgctccagtcaagaggttcaacttccttaacatgcagatgctcaaataagtttccattcggagcatactcaaacaccatcatccttgtgaatggttcttcttcgtcacagtacccaataaggttggtaaagttcttatggt

SEQ ID NO: 148643 - DNA, 231 bp, Glycine max
agcatggagagaccaattcattcatccccctcttcagagagccaagcagcattgagaaaatcttcggggacttcgaaagggagcaacaattactggggttaaggcctgccactcctccggagagacctaaaacaccaccttatgtccctccaagagctccttctcctagacctccctctccgagggctccttctccaaggcctccgtctccaagggctgcttctccgaggg

SEQ ID NO: 148644 - DNA, 229 bp, Glycine max
ggaaaaatggttacgttcaggtttcaccagtaccaggtggttgggagggctcttcccacggaagcagatcagcaccccaagatctaccgaatgaagctctgggccaccaacgaggttcgcgccaagtccaagttctggtattttctgaggaaactgaaaaaggtgaagaagagcaatggccaagtgcttgccatcaacgagatttttgagaagaacccaaccaaaatta

SEQ ID NO: 148645 - DNA, 229 bp, Glycine max
gagatgagatccttccgactcttatgcctattgttcaggctaagttgtctgctggtggggatgatgcttggaaagatagggaagctgctgtcttggctcttggtgctataggtgaaggttgcatcaatggtctttatccgcatctgttggagattgtggcatttcttgtccctcttcttgatgataagtttcctctgatacgaagtatttcatgctggacactatcacg

SEQ ID NO: 148646 - DNA, 237 bp, Glycine max
gtcgactcctgctaggaagaggctgatgagagacttcaagaggctgcaacaagacccgcctgcagggatcagcggtgccccccaggataacaacataatgctgtggaatgctgtcatatttggtcctgatgatactccatgggatggaggcacgttcaagttgactctccagtttactgaggattatccaaataaaccaccaactgtgcgatttgtgtctcgcatgtttcatccaaa

SEQ ID NO: 148647 - DNA, 232 bp, Glycine max
gttaaagccattagtcgggctatccgtcgagctcgggttggactaaaaaatcctaatcgtcccattgccagcttcatcttttctggtccaactggtgtggggaagtctgaattggccaaaccattggctccatactactttggctcctaagaaacctatgttccggcttgacatgagtgatttcgaggaagggcactgtgtctcaaaacttattggttcacctcctggatat

SEQ ID NO: 148648 - DNA, 225 bp, Glycine max
cgagggtgttcaccacagtttacactcacgagagtacccattttctcttctcaatttctcaagtgtgccgagaaaatcatggtggacgcagcagaacgtagatacttggaggatgatgattcatctctcatgaaaactatcaagggcgcaacaactggtttagtggctggaactatctggggtactgtagttgccacctggtatgatgtcccccgtgtcgagaga

SEQ ID NO: 148649 - DNA, 228 bp, Glycine max
cttgtcttggaccttgaatctcacaagttgcaagctttcactgacgcatatgcagaacttgcacctgctttgtctgatctgaatgttcttgttgagacctactttgctgacatccctgctgaggcgtacaagaccctcacatctctgaatggcgtcactgcatatgggtttgatttggtccgtggaacccatactcttgatttgatcaagggtggatttcccagtgga

SEQ ID NO: 148650 - DNA, 229 bp, Glycine max
ccgattcagaaaactgaagaggagtggaaggtcattctctcccccgagcagtttcggatccttcgccagaaaggaactgaattgaagggtacaggagaatataacaagttttatgaagaaggaatttacaactgtgctggctgtgggactcctctttacaagtcttcaaccaagtttgattctggttgtggttggcctgctttctttgagggttttcccggtgccatcg

SEQ ID NO: 148651 - DNA, 237 bp, Glycine max
gggtatggaagaaggagagttctctgaagctcgtgaggatcttgctgctcttgagaaggactatgaggaggttggggctgaaggagcggaagatgatgaggaaggagaggactattcataaatgaaggttttattatcaatgtaattgtttcgagtaaaaagggtatatgcttcgttacattaccctgaaccagtattgttcgttcctttttgtttttactcctgtgtgatatagtt

SEQ ID NO: 148652 - DNA, 230 bp, Glycine max
aataggtggtttggaggctatgaatttcattgctgttgccgcacctcatctaggatcaaggggaaataagcaggttccatttcttttgggggtacctgcttttgagaaggttgctagttgtgttattcatttcatttttagaagaacaggtcggcatcttttccttactgatgatgatgaaggaaaacctccattgcttaaacgcatggttcaagactacggtgatttgt

SEQ ID NO: 148653 - DNA, 228 bp, Glycine max
cgaagtttctatgcttagaaatgctacctggacactttcaaacttctgcaggggcaagccacagcctccttttgatcaggttaaacctgcacttcctgctcttgcccgtcttatccattcgaacgatgaagaagttttgactgatgcatgttgggcactgtcatatctttctgatggtacaaatgataaaattcaagctggtaattgaagctggtgtttgtccccgac

SEQ ID NO: 148654 - DNA, 227 bp, Glycine max
tgcttcttcactttctctcgtttcaatcgaaaccaaaacaaaaacatgggcagaaaattcttcgtcggtggcaactggaaatgcaatgggaccactgaggaggtaaagaagattgttactactttgaatgaggctaaagtcccgggggaagatgtcgtagaagttgttgtgagccctccttttgtgttccttcctgttgtaaaaagtttgctgcgccctgatttcca

SEQ ID NO: 148655 - DNA, 227 bp, Glycine max
ctgataccctgagtcttgatcaggtgaaggctttggaggctgttctgccatcaaagccaacatcacagttgtcagacatggagctggatgagtgtgaggagaccacactccatgatgtgaacatggaggaagagacaaggaggaggcaacaagctcagcaggaggcatatgatgaggatgaggatatgcatggtggtgctcagagagtgcagtgcgctcagcagtaa

SEQ ID NO: 148656 - DNA, 225 bp, Glycine max
gttgataaggaagactggaaactagagacattatgtgacctttatgagactttggctatcacccagagtgtcatctttgtgaacacaaggcgtaaggtggactggctcactgacaagatgcgaagaagtgaccatacagtctcagccacccatggagacatggaccaaaacactcgtgacatcatcatgcgggaatttcgctctggctcttctcgagttctaatt

SEQ ID NO: 148657 - DNA, 229 bp, Glycine max
ctttatgtcactgtgctcaccattattggctacaaaaggcagactgatacaacggtaggtggcaccgactgtgatggggttggcattttgggcatcgcttgggcctttggtggcatgatcttcatccttgtttactgcaccgccggtatttcaggaggacacataaacccggcggtgacattcgggttgttcctaggacgcaaggtgtcgttgataagggcgttgttgt

SEQ ID NO: 148658 - DNA, 231 bp, Glycine max
gactagttcaagatcgcgagcggccgcccttttttttttttttttagataaaaccccaagttctcatgatcaatccagaatttgcacaaactgaggctgaaattctccatgatcctgtcaaaaaaaaaaagggtagctatgaagagaccattagggtcttgaccacaaggtgcaggacccaacttgttgcaactttcaaccgctacagagagatccatggcacttccatct

SEQ ID NO: 148659 - DNA, 234 bp, Glycine max
gtgatcaaactgcaattgtgtgggatgtgaaggcagaagaatggaaacaacaatttgaatttcattcaggtccaacacttgatgttgattggcgcaacaatgtgtcttttgccacaagttccacagacaatatgatagctgtttgcaaaattggagaaacccgccctataaaaacttttgctgggcaccagggtgaggttaattgtgtcaaatgggatccctcaggttcattgc

SEQ ID NO: 148660 - DNA, 255 bp, Glycine max
gggccgaggtagcattaaggatccagctagggaggaaatgatgagagggaaacctgggtatgaacatctgaatgaacctctccacattctagttgaggcagaattacctgttgaaatagtagatgctcgtttgatgcaagcacgtgacatacttgaagatttgctcaaaccggtggatgaatctcaggatttctacaagaagcagcaacttcgggagttagcaatgctgaatggcactcttcgcgaggagggttc

SEQ ID NO: 148661 - DNA, 260 bp, Glycine max
cgacattgagttgggaaactcttgttacccaatggttcttgttcaagtccccatgtacaacgaaagagaggtttatcagttgtctattggagcagcatgtgggctttcttggccttcagataggatcatcatacaagtccttgatgactccactgacccaacaatcaaggagttggtgcagcttgaatgccaaagatgggcaagcaaaggggtgaacataaagtatgaggttagggacaataggaatgggtacaaagcag

SEQ ID NO: 148662 - DNA, 258 bp, Glycine max
aaaagatcttggattctttatcacccttcagctctgaacacctttgaacagatagtatatagtgccaaaggaaagcaaattgtagtttttcttgactacgatggaactctctctccaattgttgcagatccgaataaggctttcatgactagaaagatgagagcaacactaaagggtatagcaagacattttcccacagcaatcgtgactggaaggtgcagagacaaggtatataactttgtaaaattggcagaactt

SEQ ID NO: 148663 - DNA, 263 bp, Glycine max
atgggctccaactaccttcaagaggtcactggtgcaggtgctaggaaaaatgcagggaaatttgttgttctacacctccgatttgataaggatatggcagcccattcggcctgcgattttggtggaggaaaagctgaaaaattggcccttgcaaagtatagacaggttatttggcaagggagggttcttaattcccaattcactgatgaagagttgaggagtcaaggccgttgccctatgacaccggaagaggttggattgtt

SEQ ID NO: 148664 - DNA, 262 bp, Glycine max
gtggtacggtaagaacgcgaactgagggagctggtgaaccttgtggttgttgctggagacaggaggaaggagtcaaaggacttggaagaaaaggccgagatgaagaagatgtacggcctgatcgagacctacaagttgaacggccaattcagatggatttcatcgcagatgaaccgtgtgaggaatggagagctctaccgcgtgatctgcgacaccaggggtgctttcgtgcagcctgctgtatacgaggcttttggtttga

SEQ ID NO: 148665 - DNA, 252 bp, Glycine max
ctcaagattgaagaatggcaattttgttgagttgcatggttactgtgttgaaggaaatcttcgtgtacttgcatatgagtttgctactatacgctctcttcatgacatattgcacggtagaaagggagttcaaggtgctcaaccaggaccaactcttgattggatacagcgagttagaattgcagttgatgctgctcggggattggaatatttacatgagaaagttcaaccaccgattatacacagggatat

SEQ ID NO: 148666 - DNA, 250 bp, Glycine max
ctcaagattgaagaatggcaattttgttgagttgcatggttactgtgttgaaggaaatcttcgtgtacttgcatatgagtttgctactatgggctctcttcatgacatattgcacggtagaaagggagttcaaggtgctcaaccaggaccaactcttgattggatacagcgagttagaattgcagttgatgctgctcggggattggaatatttacatgagaaagttcaaccaccgattatacacagggat

SEQ ID NO: 148667 - DNA, 244 bp, Glycine max
aagaaaccctagcaagtggagcaatggcagacgttgaagtcgatgtggcggcagagcagcagcagggctgccgaagaagagaacgttcaagaagttcagttttcgaggcgtggatctcgatgcacttctcgacatgtccaccgatgaactcgtcaagatgttcagtgcccgcgctcgtagaaggttccagagaggcctcaccagttagcccatggccttgatcaagaagctccgtaagcgaaaa

SEQ ID NO: 148668 - DNA, 259 bp, Glycine max
atgaaaatgtacgaagggaaattataaatcacagatcactgaggcatcccaatattgtcaggttcaaggaggtaatattgacccctacacatttggctattgtgatggaatacgcttctggaggagagttatttgagcggatatgcaatgcaggacggtttagtgaggatgaggcacgcttcttcttccaacaacttatatcaggggttagctactgtcatgcaatgcaagtatgccatcgtgacttgaagttggagaa

SEQ ID NO: 148669 - DNA, 258 bp, Glycine max
ctcgagccgattcggctcgagggagggtatccccccggaccagcaacgtctcatcttcgccggaaagcagctcgaggacgggcgcaccctcgccgactacaacatccagaaggaatcaacccttcacctcgtcctccgtctccgtggtggcatgcagatcttcgttaagaccctcaccggcaagactattaccctagaagtcgaaagctccgacaccatcgacaacgtcaaggctaagattcaggacaaggagggaat

SEQ ID NO: 148670 - DNA, 255 bp, Glycine max
gcgtcttaataaacgctcttctctgaaaaacctgatttcttctcttcttctcttctctttcgtttcgatcttcgatctctgaaaatgagagagtgcatttcaatccacatcggtcaggccggtattcaggtcggaaacgcctgctgggagctctactgcctcgaacacggcattcagcctgatgggcagatgccaagtgataagactgttggtggaggtgatgatgctttcaacaccttcttcagtgaaactggg

SEQ ID NO: 148671 - DNA, 260 bp, Glycine max
agagagaagaagaaacttaatcgatcatcacttcacttcactaatacatcatggcagacgagacccagaacaagtatgagagctctgaggttgaggtccaggatcgtggtgtttttgactttctcggtaagaaaaaggatgaagaagacaagcctcatcctcaggaggaggtcatcgccaccgagtttcaaaaagtcactgtctcagaccaaggagagaacaagcacagcctcttagaaaagcttcaccgatctgacagc

SEQ ID NO: 148672 - DNA, 156 bp, Glycine max
accggtattaatccaaaggccaaatcttattacctctttgatggttatgcacatctctcctctggtcttgcctgtggcttggctggcctttctgctggcatggctattggtattgtcggtgatgctggtgttagagccaatgcacagcagccaaaa

SEQ ID NO: 148673 - DNA, 254 bp, Glycine max
gcttacagaagtgctccgtgactcctttgttggaaattcgaaaactgttatgatctcttgtatatccccaaatgctgggtcatgtgaacacacacttaataccttgagatatgcagaccgagttaaaagtctatccaagagtggaaatcctagaaaggaccaggccacaaatccagtaccaccagcaattaaagaggtttcatccacatcttcacttccagctagtgttggtgcagatgattttaatggtcaat

SEQ ID NO: 148674 - DNA, 256 bp, Glycine max
tatcccttcctcgtttacctgtttatccactctcacccccgtcttccacacatcttctattgaccctcgcattagtcttctgttcgatccactgaggaaatgcaaacataggaacccccgaagccaagctttccattgtcgaattccaaccacagtgcgtcacaaaacaccccacagaacgatgtgaaagaacttccacttgagaacaccaatttactatcttccccttctgttccaactcctccctgcagcttag

SEQ ID NO: 148675 - DNA, 262 bp, Glycine max
caaaagttgtccttggttcaatagcctttgcaatcttctgggtactagcggttttcccagctgtgccttttctacccattgggagaactgcagggtccctgctaggtgcaatgcttatggtaatattcaaagttcttagtccagaccaagcttatgctgcaattgatcttccaattcttggtcttctttttgggactatggctgtcactacttttcttgaaagagcaaacatgttcaagtacttggggaaattgctttcttg

SEQ ID NO: 148676 - DNA, 262 bp, Glycine max
ccaccacagaaaatgcatacccagctaattcctgacaagactcccaggtccatttttgtatacttccgaggactcttttatgatgttggcaatgaccctgaaggtggttactatgcaagaggcgcaagagcagcagtgtgggagaactttaaggacaatctgctgtttgacatctccactgagcatccaaccacttactacgaggacatgcaaagagccgtgttttgtctgtgcgcacttggatgggccccttggagcccaa

SEQ ID NO: 148677 - DNA, 238 bp, Glycine max
tccaacctctcaagtccaacctacccctttttctgctcccaccaacttcaccgtcttcttcctcgatcatgtctcacttcaagggcaagtaccatgatgagcttattgccaatgctgcttacattggcactcctggaaagggtattcttgctgctgatgagtcaacagggacaattggcaagcgtttggccagcatcagtgtagagaatgttgaatccaacaggcgtgctcttaggga

SEQ ID NO: 148678 - DNA, 267 bp, Glycine max
accaggcgtgcattaaaaggatacatggtgatgattctgggcagaaacactgcactggacaatattttgattattggtcttgtattgacaaatgtgttgcaccgaagctattcaccaaactgaagtaatggagaaggatttgatggcttattatcgttgcattctgttctgttttcattcccagataacttcgtctaaacattcaatgttataataaccaaactatatgtcctgtatggataatattgtgtttactgtgaagttttg

SEQ ID NO: 148679 - DNA, 259 bp, Glycine max
atagagaagaagagacttaatcgatcatcacttcacttcactaatacatcatggcagacgagacccagaacaagtatgagagctctgaggtttaggtccaggatcgtggtgtttttgactttctcggtaagaaaaaggatgaagaagacaagcctcatcctcaggaggaggtcatcgccaccgagtttcaaaaagtcactgtctcagaccaaggagagaacaagcacagcctcttagaaaagcttcaccgatctgacag

SEQ ID NO: 148680 - DNA, 255 bp, Glycine max
gagcaacagcaaggaaggcatctttgtccataattgctgaaaatgctttattagatgctatccaatccaaaaggtatggggatgcactatatttttgggtgcgcatggatatggattcacgaaacccttcgcaaacggacttttggtcattttgtgatgccgttaatgcgggaaattgcaagtttgctttctcagaagccatgaggggaatgtatggggtaaaaggtgatgcggattctttgcctcccatgccgg

SEQ ID NO: 148681 - DNA, 255 bp, Glycine max
ggcgagggtaatgagaaagtgcaggatcttcttttgttggatgttactcctctatccactggtttggagactgcaggaggagtcatgactgtgttgattcccagaaacacaaccattcccaccaagaaggagcaggtgttctcaacctactctgacaaccagcccggtgtgttgattcaggtctatgaaggtgaacgaacgaggactcgtgacaacaatttgcttggcaaatttgagtaatctggaattcctcct

SEQ ID NO: 148682 - DNA, 257 bp, Glycine max
atttttcttcctcagtagtgtcatttacgcttctcttctctgcagcaactatgcctaaccctaaggtcttcttcgacatgaccatcggcggtcaatctgctggccgcatcgtgatggagctctacgccgacgtcactccccgcaccgccgagaacttccgcgcgctttgcaccggcgagaagggcgtagggcggagcggcaagcccctccactacaagggctcgtccttccaccgcgtgatcccgagtttcatgtgt

SEQ ID NO: 148683 - DNA, 244 bp, Glycine max
gcggctagggttttagcgcagttcttctagatttaaggaagatgggtaaggaaaaggttcacatcatatacttcaggtcattagagataacgtagtgttgtatcaagttgtactgaaaagcgaagttaagatctgtggaaatgcaccatgaagctctcacagaggctcttcccggtgataatgttggattcaatgttaagaatgttgctgttaaggatctcaagcgtgggtatgttgctcgaac

SEQ ID NO: 148684 - DNA, 259 bp, Glycine max
aagattcgaaacgaagaaagaaagcgttgtgaagaatggcggaagagggacaagtgatcggtgtccacagcgtagaggagtggaaggaacatctcaagaagggagaagagtccaagaaattgattgtggtggattttactgcttcttggtgcggtccatgccgtttcattgccccaattcttgcagagtttgctaaaaagttgccgaatgtcaccttcctcaaggtggatgtggatgaattggagactgtttccaagga

SEQ ID NO: 148685 - DNA, 258 bp, Glycine max
ataacacaaggcagaaagcaagctcatcctagagttttaaaaatggcagcagcctcctccatggctctctcttccccatccttggctggcaaggccgtgaagctgggcccatcagcccccgaagtcgggagggtcagcatgaggaagaccgtcaccaagcaggcctcctccggaagcccatggtacggcccagaccgcgtcaagtacttgggcccattctctggcgagcccccgtcctacctcactggcgagttccca

SEQ ID NO: 148686 - DNA, 265 bp, Glycine max
gaataatcgagacacagatcatagtgatcattttttaatttctcagatttatccgacgtcgctgcagatccaccaaccgttatggctgccttcagcggtgatgaaacggcaccgtttttcggcttccttggcgccgcagctgccctcgtcttctcctgtatgggagctgcctatggcacagcgaagagtggcgtgggcgtggcttccatgggtgtaatgagacctgagctggtgatgaagtcgattgttcctgttgtcatggctg

SEQ ID NO: 148687 - DNA, 271 bp, Glycine max
cagatcaagtaagaatgagcatagcactaagggctgaaaagggtcttgctttaaataatagtacagaacataaagtcatataccgtgactttaaaacgtcaaatatcctactcgatacaaactataatgccaaactttctgattttgggttggccagagatggtcctactggtgataaaagccatgtctctactagggtcatgggaacccgtggatatgcggcaccagagtatttaccgacaggtcatctccctaccaagagtgatttgta

SEQ ID NO: 148688 - DNA, 264 bp, Glycine max
ctcgagccgaatcggctcgacttaatcgcttatcacttcacttcactattgcatcatggcacacgagacccagaacaagtatgagagctctgaggttgaggtccaggatcgtggtgtttttgactttctcggtaagaaaaaggatgaagaatacaagcctcatcctcaggaggaggtcatggccacggagtttcaagaagtcactgtctcataccaaggagatttcacgcgcagcctcttagaaaagcttcactgatgtcactg

SEQ ID NO: 148689 - DNA, 255 bp, Glycine max
gattgttggaggtgaccataggctgaggaactattcttccataatcaccgtccatccagaggtcatcgatgggagacccggtacaatggtgatcgaatcatttgtggtggatgtgcctgatgggaacaccagggatgaaacttgttactttgtggaggctttgatcaggtgtaacctaagctctttagctgatgtctcagagaggatggccgtgcaaggtcgaaccaatcctatcaaccattaagcatgtctagg

SEQ ID NO: 148690 - DNA, 260 bp, Glycine max
ggcttcaagtcaggaagaggtgactcttttgggagtaattggaagcccatttgcttgcagggtgaagattgcccttaagttgaagggagttgaatacaaatatgtggaagaaaatttggccaacaagagtgatttgcttctcaaatccaacccagttcacaagaaagttccagtttttattcacaatgagaagcccatagcagagtctcttgtgattgttgagtacattgatgagacatggaagaacaaccccatcttgg

SEQ ID NO: 148691 - DNA, 252 bp, Glycine max
tattggcagttaggggcaccttttataggggtgtatgcgatctggggctttgctagaataaagggaatgggatggggttgggctggtgtaatctggctgtacagtgtggtaacctatatccctcttgatttactcaaatttgctatccgctatattctaagtgggaaggcttgggataatcttttggagaacaagactgccttcactacaaagaaagactatggtaaagaagagagggaagctcaatgggcg

SEQ ID NO: 148692 - DNA, 242 bp, Glycine max
ggctcgaggtctctctctacgctttctcgttcgagatccctcaagggctccactaactgaaggagaaatggggttgacattcaccaagcttttcagccggcttttcgccaagaaggaaatgcgaattctgatggtgggtctcgatgcagctggtaagaccaccatcctgtacaagctcaaacttggagagatcgttaccacaattcccaccattgggttcaatgtggagactgtggaataca

SEQ ID NO: 148693 - DNA, 261 bp, Glycine max
gtcgaactgatgctggagtgcatgctttgtcaaatgtttgtcatgttgatattcaacgcatcagcaaaaggaggcctggtgaagtgttaccacctcatgaacctgctgtcgttggaagagctgtaaaccatttcttacagaagcacgacagtgacttaatggttattgatgttcgatgtgttccatctgattttcatgcaagatttaaagcgcaagagcgcacatacttctatcggttgctttctgggccagagcctttgt

SEQ ID NO: 148694 - DNA, 255 bp, Glycine max
caggataagtcttggcgcgtgcgttacatggttgcaaatcaattgtatgagctttgtgaagctgtaggccctgaacctaccagaacggaattggtacctgcttatgtgcggttgcttcgagataatgaggctgaagtgcgcatagcagctgctggaaaagtgaccaagttttgccggattttaaatccagatctttcaattcagcatattctttcttgtgtgaaggaattgtcatcagattcttctcagcatgtc

SEQ ID NO: 148695 - DNA, 255 bp, Glycine max
accgatgctgccgtacagaagagcggaggttggttcggcttcatctccgaagctatggagttcgttctcaaggtgttgaaggatggtctttctgccgtgcatgtcccttatgcatatggatttgctatcatattgctcactgttatagttaaggcagcgacgcttcccctgacaaagcaacaggttgaatctacattggctatgcaaaatcttcaaccaaaaattaaggccattcaagatagatatgctggcaat

SEQ ID NO: 148696 - DNA, 257 bp, Glycine max
ggcccacaaacaggctattcctttccgacgcttttgtggtggtgttgggaggacggcccaggctaagaacagacactccaatgggcaaggacgctggcccgtcaaatcagctaagttcattctagatttgctgaagaatgctgagagtaatgctgaagtgaaaggtttggatgtcgatgctctgtacatttctcatatccaggttaatcaagcacagaagcaaagacgccgcacctacagagctcatggaagaatca

SEQ ID NO: 148697 - DNA, 224 bp, Glycine max
gaacttcaaagaatatgacatctggctggcagcagagaatgggatgtttttaaacccttcaaagggagaatggatgacaacaatgccagagcaactgaatatggaatgggttgacagtgtgaagcatgtttttgattacttcacggacagaacacctcgatcatattttgaagaaagggaagcttcacttgtatggagttacagacatgcagatgctgaatttg

SEQ ID NO: 148698 - DNA, 259 bp, Glycine max
atagagaagaagagacttaatcgatcatcacttcagttcactagtacatcatggcagacgagacccagaacaagtatgagagctctgaggttgaggtccaggatcgtggtgtttttgactttctcggtaagaaaaaggatgaagaagacaagcctcatcctcaggaggaggtcatcgccaccgagtttcaaaaagtcactgtctcagaccaaggagagaacaagcacagcctcttagaaaagcttcaccgatctgacag

SEQ ID NO: 148699 - DNA, 254 bp, Glycine max
aacagagagtggtttcagtgagtgatcggtgttcacttgatccttcataagtcgtcatcatcatcatcatcatcaccgttgattgaagaagatgccgatcagaaacatcgccatcggaaggcctgaagaggctactcaccccgacacgttgaaggcggggttggctgagttcatctccaccttgatcttcgtgttcgccggttcaggttccggcatcgcctacaacaagctcaccgacaacggcgccgccactc

SEQ ID NO: 148700 - DNA, 255 bp, Glycine max
atttttcttcctcagtagtgtcatttacgcttctcttctctgcagcaactatgcctaaccctaaggtcttcttcgacatgaccatcggcggtcaatctgctggccgcatcgtgatggagctctacgccgacgtcactccccgcaccgccgagaacttccgcgcgctttgcaccggcgagaagggcgtagggcggagcggcaagcccctccactacaagggctcgtccttccaccgcgtgatcccgagttttcatg

SEQ ID NO: 148701 - DNA, 250 bp, Glycine max
gcggctagggttttagcgcacttcttctagatttaaggaagatgggtaaggagaaggttcacatcagtattgtggttattggccatgttgacttttgcaccaactggactgacaaccgaagttaagtctgtggaaatgcaccatggagctctcacagcagcacttccaggtcccgatctcgtagatggttccagagaggcctcaccagaaagcccttggccttgttcaagaagctccgtaaaccgaaaag

SEQ ID NO: 148702 - DNA, 262 bp, Glycine max
aattttgcagatctggaaatggcgacggcaacgtaccctccaccgccaccttattacagactttacaaagattacttgcaaaaccctaagtctgctcccgaccctccaccgcctattgaaggcacttatctttgttttgagccaattacaccactagtgatgttctaccaaccttggaagaacaaggggtgcgccagtctattctaagggccctaatgttgatttcaagaaggagctgaggtcactcaacggagagttgcaa

SEQ ID NO: 148703 - DNA, 255 bp, Glycine max
gaagacgatagctatcactgaatatgggattcgctcagtggctgccaagtatatcatgaagtgtgatgatgacacgtttgtcagaatagagtctatcatcagcgaacaagaaaagtaggaagtggtagaagtcctatataggaaatatgaattaccaccataggcccctacgttctggcaaatgggcagtaacatatgaggaatggtcagaggaagagtatcctacctatgctaatggtccaggctatacaatct

SEQ ID NO: 148704 - DNA, 255 bp, Glycine max
caggctgctgtttatggtgttggtgtttgtgctgagtttggtggatctgttttcagcccccttgttggagaggcactttcaaggttagatgctgtgataaggcatccaaatgcactacatgctgataacataatgcatatgacaatgccgtctcagctcttggaaaaatatgccaattccatcgtgatagcataaatgcagcacaggttgttcctgcctggctaagttgcttgcctataaaaggtgatttaattg

SEQ ID NO: 148705 - DNA, 254 bp, Glycine max
gccaagaggcaattgctagaatcagggtggagcatatcatacgggaacaaaatacatgggctgcatatgaaattttggagttgttctgtgaatttgttcttgcacgtgtacctataattgagaatcagagggaggccccacggaattgcgagaagccattgcaagtataatttttgctgctcctagatgttcagatgtaccagacttattgcacatcaagaacttgttaccactaaatatgggaaagaatttgt

SEQ ID NO: 148706 - DNA, 254 bp, Glycine max
caagaaggatattagtggaaatgccagagctctgaggaggttgagaacagcatgtgagcgggcaaagaggactctctcttccactgctcaaaccaccatagagattgattccttgtacgagggtattgacttctcacaaccattacccgtgcccgttttgaagagctaaacatggatttattcaggaagtgcatggagcccgtggagaagtgtttgcgggatgccaagatggataagagtaccgtccatgatgt

SEQ ID NO: 148707 - DNA, 253 bp, Glycine max
atctaattacctcaattaatcccttaattgcaagcatcatggctgaggagaaacaccaccaccacttccaccaccacaagggcgatgatgtgcctggcgaggttgattataagaaggaggagaagcaccacaagctcttgagcaccttggggaacttggtgctgcggctgccggtgcttatgccttgcatgagaagcatgaggccaagaaagacccagagcatgctcacaggcacaaggtagaagaggagatt

SEQ ID NO: 148708 - DNA, 251 bp, Glycine max
gaaattttgaatgctatcacggagcagagtaaacttctgcagcatgctacaaccatatatctacaccatacaataagtgactttgctgaggcattggcagcaaaaatgcctggaaaccttaaggttgtttatttgtaaattctggttcagaagcaaatgaattagcaatgatgatggcccgtttatatactggtaatctcggtatgatttctttgagaaatgcatatcatggggggagttctagtacactt

SEQ ID NO: 148709 - DNA, 254 bp, Glycine max
ctcgagccgaacaattcgtaggatggagctacttgttctgggtgtcttggattggaggctaagatcagtaaccccactttgcttcctcgttttctttgcgtgcaaagcagattcaactggaacttttacccggtcctcattttccgggctacagagatcatcgtatctaatatccaagaggctagctttcttgcttacaggccatcatgcattgctgctgcaggcatactcactgcagctagatgaaattccta

SEQ ID NO: 148710 - DNA, 253 bp, Glycine max
aaagagtttctggggtcagcaaaatagtataaggaaaaaaaatggatttttggaaagtgggtttgcttagtcttctttgtgccgcttctgcttttgcaattggggctgtggagctgggtcgacatcaacctatgagagaatttcaggtagtgctggtgatgtgttagaagatgatccagtgggaaggttgaaggtttttgtttatgaacttccaagcaaatataataagagaattctgcaaaaggaccctaga

SEQ ID NO: 148711 - DNA, 249 bp, Glycine max
cgttcagtgagccaactctctttgatagctctagtgatcagcagcaatggcggggaaagtggcaaaggcagcttatgatgcaaagatgctgaagcttctgaaagagtacagtcaggtgctggtggtttcatcgacaatgtgggttccaaccagcttcagggcatacggaggggacttaatgctgattcggtggtggtgatgggaaagaactccatgatgaaacgctctatcatcttggatgctcagaag

SEQ ID NO: 148712 - DNA, 253 bp, Glycine max
ctgccctaatcatcataactggaagaacctcttcacgaaagtgcgaaacttgatcagtgttggacgcgcttcctcctcctcctccgccgccgccaacgccatgggtgacgttcagatccacaagaccaaacttgcatcatcggaagcggtccctccgcccacacagccgccgtctacgccgctcgagccgagctgaagccgatcctcttcgagggctggatggccaacgacatcgcccccggcggccagctca

SEQ ID NO: 148713 - DNA, 252 bp, Glycine max
cccagtgaaccctaccgcaccgaaacaaaaccctcgcaaaccctaaccctaatctcataggaacatggacggcgacgacgagacctcgggtccgatgatcgacgaaatctacgccaacggcggtggcgtcgggacgacggagacaagcggagccgccgcgcaatcatgagcggcgaccagctcgacatcgaggcgtacgcggcgctatactcggggcgcacgaagatcatgaggctcctcttcttcgccgac

SEQ ID NO: 148714 - DNA, 249 bp, Glycine max
ggcttaagtgacaagagcatttgcatgtgggaattagatgggaaagaagtggagtcttggaaaggacaaaaaacccttaagatatctgatttggaaataacagatgacggggaagagattctaagtatttgtaagccaatgtggtactgttgttcaatagagaaacaaaggatgagagatttattgaagagtatgaaacaataacctccttttctttatcaaaggataacaaattcttgttggttaatc

SEQ ID NO: 148715 - DNA, 250 bp, Glycine max
aaccaaaccctaacacacacccatttgattcagtttccatggctagcctcaaggttgcatttttggctgcagtgctctgcatggttgtggtgagtgcacccatggcacatgcagctatcacgtgcgggcagtgacgaatagcctgatcaattgcatcggttacctccagaacggaggaacgccgccgtcgggatgctgcaacggagtgaagagcctcaatgccgccgccaagaccaccgccgaccgccag

SEQ ID NO: 148716 - DNA, 250 bp, Glycine max
tcaaggtgtgcacggccacctcacaaagaggcctgaggagattggtgctggtgaccaaggtcatatgttcggctatgccactgacgagactcccgagctcatgcccttgagccatgtccttgccacgaagccggtgccaagctcaccgaggttcggaagaacgggacatgcccttggctgagacctgatggcaagacccaagtcactgttgagtactacaatgacaagggtgccatggttccaatccgcg

SEQ ID NO: 148717 - DNA, 249 bp, Glycine max
ttgatctatggcgaaaggacgcttttttctctgcggcggaagaggtgcaggaatcagctgatataatggaatctgcatacagggcaaggttgagagagaagagagaaaggtcaactcctgacgaattaaataaccatgtagagagctgcaaactgctttaggtaccgcaaaatggcagttggaagaatttgataaagccgtcaggtacagctaccgacctcacagtgatgacaatacatccactaggca

SEQ ID NO: 148718 - DNA, 259 bp, Glycine max
ggccaaggaagctaaaatccttgcccagtgttgttcacctccctctttactctcatcctcactggcatgatgcagatgttcttccctcttggacctactgcccatgctatctatggtgcaattggtgctatgatttctctggctatattgtatacgacactgacaacctgatcaagcgcttcacttatgatgagtacattggagcctccgtcactctttatcttgacatactcaacctcttcctttccatcttgaggat

SEQ ID NO: 148719 - DNA, 205 bp, Glycine max
cacttttgcttccttaacctattttgttatcctcaattttcaatggctcaatcccattctggaaaaacctcttccatgacttcaatactcctcctgtttatgcttcttatcagtaatacaggcacaacaggtgacaatctggtgtatgctatggaagagttggcaacaatctgccatcgcaacaagaggtagtttccctttttaa

SEQ ID NO: 148720 - DNA, 251 bp, Glycine max
gccagcacaaaggagaagagggtttcgttccgtttcaatggggagcgaagagcagaacggcgaattctacctgcgttactacgtcggtcacaagggcaagtttggtcacgagttcctggagttcgagttcccccagacggcaagctccgctacgccaacaactccaactacaaaaacgacaccatcatccgcaaggaggtttacctaacccccgccgttctccgcgagtgccgtcgcatcatcgccgagag

SEQ ID NO: 148721 - DNA, 252 bp, Glycine max
caaacatggatgcatccaaactcaatcaattgaagcatttcatcgaacagtgcaagtccaacccttccctcctctccgatccttcactctccttcttccgcgactatctcgaaactctcggggcgaaactcctgaatctgcttattccgaatcgacgggcgtggagagcgatgaggacatagaagatgttacggatgagcaagagaaggtagaagatgaagaagaagatgatgaaataattgaatccgatgt

SEQ ID NO: 148722 - DNA, 249 bp, Glycine max
ctcccccaaatcgtagatctacggttaaattggtgtagtgtggtaagatgggaggaggatttagagtgcttcacttagttaggccatttctctcgtttcttcctgaagttcaaactgctgacaggaaagtccatttagagagaaggtcatatacactgtgatctctcttttcattttcctggtttgtagtcagctccctctatatgggatacactcaacaacaggtgctgatccattctattggatgcg

SEQ ID NO: 148723 - DNA, 219 bp, Glycine max
atctagatcgcgatctagaacggacgatacttgatgatcgtcccattcgagttgattttgattggggatttcaggaaagtagacaatggggtcgtgggatgagcggtggccaggtgcggatcgagtacccactgattatgatcctggtagaggtggctacgggaagctggttcagaaagagttagaagtgcaaacgcagcttgtagattatcgggatgc

SEQ ID NO: 148724 - DNA, 246 bp, Glycine max
ccttgggatggacatgggcaaagaaggaagttatatggtccatggtaggagctcaaaccacagaacaaggagacagaatctaagttcaaaggcaatgtacctcactgctgcaagaaaactcccacagttgagacttgctccctggtgtgccttacaaccagcaattcccaaactgttgtaagggtggagtggtggcagcatggggccaagacccttcatcagcagtctcatccttccaagtgagta

SEQ ID NO: 148725 - DNA, 249 bp, Glycine max
ctcgagccgcaattctctgtgaactttctagaatctcgttcttcctttgccttctccttcttcttcaaccctttttctttctctttctttcgcactttcattctctaaaaaaatctaagtccctttggtttcatcttctgttcttatccatgtatggcttctaaacccatcttgaaggacctcaaggatttgcagaaggatcctcctacctcatgcagtgcaggccctgtggctgaggacatgtttcac

SEQ ID NO: 148726 - DNA, 196 bp, Glycine max
ggtctatgaaggtgaacgtacgaggactcgtgataacaatttgcttggcaaatttgagttatctggaattcctcctgctccgagaggtgttcctcagatcaccgtttgctttgacattgacgccaacggatattgaacgtgtctctggaggacaaaaccactggacagaggaccaagattacaattaccaacgaca

SEQ ID NO: 148727 - DNA, 247 bp, Glycine max
tggttctccgccttcgtggtgggatgcaaatctttgtcaagactctcactggaaagaccatcacccttgaggtggagagctctgacactattgacaatgtcaaagccaagattcaggacaaagaaggttcccaccagaccaacagaggctcatttttgctggcaaacagcttgaagatggccgaaccttggctgattacaacatccaaaaagaatctaccctccacttggtgctccgtctgcgcggt

SEQ ID NO: 148728 - DNA, 240 bp, Glycine max
gatattcaggggactgcatctgtcgttcttgctggggtcgtggcagccttgaagctcattggcggtaatctggctgaccacacattcttgttccttggggctggagaggctggaactggaatagcagactaatagctcttgagatgtcaaagcagacaaagacacctatagaggagactcgcaagaagatatggcttgtagactcaaagggtttgattgttggttcaagaaaggcttcac

SEQ ID NO: 148729 - DNA, 246 bp, Glycine max
ctccgcaccagtttcaccgaacgaatatcttgttgtttggagcgatccgagaaaaactctgtaaacatgttggtttaccaggacctccttacaggtgatgagcttctctctgactccttccgttacaggaaattgagaatggaatgctgtgggaagttgaggggaagtgggttgttaaaggagcagttgatgtagacattggtgcaaacccttctgctgagggtggaggagaagatgagggagttg

SEQ ID NO: 148730 - DNA, 249 bp, Glycine max
catcttcctcctccgcatggggcagcgcaacctcgtcgtggtttcttcccctgagctcgccaaagaggttctccacacgcagggcgtggagttcggctcccgcacccgcaacgtcgtcttcgacatctcaccggaaagggccaagacatggtcttcaccgtctacggcgagcactggcgcaaaatgcgccgcatcatgaccgtccccttcttcaccaacaaggttgtgcaacaataccgccatggatgg

SEQ ID NO: 148731 - DNA, 245 bp, Glycine max
gttccattatcgggtctgagttcaatggagagatttcacgaagtttgcaggtactgtcgaggagatgctatgcgtcacctcagatctccccccacaccaggaaattggaatgccttctctctcaccacaatgacagagggtaacattgcaagatggttgaagaaagaaggtgatagaatctctcctggtgaagtgctctgtgaagttgaaactgataaagccactgttgaaatggaatgtatgga

SEQ ID NO: 148732 - DNA, 244 bp, Glycine max
catatattggtggcgtctcatgcccatatatctgcggcaagcatttggatcacggggttcttttggtggggtatggttctggtgcttatgctccaattcgttttaaggaaaagccttactggatcaaaagaattcatggggggagagctggggagaagagggatattacaagatctgcagaggtcgcaatgtatgtggggtggactcgatggtctcaactgtcgctgctatacatgtttctaac

SEQ ID NO: 148733 - DNA, 245 bp, Glycine max
attgaaattgattctctctatgagggaattgatttctactccaccattactcgtgctagatttgaggagctcaatatggatctcttccgcaagtgcatggaaccagttgagaagtgtttaagagatctaagatggacaagaggactgtccatgatgttgtacttgttggtggttccaccagaattcccaaggtgcaacaactcctgcaagatttctttaatgggaaggagctctgcaagagcatc

SEQ ID NO: 148734 - DNA, 251 bp, Glycine max
tcagattccaaaaaggatttccctgctgatgacaaagctggaacagaagagagtaaaacatccaaagatgagacttcatctaaagattctccagcagaacaaagagcgacagctacttttggacctagaccggacctgctgggcatccaggcaacccttttgatctctcagcaatgtctggtctgctcaatgatccaagtatcaaggaattggctgaacagatagcaaaagatccatcgttcaatcagatg

SEQ ID NO: 148735 - DNA, 254 bp, Glycine max
agaaggcaggcatgattcctctgcaaatggagttaggaggaaaagatgcctgcattgtacttgaggatgctgacctggatttggttgctgcaaacattataaagggaggcttttcatacagtggtcagagggcactgctgttaaggttgtcctggtaatggagtccgttgccgatgctttggttgagaaggtgaaggctaaggtggcaaaactaactgttggaccaccagaggatgactgtgatatcaccccgg

SEQ ID NO: 148736 - DNA, 244 bp, Glycine max
tttcctttgtttctatggcttctgcagaagtagagttccgatgctttgttggtgggcttgcttgggccaccgaccacgatgctctcgagaaagccttctctcaatttggcgaaatcgtcgaatcgaaggcatcaacgatcgtgaaactggaagatccagagggtttggatttgtgaccttcgccacagagcacgcgatgagagacgcaattgaaggaatgataggccagaacctcgacggtcgt

SEQ ID NO: 148737 - DNA, 246 bp, Glycine max
ctgagcgtggccttggcaagctcagaaaactcaccaccctcaaaactattgatgaaggagaaagtagcaagctgcagaagacgttgtcgatgccgtcgacaccaacaaccccgatgactccgacgctccaacgacaccgggatcggcccgtaaagctgacaacgtttggaggagcgtcttccatcctgggagcaactccgccacaaagaccatcggtgctcagatgtttgacaaaccacttcccaa

SEQ ID NO: 148738 - DNA, 244 bp, Glycine max
cgggactttcactagccgcagcagcctcaggaggagaataaggatgtctcacaggaagttcgagcacccaaggcacgggtcactgggatttctccccaggaagcgtgctgctcgtcacaggggaaagtgaaggcattccccaaggatgacccatccaaggcacccaagctcactgcattcttgggttacaaggctggtatgactcacattgttagagaggtcgagaagccaggatcaaagcttc

SEQ ID NO: 148739 - DNA, 244 bp, Glycine max
gcgattctcacccctccccaatgtcttcgcaggagaatggtcgtccattgcctaaattcggtgagtgggatgtgaataatcctgcctcagcggaaggttttactgtcatattccacacggctacgatacaaagatgactaacacagcaactgcaaccccaaccccacgtagatctgatcctgtgttcaagaatgagaattattacaatcctcaatattcggagtagtagcaagtggttttgctg

SEQ ID NO: 148740 - DNA, 244 bp, Glycine max
gacttactttttcccatttttttagcccataactccaactcaccaaaaatgaagagagagggtagacaacatggtatggtgaggtcttatagaatcctaccaaattcacttaaccctcgacccatactcgattcatcacccaatttgatgcccctcccactgctggattcttcgtaaaagtgtcctctaagccaaccaatcactccaagttcactggcaagtgtggcacaccacgttgcaccgg

SEQ ID NO: 148741 - DNA, 245 bp, Glycine max
atcgaataaaactagggtttccgatcgtcgtcgaggagaatgccgaagaacaagggaaagggaggaaagaaccggaagcgcgggaagaacgaggcggacgacgagaagcgggagcttgtgttcaagaggacggccaggagtacgcgcaggtgctccggatgctggggaacggccgctgcgaggcgatgtgcatcgacggcaccaagcgcctctgccacatccgcggcaagatgcacaagaaggtc

SEQ ID NO: 148742 - DNA, 245 bp, Glycine max
ggctacttcgccgccgtcataaggtccaagatcaggtccccggcggtgatgcgcgacttggtgctgggcggcgcgaactaacggcggcggaggcggtgaggatgggaatcgtggattcggcgcacatagcgcggagagcacggtcgaggctgcaatgcgcctgggggagcagttggcacggaggaagtgggtgggtgaagtgtacgcagagataaggaaaagtctttacccagacgcgtgtaagg

SEQ ID NO: 148743 - DNA, 241 bp, Glycine max
attccttaaaggtttgatgggtcgccaaaatcgcacacccaccattgttgtgatttggtcagtgctattggcctctattttctccttactttgggtaagaattgatccatttgtcctcaagacaagggacctgataccaagctatgtggaatcaactgctaaaaaagactgctttccctatagtattattctttaaaagatgtatgtagggtacatacattcttggtttcacaaaccaaca

SEQ ID NO: 148744 - DNA, 242 bp, Glycine max
ctctctaactcaatctctctctctctctctctctgaattttctcctctctccgattccttttattaattggagtttactcgctccttttcctttccctgaaaacatttcctcgtcgtattgattcggaaaagggccggccacttccaaaatttggtgaatgggatgtcaatgatccaacctcagctgaggggttcacagtgatttttaataaggccagggatgagaaaaagacaggtggtaa

SEQ ID NO: 148745 - DNA, 240 bp, Glycine max
ggatctcactaagccagtggaggaagagaacattaaggttacaatggatgactttttgaatgcactccacgaagttacttccgcatttggagcttcaactgatgatcttgaaagatgcagatccatggcatggttgagtgtggtgatcgacataagcacatttatcaaagagcaatgctacttgtggagcaagttaaagtgagtaaaggaagcccacttgtcacttgtctcctggaaggt

SEQ ID NO: 148746 - DNA, 242 bp, Glycine max
agaaagcaagctcatcctagagttttaaaaatggcagcagcctcctccatggctctctcttccccatccttggctggcaaggccgtgaagctgggcccatcagcccccgaagtcgggagggtcgcatgaggaagaccgtcaccaagcaggcctcctccggaagcccatggtacggcccagaccgcgtcaagtacttgggcccattctctggcgagcccccgtcctacctcactggcgagttc

SEQ ID NO: 148747 - DNA, 243 bp, Glycine max
atggaactgtcttcagcactggaaaagatgtttagttgttttacaatcagtcaatgtggttcccatggagtttgtggtcgagataagttgactgaaaatagattgatggatctcctccatggtcagaatatgtgctcacctatgaagacaaggatggtgattggatgcttgttggtgatgttccatgggagatgttcaccgactcttgcaagaggttgaggataatgaagagttctgaagcaa

SEQ ID NO: 148748 - DNA, 245 bp, Glycine max
gtttggatttgctcagcctttggacccttttgggggtttcaggaagggttttggaaatggttcagtggggtgatggacaatgctctctacccagttctcttcctggattacatgaagcaatcctccctatctttgatcgtttggctgctcgaatccctgctcttctggggatcaccctttcactcacttacttgaattaccgtggccttcacatcgtcggcttttctgctgttttcctcgccctt

SEQ ID NO: 148749 - DNA, 244 bp, Glycine max
gatgaagatagcttcaataatgtgaagcaatggctcagtgaaattgaccgctatgccagtgataatgttaacaaacttttggttggaaacaagagtgatctgacagcaaatagagttgtctcatatacacagctaaggaattcgcagatcaaattggcatacctttcatggaaacaagtgcaaaagatgctacaaatgtggaagatgctttcatgggcatgtctgctgccatcaagaatagaat

SEQ ID NO: 148750 - DNA, 237 bp, Glycine max
caagggcaggctttctaaggaggagattgagaagatggtgcaggaagctgagaaatacaagtctgaggacgaggagcataagaagaaagtggaggccaaaaatgcattggaaaattatgcctataacatgaggaacacaatcaaggatgacaagattgcttccaaactgtcttctgatgattagaagagaattgaagatcgattgacaggctatccaatggctagatggaaaccaac

SEQ ID NO: 148751 - DNA, 145 bp, Glycine max
ggtcggccaagctgggctattctgtaccttttgatgacgacatcaactttcataagacaattgctggggccatcgttattggtgttatacttcatgccggggatcaccttgcttgtgattttccaagacttgtaagtacgtctga

SEQ ID NO: 148752 - DNA, 247 bp, Glycine max
aacaaagaaaaaaaaaaacccttagccaacacaaccatcatggccacctctgctattcagcaatcagcattcactggtcaaactgctctgaagcagctcaatgagttcgtccgcaagaccggtggcgccggcaaaggtcgcactaacatgcgccgcaccgtcaagagtgctcctcagagcatttggtatggccctgaccgtcccaagtacttgggtccattctcggagcagagtccatcatacctga

SEQ ID NO: 148753 - DNA, 244 bp, Glycine max
gcgagcagcgtttgtttgttccttcctcagtcgttgtgacagtgtgtgtgagtgagtgagtgagagcgacgatgggcgcgacagcgaccccacccaagacggttccgacgagcagcagaagcgttcggagatctacacctacgaggccccctggcacatctacgccatgaactggagcgtccgccgcgacaagaagtatcgcctcgccatcgcctccctcttagagcagtaccctaaccgcgtg

SEQ ID NO: 148754 - DNA, 244 bp, Glycine max
ggggtttaggattggagggattgacgctgcgtctcttcctcttctctttcgatccatccctcattcctaatcctccaatccaaccacctcagcctcacactcacatatacacatatctgaacgcgtatcgtccctcctatggcttcaaagcgcatcctcgaagagctcaaggatcttcagaaagacccaccaacgtcattcagcgcctggtcagcagcctaggacactctccacttgcaagcaa

SEQ ID NO: 148755 - DNA, 178 bp, Glycine max
cctgactatggcggaatattttcgagatgtcaatgaacaagatgtacttctatttatcgacaatatctttcgcttcgtccaagcaggatctgaagtatctgccttattgggtcgaatgccttctgctgtgggttatcaacccactcgttagtactaagatggcttcttacaagaaaga

SEQ ID NO: 148756 - DNA, 165 bp, Glycine max
aacactcattaattgcaagaatggcacttcgttgcttggtgatgtccctttctgttctcttcactcttggtcttgcgagagaaagccatgccagagacgaagatttttggcatgctgtttggccaaacactcccattccaagttcattgcgagagtctctaaagc

SEQ ID NO: 148757 - DNA, 184 bp, Glycine max
aactcagtgtaccattgctcatgctctagaaaagaccaagtaccctgagtctgacatttactggaaaaaatttgaagagaaatatcatttctcatgccaatttactgctgatctttttgcaatgaaccacacagactttatcatcaccagcaccttccaagagattgctggaagcaaggacact

SEQ ID NO: 148758 - DNA, 246 bp, Glycine max
tggaagccccccgcgacggagcgcgtcggattctgggggactgtggggtcgggtgggcccgggcccgcgggaggggttccgttgaatttgacgcccgacgttacggtgtgtaagaatggaggggatggctgttataagacggtgcaagaggccgttaacgccgcgccggataacggcaaccgaacgaagaggtttgtgatacacattaaagaaggggtttatcaggagaccgttagggttccgtta

SEQ ID NO: 148759 - DNA, 237 bp, Glycine max
gttgcacgctctttcaagccatcaattgactggattgcagcttctgaccttgaagatgacagtgaaaaatcaacaccagaagcacatgctgcggcctggaagactttgaagagcgcagattgtgtcttggttcctgggggatttggagatcgtggtgtgagaggtatgatgctagctgccaaatatgcaagagaaaacagtgttccttacctggggagtttcctgggaagtcaaatt

SEQ ID NO: 148760 - DNA, 239 bp, Glycine max
ctgttcttggtgtacaagatgctaacagcactgaatttgagccccataccaaaagtccctacatcatgattatgcctcagggatcaaaaacacatatgggaggcaccatgcgccttggatctaggaggacatatttccagaccaaggaatgcaaatctgcaaaattatatggctgcaaaagcttcattgatgagagacatcggcatagatatgaggtgaatccggagttaggtgcacgc

SEQ ID NO: 148761 - DNA, 245 bp, Glycine max
gaagatggattcattggtatgttcaacagcggtttgtggcgaggaactggcagcagccctctgtgcgtttgaacaatgcactcatacacatgtatgctagttgtggaatccttcacgaagcttatcaagtgtttgtcaagatgcctcggaaaagcaccgtatcttggactagcatgatcatggcttttgcgaaacagggactcgggaaggaggcccttgatctgtttaagactatgctcagtgat

SEQ ID NO: 148762 - DNA, 238 bp, Glycine max
caagcgctctctttctttgcttttccttccccctttcagtttcttcaacgctgcaactatccatggcaaaccgctggctcagacccgaggtgtatccactgttcgctgcggttggtgccgctgttgggatctgtggattccaattggttcgtaatatctgcatcaaccctgaagtcagggtgaacaaggagggaagaaaggcaggagtgttggagaactttgctgagggagagaagta

SEQ ID NO: 148763 - DNA, 242 bp, Glycine max
atggagtatggtcttgatcccaacgtcggagaagcaataatgcaagcagcacaagaagtagccgagggaaaactaaacgaccattttcctctcgttgtatggcaaactgggagtggcactcaaagtaacatgaatgctaacgaggttattgcaaaccgagcagcagagattcttggccataagcgtggtgagaagtttgtgcacccaaatgaccatgtcaatagatcacagtcttctaatga

SEQ ID NO: 148764 - DNA, 222 bp, Glycine max
  unsure (1)..(222): unsure at all n locations
cgtgtgaagaacatcacaggactcgtggagtggtacggtaagaacgcgaagtagagggagttggtgaaccttgtggttgttgccggagacaggaggaaggagtcgaaggacttggaagagaaggccgagatgaagaagatgtacggcctgatcgagaccaaagtgttgaacgggcaactcagantganttcagtatagagtaaccgatctaggaacggagag

SEQ ID NO: 148765 - DNA, 169 bp, Glycine max
  unsure (1)..(169): unsure at all n locations
gcaggaatgatccgtccagcaattgcaacctcgactgccatggcgactggtcttgtctgcctggagctgtacaaagttttggatggagggcacaaagttgaagactacagaaacacatttgctaacttggcactgcgctctctttcaantgcctaaccagnttcaccga

SEQ ID NO: 148766 - DNA, 133 bp, Glycine max
cactcacaaaccaggtagtatatctgacgaaagcaacggtgatgttgctgttgatcaataccaccggtatctggaggatattgatctgatgggagctataaaagtcaatagctaccggttttcaatatcatgg

SEQ ID NO: 148767 - DNA, 241 bp, Glycine max
attgtttgttgttgtaactcgttcttcttcttttgttgttctgtgtttgtgtttgttttttctctcacctgaaaatgtcttgctgcggtggtaactgtggttgcggaagctcctgcaagtgcggcaacggctgcggaggctgcaagatgtacccagacttgagctacactgagtcaaccaccaccgagaccttggtcatgggagtggcacctgttaaggctcaatttgagggtgctgaaat

SEQ ID NO: 148768 - DNA, 242 bp, Glycine max
tgcttttttctttttgaaccacaaaatggccgacgatagcacagctacctgcatcgacatcctccttgccatcatcctccctcctctcggtgtcttcctcaagtatggatgcaaggtagagttctggatctgtttggtgcttactctttttggttacattcctggaattatctatgctgtctatgctatcaccaagtgatcatattcatcacctcttgtagacaatgaataatttgtcaaag

SEQ ID NO: 148769 - DNA, 182 bp, Glycine max
aacgattcaagatatttcaacaggacaacctgggacgccgtttgattacggtgccggacacgtcgatcccgtggccgctcttgatcctggtctcgtctacgatgccaacgtggacgattacttagggtttttctgcgcactaaactactcgtcatttaaaccaagccttgctcgaggaggga

SEQ ID NO: 148770 - DNA, 243 bp, Glycine max
gtttgttgttgtaactcgttcttcttcttttgttgttctgtgtttgtgtttgttttttctctcacctgaaaatgtcttgctgcggtggtaactgtggttgcggaagctcctgcaagtgcggcaacggctgcggaggctgcaagatgtacccagacttgagctacactgagtcaaccaccaccgagaccttggtcatgggagtggcacctgttaaggctcaatttgagggtgctgaaatgggtg

SEQ ID NO: 148771 - DNA, 194 bp, Glycine max
aagaactgtcatttggatgggaaaaagacaggaaactgtggaagatgtcccctgtggtaacactgttgctatggttggtttggatcagttcataacaaagaatgctactttgactaatgaaaaggaagttgatgcccatcccattcgagctatgaagttttctgtctcacctgttgttcgtgttgctgttcaat

SEQ ID NO: 148772 - DNA, 243 bp, Glycine max
gttagagccatgtgtattaatattcccggatttgcataccacaaagcattcaaggcaaggaaaaatctagtggccatatttcaatctattgtggatgagagaagaaacttaaggaagggatatctgccaggaaaagccaaagatatgatggatgctctgatagatgttgaagatgatgatggaagaaagttgagtgatgaggacatcattgacattatgttgatgtacttgaagtcgggccat

SEQ ID NO: 148773 - DNA, 242 bp, Glycine max
gggtttcacgcaagaagaagacgaagaagatgacgacgacgatggagagcttgattgggctggtgaaccgaatccagagggcttgcacggtgctcggtgactatggcggcgctgataacaacaccttctcttctctctgggaagctcttccttctgttgctgttgttggtggccagagttcagggaagtcttcacttttggagagcattgttggtcgtgacttttgccaagaggatcaggga

SEQ ID NO: 148774 - DNA, 207 bp, Glycine max
  unsure (1)..(207): unsure at all n locations
agaaatttgaaagtgcccttgccatatatgataaggataccccagacagatggctgagggttgcagccatgctccctggaaaaactgtctatgatgtgatcaaacaatacagagaattggaagaagatgtttgtgaaatagaagcagggaggagttccagttcctgantatctacctcttctttaacattgagactgtttacaacca

SEQ ID NO: 148775 - DNA, 164 bp, Glycine max
caatgacaatggtgccagggttcctattcgtgtacacaccgtgctaatctccacccaacacgacgagactgtcaccaatgacgaaattgctgctgacctcaaagagcatgtgatcaagcctgtgatcccagagaagtaccttgatgagaagaccagtttccacg

SEQ ID NO: 148776 - DNA, 162 bp, Glycine max
gttgttcttgttggtggttctactaggattcccaaggttcaacagttgttgcaggacttcttcaacggaaaggaactttgcaagagtattaacccagatgaagctgttgcttatggtgctgcagtgcaggctgcgattctcagtggcgagggctaatagaaa

SEQ ID NO: 148777 - DNA, 165 bp, Glycine max
attgatcgccacgatagatatgctaaccgaaacacagtgttctttgatatcaatatgaaagggcttgatgggattcaaggtccagtatatgttggtactggaactgtgttcaacaggcaggcattgtatggctatgatccaccagtatctgagaaaaggccaaag

SEQ ID NO: 148778 - DNA, 130 bp, Glycine max
tcggctcgagatttctcagtctctgtgtttgcggctgaggattccgaacgagtgaccttcttcgtttctcgcaaagtttaagtaatcatgggtaaggaaaaggttcacatcaacattgtcgtcattggac

SEQ ID NO: 148779 - DNA, 244 bp, Glycine max
ctattcttctcagtctcagatcagaaccttagccatggcagcgttgcagaagatcaaggtcgccaaccccatcgtcgagatggacggagatgaaatgactagggttatctggaagtcaatcaaggacaagctcattttgcccttcttggagttggacatcaagtattatgacttaggccttccttaccgtgatgagaccgatgatacagttacaattgaaagtgcggaacaactctcaagtata

SEQ ID NO: 148780 - DNA, 242 bp, Glycine max
ccaaattccattttccaattcaaaaccctaactccgttcgaagcaccaaatcgtgatggcaccaaaggcagagaagaagccagcagagaagaagcctgtggaggagaagaaatcgacggtgggagacaaggctccggcggagaagaagccaaaggccggaaagaagcttccgaaggagggaggcgccggcggagaaggtaagaagaagaagagaaacaagaagagcgtggagacatacaaga

SEQ ID NO: 148781 - DNA, 180 bp, Glycine max
gtcgtttgtggttattgagtcctgagtgatcttgtcatccgacctttgccatgacaggtgcgcttgcatggcaggtcaaaaaatgttaataaaaaaagttttattggtttggggagagatcgcacgggggttgcccggggtctcttcctcttgtgtggtgtggtgtttgctgtgctctcc

SEQ ID NO: 148782 - DNA, 240 bp, Glycine max
ctgacaccgtggttgaaccctacaatgccactctctctgttcatcaactagttgagaatgcggatgaatgcatggtccttgataacgaggcactctatgatatctgtttccgtacactcaagctcacaaatccaagttttggtgatctgaaccacttgatctcaacaacaatgagcggggtaacgtgctgcctccgcttccccgggcagctgaactccgacctccgcaaacacgccgtaa

SEQ ID NO: 148783 - DNA, 242 bp, Glycine max
ggcatcgtctcacctaccgcaagaggcacagctatgctaccaaatccaaccaacacagggtcgtcaaaacccctggtgggaagctcgtttatcagaccaccaagaagagggccagctggcccaaggtgccccgtcactggcaagaggattcaggggattccacacttgaagcctgcagagtacaagagatcaaggttacccagaaaccgtaggactgtcaaccgtgcactatgcggagtttt

SEQ ID NO: 148784 - DNA, 190 bp, Glycine max
ctcgctttcttcttttcctttgtcaattgagaattgttcctctcttccattcgtgtacccgcaaaagaatcatgacgagttcctctgctgccgctcgcaagaatctgagtaagattgcctgcaataggctccagaaagagctcgtggagtggcaggctcaatccccaacctgcttcaagcacaaaggtac

SEQ ID NO: 148785 - DNA, 242 bp, Glycine max
ccaaaacctggttcttctgttgccatttttggacttggagctgttggccttgctgctgctgaaggggcaaggatttctggtgcatcaagaattattggggttgatttagtttctagcagatttgaagaagctaagaagtttggggtcaatgaatttgtgaacccaaaagaccatgacaagcctgtacaagaggtgattgctgcaatgacgaatgggggtgtggatcgtgctgttgaatgtac

SEQ ID NO: 148786 - DNA, 243 bp, Glycine max
ctccatggctctctcttccccatccttggctggcaaggccgtgaagctgggcccatcagcccccgaagtcgggagggtcagcatgaggaagaccgtcaccaagcaggcctcctccggaagcccatggtacggcccagaccgcgtcaagtacttgggcccattctctggcgagcccccgtcctacctcactggcgagttcccaggtgactacggctgggacactgctgggcattcggccgaccc

SEQ ID NO: 148787 - DNA, 191 bp, Glycine max
gagaatccgaggcgaagagaagagaaaaattaagatggaggggaaggagcaggatgtgtcgctgggagcgaacaagttcccggagagacagccgattgggacggcggcgcagagccaagacgacggcaaggactaccaggagccggcgccggcgccactggttgacccgacggagtttacgtcatggtcct

SEQ ID NO: 148788 - DNA, 238 bp, Glycine max
cggctcgaggcaacatcttctccacccaggaccatgccgccgccgctattgcccgcgacagtgccgccgtcttcgcctggaagggtgagaccctccaggagtactggtggtgcaccgagcgcgccctcgactggggccccggtggtggacccgacctcatcgtcgacgacggtggtgacgctacccttctcatccacgaaggcgtcaaggccgaggagctctatgagaagaccggcga

SEQ ID NO: 148789 - DNA, 127 bp, Glycine max
cactcatcagctgaaactatgtgattttgggagtgcaaaagtgttggtgaaaggagaacctaatgtttcttacatctgttcaagatactaccgtgctccggaacttatatttggggccaccgaatat

SEQ ID NO: 148790 - DNA, 270 bp, Glycine max
cggctcgagctccatctttcccgaagtttgctatcatggctgggttggcgccagaaggatcacaatttgatgctcgtcaatatgatgctaagatgaatgagttacttggaactgatgggcaagatttttttacttcttatgacgaatttgtgaaagctttgatgctatgggattgcaggagaaccttctgaggggtatttatgcatatggttttgagaagccctctgcaattcaacaaagggggattgttcctttctgcaaggggcttga

SEQ ID NO: 148791 - DNA, 258 bp, Glycine max
gagctgaagaagcctgttgtggagaaagaagctccagggcatgccatatgagggcatgcacgtacggcctcggaggggaaccagaaaattatgttaacaaaataatctggaaccctaatgtatcagtgtcatcatcagtgtgtagtttaagctagctttgctatggttacgttctttgagatgagagtcttgatgaacagtaccattctgatgtattgctttccttgaaagttaatgcatgcttcttatcttctgtct

SEQ ID NO: 148792 - DNA, 254 bp, Glycine max
ttggattcaatatgcagctgagttttgtggatcttgctggttcagaaagagtgaaaaagtcaggttctaccgggagtcagcttaaggtagctcaaagcattaacaagtcattatcagcacttggagatgttattagttctttgtcttctggtggtcaacacacaccatacaggaatcacaagttaaccatgttgatgagtgattcacttggtggtaatgccaaaactctcatgtttgtgaatgtttctccggca

SEQ ID NO: 148793 - DNA, 254 bp, Glycine max
gacccaacccctctcttttcttttcttcagttcggtggaaggagccgtagcagcagcggaagctctagcttgggcagcgaatcacaatggcgagaggattgaagaagcatttgaagaggcttaatgcgccaaagcattggatgcttgacaaactgggtggtgcatttgctcctaagccctcatctggaccacacaaatccagggaatgcctgccactcatactcattttgcgaaaccggctgaagtatgctctg

SEQ ID NO: 148794 - DNA, 224 bp, Glycine max
tgattgaacaaaatgtacacctcgaggaagaaaattcacaaggataaggatgccgagcccactgaatttgaggagacagttgcacagtacttgtttgacttggagaacaccaatcaggatctgaaaagtgacttgaaagatctctacataaatcaagcaattcaaatggatgtggctggtaatcgcaaggctgtagtcatctatgtgcccttcagattgaggaa

SEQ ID NO: 148795 - DNA, 242 bp, Glycine max
ctacaacgcctcgaatccacacagttctactctacgctctaaaacctctctctctctctctctcgatctatcatggctttgcccaatcagcaaaccgtggattaccctagtttcaaactcgtcatcgtcggtgacggcggtacaggagagacaacgttcgtgaaaaggcatcttaccggtgaattcgagaaaatatacgaagcgaccattagagtggaggttcacccattggatttcttcac

SEQ ID NO: 148796 - DNA, 256 bp, Glycine max
  unsure (1)..(256): unsure at all n locations
ggcagcaagaatcttggtagtgctcttgtgcaaacatgagtttgatgtgagataccagatgcctgaagataaattgtatattgctcagctatatttcccacttgttggacagganttaagtgaagaagctgccatgtgccttcttgcacaatttgatggatagtcttaaaacggtggaggaatggacaatctgtagagtcgtgggaggctcataaggcaccggtccaaactatcataaagctggccctcaagagag

SEQ ID NO: 148797 - DNA, 242 bp, Glycine max
tgacgtccatggccactttcttcgcacaaacctccttcccctcccactctctctccaaaaccttcgatacccatttcgcccctgccccgaaagtcaacgtctttgtgaacttcagggcgaggaggcacgttggggtgcgagtttcgaacgcgctgatcgcaccagatggacggaagctcgtggagcttgtggtgacggatttttagagggatttgacgaagggtgaggctctttcgttgccg

SEQ ID NO: 148798 - DNA, 240 bp, Glycine max
ctctctaactcaatctctctctctctctctctctgaattttctcctctctccgattccttttattaattggagtttactcgctccttttcctttccctgaaaacatttcctcgtcgtattgatgtcggaaaagggccggccacttccaaaatttggtgaatgggatgtcaatgatccaacctcagctgaggggttcacagtgatttttaataaggccagggatgagaaaaagacaggtgg

SEQ ID NO: 148799 - DNA, 248 bp, Glycine max
ctctttgccacactgatgtttacttctgggaagccaagggccaaactccattgtttcctcgtatatttggtcatgaagctggagggattgtggagagcgtatgtgagggtgtgactcatctcaaaccaggggaccatgccctcccagtgtttaccggggagtgtggagaatgccctcattgcaagtcagaggagagcaacatgtgtgatcttctgtcattcaacactgataggggtgtcatgatccat

SEQ ID NO: 148800 - DNA, 260 bp, Glycine max
ctctggccaccgaaatgggaaggctagtttcagaaggttacgttctcaccgttttggctccaaacgacgaagccatggcgaagttaacgacggatcagttgagcgaacctggcgcaccggaacagataatgtattatcacattattcctgagtatcaaaccgaagagagtatgtacaatacggttagaaggttcggtaaggttagctacgatacactgcggttaccgcacaaggttctggctcaagagtctgacggctcc

SEQ ID NO: 148801 - DNA, 247 bp, Glycine max
ttaaaggggaaaatgagttacttgggtttgggtgttagtccaggtactgttccagtgtaccatggaacaaaacttaaagtgttggataggagggtgaggataacagagctggtgttaaggtgtgtgagccttggtcttggagttgttgcaattgttcttgtggtgactgattcccaagtcaaagagtttttctcctttcagaagaaagctaaatttacagacatgaaggctttagtgttcttggtag

SEQ ID NO: 148802 - DNA, 257 bp, Glycine max
gcctttcttctccgtttccgtttcctcgttcgaattcgctttttgatctgcgaaaatgagagagtgcatctcgatccacattggtcaggctggtatccaggtcggaaatgcttgctgggagctctactgcctcgagcacggcatcgggcccgatgggcaaatgccaagtgacaagacagttggcggtggtgatgatgctttcaatactttcttcagcgagactggtgctggaaagcacgtgccacgtgcagtgtttg

SEQ ID NO: 148803 - DNA, 255 bp, Glycine max
agcaaacgctgccgaattcgttatcgctttgcactagcagctttgaaacccggttcatccgaagcccttcaccgaaccatgtcgaggagaaaggttagagagccaaaggaggaaaatgtgactctgggtccagctgttagagatggtgaacacgtttttggcgttgctcgcatctttgcctccttcaacgacaccttcatccatgtcactgatttgtctggcagggaaacccttgtccgaatcactggtggtatg

SEQ ID NO: 148804 - DNA, 254 bp, Glycine max
aaattagccccttaccagccctcaaggaaatcttccgcactgatggtgaaaatgttcttcaatttccaccacctcatgtagctaaagttagtaagtctgggtggatgactgatgaggaatttgctagagaggtgattgccggtgtaaacccaaatgtgatccgtcgtcttcaagaattcccaccaaagagcagacttgatcccacactctatggtgatcaaaccagtagcataacataagaacaattggagatt

SEQ ID NO: 148805 - DNA, 251 bp, Glycine max
agtgtgtgattgtttgttgttgtaactcgttcttcttcttttgttgttctgtgtttgtgtttgttttttctctcacctgaaaatgtcttgctgcggtggtaactgtggttgcggaagctcctgcaagtgcggcaacggctgcggaggctgcaagatgtacccagacttgagctacactgagtcaaccaccaccgagaccttggtcatgggagtggcacctgttaaggctcaatttgagggtgctgaaatgg

SEQ ID NO: 148806 - DNA, 249 bp, Glycine max
actgtatctgcgtgtgtttgcgaattgtgcaattttcaagatctgaatcagagaatagataataatggctacaccggaccacctgttcaacctccgcaacaacttgtatctcggggcgtaccaagccgccatcaacagcggcgacgtcaccaacctctcccaagaagactccctcgagcgcgacaccctcgtccaccgctgctacatcgccctcggccagcttcagttcgtcatctccgagatccatga

SEQ ID NO: 148807 - DNA, 246 bp, Glycine max
gcattattgtctgtttgattactactctctttgcaactgatttctttgagatcaaggctgtcaaggaaattgaaccagctttgaaaaagcagcttatcatctctacagtactcatgactgttggaattgcaattattagttggattgctctgccaacatccttcacaattttcaactttggcgctcagaaggaagtaaagagctggcagctgttcctctgtgtgggtgttggtctatgggctggac

SEQ ID NO: 148808 - DNA, 252 bp, Glycine max
ccagaagactgttgatgggccatcagccaaagactggagaggtggaagagctgcttcatttaacatcattcctagcagcactggagctgccaaggctgttggaaaagtcctccctgctttgaatggaaaattgactggtatggcattccgtgttcccactgtggatgtctctgttgttgacctcacagtgaggctggagaaggaagctcctacgtggaaattaaaaatgtatcaaggaggaatcagagggca

SEQ ID NO: 148809 - DNA, 253 bp, Glycine max
aacgtggctggggagtggaaccacacctctggtcaatggaatggagacgctaatgacaaaggtattcaaaccagtgaggattacagattctatgctatttcagctgagtaccctgaattcagcaacaagggtaagacactagtctttcaattttctgttaagcacgaacagaagcttgactgtggtggtggctacatgaagttgctcagtggggatgttgatcagaagaaatttggcggggatactccttaca

SEQ ID NO: 148810 - DNA, 245 bp, Glycine max
cactaacctgtgtgccattcacgccaagcgtgtaaccattatgcccaaggatattcagctggcaataaggattcgtggtgagcgtgcttgagttggtggttggaaagatgaagatgattggtggctgcggttggtgtttttgtttttcagattctatgtttattcaatagatggggttgttagggagggtaggttttctgctggtagtagcattaattgggatataggcaaatactgctaagtgt

SEQ ID NO: 148811 - DNA, 245 bp, Glycine max
gcctgacatagagaagaagaagagagagtgatggagtgcgtattcggattggtgggtaatgggtttgcgatcgtggtggctgattcatcggcggtgcacagcatcctcgtccacaagtccaacgaggacaagatcatgctcctcgattcccacaaactcattgccgctagcggcgagcccggagacagggttcagttcacagagtacattcagaagaacgtcgccttgtatcagttccgtaacgg

SEQ ID NO: 148812 - DNA, 243 bp, Glycine max
aaaatattattaagatgatcaacattattggagcacttgttctactctttgcatttctcttcctcagttgtgtgtatgcacaagacacaacaacccttgtgcctgcaatcataacttttggtgattctgctgtggatgtagggaacaatgactatcttcccacccttttcaaggctgattaccctccttatgggagggactttgttaaccaccaacctactgggaggttttgcaatggcaaat

SEQ ID NO: 148813 - DNA, 243 bp, Glycine max
tattctgcgacgatggtggcacattcgagttcttggggaagggcactcgtcgcgatctcgccctacaccttctccgccatcggcatcgccgtcgctatcggcgtctccgtcctcggcgccgcctgggggatctacatcaccggaagcagcttgatcgccgctgcaatcagggctcctcgaatcacttccaaaaatctcattagtgtaatcttctgtgaagctgttgctatatatggtgttatt

SEQ ID NO: 148814 - DNA, 254 bp, Glycine max
gtttgttgttgtaactcgttcttcttcttttgttgttctgtgtttgtgcttgttttttctctcacctgaaaatgtcttgctgcggtggtaactgtggttgcggaagctcctgcaagtgcggcaacggctgcggaggctgcaagatgtacccagacttgagctacactgagtcaaccaccaccgagaccttggtcatgggagtggcacctgttaaggctcaatttgagggtgctgaaatgggtgtgcccgctgag

SEQ ID NO: 148815 - DNA, 255 bp, Glycine max
acccattgatccctttcgccacatcaacatagttctcaaccctaacggaaccctaaattcgttgccccatattcccagcaccgcaccctcttccgaccccactctcccagttctcaccaaagacatcaccatcaaccaacaaaacaacacatggctccgcttattcctcccccgaatagcactatccccaaaccctaagaagctacctctcatcgttttcttccacggcagcggcttcatcgtaaccagcgccgc

SEQ ID NO: 148816 - DNA, 129 bp, Glycine max
ggagacgctactggagtcgtctctgctgcctgcggacctgcgtctagactgacccaccgcgctcaagctcggctgtcttatgcaggggagatgctgtcctgccgtctccagtgcgcgctggcctcgctc

SEQ ID NO: 148817 - DNA, 252 bp, Glycine max
tctcgagccgaatcggctcgaggaaattagtttggaaatggcagtagcaggttgtcagaagctctctggaactgagcaccaagatcgtcgctgttggcagaaactacgctgctcacgccaaggaattaggcaacgccgttcccaaggagccggtgttgtttctgaaaccgacgtcgtcttacttgaaaaacggcggaaccatccaaatcccacacaacgagggctctctgcatcacgaggttgagctcgctg

SEQ ID NO: 148818 - DNA, 247 bp, Glycine max
atggattgaaaatcatccttgatcttcatgctgcacccggttctcaaaatggttttgagcacagctcttcaagagatggttcacaagaatggggaaaaacagatgaaaccattcaacaaacagttcatggtatagacttcctaactgcaaggtacgcaaaatgccaaagcctttatgctgttgagctaataaatgagcctctctcacctggtgtgacactagaggccttgaacaagtactataaggc

SEQ ID NO: 148819 - DNA, 245 bp, Glycine max
ctgggatgagagagagaaaattccagaccctagtgcagtaaagccagatgactgggatgaggatgcacccttggaaattgttgatgaagaagcagagaaacctgaaggatggttagacaatgaacccgaggagattgatgatccagaggcaacaaaaccagaagattgggatgatgaggaggatggtgaatgggaagccccaaagattgagaacccaaaatgtgaagcagcccccggttgtggtg

SEQ ID NO: 148820 - DNA, 250 bp, Glycine max
attgttcttagtggtggctcaactatgttccctggtattgctgaccgtatgagcaaagaaatcactgcacttgctcctagcagcatgaagattaaggttgtggctccaccagagagaaagtatagtgtttggattggaggatcaatccttgcatccctcagcaccttccagcagatgtggatatcgaagggtgaatatgatgagtctggtccatccattgtccacaggaagtgcttctaagtccaaaaga

SEQ ID NO: 148821 - DNA, 252 bp, Glycine max
ctctcttcttccattttccttctcaatccaccactctaaccctcgcacgcttcgttcaattacaataatggacagatcaactggccgtggtggtggtggaagtgtggacatgtttctccgaaattataagttgggaaaaacactcggcattgggtcctttggcaaggtgaaaattgctgagcatgtacggactggtcataaagttgctataaagatccttaaccgccacaagattaagaacatggaaatgga

SEQ ID NO: 148822 - DNA, 251 bp, Glycine max
gaatgatcttaagagagtttctactgagaattggaagtcttctggaaagcctactggtggtttccacaaaaagaatatggttggaacactcatttacatggcacctgaaatattaagaaaagagttacatacagaaaagtcagatgtatacagttttgggatatcaatcaatgaactcctaactggtgttgtgccatacactgatcttcgtacagaagcgcaggctcacacagtgcttgagatgaactata

SEQ ID NO: 148823 - DNA, 245 bp, Glycine max
acaaaaagttctgttctttttcccacccaattcagttttctcaaatggctcgtacgaagcaaacggctcgcaagtccaccggcggcaaggcgccacgtaagcagctggccaccaaggcggctcgtaagtctgctccggctaccggcggcgtgaagaagccgcacagattccgtccgggaaccgtagcgctccgcgagatccggaagtaccagaagagcacggaacttctgatccggaagctcccg

SEQ ID NO: 148824 - DNA, 243 bp, Glycine max
cacaccctctaaaccaatctatcaagtcctgaatctggtgagcaaatatggagctttgttggcaaacatccatccatggttcttgaagaagcatggagataaaggggtgtgagagggtcctcaccactcacactcctccacttaaaacagtttgttttggcttagctttggcttctctaatcaacaagggatgtgttctaacattctctcttgagtggcagaagcagatatgcattctccaaa

SEQ ID NO: 148825 - DNA, 241 bp, Glycine max
ctgttctcttctgtcattgcttctcctccacacacgcacagagacacacacttttgcagtcacattgagaatggggcgtgttcgcacgaagacggtgaagaaatcctcgcggcaagtgatagagaggtactactcccgcatgacgctggacttccacacgaacaagaaggttctggaagaggtggccatcattccctccaagaggctccgcaacaagatcgcggggttctccacccatctc

SEQ ID NO: 148826 - DNA, 241 bp, Glycine max
ctcaaggcaaccgagcttagattggggcttccaggaacagaagaaattgttgaaaaaccacttcctgcaagtgctagaattaccaacaaaaggcctttgtctgaaacctctgaggagtgtgcttcaaagggttctagtgctccacatgtggaaactgaagcagcccctcctgccaaggctaagatagtggggtggccaccaatcagatcctacagaaagaacagccttcaggagaatgatg

SEQ ID NO: 148827 - DNA, 245 bp, Glycine max
gctgactacaacattcagaaggagagtactcttcacctcgtcctccgtctccgtggtggcatgcagatcttcgttaagacactcaccggcaagaccacaaccctagaggttgaaagctccgacaccatcgataacgtcaaggccaagatccaggacaaggagggtatccccccggaccagcaacgtctcatcttcgccggaaagcagctcgaggacggccgcaccctcgccgactacaacatcca

SEQ ID NO: 148828 - DNA, 252 bp, Glycine max
tcttcttctcttgcggctagggttttagcgcacttcttctagatttaaggaagatgggtaaggaaaaggttcacatcagtattgtggtcattggccatgtcgactctgggaaatccactaccactggtcacctgatttacaagcttggaggcattgacaagcgtgttattgagaggtttgagaaggaagctgctgagatgaacaagaggtctttcaagtatgcctgggtgctggacaaacttaaggctgagc

SEQ ID NO: 148829 - DNA, 248 bp, Glycine max
cgctctgtttctgtctctgtgtttgcggctgaggattccgaacgagcgaccttcttcgtttctcgcaaagtttaagtcatcatgggtaaggaaaagactcacatcaacattgtcgtcattggacatgtcgactctgggaagtcaactaccactggtcatttgatctacaagcttggaggtattgacaagcgtgtgattgagaggttcgagaaggaggctgctgagatgaacaagaggtcattcaagta

SEQ ID NO: 148830 - DNA, 251 bp, Glycine max
actagttctagatcgcgatctagaactaccatcttaattttctcacaattcctctgttctcgaagggcgtaggagaagagggtttcgttaccgtttcaatggggagcgaagagcagaacggcgaattctacctgcgttactacgtcggtcacaagggcaagtttggtcacgagttcctggagttcgagttccgcccagacggcaagctccgctacgccaacaactccaactacaaaaacgacaccatcatc

SEQ ID NO: 148831 - DNA, 248 bp, Glycine max
cttctctctcgtaccaatcaaatcacacttttgtgttgtgttgggaaacccttaaccccgttttcggtgagatcgagatcgatcgaacatggatgaggagtacgatgtgatcgtgttgggcacgggtctcaaggagtgcattctcagcggtcttctctccgtcgatggcctcaaggttctgcatatggataggaacgactattacggaggagaatccacttcgctcaatcttattcagctttggaaga

SEQ ID NO: 148832 - DNA, 246 bp, Glycine max
gtggtgttagatctgtacccgcctagccattgatttggaaaagtccaagcttcaaagatgagtaagcttcagagtgatgctcttagagaagctatctcaggaatcatgactgattccaaggaaaagaacaggaaatttgtggagaccattgaactccaaattgggctgaaaaactatgatccccagaaggacaagcgttttagtggctctgttaagttgcctcacattcctcgccccaagatgaag

SEQ ID NO: 148833 - DNA, 246 bp, Glycine max
ctcgagcgcgcgggtggacaacgaaatttctcagccaaagaacaaggatcagaatcgtataatcaagttgaggaagatggcactagtctccggaggaagatcaacactgaaccctaacgcccctctttacattcccgccgcgttccgccaagtggaggatttttctccagaatggtggcagctggtgacgacactgacatggtaccatgactactggctaagccagcagcacgatgatggagcctt

SEQ ID NO: 148834 - DNA, 247 bp, Glycine max
attctctgtgttgtgttgtgtacttgtgttaattgtgttgttgttgtaggaaatttaagtgaagagagaatgatgatgaagtctgctatgtgtgcattggtgcttgtggcactggttgtggttgaagtggggcccatggctgaggctgcggtgacttgcaacccaacacagttgactccttgtcttccggcaattaattcaggttctgcaccttcgagtgcttgttgccagaagctgaaggagtaaa

SEQ ID NO: 148835 - DNA, 248 bp, Glycine max
gcaagatgatttatgcaagctccaaagacagattcaagagggagctggatggaattcaagtagagttgcaagcaactgatcctactgagatgggtcttgatgtgttcaaaagccgtgccaactaaaatgattatataaaatagtaggctttctggtgggagcagcacccctgaagccttagttactcatatggaaaatatcctagtttgtgggatggtcaacttgggtagttatggtcccaaactctc

SEQ ID NO: 148836 - DNA, 246 bp, Glycine max
ggagcctccgagaggttaactctgcataaggttgacctccttcatcttgactccgttagatcagttattaacggttgccatggtgtctttcacactgcttctcccgtcaccgataaccccgaagaaatggtggagccagcggtgagtggagctaagaatgtgatcatagctgctgcagaggctaaagttagacgtgtggtgttcacctcatccattggtgccgtctatatggaccccagtaggagc

SEQ ID NO: 148837 - DNA, 246 bp, Glycine max
caggcttgaaaaccttgctttcaaagagcaagctagttccttctggagacttgcaaaaatgaactctcctgaatggctttatgctttaattggctctatagggtctgtagtttgtggatcccttagtgccttctttgcttatgttctaagtgctgtcctcagtgtgtattacaatccagaccacagatacatgttccgcgaaatagaaaagtactgctacttgttgattggcctttcatcaactgc

SEQ ID NO: 148838 - DNA, 247 bp, Glycine max
ctccgaacatcaagcctcctcccattaatgacggaactccgaatgagagtgttgcagatgtttttgttcgtgtgacacagctcatgtcaattcttgaaactcagtattcgggtgacaccgttattattgtgtcgccagattctgacaacttgacaatccttcaggcaggtttgataggactagaccttcgaaggtatggttttaatcaaaagcttcaattaaggttttaattttggttactagttca

SEQ ID NO: 148839 - DNA, 242 bp, Glycine max
ctttcaacctaacccatcatcgttcacacccgtggttctggctcagccctattttcggttcctctcgttatcggaacagaaaccatttgtggtgaacatggatttggaccagtggatctcgaaggtcaaagatggccagcatcttctcgaagacgagcttcaacttctctgcgaatatgtaaaagagatccttattgaggagtccaatgtgcagcctgtcaatagtccagtgactgtttgtg

SEQ ID NO: 148840 - DNA, 247 bp, Glycine max
gaagcttcgaggagtggtgcgggactgcgtgagccagcacctctactcctccgccatcttcttcgccgacaaagtggcagccttcaccgccgaccccgcagacatctacatgcaggcccaggccctcttcctcggccgccactaccgccgcgccttccacctcctcaacgcattcaaaatcgtcctcaccgacctccgattccgctacctcgccgccaagtgcctcgaggaactgaaggagtgggat

SEQ ID NO: 148841 - DNA, 247 bp, Glycine max
ctgagaaaggcaaagtcattcaacatcctaatccgcctcatgaaaaccacccaattgatcaaccaactcaatgcacagctcctcactactaaatccggaggcatcaccattcttgccccagatgacagttccttctctgaactcaaagctggcttcctcaactctctttctgatggccaaaagctcgagctcttacagttccacgttatttcagactacgtgtctagctccaactttgatacactga

SEQ ID NO: 148842 - DNA, 243 bp, Glycine max
gaggattttgagcagtatgctgagaaagcaaagactttgccaccgactcaatcaaacgaagacttgcttatcctttatggattgtacaaacaggccaccgttggacctgtcaacaccagccgtcctggaatgttcaacatgagggacagagctaaatgggatgcatggaaggctgttgaagggaaatccaaggacgaagcaatgggtgattacatcattaaggtgaaacagctgctggaagca

SEQ ID NO: 148843 - DNA, 245 bp, Glycine max
tggttcggttcagcaacaacgtgatcggactcctgaacttcctgaccttcctcctctccatcccgatcctggtggccggagtgtggctgagcaagcagggcgccaccgagtgcgagcggtggctggagaacccggtgatcgcactcggcgtcttcctcatgctcgtctcactcgccggcctcgtcggcgcgtgctgtcgcgtgtcgtggctcctctggctctacctcctcgtcatgttcgtcctc

SEQ ID NO: 148844 - DNA, 241 bp, Glycine max
cacgcagccgccttgatgaattgtttcatgtgagggggattcccatcttgcattacttgatgaagctggcaatgttgtcactgaagatggagttgatgttatacgcgaatacggtgttgaaggatacccgtttacatcagcaaggatccaagagttgagagatcaagaagaggaagctaggaggaaccagtccgtgagatctctcttggtctctccatctcgggacttcgtaatatcatct

SEQ ID NO: 148845 - DNA, 241 bp, Glycine max
gcgtgattctctagtcaaattttgtcagaagcatgggatttgtgtcactgcacacactccactaggaggtgctgcagcaaatgctgaatggtttggaacagtttcatgtttggatgaccaagttctcaaaggtctggctgaaaaatacaaaaagactgccgcccagatcagccttcgctggggaattcaaaggaacactgtggtcattcctaaatcgtcaaaactggagaggttgaaagag

SEQ ID NO: 148846 - DNA, 240 bp, Glycine max
caagggtttaacctttctggctgtgttaatatgcgtttcagcactgtcactgagtccttctgttgcgggggaagggcaaaataatggccttgttatgaacttctacaaggaatcatgccctcaggctgaagacatcatcacagaacaagtcaagcttctctacaagcgccacaagaacactgctttctcctggctcaggaacatcttccatgactgtgctgttcagagttgtgatgcttc

SEQ ID NO: 148847 - DNA, 243 bp, Glycine max
gtcgagcagagagatgatcatcaacgtgaaggaatcgacggtggtgcggccggcggaggaggtggcgcggcgggtggtgtggaactccaacgtggacctggtggtccccaatttccacacgcccagtgtattcttctataggtccaacggcacctccaactttttcgacggcaaggttctgaaggaggcactgagcaaggtgctggtgccgttctacccaatggctgggcggctccggcgaga

SEQ ID NO: 148848 - DNA, 244 bp, Glycine max
cttacaatctcagcgcatagcattcttcttcttccaacgagaatcagtctttgtgttccaaatggctcgtacgaagcaaacagcaagaaagtccaccggaggaaaagctccaaggaagcagctcgccaccaaggcagcacgcaagtccgctccggcgacgggcggcgtgaagaagccccaccgtttcaggccggggacagtggctctgagggagattcggaagtaccagaagagcacggagctt

SEQ ID NO: 148849 - DNA, 242 bp, Glycine max
gtcccgaatagttccccttattatctaccatttgaagagaaaatatctttgcaagactgaagctgagttgaaagaagcttggcgtccaggagatcttggttatggaactagagttcctggtgacatgctgattgtcacaattgtcttctgttactctgttattgctcctgtgataatcccatttggtgctctatattttggtctaggatggcttgttctgcgaaatcaggcactcaaagtct

SEQ ID NO: 148850 - DNA, 244 bp, Glycine max
gatcgttgatacaacttgcccatgggttgcaaaggtatggaattctgttgaaaaacacaagcaacgagattatacctctgtaattcatggtaaatatgcccatgaggaaactgtagcaactgcttcttttgctggaaaatatataattgtgaagaatatggcggaggctgaatatgtttgcgactatattcttggtggtgaattaaatggatccagtccaaccaaggaagcatttttagagaaa

SEQ ID NO: 148851 - DNA, 241 bp, Glycine max
ctcgagccgatcggctcagcagaaatgcttggaaaccccgtgaacctgagaggcgccaccaggtctgctccatcaccgtctacacctgttactttcaagaccgttgcgcttttctccaagaagaaggcagcaccacctcctccaaagaaaaagcctgctgctgtatcccccgccaatgaggaactcgccaagtggtatggtcctgacagaaggatcttcttgcctgagggtctcttggacc

SEQ ID NO: 148852 - DNA, 237 bp, Glycine max
ggcgctgaagcaggccgcgtcgcccgggtttaaggcctacgcgaacaggttaaggcgaacgccgttgcgcttggaaaatacttgatggggaaagggtacagccttgtcactggcggaacggagaaccatcttgttttgtgggatctgagacctcttggattgactgggaataaggtggagaaactctgtgatctctgtaacattactgttaacaagaacgctgtttttggtgatagc

SEQ ID NO: 148853 - DNA, 242 bp, Glycine max
aaatcacctccacctccagtttacatatatgcttccccacctccacctatctacaagtaagttcgaattgcggaagcaccattcacgataaatcatgttctagtttttatcgaggaataaaggcaagctctatttggagtcaagtgaaacatctatcttcctgtccaagttctttgaataaaagtctgaatgtgtcatctctgcactacaatatttgtgattctgaccaagttggttctatt

SEQ ID NO: 148854 - DNA, 253 bp, Glycine max
tcggctcgaggagaattccaactgataaaaagaatattcagagaattccaaagacagagatgactgtcattaaggaagagcaacaaccaaaccaaatagctggccacaaagaacttggtcacaaaagtctccttcagagcgatgcactctatcagtatatacttgaaaccagtgtgtacccaagagagcatgagaggcttgaaggaactacgatagttgacggaaagacacccttgggagcaacactgggtcc

SEQ ID NO: 148855 - DNA, 243 bp, Glycine max
tcaatgctggaatcagacccgctattaatgtaggtatttccgtttccagagttggatcggcggctcaaattaaagccatgaaataagtagctggtaaattaaaattggaattagcacaattcgcagaattagaagcttttgcccaattcgcttctgatctcgataaagctactcaaaatcaattagcaagaggtcaacgattgcgcgagttgcttaaacaatcccaatcagctcctcttaccg

SEQ ID NO: 148856 - DNA, 242 bp, Glycine max
ctagaactagtcactccttttagcaagttaacaacacttttgtcttcgttccattatctagttctcaattctcttcaccctttgcctctgaaagaaatgggtagtcttgaagcggaaagaacaacagtaggattggcagcaagagacccttcagggattctctccccatacacctacaatctaagaaacacaggccctgatgatgtttacattaaagttcactactgtggaatttgccattc

SEQ ID NO: 148857 - DNA, 241 bp, Glycine max
tgcgttctggtcgtttggatcgtaaaattgagtttccacacccaagtgaagaagcaagagctcaaattctacagattcattcaaggaagatgaatgttcacccagatgtcaactttgaagaacttgcccggtccacagatgatttcaatggcgcacaactgaaggctgtctgtgttgaggctggcatgttggctctacgccgtgatgcaactgaggtgaaccacgaggattttaatgaagg

SEQ ID NO: 148858 - DNA, 241 bp, Glycine max
cagagtcccacagaagaaaaacaaaaccctcactgagcgctgctgctttgagagagagatggctccgaaccttgaatgtcgtatgtacgaagcgaagtacccggaggtggacatggcggtgatgatacaggtgaagaacatagcggacatgggggcgtacgtgtcgctgctggagtacaacaacatcgagggcatgatcttgttctcggagctctctcgccgtcgtattcggagtgtgagc

SEQ ID NO: 148859 - DNA, 241 bp, Glycine max
aaattacaatcttgtcctcgccatgctgtggcgccacccggaaaacgttaaattagaccaagtcaaggttgttcactattgcgcacggggtccaagccatggagatatacggggaaggaagagaatatgcagagggaggacataaagatgctggtgaagaaatggtgggatatctacaatgatgcttcgcttgactacaagccattgatgaatgcaagtgaagctccagcagcggatggtg

SEQ ID NO: 148860 - DNA, 238 bp, Glycine max
gcaagacctcttgtggttatggggtggctacagggggacccttagcctggggcttatgctacaataaggaattgagtcctgataaattctactgcgatgactactacaaattaacctacccttgtactcctggtgcagcatactatggccgtggtgccatcccactttactggaactacaactatggaaaagctggggaagccttgaaggtggatctgttgaaccatccagaatacat

SEQ ID NO: 148861 - DNA, 237 bp, Glycine max
agaagctgaaggagcaaaagccatgcttctgtggctacctcaaaaaccctagcttgaagcagtatgttaactctcctaatgccaaaaaaaccgttagttcttgtggtattgcctatccaacttgttaagcacctcttatatatatatataaaatgtgtgaacaatatatatatattgattaaaaaatatagtttaatttatatacacactttgatcctataaaaacatcttgacaca

SEQ ID NO: 148862 - DNA, 237 bp, Glycine max
gcgaaactacacctattccgatgttgtcagatccgtcttaggagggaggaaatttcagctgtgtggattagctcagtacataaatcttgtcggtgtaactatcggttacacgataacggcttcaattagtatggtggcggtgaagaggtcgaattgttttcacaaatatggtcatcatgttaagtgctatacgtcaaacaaccctttcatgatcctctttgcctgcattcaaatcgt

SEQ ID NO: 148863 - DNA, 238 bp, Glycine max
acaaaaagttctgttctttttcccacccaattcagttttctcaaatggctcccacgaagcaaacggctcgcaagtccaccggcggcaaggcgccacgtaagcagctggccaccaaggcggctcgtaagtctgctccggctaccggcggcgtgaagacgccgcacagattccgtccgggaaccgtagcgctccgcgagatccggaagtaccagaagagcacggaacttctgatccggaa

SEQ ID NO: 148864 - DNA, 239 bp, Glycine max
actgaatgttgttgacgtctcctatggaggtgagaatgggtttaatcaggctattgaactatctgctgaaattctgtccaatgtgaagtttatccaggaaaagcgactgattggaaaatactttgaggaaatcagccaggatactggaaagtatgtttttggagttgatgatactctaaaagctttggagatgggagctgtcgagacacttattgtctgggaaaatctggatatgaata

SEQ ID NO: 148865 - DNA, 240 bp, Glycine max
cttagctttgattctctgttctctgttttgttctgtttcgcattgacttcatacaggaacttgaacaatgaagaatgcaaagggcaagggagcagcaagggcctcaaaagaatcactgaagcccgttgatgaccgaaaggttggaaagcggaaggcttccggtaagcctgggagaagtagtgcaccaaagaaggagaagaaggccaagaaagaccccaacaagcctaaaagaccacccag

SEQ ID NO: 148866 - DNA, 238 bp, Glycine max
gttgagagtaagagaagaggccaatgccaatgtaatcaaggcaagtttggttggagagtgagaggtgggaatagtccttggctctaacatggtcaacttgttcagtctcagaatactgagtgtacgctttggtgaactcattgaatgattcatgaagcgatggaagagactcatggtttgtgaattgagtgtttgggaatatagaggatgttgttgtgaccgcgaactcgtggcgcca

SEQ ID NO: 148867 - DNA, 235 bp, Glycine max
ctaggttctagatcgcgatctagaactagaagtccagaaagagggtacccccaattgtgaaggggtggcccttaattggagggctaatccgtttccttaaaggtccaatctttatgctccgtgaggagtaccctaagcttgggagtgtcttcaccctcaagctcttccacaagaacatcaccttcctcgttggccctgaggtctctgcatacttcttcaaggcctcagagactga

SEQ ID NO: 148868 - DNA, 237 bp, Glycine max
gaagattcagttcgggatttttgcgcttcgtcctcaatttgcagcgcgtgagtgagggaacatggacggtgccgaattgtccaacataaagaaatggattgtgatgtatcctgtttacataaactccaaaaaaacgatggccgaaggaagacgcattggcctcgccaaagcctgcgaaaaccctacttgcgctgaaatcggtgattgctgcagctatctgaagcttccttttgcaat

SEQ ID NO: 148869 - DNA, 236 bp, Glycine max
aagagcatcactgaactaacaaagcaaccctatgtcgaaggtggtttgtgtcaccggagccagcgcgacgtcggatcatgggtggtcctactcctcctccagcgtggttacaccgtccatgccaccgtccaagatatcaaggatgaaaatgagacgaaacatttggaggaaatggaaggagcaaagagtcatctccatttttttgaaatggatcttcttgacatcgactccattgc

SEQ ID NO: 148870 - DNA, 244 bp, Glycine max
aagaaggaagccattgagaacataggagctgactcatttgtggttagccgtgaacaagatcagatgcaggctgtaatgggaaccatggatggtatcattgacacagtttctgctgtccatcctcttgtgcctttgattggcctgttgaagcctcatggtaaactagtcatggttggtgcaccagagaagcctttggagttgccagtattttctttacttatggggaggaaaatggttggtggca

SEQ ID NO: 148871 - DNA, 184 bp, Glycine max
gcgcgggattcggctcgaggcggtgttagcatagacgactggtggaggaacgaacagttttgggtgatcggagctgtttctgcccatcgatttgccctatttcagggtctactgaaggtcttggctggggtgaatacaaagttcagtgtgacctcaaaagcagccgatgatggagcattctcag

SEQ ID NO: 148872 - DNA, 228 bp, Glycine max
aaattagccccttaccagccctcaaggaaatcttccgcactgatggtgaaaatgttcttcaatttccaccacctcatgtagcgaaagttagtaagtctgggtggatgactgatgaggaattttctagagaggtgattgccggtgtaaacccaaatgtgatccgtcgtcttcaagaattcccaccaaagagcacacttgatcccacactctatggtgatcaaaccagta

SEQ ID NO: 148873 - DNA, 227 bp, Glycine max
aacgctgaattaattttcgcctaaaaagacaattcggtgggatctaggttagcagcaaccagcgcaatctgggacttttctttctttctccccacacccagattcaaaaactcagctctgctctttcgtttggatctcaaaacctgttcttcttcgattggttctatggcattctagcttccctcggtctctggcagaaagaagccaaaattctcttcctcggtctc

SEQ ID NO: 148874 - DNA, 227 bp, Glycine max
gttgatagaggactgttacataagtgtgggggatgatgcaattgcaataaaaagtggctgggatcaatacggaattacttatggaaggccttccaagaatatagtaattcgaaaccttgttgttcgctctaacgtcagtgctggcatctcaataggcagtgagatgtctggtggggtatccaatgtcctggtggagaacattcttgtatgggaatcaaggcgtgcca

SEQ ID NO: 148875 - DNA, 226 bp, Glycine max
ggctcgagaaagcattgaattcaaaaacttaagttcattccttgtgttttgctttcttcctcaaaaccaaacatgtcgaacacatgcggcaactgcgactgcgctgacaagactagctgcaccacgggaaacagctatggtgttattgtagagactgagaagagttacatcgagactgttgtcatggatgttccagcagctgagcatgatgggacatgcaagtgtg

SEQ ID NO: 148876 - DNA, 236 bp, Glycine max
ccctaaacgactctatctctcttcgttttgttcttccttgcgctcctcctcgttcgttcgttctccctcgcgtagatcggcaatggcggagaccgagacgtttgctttccaggctgagatcaaccagctcctcagtctcatcatcaacaccttctactccaacaaggaaatcttccttcgtgaactcatcagcaacgcctctgatgctttggacaagattagatttgagagtttga

SEQ ID NO: 148877 - DNA, 243 bp, Glycine max
cgaaaattagggtttgtagtgtagcaggaagaagcagcaatggcgccgaagataacacgtaaggttagcagaaaccctgaattgataaggggaatcggaaagtactcgaggtcgcagatgtaccacaagaggggcatttgggctatcaaggccaaaaacggtggcgttttacctcgccacgaccctaaacccaagcctgaagctcctgctgaaaaaccacccaaattttaccctgctgatgat

SEQ ID NO: 148878 - DNA, 228 bp, Glycine max
tacaaaccaaagatgtggacagaagcttggactggctggtttactgagtttggaggtgcagttcctcacagacctgctgacgatttggcattttcaattgcaaggtttatacagaaagggggatcatttgtcaattattatatgtatcatgggggaacaaattttggtcgaactgctggtggtccctttattgctacgagctatgattacgatgcgcctcttgatgaa

SEQ ID NO: 148879 - DNA, 227 bp, Glycine max
agatcatttctgcaattaaagaagcaggaaatgttaagaagttctatccatctgagtttggaaatgatgtggaccggactcatgcagttgaaccagccaagtctgcatttgcaacaaaggccaaagttcgccgagctattgaggctgaaggaattcccttcacttatgtgtcaagcaacttctttgctggttacttcctgcccaacttgtcacagcctggagccaca

SEQ ID NO: 148880 - DNA, 224 bp, Glycine max
aagtggttgagagtggacttcaaggagccagtgtggttcaaagctggagcccaaatattctcagaaggtgggcttgactatttggggaacccaaaccttgtccatgcacaaagcatcctggcagtgctgggcttccaagttatcctaatgggccttgttgaagggtaccgcatccatgagcttgatggggtcggcgaggtcaatgacctctaccctgggggcca

SEQ ID NO: 148881 - DNA, 224 bp, Glycine max
tgataacttggggacagtgacgtattggtggagccatgctatgatctccgaccagacttaccggcaactaatgagtacatgtgattttcgcaggcagaaggaatctgatgagtgtgagtctgtgtatagctatgccatggatcaagagtttggtaatattgatcagtacaacatctatgctcctccatgcaacaactctgatggtagtagtagctctgccaccc

SEQ ID NO: 148882 - DNA, 217 bp, Glycine max
ggaagccccaaagattgaaaacccaaagtgtgaggccgcccctggttgtggtgaatggaagaggccaacgaagaggaatccagcttataagggaaagtggagtgctccttacatcgataaccccagttacaagggcatatggaagcctcgcgagattccaaaccctgaataccttgaactcgaaaaacctgatgttcctggttctactgctattggc

SEQ ID NO: 148883 - DNA, 242 bp, Glycine max
attaattgcaagaatggcacttcgttgcttggtgatgtcccgttctgttctcttcactcttggtcttgcgagagaaagccatgccagagacgaagatttttggcatgctgtttggccaaacactcccattccaagttcattgcgagatcttctaaagcctggccctgcaagtgttgaaatcgatgatcaccctatgcaaattgaagatacacagtacccgagaacgtcttctataaagaaga

SEQ ID NO: 148884 - DNA, 230 bp, Glycine max
gagaaataagggaaaaatggtgtcgctgaaactgcagaagcgcctctccgcaagcgtgctcaagtgcggcagaggaaaggtttggcttgaccccaatgaagtcaacgaaatctccatggccaattctcggcaaaacatcaggaagttggttaaggatgggtgtatcatcaggtagccaaccaagattcactcccgctcacgtgctcgtaggatgaaggaggcacagagga

SEQ ID NO: 148885 - DNA, 223 bp, Glycine max
gccacatagcatcactgcacagcaaattggctcaggttatcacggacttgggattggtgccttcacacttgattgggcagggatttcagcttatcatggcagtccccttgtttcaccatggtcttccattgttaatgtgggaattggatttatcatgttcatctacatcattctacctctctgttactggaagttcaacacttttgatgcacacaagtttcct

SEQ ID NO: 148886 - DNA, 233 bp, Glycine max
ctatttttcttcctcagtagtgtcatttacgcttctcttctctacagcaactatgcctaaccctaaggtcttcttcgacatgaccatcggcggtcaatctgctggccgcatcgtgatggagctctacgccgacgtcactccccgcaccgccgagaacttccgcgcgctttgcaccggcgagaagggcgtagggcggagcggcaagcccctccactacaagggctcgtccttcc

SEQ ID NO: 148887 - DNA, 234 bp, Glycine max; identical to SEQ ID NO: 148274

SEQ ID NO: 148888 - DNA, 231 bp, Glycine max
gagatgaccaaccaagatttgaaacatgttaccagattgctttggctatcaaggatgaggttgaggatcttgagaaagctggtattactgtcatccagattgatgaggctgctctaagagaaggtttacctctgaggaagtctgaggaggctttctatctaaactgggctgttcactcatttaggattaccaactgtggtgtggaggacactactcagattcacactcaca

SEQ ID NO: 148889 - DNA, 227 bp, Glycine max
gcgacggccgctccgatctagaactagtggggagtatcctagtcctcccccagaatattcaacctgcttgggtgatctgtacagtgttgcttggatggaagacagtgacagacacaatttacgaacagaaactctgcatcaacaatataaattggttaaagagaggactatatctggagattcatactatggctctcacgtgatgcagtatggtgatgtacggctta

SEQ ID NO: 148890 - DNA, 234 bp, Glycine max
gtgaaaatgttcagaaaccagtacgacacggacgtgaccacatggagccctgcggggaggctgttccaggtggagtacgctatggaggcggtgaagcagggctcggcggcgatagggctccgatcgaagacccacgtggtcctcgcatgcgtcaacaaggccaactccgaactctcctcgcaccagaagaagatcttcaaggtcgacaatcacatcggcgtcgccatcgctggc

SEQ ID NO: 148891 - DNA, 230 bp, Glycine max
gaaggatttaagttggatgtccaaccaggaaacacctacttgctaagaatcatcaatgctgcactcaatgaagagctattcttcaaaattgctggccatgaactcactgttgttgaggttgatgcagtctacacaaaaccattcaaaactgataccattgtcatagcacctggccagaccacaaatgtgcttctaacaaccaaacatgcagcaggcaaatacttggttgc

SEQ ID NO: 148892 - DNA, 228 bp, Glycine max
tctgaatctgcgtgtgtttgtgaattgttgttgagatctgaatcaaaatcagaaacgataatggctacaccggaccacctcttcaacctccgcaacaacttctacctcggcgcttaccaagccgccatcaacagcagcgacgttgccaacctctcccaagaagataccctcgagcgcgacaccctcgtccaccgctgctacatcgccctcggccagctccagttcgtc

SEQ ID NO: 148893 - DNA, 224 bp, Glycine max
caaacccatttccttgatatcttagttatctaattacctcaattaatcccttaattgcaagcatcatggctgaggagaaacaccaccaccacttccaccaccacaagggcgatgatgtgcctggcgaggttgattatcagaaggaggagaagcaccacaagcatcttgagcaccttggggaacttggtgctgcggctgccggtgcttatgccttgcatgagaag

SEQ ID NO: 148894 - DNA, 222 bp, Glycine max
ctcttggtagaatgctaacagaaggcattcacacagacatcaccatcaatgcttctgatggaagtataggagctcatagagctgttcttgctgccagatcacctgtcttccgcagcatgttctcacataatcttcaggagcaagagttatcaaccataaacatctcagacatgtcacttgaatcatgccaggcttttctctattatctttatgggataatca

SEQ ID NO: 148895 - DNA, 221 bp, Glycine max
ctcacaccaaaacctttgttacaatgcactcaccacctgtgtcatgtccgggtgcactggcatttgaaagacaactataaggactattggcgcgtcaagattgccatcatcaatttcaactatcggttgaatttcaccgattggtctcttgttgtgcagcaccctaatctcaataatgtcacccaagtctatagctttgtatacatgccgcttcttcccta

SEQ ID NO: 148896 - DNA, 217 bp, Glycine max
cagaacattataatgcagcatgttgatcattcagctggagatcttatacatcttttgcaggggctacttagatatgacccctttgaaagacttacagctagggatgctttgaggcattccttctttactagagatcaacttaggagatgattttgctgtatttgtaaacgattggtctgtttttaagtttaaagagcattcgagggcaaatatggct

SEQ ID NO: 148897 - DNA, 227 bp, Glycine max
attttaatcctaattctgcacttcttgatcattcgatttttctcctcaagatgcagatattcgtaaaaactttgaccggcaagaccatcacccttgaggtggaatcctccgacaccattgacaacgtaaaagctaagattcaagacaaggaagggatcccacctgaccagcagagacttatctttgcgggtaaacaacttgaggatggtcgcacccgtgccgattac

SEQ ID NO: 148898 - DNA, 233 bp, Glycine max
ggaagccccaaagattgaaaacccaaagtgtgaggccgcccctggttgtggtgaatggaagaggccaacgaagaggaatccagcttataagggaaagtggagtgctccttacatcgataaccccagttacaagggcatatggaagcctcgcgagattccaaaccctgaatactttgaactcgcaaaacctgattttgagcctattgctgctattggcattgagatttggacaa

SEQ ID NO: 148899 - DNA, 232 bp, Glycine max
aagcaacacaagaacactctcttgaacattcatggatccagtgagcgtgtggggtaacacgcccttggcgacggtggatcccgagatccatgacctcatcgagaaggagaagcaccgccaatgccgcggcatcgagctcatcgcctccgagaacttcacctccttcgcagtcatcgaggccctcggcagcgccctcaccaacaaatactccgagggcatgcccggcaaccgc

SEQ ID NO: 148900 - DNA, 224 bp, Glycine max
gttaaaagaagagcatcactgaactaacaaagcaaccctatgtcgaaggtggtttgtgtcaccggagccagcggcaccatcggatcatgggtggtcctactcctcctccagcgtggttacaccgtccatgccaccgtccaagatatcaaggatgaaaatgagacgaaacatttggaggaaatggaaggagcaaagagtcatctccatttttttgaaatggatct

SEQ ID NO: 148901 - DNA, 220 bp, Glycine max
gagagagagagagaaatggcttgcaggcaattgtgggcttcaagagctgcctcttacctgaggatctctgtgtttcacagaggcttttctaatgttattaaagatttcaagtatgttgattctcatgagtgggtgaaagttgatggaaattacgcaaccatcggcataactgatcatgcccaagatcatttgggtgatgttgtatatgttgaattgccag

SEQ ID NO: 148902 - DNA, 221 bp, Glycine max
gcggtgacttcaagtgtccgccgtggttctcctccgaggcgcggaggctcatcaccaagctcctcgaccccaacccgaacacgcgaatcacaatttcaaaaatcatggactcgtcgtggttcaagaaacccgtgccgaagaacttgatgggaaagaaaagagaggaattggatctggaggagaagattaaacagcatgagcaggaggtttctactacgatg

SEQ ID NO: 148903 - DNA, 224 bp, Glycine max
caacaacaccatcctcaaaatctccaaactcgcgatcctcctcgttttgttcgcttcagtctgcaacgtcgctatgtcggactccaccgccaaacccctcgaccagcacgccaccacgggctctgaccctactgcgccagcggttcacatcgtgtacaccgagagaccacagaacgaggagcctgaggcctaccacatcagaaccctcacttcagtccttggca

SEQ ID NO: 148904 - DNA, 222 bp, Glycine max
ggcggcggttgcggctgggaatggtggtagcaaggctgaagggaacgcgaagaagttggtgttttttgggaatgcggcgagggcgtttgatttggaagatttgctcagggcttcggcggaggttttggggaaagggactttcgggacggcgtacaaggcggtgttggaggcggggccggtggtggccgtgaagaggttgaaggatgtgacaatttccgagaa

SEQ ID NO: 148905 - DNA, 229 bp, Glycine max
cagggaattacggaccaacacctgcaactgtttttaatgttgcaccttggatactaacagttggtgcaagcaccttggacagacagtttgatagcgttgttgaactccacaatggacagcgcttcatgggagcacgcctttctaaagctatgccggaagacaagctttacccactcatcaatgctgcagatgcaaaagcggctaataaaccagttgaaaacgctactct

SEQ ID NO: 148906 - DNA, 224 bp, Glycine max
gtgaagagcgaagagaatggctcccaagggtttaatctttttggctgtgttatgcttctcagcactgtcactgagtcgttgtcttgcggaggataatggacttgtgatgaacttctacaaggaatcatgccctcaggctgaagacatcatcaaagaacaagtcaagcttctctacaagcgccacaagaacactgctttctcctggctcagaaacatcttccatg

SEQ ID NO: 148907 - DNA, 230 bp, Glycine max
attatatttacaatggaagatctcttgcagagtgcgaagacaaacatgaatgtggaggaggttatcttttcaatagcaagagatatcaagcaaaggcttgcacacacagattctaaggctgaagtatgttgttgactcttatgcacttcattagtactcttatttcttatatgaaagactaaaattttgccatcatcaaattcaagtagatgtaaaacttgttaaggtca

SEQ ID NO: 148908 - DNA, 236 bp, Glycine max
agttggttgtagatctgagccgggttcaaaggaatgggagatgaggccaggtggaatgttggttcagatgagaactgctgattcgggtcggaacccagcacttttgccaacaattagagtaaaggtcaagtttggttcaatttaccatgaagtcaacattagttcccaagctacatttggggagttgaagaaaatgctgtcagggctaactggtttacaccatgaagaccaaaagc

SEQ ID NO: 148909 - DNA, 243 bp, Glycine max
ccggcatcaagcatcccagatgggtggatggggttggatattggtcctgattccatcaagacatttggtgaagcattggatacgactcagaccattatttggaatggaccaatgggtgtttttgagtttgataagtttgccacaggaacagaggctatagccaagaaactggcagagctgagtgggaagggagtgacaaccatcattggaggaggtgactccgttgccgctgtggagaaggtt

SEQ ID NO: 148910 - DNA, 241 bp, Glycine max
taccacttcaacaaactggtgctgctttgaaaaagtctgatgggttcaagattcccatctcatcagctcagcaatggcctgtatgtatcaggccggcctgaacagccaaaagaaaagactcccacaatgagctcagttgccatgccctatactggtggtgacatcaagaggtcgggagaattaggcaaaatgtttgatatcccaatggatggctctaaatctagaaaatccggtcccataa

SEQ ID NO: 148911 - DNA, 235 bp, Glycine max
ttccattctctctgtgtatttccctacctctcccttcaagatgcagatcttcgtcaagaccctcaccggcaagaccatcacccttgaggtggaaagctctgacaccatcgacaacgtcaaggccaagatccaggacaaggaaggaatccccccggaccagcaacgtctcattttcgccggaaagcaacttgaggacggccgtacccttgctgactacaacattcagaaggagagt

SEQ ID NO: 148912 - DNA, 235 bp, Glycine max
ctagggtttacagagaagctaagaggcgcacgacagcaaaagctcgtggaattgctagcaatggcgaggatcaaggtttacgagctgaggcagaagacgaaagctgatctgctgaatcaactgaaggacctgaaggcggacttgccttgcttcgagtagctaaggtcaccggtggtgcccctaacaagctttccaagataaaggtggtgaggttgaacattgcccaggttttgac

SEQ ID NO: 148913 - DNA, 238 bp, Glycine max
tgggaacattggtgacggtggctggggccatgttgatgaccttgtacaaaggtcctatggtttggaccaaagatgcacctcataatgggcaaatcaataatgcaacaaataccacaacatattcagacaaggattggttcataggctctatcctcctaatcattgccactcttgcctgggcatccctctttgttttacaagccaaagccattgaaacctacaaaaatcaccagctaag

SEQ ID NO: 148914 - DNA, 243 bp, Glycine max
ttaacatatacaaattctctgtgttgtgttgtgtacttgtgttaattgtgttgttgttgtaggaaatttaagtgaagagagaatgatgatgaagtctgctatgtgtgcattggtgcttgtggcactggttgtggttgaagtggggcccatggctgaggctgcggtgacttgcaacccaacacagttgactccttgtcttccggcaattaattcaggttctgcaccttcgagtgcttgttgcca

SEQ ID NO: 148915 - DNA, 246 bp, Glycine max
gaaattctttagttgtaactgacaaagttttctgagaaaataaggattattattgagagagtggctggctcatcggaagagggacaagtcattagcggccacaccgttgaagaatggaacgatcaactccagaagggcaacgaatccaagaaactcattgttgtggattttactgcttcttggtgtggaccatgccgtttcattgcaccattcttggctgagctggctaagaagttcacaagtgtc

SEQ ID NO: 148916 - DNA, 251 bp, Glycine max
aaaataaccttatttcttggtctgcaaaacatcatggcagaagcgagtttctttgttggagtcataggtaacatcatctcaattctcatgtttctttctcctgtacctacgttttggaaaataaagaagcacggatccaccgaagatttctcaagccttccttatatttgcacattgcttaattgctccctctggacttactatggaatcataaaagctggagagtaccttgtggccactgttaatggctt

SEQ ID NO: 148917 - DNA, 239 bp, Glycine max
gaaagatctctacataaaccaagctattcaaatggatgtggctggtaatcgcaaggctgtagtcatctatgtgcctttcagattgaggaaggcattccgcaagattcatcttcgacttgtcagagagttggagaagaagtttagtgggaaggatgttgtcttgattgccacaaggaggatcgtgcgaccgccaaagaaaggctctgctgttcagcgaccccgaacccgcactttgaccg

SEQ ID NO: 148918 - DNA, 235 bp, Glycine max
ttgagaaataaggggaaaaaatggtgtcgctgaaactgcagaagcggctggccgcaagcgtgctcaagtgtggcagaggaaaggtgtggcttgaccccaatgaagtcaacgaaatctccatggccaattctcggcaaaacatcaggaagttggttaaggatgggtttatcatcaggaagccaaccaagattcactcacgctcgcgtgctcgtaggatgaaggaggcaaagaagaa

SEQ ID NO: 148919 - DNA, 236 bp, Glycine max
acttgacattgagcgccctacctacagcaaccttaaccgtctcgtttcccaggtgatttcatccctcaccgcctcgttgatgtttgatggagcactgaacgttgatgtgactgagttccaaaccaacttggttccttaccctaggatccatttcatgctttcctcatacgcccctgttatctctgctgagaaagcataccatgaacagctttccgttgctgagatcaccaacagtg

SEQ ID NO: 148920 - DNA, 239 bp, Glycine max
gaacactgcagagcaagatctcaaacgacaaacgttgttggaacttgttgattttgtttcttctggatctgttaagttcacagaaccagcaatcgccgcattgtgtaaaatgtgtgcaactaatttgttcagggttttcccaccaaagtttcgaacaagtactagtggtggagaaacagaagatgaagaacctatgtttgatcctgcctggtctcacctacaagttgtttatgatctac

SEQ ID NO: 148921 - DNA, 245 bp, Glycine max
gttctgtccatatagaatttgtgaagtgagagtccaacctttcattttcaattttcaaagatgcctcgtggaacacttgaagttgttctgatcagcgccaaaggaatcgatgacaatgattttctctccagcatagatccttatgtgattctcacatacagggcacaggagaaaaagagcactgtgcaagaagatgctggatccaagccacaatggaatgagagctttcttttcactgtctctga

SEQ ID NO: 148922 - DNA, 245 bp, Glycine max
tgggagctatgacttcatctttgtggacgcagacaaggacaactacctcaactaccacaagaggttgatagagcttgtcaaagttgggggagtgatcgggtacgacaacaccctatggaacggctctgtggtggcacccccagatgctcctctcaggaagtacgttagatactacagggacttcgtgctcgagctcaacaaggcactcgctgtggaccccaggatcgagatttgcatgctcccgg

SEQ ID NO: 148923 - DNA, 252 bp, Glycine max
accaaacgaaactctttctcactgacatggctttctgttctccaaaattcctcagcctcctcctcctactctctgccatacccatcggaatcatcgtcactctagagcgagccaaacccgccacccacgtctaccactaccacagtaacggctggttccgagaatgcgccaagtgggattctcataaccgccgcttcattgtttccttcttcgaaggtggtcttggtcaggctttgctgccggagaaagatt

SEQ ID NO: 148924 - DNA, 252 bp, Glycine max
gtaagctcccaagcagtgggaggaggctcgggactctgaccgcgtgcctgttgaagaatgagccggcgactcataggcagtggcttggttaagggaaaccaccggagccgtagcgaaagcgagtcttcacagggcaattgtcactgcttatggacccgaacctgggtgatctatccatgaccaggatgaagcttgggtgaaactaagtggaggtccgaaccgactgatgttgaagaatcagcggatgagttg

SEQ ID NO: 148925 - DNA, 105 bp, Glycine max
ttcttcggctcgagaacaagggcaatttgggaattattgctcccatcgccattggtttcattgttggcgctaacattttgttgggtggggccttctccggagcag

SEQ ID NO: 148926 - DNA, 246 bp, Glycine max
gttctgcagctgcaagatgtacccagacttgagctacactgagtcaaccaccaccgagaccttggtcatgggagtggcacctgttaaggctcaatttgagggtgctgaaatgggtgtgcccgctgagaacgatggctgcaaatgtggaccaaactgctcctgcaacccctgcacttgcaagtgaggtgttgggagagcaagcttcaagcagagatagcccttaattaggaataatgataaactatt

SEQ ID NO: 148927 - DNA, 234 bp, Glycine max
gttatgtactagtaaatagtaattttattgtaaactatccagtacctgagagagagtagcatctgagtcttgtgtttagcgtaggggattgaaaatgagtatgtacggtagggatccgtggggagggccgttggagatccacgccacagactccgccaccgacgacgagcgcagcggaatctccaggagctggaccgaggcgctttagacgagacacaacagagctggctcttg

SEQ ID NO: 148928 - DNA, 229 bp, Glycine max
ggatcaagttcgtgccttggagaatgagatgctcaaccgcatcaagaaacaaggccttgatatcacccctcgtattctcattattactcgtcttctccctgatgcagtaggaactacctgtggcgaacgtctagagagggtatatgatactgaatattgttacattctccgcggtcctgtcagaactgaggagggacttgttcgcaaatggagctgaagattcgaagtc

SEQ ID NO: 148929 - DNA, 234 bp, Glycine max
ctcgagccgatttgatggagttcttcacattaaggaggcaatgcataaggctgaagctgcaggaaatgatgactgccccgtcaaaattaaacttgttgctcccccactttatgttcttaccacccagacactggacaaggagcaaggaatattggttctcaacaatgccatagcttcttgcactgaagcaatagaacaacacaagggtaaacttgtggttaaggaggcagctag

SEQ ID NO: 148930 - DNA, 235 bp, Glycine max
aaacaacaggataatgcacagaagattgctgagttccttgcctcccatcctcgagtgaagaaagtgaattatgctggcttgcctggtcatcctggtcgtgatttacactattctcaggcaaagggtgcaggatctgtgcttagcttcttgactggttcattggaactttcaaagcatattgttgaaactaccaaatacttcagtataaccgtcagctttgggagtgtgaagtccc

SEQ ID NO: 148931 - DNA, 240 bp, Glycine max
tgtgtttttcctttcgggattggtttctatggcttctgaagtaatagagtaccgatgctttgtcggtgggcttgcttgggccaccgacagcgatgctctcgagaaagccttctctcattatggtgagatcgtcgaatcgaaggttatcatcgatcgtgaaactggaagatcgagagggtttggatttgtgaacttcgccactgagcaggcgatgaaagacgcaatcgtaggtatgaacgg

SEQ ID NO: 148932 - DNA, 241 bp, Glycine max
cggcccagaccgtgtcaagtacttgggcccattctctggtgagcccccatcctacctcactggtgaattcccaggtgactatggttgggacactgctgggctttctgctgacccagagacctttgccaagaaccgtgaacttgaagttatccactccagatgggccatgttgggagccctgggctgtgttttccctgaactcttggcccgcaacggtgtcaagttcggtgaagccgtgtgg

SEQ ID NO: 148933 - DNA, 208 bp, Glycine max
aggctgttctagaagcaacattttgccccatgtatgctcagctctgttctgatctaaatgaaaagttgcctccattcccatctgaagaccctggtgggaaagaaatcacctttaagagagtgctcttgaataattgccaggaggcatttgaaggtgctgaaaatctgagcgaggaataaaaagctgactgcccctgagcaggagatgg

SEQ ID NO: 148934 - DNA, 237 bp, Glycine max
catttgtcttgttagcgctttaaggggcatggttcgaggcggactttgtctgtaccctgtttggaacctgctgcctacctcatgggaggtaggtcatgagatgacagctttgaagtctgccaacaaggagttgaagggaatgatgaaaactgtgaagatccaagacattgataacttgcaagatgagatgatggacctcatggatgtaagtcatgagatccaagagactttgggtag

SEQ ID NO: 148935 - DNA, 232 bp, Glycine max
cgccactggtatatccagagcacttgtgcaacttctggagagggtctctatgagggtttggactggctttctaacaacattgccagcaaagcatgagacatttgaaaaattttggtcttgtctggtgatttcatgcgagtctggcggttcttggagaaagatgcttatctgttctagcgaatgttgtaatagcagaatgcttgctagaagtattctcttttgtgtaacttgg

SEQ ID NO: 148936 - DNA, 227 bp, Glycine max
ctctctcgcagattgaagcaccgtggccctgactggagtgggctccatcaacatggtgactgctttttggcacatcaacggttagccatagttgatcctgcttctggggatcaacctctctttaacgaggacaaatccgtcattgttacggtaaatggagagatttacaaccatgaagagctcaggatacagctgcctaatcacaacttccgaactggaagtgattg

SEQ ID NO: 148937 - DNA, 229 bp, Glycine max
cgtccttctcagaagagtgtaaaagtaatctgaacctgaaagccactgaactcaggcttgggcttccgggatcacagtctcctgaaagagattctgatctttgcttaagaagctcaactcaattagatgaaaaacctttgtttccgttgcatcctttgactgatgatcaccattcttcagccaaaactgctgtcttgggaaacaaaagagggttctctgatgccatgaa

SEQ ID NO: 148938 - DNA, 231 bp, Glycine max
cagctcacgtgtcattgacctgcttgtattcgttgccaagaagtctttttaaggtggtgtactgcaaagttgcttgtctacacattatgtgcttgtctagttgcgatttagtgtcttgctcgtgcaaaaaatgagaggtctgaataaatcggtttctggaaccagtggatttaccttgttaggagcattagctctattttggactttgcctcttgtggaggaggatggagt

SEQ ID NO: 148939 - DNA, 245 bp, Glycine max
gatgagaagtacagcactagggtgaaggatgaagaggggtgccctgctttctctttgatcaacaagggcactggttgaagccttgaagcactccatcggtggcaatcatcctggtcgggtgataccttaaaaggccgactatcttgatgagtctaatctatggactgaaagccgtgacttaggagatggccacagagctataaggatggtcaacaatgttcatcttaatgtggatgcttttcacg

SEQ ID NO: 148940 - DNA, 246 bp, Glycine max
tgagaagcgaagatgagcagcgacacaaaagccaacagcaacgttggagggggatccagatcgaggttaaatcactacctctatagcggtgacaagaaacatgtcttcgttggtttaactctcatcaccgctgtctttaccatcccatggttccttatgaacagagggaccaaacaccaatctcatcaagattacttggaaaaagctgataaagcaaggagccaaagactctcatccagtctgctt

SEQ ID NO: 148941 - DNA, 246 bp, Glycine max
atcgaagctttgggtttgatacgcagccagtcctcattgggctcatcatatttcagcatactgtaatcccacttcagcaattggtcagctttggtctgaacctagtcagccgatcatttgaatttcaggctgatggctttgccaagaagcttggatatgcatctggattacgcggtggtcttgtgaaactacaggaggagaatctgtcagctatgaatacagatccttggtactctgcttatcact

SEQ ID NO: 148942 - DNA, 230 bp, Glycine max
gttcttcacttctcttcttcaattcattctagttctggattccgactcgccgcattgactcggtccgggttggggtcgactcagttcggtttttcattctctcgcgaatctaatctataggaaaagctaagggcacatcacaatgaaggcattgattctggttggggggtttggaacaaggctgaggccactgacactcagttttcctaagcctcttgttgattttgcta

SEQ ID NO: 148943 - DNA, 234 bp, Glycine max
aagacatgccctgctgcaatgggatttgcatttgctgctggaacaacagatggacctggagcttttgactttaagcaaggtgatgatcagggaaatcctttctggatgctggtccgtaacttgcttaaaacgccaggcaaggaacaagtagactgtcaccacccaaagcccattttgcttgatactggcgaaatgaagctaccatatgattgggcgccttcaatacttcctatc

SEQ ID NO: 148944 - DNA, 248 bp, Glycine max
cgatcacttcgagcggaagcgcaagaaagaggcgcgtcaagttcacaaacgctctgcaattgcccagaaggctctgggtattaagggcaaaatgattgccaagaaaaattatgctgaaaaggcacagatgaagaagactttggctatgcatgaagaatcaacttctaggcgcaagactgatgataatgtacaggatggagctgttcctgcttatctccttgatcgtgataacacgaccagagcaaagg

SEQ ID NO: 148945 - DNA, 266 bp, Glycine max
gccttatcctttggatatgagaggcgagctagatgacactgctgctttcaagaacttcaagaaatggggagacattgaatttccactgccatttggaagggttatgagtgccaccgagtctttcattcatggattagatgaaaagacaagtgcatccttaaaattcacagtgttgaacccaaagggccgaatttggacaatggtagctgggggaggtgctagtgtcatttatgctgatacggtaggagatcttggctttgcatctg

SEQ ID NO: 148946 - DNA, 264 bp, Glycine max
gttgtttttctttttttcatttgcattgcaaagcaaaaaccttgcaaattgcaatggcttccaacaaggttattgccaccatcttggttctttctctccttgcctactcaacatcattcaccaatgcatgtggcacatgccacccaaaacctactccttctccccctcctccatcagggaagtgccccaaggacacattgaagctaggggtgtgtgctgatgttctaggacttgttaatgttgttgttggttcccctgtctcta

SEQ ID NO: 148947 - DNA, 270 bp, Glycine max
ttcgggactgtaactagccgcagcacgaggagcagcctcaggaggagaaggatgtctcacaggaagttcgagcacccaaggcacggttcactgggatttcttcccaggaagcgtgctgctcgtcacaggggaaaagtgaaggcattccccaaggatgacccatccaaggcacccaagctcactgcattcttgggttacaaggccggtatgactcacattgttagagaggtcgagaagccaggatcaaagcttcacaagaaggaaacttgt

SEQ ID NO: 148948 - DNA, 273 bp, Glycine max
tgctggcatacatattacgtttgtgcttggaatggataccatgcgctatgcatttctaacatctcttgtcaggattactttcttgcatgcccccaaggaaatgcgcagtaaaaatgtggaagctttgcgtacactgttggttctatgtgactcagacatgaacgctcttcaagatacatggaatgcagttctggaatgtgtttctcgcctcgaatttataacatcaactccttcaattactgtcactggtatgcatgggtcaaaccagatctc

SEQ ID NO: 148949 - DNA, 264 bp, Glycine max
gctttgtttcactcacactgtgtttggagcagaatcagatcgtgtgttccgtacgttcgttcgttcatttccagtgtcaaacatggcgtctcagatgagcaagaagagaaagtttgttgcggacggagtgttcttcgccgaactgaacgaggttctgacacgtgaattggcggaggacggttactccggcgtggaagttagggttacgccgatgcgcaccgagatcatcatcagagccaccagaacccaggctgttctaggtga

SEQ ID NO: 148950 - DNA, 256 bp, Glycine max
ctctctcttgcaaaacctaattttcatttcttccctcaaatttcaaaatgcgtgagatccttcacatccagggtggccaatgcggcaaccagatcggcgccaagttctgggaggtggtttgcgcggagacgggatcgaccctaccggaaggtacggtggggactcggagttgcagctcgagaggatcaatgtctactacaacgaggccagttgcggtcggttcgtgccgcgcgcggttctcatggacctcgaaccg

SEQ ID NO: 148951 - DNA, 264 bp, Glycine max
caccaactccaactcaaactctccaaaacctgccacttcaaccttcctatatattccttccctcactctcttctgcttctatcatctttctgagaggcttgttgacacacaaaaaatgatcaccttaacagacttctaccatgtgatgactgcaatggtgccactctatgtggccatgatactagcctatggctcagtgaagtggtggaagattttctcccctgatcaatgctctggcatcaaccgttttgtggcactctttgc

SEQ ID NO: 148952 - DNA, 267 bp, Glycine max
gtcactaaatccgcaatcatgaagctcgataccaccggtctcgaatcgtttcccacactgcttgcgcctcaaaacgacgtcgttggagaactctccgccgctccatccttcgaccttccgaattccaacgatttcgatgggtttgtgaaagaagctattcagatggtgaagcccgcgaagggtactacgactcttgcttttatatttaaggagggtgttatggtagctgctgattctcgagctagcatgggaggatatatatcatcg

SEQ ID NO: 148953 - DNA, 269 bp, Glycine max
aaaaagaatattcagagaattccaaagacagagatgactgtcattaaggaagagcaacaaccaaaccaaatagctggccacaaagaacttggtcacaaaagtctccttcagagcgatgcactctatcagtatatacttgaaaccagtgtgtacccaagagagcatgagagcttgaaggagctacgagagttgacggaaaaacacccttggaacctgatggctacaccacctgacgaaggacaacttctaggcatgctccttaagcttat

SEQ ID NO: 148954 - DNA, 269 bp, Glycine max
tctcttcaaaagggagaagataaggaaagaaaactctcaaaaaactattatagcaatggcagaacaaaaccaaaaccaaacaactgaagctggaaggcaccaagaggttggtcacaagagccttctccagagtgatgctctttaccagtatattctggagacaagtgtctacccaagagaacctgaatccatgacagaactgagagagttgacagcaaaacacccatggaacatcatgacaacctctgcagacgaagggcagttcttga

SEQ ID NO: 148955 - DNA, 270 bp, Glycine max
tcgcaaaaataaaggagataatttggtcgccgattggttcactaggtataagatcgccttgggcgtggctcagggaatctgctatcttcaccacgactgtgatcccgtcatcgtgcatcgcgatctcaaacctagtaacatattattggacgctgagatggaggccagagtcgcagattttggtgtcgccaagttgattcagaccgacgagtccatgtctgtcattgccggttcctatggctacattgctccagaatatgcttacaccct

SEQ ID NO: 148956 - DNA, 274 bp, Glycine max
taagttacttctagcagagacagaggggtcttacacagtgcaacagaactacactagcttagatattcatgttggacaatcttattcttttctgttaagcacggatcaaaatgcaagtacagattactacattgtagcaagtgccaggtttgtgaatgaatcacgttggcaaatagttacttcagttgctatcttgcgctatacaaattccaaggggaaggcacgtggtcctctcgcacctgctcctgatgatcaatttgacaagacttactca

SEQ ID NO: 148957 - DNA, 265 bp, Glycine max
cgcgctcttaaagttgctgaggaagaaatgttaaaggcaaagtttgaggctactgccatagaaaaagagctgagggaggctcatggtgcttggcttcccccttggcttgctgttcactatattcatagtaagtcttttgttgatagtcattggaacaaacatgggaaacctgctttggaaatggttactcaaaaggccctagagaaaaaggcacaagctggaaagtgggctgaacctcatgtggaaaccattaaaactaaatggg

SEQ ID NO: 148958 - DNA, 257 bp, Glycine max
tcccggcaacaccaaaaccaccaccgcctctcctacctcccggagccatggccgccaccgactcctccgctgcttcgtcacgccagctttcgcagagggagacggacatccagatgatgctcgctgccgacgttcacctcggcaccatatactgctcgcttcagatggaacgctacgtgctcaagcgccgcaccgatggtatttacatagttaacctcggagagacatgggataagcttcatcttgctgctaggatt

SEQ ID NO: 148959 - DNA, 262 bp, Glycine max
gaaagccttagccgaaatcgcctgtggcgcaacggaaccttccctcactccagtgtggtgcagggagctcttgaatgcaagaaacccacctcgaatttcacgcacccatcacgaatacgaggtggaaaacaaagccaaaggaactatgatgatcccattaaacgacgtggtgcaacgttgtttcttcttcggacctagagaggtagcttctctccgtagtttggttcccaaacatcttggtagatgcacaacatttgaggtc

SEQ ID NO: 148960 - DNA, 261 bp, Glycine max
gattttggatgtacgaattttaaacacagacagacatgcaggaaatcttctggtcaggaagcttgaagggtttggaaagtttgaccaagtggagctttttcccattgatcatggtctttgtctccctgaaactttggaagatccttattttgaatggatccattggcctcaagcatcaattcctttctcagatgatgagctcgactatatatatcatctagacccatttcgtgattcagaaatgcttagaatggagcttcc

SEQ ID NO: 148961 - DNA, 261 bp, Glycine max
atcaatagccatgaagatcgttcggagagacctagtacctaatggacctggcagcgttaagatggtggcagtggattcggatgatctctggattgcgtataacttgatagctcccggagactctgtcatggccgttactgtcaggaaggttctaagagaagctgctaatggcggacgggaagcagaacgcgtcaagctcaaattggaaattatagtcgaagagctttctgattatgacaaagaaggttctattttgcgtgt

SEQ ID NO: 148962 - DNA, 261 bp, Glycine max
tctcgagccgaatcggctcgaggaaaaggaaagaaaactctcaaaccactattatagcaatggcagaacaaaaccaaaaccaaccaactgaagctggaaggcaccaagaggttggtcacaagagccttctccagagtgatgctctttaccagtatattctggagacaagtgtctacccaagagaacctgaatccatgatagaactgagagagttgacagcaaaacacccatggaacatcatgacaacctctgcagacgaag

SEQ ID NO: 148963 - DNA, 265 bp, Glycine max
gtttcttcatcggttgttcaagtaaatggcctttgtcaccactgctgaagtgtgtgatgcgaacccacagttaattttgagtggggagcttcgtgcccttcagccagtttttcagatttatggccgtcgacaggttttctctggaactatagttaccttgaaggtgtttgaagacaatgttctggttcgtgagttccttgaagagacaggctatggaagagttctagttgttgatggaggcgcgagtttacgctgcgctatattg

SEQ ID NO: 148964 - DNA, 265 bp, Glycine max
ttgatctatggcgagaggacgcttatttctctgcggcggaagaggtgcaggaatcagctgatataatggaatctgcatacagggcatggttgagagagaagagagataggtcaactcctgaggaattaaatgaactatgtagagagctgcaaactgctttaggtaccgcaaaatggcagtaggaagaatttgataaagccgtcaggtaaaggtaccgacctcacagtgatgacaatacatccactaggcataggcagtttatttc

SEQ ID NO: 148965 - DNA, 266 bp, Glycine max
tttctctcgaagcaagaaaaatgttcatcgagagtatcaaggttgagagtcctaacgtgaagtatacagagactgagattcagtccgtgtacaactatgaaagcactgaacttgttcacgagaacaagaatggcacttatcagtgggttgtcaagccctaaactgtcaaatatgtatttaaaaccaacacccatgtccctaaactatgggtaatgcttatcgggtagggtggaaacgatggctcaaccctcaccggtggtgttatt

SEQ ID NO: 148966 - DNA, 263 bp, Glycine max
catacatcgcagcgtattgatgacgtggactttagccgattgaaagactttagctcaaacttacaacttgtaccccgacttaggttcatgattcgggatgttatagagttgcgtgctagtaacttggttcctagacgcgaagatgtcaaagccaaaagcattactgaaattcattcagaggcagaaaaaaatcttggattgcggccaggtgcaactgcaagtatgagaaatccccgtggtggtgttcaaggaaataccagctc

SEQ ID NO: 148967 - DNA, 264 bp, Glycine max
cttattctcttcctctctctctactctgagacacaaaggaaaattataagaaattatggctggttattcaaaagcttcagctctttggatcctttttcttctctttggcttctctgtagctaaggaaattttggttggaggtaagactgatgcatggaaggtttcagcctctgaatcagattcactcaaccaatgggcagaaaagtctcgtttccaagttggagactatcttgtttggaaatatgatggtggctaagactcagt

SEQ ID NO: 148968 - DNA, 262 bp, Glycine max
accatattgtaccatactggcacagcaaaatcttgtaagcgaacaggtgttctctttttggctcaatggtgatccaaaagcgaaagatggtggtgaactaatttttggaggtattgatcctaaacacttcaaaggagatcatatttatgtcccagttactaaaaagggctactggcagattgaaatgggagatttttttattggaggtctctcaacaggtgtttgtgagggtggctgtgctgctatagtggattcacgaaca

SEQ ID NO: 148969 - DNA, 261 bp, Glycine max
ggcaggcttcagttcagccatgagaactcacactcacacttacacttatactattttctctctaattcttctctccttatttcttcgaacccattccgaggttataacgttaacctctgatacatttaatgataagatcaaggagaaagacactgcatggtttgtgaaattctgcgttccctggtgcaagcattgtaagaatcttggttcattgtgggatgatttggggaaagcaatggaaggagaagatgaaatagaggt

SEQ ID NO: 148970 - DNA, 262 bp, Glycine max
cattccccttatctttctctcttctctctccccgctcaaaccctaactccctaccctattccgctttctctcatccatcatgaaaggaggaaagtccaagaccgaatctaagagagccgatgccaaacttgctgtgaataagaagggcgccgccaccaagactaggaaacccgccggaaaggggaaggcagcgaaagatcctaacaagccaaagaggcctccaagtgctttcttcgttttcatggaggaattcacgaaggtg

SEQ ID NO: 148971 - DNA, 259 bp, Glycine max
atcactgtgttgcgagcagtgatcgattctgcgaactgcgattcgcattgccaatttcaacagcgtgcgttcgtacggagatggagtcgctaccgacgacgaagcgaggaggagcgagatcgaagcccgttcagacctcgaaatcgtccctcgtcatggccttcttctcctgcgtcgcgtggctctacgtcgctggaaggttatggcaagacgcagagaatcggaatttgctcgctagtcttctgaaaaagaattcagc

SEQ ID NO: 148972 - DNA, 260 bp, Glycine max
cccttttattttttttttttggtgaggcattttccgacacaggaggtgctgcctcaggaggagtaggatgtataacgtgtagttgggcacccagcagttggttcaatgcggtttcttcacaggaatcgtgcttctcgttatatgggtgaagtgaatgtgttccccaaggatgaaccgtcctcggcacccgtgctcactgcattcttgggttaccaggccggtatgactgccatgccccgagaggtcgagaagttatgatc

SEQ ID NO: 148973 - DNA, 269 bp, Glycine max
ctcatttttattagttttgttgctgagtgtgtgtgaaactgtgaaagagagttatggcaggaggtggtggagctccatgcacctaagattgatgagccacaacctcatcccccgaaggatcagttaccgaatgtttcttactgcattacgagtcctcctccatggcctgaggccatacttcttggttttcaacattatcttgtgatgctcggtacaactgtgctaattcccactgctcttgttccccagatgggaggtggcaatgagga

SEQ ID NO: 148974 - DNA, 272 bp, Glycine max
cgggagaagtgctaaccccaccatcaacagccagggcaacagatacaatgctcctactaaccgttttgccaaggaggtgacaaagagagtggaaacagcagaaagtcagtggaagggttggaattggaggtcagagggagatttgttgctgaatggtgcctatttcacaccatctggtgctggagcctcagcaagctatgcaagagcctctagcttaggagcaaatcttcttcctggttggttcatgacttccatgctggtgcataggttgc

SEQ ID NO: 148975 - DNA, 254 bp, Glycine max
gcggcaactgcgactgcgctgacaagactagctgcaccaagggaaacagctatggtgttattgtagagactgagaagagttacatcgagactgttgtcatggatgttccagcagctgagcatgatgggaagtgcaagtgtggcactaactgcacttgcacggactgcacctgtggccattaaggaatatgtatgaaaatgtaattgccatgtgtttggcaatacaaatatccaaataatgtaatcttcgtatga

SEQ ID NO: 148976 - DNA, 258 bp, Glycine max
gcttttcatgccaaaggtgaaataattgctgttgcatctggccacaagttgtacatatggcaccacaacaagaaaggtgaagcatcctctccaatatttgtgttgaagacaaagcgctcccttcgtgctgtgcattttcaccctcatgccgcaccatatcttttaactgcagaggtcaatgatcttgattcttcagattcctcaatgacagaggctacatctcttggttatttacaatatcctccgcctgctgttttt

SEQ ID NO: 148977 - DNA, 248 bp, Glycine max
aggaagtgagccagcagaggaaggactacgtagaccctccgccagcccccctcatcgacttggccgagattaagctctggtccttctacagagccctcatcgccgagtttatcgccacactcctcttcctctacgtcaccgtcgccaccgtcattggccacaaaatacagaccggaccatgtgacggcgttggccttctcggcatcgcatgggccttcggtggcatgatctttgtcctcgtgtactgc

SEQ ID NO: 148978 - DNA, 259 bp, Glycine max
ctgcgactgcctccaggggttccaggtctgccactcgctcggcggatgaaccggctccgggatggggacgcttttgatttccaagatcagagaacagtaccgtgacagaatgatgctcaccttctccgtttttccttcccccaaggtctctgatactgtggttgagccttataacgctactctttctgttcatcagttggtggagaatgctgatgagtgtatggtgcttgataatgaggcgctctacgatatctgcttc

SEQ ID NO: 148979 - DNA, 265 bp, Glycine max
cttaaatcgcggcgtataaatgacgtttactttagccgattgaaagcattaagctcaaacttacaacttgtaccccgacttaggttcatgattcgggatgttatagagttgcgtgctagtaactgggttcctagacgcgaagatgtcaaagccaaaaccattactgatattcattcagaggcagaaaaaaatcttggattgcggccaggtgcaactgcaagtatgagaaatccccgtggtggtgttcaaggaaatgccagctctg

SEQ ID NO: 148980 - DNA, 262 bp, Glycine max
ggtcgaccccgacctcaacctcgtcaaaggccgcggcggcgccctcctccgcgagaagatggtcgaggccgcctccgacaagttcgtcgtggtcgtcgacgacaccaagctcgtggacggcctcggcggaagcgggctggccatgccggtggaggtggtccagatctgctggaagtacaatctggatcggcttcaggagcttttcaaggaagaaggtgtggaagcaaaattgagattggaggagagtgggaaccctacgtca

SEQ ID NO: 148981 - DNA, 259 bp, Glycine max
ctagctggataggtcaaacatcatcatgtcggacgaagagcaccatttcgagtccaaggcagacgccggtgcctccaaaacctaccctcagcaagccggtaccattcgcaagaacggctacatcgtcatcaaaggacgcccctgcaaggttgtggaagtttcgacttccaaaactggaaagcacggtcacgccaagtgccactttgttggaattgatattttcactgccaagaaacttgaggatattgtgccctcttct

SEQ ID NO: 148982 - DNA, 260 bp, Glycine max
ggacacaagaaaaggtggtcctttagaaggagctcatgttcacattgttcacttgtctgattcaagtgcttccttggatctgattaaggaagcaaaaagtcgtggtgacagcataagtgttgagacttgtccccattacttagctttctcatctgaagagataccaaatggagatactcgttttaagtgttccccgcccattcgtgatgcttataacagagaaaaattatggggggctgtattagagggacacattgacc

SEQ ID NO: 148983 - DNA, 255 bp, Glycine max
cgggactgtaactagccgcagcacgaggagcagcctcaggaggagaaggatgtctcacaggaagttcgagcacccaaggcacggttcactgggatttcttcccaggaagcgtgctgctcgtcacaggggaaaagtgaaggcattccccaaggatgacccatccaaggcacacaagctcactgcattcttgggttacaaggccggtatgactcacattgttagagatgtcgagaagccatgatcaattcttcacaa

SEQ ID NO: 148984 - DNA, 257 bp, Glycine max
atatactcccgcatgttaaatggcgaggatcaaacctcaagctctgctacagcaaagctaaaggaagaagggtccttctcggataagtgccgtgactgctatattttacttgctgattcttgccttggttgggtttttcctgtttgcttcgtacatacatttgtccagcagatcactattacaatccgtagatcacttgtcagtctccgagggtgataatacttttgtggactccaagagatctgagctgccttgat

SEQ ID NO: 148985 - DNA, 259 bp, Glycine max
gaagaacatcacggggcttgtcgagtggtacgggaagaacgcacgcctccgcgagttggtgaacctggtggtggtggctggagacaggaggaaggagtcgaaggacttggaagagaaggccgagatgaagaagatgtatggcctcatcgagacctacaagttgaacggccaattcagatggatatcctctcagatgaaccgtgtgaggaacggagagctctaccgtgtcatctgtgacacaaggggtgcctttgtgcag

SEQ ID NO: 148986 - DNA, 153 bp, Glycine max
aaaaaaaaaaaaaaaacaaaaagaaaaaaaaaaaaaaaaaaaaaaaaaaaaaaaaaaaaagaaaaagaagaaaaaaaaaaaaaagagaaaaaaagaaaataagaggaagggtagaaactagagagacaagagggaaaagtagtggctgaaaag

SEQ ID NO: 148987 - DNA, 255 bp, Glycine max
ggaacagagaaagtgtcccgaagagcctccaacaggctatatccatgtcagagcaagaaggggtcaggcaacggatagccacagccttgctgaaagggtgagaagagagaagataagtgaaaggatgaaggtgttgcaacggcttgtgccaggctgtgacaaggtgactggaaaggcccttatgttggacgaaataatcaattatgttcagtctctacagaatcaagttgagttcttgtcaatgaagcttgcttc

SEQ ID NO: 148988 - DNA, 248 bp, Glycine max
gctcgattgactactccacctcctcgtctggctgactttaactattcaactgaaatgtttgaaaagaacatggaatattggcaacaagaagttgctaattactggaaaatgctagacaataaaattaagcctggcacaattcggaatgtgatggacatgaaagcaaatttgggttcatttgcagctgctttgaaggacaaagatgtttgggttatgaatgtggtgccagaccatggaccaaacactct

SEQ ID NO: 148989 - DNA, 245 bp, Glycine max
aaaaaatctaagtccctttggtcttcatcttctgttctgatccaggtatggcttctaaacgcatcttgaaggagctcaaggatttgcagaaggatcctcctacctcatgcagtgcaggccctgtggctgaggacatgtttcactggcaagccacaatcatgggacctgctgatagcccatatgcaggtggtgttttcctagtttcaattcattttcctcctgactatcccttcaagccaccaaag

SEQ ID NO: 148990 - DNA, 241 bp, Glycine max
taaaaaccctggcttgggttggatgatgggtttcatgtttgttgtcagtttccttggactttttagtcttgtgccacttcgtaaggttatggtcttggattataagcttacatatcccagtgggacagctacagcaatgctaatcaacagtttccatacaaaaactggagcagaacttgctgggaaccaagttcggcagcttgggaagtatctaagcataagtttctgctggagttgcttt

SEQ ID NO: 148991 - DNA, 244 bp, Glycine max
tacagaagaagccaagccagaggagcctaaagaagttgcagttgagaccgaggaggtggtgacaaaggagacagaggaagagaagccagcagcagaagagaaatcagaggagaaaactgaagaagtgaaagaagaagcagaagagcctaaagaaactactgaaacagaaacagaatcagcaccagcagcaaccacagaggaagagaacaaaccagctgagacagtggaagccccagtagaggtt

SEQ ID NO: 148992 - DNA, 246 bp, Glycine max
tgttgatgatgttgtccttgttggtggttctaccagaattcccaaggttcaacaactgctgcaggacttctttaatggaaaagagctttgcaagagcattaatcccgatgaggctgttgcatatggtgcggctgttcaggctgcaatcttaagtggtgagggcaatgagaaggttcaggatcttctcctcctggatgtcacccctctgtctcttggtttggagactgccggtggtgtgatgactgt

SEQ ID NO: 148993 - DNA, 247 bp, Glycine max
ctttgtcaccgccacaaacttctgccctccaaactacgctctccccagcgacaatggcggttggtgcaatcctcccagacctcacttcgacctcgccatgcccatgttcctcaaaatcgctcagtaccgcgccggcatcgtccccgtctcatatcgccgggtgccctgcaggaaagagggagggatgaggttcacgatcaacgggttccgttacttcaacttggttttgatcaccaacgtcgcgggt

SEQ ID NO: 148994 - DNA, 242 bp, Glycine max
ctttgggattctgctacaaatccttattcatacccaagtaatgacagcttttgtacgcgagtttacgataaaccttttaagcacttcatttccaaacatgactgcttcagaggttactcaatttgttaatggcctttttgagtccaccaatgacctccccacatttgaaacccacatacgagattttcttgtacaatccaaagaattttcagctcaggataacaaagatctttatgctgaag

SEQ ID NO: 148995 - DNA, 234 bp, Glycine max
ttcgaccgaatcggctcgagattgtttgttgttgtaactcgttcttcttcttttgttgttctgtgtttgtgtttgttatttctctcacctgaaaatgtcttgctgcggtggtaactgtggttgcggaagctcctgcaagtgcggcaacggctgcggaggctgcaagatgtacccagacttgagctacactgagtcaaccaccaccgagaccttggtcatgggagtggcacctgt

SEQ ID NO: 148996 - DNA, 239 bp, Glycine max
ggattacaacaagttctatgaggctttctctaagaacttaaagcttggtatccatgaggattcccagaacaagggaaagattgctgaattgctcaggtaccactccaccaagagtggtgatgagctgacaagcctcaaggattatgtgaccaggatgaaggaaggtcagagtgacatctactacatcaccggtgaaagcaagaaggctgttgagaactccccattcttggagaagttga

SEQ ID NO: 148997 - DNA, 240 bp, Glycine max
tgattgtgaagaaagcattgtttcttctccacttatggagcatttgccgccacaaccgcatcatcatgcgggtccttcttctcagctgcagcaacagttgccagaatcaatgattgagttaatttcacaagataaaccgttgccagaaaagggtaagcttttgcaagcagtgatgaaagctggtcctttgcttcagacactgcttcttgcaggaccacttcctcaatggagacaccctcc

SEQ ID NO: 148998 - DNA, 220 bp, Glycine max
cacagccaagtcgtaaaagggtttcaagggatggaaaacatgcagagcttctggcaattgggtgatgaactccgtgggcactcaaaagcatcggaggatcacaagtggttaatggttgcctcgaaactggccgaacagacaagattgaagggggagcgtgtgaacaacctggatctttcaaagggccccattgaaacagggtcaagggataattttgggt

SEQ ID NO: 148999 - DNA, 238 bp, Glycine max
cctttgttcactcttcttctcttgcggctagggttttagcgcacttcttctagatttaaggaagatgggtaaggaaaaggttcacatcagtattgtggtcattggccatgtcgactctgggaaatccactaccactggtcacctgatttacaagcttggaggcattgacaagcgtgttattgagaggtttgagaaggaagctgctgagttgagcaagaggtctttcaagtatgcctgg

SEQ ID NO: 149000 - DNA, 248 bp, Glycine max
accgcttttacgttggtttattcggtttgtgttgctctgttatgctgctcctccctgtttgatttcaagggtaaaggataaagggatgatctacacagcaattgacacgttctacctcacagatgagcggctagcaaactcaccttctagaaaagatggcatagatgaagccactgagaccacccttagaatctatggttgtgatctcatccaagaaagtggcattttgctcagattgccacaagcag

SEQ ID NO: 149001 - DNA, 253 bp, Glycine max
ttccattctctctgtgtatttccctacctctcccttcaagatgcagatcttcgtcaagaccctcaccggcaagaccatcacccttgaggtggaaagctctgacaccatcgacaacgtcaaggccaagatccaggacaaggaaggaatccccccggaccagcaacgtctcattttcgccggaaagcaacttgaggacggccgtacccttgctgactacaacattcagaaggagagtactcttcacctcgtcctc

SEQ ID NO: 149002 - DNA, 246 bp, Glycine max
  unsure (1)..(246): unsure at all n locations
caagttctggatctgaaggaggagatccgcatatcatcgatgagaggaagcggaagaggatgctgtcganccgcgagtcggcgcggcgatcgcggatgaggaagcagaaacagctggaggatctgaccgatgaagttagcagattgcaaagcgcgaacaagaagcttgcggagaacatagaggccaaggaagaagcgtgcgtcgagaccgaagcggcgaacagcattctgagagcacagacaatgg

SEQ ID NO: 149003 - DNA, 243 bp, Glycine max
tggaggaacactctgactcacggtatcataaaggtttcttgtatgagcacatctcgaaagcctctcatcaagagacatgataggacattcaagcttacagatccatcgtcagagcactgccctcctggagagttcgtccgagaaatccctctttcaacccgaattcctgaagacgccaacatagaagcatactacgatgggccaggatctgtgcttgagatcctggtgccaaaacatcgcgtg

SEQ ID NO: 149004 - DNA, 236 bp, Glycine max
catcgttctcgatgacgtcgcgattactcacctctcctacggcggggaattctcccgcgcagtggagcagaagcaggtggcgcagaggaggcggagagatcgaagtttgtggtgatgaaggccgagcaggagcggagggccgccattattagggctgagggtgagagcgatgcggccaagctgatctcggacgccactgcctcggccgggatggggttgatcgagctaaggaggat

SEQ ID NO: 149005 - DNA, 205 bp, Glycine max
cgctctctgggtgttcccaaaatgaagcttcggagatcttcgctgtgcgtctttctagggtttctggcgctgttcctttcgccgccgccgtcaatggcgaaattcgtggtggagaagaacagcttgacggtgacgtcgccggacaacatcaagggcacgcacgatagcgcgattgggaacttcgggataccccaatacgggggca

SEQ ID NO: 149006 - DNA, 241 bp, Glycine max
gcaaggacccccagccatgatgcctccacaagctggatttggataccagcagcaactagttcctggaatgagacctggtggtggtcccatgccaagcttctttgttcctatggttcagcaaggccaacaagggcagcgcccagggggccgccgaggaacaggtcctgtgcaacaaccccaacagccaatgccaatgatgcagcagcagatgcttccaagggggcgtgtctatcgttaccct

SEQ ID NO: 149007 - DNA, 244 bp, Glycine max
ccacttgcatccaagcactcgaaacaagagcttcactcttcgaaacaattcgctgtttaccagattctcttcacgatctcgaacacttaaagcttctctacaattcaatcttgcgtgatcgcaagcttcctggtcctgcgtggaagcgccacaacgtgcgctacagagaaattccagggaaactttgctccctcactattaaaattcaggaacttaaacagaggttggcttctggtgaaactgg

SEQ ID NO: 149008 - DNA, 244 bp, Glycine max
gagaatcggagtttctcaactcgcattccaaacccgagatcgtcgacatgctgcgaaagcacacgtacaatgacgagctggagcagagcaagcgcagcgcggcgtcgtccggcggcgaggctccgccgtcgccggcaccgcaaactcaatttccggcgcgtgctttactaaggcacgtgagcagctattcgagaaggctgttacgccgagcgacgttgggaaattgaaccgtttggtgataccg

SEQ ID NO: 149009 - DNA, 247 bp, Glycine max
cgtcgctccgcaccagtttcaccgcacgaatatcttgttgtgtggagcgatccgagaaaaactctgtaaacatgttggtttaccaggacctccttacaggtgatgagcttctctctgactccttccgttacaaggaaattgagaatggaatgctgtgggaagttgaggggaagtgggttgttaaaggagcagttgatgtagacattggtgcaaacccttctgctgagggtggaggagaagatgaggg

SEQ ID NO: 149010 - DNA, 239 bp, Glycine max
tacaaattctctgtgttgtgttgtgtacttgtgttaattgtgttgttgttgtaggaaatttaagtgaagagagaatgatgatgaagtctgctatgtgtgcattggtgcttgtggcactggttgtggttgaagtggggcccatcgcttatgctgcggtgacttgcaacccaacacagttgactccttgtcttccggcaattaattcaggttctgcaccttcgagtgcttgttgccagaag

SEQ ID NO: 149011 - DNA, 241 bp, Glycine max
gaaattcgtaagttataactgacaaagttttctgagaaaataaggattattattatcgagagaatggcaggctcctcggaggagggacaagtcattagctgtcacaccgttgacgcatggaacgatcaactccagaagggcaaccaatccaagaaactcattgttgtggattttactgcttcttggtgtggaccatgccgtttcattgcaccattcttggctgagctggctaagaagttca

SEQ ID NO: 149012 - DNA, 237 bp, Glycine max
atttggcaacaattctatgccatcctccaagctcgagaaggctctcggcgaccaattccccgaaggagagcgttactttggcctcgagaattttggcaatacttgttactgcaacagcgttttgcaggcactatacttctgtgttccatttcgagaacaattgctagaatattatgcaaataacaaaagcataacagatgcagaggaaaatcttttgacttgcctagccgacttatt

SEQ ID NO: 149013 - DNA, 221 bp, Glycine max
ctaattttctcttccctcaaactcaatccacagtcctcccaaacccttcaacctacttctcctcaaaccttctttcttctccactccccactaactctttctttcaaaactttgttattccaaacgggtctcaagctgagtacattcacccttacctcgtcaaaacctcaaactcttcactctcagcctcataccctcttctcctcttcaccacagcattt

SEQ ID NO: 149014 - DNA, 240 bp, Glycine max
aaaagtgtgcaacgaactgtcatttggatgggaaagaggcaagaaactgtagaggatgtcccctgtggtaatacagtggctatggttggtcttgaccagttcatcacaaagaatgcaacattgacaaatgagaaggaagtcgatgcccaccctatccgagctatgaagttttctgtctcacctgttgttcgtgttgctgttcaatgtaaggttgcatcagatcttcccaagcttgttgaa

SEQ ID NO: 149015 - DNA, 263 bp, Glycine max
ttcggcactcggctcgaggcgtttttctcttcttcttcttcttcgcataatagcagccacaatggtgaagcactacagacccccggggaagaaaaaggagggaaatgctgccaaatttgtcattaggtcacaagcaatcaagcagcttcaaatcagtctaccccttttcaggaaactatgtattttgaaaggtgtaactccaagggagcctaagaaaaagttcaagggaactcatcagacttattaccatgtcaaggatgttt

SEQ ID NO: 149016 - DNA, 243 bp, Glycine max
ctctttctctctctctctgtctgccatggttctctccaaaaccacctccgaatccgacgtctctgtccactcaaccttcgcttctcgatatgtcagaacttcgcttcccaggtttaagatgccggaggagtcgataccaaaggaggcagcgtatcaaataataaacgatgagttgatgttggatgggaacccaaggttgaacttggcatcatttgtgacaacctggatggagccagagtgtga

SEQ ID NO: 149017 - DNA, 241 bp, Glycine max
ggaaaagtgaaaaccagaagtacgaacgaaagagaagagcgatttagaagtgagagaagatggggttgtcgttcacgaagctgttcagcaggttgtttgcgaagaaggaaatgaggattctgatggtaggtctcgatgctgctggtaagacaaccatcttgtacaagctcaagcttggagaaatcgtcaccactatccccaccatcggatttaatgttgagactgtggagtacaagaacat

SEQ ID NO: 149018 - DNA, 197 bp, Glycine max
ggtctttaagatgaaaacaaaaaatgcaaatgtaggttcctttttttgaacacaaaatatttttacttccattttttgactgaaagaataaaaaaatgatatgattcaacctcaaactcatttgaatgtagctgataatagcggacacgcgaactgatgtgtattcgaatcctaggagctagtaatcgacgatatgc

SEQ ID NO: 149019 - DNA, 209 bp, Glycine max
aagcattcaaaattcaaaagtttattttaaagtcttttcttagacaattctcttctccagtctctaacgcaatcaatataacaatgggttttcatttacctagtatcagaagggcattatttgctgcaaatcaagtatcttcaaaaacagtggacgtgccaaagggatatcttgcagcctatgttggagataaaatgaagcgctttgtg

SEQ ID NO: 149020 - DNA, 235 bp, Glycine max
cgatcactctcacgcgctcctatattcgctcctccaccgtcgctctctcgaacaaccacaacaccatcttcatcacatggcaaacgcagcatctggtatggcagtccatgatgactgcaagttgaggtttttggagctgaaggcaaaaaggacacaccgtttcatagtttttaagattgaggagcagcagaagcaggtcattgtggagaagcttggtgagcctgcccagggctat

SEQ ID NO: 149021 - DNA, 232 bp, Glycine max
atcaaaatgtgagagaccccttttcacttgactgggccaaggccaagaggacattaaaaaatctgaggattaaagcgagcccatctaatcaagaattcaaaataactgggattagtgaactcccttgcaaagatcaaacgtttaccttgaagagaaaaggtggtgatgatgttgctgaggaagaagtgacagtatatgattatttggtaaatatcggcaggatagatcgtcg

SEQ ID NO: 149022 - DNA, 237 bp, Glycine max
agtgaaagtgagaaaaaataaaaatcaaagagcataatgtcagggatcattcacaagattggggagacccttcatgtgggagggcacaagaaggaggaggagcataagggtgagcaccatgctggagaatacaaaggggagcaccatggtgaacacagtagtgagtacaaaggagagcatcatggtgaacacaaagctggagagtaccatggtgagcacaagccagagcacaaagag

SEQ ID NO: 149023 - DNA, 205 bp, Glycine max
ctagattgctagagctagaatttcaacctacctatgtgtactgaacagatctgcttccctacttaaagagagcatcatcctgtgatcagtgtgcttcgtattctctctctctatatatatatggtaaaaagtggttatctcgtgcctcaaaaaaaaataaaaaaaaaaaaaaaaaaaataaaaaaaaaaaaaaaaaaaagaaaaa

SEQ ID NO: 149024 - DNA, 238 bp, Glycine max
ccattttgcaaaaagttttcaattgaaccacgcgcacctgagttctacttctctcagaagattgactacctgaaggacaaagtacaaccttcttttgtgaaggaacgtagagcaatgaagagggagtatgaagagtttaaagtgcgagttaatgctttggtagcaaaggctcagaaaacaccagatgaaggatggactatgcaagatggaacttcatggccaggaaacaactcacgtg

SEQ ID NO: 149025 - DNA, 235 bp, Glycine max
agcagacttaacaacagcacaaagcgggttactgtctgttcaagctaccatctctctctctctttcttagtgcctccttgccagaagttaaaatggcccaagaaactttcctattcacatctgaatcagtgaacgaggggcaccctgacaagctctgtgaccagatctccgatgctgtgctcgatgcatgcttggagcaggaccctgacagcaaggttgcctgtgaaacctgcac

SEQ ID NO: 149026 - DNA, 235 bp, Glycine max
gccatgatggtcatcagattgtagagctatggacaaaaagaaacttcagatgtgattgtgggaattcaaaatttggtgaattctactgcaagattttcccaaataaagatgtagaaaatgttgagaattcatacaatcacaactttaaaggttcttattgctcatgtggtcgcccttatcctgatctagatgctgaagaacaagtagagatgatacagtgctgtctatgtgagga

SEQ ID NO: 149027 - DNA, 234 bp, Glycine max
tgctgtacagcgaggatattcattacatgcttggtgcattaaggacccttggactgcgtgtggaagacgaccaaacaaccaaacaagcaattgtggaaggctgtgggggattgtttcccactattaaagaatctaaagatgaaatcaatttattccttggaagtgctggtactgcgatgcgtcctttgacagcagctgtagttgctgcaggtggaaatgcaagctacgtacttg

SEQ ID NO: 149028 - DNA, 234 bp, Glycine max
aagataatgacaacaaagaagtcaaagatattattgatattcttctccagctacttgatgatcgttccttcacctttgatctcactctcgaccacataaaagccgtgctcatgaacatctttatagcaggaacagacccgagttccgcgacaatagtttgggcaatgaatgcactgttgaagaatcccaatgtgatgagcaaggttcaaggagaagtgagacatctattcggtg

SEQ ID NO: 149029 - DNA, 238 bp, Glycine max
atatagcccaagccctatacaaccaaaccctaacacacacccatttgattcagtttccatggctagcctcaaggttgcatttttggctgcagtgctctgcatggttgtggtgagtgcacccatggcacatgcagctatcacgtgcgggcaggtgacgaatagcctgatcaattgcatcggttacctccagaacggaggaacgccgccgtcgggatgctgcaacggagtgaagagcctc

SEQ ID NO: 149030 - DNA, 241 bp, Glycine max
ctacaaaatcccatttaccaattcaaaaccctaactccgttcgaagcaccatatcgtgatggcaccataggcagagaagaagccagcagagaagaagcctgtggaggagaagaaatcgacggtgggagacaaggctccggcggagaagaagccaaaggccggaaagaagcttccgaaagagggaagcgccggcggagaaggtaagaagaagaagagaaacaagaagagcgtggagacatac

SEQ ID NO: 149031 - DNA, 278 bp, Glycine max
cactgatctccattcccattccatggcttccactgaatcatcccctttcaagaaaattcagattcaaagggatgacactacatttgacgcatatgtggttggaaaagaggatgctcctggaattgttgtgattcaggagtggtggggtgtggattacgaaattaagaaccatgccgtgaagatttctcagcttggtagtgggttaaagctcttattccagatttatacagaggaaaggttggtctggatgttgctgaagctcagcatttgatggatgg

SEQ ID NO: 149032 - DNA, 275 bp, Glycine max
caaaaataagacattgtttggtttggttacttgctcgaatttcctcgaatcgcttaatttgtatttgattagttaaaccgcaacgcggaatctcttttctcgaactggctaactctcaggcaagtggttcggacgctgattccagcaacaagcggctggtgctcgcactgtatgacgccctaaactccggcgactccgacgccgtcgtcaagatcgtcgccgccgacctcgagtggtggttccatggtccgccctcacaccagtttttgatgcgc

SEQ ID NO: 149033 - DNA, 275 bp, Glycine max
gtaaaaaaaaaaaaaaaaaccagtggtgcgcgatgccaccgaagttcgatcccttgcaggtggtggacgtgttcgtccgattaaccggcggcgaggtcggcgcggcgagttccctcgctccaaaaatcggtccattgggtctctccccaaagaagatcggagaagacattgcgaaggaaaccgcgaaggactggaagggcctccgcgtaacggtgaagctgacattacagaaccggcaggcgaaggtaacggtggtgccctccgccgccgcgttt

SEQ ID NO: 149034 - DNA, 270 bp, Glycine max
gaagaagaataagaagaaggttttgatcggatgcgatgagcacacaaggacaagtgattgatgaggcggttctggatgacataatccggcgcctaacggaggtccgattggcccgacccggaaagcaggttcagctctccgagtctgagatcaagcaactttgcgtcgcttccagagacatcttcattaaccagcccatttgcttgaactcgaagcccccatcaagatttgtggtgacattcatgggcagtacagtgatttgttaaggct

SEQ ID NO: 149035 - DNA, 268 bp, Glycine max
cataaacgccgcccaaaaccatttatagggttttcttttctttgccaagaaaatgagagagtgcatttcaatccacattggtcaggccggtatccaggtcggaaacgcctgctgggaactctattgccttgaacacggcattcagcccgatgggcagatgccgagtgacaagaccgttggaggaggagacgacgcctcaacacattcttcagcgagaccggcgccggaaagcacgtgcctcgcgccgtcttcgtggatcttgagccca

SEQ ID NO: 149036 - DNA, 270 bp, Glycine max
tgatttttggaagtgaattttttgaagaatatattggacaacttgcactggcttctttagcatctatagaaattgaggaagactcacaggatcctgaagtttgaggcagagaattcaagaaaagatgaaagcttggcagaaggaaagggagcaaaagctttcaacatttctgaaagatcgcctgcaaccatttgttgatggtcgagaagatgaatttacagcatgggcaaaatcagaagcacgtagtctttctaaagctgcttttggaga

SEQ ID NO: 149037 - DNA, 270 bp, Glycine max
atcgctacagagaaaccttgatgatgcgaaacatgaggcagaaatgctagcaagtgagcttacaactgccaaggaacacttgaaggaagcacaagcagagctgcaaggtgtgtcaaaagaattgacagctgctcttgaaaagaatgatagcctacaaaaagaattagttgaagtctacaaaaaggctgaaagcacagcagaggatttgaaggaacaaaaacagttagttgcttctctgaacaaagatttacaagcattagagcagcaagt

SEQ ID NO: 149038 - DNA, 265 bp, Glycine max
ggtgagcaaatatggagctttgttggcaaacatccatccatggttcttgaagaagcatggagataaaggggtgtgagagggtcctcaccactcacactcctccacttaaaacagtttgttttggcttagctttggcttctctaatcaacaagggatgtgttctaacattctctcttgagtggcagaagcagattgcattctccaaaggaggagaggctttggctacagcctggcaaaccggcaagtcacgaaaaggcaatggact

SEQ ID NO: 149039 - DNA, 266 bp, Glycine max
  unsure (1)..(266): unsure at all n locations
aagaagagcatcactgaactaacaaagcaaccctatgtcgaaggtggtttgtgtcaccggagccagcggcgccntcggatcatgggtggtcctactcctcctccagcgtggttacaccgtccatgccaccgtccaagatatcaaggatgaaaatgagacgaaacatttggaggaaatggaaggagcaaagagtcatctccatttttttgaaatggatcttcttgacatcgactccattgccgctgccataaagggttgttccggcg

SEQ ID NO: 149040 - DNA, 261 bp, Glycine max
caaagtttgaaatttctttgtctttgatttcatgtttttgttaccctgattgatcatatttttttcatattaacaattgaaataaaaaaaaaaaaaaaaaaaaaaaaaaaaaaaaaaaaaaaaaaaaaaaaaaaaaaaaaaaaggggggccccccccctttttgtccctccccccccgggttttttttccggccggctcctggggggtccccccttttccccttggggggttttttttagccttggggtaaattgggttcc

SEQ ID NO: 149041 - DNA, 262 bp, Glycine max
acagatgcgaggggtagtacaaaccgcccttgttctatgctcttcagtgtacgtaatgataagcttctttgggttcctcctatttggcgaaggaactcttgatgatgtgctggccaatttcgataccaatcttggaattcctttcggttctgtgctcaatgatgctgttcgtataagctacgccgcacactgatgcttgtacttccagttgtcttctttccattgcgtctcaacatagatggcctcctcttctctaaatcaa

SEQ ID NO: 149042 - DNA, 272 bp, Glycine max
cacggacgagaccccagaattgatgccattgagtcatgttcttgcaactaaactcggtgctcgtctcaccgaggttcgcaagaacggaacctgcccatggttgaggcctgatgggaagacccaagtgactgttgagtattacaatgacaacggtgccatggttccagttcgtagaccacactgtgcttatctccaccaacatgatgagactgtgaccaacgacgaaattgcagctgacctcaaggagcatgtgatcaagccggtgatcccgg

SEQ ID NO: 149043 - DNA, 269 bp, Glycine max
gtgtaggtccttcgaagagcagcatgccgcatgtcatcgatgggatattgaatgcggttgaggttatgaagttgaacaattctcgcagtagtcttgatggagaggtttgtgctgatttagttatgaagagctggtcgacgaggaataatacaggtatgctgtttactttggtggctgctgtttgcattgtgttgagcttgtccatagtgattcgtaggaggttgattgggtcgagggaatctgtgtcttggtcaaggttgcctgtgaat

SEQ ID NO: 149044 - DNA, 267 bp, Glycine max
gcgagctcttcctcgagaagttgatccagtggtttacaatatgttgcatgaagatcctggtaatatcagctattcagctgttggtggcttatctgatcagatcagggaattgagggagtcaattgaactacctctgatgaatcctgagctctttcttcgagttggaattaaacctccaaagggtgttctcctttacgggcctcctggtactggtaaaacattgttagccagggctattgccagtaatatagatgctaacttcctaaa

SEQ ID NO: 149045 - DNA, 265 bp, Glycine max
gtcaaaactttcatctttgtcatccacttaacccaggtgtaaaaatgtcagcagtgaacatgtccactatgagacttccaagagcttccttgtctggaacaacaccagctaggagatcatgtgctcttacaaagagtccatcatctttgaggtctgtgaagaatgtgtctaaagtgtttggattgaaatcatctcctttagagtgtcagcaatggcggtatataaagtgaagctgattggaccggacggtgaagagaatgaattt

SEQ ID NO: 149046 - DNA, 261 bp, Glycine max
tgttaccaatgtaaactgtaaagcataatgtccttctaaagatgagtgtgcaaatgaatcatgaaaacatgttgttagtcctttactggagattcatcgtgcagtcgggtctgtactccccaataaaattcatcatgcagtcagatgtttattccccaatgaaattgattgctgtaaaaaaaaaaaaaaaaaaaaaaaaaaaaaaaaaaaaaaaaaaaaaaaaaaacaaacatcatagaaaaaataaacagtggaaggttc

SEQ ID NO: 149047 - DNA, 264 bp, Glycine max
aggtgttatccctgtggtcaagacatccattggcggtactcgtattattggtcgtctttgtgctggtaacaagaatgggcttctcttgccccataccaccacagaccaagaacttcaacatttgagaaacagtctacctgatcaagttgttgttcagcgaatagacgaaaggttatctgctctgggaaattgtatagcatgtaatgaccatgtggccctcacacacactgatcttgacagggagactgaagagatgattgcaga

SEQ ID NO: 149048 - DNA, 259 bp, Glycine max
ccccaatcgtagccgtcgcactttgcgttttctgcgtcatctccgattccccgacaatggccacccaaatgagcaagaagagaaagttcgtagctgatggagtgttcttcgctgaactgaacgaggttctgacaagggagttagccgaggacggatactccggcgtggaagttagggttacgccgatgcgaccgaaatcatcatcagagccaccagaacccaagccgttctcggtgagaagggaaggagaatcagggaa

SEQ ID NO: 149049 - DNA, 260 bp, Glycine max
gtgccaggtggttatggagtggccactggaggacctttggcctggggtctttgttacaatcatgaaatgagtcctatgcagtcatactgtgatgactacttcaaactcacatacccctgtactcctggtgctgactactatggacgtggagccattcccattttttggaactacaactatggtgctgtcggagaagctttgaagattgacctactaagccatccagaatacatagagcagaatgccacccttgctttcca

SEQ ID NO: 149050 - DNA, 257 bp, Glycine max
agaaaaggaaagaaaactctcaaaaaactattatagcaatggcagaacaaaaccaaaaccaaacaactgaagctggaaggcaccaagaggttggtcacaagagccttctccagagtgatgctctttaccagtatattctggagacaagtgtctacccaagagaacctgaatccatgaaagaactgagagagttgacagcaaaacacccatggaacatcatgacaacctctgcagacgaagggcagttcttgaacatg

SEQ ID NO: 149051 - DNA, 260 bp, Glycine max
ctcttaaggaggcttttgagatcttttgcaacaagggtgttgctggaagctcaagtgcagaactgcttgccactttctgtgacaatattcttaagaaaggaggaagtgaaaaattgagtgatgaagcaattgaagaaactcttgaaaaggttgtcaagttgcttgcctatattagcgacaaagatttgtttgctgaattttataggaagaagcttgctcgaaggctcctttttgacaagagtgccaatgatgatcatgag

SEQ ID NO: 149052 - DNA, 271 bp, Glycine max
tgttcttgcaactaaactcggtgctcgtctcaccgaggttcgcaagaacggaacctgcccatggttgaggcctgatgggaagacccaagtgactgttgagtattacaatgacaacggtgccatggttccagttcgtgtccacactgtgcttatctccacccaacatgatgagactgtgaccaacgacgaaattgcagtgacctcaaggagcatgtgatcaagccggtgatcccggagaagtaccttgatgagaagaccattttccacttga

SEQ ID NO: 149053 - DNA, 269 bp, Glycine max
gtgaaaagtgaaaagtgaaaatggacttggaagcagtgaagaggtacttagagaaaggaggagaaacagcatcggcggtggatgggttgcctccgaggtttctggaaccgttaataatgaacgctcttaaggtcgatctcatcgaaactggtcgcgttgtctgctccatgaagatacctccgcgtttactcaatgtgggaattcgttacacggtggcgccatcgctgctctggtcgacgtggtggggtccgctgcgattcccaccgttg

SEQ ID NO: 149054 - DNA, 264 bp, Glycine max
gaaaaagttagggtttgtaactttgtcttttgcttgcgaatctgaatcgaataataatcaatcaatcatcatgtcgtcggcgaagaagatcacactgaagagttcggacggcgaggctttcgaggtggacgaggcggtggcgctggagtctcagacgataaagcacatgatcgaggacgactgcgccgacacggcatccctctgccgaacgtgacgagcaagatcctggcgaaggtgatcgagtactgcaagaagcacgtcgag

SEQ ID NO: 149055 - DNA, 259 bp, Glycine max
gcctggatcacttgctccaactggattgtatatcggtggcaccaaatacatggtcatccagggtgagcctggtgctgtcattcgagggaagaagggtcctggtggtgttactgtgaagaagaccggtgcggccttgatcattggcatttatgatgaaccaatgactccaggtcaatgcaacatggtagttgaaaggcttggcgattatctcattgatcagggtctctaatctttgctttatgtcttgttatcgtgcata

SEQ ID NO: 149056 - DNA, 257 bp, Glycine max
cccagggaaccaagattgcttctgaaggactcaaacatagagtgtttgaggtctcattggctgatctccaaggagatgaagaccatgccttcaagaagattcgtttgagagctgaggatgttcaagggaaaaatgttctgacaaacttttggggaatggatttcacaactgataagttgaggtcctggtgcggaaatggcaaactttaattgaagctcatgtggatgtcaagaccactgataattatactttgagga

SEQ ID NO: 149057 - DNA, 257 bp, Glycine max
aggaaactaggtgttcattttttagcaagagaggccttcatcaagtgggaatgtggatgcatgaatgccattgtggagcatcatctacttcatttgattgtttagggttaaacaatggttgggatctcccaagtagtttatgtccctgttgtgagcctagctctccggtatcagagcagttgcattgttggagagactactataagtggagatgcatcccgctagactcgcctgttgctttgcttcttcaatggcca

SEQ ID NO: 149058 - DNA, 258 bp, Glycine max
gagatgaccagcctcaaggactatgttaccaggatgaaggaagggcagaatgacatctactacattactggtgaaagcaagaaagctgttgagaattcccctttccttgaaaagcttaagaagaaggggttcgaggttctctacatggttgatgctattgacgagtatgctgttggtcagcttaaggaatttgagggaaagaagttggtctctgctactaaggaaggcctgaaacttgacgagagcgaagacgaaaag

SEQ ID NO: 149059 - DNA, 257 bp, Glycine max
caatgcaggccgagctgcgtacctagctgcaaggaaagagcagtctgcactcagggctgtgattaaatgcattgaagaatacaaacttgaggatgagttcccaccagagaatctgaagaagcgacttgaccagttggagaaggtgaagacggtgaagaccgagaaaaggaaaccggttgctgttcctgccaataagagaactcgagcaagcaacagcaatggaggtccaatgccaccagccaaagctgggcgtttga

SEQ ID NO: 149060 - DNA, 265 bp, Glycine max
tatctctgcctttagagaatgtttgtctctatcatggaaaaatccttatgttcttcgccttgctttctccgctggaattggaggctttctctttggctatgacacaggagtcatatctggagtacttttgtacatcagagatgatttcaaagaggtggatagaaagacgtggctgcaggaagctatagtgatatggcacttgctggagcaatcataggagcttcagttggtggatggatcaacgatcgatttgggagaaagaaag

SEQ ID NO: 149061 - DNA, 255 bp, Glycine max
ctcttttttctctctcttgcaaaacctaattttcatttcttccctcaaatttcaaaatgcgtgagatccttcacatccagggtggccaatgcggcaaccagatcggcgccaagttctgggaggtggtttgcgcggagacgggatcgaccctaccggaaggtacggtggggactcggagttgcactcgagaggatcaatgtctactacaacgaggccagttgcggtcggttcgtgccgcgcgcggttctcatggac

SEQ ID NO: 149062 - DNA, 265 bp, Glycine max
ccaccaccacctcgctctcttcttccctgcttcacaatttttattttaatgatactattttgttattgttaagacggcatcatcagggaaatggatcgggtgaagggtccatggagcccagaagaggacgaggctttgcggaggctggttcaggcccacgggcctcgaaactggtcggtgataagcaagtcgttccgggacgatccgggaaatcgtgccgcttacggtggtgcaaccagctctcgccgcaggtggcccaccgccc

SEQ ID NO: 149063 - DNA, 261 bp, Glycine max
tgcggaataacgaagcctcctcgttcttcttcttccgccctttctctctctagaaccgtacggtcgtttctttctctctcctcaaccggagacagcgtcgccttcttttctgaatctcgcggtgttgttagttctgcggcggttgtagttccggcggcgatgggacagcaatcgttgatctacagcttcgtcgctcgcggcaccgtgatcctagcggagtacaccgagttcaccggaaacttcaccagcgtggcggcgcag

SEQ ID NO: 149064 - DNA, 255 bp, Glycine max
agattttcagactatgctcttgtgataagagcattgggatcactagaaggcacagctaaagctctggatcctgattttaaagtcattcagagtgcatatccttttgtcattgggagacttattgcagacccaagccctgatatgagaagaattctgagggaacttctcattcgtaacaatggatccataaggtggaatcgtctagaacgcttggtagcagcaatctctgaacaagcttctgagataactggagac

SEQ ID NO: 149065 - DNA, 253 bp, Glycine max
tggaaacctcagagtatctaaaaaatgattgccttgtcatgcattgcactgttggtgttgttaaaactcgttttgagggatctaaacagggtgttattgtgccacagtcagacatgggccgggattttaaggacttgttggaatctgaggtcggttgtgacatacttttcaaggtcaaaagtgaaagcttcaaagctcataagttgatacttgcagcccgatctcctgtgtttagagcccagttttttgggct

SEQ ID NO: 149066 - DNA, 262 bp, Glycine max
aaacactcataacacaaagcacaaagcaaagctcatccttgagttaaaaaatggcagcagcttcttccatggctctctcatccccatccttggctggcaaggccgtgaagctgggcccatcagccccagaagtgggaagggtgagcatgaggaagaccgtcaccaagcaggtctcctcaggaagcccatggtacggcccagaccgagtcaagtacttgggcccattctctggcgagcccccgtcctacctaaccggtgagtt

SEQ ID NO: 149067 - DNA, 257 bp, Glycine max
tctagtcctgttatttctcagcgcgtaaagcatggctttgttggtggagaaaaccacgagtggtcgcgagtacaaggtcaaggacctttcccaggccgacttcggccgcctcgagatcgagctggccgaggttgagatgcccggcctcatggcctgtcggaccgagttcggcccctcccagcccttcaagggggcccgcatcaccggctccctccacatgaccatccagtccgccgttctcattgagaccctcaccg

SEQ ID NO: 149068 - DNA, 256 bp, Glycine max
ggcagtggaaatgggaaagttggaaaagaagtctatttggaaaaacatcttccgaccttgccaacgttgggagcaaggcaggatgcgttcagtattttctttgaatgggatgctagttttggaattccaggagcattttacatcaaaaactgtatgactgatgagtttttcctcgtcagtgttaactcgaggacattccaaaccatggaaccattgaatttgtttgcaactcatgggtttacaacttcaggagtta

SEQ ID NO: 149069 - DNA, 256 bp, Glycine max
gtatttcgctcgtgactacgaacattgcaggaagaaagaaagaaaggcgatggacctcggaacctatgacgtgccagaaggagtggacattctgggaagatacgatgcagagtttgcaaaaatcctcgcaaaagatgctttgaaattcgttgctgaactgcaacgtgagttccggaacgatatcaacatgcattagagcgcagaagagaggcaaagaagaagtacaatgaagggtctcttccggggtttgatcctg

SEQ ID NO: 149070 - DNA, 254 bp, Glycine max
ctaaatatggctgacttgttggaatggtcaaagcaagataagaaacgaatgcttcatgtcgtctaccgtgttggtgaccttgatcgcaccatcaaattttacacagaatgtttaggaatgaagcttttgaggcaaagagatatcccagaggagaaatatgctaatgcttttcttggatttggcctgaagaatcccattttgttgttgaattaacatataattatggggttacctcgtatgacattggcgatggc

SEQ ID NO: 149071 - DNA, 251 bp, Glycine max
gtttttgttgtcaatgttctaggttacatagcatacaactttgtaataggtgcttactcatattggggccctaaagctggttatagtatatataacatgactaatgcagatatgatgtttggaggaattactgttgtatgtggaatattgggcaccgtagcaggaggctttgttcttgattcatgactaacacaatatcaaatgcatttaagcttctctcaatagcaacatttattggtggtgcatgctgt

SEQ ID NO: 149072 - DNA, 253 bp, Glycine max
ctgccgtgatgaattccgtaccctccattacctttgtactagcaatcatttttcgattggagcgcatgaactttaaggagctaggatgtatagccaaagtgattggcactgcagttagtcttggaggtgcttttctaatggcactgtacaaaggtcctgttgttaacattgcaggctcatcggctagccacgtgggacagcctgagaatgtgaacgacccttctggcagtcactggctcattggtgcatgttt

SEQ ID NO: 149073 - DNA, 254 bp, Glycine max
atggagtcaaggcttttacacaggatctaatagcaggtgggactgagagttcagcagtaacagtggaatgggcaatcacagagctattgagaaggccagagattttcaagaaggcaacagaggagctagacagggtaataggtagagaaagatgggttgaagagaaggacattgtaaatttgccttatgtgaatgccattgcaaaggaagcaatgaggctgcaccctgtggcaccaatgttggtgccaagacta

SEQ ID NO: 149074 - DNA, 250 bp, Glycine max
caaagaatgcaggtccgttgtcaatcaatatggacaaacaatcttggaattgctcttggctgaagcaaagccaaaaaagatctgctcacaaattggattgtgtacctttgatgggactcatggtgttagcatgggtatcgagagtgtggtggataagaatgaaaaaaaatcatctggtggcattcgggatgctggttgttctgcatgtgagatggctgttatttggatgcagaaccagctgaggcagaat

SEQ ID NO: 149075 - DNA, 247 bp, Glycine max
ccgccattatgctcaaattggatagtgggtggaattggttcatcaccttgagtgcacgggattatcctctcataactcaggatgatctgtcccatgttttctcttctgttagtagagacctcaatttcattgatcacactggtgaccttggatggaaagagagtgataggttccagccaattgtagttgacccgggactatatttagcaaggaaaagtcaaatttttcaagctacagaaaagaggcc

SEQ ID NO: 149076 - DNA, 245 bp, Glycine max
ccactcttcatttggtactccgtctacgtggtggaatgcaaatctttgttaagactctgaccggaaagaccatcacccttgaggtggagagctctgacaccattgacaatgttaaggccaagattcaggacaaagagggtatcccaccagatcaacagaggctcatctttgctggaaagcagcttgaggatggccgtacccttgctgattacaacatccagaaggagtccactcttcacttggta

SEQ ID NO: 149077 - DNA, 243 bp, Glycine max
aagcgatttagtcgaaaagaagagcagcgaaaagctggagcatgcggattgggaggatgttatcactctccttgatgataacgaatggccagaaaaaacaccaggcttcagggaaaccatggcgaaatatcgggccgagctaaagaaattggcagagaaagtgatggaggtgatggatgagaatcttggcttaaccaaagggtacatcaagaaggcactgaatggtggagatggagacaatgc

SEQ ID NO: 149078 - DNA, 241 bp, Glycine max
gccctttgaaaatcgttcaaaaccaatctatctatctatttggtataagcatggagctttgttggcaaaaatccatccatggctcttaaagaagcttggaggattttgtgtgagagggttctcacccttcacactccacctcctacagtttgcttatgctttagccattggtttctctaatcaatcaccacaaaagggtatacatggaggaacataattctctgagtggcaagaagcagag

SEQ ID NO: 149079 - DNA, 239 bp, Glycine max
tcttaagctcgccgacttcggttcggcggagtggttcggcgacgggaggagcatgagcggcgtggtggggacgccgtactacgtggcgccggaggttctgttggggagggagtacgatgagaaggttgatgtgtggagctgtggggtgattttgtatataatgttggcggggattccccctttttacggagactctgctgctgagatctttgaggctgtggttagggctaacctcaggt

SEQ ID NO: 149080 - DNA, 241 bp, Glycine max
ctcttttttctctctcttgcaaaacctaattttcatttcttccctcaaatttcaaaatgcgtgagatccttcacatccagggtggccaatgcggcaaccagatcggcgccaagttctgggaggtggtttgcgcggagcacgggatcgaccctaccggaaggtacggtggggactcggagttgcagctcgagaggatcaatgtctactacaacgaggccagttgcggtctgttcgtgccgcg

SEQ ID NO: 149081 - DNA, 234 bp, Glycine max
aacctacacatcctattcgtttgggtctggctctaaatttctctgtgttttattatgagataatgaattcacctgaaagggcctgccatcttgcaaagcaagcctttgatgatgctgtctcagacctggataccctgaatgaggattcttacaaggacagtaccttgattatgcagctgttgagggataaccttactttatggacttctgatatccccgaagagggtgaggacc

SEQ ID NO: 149082 - DNA, 249 bp, Glycine max
ccaaaattgcagaaacgggaactttcaagggtagcctcactggaataagcattggaactgtgacggaggcccaaaaagtttggggtgttttccaagctcttggtaacatagccttcgcctattcatattctttcgttctcctagaaattcaggataccatcaaatctccaccatctgaagtaaaaacaatgaagaaggctgcaaagttaagtattgcagtgaccacaacattttatatgctttgtggct

SEQ ID NO: 149083 - DNA, 242 bp, Glycine max
gaactttctgaattcttcactttgatcatcatcttcttcaattccagcaaggatgtcacagcaaggcgaatcatcggacccgaaatcggggaagaaggacttctcgaccgcgattctggaacgtaaaaagtcgccgaaccggcttgttgtggatgaggctgtcaacgacgacaactccgtagtgaccatgcacccccaaaccatggaaaagcttcagcttttccgaggggacactatcctta

SEQ ID NO: 149084 - DNA, 244 bp, Glycine max
gttgtaactcgttcttcttcttttgttgttctgtgtttgtgtttgttttttctctcacctgaaaatgtcttgctgcggtggtaactgtggttgcggaagctcctgcaagtgcggcaacggctgcggaggctgcaagatgtacccagacttgagctacactgagtcaaccaccaccgagaccttggtcatgggagtggcacctgttaaggctcaatttgagggtgctgaaatgggtgtgcccgct

SEQ ID NO: 149085 - DNA, 243 bp, Glycine max
gattttcgccaaagcaacaggttgcaggaaacaatggatcggttggctgcaaagttagaatcaatttataatgctgcaggagggaagaaaataaacattataactcattctatgggcggtcttttggtgaaatgtttcatgtgcctgcaaagcgatatttttgagaaatatgttaagaattgggttgcaatttgtgcgccattccagggtgcaccaggaaccatcaattctacctttttaaat

SEQ ID NO: 149086 - DNA, 242 bp, Glycine max
gccctttgaaaatcgttcaaaaccaatctatctatctatttggtataagcatggagctttgttggcaaaaatccatccatggctcttaaagaagcttggaggattttgtgtgagagggttctcacccttcacactccacctcctacagtttgcttatgctttagccattggtttctctaatcaatcaccacaaaagggtatacatggaggaaccataattctctgagtggcatgaagcagag

SEQ ID NO: 149087 - DNA, 238 bp, Glycine max
ttgccatccaagtttttctggaaatgagagctgtgggatgcaagcccaatatttgcaccttcaatgcccttattaagatgcatggcaaccgaggaaagtttgccgagatgatgaaagtttttgatgatatcaagctctgcaattgctcccctgatattgttacttggaatacccttttggctgtctttggacagaatggaatggactctcaggtctctggaatatttaaggaaatgaa

SEQ ID NO: 149088 - DNA, 239 bp, Glycine max
caccaactaccactttattgtccctgaattgggccctgatgtgaacttcacctatggttctcacaaggctgttgatgaatacaaggaggccaaggcgcttggagtggataccattcccgtactcgttggccctgttacatacttgttgctctccaagcctgccaagggagtcgagaaatccttttctctcctctctctccttcccaaggttcttgctgtctacaaggaagttattgctg

SEQ ID NO: 149089 - DNA, 244 bp, Glycine max
cccacttgtgcctgtggctgccagaacaggaggaactgtgtcaagagtgactctaaacgtatcaacatggtggggattcacactccaaagaaagacaatgaaccattgctacagtgcactcatcatatgtgtccaataagggtgcactggcacgtgaagctcaactataaggactattggcgagtcaaggttgctgtgacgaatttcaactacaggatgaattactccctctggactcttgctg

SEQ ID NO: 149090 - DNA, 249 bp, Glycine max
ctcgacaatgaagccatttatgacatctgcaggcgttcactggacattgagaggccaacctacaccaaccttaatcgtttagtttctcaggtgatatcatcactgactgcttccctgaggtttgatggagccttgaatgttgatgtcaatgaattccagaccaaccttgtgccataccccaggattcattttatgctttcatcttatgctcctgtaatttcagccgagaaggctcaccatgagcagcta

SEQ ID NO: 149091 - DNA, 241 bp, Glycine max
cgcttactggaaatctggcaagcatcaagaacgtgctgtgttcgatttgtattttcggaggaatccgtttggtggggactataccgtcttcgctggcttggaagagtgcataaggttcatagctaatttcacgctcgctgaagagtagatcgattttgttagggaatgtttatcttcctcttgtgaggatggattctttgactacctcagaggacttgactgctctgatgttgaggtgtat

SEQ ID NO: 149092 - DNA, 243 bp, Glycine max
atttttcttcctcagtagtgtcatttacgcttctcttctctgcagcaactatgcctaaccctaaggtcttcttcgacatgaccatcggcggtcaatctgctggccgcatcgtgatggagctctacgccgacgtcactccccgcaccgccgagaacttccgcgcgctttgcaccggcgagaagggcgtagggcggagcggcaagcccctccactacaagggctcgtccttccaccgcgtgatcc

SEQ ID NO: 149093 - DNA, 244 bp, Glycine max
aaaagattgaagcatttgttggttcaaaaacagttatccagatacgaagtcatgcacagaagtattttcttaaagttcagaagaagggaacaagtgaacatgtacctcctccccggccaaagagaaaagctgctcgcccataccctcaaaaagctcctaaaactcctactgtatcccaagttatgggcccattgcaatcttcatcttctttcattgaacctgcatacatttatatcccggattc

SEQ ID NO: 149094 - DNA, 242 bp, Glycine max
caatatattccattctctctgtgtatttccctacctctcccttcaagatgcagatcttcgtcaagaccctcaccggcaagaccatcacccttgaggtggaaagctctgacaccatcgacaacgtcaaggccaagatccaggacaaggaaggaatccccccggaccagcaacgtctcattttcgccggaaagcaacttgaggacggccgtacccttgctgactacaacattcagaaggagagt

SEQ ID NO: 149095 - DNA, 239 bp, Glycine max
gggtgcagatgtctatcctgctgcacagcaaatgctaattcatcaagggaaagttcttagggatgcttctaccttggaggagaataaagtagttgaaaatactttcattgtaattatgctatcaaagagtaagagcccatccggtgaaggatctactacttcaactgctccatcaaccaaggccccacagacaagtacagttcctgcttcaacccctccagcgtcagtagttcctcaag

SEQ ID NO: 149096 - DNA, 237 bp, Glycine max
cttttggatgacaatcttagcaaggggaaacgtcctgttgctgctggccaggcctactttatatctgatggctccccagtcaattcttttgaattcctgcaccctctacttaggagtttggattatgaactgccaaagacttccctaccggtcgaccgtgctcttgttctcagcaggatttgctgggctgtttatacaatcctatatccatggctcaatcggtggtggcttccacag

SEQ ID NO: 149097 - DNA, 241 bp, Glycine max
cgggaaggatctcatttgggccgattatgggccgcactacgtgaaggtgaggaaggtttgcacgctcgagcttttcacgccgaagcgcctcgagtccctcaggcccattagggaggacgaggtcaccaccatggttgagtccgtttacaatcactgcaccaccactggaaatttagggaaagcaatattggtgaggaagcacttggggtctgtggcattcaacaacatcaccaggttggca

SEQ ID NO: 149098 - DNA, 245 bp, Glycine max
tccgaaccctcgatcactctcacgcgctcctatattcgctcctccaccgtcgctctctcgaacaaccacaacaccatcttcatcacatggcaaacgcagcatctggtatggcagtccatgatgactgcaagttgaggtttttggagctgaaggcaaaaaggacacaccgtttcatagtttttaagattgaggagcagcagaagcaggtcattgtggagaagcttggtgagcctgcccagggctat

SEQ ID NO: 149099 - DNA, 243 bp, Glycine max
tatggaaataccctaagttgtgggtgggattcttgaagtgtgtgcagttgacaaaaccacagtcatttggcattttgcttcagctgcctccagcacaattggaaaatgcattaaatagaattgcagccttgaaggcaccattgattgcgcatgcaagccagccagatatacaatctaaacttccgagggctgtgctggttgttctgggacttgcttccgattctcaggtttcaagtcaagcac

SEQ ID NO: 149100 - DNA, 243 bp, Glycine max
aaacactcataacacaaagcacaaagcaaagctcatccttgagttaaaaaatggcagcagcttcttccatggctctctcatccccatccttggctggcaaggccgtgaagctgggcccatcagccccagaagtgggaagggtgagcatgaggaagaccgtcaccaagcaggtctcctcaggaagcccatggtacggcccagaccgagtcaagtacttgggcccattctctggcgagcccccgt

SEQ ID NO: 149101 - DNA, 240 bp, Glycine max
aaaaggttttagatcgtaaaaactaatcactacgaaaacaagagatatcgaagatggctctgcccaaagctaaggagatcgtgtcgtccaattccgtcgtcgttttcagcaaaacctattgccctttctgcgtcgatgtgaagaagctcttcggtgacctcggtgccaattacaaggccatcgaactcgacactgaatccgatggaaaagagctccaagcagcattagttgagtggacgg

SEQ ID NO: 149102 - DNA, 239 bp, Glycine max
aaaaaaaaaataaaaaaggagaagcatactcagcgcggcggtggaagatggtggcgacggcgatcgaggaagtgcgaaccctctggattggcgatttacagtactgggtggacgagtcctatctctctcagtgcttcgcccacaacggcgaagtggtttccattaaaatcatccgcaacaagctaacgggccagcccgagggctacggcttcgtcgagttcgtctcgcacgcctcggcc

SEQ ID NO: 149103 - DNA, 235 bp, Glycine max
ctcaccatattcttgttctcatttttctgccacagtctctcaattaggttcctcaaccaattggccatcctcatttgcgcaccacaagatgcaatgtcattggtgaccccagagtacttaaccgagattttggagaaaggaacttttttgaacactgttgggaacaggatcttctactcagcacttcctcttttgctttggatctttgggccagtgctggttttcttgtgctcta

SEQ ID NO: 149104 - DNA, 236 bp, Glycine max
ctcgagccgaatcggctcgagagagaggagatgtcggtggagcagacaagcagcagggaaggacggaggagggaaaactgcagcagggaattgcagagttctacgacgagtcgtctggcatatgggagaacatttggggcgatcacatgcaccacggcttttatgacccggattccaccgtttctgtttctgatcatcgcgctgctcagatccgaatgatccaagaatctcttcgt

SEQ ID NO: 149105 - DNA, 234 bp, Glycine max
gaaatttggtcttcttgcaaattggcaacagaggtttaccatggaagatatactgacccagctgaagaaggaaatggcggcttcacataaccgcaagcttgtccaacctcctgaaggtactcactattagtgtccaagatcacactgatattggatcatattgcatttgcagtatgcaatatatagtatgtaatactctggatccttctaaattcaagaacatactggggaatg

SEQ ID NO: 149106 - DNA, 234 bp, Glycine max
cgaggctgttcagaaggctgctgctgcattgaagggttcagatcatcgccgtgcaacaaatgtcagtgccagactggattctcaacaaaagaagctcaaccttccaatcctgccaaccaccactattggatccttccctcagactgtagaactgaggagggtacgccgtgaattcaaggctaacaagatctccgaggaagagtatgtaaagtcaattaaggaggaaattcgcaa

SEQ ID NO: 149107 - DNA, 239 bp, Glycine max
ctttgtcaagggtattgttgattctgaagatctcccactcaacatttcaagagaaatgttgcaacagaacaagatcttgaaggtcatccgtaagaacttggtcaagaagtgccttgagctcttctttgaaattgcagagaacaaggaggattacaacaagttctatgaggctttctctaagaacttaaagcttggtatccatgaggattcccagaacaagggaaagattgctgaattgc

SEQ ID NO: 149108 - DNA, 241 bp, Glycine max
tacgtgatcttgatccagaaagcattactactttcccatctaccctgtctcaactgactgagcggttgaaacactggaaaaatgttctacaaagcaatgttgaggataggtttccagcagtattaaagtttgaagaagaaagcaaggtgtagcgggactttcacgttattgatgtcgaagttccagggcaatatttcactgaccacgaaattgcaccagatcataccgtgaagttggatag

SEQ ID NO: 149109 - DNA, 237 bp, Glycine max
aaaaggagatgctttctgaagcacgagcccggttggccaacacaaaaggaaagaaagcaaaaaggaaagctagggagaaacagcttgaggaagccaggaggcttgcttctttacaaaagaagagagaattgaaggctgctggaattgatattaggcagcggaagagaaaaaggaaaggaatagattacaatgcagcaaccaaatgggagtgttcctgttatttagtaaccttggtgg

SEQ ID NO: 149110 - DNA, 237 bp, Glycine max
tgaagagtgagagagatagagagagagaggcacttggaatccatgaatgagacaaatcatcagcattcacataggtcaggccgggatccatgctggcaactcctgctgggaactctactgcctggaacatggcatccagcccgatggcatgatgccaagtgactcctccttcggtgtagcccacgacgccttcaacaccttcttcagcgaaaccggatccggcaagcacgtccctcg

SEQ ID NO: 149111 - DNA, 234 bp, Glycine max
gccatggccatgagcaatttgagatgacaggtttggaccctgagtataatagattgttcaatgagggcatggtgtgcactgctagggttgtgtccaaggctgtgatcactgggtacaaagatgggttcaaccagattaagtccttggttgatgttggaggtggcattggagggtctctttctgagattgttagggcttatcctcacatcaatgccatcaactttgacttgcctc

SEQ ID NO: 149112 - DNA, 233 bp, Glycine max
gaaaaggccaaggctaaaggggtttctttgttgcttccaactgatgttgtcatagcagacaagtttgctgctgatgctaacagcaagactgtgccggcatcaagcatcccagatgggtggatggggttggatattggtcctgattccatcaagacatttggtgaagcattggatacgactcagaccattatttggaatggaccaatgagtgtttttgagtttgataagtttgc

SEQ ID NO: 149113 - DNA, 233 bp, Glycine max
gacaagtacttccaaaggaagcaactgtcaagtgtcttgctgatgcaggcttcttcctagatgagaaggatattagtggaaacagtacaatgagatctttctatcatgatgttgcccagcttcagggtcttgcaaaaagtttgcacaaagattgcattgctaaaatggaaccatctaagtgtctctttccatcagaaattgctaaaaacataaagactccactgttccttgtt

SEQ ID NO: 149114 - DNA, 228 bp, Glycine max
attattgtcctcatagtgagtagaaggcagagagactagagcggagatagcaatctcatctcattcatttcaatggcaactcaaggtcaagtcattacctgcaaagctgcggtggcctgggaacccaacaagcccttaactgtccaagacgttcaggtggctccgcctcaggccggcgaggtccgtgtccaaatcctcttcaccgctctctgccacaccgatgcttac

SEQ ID NO: 149115 - DNA, 230 bp, Glycine max
gaattctccagagagaagaagaaacttaatcgatcatcacttcacttcactaatacatcatggcagacgagacccagaacaagtatgagagctctgaggttgaggtccaggatcgtggtgtttttgactttctcggtaagaaaaaggatgaagaagacaagcctcatcctcaggaggaggtcatcgccaccgagtttcaaaaagtcactgtctcagaccaaggagagaac

SEQ ID NO: 149116 - DNA, 231 bp, Glycine max
atttagtaaaagcagttcgcaaggcagctggaaacatagagaaaccattggagggtttccatatagttgttgatgcaggcaatggagcaggaggcttttttgcagcaaaggttctggaacctctgggggcaataacttctgggagtcaatttttggagcctgatggcttgtttccaaatcatatcccaaatcctgaggacaaaacagcaatgaaagctataacccaagcag

SEQ ID NO: 149117 - DNA, 234 bp, Glycine max
ccaatatattccattctctctgtgtatttccctacctctcccttcaagatgcagatcttcgtcaagaccctcaccggcaagaccatcacccttgaggtggaaagctctgacaccatcgacaacgtcaaggccaagatccaggacaaggaaggaatccccccggaccagcaacgtctcattttcgccggaaagcaacttgaggacggccgtacccttgctgactacaacattcag

SEQ ID NO: 149118 - DNA, 236 bp, Glycine max
cactcattaattgcaagaatggcacttcgttgcttggtgatgtccctttctgttctcttcactcttggtcttgcgagagaaagccatgccagagacgaagatttttggcatgctgtttggccaaacactcccattccaagttcattgcgagatcttctaaagcctggccctgcaagtgttgaaatcgatgatcaccctatgcaaattgaagaaacacagtacccgaaaaccttctt

SEQ ID NO: 149119 - DNA, 233 bp, Glycine max
ttttgctcgacttaggatggaaaagcggcacaactatgttaggaaaactgcagaacttgctactcagtttttcatcaatcctgccaccagtcaacctaatgtttctggacttatacttgctggttctgctgacttcaagactgagttgagtcagtcagatatgtttgaccctcgattgcaagcaaaaatattgaatgtggtagatgtttcttatggtggggaaaatggattca

SEQ ID NO: 149120 - DNA, 233 bp, Glycine max
aacaaaaacaaagaaaaaaaaaaacccttagccaacacaaccatcatggccacctctgctattcagcaatcagcattcactggtcaaactgctctgaagcagctcaatgagttcgtccgcaagaccggtggcgccggcaaaggtcgcactaacatgcgccgcaccgtcaagagtgctcctcagagcatttggtatggccctgaccgtcccaagtacttgggtccattctcggg

SEQ ID NO: 149121 - DNA, 229 bp, Glycine max
ctatgttgagagactcagggatgagcccttgtttctggttcttgcccagaatgttcaggaatatcttgaaagagttggaaatttcaaagctgcatctaaggtggccttgaggagggttgagctcatttactacaaaccacaagaggtttatgttgcaatgaaaaaattgactgagctgacagaggatggagataatggagtggaggcaagtgaggagaaaggatttgag

SEQ ID NO: 149122 - DNA, 228 bp, Glycine max
tttggattaaggccagccatagttgtttcctctccaaaattggccaaagaggtaatgaaagacaatgaccttgagtgctgtggacgacctaaattactaggccaacagaaactaacctataatgggttagacatgggattttcctcatacgatagttattggagagaaatcagaaaaatttgtgttgtccatgtccttagctccaaacgtgtccaaagctttacctca

SEQ ID NO: 149123 - DNA, 226 bp, Glycine max
ccttcgttcactcttcttctcttgcggctagggttttagcgcagttcttctagatttaaggaagatgggtaaggaaaaggttcacatcagtattgtggttattggccatgttgactctgggaagtccactaccactggccacctgatctacaagcttggaggcattgacaagcgtgttattgagagatttgagaaggaagctgctgagatgaacaagaggtctttc

SEQ ID NO: 149124 - DNA, 227 bp, Glycine max
gcaaggaatcatcacggaagagatgctttactgtgccactcgtgagaaccttgacccagagtttgtgaggtcagaagttgctcgtggacgtgctatcattccttccaacaagaaacacttggagttagagcccatgatagttggaagaaactttttggtaaaagtaaatgccaacattggaaattctgcgagttgcaagttccatagaagagggagtttacaaggtt

SEQ ID NO: 149125 - DNA, 230 bp, Glycine max
attccaagccgttggttgcggagattgagatttcaaaacttcttgatccaaccaaaggcactgcaagtattagtgcagttgctggttcctttggttacataccaccagaatatgcatatactatgcaagtcacagcaccaggaaatgtttatagctatggtgttgttctgctggaaatccttacaactagactaccagttgatgaggattttggtgaaggtgtagatttg

SEQ ID NO: 149126 - DNA, 230 bp, Glycine max
accatactgaggaaagcataatcaaatcaaccatggctaccctcattgctcccatcaccttttcgcctggtttagatgcagaagctcttagaaaagctttccaaggatgggggactgatgagaagaccgttatagcaatattgggtcacagaaatgttcatcagaggcaacaaatcagaaagatttatgaggacatttaccaagaggacctcatcaaacgcctagagtct

SEQ ID NO: 149127 - DNA, 242 bp, Glycine max
gttccatatgaccacatttccaagttccaccagcatcgctccaaggcctagttggagtcacaatactctttgctgtgccattctatgaccgtgtctttgtgccactagcaaggaatatcacagggaaacccactgggataacagtgttacaaagcattggggtaggacttttcttgtcaatccttaacatggttgtgtcagcacttgtggaggccaaaagggttggtgctgcaaaagagagt

SEQ ID NO: 149128 - DNA, 239 bp, Glycine max
caaatggagggaatttcaaatgaagcatgctcacttgccggtcactggggtctagggaagcttattgctttatatgatgacaaccacatttccattgatggggacactgagattgcattcactgagaatgttgatcaacgttttgaggcacttgggtggcatgtaatttgggtgaagaatggaaatactggatatgatgaaattcgtgcagccattaaggaagctaaggctgtcaaaga

SEQ ID NO: 149129 - DNA, 242 bp, Glycine max
atgcgagccaccgtgacctgaggcgtgcaagggcagcagcactcaacattgtccccacttcaacaggagcagcaaaggcagtggcccttgtcctcccaaccctcaaaggcaaactcaatggcattgcactccgtgtgccaacaccgaacgtctcagtggtggacctcgtcgttcaggtctcaaagaagacctttgcagaagaagtgaatgcagcattcagagagagtgcagacaatgagctc

SEQ ID NO: 149130 - DNA, 243 bp, Glycine max
atgcttacggtgatggaagcttaatcgcgcgtctctatcgtgacacgctttctctctcttctttgtttctcagaaatttcacgttcggttgcgctcacactaccctcgccgaacctactggagtcgccggattcggtcgtggtttgctctctctcccggcgcagtggccacgttatctcctcaactcggaaaccggttttcgtattgtttggtttctcactcgttcgattcggagcgagtgag

SEQ ID NO: 149131 - DNA, 247 bp, Glycine max
gagattccggaagcatgtatacagattgggatattcttcctccacgaaaaatcaaagatgtcaaggccaaaaagcctaaagactgggaagaaagagaatacattgaagaccctaatgatgtcaaacctgagggatatgattcgatcccaagagaaattcctgacccaaatgctaaagagcctgaaaactgggatgaagaggaagatgggaaatggaaaccaccaaagataccaaatccagcatacaa

SEQ ID NO: 149132 - DNA, 250 bp, Glycine max
gccacaaggatgaggccttcttctctggtaatgctgctgctctggcttcaaggaagtcttctccaagagtgaccaacgaggctgttcagaaggctgctgctgcattgaagggttcagatcatcgccgtgcaacaaatgtcagtgccagactggattctcaacaaaagaagctcaaccttccaatcctgccaaccaccactattggatccttccctcagactgtagaactgaggagggtacgccgtgaatt

SEQ ID NO: 149133 - DNA, 252 bp, Glycine max
gcattgaagccgaaggatcccctatacgtacgtttccagcaactacttcgctggctattttcttcccacattagcacaaccaggtgcttttgctccacctccacccaaagacaaagtcattatcttgggcgatggaaatcctaaagcaattttcaacaaggaagaggacattggaacctacaccatcagggctgtggatgaccctaggacattgaacaagattctctacctcaggccccctaagaacattta

SEQ ID NO: 149134 - DNA, 247 bp, Glycine max
caatctcaaacacacacacacagaacagagtgtgatggaagaacaagaagagtgccaagttggggagaccaaggaaactccaactcctcctgttcgagtctatgctgatgggatttatgatctctttcacttcggccatgcccgttctctcgagcaagccaaaaaactgtttccgaacacttatcttcttgttggatgctgcaatgatgagatcacccataagtataagggccaaactgtcatgact

SEQ ID NO: 149135 - DNA, 241 bp, Glycine max
cttgctgttgttatcgaacatttcatggtgatttcaaaaattttccggaaaaaatttgaatctatttttatatgcgaatcaatcctactacttctggtcctgaggtttctgcgcttgagaaaaaaaatctgggacgtatcgtccaaataattggtccggtactagatgtatcttatcccccaggtaggatgcctattattaacaacgcgctgatagtaaagggtcgagatactgttggtca

SEQ ID NO: 149136 - DNA, 241 bp, Glycine max
tgcttccatgatcaacaccatagcttcccttaccttcatcattgcagtggcactcaggtttgaggttcttgatcttcgaaatcctcggggtatagcaaaagttattgggaccattatctccttagctggtgttttgatcatgacactgtacaaaggacccgttatgagaaatttatggcatccactaatccatattccagggaaaagtgctgctataaatgaagactggttaaagggttca

SEQ ID NO: 149137 - DNA, 242 bp, Glycine max
tgctgaagcaaagccaaaaaagatctgctcacaaattggattgtgtacctttgatgggactcatggtgttagcatgggtatcgagagtgtggtggataagaatgaaaaaaaatcatctggtggcattcgggatgctggttgttctgcatgtgagatggctgttatttggatgcagaaccagctgaggcagaatcagacagaagataggataatagactatgccaatgagctttgtgaaaaat

SEQ ID NO: 149138 - DNA, 237 bp, Glycine max
atctcatttcttgctattcatttcttcattccaccatcaccatggtccaggagaagaagaacgtggtggtcaagaacaagaagccaaacaacaatgccgacgagcttcacttccgcggcgtccggaagcgaccatggggccgctacgccgccgagatccgtgaccccggcaagaagacccgcgtctggctcggcaccttcgacaccgccgaggacgccgcccgcgcctatgacgccg

SEQ ID NO: 149139 - DNA, 249 bp, Glycine max
aagatggagtattcggagccggttttgtacttggatgtcgggttttggcaccctctggctccttgtatgtatgatgatgtgaaggagtatttgaattggtatggaaccagaagggatgcaaatgagaagctgaagagtccgagtgcgcctgtcattggtttggttttgcagaggagtcacattgtgactggtgatgatggacactatgtggctgtgattatggagctggaggctagaggggctaaggtc

SEQ ID NO: 149140 - DNA, 249 bp, Glycine max
gcgcgtggtggcgacttcgtcgatctcatccattatgccaagccctaactggccagctgataagattaaggcagaagagtgttggacagaccttgaatactgcaaacagaaggggttgtactatcccattgcaaagactctagcagagaaagcgggttgggaatttgcaaaggagacaggttttgatgttgtcatgataaaccctggtacagctttgggccctctgcttccaccaagaatcaattcaag

SEQ ID NO: 149141 - DNA, 245 bp, Glycine max
cgtttacaagtcctcctttctcacagctaggtggtggtgattagtgtacatatatatatggttgaagtgggtatgtatcagatccctacgatcactttcgacccatttgcggaggcaaaagaaacagatgctcccggggcaaaagagtatgtgcatatgcgcatacaacagaggaatgggaagaagagtctgaccacagtgcaagggctgaagaaagagttcagctacgagaagatcctcgaaga

SEQ ID NO: 149142 - DNA, 247 bp, Glycine max
cttggaaacaggcagtatgagcattttaacaaggtggcgaaggtcgtggatgacatgctcgttgagcaagggcgggaagcgccttgtgccagtgggtctaggtgatgatgatcaatgcattgaggacgcccgtactgcatggaaagaagaactgtggccagcattggatgaattgcttagagatgaggacgatgcaactgtgtctacaccttatactctcagttttaggagtaccgggttgttattc

SEQ ID NO: 149143 - DNA, 262 bp, Glycine max
caccaaaaacccttcttgtgtttgagcttccgacaagtgctgatctacgctcatggcttctccgcgagctgcagcaaacacagaagatagcttggagatagatcaagcgccagtactcttccgcttccggtagaaacctgttgcagggaccgcttctcaagagatctgaaaccctgagaaaatggaacgagcgttgggggatcttggacccgacaacggggagaatcgaatacaagataagaagaaacgaaccttctgttaa

SEQ ID NO: 149144 - DNA, 252 bp, Glycine max
gtcgtgttactgttagctaacactttctgcaataatggcacgtactagcatccaaacaagctcttcatcacgggcaaaaaaatttgatgtgttttcatcgttgtcttctcaaaggactatgcatcatccacatggtgcatgacagagctgacaaagatcgttgattgggttcaagaaacaggtccaagtgtgctccctgttttctatgatgtcactccttcggaggttcgaaaacagagtggacagtttgga

SEQ ID NO: 149145 - DNA, 252 bp, Glycine max
ttcacatccaaatctagtaaagttaattggatattgctgtgaagacgaacatagggtgctaatatacgagtacatgtcccggggaagtgtggaacacaacttgttctcaaaaattttgcttcccttgccatggtccataagaatgaagattgcgtttggcgctgcaaagggacttgcatttcttcatgaagcagagaaacctgtcatctatcgagatttcaagacatcaaatattttattggaccaggagta

SEQ ID NO: 149146 - DNA, 254 bp, Glycine max
ctcgagccgattcggctcgagcctccactctgcaacctctcgccgatcgcaaccagaagtgcctcccatcacattcgtgcatcacccttggaggagtgggaagggagaatgaatgttggcatgtctaattctgtgacgacagcaattcgcagcagtgttcgagacttggccattgggaagactaaaactactgagaaagcagaccgggctactgttgagcaggcaattgatcctagaacgcgcatggtcttatt

SEQ ID NO: 149147 - DNA, 250 bp, Glycine max
  unsure (1)..(250): unsure at all n locations
ggangaccaccttgttgtgacaaagaaggggtcaagaaagggccttggactcctgaagaagacatcatattggtgtcttatattcaggaacatggtcctggaaattggagggcagttcctgccaaaacagggttgtcaagatgcagcaagagttgcagacttagatggacgaattacctgaggccaggaatcangcgtggtaacttcacagaacaagaggagnagatgataatccatcttcaagatcttt

SEQ ID NO: 149148 - DNA, 245 bp, Glycine max
tatagtaaaacaggacattcattcatctatggctacccttattgctcccagcaaccactctccccaagaagatgctgaagctctcagagaggcttttgaaggatggggaactgatgagaacactgtcatagtaatcccgggtcatagaactgtgtatcagatgcagtatatcagaagagcttatgaggtaatttaccatgaggatcttgtgaagcgtctatattctgagatcaaaggagactttg

SEQ ID NO: 149149 - DNA, 248 bp, Glycine max
ttctcgagccgaatcggctcgagccagcctggtgtgcttatccaggacctttgagggtgaaagacgcaaggaccagagataacagtttgttgggcaaatttgagctatctggcattcctcctgcacccaggggtgttcctcagattacagtgtgctttgacattgatgccaatggtatcttgaatgtctctgccgaagataaaaccacttgccagacaaataagatcactatcaccaatgacaagggt

SEQ ID NO: 149150 - DNA, 241 bp, Glycine max
aagagacatcacgttcgagaactatgcgggaccagcgaactatcaagcagtggcgctccgtgtcggagccgaccatgcggtggtgtaccggtgcaacattgtggggtatcaagactcatgctatgtgcattctaaccgtcaatttttccgtgaatgcaacatttacggcactgtagacttcatatttggcaatgctgccgtggttttccaaaagtgcaacatttatgctcgtaagcctatg

SEQ ID NO: 149151 - DNA, 251 bp, Glycine max
caagtctctcgaagcctctttctctctcttctagaagctatctgtgtttggtgttactaagtctccaacaagcaaagtacatggttgatttggaaatccaggtccccaccccattcgacccgtttgccgaggcgagagaatcggatgcccccggagcaaaggagtatgtgcatattcgaattcagcagaggaatgggaagaagagtctgaccacagtgcaagggctgaagaaggagttcagctacgagaag

SEQ ID NO: 149152 - DNA, 250 bp, Glycine max
gttctagatcacgcgcgatctctaaactaggcgcatctctatgctgtcttccaaggcctgctcaaagtgcttgctggaattgacaccaactttactgacacctccaaagcctcggacgaagatggagactttgccgagctctacatgttcaaatggaccaacctactcaactgccgcacaaaccttctcataataaacatgattggggtagttgccggcaactcctatgccatcaatagtggctaccaat

SEQ ID NO: 149153 - DNA, 251 bp, Glycine max
gtttctttttcttctatagagacacacggagagagtctcagagcaataaacacccttcaatggctaccactaaagtttacattgtttactattctacgtacggacatgttgagaagttagctgaagagattaaaaagggagctggttccgttgaaggtgtggaagcaaagctatggcaggtacctgaaacactttctgaagaggtccttgggaagatgggtgcacctccaaagagtgatgtaccgattatt

SEQ ID NO: 149154 - DNA, 242 bp, Glycine max
gaagactacagaaacacatttgctaacttggcactacctctgttttcaatggctgaaccagttccaccgaaaattatcaagcatcaagatatgagttggacagtttgggatagatggattctcggaaacaatcctaccctcagggaacttctcgagtggctgaaagcaaagggcttgaatgcttatagcatctcttgtggaagttgcctactctataatagcatgttccctaggcataagga

SEQ ID NO: 149155 - DNA, 242 bp, Glycine max
ctttttgaacagacgaaggaaaaaaacgcagtgatcacgagcagacatgtatcatccaacaagaggtggcgttcgtggtggtcgagatcaattcacttgggaggatgtgaaagctgataagcatagggagaactatcttggtcacagtatcaaggctcctgttggaagatggcagaaagggaaagatcttttctggtataccagggataaaaagtcccaaaatgcagaaatggaggctgcaa

SEQ ID NO: 149156 - DNA, 243 bp, Glycine max
caatgcctcccgaggcacttgagatcacaaggaagttcatgaacaaacctgtgaggatccttgtgaagcgtgatgagctcaccttggagggtatcaagcaatttcatgtcaatgttgagaaagaggaatggaagcttgacacactgtgtgatctttatgagacattggcaattactcagagtgtcatttttgtgaacaccagaagaaaggttgattggctgactgacaagatgcgaagtcgag

SEQ ID NO: 149157 - DNA, 177 bp, Glycine max
tgaagagatgagagtcaaaaggagggatgcagaactgtggatgtcccaccgtatgctaccagatttgctgaaggaaagaattagaaggtatgagcaatacaaatggcaagaaaataggggtgctgaagaggagacattgattcgcaacctccctaaaagatactacagaaggggata

SEQ ID NO: 149158 - DNA, 250 bp, Glycine max
gagcaggcttcagaagcttaatgcaatggtgttggcagcatcatcaacacctgattctgaagatcagttagaagcccctattcacgcaggaaatggagagtacttaatagagttagccattggatcaccaccagtgtcttaccctgcggttttggacactggcagtgaccttatatggacacagtgcaagccttgcacacggtgttacaaacgaacaacacccatttttgatcccaagaagtcctcttct

SEQ ID NO: 149159 - DNA, 252 bp, Glycine max
gcttccccgccgccgatctcctcctcttactatccctccgcgccgcacatgctcctcgccctctccgccgggctagcggctccgccggagagcaccgcagcgccttccgccgcgctcagcagaaagcgtttccgaacgaagttcagtcaggagcagaaggagaagatgcacaagttcgcggagaaagtggggtggaagattcagacgcgggacgaggatttgattcacgagttctgcaacgaggttggggtc

SEQ ID NO: 149160 - DNA, 245 bp, Glycine max
cggctcgagaggggtgctcgggatgcctgctggtccttacttatatgcggatgatctgattgacgtcttgaagaaaaaacatgcttctggaacgtataaaaacctagtattttatctggaggcatgtgaatctgggagtatctttgaaggtcttcttcccgaagatatcaatatttatgcaaccacagcttccaatgcagaagaaagtagttggggaacatattgccctggggagtatcctagtc

SEQ ID NO: 149161 - DNA, 247 bp, Glycine max
agtggtttcagtgagtgatcggtgttcacttgatccttcataagtcgtcatcatcatcatcatcatcaccgttgatttaagaagatgccgatcagaaacatcgccatcggtaggcctgaagaggctactcaccccgacacgtttaaggcggggttggctgagttcatctccaccttgatcttcgtgttcgccggttcaggttccggcatcgcctacaacaagctcaccgacaacggcgccgccactc

SEQ ID NO: 149162 - DNA, 241 bp, Glycine max
ctcaaagggtagtttcactccacacaacgctcccatctctgaacgcatccccatccacagccacgcctacaccatatgccccgccaccgcctccgtccgcttcctctcccggcggcgtttcgaaggcggcggagttcgtgatctcgaaggtggacgatctgatgaactgggcccgccgcggctccatctggcccatgaccttcggcctcgcctgctgcgccgtcgaaatgatgcacaccgg

SEQ ID NO: 149163 - DNA, 239 bp, Glycine max
ggttgcccatgtacaatacattcaacaaacataattctagtgatccaagatatacttctgagttgaactacctgcgtttctacctgccagatatcttccctactctaaataagattctgctctttgatcacgatgtggtggtgcaacaagatctcagtggactatggaatgccaatttgaaaggaaaagtaattgcagcagtgggcacctgtcaggaaggtggaacctcatttcatagg

SEQ ID NO: 149164 - DNA, 241 bp, Glycine max
tctgcttcaacttgctccctcagaagcgaagaagaagccacagagaactagtctcctactctcacccgcaagaaagaaatggcatctcacatcgttggatacccccgtatgggtcccaagagagagctcaagttcgctctcgagtctttctgggatggcaagagcagcgccgaggatttgcagaaggtgtcttctgatctcagggcatccatctggaagcagatggctgatgctgggatca

SEQ ID NO: 149165 - DNA, 240 bp, Glycine max
gcctgataacccataaccgaccgcaccaccgttttcctttgctttgcgttctacaatgtcgaaaacctcagagattattacatgcaaagctgctatttgctggggaataggaaaacctgtgactgtggaagagatacaagtagaccctcccaaagccaccgaagttcgagttaagatgctttgtgccagtatatgctccacagacatctctagcacaaaaggattcccacatgttagaat

SEQ ID NO: 149166 - DNA, 245 bp, Glycine max
gcgggttgggaatttgcaaaggagacaggttttgatgttgtcatgataaaccctggtacagctttgggccctctgcttccaccaagaatcaattcaagcatggaaatgcttgttagtgttctcaaagggggcaaagagacgtacgaggacttctttatgggaatggctcacttcaaagacatagcattggcacatattttggcacttgagaacaagaaagcagcaggaaggcacttgtgtgtgga

SEQ ID NO: 149167 - DNA, 247 bp, Glycine max
cattaacatgggtgctggtgactactacaaaatactgaaggtgaagcatgatgccactgatgaagaagtgaagaaggcttataagaaattggcaatgaaatggcacccagataagaaccttgaagaccctcttaggaaagaagagtttgaggccaagtttaaacaagtttctgaggcctatgatgtgcttagtgacccaaagaagcgccagatctatgacttgtacggtcactatccccttaactct

SEQ ID NO: 149168 - DNA, 237 bp, Glycine max
cacctgaaaatgtcttgctgcggtggtaactgtggttgcggaagcacctgcaagtgcggcaacggctgcggaggctgcaagatgtacccagacttgagctacactgagtcaaccaccaccgagaccttggtcatgggagtggcacctgttaaggctcaatttgagggtgctgaaatgggtgtgcccgctgagaacgatggctgcaaatgtggaccaaactgctcctgcaacccctgc

SEQ ID NO: 149169 - DNA, 238 bp, Glycine max
gaggatgatctaccttcacctccccccaggacttttatcaaccagttacctgattggagcatgcttcttgctgccattacaacaattttcttggcagctgaaaagcagtggatgatgcttgattggtagccaaggcgacctgacatgcttattgacccctttgggataggaaaaattgtacaggatggtctcgtgttccgtgaaaacttttctattagatcatactgagatggtgctg

SEQ ID NO: 149170 - DNA, 277 bp, Glycine max
cacgcgtacgtgatctcgggaatcgagctcaagctcctatagagcttatcagatgcttgaggtcacgtaaagttcatgcctttgaggcatcagagtctccagttgtggtagccctagaagaccttcttgcacctgatcttcatgctaccagtggctgaaatggttgatcacacatttgattcctgtacccaaatgctcctagagtctgaaagtcgtggatgaataccgatcatgctgaatcggcttccgccgaagattcctaattcagcctacccag

SEQ ID NO: 149171 - DNA, 239 bp, Glycine max
atgcgaaggtagactccaacgccttagtgtcaactacattgatctctattatcagtaacgtgtagacacaactgtacccattgaagacactatgggagagcttaaaaggctggtccaattctgaaaataaggtacataggattgtcggaagctagccctgacacaattaggagggcacatgctgttcatcccattactgctgtgcaactaggagtggtccctttggactcgtgaaattg

SEQ ID NO: 149172 - DNA, 236 bp, Glycine max
cagtttttggcaggaaaaaaaaattgcatttgagtaaaaataacagagtgtagtgtagggtcttgttcttgatactgtgctaaatttgttggatggcggagaaatcatgcatcaagcgccttcagaaggaatatagagccctttgtaaagagccagtttctcatgttgtggctcgtccttcaccgagtgatattcttgagtggcattatgtgttggagggaagtgaaggaacacct

SEQ ID NO: 149173 - DNA, 250 bp, Glycine max
aaccactcttaatttctctctgccttgctcatttacacacctctccaacctttcactttcagctttatttgaatccctctctctcctttccaaatggccagcgttgaggttgcacatcaaacaccaacaacagttccagaaaatgaaacaaccgaggtaatcaagacccaggaaacaaccccggaaccagtaccagccactgaggctcctgcaacagaacaagcagcagctgaggttcctgctcaagaag

SEQ ID NO: 149174 - DNA, 167 bp, Glycine max
gtaacgtccccggcgtcgaggtcgccaacgtcgagaggctgaaccttctgaagctggcccccggtgggcacctcgggaggtttgtaatttggaccaagagcgctttcgagaagttggagccaatttacgggtcttttgataagccctcggagaagaagaagggatac

SEQ ID NO: 149175 - DNA, 231 bp, Glycine max
ttctcctcctacaccaacaaaaatggcaccttctccacaagaaatcatcttccgatccccactccccgatattcccatccccacacatctcccattgtactcttactgcttccaaaacttgtcaaagttccatgaccgtccatgcctcatcgacggcgacaccggcgagaccctcacctacgccgacgtcgacctcgctgctcgccgcatcgcctccggcctccacaaaat

SEQ ID NO: 149176 - DNA, 231 bp, Glycine max
gccagcacaaagggcgtaggagaagagggtttcgttccgtttcaatggggagcgaagagcagaacggcgaattctacctgcgttactacgtcggtcacaagggcaagtttggtcacgagttcctggagttcgagttccgcccagacggcaagctccgctacgccaacaactccaactacaaaaacgacaccatcatccgcaaggaggtttacctaacccccgccgttctcc

SEQ ID NO: 149177 - DNA, 154 bp, Glycine max
tgctgctgacctcaaagagcatgtgatcaagcctgtgatcccagagaagtaccttgatgagaagaccattttccacttgaacccttcaggccgttttgtcattggtggccctcatggcgatgctggtctcaccggccgcaagatcattatcgat

SEQ ID NO: 149178 - DNA, 221 bp, Glycine max
ctcgagcgattcggctcaggaagtggggcccatggctgaagctgcggtgacttgcaccccaacacagttgactccgtgtcttccggcaattaattcaggttctgcaccttcgagtgcttgttgccagaagctgaaggagcaaaagccatgcttctgtggctacctcaaaaaccctagcttgaagcagtatgttaactctcctaatgccaaaaaaaccgttc

SEQ ID NO: 149179 - DNA, 221 bp, Glycine max
gccaagaccaccgccgaccgccagacggcgtgcaactgcctcaagtcggccgccagccaaatctccggcttcaaagccaacaacgccgcctcgctccccggcaaatgcggagtctccatcccctacaagatcagcacctccaccaactgcgctaccatcaaggtttgaagagaaagtcatggacgcaggaaaccggaaactactcactagtatatgagtag

SEQ ID NO: 149180 - DNA, 120 bp, Glycine max
cacctttattgggaactcgacatcaattcaagagatgtttaggagggtcagtgagcagttcactgctatgtaccggcgcaaagccttcttgcattggtacactggggagggtatggacga

SEQ ID NO: 149181 - DNA, 197 bp, Glycine max
gtagctggttccctccgaagtttccctcaggatagctggagcccgcgggcgagttctatcgggtaaagccaatgattagaggcatcgggggcgcaacgccctcgacctattctcaaactttaaataggtaggacggtgcggctgctctgttgagccgcgccatggaatcgagagctccaagtgggccatttttggta

SEQ ID NO: 149182 - DNA, 159 bp, Glycine max
cgatcctcgtccgggggctgctccgaataccaccaccaccacgcgccgatggccacgataggaggcttacgcgactcccaaggctctcagaacagcgtccaaaccgaggccctcgctcggttcgccgtcgatgaacacaacaagaagcagaattcactt

SEQ ID NO: 149183 - DNA, 221 bp, Glycine max
tgatttcactccaagaattctaatagttaccaggttaatacctgatgcaaaggggacaacatgcaaccagcggctagaaagagtcagtggtactgaccatactcatattttgcgagttccattcagatcagagtcaggaactctccgtaaatggatttcaaggtttgatgtgtggccttatctagagacttatgcagaggatgttgccagtgaaattgctg

SEQ ID NO: 149184 - DNA, 219 bp, Glycine max
gttttgctccatggtcttgaccaaggacagaaagatttgacgtggaacaagtggtcatataaggttggcctaagaggagaggctatgaatttggtatctcccaatggagtctcgtctgttgactgggtccaagagtcacaagctactcaaagccggtcacaattaaaatggtacaaggcatattttgatgcacccgggggaaaggaaccactggctttg

SEQ ID NO: 149185 - DNA, 222 bp, Glycine max
ggatgggcattcacggtcaccctcttgagatccaggcattattttactcggctttacgctgctctcgtgagatgctaatagtcaatgatgcaaccaagagtctggtggctgctgttagtaatcgcctgagtgcactctgctttcacatgagagagtattattgggttgatatgaagaagattaatgaaatttaccggtacaagacagaagagtattctactg

SEQ ID NO: 149186 - DNA, 248 bp, Glycine max
ggacaagaagatggtgtggtgttggtctgatgtgggggctccttttgccgtggatgagaaacgggtcagggatgctattgccatggaggataataactccatttgtgtggtcaatgagtttgaggatttggggttcatggatttgagaagttctgctgccaatagcattaggtggagctccaggagtaggttgatgaaggggaagatgcctgaggaaccttggtatcctaaactggcattgcatgggg

SEQ ID NO: 149187 - DNA, 161 bp, Glycine max
ccactgtgtgctctctgtgtggtgtggtcgctcactgcaacaacaacaacaacaacaacgaacgccaacgcaaacgcaaacgcgaataagagcgagaacattctcttcagctcaacccttttctttttcgatggctaatcggcacacgattattctaatgc

SEQ ID NO: 149188 - DNA, 157 bp, Glycine max
ctttggcattctcattgagcattatgctggtgattttccattatggctttctccaatacaagctcgagttttacctgttactgatgcccagcttgaatattgcaatgttgtgaccaacaaacttaaaatgtatggcatccgagctgaagtttgccat

SEQ ID NO: 149189 - DNA, 220 bp, Glycine max
gggaaatggctcccaaaccgcctagtacgggtctgtttgttggactgaacaagggacatgtcgtcaccaagaaggaattgcccccacgcccctcggatcgtaaggggaaaacaagcaagagggtgcactttgtgaggaacctcataagagaggttgctggttttgcaccctatgaaaagcgtataactgagttgctgaaggttgggaaggataagagggc

SEQ ID NO: 149190 - DNA, 226 bp, Glycine max
ctcttgcagcaatcacctttagcccttgcaaaagctttaaagaactcggtggagttggatgggttaaaaaaggcacatattcgggatggtgcagcagttgtgcaatatcttgtctggctggataagaagatgcaggatatttatggagcttctggttactttttggagaaggattctgtgaaaaaggagaaacatttgcaatctttgaaattgactgaggtgactg

SEQ ID NO: 149191 - DNA, 226 bp, Glycine max
tttggcattcgcagatcgaatacgagtaatttcactgaatcttattgaagatgtttctcacaagaactgagtatgaccgaggagtcaacacctttgctcctgaaggccgtttatttcaggttgaatatgcaatcgaagccatcaagctgggatcaactgcgattggattgaagacgacagagggtgttgtccttgcagttgaaaagcgcatcacttcaccactgct

SEQ ID NO: 149192 - DNA, 221 bp, Glycine max
gacggaccttgaatactgcaagcaaaaggggttgtattatcccattgcaaagactctagcagagaaagcgggttgggactttgcgaaggagacaggttttgatgttgtcatgataaaccctggtacagcattgggccctctgcttcctccaagaatcaattcaagcatggctgtgcttgttagtgttctcaaagggggcaaagagacctacgaggattttt

SEQ ID NO: 149193 - DNA, 217 bp, Glycine max
attgcgggagccccttttgttcttcctcttgctcacaaacataacataaaaattcttcccgctgattcggaacattctgcaatttttcagtctatccaggggttgccaaagggtgcacttaggaaaatccttttaactggatcaggaggtgctttcagagaatggcctgctgaaaagatgaaagatattaagcttgctgatgcattaaagcatccca

SEQ ID NO: 149194 - DNA, 216 bp, Glycine max
cgatgaggctgttgcatatggtgcggctgttcaggctgcaatcttaagtggtgagggcaatgagaaggttcaggatcttctcctcctggatgtcacccctctgtctcttggtttggagactgccggtggtgtgatgactgtcctgatccctaggaacactacaattccaacaaagaaggaacaagttttctcaacatactctgacaaccagcctgg

SEQ ID NO: 149195 - DNA, 162 bp, Glycine max
ctgtgcggaggccatggcagcaaccagtgttggaacacctcaggttgttccgctgctaatgaaagccatagggtggcaaggtggaagcattttagctcttgagactctaacacgtgttgtggttgccggaaaccgagccagggatgctcttgttgcacaggg

SEQ ID NO: 149196 - DNA, 226 bp, Glycine max
cgaacgtggcggcgaatgtgaacctgggagcgttttatctggtggggattcccgtggcagttgggcttgcgttctggctcgaggttgggttctgtgggctctggctgggcctattgtcggcccaggtttgttgtgcgggcctcatgttgtatatgattgggaccaccgattgggagtaccaggcctgtcgggcccagttacttacggcccttgatgaaggatccga

SEQ ID NO: 149197 - DNA, 216 bp, Glycine max
atttcaaatcaagcttgctgcgaggagggactatacgtgtgacccgaagaaggattacagagtggaggattttaattatccttcttttgcggttcctatggatacagcttcggggattgggggaggttccgatactctgaagaccgtgaagtactctagggttttgactaacgtgggagctccgggaacgtacaaagcttcggtgatgtcgttggg

SEQ ID NO: 149198 - DNA, 213 bp, Glycine max
gggcattgttccaaggaatccacatcccccagaagaagagtttcgttatgattcttcagtttctgttgatgctgggggagctggacgacaaacgccaagtcttcagttccctcgaacaaaagaagttgtagtcaatggcattgctgtaaaggtgaaatattgtgagacttgtatgttgtatcgtcctcctcgttgctcgcattgctccatttg

SEQ ID NO: 149199 - DNA, 213 bp, Glycine max
gttgtattaatgggtgatggtttgatgatacaagagggaagttcagtaaaagcaacaggaagaattgctcagatacctgtaagtgaggcttatttgggtcgtgttataaatgccctggctaaaccaattgatggtcgaggagaaatttcagcttcggaatctcgattaatcgaatctcctgctcccggtattatttcgagacgttccgtatat

SEQ ID NO: 149200 - DNA, 218 bp, Glycine max
taaaccctaaacaactctttctcttcttccttcgctcgttgttctccctcgcgtagatcgacaatggcggagacagagacgtttgctttccaggctgagatcaaccagctcctcagtctcatcatcaacaccttctactccaacaaggagattttccttcgtgaactcatcagcaacgcctccgatgctttggacaagattcgatttgagagtttgac

SEQ ID NO: 149201 - DNA, 221 bp, Glycine max
cactcttgggaagcacaaaagcttcttttcttagtgggaggaaactgaaggtgaacagttttacagcaccagttggagcacgatccagcactacagtgtgtgcagttgctgagcctgataggcctctgtggttcccaggcagcacccctcctccatggctagatggcagtttgccaggagattttggctttgatccctaggtcttggatctgatcctgaga

SEQ ID NO: 149202 - DNA, 176 bp, Glycine max
aaagaagccagtgctaggatttgttagtgaagcaatggctcaaaccatgttgctcatgtctagtgtctctagcagttattccgtggatttggttttactaagcagaacgagctctttgtgggtcgtgttgctatgcttggttttgcagcatcactgttgggtgaaggaataactgg

SEQ ID NO: 149203 - DNA, 216 bp, Glycine max
aaagaaagagaaaataaaaagcaatgggtagccttgaagcggaaagaacaacagtaggattggcagcaagagacccttcagggattctctccccatacacctacaatctaagaaacacaggccctgatgatgtttacataaaagttcactactgtggaatttgccattctgatctccaccagattaaaaatgatcttggcatgtccaactatccca

SEQ ID NO: 149204 - DNA, 221 bp, Glycine max
gactcaaagaagatcactcacaagtccgatgtctacagcttcggggtgctgctgctagaaatgctgacagggaagacccctctgaggtatcctggctatgaggatgtggttgatcttccaaggtgggtgaggtctgttgtcagagaggaatggactgcagaagtgtttgatgaggagcttctgagagggcaatatgttgaagaggagatggttcagatgct

SEQ ID NO: 149205 - DNA, 208 bp, Glycine max
gaaagatcggcgatgactgcctccaaggatcgcgagaacttcgtctacatcgccaaactcgccgagcaggccgagcgttacgaagagatggtggaatcaatgaagaacgttgcgaatctcgacgttgaactgacggtggaggagcggaatttgctttctgttgggtacacagcatgcgattggtgctcgcagaggtccctggaggatc

SEQ ID NO: 149206 - DNA, 234 bp, Glycine max
taactaacgtgggagctccgggaacgtataaagcttcggtggtgtcgttaggggatttgaatgtgaaaattgtggtggaaccggagacgctgagtttcaccgagttgtacgagaagaagggttatatggtgtcgtttaggtacacttcgatgccgtctgggacgaccagcttcgcacgtttggaatggacagatggaaagcatagggttggaagtccaattgcgttcagctgga

SEQ ID NO: 149207 - DNA, 230 bp, Glycine max
ggcgtcttgggatcaaatgggggaacttgcaaatgtggcacagttgactggtgtagacgctgtgcggttgattgggatgattgtgagagctgcaagcactgcacggatgcataagaaaaactgtaggcagtttgcacagcatctgaagttgattgggaacttgctggagcagctcaagatctcggagctgaagaagtaccccgaaactagggaacctctggagcagctcg

SEQ ID NO: 149208 - DNA, 233 bp, Glycine max
ggatttgttgagggcttcggcggaggtgttggggaagggtagcgtggggacttcgtataaggcggtgctggaggaaggaaccaccgtggtggtgaagaggctgaaggatgttgtggtgacgaagaaagagttcgagacgcaaatggaggttctggggaagattaagcacgagaatgtggttcctctcagagccttttacttctccaaggacgagaaattgctcgtttacgatt

SEQ ID NO: 149209 - DNA, 232 bp, Glycine max
ccctctctctatctctcacacacactttctctctctctctctctcacccagatcttgtagcaatggcgagcgctcccactccacgcgaagagttcgtgtacatggcgaactggcggagaggccgagcgctacgaggagatggtggagttcatggagaaggtctccgcctccgccgagagcgaggagctgaccgtggaggagcgtaacctcctctccgtcgcctacaagaacg

SEQ ID NO: 149210 - DNA, 231 bp, Glycine max
gttgagatgcaccatgaggctctcacagaggctcttccaggtgacaatgttggatttaatgtgaagaatgttgcagtcaaggatctcaagcgtggttttgttgcatccaactccaaggacgaccctgccaaggaagctgccaacttcacatcccaagtcattatcatgaaccatcctggccagattggtaatggatacgcaccagtccttgactgccacacttctcacatt

SEQ ID NO: 149211 - DNA, 232 bp, Glycine max
agtggacttgccagaaggtgcattgtgcaagtgtcttatgccattggtgtgcctgagcctttgtctgtgtttgttgacacctatggcactgggaagatccatgataaggagattctcaacattgtgaaggaaaactttgatttcaggcctggtatgatctccatcaaccttgatctcaagaggggtggaaataacaggtttttgaagactgctgcctatggacactttggaa

SEQ ID NO: 149212 - DNA, 236 bp, Glycine max
catctgacgagcctggtgggaaagaaatcacttttaagcgagtactcttgaatatctgccaggaggcttttgaaggtgcagataaactgagggaagaactgagacagatgactgcccctgaccaggagatggagctacgggacaaggaaagacttgtcaagattcgaacccttggaaatatccgtttaattggtgagctgttgaagcaaaaaatgggtcccgaaaagattgttcat

SEQ ID NO: 149213 - DNA, 237 bp, Glycine max
ctctgtgtatttccctacctctcccttcaagatgcagatcttcgtcaagaccctcaccggcaagaccatcacccttgaggtggaaagctctgacaccatcgacaacgtcaaggccaagatccaggacaaggaaggaatccccccggaccagcaacgtctcattttcgccggaaagcaacttgaggacggccgtacccttgctgactacaacattcagaaggagagtactcttcacct

SEQ ID NO: 149214 - DNA, 238 bp, Glycine max
ctaaagagcagctgcagacaaacaagcctcttttggggttggattagctggtgagatccatggaagatataggtccgaattcatgcacaaggccagtgacagagaagaaagcaagaccccaagaacaattgaattgtccaaggtgcagttcaaccaacacaaagttctgttattacaacaactacagcctcacacagccaagatacttctgcaagacttgtagaaggtattggacaga

SEQ ID NO: 149215 - DNA, 231 bp, Glycine max
ttacattttcagttatgttaagaccttccaggctcacccagatcgcctcctaccagacagggttcaggttggcatgactcaacacttcatgaaaagctactctgatctcctcatcaggacgtgccacaggcgcggtgtgcatgctatgggaggaatggcagcacagattccaatcaaagatgacccagtggcaaatgaggcagcactggaactggtaaggaaggacaagct

SEQ ID NO: 149216 - DNA, 232 bp, Glycine max
ctgttttcattgaatctacactaatggagaatggagggcttccagaatctgctgatccctcaatgctgatcaaagaggccattcatgttattagctgtggatatgaagagaaaactgcatggggaaaagagattggttggatctatggttcagttactgaggatatcttaacggggttcaagatgcaatgccggggatggagatcagtttactgcatgcccttaaggcctgc

SEQ ID NO: 149217 - DNA, 230 bp, Glycine max
gtgctttgaaaatgggaaagtttagttcaagttacagtacttctgattttgttcactttggagttctacttccctttcttctgttatcacagttgttctttcaacttgcatggtgtggctccatagtaaagttccttcctggattagagggaccccttccttttgttcttgaaaccgggtatgtgggagtgggtgaatcagaggatgtgcaggcattctactacttcatt

SEQ ID NO: 149218 - DNA, 228 bp, Glycine max
gcaaggttttcaagtttgccactctcttggaggaggcacaggttctggcatgggaacactgttgatatcaaaaattagggaggaatacccagacagaatgatgctcactttctctgttttcccatctccaaaagtttctgacacagttgtggagccatacaatgccactttgtctgtacaccaactggttgaaaatgcagatgaatgcatggttcttgacaatgaagc

SEQ ID NO: 149219 - DNA, 229 bp, Glycine max
ctccgcagtgtcggtggaggtcggagagcatgtccagctcgcttatacccaccagaacgagtcgccgtttcagcccagatcctttgctgtgaaggatgaggtattctgcttgtttgagggagcccttgacaatttgggcaacttgagacaacaatatggattggccaagtcaaccaatgaagtattgttggtcattgaggcttacaaagcattgcgtgacagagcaccc

SEQ ID NO: 149220 - DNA, 227 bp, Glycine max
tggggtgctggtttgtgctgctgggcaggagtttaggggggacgtggcgctttgtaccgtgccattgggggtgctaaagaagggggatattgagtttgtgcctgagcttcctcagaggaagaaggatgctattcataggttggggtttgggttgttgaacaaggttgcaatattgtttccttataatttctggggtggggacattgacacgtttggtcatttgactg

SEQ ID NO: 149221 - DNA, 235 bp, Glycine max
cttcttttctcggcagagtcctcttcgcctccgttttcatcctctccgcttaccaagaatttaattcttatggagttgatgggggacccgcagcaaaagcactcagaccgaagtttgatgcctttgcacatcaagtacattctaaagttggctttcaacttccagatattgatatgaaatttttagtggctggggctattgctctcaagggccttggagggattcttttcatact

SEQ ID NO: 149222 - DNA, 235 bp, Glycine max
gcagtttcaaaggtgtttgactttattgttcagaaactttatgcactgagaaagcccaaaacaaatatccaaatacttcaacaaagtgtccttttaaaatacaagtatgttgtttccttcctcaaggaacatggcaaggaaatatataatgaagttcatgcagcatacattgatacgatgaacaaggttcttagtgctcatttccgtgcttatatacaagcatgggagaaactac

SEQ ID NO: 149223 - DNA, 231 bp, Glycine max
catgattgtggaagcctttgcaggaaaagacaccatcaaggtgccctatgagtccaaaggcaaaggagggttcaaacgtgcagcactcaagtttgtggctgttacccctagaacaagaatcatgttccttagcacattctacaccatgagaagtgatgacttttcttcactctgtgggcctgtgattgatgatgtcaagttggtgagcctgcgtaaaccatgatgagggaa

SEQ ID NO: 149224 - DNA, 228 bp, Glycine max
ccgaagcgcttattagctgtgtgacaggaaagggttccgagattggtgattttcttacaatgcatccgggggtgaactgcataagtttcactggtggggacactggaatagcaatatcaaagaaggccggcatggttcctcttcaaatggaattgggtggaaaagatgcctgcattgttcttgaagatgctgacttggatttggcagctgctaacattgtaaaaggag

SEQ ID NO: 149225 - DNA, 228 bp, Glycine max
ctctatcaccccattttctcaaacacctacacaaaatgtgcttcctcaacacaaagtccctggctcacttcatgttgctaacaacaattgtagttggcattgcaatgggagattcatcaaaggacaaagaggaatgcactgagcaattggcaggcctagcaacatgtctgccctatgttgggggtcaagcacaagctccaaccccagattgttgtagtggtctcaagc

SEQ ID NO: 149226 - DNA, 224 bp, Glycine max
gggaaatatgtttcggtgcatcttcgtttcgaggaggatatggttgcattttcatgctgtgagtatgatggtgggaaggaggagaaacttgaaatggatattgctcgtgaaaggagttggcgaggtaaattcagaagaaagcataggataataaagcctggtgcaaatcgcgtggatggaagatgcccattgactccattagaggtgggaatgatgcttagagg

SEQ ID NO: 149227 - DNA, 229 bp, Glycine max
tgaaggtgaaaggatcaattgattacgtccctgaactgtttgatgagcagaaggaccaagtagcagtggagcagattttgcgagttgtttttctagatccagagcgtccttgtcctgctttggaaaaactgaaccgacagctggctgatgctgatgctgcccttgaggcacgtaagatacctgcggaagatgcaggtcctaaaattatcggggaagggctcgtcataga

SEQ ID NO: 149228 - DNA, 229 bp, Glycine max
caaggcagaaagcaagctcatcctagagttttaaaaatggcagcagcctcctccatggctctctcttccccatccttggctggcaaggccgtgaagctgggcccatcagcccccgaagtcgggagggtcagcatgaggaagaccgtcaccaagcaggcctcctccggaagcccatggtacggcccagaccgcgtcaagtacttgggcccattctctggcgagcccccgt

SEQ ID NO: 149229 - DNA, 226 bp, Glycine max
atcctagttgggagagaggtctttccagatgggattttgtatgcttcacgggagtcacattattctgtgtttaaagctgctcgaatgtacagaatggaatgtgagaaggttgatactctttggtctggggaaattgattgtgatgatttcaaggccaagcttcttagtcaccaggataagccagcaattataaatgtgaacataggtacaactgtgaaaggggctg

SEQ ID NO: 149230 - DNA, 232 bp, Glycine max
ataaatcttttttatgggtttcagggtcactactactctgtctctgctctccctgttttggctcttgtccctgcaccaagcaagagctgcaaagttccacaatgtgagtggcttgagagggaaaaagccagttgtagcaaatgggtgcaatttgttcctgggaagttgggtggttgacacgtcttatcctctctatgactcttcaacatgccccttcattgatcccgagttt

SEQ ID NO: 149231 - DNA, 231 bp, Glycine max
gcgtgtgattgagaggttcgagaaggaggctgccgagatgaacaagaggtcattcaagtatgcctgggtgctcgacaagctcaaagctgagcgtgaaagaggaattaccattgatattgctttgtggaagtttgaaaccaccaagtactactgcacggtcattgatgctcctggacatcgtgactttatcaagaacatgattactggtacctcccaggccgactgtgctgt

SEQ ID NO: 149232 - DNA, 226 bp, Glycine max
ggtgctggtgactcaatactttgacaccatgaaagagattggagcatcttcaaagtcctcatctgttttcataccacatggtcctggcgcagttaaggacattgccatgcagattcgggatggtctgcttcaggccaccacttcacagaattaagctttcctggagttgtaaataacaaatagtagcgtgccagattttttttcagtaaatgcttttcttgtttga

SEQ ID NO: 149233 - DNA, 225 bp, Glycine max
ggcagaacagaacaccaactcttattgtcatatggtctgtgctcttggcttctatcttttccttggtttgggtcagagttgacccttttgtgttgaaaacaaaggggcctgatgtcaagcaatgtggaatcagctgctgaatctacatctcatttctttactactatgaagcgtgaaacaaaaacctaggtgcagagatgaaaatggcagaaaaaaaaaaaaaca

SEQ ID NO: 149234 - DNA, 223 bp, Glycine max
ggtgaatttacaatgactgaacttgctgagacagttaaagagcttattaatccaggtgtggagatcaagatggtggagaacactcctgatgacccacgacaaagaaaaccagacatcacaaaagcaaaggaattgttgggctgggagccaaaggtcaagttgcgtgatggtcttcctcgtatggaagaggatttccgtctgaggcttggagttggcaaaaaga

SEQ ID NO: 149235 - DNA, 226 bp, Glycine max
gcagcactattgctaattctggggcgtttgtcaaggtttccatggatggagcaccttaccttcgcaaggtggacctcacaatgtacaaaagctacaaagacttatctgatgccttggccaaaatgttcagctccttcaccatgggtaactatggggcccaaggaatgatagacttcatgaatgagagcaagttgatggatcttcttaacagctctgagtatgtgcc

SEQ ID NO: 149236 - DNA, 228 bp, Glycine max
gccttatatagttgggtccttggtaggaatggtgccggaaatatttgttgcaatctatactggaattttgattcggacattagctgatgcttcatatgaaaagcattctctatctgccccacaaattattctcaatgtggcaggcttctgtataacggtggcgacaaccatctttttcacagcttatgctaggagacggcttgatgagttacaaagggaggaggatcc

SEQ ID NO: 149237 - DNA, 230 bp, Glycine max
aaactcctgaatttctcaagatcaatcctattggcaaggttcctgtgctggaaacccccgatggtccaatattcgagagcaatgccattgctcgctatgttacccggctgaaaggtgataacactttgtatggatcttccttgattgaatatgcccacattgaacagtggattgatttttcatcattggagattgatgctaatattatcaagtggtatgccccaagagtt

SEQ ID NO: 149238 - DNA, 221 bp, Glycine max
atttacgaacagaaactctgcatcaacaatataaattggttaaagagaggactatatctggagattcatactatggctctcacgtgatgcagtatggtgatgtacggcttagcagtgatgttctcttccattatttgggtacagatcctgctaatgataatttcacttttgtggacgaaaactccttatggtcaccttcaaaaccagtcaaccaacgtgat

SEQ ID NO: 149239 - DNA, 228 bp, Glycine max
ctcgagcgtgttgttgtaactcgttcttcttctattgtcgttctgtgtctgtggttgttatttctctcacctgataatgtcttgctgcggtggtaactgtggttgcggaagctcctgcaagtgcggcaacggctgcggatgctgccagatgtacccagacttgagctacactgagtcaaccaacaccgagaccttggtcatgggagttgcacctgttaatgctcaatt

SEQ ID NO: 149240 - DNA, 228 bp, Glycine max
cttcgatcatcacctctccacaatgccgccgaagttcgacccctcccagatagtcgacgtcttcgtccgcgttaccggcggcgaagtcggcgcggcgagttccctggccccgaagatcggtcccctcggtctctcccccaagaagatcggagaagacatcgccaaagaaaccgccaaggactggaagggcctccgcgtcaccgtcaagctcaccgttcagaatcgtca

SEQ ID NO: 149241 - DNA, 222 bp, Glycine max
cagccatgctcatgtgggatctgcatctgtgttggttggtgatattgatgatgcattggactctgaaaaaaggtacttgaaaaggggtgtgaatgatcgggggagggttgctaatgatgttgagacagagcagattgtccttgatgaagaatcaggctcttgcaagggaaagatgagttcagttgtgcaaatgcgtggatcaataccacttttctggtcaca

SEQ ID NO: 149242 - DNA, 220 bp, Glycine max
gtcttatcagaagacttttggtactgaggagaagcgcagtgagttcttgagatgtaggtgccagttgatggagaagggtattcagaggcttaatttgaagccaggtggtgtgtcttcattgcttcagatcaatgaccttaagaagtcccctggtccttcagagcgtacggttgccacggaacagactctggtaatgtttcaggacaattatccagaaatg

SEQ ID NO: 149243 - DNA, 223 bp, Glycine max
cagaaaagggtgtggtggttttcaccaagagctcttgttgcctctgctatgcagtcaacattctgttccaagagcttggagtgatccctgtggttcatgaaattgacaaagaccctgagggcaaggaaatagagaaagctataacaaggttggggtgtcctacacctgttcctgcagtcttcatcggagggaagctggtggggtccaccaatgaagtcatgtc

SEQ ID NO: 149244 - DNA, 221 bp, Glycine max
agccggagaacgcggtttatgatttcgaggacaagattaacttcgcggtgttcccttcgctgcagggtgggccccacaaccaccagatcggtgctctcgccgtggcgctgaagcaggccgcgtcgcccgggtttaaggcctacgcgaagaggttaaggcgaacgccttgcgcttggaaaatacttgatggggaaagggtacagccttgtcactggcggaac

SEQ ID NO: 149245 - DNA, 225 bp, Glycine max
tcaagattttgtggatccccattgtggagacctgatggacgagaagataatgggcaatcaatttgaagagccagaccaacccatgcagagcatcgatacgatcatgcagataatttcagaagctaccgtaccagcagttgggacctattcttttgaccagtttatggaggaacaaatttatgacttggaatctgaatctgatgctgaatctgatcttgatataga

SEQ ID NO: 149246 - DNA, 227 bp, Glycine max
ttcgaatttcgatactttgatcagatccacaacactccttcatccatgacgcttggctcttcaggatccagtgtcgtggttccaaggaacttcagattgctggaggagcttgagaagggagaaaaaggaatcggagatggaacagttagctatggaatggatgatggtgacgacatttacatgcgctcttggactggaaccattattggcccctataatactgtaca

SEQ ID NO: 149247 - DNA, 230 bp, Glycine max
cgagaacagagacatgcagcagaggctcccacctccgacatggctcaacaacgttaacgcgcgtcaacagaatttcctcgacaccgagaagagcgtggatcggaacaaccgaagcgagagcaattgcgaatccgaggatttgagggaatacaaagcggacattctaggtcaccctctctacgatcaactgttgtcggcgcacgtctcgtgcctcagaatcgccacgccgg

SEQ ID NO: 149248 - DNA, 227 bp, Glycine max
ctcgagccgattcggctcgagtgcgtgctataattgagaatgctagtcaaatatcaaaggtcatagatgagtttgggtccattgacaagtatatttggagttttgtgaaccacaagcctatagttagcagattcaggtatccaagacaggttcctgtgaaaacaccaaaggctgatgttattagcaaagacctggtgaggagaggtttccgaggcgttggccccaca

SEQ ID NO: 149249 - DNA, 225 bp, Glycine max
ggaagtacgtcggaaactcagatctgcaactcgagcgcgtgaacgtctactacaatgaagcctcgtgcgggcgcttcgtgccacgcgcggtgctgatggacctggagcccggaaccatggacagcgtgcggaccgggccgtacgggcagatcttccgccccgacaacttcgtgttcgggcagtccggcgccggcaacaactgggctaaggggcactacaccgagg

SEQ ID NO: 149250 - DNA, 223 bp, Glycine max
aatggttgtgtctcaagaatcaacactgatgctcaaggatttaacaagaagctcaactcagctgcaacgagtcttcaaaagcaacttcctggtcttaagattgcggttttcgacatttacaagcctctctatgaccttgttcaatccccttcaaaatctggttttgtggaggcaaacagaggatgctgtggtaccgggactgtagagacaacatccttgttgt

SEQ ID NO: 149251 - DNA, 220 bp, Glycine max
ttccattctctctgtgtatttccctacctctcccttcaagatgcagatcttcgtcaagaccctcaccggcaagaccatcacccttgaggtggaaagctctgacaccatcgacaacgtcaaggccaagatccaggacaaggaaggaatccccccggaccagcaacgtctcattttcgccggaaagcaacttgaggacggccgtacccttgctgactacaac

SEQ ID NO: 149252 - DNA, 221 bp, Glycine max
ccattgttggtgcatcagggacaccttatcacgatggcttgtttttctttgatatatgtttccctccagagtatcccagcgaaccccctatggtgcattataattccggcgggctacgattgaatcctaatttgtatgagtccgggaaagtctgtctgagtctcctaaacacgtggactggtacagacaccgaagtttggaaccctggagcttccacaatt

SEQ ID NO: 149253 - DNA, 174 bp, Glycine max
tcacaatttttattttttaatgatactattttgttattgttattgatggtatcatcatcgggaaaaagcagagaaatggatagggtgaagggtccatggagcccagaagaggacgaggccctgcgggcgctggttcaggcccacgggcctcgaaactggtcggtgataagcaag

SEQ ID NO: 149254 - DNA, 217 bp, Glycine max
gaagttattgctaatgggataagtgtgaatgtgacgctgatattctctcttgcaagatatgaagctgtaattgatgcatacttggatggtcttgaggcatctgagttaaatgacctctctagagttacaagtgttgcctctttcttcgtcagtagagtggacaccctcattgacaaggcccttgagaaaattggcaccccagtggcccttaatctac

SEQ ID NO: 149255 - DNA, 225 bp, Glycine max
ctaacaaccacttatcccctttctccttctaacgagtgaggaaaaatggcgcgtaagaagatcagagagtatgactcaaagaggttgttgaaggagcactttaagagactctctggcaaggagttgccgatcaagtctgcacaaattaccgcatcaactgatttcactgagctacaagagaaggaaccctggctttcatcttctaaattggttgttaaacctgac

SEQ ID NO: 149256 - DNA, 248 bp, Glycine max; identical to SEQ ID NO: 114737

SEQ ID NO: 149257 - DNA, 243 bp, Glycine max
ccgcggttgcaagcagagcacaccatcgaaatgggcgaacgaaggcgttggttccggaatcggtggtgaagaaggagaagaggaacgaggagtgggctttggaaaagaagcaggaactcgatgccgcaaagaaaaagaggttcgaaacgcggaagctgatttttaacagagccaaacagtactcaaaggaatacgacgagcagcaaaaggagttgattaggttgaagcgtgaagccaagctta

SEQ ID NO: 149258 - DNA, 240 bp, Glycine max
cagatctccgcgaccgcatgtatgttaccccgacatgtggagagacggattgcagctcgccttctaattagtcgtgtagcctcttgttccaatctctgggaccttattatggatgctggaactggcttttcaagtcaactttataagttgtcaccatttttcttacacaaggcatggatcatggcacagtgggaccagaactattacattacttctattgcaggggctaataatgggagc

SEQ ID NO: 149259 - DNA, 235 bp, Glycine max
gcgcttcagcacaatgggtgcctacaagtatgtttcggagctatggcgcaagaagcagtctgatgttatgagattcttgcagcgggtgaggtgctgggagtatcgccagcaaccttctattgtccgtttgacaaggtctactcgcccagataaggctcgtcgcttgggtttcaaggctaagcagggttacgtgatttaccgtgttcgcgtacgaaggggtggccgtaagagacca

SEQ ID NO: 149260 - DNA, 237 bp, Glycine max
atggggtttgaggaaactgagctaaggcttggactgcctggaaacgtaggaggcactggcactgaagaagtgctcatcaggaagagaggtttctctgagactgaaactgaaactgaggaggatgagtctgctaccactgtggatttgatgcttaatctttcttctaaggaagctgctgctgctgcagatccaactgataagcacaagactttgcctaaggagaagactcttctgcct

SEQ ID NO: 149261 - DNA, 235 bp, Glycine max
aacttatcagtgagaaggtgttctctttttggcttaatggggatccaaatgcgaaaaaaggtggcgaattagtttttggtggtgttgacccaaagcacttcaaaggaaaccacacttatgttccaattactgaaaaaggttactggcagattgaaataggagattttttcattggaggtgtttcaactggtgtttgtgagggtggctgtgctgctattgtggattcaggaacatc

SEQ ID NO: 149262 - DNA, 233 bp, Glycine max
ctttcaaggagagagagaaaatatagcacgccgaaaaacacgctcccacttgtaacttagtataacgacctccaacaactgatacatacaatctcctttccttcgtgttggacaacaacaatggcggcgaaatctagttcgagttcgacaacaaacgtggtgactctgaaggcggcgtgggttctcccgcagcgcacgcagaacatccgtgaggtgtacgaggtggggcggaa

SEQ ID NO: 149263 - DNA, 236 bp, Glycine max
cagaccaagtaccctgagtctgacatttactggaaaaaatttgaagagaaatatcatttctcatgccaatttactgctgatctttttgcaatgaaccacacagactttatcatcaccagcaccttccaagagattgctggaagcaaggacactgttggacagtatgagagtcacactgccttcacccttccaggactttaccgtgttgttcacggtattgatccatttgatccaaa

SEQ ID NO: 149264 - DNA, 237 bp, Glycine max
cttcttcgtcgttatcttcttcttttgttgtttgtgtgtttgtgttttctctcacctgaaaatgtcttgctgcggtggtaactgtggttgcggaagcgcctgcaagtgcggcaacggctgcggaggctgcaagatgtacccagacttgagctacaccgagtcaaccaccaccgagaccttggtcatgggagtggcaccagttaaggctcaattcgagagtgctgaaatgggtgttcc

SEQ ID NO: 149265 - DNA, 241 bp, Glycine max
tgcagtgcaggctgcgattctcagtggcgagggtaatgagaaagtgcaggatcttcttttgttggatgttactcctctatccactggtttggagactgcaggaggagtcatgactgtgttgattcccagaaacacaaccattcccaccaagaaggagcaggtgttctcaacctactctgacaaccagcccggtgtgttgattcaggtctatgaaggtgaacgaacgaggactcgtgacaac

SEQ ID NO: 149266 - DNA, 236 bp, Glycine max
gaaaaggaaacatggaactcgagacaaacaaggtgtatgtctacgaggatgcacgaggggacgttgaagtcccagataccgctcatcagataagcactgattcatggtttcaagtggcttttatcctcacaaccggaatcaacagtgcctttgttcttggatatccagggaccgtcatggttcccctgggttggatcgggggtgtgattggtctaattcttgctaccatggtgtca

SEQ ID NO: 149267 - DNA, 230 bp, Glycine max
ctgactctcacacatcgttttatccgaaagcaagcattatcagaagcagaaagaaagaataagaggttgcagcaacaatggcagccatggctgcgcttcagagctcaatggtcggtctctccctctcctccaactctttcttaggccaacgcctttctcccatcaccctcccctctcttcttccgggtaagtcaacagagaagcaatgtcctattgtaatgaggcttaaa

SEQ ID NO: 149268 - DNA, 235 bp, Glycine max
ctctgatgatgaggatgaggaagagaagaaggatgaggagggtaaggtggaggatgttgacgaagagaaggagaaggaagaaaaaaagaaaaagaagattaaggaagtgtcacatgaatggtccttggtgaacaagcagaagcccatttggatgagaaagcctgaggagatcacaaaggaggagtattctgctttctacaagagtctcaccaatgactgggaagagcatttggct

SEQ ID NO: 149269 - DNA, 232 bp, Glycine max
ggtaaaagaaagtaaagagaaagagagagagagagagagagagagagtcataatcataagtcatacctgatttccattctctctgagagacagtgcgagattggcataatggcgaaaaaagccgttttgatcggaataaactacccgggaacaaaggcggagctgaaaggatgcataaacgacgtgtggaggatgcaccgctgcctcatcgatcgatacggtttctccgaag

SEQ ID NO: 149270 - DNA, 235 bp, Glycine max
ggctgttgtatggaagaggatcaattgttactgatttatgaatacatggaaaacaatagtcttgctcatgctttatttgccaaaaatgatgactctgagaaatgtcaattgagattggattggcaaacaaggcataggatttgtgttggtatcgctaaaggtttggcttaccttcatgaagagtccaaactgaagattgttcatagggacatcaaggccaataatgtgttgctgg

SEQ ID NO: 149271 - DNA, 232 bp, Glycine max
gggctgcaatgtccaatttgtcaacgtctcacatgcttattgctgctgccactgaggatgtccaagttcgcctttgtgatattgcttccggggcttttgctcacactttgtccggtcaccgtgatggagttatgactgttgaatggtctaattcaagtgaatgggtcttggttactgggggatgtgatggtgcaatacgattttgggacatcagacgcgctggctgtttcca

SEQ ID NO: 149272 - DNA, 233 bp, Glycine max
agttgggtcatctcttgtggaggaagacaagcttagccttgcaactacacttcttgaaaaggccaaggctaaaggggtttctttgttgcttccaactgatgttgtcatagcagacaagtttgctgctgatgctaacagcaagactgtgccggcatcaagcatcccagatgggtggatggggttggatattggtcctgattccatcaagacatttggtgaagcattggatacga

SEQ ID NO: 149273 - DNA, 243 bp, Glycine max
tgtcgaaccgattcgggtcgagcctgatgaatgtgtgtttggggctgggatatcagtaacttgaacctggcagatgccatggccagggccaaggtgtttgatatcgacctgcagaaacagttgaggccttacatggaatctatggttccactccccggaatctatgaccccgatttcattgctgccaaccaaggagaccgtgccaacaacgtgatcaagggcacaaagacagaacaagttcaa

SEQ ID NO: 149274 - DNA, 234 bp, Glycine max
tctttggattgagaagaccactgaaaaggagatttctgatgatgaggacgaggaagagaagaaggatgaggagggtaaagttgaagatgtggatgaagataaggagaaggaggagaagaaaaagaagaccattaaggaggtatctcatgagtggtcattggtgaacaagcagaagcctatttggatgaggaaacctgaagagatcacaaaagaagaatatgctgctttctacaa

SEQ ID NO: 149275 - DNA, 230 bp, Glycine max
gatgactgtcattaaggaagagcaacaaccaaaccaaatagctggccacaaagaacttggtcacaaaagtctccttcagagcgatgcactctatcagtatatacttgaaaccagtgtgtacccaagagagcatgagagcttgaaggagctacgagagttgacggaaaaacacccttggaacctgatggctacaccacctgacgaaggacaacttctaggcatgctcctta

SEQ ID NO: 149276 - DNA, 238 bp, Glycine max
ctagccgcagcagcctcaggaggagaataaggatgtctcacaggacgttcgagcacccaaggcacgggtcactgggatttctccccaggaagcgtgctgctcgtcacaggggaaaagtgaaggcattccccaaggatgacccatccaaggcacccaagctcactgcattcttgggttacaaggctggtatgacggccattgttagagaggtcgagaagccaggatcaaagcttcacaa

SEQ ID NO: 149277 - DNA, 233 bp, Glycine max
cttcgaatgctttgctttctccaaagggtgtgaactttgaagtgcaagctttaatgggcataaaagcttctcttgtggatcctcatggtattctagataattgggatggggatgcagttgatccatgcagctggaacatggtcacatgttcccctgagaatcttgttattagcctgggcattcccagtcaaaatttgtctggcactctatctccaagcataggaaacctaaca

SEQ ID NO: 149278 - DNA, 230 bp, Glycine max
attaattgcaagaatggcacttcgttgcttggtgatgtccctttctgttctcttcactcttggtcttgcgagagaaagccatgccagagacgaagatttttggcatgctgtttggccaaacactcccattccaagttcattgcgagatcttctaaagcctggccctgcaagtgttgaaatcgatgatcaccctatgcaaattgaagaaacacagtacccgaaaaccttct

SEQ ID NO: 149279 - DNA, 226 bp, Glycine max
ctgagtttaacatcctctctgggacttcaatggcttgtcctcatgtttctggtttggctgctttgttgaaagcagcacatcctgattggagtcctgctgccattaggtctgctttgatgaccactgcttacactgtggacaacaagggtgatcccatgttggatgagtccactgggaatgtttcatcagtgtttgattatggtgctggccatgttcatccagtgaa

SEQ ID NO: 149280 - DNA, 228 bp, Glycine max
gttgattgctcacccaaacatttctgatgctgccgttgtaggtatgaaagatgaagctgcaggagaaattccagttgcatttgttgtaaggtcaaatggttctgagattaccgaggatgaaataaagacatacatttcacaacaggtggtattttacaagagaataggtagagttttcttcacggactctattcctaaagcaccctccggcaaaattctgcgaaaggt

SEQ ID NO: 149281 - DNA, 229 bp, Glycine max
ctcgagccgtccggaccatgtggttgtcattaagtatgtaccttacgttggggacagcaaacgggccatggatgagtactcttctgagatattcatgggcggaaagaacacaattgtgttgcacaacacttgtgaggattcactgttagctgctcctattatcttggacttggtccttcttgctgagcttagcactcgaatcgagtttaaagctgaaaatgagggaaag

SEQ ID NO: 149282 - DNA, 235 bp, Glycine max
aaggcgttgccattctcatcctcttctttctctctctaccattgccatggatccctacaagcaccggccttccagcgccttcaattctcccttctggactacaaattctgttgctcctatttggaacaacaactcctctttaaccgttggagctagaggtccaattctgctggaggattatcatcttgtggagaagcttgcaaattttgatagggaacgtatcccagaacgtgtt

SEQ ID NO: 149283 - DNA, 236 bp, Glycine max
acacgttctctgtgactgcctctgttccgccaagcgcagcattgccccaccgttcaggccaccggctgagttaggtttccggcgaggatgggtgctgctctgctgtcggagcttgcgacggagatagtcgtgccagtgtgcgccgtcatcgggatcgtgttctcgctggtgcagtggttcctcgtgtcgcgcgtcaagctcactcccgaccgcaacggaacgacgtcgtcgccgcg

SEQ ID NO: 149284 - DNA, 236 bp, Glycine max
aatcaacaaagctgagatccttttcccaggagttggttgctttctgattgcagtttttctaggttctgctgttcattcatctaatgctgctgataataaagcaaagctcaacaatttcaccggtgattataaaaatggagacacctctttgaaggatggagatatagttaaatcaaaagacctcgagggtggaagtagttctgcagacaatgttgaagcaggaactgcagttttcc

SEQ ID NO: 149285 - DNA, 229 bp, Glycine max
gaccgatgaagaggttgatgagatgattcgcgaggccgatgttgatggcgatggccaaataaactacgaggagttcgttaaggtgacgatggccaagtgatcatcacattatggccacaaaaacctaaatgaagaaatgttgattaaaaggaaacgacaaaaaaaggggtaggaggaaggccaagggtttgggtggtataacagtgatgtagtagtccttgacctttct

SEQ ID NO: 149286 - DNA, 229 bp, Glycine max
gcggctgccattgcttatgggctcgacaaaaaggccactagctctggggagaagaatgttctcatttttgatctcggtggtgggacttttgatgtctctcttctcaccatcgaggagggtattttcgaggtgaaggccactgctggtgatactcacttgggaggtgaagattttgataacagaatggtgaaccattttgttcaggaattcaagaggaagaacaagaagg

SEQ ID NO: 149287 - DNA, 224 bp, Glycine max
ggagctcatggaggtggatacggtggcggcgcgggtgccggtggaggaggagggtatggggctggtggagcacatggtggtggttttggaggaggtggtggaagtggtggtggccatggtggctatgttccctaagaactactcttcaatgcacaatagatgtgcaagtgtcccctttcgcgtatcaagaataataagtatgctattaataacaggatcataat

SEQ ID NO: 149288 - DNA, 228 bp, Glycine max
caaccactcttaatttctctctgccttgctcatttacacacctctccaacctttcactttcagctttatttgaatccctctctctcctttccaaatggccagcgttgaggttgcacatcaaacaccaacaacagttccagaaaatgaaacaaccgaggtaatcaagacccaggaaacaaccccggaaccagtaccagccactgaggctcctgcaacagaacaagcagc

SEQ ID NO: 149289 - DNA, 230 bp, Glycine max
gtcagaatcagaatcagaagaagcgagcaaagatgtcgggtcgtggaaagggaggcaagggtttgggtaagggaggagccaagaggcacaggaaggtgctccgcgataacatccagggaatcacaaaacccgccattcgccgtttggctcgcagaggcggcgtcaagagaatcagtggcctcatctatgaagaaacccgcggcgtccttaagatcttcctcgagaacgtt

SEQ ID NO: 149290 - DNA, 228 bp, Glycine max
gcagaagagcgtcgcagttgtaaccctaatcagaagaagcgcagttcaagcgagtgacagccaccagccatgggtcgtatgcacagccgcggtaagggtatatcctcttctgctttgccctacaaaaggacacctcctagctggctcaagatctcttcgcaagatgtcgaagaaaatatctgcaagtttgcgaagaaaggtttgaccccgtctcagattggtgtcatt

SEQ ID NO: 149291 - DNA, 214 bp, Glycine max
cttggctacaatccctgtcactggcaccggcattaaccctgcaaggagtttcggaccagctgtcgatcttcaacaacgacaaagcctgggacgaccaatggatttactgggttggaccgtttgttggagctgcggtggctgcaatctaccatcaatacattcttagaggttctgcaatcaaagctcttggatccttcaggagcaacgcttaatt

SEQ ID NO: 149292 - DNA, 227 bp, Glycine max
cggatgcaagattagcgcaacatgtggagagagggattgcagatggccttctaattagttgtgtggcttcttgttccaatctctgggcccttattatggatgctggaactggcttttcaagtcaagtttataagttgtcaccatttttcttacacaaggaatggatcatggaacagtgggaaaagaactattacattacttctattgcaggggctaataatgggagc

SEQ ID NO: 149293 - DNA, 222 bp, Glycine max
attggctgaaaaggagacagacaagatattgggagtgcacattatggcgcccaatgcaggagagcttattcatgaagctgcaatagcactacagtatgatgcatcaagtgaggacattgcacgtgtgtgccatgcacatccaacaatgagcgaggctgtgaaagaagccgcaatggccacttatgacaagcccattcacatctaaagagacggttgctactt

SEQ ID NO: 149294 - DNA, 227 bp, Glycine max
tgatgtctgaggcattggaagaggttgttccttcaatgaaaggagggtgtgaagaagaagggttgaacctggaggctactgagctgaggcttgggttgccagggtgtgagtcaccagagagggagggtgtgtttacagaatgtggtggtgtctggggccaaaaggggtttctctgatgccattgatggaaactggaatggtggaggatctgaaaaagatgccgctgc

SEQ ID NO: 149295 - DNA, 242 bp, Glycine max
ctttagcaaattcgaattcccaattcccaattcgaaacccttattcctttcaaagaaccaaattgagtgatcgtgatggcaccaaaggcagagaagaagccagcggagaagaagcccgcggaggagaagaagtcgacggtgggagacaaggctccggcggagaagaagccaaaggccggaaagaagcttccgaaggagggaggcgccggcggagaagggaagaagaagaagagaaacaagaa

SEQ ID NO: 149296 - DNA, 217 bp, Glycine max
gttggcttcaccaaactgtatcttcgaacagggcagattggggcactggaggacaggagacaacatcttttgcagggaatacttggaattcaaaaaagctttcgtggttatcaagctcgttgtcattatcatgaacttaagaatggagtgactattttacaatcatttgttcgcggagaaattgcaagaaggaaatatggtgttatggtgaagtctc

SEQ ID NO: 149297 - DNA, 272 bp, Glycine max
gaggttgcataactgaacaacaaagcaaccctatgtcgaaggtggtttgtgtcaccggagccagtggcgccattggatcataggtggccctcctccaccaccagcgtggttatacggaccatgccaccgtccaagacatcaaggatgaaaatgagacgaaacatttggaggaaatggaaggagcaaagagtcgtctccatttttttgaaatggatcttcttgacatcgactccattgccgctgccataaaaggttgctccggcgtaatccac

SEQ ID NO: 149298 - DNA, 268 bp, Glycine max
gcattttatagcctccctttcctgaactagttttaacatacaatctttcaagtacacctccccagcttccatttaagaatggagatcactagaataggccaatggttaagtcttctgatatgtgtactactattactgcagacagaaggggttcctgtgggaatcacttttgttgaaaatgcagtggcaaaaggggctgtttgtttggatgggagtcctccagcttaccacttccacaagggatctggagcagggattaacaactgga

SEQ ID NO: 149299 - DNA, 269 bp, Glycine max
ccaatatatccattctcctgtgtatttccctacctctcccttcaagatgcagatcttcgtcaagaccctcaccggcaagaccatcacccttgaggtggaaagctctgacaccatcgacaacgtcaaggccaagatccaggacaaggaaggaatccccccggaccagcaacgtctcattttcgccggaaagcaacttgaggacggccgtacccttgctgactacaacattcagaaggagagtactcttcacctcgtcctccgtctccgtg

SEQ ID NO: 149300 - DNA, 266 bp, Glycine max
tacaagtctttattataccaatttttgctattgcaatcagtatttttgttagtttcacctttgctgccatgtatggtattgccgttgctgcacttggcatgctgagtaccattgccaccggattggccattgatgcatatggtccaatcagtgacaatgctggaggtattgctgagatggccggtatgagtcacagaattagagagagaactgatgcccttgatgctgccggaaacacaactgccgcaattgggaagggatttgcc

SEQ ID NO: 149301 - DNA, 265 bp, Glycine max
caagcattaattcaaaacttaagttcattccttgtgttttgctttcttcctcaaaaccaaacatgtcgaacacatgcggcaactgcgactgcgctgacaagactagctgcaccaagggaaacagctatggtgttattgtagagactgagaagagttacatcgagactgttgtcatggatgttccagcagctgagcatgatgggaagtgcaagtgtggcactaactgcacttgcacggactgcacctgtggccattaaggaatatg

SEQ ID NO: 149302 - DNA, 264 bp, Glycine max
tctgttttgtctctgcgtttgcggctgaggattccgaacgagcgaccttcttcgtttctcgcaaagtttaagtcattatgggtaaggaaaagactcacatcaacattgtcgtcattggacatgtcgactctgggaagtcaactaccactggtcatttgatctacaagcttggaggtattgacaagcgtgtgattgagaggttcgagaaggaggctgctgagatgaacaagaggtcattcaagtatgcctgggtgcttgacaagc

SEQ ID NO: 149303 - DNA, 262 bp, Glycine max
ggcctccaatccagaccaagccctcggtgacaccgatccccgcgtcggtgaaacttgccgatacttggcggaggcaaatgtgcaagcaatgcagtttgataaagcagaggagctgtgtaagaagacactggagattcatcgggcacatagtgaaccggcttcgcttgaggaagctgcagataggaggctcatggcgctgatttgcgaggcgaagggagattacgaatcagcgttggagcatcttgtgcttgctagcatggct

SEQ ID NO: 149304 - DNA, 263 bp, Glycine max
cgagaagatatgagagtctataacaagaaacaggcggaaggtcctactggtggggatgaagaagaatctgagaagtctgtatctgaggtgaatgatgaagatgatgatgaggaaggcagtggcgaggaagaggatgacgattagagaatggactgataattgcatttatgtaggttctgatgattttgatcatctgttgtaggtggtctggtcatttcctgataaacatatttcttgcttccaaaaaatatttccctgctccc

SEQ ID NO: 149305 - DNA, 267 bp, Glycine max
ctagttttgttttggacatatcgcattacattacattagattggtggcaaagcaatggcatcgtcactacaagcagcagctactttcatgcaacccaccaagtttttgcagctaaagtctactcaggccatatctaaggcttttggtttggaacctgctggagttaataaggtcacatgctcccttcaggctgatcttaaggacttggctcacaagtgtgttgatgctaccaaaattgcaggctttgcccttgccacctctgctctc

SEQ ID NO: 149306 - DNA, 270 bp, Glycine max
ccgtgagagtgctaacatttgaagcgcctagctgaagaatttggtcctgagtgggctatgcaacacataattccacaggttttggagatgattagcaatcctcactatttgtatcgaatgaccatactccatgctatctctctacttgctcctgtgatgggctctgaaatcactcgttcagaattattgcctattgttattactgcatctaaagacagagtacccaacattaagttcaatgtggcaaaggtcttggagtcaatcttcccc

SEQ ID NO: 149307 - DNA, 261 bp, Glycine max
ctacttgatcctacctgaatgagaagtttgagttgattgcagaagacaaggagacccaatcactaattcttgaggttcttgataaagacattggacaagataagcgattgggaatagcacagttaccccttattgatctagaaatacaaactgaaaaggagattgaattgaggctgctgccctcacttgatacactgaaggtgaaagataagaaggatcgagggaacttaaacagtaaaggtcatgtattatcagtttaac

SEQ ID NO: 149308 - DNA, 261 bp, Glycine max
cgttctcttcgtcttatcttcttcttttgttgtttgtgtgtttgttttttctctcacctgtaaatgtcttgctgcggtggtaactgtggttgcggaagcgcctgcaagtgcggcaacggctgcggaggctgcaagatgtacccagacttgagctacaccgagtcaaccaccaccgagaccttggtcatgggagtggcaccagttaaggctcaattcgagagtgctgacatgggtgttcccgctgagaacgatggctgcaaa

SEQ ID NO: 149309 - DNA, 259 bp, Glycine max
tcgggccgatgctgcgggtaagaccaccattctgtacaagctcaagcttggagagattgtcaccaccattcccaccattgggtttaatgtggaaactgtggaatataagaacatcagcttcactgtctgggatgttggaggtcaggacaagatccgtcctttgtggagacattacttccaaaatacacaaggacttatttttgtggttgatagcaatgacagggaccgagttgttgaagctagagatgagttgcataga

SEQ ID NO: 149310 - DNA, 266 bp, Glycine max
cttcaacctaacgcagatcgctatactcttcattccatggctttgcccaatcagcaaaccgtggattaccctagtttcaaactcgttatcgtcggtgatggtggcacaggaaagacaacctttgtgaaaaggcatctcaccggagaattcgagaagaaatatgagccaaccatcggtgtggaggttcacccattggattttttcacaaactgtggaaagattcgattctactgctgggatactgctggacaggagaagtttggtgg

SEQ ID NO: 149311 - DNA, 263 bp, Glycine max
tcttccaaccacactactcactcactgcagatctcaattgcatcgctgtccatggctaccatcgttagcatcaaggcccgccagatcttcgacagtcgtggcaatccaactgtcgaggtggatttgacttgctccgatggtacttttgccagagctgctgttccaagtggtgcatccactgggatttatgaggcccttgaattgagagatggaggatctgactaccttggaaagggtgtatcaaaggctgttgacactgtgaa

SEQ ID NO: 149312 - DNA, 260 bp, Glycine max
cttctcaccgatgctagaatggaatttcgatgctcagtcatctcttttaccattctcttctctcttgctcttgcaggagagagccatgtccatgcatcgctacctgaggaagattattgggaagctgtttggccaaacactcccattcccactgcactgcgagagcttctaaagcctctccctgcaggtgttgaaatcgatgaactccctaagcaaattgatgatacacagtacccaaaaacattcttctataaagaaga

SEQ ID NO: 149313 - DNA, 229 bp, Glycine max
cgactcttcaagacgttggcatcgcattcgacatgatgcttctcgctcacaacgccggtggcaaagagaggaccgaagagaactggaagtggctgttcaaggaaaccggtttcgcgcgttacaacatcatcaagatcaacgctctcccttccatcattgaggcgtttccaatctgaagaagatgccactaccacaactgcatgtggtttttatgttgcatgtgttgttg

SEQ ID NO: 149314 - DNA, 260 bp, Glycine max
ctaaataacatgaagacgggggaagtgctatgagcgtaacaccttatttccggcccatgcacgagattaccttttcaacagttgacaagcctaaactccttagtcagttaactgcaatacttggtgagatgggactgaatattcaagaagctcatgcattttccaccactgatggattttctctggatgtctttgttgttgagggatggcctaatgaggaaactgaggagctgaaaggtgtgttggaaaaggaaattttc

SEQ ID NO: 149315 - DNA, 258 bp, Glycine max
ttcttgccgcattgaaagggcaatattggacaacgtgaatgttctttctttatctctcggtggtggcatttctgattattacagagacagtgtcgctattggagctttttcagcgatggagaaagggattttggtttcatgctccgctgggaactcgggtccgggtccctacagtctctccaatgtggctccatggatcactaccgtaggcgctggtacactggatcgtgacttccccgcatacgtggcgctcggaaa

SEQ ID NO: 149316 - DNA, 257 bp, Glycine max
cagaacatcgcttcgtctcaaatgatgtgggactggatgccgacaactgcaaggtcctcgtcaacattgagcagcagagccctgatattgctcagggtgtacacggccaccttaccaaaaaacctgaagaaattggtgctggtgaccagggtcacatgtttggctatgccactgatgaaacccctgaattgatgccattgagccatgttcttgcaacaaaactcggtgctcgtctcaccgaggttcgcaagaacggt

SEQ ID NO: 149317 - DNA, 260 bp, Glycine max
ggggttgagggactgagttaaggcttggactgcctggaaacggaggcactgaagaagtgctcatcaggaagaggggtttctctgagactgaaactggtcatgaagatgagtctgccaccactgtggatttgatgcttaatctttcttctaaggaggccgcaaccactgctgctgctgctgcagatccaactgataagcacaagactttgcctaaggagaagacccttctgccagcagatcctgctaagcctccagccaag

SEQ ID NO: 149318 - DNA, 261 bp, Glycine max
tagtgttgatgagctgataagcttagctcaatccttggatttggcataaacgagccatggatacagtacttgtcaaacaccaaattttaccgagctgatagggaaaaacttagaaccttgtttgtgttcctgggagaatgtttgaagttggttgtggctgataatgaagtgggaagtttaaaacaagccttggaaggtaaatatgtggagccagggcctggtggtgacccaataagaaatccaaaagtcttgccaacagga

SEQ ID NO: 149319 - DNA, 263 bp, Glycine max
tgggaggatgtattgttccactgagagagcttgatgatgtcattattcccccatccccagtaacgtttcctgaagatcatgagacctggaatgttcagttgtttagatccattgatggtggggctgcttttgggttcccggagactcctgaagatgctgccagagctggtcttattagtgggaaggataatatcattgatcgtagcattcaagatgcttatattaatgctattcgacgtgcaaagaacttcatctatattgaa

SEQ ID NO: 149320 - DNA, 266 bp, Glycine max
cttttgtagattatatagtttgatttctttgaagacaattgcaatttgcattatggggacaaaaatcatcccttctaaatacatcatgaaaacagatgatgatgcctttgttaggattgatgaagtgctttccagccttaaaggaaagccatcggaaggcctcttgtacggtctcatatcttctaaatcatctcctcagagggacgaaggcagcaagtggtacatcagtgaggaggaatggccccatgatacatacccaccatggg

SEQ ID NO: 149321 - DNA, 268 bp, Glycine max
gacaatttaaggctagattcaggacaaagagggtatcccaccagaccaacagaggctcatctttgctggaaagcagctagaagatggccgaaccttggctgattacaacatccaaaaagaatctaccctccacttggttctccgccttcgtggtgggatgcaaatctttgtcaagactctcactggaaagaccatcacccttgaggtggagagctctgacactattgacaatgtcaaagccaagattcaggacaaagaaggtatccca

SEQ ID NO: 149322 - DNA, 264 bp, Glycine max
caaaactccaattggttgttccaggaaagcaaggtagcaagatggactgcagaagagaacaaactgtttgaaaatgccttggcttactatgataaggacaccccagatagatggatgagggtggcagccatgattccagggaaaactgttggtgatgtgatcaaacagtacagagagcttgaggaagatgtgagtgtcattgaagcaggtttgatcccagttacctggctatactactgccagttctttcacattggagtgggt

SEQ ID NO: 149323 - DNA, 258 bp, Glycine max
tgaaagggcaaagactgggtggatgagcatgagccgcaactggggtcagaactggcagtcaaacgctgttctggttggtcagtcactctccttcagggtcacagccagtgaccgacgcacctccacctcctggaacattgtacccgccaattggcaatttggtcaaacattcaccgccaaaaatttcagagtctaataattactgtgtttgatggtttttttgttaaattgtttatttaatttttataattttttttt

SEQ ID NO: 149324 - DNA, 257 bp, Glycine max
gaaaacaagtatagagtgaaagaatgggtgagaaaagcaagattttgatcataggaggcaccggctacatcggcaaacatatagtggaagcaagcgcaaaggctggaaatcccacttttgctttggtgagggaatccacactctctgacccctccaaggcacaactcatccacaattttgaggctttgggcgttaatttggtccgcggggatctgtacgatcatgagaagttggtgaaagctatcaagcaagtagat

SEQ ID NO: 149325 - DNA, 258 bp, Glycine max
agtaaggtcacctgccatgctaacttaaggaaggtagctcttgtaaacatttagatctatcttccttaagtaaggtgcacctgccatgctaacttaaggaagatagacctaaatgttaccaagagctacccagaacttctcaaggccttgggaaatatgttcaagtgcacatttggtgaatattcagaaagggaagggtacaatggatctgaatatgctccaccttatgctgacaaggatggggattggatgctggtt

SEQ ID NO: 149326 - DNA, 256 bp, Glycine max
caggattttattatcgttttatctgagaattttgcttcttcctggtattgcttagttgaagttgttatgattcttgatgagttcgctaaggggaagggtagatggattgtgccgattttcttctacgtggatccctctgttctggttcgtacttatgaacaagcattggctgaccagaggaagtggtctagtgatgacaaaattgaagaatggaggactgctttgactaaattatctaaatttcctggcttctgtg

SEQ ID NO: 149327 - DNA, 262 bp, Glycine max
ctcgatcgcactctctttttcttccaaaagggaaaacgaatctcaaacttcacaagtgtttgaggcgccatggcggatcggttgacgcgtattgccatcgtcagcaacgacaggtgcaagcccaaaaagtgccgccaggagtgcaagaagagttgccccgtcgtcacgaaccgggaggttgtgtattgaggttacttcctcgtccaagattgctttcatttcggaggcattgtgtattggatgcggtatttgtgttaagaaa

SEQ ID NO: 149328 - DNA, 265 bp, Glycine max
tgacagcttgatactgttcaaatctgaagaatctcattccttcaaaatcatctcctaacttcaagtttgtgaagggggatattggaagtgctgatcttgtcaactaccttctcatccttgagtccattgacacaataatgcactttgctgctcaaacccatgttgacaactcctttggcaacagctttgagttcaccaagaacaacatttatggtactcatgtcctattagaagcctgcaaggtaactggccagatcaagaggtt

SEQ ID NO: 149329 - DNA, 258 bp, Glycine max
acatcatcatcgtcatctacaactagtaacaaagatccaacaagcagatcaatctctctctctgtctcccaatcaaaacagacatgggtttgaaggaggattttgagcagtatgctgagaaagcaaagactttgccaccgactcagtcaaacgaagacttgcttatcctttatggattgtacaagcaggccaccgttggacctgtcaacaccagccgtccgggaatgttcaacatgagggacagagctaaatgggatg

SEQ ID NO: 149330 - DNA, 260 bp, Glycine max
gttccaattattccattctctctgtgtatttccctacctctcccttcaagatgcagatcttcgtcaagaccctcaccggcaagaccatcacccttgaggtggaaagctctgacaccatcgacaacgtcaaggccaagatccaggacaaggaaggaatccccccggaccagcaacgtctcattttcgccggaaagcaacttgaggacggccgtacccttgctgactacaacattcagaaggagagtactcttcacctcgtc

SEQ ID NO: 149331 - DNA, 258 bp, Glycine max
gcgagtcattcgatattatgttcgagcacttgccatgaatccaaaagcagagaatgcatggcaatatttgagaatttcattgagctgtgcttctaggaatgacatgttggaagcttgtgatagtcgtaatttggaccttctccagaaggagtttccactacagtaagggagggtcagttccactgtggaggtggttgcttgaacatgaatcctaattttccttaaaacttttggatgagtaaatggcacattttctgc

SEQ ID NO: 149332 - DNA, 258 bp, Glycine max
gaaaatcctccatggctcttaaagaagcttggaggattttgtgtgagagggttctcacccttcacactccacctcctacagtttgcttatgctttagccataggtttctctaatcaatcaccacaaaagggtatacatggaggaacataattctctgagtggcatgaagcagagaagctatggccacatcttagcaaaccggcaagtcacaaaaaggcaatggactctctctcattaaagggtccttatggctatgta

SEQ ID NO: 149333 - DNA, 256 bp, Glycine max
aggacaatatgatgttaccatggtctacccggagccttggtgtatgccacgactttttacggctggtatagctgaattctatgaggagtattacaaaaataagggtgtcaatatcattaaaggaactgttgctgttggattcacttctaattctgatggagaggtaaaagaagtcaaactaaaggatggcagggtcctggaagctgatattgttgtcgttggtgttggaggaaggcctcaaacagccttagtcaaa

SEQ ID NO: 149334 - DNA, 255 bp, Glycine max
gggccagcaagccccactcaaccaccacacctctcctcgttcacgctacccctttctgctcttcttctacctttcaagttttaaaagtataaagatggcagagacattcctatttacctcagagtcggtgaacgagggacaccctgacaagctctgcgaccaaatctccgatgctgtcctcgacgcttgcctcgagcaggacccagacagcaaagttgcctgcgaaacatgcaccagcaccaacttggtcatggt

SEQ ID NO: 149335 - DNA, 256 bp, Glycine max
acatacttgctgatgtccctgggaaagacaaagagagagatggagaactttcccgtgatcaacttggagaatctcaacggtgaggcgaggtaagctaccctgcaccagattgaagatgcttgccagaactggggattttttgagttggtgaatcatggaataccccttgaacttttggatacggtggaaaggttaacaaaagagcattataggagatgcatggcgacgaggttcacggcggcagtgtcaagcaaag

SEQ ID NO: 149336 - DNA, 260 bp, Glycine max
catctcagcttcattggtgtgaagcgtggccgcaacctcgccgcgcaggaactgtggtccgagcttgaccctttctctgacctccttggcttcgataccaccaccaccaccaccaaccaaccaccccttccagacaaaaaagtggtgtcatcatgtgagaagaagaagaagaaaagtgtgagtgcagaaaagaagagtggtgggcgagctcggaagaacgtgtacagaggaatcaggcaaaggccgtggggcaagtgggc

SEQ ID NO: 149337 - DNA, 260 bp, Glycine max
atccaaaatggtggttggaaagcttgctcctttgttgttgtatatgaggtattcgaaagaatggcttattatgggatatcatcaaatttgattctgtatcttacaacaaagcttcaccaaggcacagtttcctctgcaaacaatgtcaccaattgggttggtaccatttggatgacacccatattaggcgcctacattgctgacgctttccttggccgctattggacttttgtcatagcctccaccgtttatctctcggg

SEQ ID NO: 149338 - DNA, 259 bp, Glycine max
cgagattgttgttgttgtaactcgttcttcttcttttgttgttctgtgtttgtgtttgttttttctctcacctgaaaatgtcttgctgcggtggtaactgtggttgcggaagctcctgcaagtgcggcaacggctgcggaggctgcaagatgtacccagacttgagctacactgagtcaaccaccaccgagaccttggtcatgggagtggcacctgttaaggctcaatttgagggtgctgaaatgggtgtgcccgctga

SEQ ID NO: 149339 - DNA, 259 bp, Glycine max
cgagtatctttctaacatggctgctgggactggactctttgcagagattttggatggagatgcgtacaagtactatgctgatggagagtggaagaaatctgcttctgggaaaagtgtttccatcatcaaccccactaccagaaagactcaatacaaagttcaagcttgttcacaagaggaggttaataaggtcatggacttagcaaaatctgcacaaaagttatgggcaaagaccccactatggaaacgtgctgagctt

SEQ ID NO: 149340 - DNA, 258 bp, Glycine max
cgagccaatctgagggtaaattgacatctctggatcagtacatatctagaatgaaaactgggcagaaggatatcttttacataactggaaccagcaaagaacaactggaaaactctcccttccttgagcggcttaagaagaaaaattttgaggttattttcttcacggatccagttgatgagtacttgatgcaatacctgatggattatgaagacaagaagttccaaaatgtgtccaaggagggtttgaaacttggga

SEQ ID NO: 149341 - DNA, 252 bp, Glycine max
aacattctaatctcattctccttctgttcaaacactctctctcatggcatcagataagaagattaggatcggcatcaacgggtttggaaggattggccgtttggtggccagggttgcccttcaaaggaatgatgttgaacttgttgctgtcaacgatcctttcatcaccactgattacatgacatacatgttcaagtacgacaccgttcatggccagtggaagcattttgatgtgaaggtgaaggactctaa

SEQ ID NO: 149342 - DNA, 244 bp, Glycine max
attgtttttggacatatgtatgtgttagaatgcttctgttttagtttttacctgcgggatgttgcagccactttagaaactgtattggacaacattcagttgccatctaatctcgtttaagttagtttgttggcttgcctcgttcttactaaaaaaaaaaaaaaaaaaaaaaaaaaaaaaaaaaaaaaaaaaaaaaaaaaaaaaaaaagggggggcccccccaaaaaaagcccccccacccggg

SEQ ID NO: 149343 - DNA, 260 bp, Glycine max
agctcacctcttcttcttcttcaaaaccaagttacttattatagaatccttaattttcctaaagttagaattcaatcaatcaggtggagatggtttgggtgaatgagaaactgaaggggttcgtggggcacagatgggtggtgtttgtgtgcgcgatgtgggacatgtcgtttgcggggacatcttacatgttcgggagcatatcgccggtgataaagagcagcatgggtttcaaccagaagcaggtggcgttcttgagc

SEQ ID NO: 149344 - DNA, 252 bp, Glycine max
gctccatcacctaatcacttccccacttcccctgtaaatcacgtttagttcgcacaaggttttaaaaaatggctgatgctaggacattcaacctcttgttgttgataatggaactggaatggtcaaggcgggttttgcaggtgatgacgctcctagggccgtgttccccagtattattgggcgaccacgccataccggtgtaatggttgggatgggtcagaaggatgcttacgtgggtgatgaagctcaatc

SEQ ID NO: 149345 - DNA, 250 bp, Glycine max
tctcgagcccgaatcggctcgaggagcgtggagagggtccgaagaagcacaacgttggagaaagtgattctcgttctgtcttctactcacaagagcaacaacaacaacatcagaatcagaaacagcaatggccaacactaacttggacgatgttccctctctggatctcatgactgagctccttcgtcgcttcaagtgctcttccaaacctgacaagcgtcttattctcattggcccacctggatctggg

SEQ ID NO: 149346 - DNA, 242 bp, Glycine max
caacagcaaattggtgaagttaatgagatcttcaaagatcttgctgtgcttgtccatgagcaaggagccatgattgtgatattggctccaacattgagaactcccatgcagcaactgcacaagcaaaatctcaacttgcaaaagcttcaaaaacccaaagatcaaattcctctttgacatgcttgcttttggtgatttttgggattgtgcttctcatcgtgatcatagttcttgctgcttag

SEQ ID NO: 149347 - DNA, 241 bp, Glycine max
cacctcactcttcagcttcggagattccctcactgataccggcaacttgtacttcatttcccctcgtcagagccccattgcttgctccctccctacggacaaacccattttcatcgccccaatggacgatgctccgatggacgccttatcctcgatttcctcgccgagtctctggggcttccgtatgtgaaaccgtatctgggtttcaagaacggcgcggtgaaacgcgggaatattgagc

SEQ ID NO: 149348 - DNA, 243 bp, Glycine max
gcagcagaattgtaccggagatgttcttttggatcagaactttgtgaatgacatgaattcttccccattatatgtagccataaagcaaaacgtgttcttcaacgtgctgtttggaatgacacatcttttctgaattcaatcaatgtgatggattactccttgcttgttggagtagattctcagaagcacgagcttgtctgcgggatcattgattatctcaggcagtatacttgggacaaacat

SEQ ID NO: 149349 - DNA, 245 bp, Glycine max
ggatcaatcagtttgatcgtggagccatgcagatcagcacacttgaaggcaatggaagtagccaaggaatctgggtcttgctctcctatgaccccaaccttcgtctacctttgttgccttcggctgaggaagctcgtaagcaaatactgagcatttgggagaaggctgatttgatcaaggtcagtgatgcggagcttgagttcctcacaggaagtgacaagattgatgatgaatctgctttgtca

SEQ ID NO: 149350 - DNA, 248 bp, Glycine max
gcttgctcgtttggttatggacaaatccccgcattcctacctcgccttctccggcgccgaagaatttgctaggcaacaggtgtggaggttgtggacaacgagtactttatcacacctgacaacgttggcatgctcaagctggcaaaggaagcaaacacaatcctgtttgattaccgaatcccaacatcggggtacgagacgtgcggatccggtgtggagagtccactgcaaatgaatggactcccaat

SEQ ID NO: 149351 - DNA, 255 bp, Glycine max
gtctggaatcttcaggtccaaaccaatagcaaggtttcaaatttgtttgctggaactcaggaaaaatgtgttgcttgcaaaaaacagtttacccaattgaaaaggtagctgttgatggaacatcttaccataaggcttgtttcaggtgcactcatggggggtgtgtaattagcccctcaaattacgttgcccatgaacatcgtctttattgtaggcaccatcacactcagttgttcaagcagaaaggtaattcag

SEQ ID NO: 149352 - DNA, 246 bp, Glycine max
aagaaggcgtcttcataaacgcctttcttctccgtttccgtttcctcgttcgaattcgctttttgatctgcgaaaagagagagtgcatctcgatccacattggtcaggctggtatccaggtcggaaatgcttgctcgggagctctactgcctcgagcacggcatcgggcccgatgggcaaatgccaagtgacaagacagttggcggtggtgatgatgctttcaatactttcttcagcgagactggt

SEQ ID NO: 149353 - DNA, 242 bp, Glycine max
ctctaaaccctaaacaactctttctcttcttccttcgctcgttgttctccctcgcgtagatcgacaatggcggaacagagacgtttgctttccaggctgagatcaaccagctcctcagtctcatcatcaacaccttctactccaacaaggagattttccttcgtgaactcatcagcaacgcctccgatgctttggacaagattcgatttgagagtttgacagataagagcaagctcgatgct

SEQ ID NO: 149354 - DNA, 243 bp, Glycine max
tcctgttctcaccgcaatgtcagcaggccatgttctccatgttttcattaatgatcaacttgcaggaactgtatgggggggattggcaaatcctaaattaacatttagtgacaatgtgaaactgagggttggcaataacaagctttctttacttagtgttgctgtcggtctcccgaatgttggtgtgcactttgaaacatggaatgcgggggtgttaggcccagtcactctgaagggtctaaa

SEQ ID NO: 149355 - DNA, 244 bp, Glycine max
gcttccagaaggacatcttgaaccttgtctacatctgtgaatgtaatggccttccagaggtggctgagtactggaacaagtgatcaaggtcaatgattatcagaagagccggttcgtgaaccgcgtggtttcgtcaatgtttaacactgttgcaaccaaaaagatagcaattcttgggtttgcattcaagaaggacactggtgacacaagggagacaccagccattgatgtgtgcaagggacta

SEQ ID NO: 149356 - DNA, 251 bp, Glycine max
ctgccattggattctccgccaaagtggtttgctttggaaacatcgaaggagctgaaaaacatgcttccaccgtttcccttcttcccaatctccaatacccaggcttgtcagcaaagggtgcaagttagttggatgtggctctgctgtgccagctcttcagatttccaatgacgacctttcgaaaatggttgatactaatgatgaatggatatctgttcgcaccggaattcgtagacgacgagttctttcag

SEQ ID NO: 149357 - DNA, 247 bp, Glycine max
aaaaaatctaaaactttttctttctagaaaaccagagcaaagcaaagcaaaaacagtcgctggctggaaacaactggccctcctaacgaaacgaagaatctcgcatcggaatctggaagcacgcgatgtcaacctcgaaccagcaccagttccgatacactcaaaccccttccaaggtgctccaccttcgcaaccttccctgggaatgctccgaagaggaactcagagagctctgcaaacccttcgg

SEQ ID NO: 149358 - DNA, 243 bp, Glycine max
tctcgagccgaatcggctcgagcttccataagcgcatgcctccaagggctgttgatttggagtcaagactactaaatacgcccctaacttgcggtgcacagctttagatgccttgacgcatcctttctttgacgaacttcgtgatccaaattctcgcttgccaaatggccgattccttccaccactatttaatttcaaatcccatgaactgaaaggtgtcccagctgagattttggtgaaatt

SEQ ID NO: 149359 - DNA, 238 bp, Glycine max
gagagagaaaagcgtgaatcatgtcggacgaagagcatcacttcgattctcaggcggatgcgggagcgtccagacgtatcctcagcaggctggtaccattcgcaagaatggctacatcgtcatcaaatccaggccttgcaaggttgtagaggtctctacgtcaaagacaggcaagcatggacatgcaaagtgtcactttgttgcaattgatatttttaatgggaaaaagcttgaagat

SEQ ID NO: 149360 - DNA, 237 bp, Glycine max
agtggtgcctacattgtgaggcaagctgcaaagagcattgttgcaaatggacttgctaggagggcaattgtcaagtttcctatgccattggtgtgcctgagcccttgtctgtgtttgttgacacttatggcactgggaagatccctgacaaggaaatcctcagcattgtgaaggagagttttgacttcaggcctggcatgatctccatcaaccttgatctcaagaggggtggaaatg

SEQ ID NO: 149361 - DNA, 262 bp, Glycine max
tcagctctcaattcgggtcgaggaagacaggttcaaaccggagcaaaaaaacttgttacgatggtttcttccgacaaggatccacgagaggagtccttcaagcatggtacatggatgatagtgatgaagatcaaagactcccccaccacaaagaacccaaggagtttgtctcgttggaccaacttgctgaacttggagtccttagctggaaattagatgctgataaccatgaaaatgatccagagctgaaaaaggatcgtga

SEQ ID NO: 149362 - DNA, 245 bp, Glycine max
gttcatacttgtttcttcaatttcatttcttttattacttttcctctttgcattccaaatggccactgttgagttgcacaacaaacaccaacaactgtgacagaaaatgaagcaaccgaggtaaccaagattgaggaaactaccccagaacaaccagcttcccaggttactaccaccgaagaaccaaaggaagaaaccaccaaagaagcaaaagaggaagaagaagccccagttgagactaatga

SEQ ID NO: 149363 - DNA, 238 bp, Glycine max
ataagatgaaaggagattattatcgttatcttgctgaatttaagtcaggcaatgagaagaaggaagctgctgtcagtctatgaaagcatatgagtctgctaccgctgcagcagaggctgatttacctcccacacatcccatccgattgggtctagctttaaatttctctgttttctattatgagatcttgaactcccctgaaagagcctgtcatcttgcgaacaagcttttgatgaag

SEQ ID NO: 149364 - DNA, 242 bp, Glycine max
gcgtttcgtcgtccctgaaggcaccaaaaaggtttcttatgagagggacacgaagatcatcaatgcggcgtcttcaccatcgagagagaggagcacactatcggcaacatcctccgcatgcagctgcacagagaccccaatgtcttgtttgccggatacaagcttcctcatcctcttcaatacaaaattattgtcaggatacacaccactagtcagtcttcgccaatgcaggcatataacca

SEQ ID NO: 149365 - DNA, 237 bp, Glycine max
gcctcgccgaaggagagtccgttgagttcgccattgaatctgaatctgacggacgcgcgaaggctgttgattcactggccccgacggcgccacgtccagggaaccagacgaggcggtgatggtggccgaagctatggcgggggacgaggaggtggtggaggtggctacggtggaggcggtggctacggtggtggtggtggctacggtggaggcggtggttacggtggtggtggaaga

SEQ ID NO: 149366 - DNA, 234 bp, Glycine max
gtcttggtgctgagattgttggcactttcatccttgtttacaccgttttctccgccaccgatgccaaactagcgccagagactcccacgtccccattttggcacccttgccaattgggttcgctgtgttcttggttcacttggcaaccatccccatcaccggaactggtatcaaccctgctcgtagtcttggtgctgctatcatcttcaacaaggaccttggttgggatgaaca

SEQ ID NO: 149367 - DNA, 237 bp, Glycine max
  unsure (1)..(237): unsure at all n locations
ctattacagaatgtgcaccctgccattctccttaggttcctgcgggagcatagatcagaatgggcagncacaatatggatgcttacacagctgctgctattaaagttggcccttgcagcttttcaggatctcgtgttggaaactatggaggtcaagttatactccccctagcacacacaattgagcatgaagagtttttggaagtcattaaattggaaggagttgctcattctcctg

SEQ ID NO: 149368 - DNA, 235 bp, Glycine max
gaagattgtgcgcgatacgtgccgttctataggatttgtgtctggtgatgttggccttgatgctgacaatgcaaggtattggtgtaccttgagcagcaaagtcctgacatagcacaaggagtccatggccacctcaccaagcgaccagaagacataggagctggcgatcagggtcacatgtttggctacgccacagatgaaacacctgagcttatgcctctcagccatgtccttg

SEQ ID NO: 149369 - DNA, 244 bp, Glycine max
gattgacaggcgatctggcaaagagcttgagaaggaacccaagtttttgaagaatggtgatgctggttttgtaagatgattccgaccaaacccatggtggttgaaactttctctgagtaccccccacttggtcgctttgctgtcagggatatgcgtcaaactgttgctgtgggagtcatcaagaacgtggagaagaaggatcctactggagccaaggtcaccaaggctgcccagaagaagaagt

SEQ ID NO: 149370 - DNA, 247 bp, Glycine max
tagcaaacctcttcgttccttcgattcattccatttcttccaaaatggccaaagacccagttcgcgttctcgtcactgagccgcaggcaaattggatatgctcttgtccctatgattgctaggggagtgatgctgggtcctgaccagcccgtgatcctccacatgcttgacattcctccagcagcagagtcgttgaatggggttaaaatggaattggtggatgctgcattccctcttcttaaaggtg

SEQ ID NO: 149371 - DNA, 249 bp, Glycine max
gcagacttaacaacagcacaaagcgggttactgtctgttcaagctaccatctctctctctctttcttagtgcctccttgccagaagttaaaatggcccaagaaactttcctattcacatctgaatcagtgaacgaggggcaccctgacaagctctgtgaccagatctccgatgctgtgctcgatgcatgcttggagcaggaccctgacagcaaggttgcctgtgaaacctgcaccaagaccaacatggt

SEQ ID NO: 149372 - DNA, 242 bp, Glycine max
cttgaaggcgaggctgatgaactcaagagggtattcttggaagggaatccttacctcctggcaattaccaggttgtttctcttcttcattcagtctttgacttcttggctttcaagaatgacatccaattttggaacaaaaataaatctatggaaggactctctgcaaagaccgttgttgtgagctttgcttgtcagcttatcatcttcctttatctacttgacaatgacacctcttggatg

SEQ ID NO: 149373 - DNA, 240 bp, Glycine max
tgattgagaggtccacaaaccttgactggtacaagggtccaactctgcttgatgcacttgaccagattaggagcccaagaggccctctgacaagcccctcaggcttccccttcaggatgtgtacaagattggaggtattggaactgtgccagtgggacgtgttgagaccggtgtcttgaagcctggaatggtggtgacttttgcaccaactggactgacaactgaagtcaagtctgtgga

SEQ ID NO: 149374 - DNA, 240 bp, Glycine max
tacaaatcaggagttcatgaaggtttcatagctggagctggtctaggcacagttatgttagttattttctgtggttatgctttggctgtatggtttggcgcaaagatgataatggaaaaaggatataatgggggcacagtgattaatgtgattattgccgtgctaactgcttcaatgtctcttggagaagcatcccctagcttgagtgcttttgctgcaggtcaggctgcagcttacaaa

SEQ ID NO: 149375 - DNA, 237 bp, Glycine max
tgcagtttttgacaaagctattgtattatactccaacagctattcttgcttctgtgatcctctctgccccccaggactcattgacgttagtgaagcttacaaaatttggaaggttgataagatagactttcttgcttgcgctggggcattctttggagtactgtttgcttctgtggagattggtctacttgttgcggtgttaatatcattttcaaagatcattctgatctcaattcg

SEQ ID NO: 149376 - DNA, 239 bp, Glycine max
caacaacttctgctacttcctactccaaccgcacttctgctccgcaattatcatgggcaaggtcaagatggagacaacggatttggaagaattggccgtttggtagccagagtggctctgcagagagacgatgttgaactcgttgccgttaacgaccctttcatcaccaccgattacatgacatacatgtttaaatacgacagtgttcatggacactggaagcatcacgatgtcaccgt

SEQ ID NO: 149377 - DNA, 235 bp, Glycine max
aatgcatggtggctggccaacaaccctgcacactggaagaagccagaggagttccggcctgagaggttttcgaggaggagtcgcttgttgaagccaatggcaatgactttaggtaccttccctttggtgttggcagaagaagctgccctggaatcattcttgcattgccaattcttggcatcactttgggacgtttggtccaaaactttgagctcttgcctccccctggccagtc

SEQ ID NO: 149378 - DNA, 234 bp, Glycine max
tcttcttctcttgcggctagggttttagcgcagttcttctagatttaaggaagatgggtaaggaaaggttcacatcagtattgtggtcattggccatgtcgactctgggaaatccactaccactggtcacctgatttacaagcttggaggcattgacaagcgtgttattgagaggtttgagaaggaagctgctgagatgaacaagaggtctttcaagtatgcctgggtgctgga

SEQ ID NO: 149379 - DNA, 237 bp, Glycine max
aaattagttcattctctttgcgcagttccctacctctcctttcaagatgcagatcttcgtcaagaccccaccggaaagaccatcacccttgaggtggaaagctctgacaccatcgacaacgtcaaggccaagatccaggacaaggaaggaattcccccggatcagcaacgtctcatcttcgccggaaagcagctcgaggacggccgtaccctcgccgactacaacatccagaaggag

SEQ ID NO: 149380 - DNA, 242 bp, Glycine max
gaagacaggttcaaaccggagcaaaaaaacttgttacgatggtttcttccgacaaggatccacgagaggagtccttcaagcatggtacatggatgatagtgatgaagatcaaagactcccccaccacaaagaacccaaggagtttgtctcgttggaccaacttgctgaacttggagtccttagctggaaattagatgctgataaccatgaaaatgatccagagctgaaaaagattcgtgaag

SEQ ID NO: 149381 - DNA, 244 bp, Glycine max
ggtcaagcttgttctcttaggtgattctggtgttggtaaaagctgtattgttctacgatttgttcgtggtagtttgatccaacatctaaggtaactgttggagcttcttttttgtcgcaaacaatagctctgcaagactctacaacagtcaagtttgaaatatgggatactgctggtcaagagaggtatgctgcgttagaccgctatattaccgtggtgcagcagttgcagttatgtgtttatg

SEQ ID NO: 149382 - DNA, 243 bp, Glycine max
attcattcaagattcagcaagtgcgttttggaagcagagaccgaaatacttcgagatggcccgtacaaacaaactgctcgtaagtcaactggaggaaaagctcccaggaagcagcttgcaaccaaggctgcacgtaagtctgcaccaacaactggtggtgtgaagaagcctcatcgttatcgccctggaactgttgctcttcgtgagattaggaaataccagaagagcactgagctcctaatc

SEQ ID NO: 149383 - DNA, 239 bp, Glycine max
gccaaacccttctggccactgctattggaggcaaagttggtgctgctgctgttactgttagtcctagagactcattgtggtagctgctgctgcaccaaagaagtcatggctccctggtgtcagaggtggtggcaacctcgtcgacccagaatggcttgatggatcgctaccaggtgactatggctttgacccactaggccttgggaaggacccagcattcctcaaatggtacagagaag

SEQ ID NO: 149384 - DNA, 225 bp, Glycine max
ggctcgaggaacatggggtttgaggaaactaggctaaggcttggacagccctggaacgtaggaggcactggcactgaagaagtgctcatcaggaagagaggtttctctgagactgaaactgaaactgaggaggatgagtctgctaccactgtggatttgatgcttaatctttcttctaaggaagctgctgctgctgcagatccaactgataagcacaagactttg

SEQ ID NO: 149385 - DNA, 237 bp, Glycine max
ctttaatcaatcatcatatttatctttgcaactaaaatggcgtcgtcacaaccagagatggagcatcaaagaaggtttttggttgggctgctcgggactcatctgggcttctctccccattcaacttctccagaagagaaacgggggagaaagatttggtattcaaagtgcaatactgtggaatatgccactcagatctacatatgttaaagaacgagtggggcaacacaacctatc

SEQ ID NO: 149386 - DNA, 236 bp, Glycine max
ctcttccacctcgccttcttctcccaatgccttccctccgcctgggcccactcggcgatcctcctccgggtcaactcgcccgtgactcaccgcagagctgccccgcccctgaccccaacctctactacaagccagtcatcggaatcgtcagccatcccggcgacggcgcctccggccgcctcagcaacgccaccggcgcctcctacatcgccgcctcctatgtcaaattcgttgag

SEQ ID NO: 149387 - DNA, 232 bp, Glycine max
aacggaagcatacctgtttcctttatccaaattattaatgaagaaactaggcctgaaaagtgagatgaggttgagattaaatgcatgggacatccagtgcttccttcactgcaggtgcaaaatttggttgacctgtggggggttgatacagcgtctttgggacatagaatttcagcaaccattggatcctcagggaaagattttgtcatgatcctaacctatggtcggaagg

SEQ ID NO: 149388 - DNA, 232 bp, Glycine max
acagaacaagatcttgaaggtcatcagaaagaacttggttaagaagtgccttgagctcttctttgaattgcagagaacaaggaggattacaacaagttctatgaggctttctccaagaacttgaagctaggtatccatgaggattcacagaacaagggaaagattgctgaattgctcaggtaccactccaccaagagtggtgatgaaatgacaagcctcaaggattatgtga

SEQ ID NO: 149389 - DNA, 234 bp, Glycine max
cccgtaaggcgcaaggaagctgattggtgggatccccctgtgggttgcaccgccgaccgaccctgacttctgtgaagggttcgagtgagagcatacctgtcgggacccgaaagatggtgaactatgcctgagcggggcgaagcagcaggaaactctggtggaggcccgcagcgatactgacgtgcaaatcgttcgtctgacttgggtataggggcgaaagactaatcgaaccgt

SEQ ID NO: 149390 - DNA, 238 bp, Glycine max
cccaattcctaattgtttaaacctaattctcatttcttcatcgttcgattcttctcctcctaaagatgagatcttcgtgaaaactttgaccggtaagaccatcacccttgaggtggagtcctccgacaccatcgataacgtgaaagctaagattcaagacaaggaagggatcccacctgaccagcagagacttatctttgcgggtaaacagcttgaggatggtcgaaccctgccgact

SEQ ID NO: 149391 - DNA, 245 bp, Glycine max
gaagaaatggcaaatcatcctttgacacactctcactctttccgcgagaggtttgatgaaactctcactggtcacaggaacgaaattttggcccttctgtcaaggcttgaagccaagggcaagggaatcctgcaacatcatcaagtggttgcagagtttgaagaaatccctgaggagagcagaaagaaactccaagatggtgtctttggagaagttttgagatccacacaggaagccatagtgct

SEQ ID NO: 149392 - DNA, 252 bp, Glycine max
gagagagacgcttcgcaaatctcaatcgaatctcagaaaaatgagagaaatcatcagcattcacataggtcaggccgggatccaggtcggaaactcctgctgggaactctactgcctcgaacatggcatccagcccgacggcatgatgccttctgactccaccttcggtgtagcccacgacgccttcaacaccttcttcagcgaaaccggatctggcaagcacgtcccccgtgctgtcttcgtcgacctcga

SEQ ID NO: 149393 - DNA, 147 bp, Glycine max
ctcgcgtacgcgggttcggggctgctgtagtttcatactttggtgctcaggtcctgcatccacagtctatgagacctgctagagaaagtgatattcctgttagggttaaaaattcctacaaccctaaagctccgggtactctcattg

SEQ ID NO: 149394 - DNA, 181 bp, Glycine max
ccttcagcttgttcgacaaggacggcgatggttgcatcacaaccaaggagcttggaactgttatgcgttcattggggcaaaacccaactgaggcagagctccaggacatgatcaatgaagtggatgctgatgggaatggtaccattgacttccctgagttcctaaatctcatggcaaggaa

SEQ ID NO: 149395 - DNA, 207 bp, Glycine max
ctttcgaaagattttatccaattgaaattttttaaaaatgactgggataaacttaagaattcaattattgaaattgaataagtaaacaatttaattggattggtcgaatggtatcaaaaaaatggagtactaactcccatttcttatttattattgaattaaccgatcaacttgctttgttatcgaacatttcttttgatttcaaaa

SEQ ID NO: 149396 - DNA, 209 bp, Glycine max
aaagcccaaaactgtcaaatatgaatttaaaaccaacacccatgtccctaaactaggggtaatgcttgtggggtgggggggaaacaatggctcaaccctcactggtggtgttattgctaaccgagagggtatttcatgggcaacaaaggacaagattcaacaagccaattactttgggtcgctgacccaggcatcggctatcagattgg

SEQ ID NO: 149397 - DNA, 245 bp, Glycine max
actccatcgtgacataaagggctcaaatcttctcattgacaataatggagtcttaaagatcgctgattttggtttggcaagtttttatgaccctcagcgcaatgttccattgacaagccgagtagtaactctatggtatagaccaccagaacttttacttggagcgaatcattatggggttgcagtggatttgtggagcactggttgcatactggggggactatatactggaggccttttttccc

SEQ ID NO: 149398 - DNA, 242 bp, Glycine max
gaaggagtcaaatccgtttattcatggtgctggacatgttgatcccaatagggctattaaccctggcttggtttatgatttggacactggtgactatgtggcgatcttgtgttctgttgggtatgatgctaatcagattgcggttttcactagagagcctgctgctgaaagtgtttgtgaagggaaagtggggaggactgggaagttggcgagtcccaatgacttgaataacccaacatacg

SEQ ID NO: 149399 - DNA, 239 bp, Glycine max
cattcccgtactcgttggccctgttacatacttgttgctctccaagcctgccaagggagtcgagaaatccttttctctcctctctctccttcccaaggttcttgctgtctacaaggaagttattgctgaccttaaggcagctggtgcttcatggattcaatttgatgagcctacccttgtcttggaccttgaatctcacaagttgcaagctttcactgacgcatatgcagaacttgcac

SEQ ID NO: 149400 - DNA, 190 bp, Glycine max
gccgtcgaaggcgtcgccactctcatccaagaagacgatggcccgacgacagtttctgttcgcatcactggccttactccggggcttcatggttttcacctacatgagtatggtgatacgacaaatgggtgtatttctacgggagcacattttaatcctaataaattgacacatggtgctcctgaggatg

SEQ ID NO: 149401 - DNA, 152 bp, Glycine max
aagaagtataacattgagccaagggctcctgagttttacttttctcagaaaattgattacttgaaggataaggtgcagcctacatttgtgaaggaaagaagggccatgaagagagaatatgaagaatttaaggtgaaaattaattctttagt

SEQ ID NO: 149402 - DNA, 211 bp, Glycine max
gtcaaggtgacgaaggtttgcacgctcgagcttttcacgccgaagcgcctcgagtccctcaggcccattagggaggacgaggtcaccaccattggtgagtccgtttacaatcactgcaccaccactggaaatttagggaaagcaatattggtgaggaagcacttggggtctgtggcattcaacaacatcaccaggttggcatttggaaaaa

SEQ ID NO: 149403 - DNA, 167 bp, Glycine max
ctcttctgcggcgtacaagtgggacactccaacgtttggaattctcacccaaaaaactacggtcctggttctcgcacttgccgagtgtgtgggaatccacatggattgatcaggaagtatggccttatgtgctgcaggcagtgcttccgtagcaatgccaaggaaat

SEQ ID NO: 149404 - DNA, 200 bp, Glycine max
agggtatggggacgcgaaccagaggatagactacgtgttcaaggtggtgctgataggggactcggcggtggggaagtcgcagatactagctcggtttgcgaggaacgagttcagcttggactccaagtccaccatcggtgttgaatttcagacaaggaccttggtcatagatcacaagaccgttaaggctcagatctggg

SEQ ID NO: 149405 - DNA, 242 bp, Glycine max
ctcttcctcagtagtgcgattttcgattctcttctctgcaactatgcctaaccctaaggtcttcttcgacatgaccatcggcggtcaacctgccggccgcatcgtgatggagctctacgccgacgtgactccgagcaccgccgagaacttccgcgcgctctgcaccggcgagaagggcgccgggcggagcggcaagcccctccactacaaaggctcgtccttccaccgcgtgatcccgaact

SEQ ID NO: 149406 - DNA, 164 bp, Glycine max
ctcaaagaaatatggtcctttattttcccttcaatttggattaaggccagccatagttgtttcctctccaaaattggccaaagaggtaatgaaagacaatgaccttgagtgctgtggacgacctaaattattgggccaacagaaactaacctataatgggttaa

SEQ ID NO: 149407 - DNA, 191 bp, Glycine max
gccaggtatgatgaaattgtgaaggaagtttcttcctatttgaagaaagtaggatacaaccctgacaagattccttttgttcctatatctggttttgagggagacaacatgattgagaggtccacaaaccttgactggtacaagggccctactctgctagatgcacttgaccagatctctgagccaaagag

SEQ ID NO: 149408 - DNA, 164 bp, Glycine max
cggtgcgcggcagcaacatccacgggagggctgatgaacaaaatgaccgggcgcatcggtgattcgccgctgataggcgccgggacctacgcgtgcgacgtgtgcggcgtatcgtgcacgggtgaaggcgaggcaatcatacgtggaacgctggcgcgtgaggt

SEQ ID NO: 149409 - DNA, 174 bp, Glycine max
taaaccctagcccctcttctcttcattcttcactcaggaaacaagcataatggccttctgtaataaggttggaaatgtcttgaggcagggtgctgctcgcagcacacaagcacctgtttcatccatgcttaattacattcgctgcatgtcttcaagcaagcttttaattggagg

SEQ ID NO: 149410 - DNA, 182 bp, Glycine max
caagttgaaaaagaaagtagaagagtctccaccatgggtgaagaacttgctaagctttgttgaacttccaccgactgaagttatccttagaagattgtttctctttggcttcatgggtggctggagtattatgaattctgctgaaactggacctgcttttcaggtggaaatctcttgggctg

SEQ ID NO: 149411 - DNA, 243 bp, Glycine max
atacccgaacaactcgtatcgggtttgcgcaacattgtacaaatcgaactctacgaaaactctctctccggcgcgttgccacgcgccgcgtttacaaacctcgccaacttagaaagattcgatgcctccacgaacgagttgactgggacgattccagaagagttgtgtgggttgaagaaactcgggtcgttgaatttgtacgaaaataagctcgagggttctttgcgggcagactatagtgaa

SEQ ID NO: 149412 - DNA, 231 bp, Glycine max
gttaaaaatgagttgccaagtactttcaaggcctaccgctaccaacagcaccgttggtcttgtggtccagccaatctttttaggaaaatggtcatggagatcataattaccaagaaagtgtcattgtggaagaagatacaatgtgatttacagcttcttctttgttcggaaggtcctaacccccataaacacgtttgtgttttattgcattgtattacctgcaacattttt

SEQ ID NO: 149413 - DNA, 221 bp, Glycine max
ggaatgagaagtttgatgcttcaataacaaaagactacgattttcaccttcttaatggcagttcagtcaaggttcccttcatgacgagcaagaagaagcagtttattatggcttttgatagtttcaaagtccttggtcttccctacaagcaaggcgaagataagcgccaattcaccatgtactttttccttccagaaacaaaagatgggctgttagctttg

SEQ ID NO: 149414 - DNA, 157 bp, Glycine max
gtggcaagacctatcttctacgcataataaacgacactttgaacgatgaactgttcttcaaaattgcggggcacaagttaacagtggttgaagcagatgcatcttacgttaagccttttgaaacagacacaattttcatgagcccaggccaaaccac

SEQ ID NO: 149415 - DNA, 238 bp, Glycine max
cttaatccaaatacgatggcagccatggcaaccacaaccctctcatcaaaccccaaactctcattcttcaacggaaagcccgtcacatattcttcccgcgtcgcgcccaccaccaaattatcctcatccaaacaaggcacaatttccatgtccctaaccccacccccctacgacctccagtccttcaaattccagcccatcaaagaatccatcgtgtcacgggaaatgacgcgccgct

SEQ ID NO: 149416 - DNA, 230 bp, Glycine max
gaaaatgcaattggggcatgtgctcaacttgtgtttgcacctattgatgagtcctttgctgatgatgctctgttgcttccatctggttttcgtgtcattccgttggatcctaaatcagatggtccagctgcaactaggacattagatttggcatcaacaatggaagtaggttctggtaatgctcgtccagctggggaagctgacttgaacggctacaaccttaggtcggt

SEQ ID NO: 149417 - DNA, 217 bp, Glycine max
gcaaaaagaaagaatcccaggcgaggagaaagatggaggggaaggagcaggatgtgtcgttgggagcgaacaagttccccgagagacagccgattgggacggcggcgcagagccaagacgacggcaaggactaccaggagccggcgccggcgccgctggttgacccgacggagtttacgtcatggtcgttttacagagcagggataccagagtttgt

SEQ ID NO: 149418 - DNA, 191 bp, Glycine max
gcctagtgattcagctagctaagcaagtttttggagcttcaagagttgctgccacttcgagtactagaaatttggacctattgaaaagcttgggagctgatttggctaatgactacacaaaagagaactttgaagatttgccagaaaaatttgatgtagtttatgatcgccattgggcaatgtgacggggc

SEQ ID NO: 149419 - DNA, 159 bp, Glycine max
gatggaagtgtggctaacttggatggaagtgccttccatttaatcggagctccacactcttctgatcagaattcccagcagcacaagagaaagtgttctgccagaggtgatgagggaagcttgaaatgtgggagcagtgctagatgccattgctctaag

SEQ ID NO: 149420 - DNA, 234 bp, Glycine max
ggatcgagccgaatcggctcgagcagattcgtggggtttgtctgtgagctttctcagcataatacttgctaccaatagttggaaatgcagctgaacatgcaggagcaatcatatttgctttcaagaacaagctggacatttcattgggtgttgcattgggttcagcaactcagattgccatgtttgtggtcccattatgtgaaaccgttccttggataatgggtatcgatatgg

SEQ ID NO: 149421 - DNA, 256 bp, Glycine max
cctctctctctctcagaaagatgaaggtggtcgccgcgtatttgctcgccgtcctcggtggcaacaacagcccctccgccgatgtcatcaaggaaatccttggctccgttggagtagaagcagatgaagataggattgaatcgtttttgtctgaagttaagggtaaggatatagttgagcttattgctgccgtagggaaaagttggccacggttccttctggtggtggtggtgccgttgccgtcgccgcagctcct

SEQ ID NO: 149422 - DNA, 251 bp, Glycine max
gctgcatgcacatgggcaacttcgacgaagctgagacccttttggttgaagctcttaacaaggatgccagggatccagaaactctagccaatctagttgtatgctgtcttcatctcggcaaaccatctaacaaatcattcagccagctgaaactttctcacccagagcatgtattggtcaaacgggtacatcagctgaagaaagttttgatagagcgctacaatcattttcctcatgagtgtcgatgattg

SEQ ID NO: 149423 - DNA, 251 bp, Glycine max
agtgaacccagttttggtacttggaccattactgcaacccagcataaatgctagtacaattcacatcctcaagtacctcactggctctgctaagacctatgcaaatgccacacaggcgtatgttcatgttagggacgtggcattggcccacatacttgtttatgagaagccttctgcctctggtagaacatatgtgccgaaagctctctccaccgtggagaattagttgaaattctcgccaagtatttccc

SEQ ID NO: 149424 - DNA, 224 bp, Glycine max
  unsure (1)..(224): unsure at all n locations
aatttgacaaagaacaatgatgacgatgagggaaaatcaggatttggttgtctctatgtaaaagtcagtatggatggtgccccttatcctagaaaggttgatctcaaaacatataacaactatatggaactttcctcagcccttgagaagatgttcagctgctttaccattggtncaatgcaattgctcctggacttgcctgggggaaaggatggacttaagtg

SEQ ID NO: 149425 - DNA, 252 bp, Glycine max
ctagtacatacattcccctaaccaagttttaagtttttctcaacagaatggaagcaaccaacagaagctcttcctccacttcctcttcctctgattgctgctcttccgagtccaaccccaacaagcccgacagaatcaaaggcccatggagcgccgaagaggatcggatcctgaccggactcgtcgaacgatacggcccacgaaattggtccctcatcagccgctacattaagggaaggtccggcaagtcat

SEQ ID NO: 149426 - DNA, 255 bp, Glycine max
ccttgttcttctttctctattgtctatagtcatctccattgttctcttcattacccacacacacaaaagaaacaacactccaagaggaccaccaggtcctccacctcttcctctcatcggcaaccttcaccaactccacaactcatccccacatctctgcctatggcaactcgccaaactccacggtcctctcatgtcgtttcgcctcggcgccgtgcaaaccgtcgtggtttcatcggccagaatcgccgaaca

SEQ ID NO: 149427 - DNA, 251 bp, Glycine max
gcttgctcgtttggttatggacaaatccccgcattcctacctcgccttctccggcgccgaagaatttgctaggcaacagggtgtggaggttgtggacaacgagtactttatcacacctgacaacgttggcatgctcaagctggcaaaggaagcaaacacaatcctgtttgattaccgaatcccaacatcggggtacgagacgtgcggatccggtgtggagagtccactgcaaatgaatggactcccaataa

SEQ ID NO: 149428 - DNA, 251 bp, Glycine max
  unsure (1)..(251): unsure at all n locations
ctctnctcattaacacactacgcgtgcaaagaacctctgctctcctcttgcttttgatnnagaagaaagaagcgagaagatgtcagancgcgttctgcagcgactgcaagaggcagacggaggtggtgtttgaccactctgccggcgacacggtgtgctcggagtgcggnctcgtactggagtcccatctatcgacgagacctctgagtngcgtaccttcgccaacgagtccggtgacaagatcncaatcg

SEQ ID NO: 149429 - DNA, 246 bp, Glycine max
gcaagaatggcacttcgttgcttggtgatgtccctttctgttctcttcactcttggtcttgcgagagaaagccatgccagagacgaagatttttggcatgctgtttggccaaacactcccattccaagttcattgcgagatcttctaaagcctggccctgcaagtgttgaaatcgatgatcacctatgcaaattgaagaaacacagtacccgaaaaccttcttctataaagaagaccttcatccag

SEQ ID NO: 149430 - DNA, 250 bp, Glycine max
gtactggcctataacaaatagtcctaaggaggttatgttcctgagtgagttggaagaagtcttagaagcaactcaacccccagaattccagcgctgtatggtgccattatttcgtcgcattgcacgttgtttgaatagccctcattttcaggtggcagaaagagccttgttcttgtggaacaatgatcacatcatgaacttgatcaaacaaaaccgaaaagtgataatgcccatcatcttccctgcattg

SEQ ID NO: 149431 - DNA, 247 bp, Glycine max
aaaaaaatgggttcttcttcttccatatggaccgtgtgtttgattttggcatcactggcctctgcagcactctgtgccaaccctcgtagaccagtggatgtacaatttggccgaaactacgtgcccacatgggcctttgatcacatcaaatacttcaatggaggttctgacattcagcttcatcttgacaagtacactggtactggcttccagtccaaagggtcatacttgtttggtcacttcagca

SEQ ID NO: 149432 - DNA, 248 bp, Glycine max
cgcgtgttggtgagaagaatgtgttgatttttgaccttggtggtcggacatttgatgtgtctttactcaccattgaggagggtatctttgaggtgaaagccactgctggtgacacccatcttggaggtgaagattttgataacaggatggtgaaccactttgttcaagagttcaagatgaagaacagaaggacattagtggaaaccccagagcacttagaaggttgaggactgcttgtgagagggcca

SEQ ID NO: 149433 - DNA, 249 bp, Glycine max
gcagaacgtctggcagagcttgctgctgatctaggctttgatgggtggctaataaatatggagagtaaatttggatctcggtcaaatttctaatttgaaagagtttgtagagcacttatcgttgagaatgcattcttctgtgcctggatcattagtgatatggtatgacagtgttacacttgatggtaaattgaattggcaagatcaactaaatgagcataataagcccttctgtgatatatgtgatgg

SEQ ID NO: 149434 - DNA, 247 bp, Glycine max
ggcggcataaccatccttgcaccagatgattctgccttttccaacctcaaagcaggcttcctcaactccctaaacgaaggccagaaaatcgaacttgtgcagttccacatattgcccgagtttgtgtccagctcaaactttgattctctaagcaaccctgtgcagacagtggccggtaaagatccgcaaggcttccattgaacgtgaatgcattaggaaacagtgtcaacatttcaaccggggtcgt

SEQ ID NO: 149435 - DNA, 247 bp, Glycine max
agtttcagctttgagttctttgaagaaacataatgactcatcaacattttctcgaaaaaatatactttaccttaaccgacatcaaacagaggagtggaaaggatggatgcaggtcctctttttaatgtatcattattttgctgcaacggagatatacaatgcaatacgtgttttcattgctgcatatgtttggatgactggatttggaaacttctcctattattatatcagaaaagattttagcctt

SEQ ID NO: 149436 - DNA, 244 bp, Glycine max
gattgtttgttgttgtaactcgttcttcttcttttgttgttctgtgtttgtgtttgttttttctctcacctgaaaatgtcttgctgcggtggtaactgtggttgcggaagctcctgcaagtgcggcaacggctgcggaggctgcaagatgtacccagacttgagctacactgagtcaaccccaccgagaccttggtcatgggagtggcacctgttaaggctcaatttgagggtgctgaaatggg

SEQ ID NO: 149437 - DNA, 247 bp, Glycine max
gaatcaaacaacacccttattaccaaacttcgcttagccaaagacacttacttctcttcatgggttctattggaattgagagctcgggacctgaggttgtcaccgttgatgtacatgcaaccaaggatctgatccagaccagtcatgtttatctggatgtcaggacggtggaagagtttcagaaagggcatgtggatgcagagaagatcattaacgttgcatacatgtttaatacaccagaaggcag

SEQ ID NO: 149438 - DNA, 244 bp, Glycine max
catgattgatagcgttcctggaatgaaggctttggatatgaatgctgcagaggatgctattgtgaggctcacgagggagattgtgcccggcatgattgtcaccggcatggaggtggcagaaattgatggctccccaaggatgggtccgacgtttggggcgatgatgatatcagggcagaagcggctcatttggcgttgaaggcgttggggaggaacaatgcaattgatggaacgtgtggagttg

SEQ ID NO: 149439 - DNA, 245 bp, Glycine max
gaagaacccacaggatatttggagtctcaaagaaaattctagaatatttcttgaagcatttagacttttttttacaaaaagggaaaaggagattggcaatctaagctttgataaagatgatcagttggctgtagaatttgttactgcagctgcaaacataagggctgcttcatttggcatccctctccaaaacctttttgaagctaaaggtattgctggtaatattgtgcatgctgttgcgacta

SEQ ID NO: 149440 - DNA, 245 bp, Glycine max
aagaaatttaagtgaggagctagagaatgatgatgaagtctgctatgtgtgcagtggtggttgtagcacttcttcttctggcggaggtggggcccatggctgaggctgtgacatgcaccccaacagagttgagtccgtgtcttccagcaatcacttccggtgctaaaccttccaatgcttgttgcacgaagctgaagcagcaaaaaccatgcttatgtggctacctcaaaaacgctagcttgaag

SEQ ID NO: 149441 - DNA, 244 bp, Glycine max
attccatttaacaaagcatatggaatgacagcctttgaataccatggaacagatcacaggtttaacaaggttttcaacaaggggatggctgatcactccacaatcacaatgaagaaaattcttgagacctacactggctttgagggtcttaaatctctggttgatgttggtggaggaactggagccgtagtcaacatgattgtctcaaagtatcccactatcaagggcattaattttgatttgc

SEQ ID NO: 149442 - DNA, 249 bp, Glycine max
tagattatggctcaagggttgcttctgaaagacgaacatcttacagggattatcctgctcgtggtcctggctacaccgagctccctagaagcacatctcgtgctgcaccaaggagaggctatgtggatgatgggtatggccagagatttgagagggctcctcctcctcctcctcctccccatctaagttaccgtgaaggacgtccccgagattatgatgctctgtctggctcaaaacgttcttatgctg

SEQ ID NO: 149443 - DNA, 248 bp, Glycine max
aatatattccattctctctgtgtatttccctacctctcccttcaagatgcagatcttcgtcaagaccctcaccggcaagaccatcacccttgaggtggaaagctctgacaccatcgacaacgtcaaggccaagatccaggacaaggaaggaatccccccggaccagcaacgtctcattttcgccggaaagcaacttgaggacggccgtacccttgctgactacaacattcagaaggagagctctgaca

SEQ ID NO: 149444 - DNA, 243 bp, Glycine max; identical to SEQ ID NO: 138287

SEQ ID NO: 149445 - DNA, 243 bp, Glycine max
caaatcctgatgatccacttgttccggaaatcgctcacatgtacaaaactgaccgggccaagtatgaggccactgcacgcagctggacccagaagtatgccatgggctgatttgtgtttggataatgtatattgaaatggattgcatctatgaaaacttttgtgggtttgcttttcactgcctgttttctgggtaagattatgtttctgttatgaggggctagggaagggaggtgtcttaatt

SEQ ID NO: 149446 - DNA, 243 bp, Glycine max
agctccgcgccgtccttctcagatgagactaaaagcaatctgaaccttaaggctactgagctgagactggggcttccgggattgcagtctcccgaacgagattcagatctttgcttgagaagttcaattcagtttgatgaaaaaccactgtttcctttgcatcctgctactgatgatcacattcctcatcaaagcctgctgttttgggtaacaaaagagggttctcagatgtcatgagtggat

SEQ ID NO: 149447 - DNA, 245 bp, Glycine max
gtttgctgaactcatgaccaagattgacaggcgatccggcaaagagcttgagaaggagcccaagtttttgaagaacggtgatgctggttttgttaagatgattccaaccaaacccatggttgttgaaactttctccgagtatcctccacttggtaggtttgctgttagggacatgcgtcaaactgttgctgtgggagtcatcaagaacgttgagaagaaggatcctaccggagccaaggtcacca

SEQ ID NO: 149448 - DNA, 248 bp, Glycine max
gaaaaacttagctactaaggaaggatcaaagagaatggctcaagcaatggcatcaatggctggcttgcgtggttcctctcaggctgtgttggaaggtagccttcaggtgagtggctccacacgcttgaatgtggggagtggaagcagggtggcctcagtcacacgtgcagggttcacagttagagcacaacaacaacaagtgagtggtgaggtacaaagcagccgtagggcagtgctttcacttgttg

SEQ ID NO: 149449 - DNA, 242 bp, Glycine max
cattgacacactctttgtgaaggttgttttgccagagggttctaaagatatttcagtatctgttccatttcctgtgaaacaatcgcaggagacaaagctttcccacttggatattgttggtagacctgttgttgtgctggagaagaacaatgttgtacctgagcataatgagcattttcaggtctactataagttcaacagtctttctatgctcagggagcctttgatgttgatttctggct

SEQ ID NO: 149450 - DNA, 243 bp, Glycine max
gcaaagactgtggaggttgaggagttgacggtggaggagaggaatctcctctctgtggcttacaagaacgtgattggtgcgaggagggcttcgtggaggatcatatcctccattgagcagaaggaggagagcaggggcaatgaggaccacgtggccattataaaggagtacaggggcaaattgaggctgaactcagcaagatctgtgatgggattttgaacctccttgagtccaacctcattc

SEQ ID NO: 149451 - DNA, 242 bp, Glycine max
accttctgctctagaaaattcagtgctgaaacatggcttcggctactctctctgtagccaaaccagcccttcaggcaaatgggaaaggcttctctgaattctctggcctccgaagctcatcaggcttccttcccttttctagaaaatcttcagaggatttccattctgtcattgccttccagacctatgcagttggaagcagtggaggatacaagaagggtgtgacagaagcaaaactgaag

SEQ ID NO: 149452 - DNA, 242 bp, Glycine max
  unsure (1)..(242): unsure at all n locations
aaccactttgtcccatcccacttggacttccacctcacccctttttntcaacgccatgaaaatagatatcagcaattgatcaaaggtcattttgtttttgtggctctgagaggggagtgattctaaactaaaatatatgggggctggggaagagagtacagctaaatcttctaaagtatcttcggcagctcaggagacaccaacagcacttgcatatcctgactggtcaagctccatgcagg

SEQ ID NO: 149453 - DNA, 234 bp, Glycine max
agtaaccaatcatctttagttcttcagtaatttattgtgggattctattctaatattttgagaatgtctagctgtgggtgtggaagcagctgcaactgtggcagcaactgcggttgcaacaagtactctgttgacttgagttacgttgagaagacaatcatagagactctagtgttgggtgtatggcctgtttaggccacattggtaggtgctgatatgggtgttgcatctgat

SEQ ID NO: 149454 - DNA, 242 bp, Glycine max
cttttgtgttagtgagagaaagttctctctgcttgtctctcttagactcaaaaccctattgcgtgctttgcaatcgaccccgattatggccaacagtaacctccctcgaagaatcatcaaggaaacgcagcgtttgctcagtgagccagcacctggaattagtgcgtccccttcggaagaaatatgcggtatttcaatgtgatgatccttggcccaactcagtcgccttatgaagggggagt

SEQ ID NO: 149455 - DNA, 238 bp, Glycine max
gtacaatgtagcaatcaagtgtgcaactatcactccagatgaagctcgtgtgaaggagtttggcctgaagtcaatgtggaagagtccaaatgggactattaggaacattttgaatggaactgtcttcagagaaccaattctttgcaaaaacattccccgccttgttcctggttggaaaaggcaatatgtattggaaggcatgcgtttggtgatcaatatcgggctactgacactgtaa

SEQ ID NO: 149456 - DNA, 240 bp, Glycine max
caaagcttccgagcttgctctctttggcatcatgtctaacaagggagaaatttgtgtggcaggttctcgtgtgtttgtccaggaagagatctatgatgaatttgagaagaagttggtggagaaggcaaaatcttgggtcgttggggatccttttgatcccaaatcgctgcaagggcctcaggctgacaggaaccaattggagaaaatactttcatatattgagcacggaaagagagaagg

SEQ ID NO: 149457 - DNA, 239 bp, Glycine max
tggagaatcaatttacggagagaagtttgctgatgagaacttcaagttaaagcatactggaccaggacttctatcaatggcaaatgctggtcctaataccaatggttcacaatttttcattacaactgtgacaactagctggttggacggaaggcatgttgtttttggtaaagttctttctggaatggatgttgtttacaagattgaagctgaaggaacacaaagtggcactcccaaga

SEQ ID NO: 149458 - DNA, 186 bp, Glycine max
aaaggatacgcgctgtagaaactgggggttgcccacatgctgctattcgggaggacatcagtatttatcttggaacgctagaggagttttctaaaatcttcaaatcagaaatacttctttgtgaatctgggggtaataatctgagttctcatttcattagggactcggctgtttagttatttacat

SEQ ID NO: 149459 - DNA, 264 bp, Glycine max
atagcttcgggaccgtgcttcttgaattggtgacaggtgaaagacctacccatgtggctaaagctccagaaacttttaaaggaaatttggtagagtggattcaacagcaatctagcaatgcaaaactccatgaagtcattgatgaatcactagttgggaagggtgtagaccaggagcttttccaatttctgaaggttgcaagcaactgtgttacagcaatgccaaaggagaggcctaccatgtttgaagtataccagtttctaa

SEQ ID NO: 149460 - DNA, 267 bp, Glycine max; identical to SEQ ID NO: 148678

SEQ ID NO: 149461 - DNA, 140 bp, Glycine max
tgcgaatgaaaatagcactaggggctgcaaagggtcttgcttttattcatagtacagaacataaagtcatataccgtgactttaaaacgtcaaatatcctactcgatacaaactataatgccaaactttctgattttggg

SEQ ID NO: 149462 - DNA, 267 bp, Glycine max
agcgaagaaagattcgaaacgaagaaagaaagcgttgtgaagaatggcggaagagggacaagtgatcggtgtccacagcgtagaggagtggaaggaacatctcaagaagggagaagagtccaagaaattgattgtggtggattttactgcttcttggtgcggtccatgccgtttcattgccccaattcttgcagagtttgctaaaaagttgccgaatgtcaccttcctcaaggtggatgtggatgaattggagactgtttccaagga

SEQ ID NO: 149463 - DNA, 263 bp, Glycine max; identical to SEQ ID NO: 148663

SEQ ID NO: 149464 - DNA, 263 bp, Glycine max
gtggtacggtaagaacgcgaagctgagggagctggtgaaccttgtggttgttgctggagacaggaggaaggagtcaaaggacttggaagaaaaggccgagatgaagaagatgtacggcctgatcgagacctacaagttgaacggccaattcagatggatttcatcgcagatgaaccgtgtgaggaatggagagctctaccgcgtgatctgcgacaccaggggtgctttcgtgcagcctgctgtatacgaggcttttggtttga

SEQ ID NO: 149465 - DNA, 195 bp, Glycine max
gttgtaactcgttcttcttcttttgttgttctgtgtttgtgtttgttttttctctcacctgaaaatgtcttgctgcggtggtaactgtggttgcggaagctcctgcaagtgcggcaacggctgcggaggctgaaagatgtacccagacttgagctacactgagtcaaccacacaccgagactttggtcatgggcg

SEQ ID NO: 149466 - DNA, 265 bp, Glycine max; identical to SEQ ID NO: 148686

SEQ ID NO: 149467 - DNA, 257 bp, Glycine max
ccaccacagaaaatgcatacccacctaattcctgacaagactcccaggtccatttttgtatacttccgaggactcttttatgatgttggcaatgaccctgaaggtggttactatgcaagaggcgcaagagcagcagtgtgggagaactttaaggacaatctgctgtttgacatctccactgagcatccaaccacttactacgaggacatgcaaagagccgtgttttgtctgtgcccacttggatgggccccttggag

SEQ ID NO: 149468 - DNA, 262 bp, Glycine max
accggtattaatccaaaggccaaatcttattacctctttgatggttatgcacatctctcctctggtcttgcctgtggcttggctggcctttctgctggcatggctattggtattgtcggtgatgctggtgttagagccaatgcacagcagccaaaactttttgttggaatgattctcatcctcatttttgctgaagctcttgccctttatggcctaatcgttggaattatcctgccttctcgtgctggccagtctagagctg

SEQ ID NO: 149469 - DNA, 260 bp, Glycine max
gaagcttgcagggagtcaaacaggcaatagtggcaaatataagttcactgtggacatccctgtcacactagtggccggaaagaacacaattgatctcttgagtttaaccgtgggacttcagaactatggagccttttttgacacatggggagcggggatcactggtccagtgatattgaaaggtttggcaaatggcaacacacttgatctctcctaccagaagtggacttatcaggttggcctcaaaggggaagacttag

SEQ ID NO: 149470 - DNA, 261 bp, Glycine max; identical to SEQ ID NO: 148693

SEQ ID NO: 149471 - DNA, 226 bp, Glycine max
gtgagagagtcttttggtccttgaacataatttggaccaaaaccataagatgatggaatccggggctcacttctgtaactcttgtggtgaacaaattggacttgatgctaatggggaggtgtttgtggcttgtcatgagtgttattttccaatttgcaaggcttgttttgaatatgaaatcaatgaggggcgtaaagtctgcttgagatgtgccactccctatgct

SEQ ID NO: 149472 - DNA, 259 bp, Glycine max; identical to SEQ ID NO: 148668

SEQ ID NO: 149473 - DNA, 262 bp, Glycine max
aagattcgaaacgaagaaagaaagcgttgtgaagaatggcggaagagggacaagtgatcggtgtccacagcgtagaggagtggaaggaacatctcaagaagggagaagagtccaagaaattgattgtggtggattttactgcttcttggtgcggtccatgccgtttcattgccccaattcttgcagagtttgctaaaaagttgccgaatgtcaccttcctcaaggtggatgtggatgaattggagactgtttccaaggagtg

SEQ ID NO: 149474 - DNA, 262 bp, Glycine max; identical to SEQ ID NO: 148675

SEQ ID NO: 149475 - DNA, 260 bp, Glycine max; identical to SEQ ID NO: 148661

SEQ ID NO: 149476 - DNA, 192 bp, Glycine max
ggcccacaaacaggctattcctttccgacgcttttgtggtggtgttgggaggacggcccaggctaagaacagacactccaatgggcaaggacgctggcccgtcaaatcagctaagttcattctagatttgctgaagaatgctgagagtaatgctgaagtgaaaggtttggatgtcgatgctctgtacatttc

SEQ ID NO: 149477 - DNA, 261 bp, Glycine max
gttaatttgcttcccttttttcacactcactctcactacatggcttcctctgttgctttagttttgggtctatgtctagcactcaacatggttctgccgacacgtgcagctacccacacagtgggagacacctcaggttgggcactcggtgctgattacagtacatgggccagtggcttgaaattgaaagtcggagatagtcttgttttcaattatggggctggtcacacagtggacgaagtgaaagaaagtgattacaag

SEQ ID NO: 149478 - DNA, 258 bp, Glycine max
gaaattgttggcatagctggcaaactttctgatgctgagtccatgattgcactaaaagatttcataaataggatggggtcaaatgatgtatggggtgaaggcattggtgtaaatactaatgctgatttcagatcaggatatattatgaatactagcattgctggtcttgaaaaagcggatgcgttcctgttggttggcacccagccacgggtggaagctgccatggttaatgccagaatacgcaaaactgtcagagca

SEQ ID NO: 149479 - DNA, 258 bp, Glycine max
ggcttcaagtcaggaagaggtgactcttttgggagtaattggaagcccatttgcttgcagggtgaagattgcccttaagttgaagggagttgaatacaaatatgtggaagaaaatttggccaacaagagtgatttgcttctcaaatccaacccagttcacaagaaagttccagtttttattcacaatgagaagcccatagcagagtctcttgtgattgttgagtacattgatgagacatggaagaacaaccccatctt

SEQ ID NO: 149480 - DNA, 257 bp, Glycine max
tttttattgctcagttggtggcaacttttatagcagtgtatgctaactggggctttgcaagaataaagggaatgggatggggttgggctggtgtaatctggctgtacagtgtggtaacctatatccctcttgatttactcaaatttgctatccgctatattctaagtgggaaggcttgggataatcttttggagaacaagactgccttcactacaaagaaagactatggtaaagaagagagggaagctcaatgggcg

SEQ ID NO: 149481 - DNA, 241 bp, Glycine max
ggctcgaggtctctctctacgctttctcgttcgagatccctcaagggctccactaactgaaggagaaatggggttgacattcaccaagcttttcagccggcttttcgccaagaaggaaatgcgaattctgatggtgggtctcgatgcagctggtaagaccaccatcctgtacaagctcaaacttggagagatcgttaccacaattcccaccattgggttcaatgtggagactgtggaatac

SEQ ID NO: 149482 - DNA, 260 bp, Glycine max
ggctcctttgggcctcaaccagtgtaaagaaccctgcctattctgacaccttatatgttgctcctcttattggacccgacactgtatcaaccatgccagaccaagcccttcaagcatttattgatcatggtaccgtatccaggacaatagactcaatgcatctgaagctgaaggaatatacaatgctctccagaaattgggtattgactggagctttgttggttcccagcttgaacttgaaggagtggactcgtttaaga

SEQ ID NO: 149483 - DNA, 258 bp, Glycine max
ggcaagatggtctgtactggagctaagagcgagcaacagtctaaattggcggcaaggaagtatgctagaattatccaaaagcttggtttcccagctaaatttaaggattttaagattcagaatattgttggctcttgtgatgtaaagttccccattcgactggagggtcttgcctattcccatggtgctttctcaagttatgaaccagagttgtttcctggactaatctatcgcatgaagcaacccaagatagtcttg

SEQ ID NO: 149484 - DNA, 259 bp, Glycine max
agagagaagaagagacttaatcgatcatcacttcacttcactaatacatcatggcagacgagacccagaacaagtatgagagctctgaggtttaggtccaggatcgtggtgtttttgactttctcggtaagaaaaaggatgaagaagacaagcctcatcctcaggaggaggtcatcgccaccgagtttcaaaaagtcactgtctcagaccaaggagagaacaagcacagcctcttagaaaagcttcaccgatctgacag

SEQ ID NO: 149485 - DNA, 256 bp, Glycine max
gagcaacagcaaggaaggcatctttgtccataattgctgaaaatgctttattagatgctatccaatccaaaaggtatggggatgcactatatttttgggtgcgcatggatatggattcacgaaacccttcgcaaacggacttttggtcattttgtgatgccgttaatgcgggaaattgcaagtttgctttctcagaagccatgaggggaatgtatggggtaaaaggtgatgcggattctttgcctcccatgccggt

SEQ ID NO: 149486 - DNA, 252 bp, Glycine max
ggcgagggtaatgagaaagtgcaggatcttcttttgttggatgttactcctctatccactggtttggagactgcaggaggagtcatgactgtgttgattcccagaaacacaaccattcccaccaagaaggagcaggtgttctcaacctactctgacaaccagcccggtgtgttgattcaggtctatgaaggtgaacgaacgaggactcgtgacaacaatttgcttggcaaatttgagttatctggaattcct

SEQ ID NO: 149487 - DNA, 257 bp, Glycine max; identical to SEQ ID NO: 148682

SEQ ID NO: 149488 - DNA, 254 bp, Glycine max
gcggctagggttttagcgcacttcttctagatttaaggaagatgggtaaggaaaaggttcacatcagtattgtggttattggccatgttgacttttgcaccaactggactgacaaccgaagttaagtctgtggaaatgcaccatgaagctctcacagaggctcttcccggtgataatgttggattcaatgttaagaatgttgctgttaaggatctcaagcgtggttatgttgcctcgaactcaaaggatgatcc

SEQ ID NO: 149489 - DNA, 256 bp, Glycine max
tatcccttcctcgtttacctgtttatccactctcacccccgtcttccacacatcttctattacacatcgcattagtcttctgttcgatccactgaggaaatgcaaacataggaacccccgaagccaagctttccattgtcgaattccaaccacagtgcgtcacaaaacaccccacagaacgatgtgaaagaacttccacttgagaacaccaatttactatcttccccttctgttccaactcctccctgcagcttag

SEQ ID NO: 149490 - DNA, 213 bp, Glycine max
tccaacctctcaagtccaacctacccctttttcttctcccaccaacttcaccgtcttcttcctcgatcatgtctcacttcaagggcaagtaccatgatgagcttattgccaatgctgcttacattggcactcctggaaagggtattcttgctgctgatgagtcaacagggacaattggcaagcgtttggccagcatcagtgtagaagatgttg

SEQ ID NO: 149491 - DNA, 258 bp, Glycine max; identical to SEQ ID NO: 148669

SEQ ID NO: 149492 - DNA, 258 bp, Glycine max; identical to SEQ ID NO: 148685

SEQ ID NO: 149493 - DNA, 258 bp, Glycine max; identical to SEQ ID NO: 148662

SEQ ID NO: 149494 - DNA, 255 bp, Glycine max
gtgccaaagatgtaaacgctgctgttgccaccatcaagaccaagaggaccattcagtttgtggattggtgccctactggtttcaagtgtggtattaactaccagccacctaccgttgttcctggaggcgaccttgccaaggtgcagagggcagtttgcatgatttcaaactccaccagtgtggctgaagtgtttggccgcattgatcacaagtttgatctcatgtatgccaagcgtgcttttgtccactggtacg

SEQ ID NO: 149495 - DNA, 225 bp, Glycine max
gaacttcaaagaatatgacatctggctggcagcagagaatgggatgtttttaaacccttcaaagggagaatggatgacaacaatgccagagcaactgaatatggaatgggttgacagtgtgaagcatgtttttgattacttcacggacagaacacctcgatcatattttgaagaaagggaagcctcacttgtatggagttacagacatgcagatgctgaatttgg

SEQ ID NO: 149496 - DNA, 255 bp, Glycine max; identical to SEQ ID NO: 148689

SEQ ID NO: 149497 - DNA, 254 bp, Glycine max; identical to SEQ ID NO: 148673

SEQ ID NO: 149498 - DNA, 255 bp, Glycine max; identical to SEQ ID NO: 148660

SEQ ID NO: 149499 - DNA, 255 bp, Glycine max; identical to SEQ ID NO: 148694

SEQ ID NO: 149500 - DNA, 252 bp, Glycine max
gacgatgctgccgtacagaagagcggaggttggttcggcttcatctccgaagctatggagttcgttctcaaggtgttgaaggatggtctttctgccgtgcatgtcccttatgcatatggatttgctatcatattgctcactgttatagttaaggcagcgacgcttcccctgacaaagcaacaggttgaatctacattggctatgcaaaatcttcaaccaaaaattaaggccattcaagatagatatgctggc

SEQ ID NO: 149501 - DNA, 255 bp, Glycine max; identical to SEQ ID NO: 148670

SEQ ID NO: 149502 - DNA, 254 bp, Glycine max
atccctctctctatctctcacacacactttctctctctctctctctcacccagatcttgtagcaatggcgagcgctcccactccacgcgaagagttcgtgtacatggcgaagctggcggagcaggccgagcgctacgaggagatggtggagttcatggagaaggtctccgcctccgccgagagcgatgagctgaccgtggaggagcgtaacctcctctccgtcgcctacaagaacgtgatcggcgctcgccgcg

SEQ ID NO: 149503 - DNA, 254 bp, Glycine max; identical to SEQ ID NO: 148699

SEQ ID NO: 149504 - DNA, 251 bp, Glycine max
ctcaagattgaagaatggcaattttgttgagttgcatggttactgtgttgaaggaaatcttcgtgtacttgcatatgagtttgctactatacgctctcttcatgacatattgcacggtagaaagggagttcaaggtgctcaaccaggaccaactcttgattggatacagcgagttagaattgcagttgatgctgctcggggattggaatatttacatgagaaagttcaaccaccgattatacacagggata

SEQ ID NO: 149505 - DNA, 250 bp, Glycine max; identical to SEQ ID NO: 148666

SEQ ID NO: 149506 - DNA, 248 bp, Glycine max
aagaaaccctagcaagtggagcaatggcagacgttgaagtcgatgtggcggcagcagcagcagcagggctgccgaagaagagaacgttcaagaagttcagttttcgaggcgtggatctcgatgcacttctcgacatgtccaccgatgaactcgtcaagatgttcagtgcccgcgctcgtagaaggttccagagaggcctcaccagaaagcccatggccttgatcaagaagctccgtaaagcgaaaagg

SEQ ID NO: 149507 - DNA, 251 bp, Glycine max
ttatggacattgccctgtctacaccaagagtatttaaagaagccagaggattatttagctcatctccttgggcatgagggcagaggaagcttgctctcctttctcaagtccagaggatgggctacatctctatctgcaggagttggggaagaaggaatttatcggtcatctatagcttatgtctttgtcatgtccatacacctcacagactctggtatagataagatctttgatatcattggctttgtcta

SEQ ID NO: 149508 - DNA, 251 bp, Glycine max
ggtacaataacttcttgcaaggttatgcgagacccgactggaatcagcagaggatcaggatttgttgcattttcaactcctgaggaagcaactcgagctcttggtgagatgaatggtaaaatgtttgctggaaaacctctgtatgttgcccttgcacagagaaaagccgagagaagagcacggttacaggcacaattttcacagatgaggcctgttgcaataacgccttctgttgcgccccgtatgcctct

SEQ ID NO: 149509 - DNA, 248 bp, Glycine max
cgtggagtctgccatcgggatatcaagcctcaaaatctattggtcaatccacacactcaccaggttaaattatatgactttggaagtgcaaaggttttggtaaaaggcgcaccaaatatagcatacatatgtactagatacgatagagcacctgagctcatatttggcgcaactgaatatacttcagccattgacatctggtctgttggatgtattccagctgagctgctgcttggacagcctctgtt

SEQ ID NO: 149510 - DNA, 257 bp, Glycine max
ctcgagcgcaagatccatcagatggaatgtatcagcaagtggtgctcgtcctaacccacaagggtctttcagatatggttccatcaatgtgactgatatttatgtattgaaaaataagccactggagaaaatcaatgggaagcggcgagcaacactcagtggaaactcttttgtcaatccttctactccaatcaggcttgctgaccagtacaaattaaagggagtatacaagcttgatttccctaccaagcctctta

SEQ ID NO: 149511 - DNA, 254 bp, Glycine max
gtgtaagaagagaaagaggacgcagcaaggccgaagcagagtttcaattcaattcaatagcgatttagagtttccagaaaagaaattgattttcagtcagtatcagatggatcattttgcagcacatgaagagcaacttgcttcacagagaatgaggcagaaacttgaagaagtaaatgtggctgctcaaactaatcttgcccctgtccaagactatgtcaattatacactccagaaagcatattttaagtgtg

SEQ ID NO: 149512 - DNA, 258 bp, Glycine max
gggaagagcatttggctgttaagcacttttctgttgagggtcagctggagtttaaggctgtcctctttatccccaagagggcaccttttgatctctttgacaccaggaagaagcctaacaacatcaaactgtatgtccgccgtgtcttcatcatggacaactgtgaggagttgatgcctgaatatcttagctttgttaagggtattgtggattctgaggatcttcctctcaacatttctagagaaatgctgcagcaga

SEQ ID NO: 149513 - DNA, 157 bp, Glycine max
cttggacctactgcccatgctatctatggtgcaattggtgctatgattttctctggctatattgtatacgacactgacaacctgatcaagcgcttcacttatgatgagtacattggagcctccgtcactctttatcttgacatactcaacctcttcc

SEQ ID NO: 149514 - DNA, 261 bp, Glycine max
gcacccacgactatcatcaggaaaccctcaacaatctcaagactgctatgcacaacactggtatactctgtgccgtcatgcttgacactaagggacctgagattcggactggttttctgaaagatggaaaacctattcaacttaaggaaggacaagaaatcaccataactactgattatgacattaaaggggatcaggagatgatatccataagttaccagaagctgcctgtccacttgcagcctggaaacaccatattgt

SEQ ID NO: 149515 - DNA, 256 bp, Glycine max
atcgaagcaagttattgtggagaagctgggtgaccctgcaaatggctatgatgaattcgctgccagtcttcctgctgatgagtgtcgatatgctgtttatgattttgattttgtcactgaagagaattgccaaaagagcagaattttcttcattgcttggtcccctgatacatctagggttaggagcaagatgctttatgccagctccaaagatagattcaagagggagcttgatggaattcagcttgagctgcaa

SEQ ID NO: 149516 - DNA, 158 bp, Glycine max
ctaaattccaataaattcctagtggccttagagatagtgctttccattaatgtgtcttgtaattctggtttttgtcatcgttgtatttgttgcgtggcgaactattaggcatgcataacttccaggagggatatgctgcaagttacaccaatgggaag

SEQ ID NO: 149517 - DNA, 252 bp, Glycine max
gaagacagtactcaaccatggccctatttgaatgaagctctggcaaaattccaggatcctgcagaggcagacaagttgatgaaaatccagagagagttggatgaaaccaaaatcatccttcataaaactattgatagtgtgctagctagaggggagaagctggatagtttagttgagaagagttctgatctgagtgccgcttcgcagatgttctacaaacaggccaagaaaaccaatcagtgttgtaccata

SEQ ID NO: 149518 - DNA, 256 bp, Glycine max
cggggattctcgagcaatcatgggatccaaggatagcaatgactccattgtggctattcagttgactgttgatttgaagcctgatttgccaagggaagcagagagaattaagaagtgcaaaggtagggtatttgctttgcaagatgagcctgaagtgcctagggtgtggttgccctttgatgatgcaccaggattagccatggctagagcatttggagatttctgcttgaaggagtatggtgtgatttctatacct

SEQ ID NO: 149519 - DNA, 179 bp, Glycine max
caagaagatccatcttgtggccctcttttggatgccattgctatcagagagttctacccgccaatgcctacaagagttaacttggtaaaaaatcctggctttgaggagggtccattccccattttcaactcaaccaacggtgttctgctcccacctcaacaacaagatggcttctcccc

SEQ ID NO: 149520 - DNA, 258 bp, Glycine max
attgtttgttgttgtaactcgttcttcttcttttgttgttctgtgtttgtgcttgtgttttctctcacctgaaaatgtcttgctgcggtggtaactgtggttgcggaagctcctgcaagtgcggcaacggctgcggaggctgcaagatgtacccagacttgagctacactgagtcaaccaccaccgagaccttggtcatgggagtggcacctgttaaggctcaatttgagggtgctgaaatgggtgtgcccgctgaga

SEQ ID NO: 149521 - DNA, 260 bp, Glycine max
gattgtttgttgttgtaactcgttcttcttcttttgttgttctgtgtttgtgtttgttttttctctcacctgaaaatgtcttgctgcggtggtaactgtggttgcggaagctcctgcaagtgcggcaacggctgcggaggctgcaagatgtacccagacttgagctacactgagtcaaccaccaccgagaccttggtcatgggagtggcacctgttaaggctcaatttgagggtgctgaaatgggtgtgcccgctgagaa

SEQ ID NO: 149522 - DNA, 257 bp, Glycine max
aagaaaatcctcaattttctgagcagccaaacactctctctctgtctctcgaaaattctcagtttgcagagaaaatctgaatcatgtcgtggcaagcgtatgtcgacgatcaccttctgtgtgacatcgaaggtaaccacctcactcacgctgctatcatcggccaagacggcagcgtttgggctcagagtaccgacttccctcagttcaaacctgaggagataactgccatcatgactgactttaatgagcctgga

SEQ ID NO: 149523 - DNA, 256 bp, Glycine max
caggctcctttcttcggtgagtcacccgaatttagtgcgcctcttaggttgctgcatagaagggggagagcagctacttgtttatgagtacatgccacatggaacactatctcaacatttgcacagagcgaggggtggagtacttccatggacaataagactcaccattgctactgaaaccgctaatgctatagcatatctccattccgcaaatgatcatccaatttatcatagagacatacaatccagcgacata

SEQ ID NO: 149524 - DNA, 250 bp, Glycine max
tgccaagacaacaaagcatgattttgtattttactctgatcgattgattcgattggttgtggaacatggtttggggcatctgccatttacagaaaagcaagtaatcactcctactggttctgtatacactggtgttgatttttgtaaaaggttgtgtggtgtctctgttatcagaagtggggagagtatggagaatgctttgagagcatgctgtaaaggtatcaagattgggaaaattttaattcacaga

SEQ ID NO: 149525 - DNA, 249 bp, Glycine max
gggtttgcagtcactgctttgtttagatcagaaccagatcgtgttctcttcttccattggcaaacatggcaactcaaatgagcaagaagagaaagtttgtggcggatggagtgttcttcgccgaactgaacgaggttctgacacgtgagttggcggaggacggttactccggcgtggaggttagggttacgccgatgcgcaccgagattatcatcagagccaccagaacccaagccgttctcggtgaga

SEQ ID NO: 149526 - DNA, 251 bp, Glycine max
cataaacgccgcccaaaaccatttatagggttttcttttctttgccaagaaaatgagagagtgcatttcaatccacattggtcaggccggtatccaggtcggaaacgcctgctgggaactctattgccttgaacacggcattcagcccgatgggcagatgccgagtgacaagaccgttggaggaggagacgacgccttcaacacattcttcagcgagaccggcgccggaaagcacgtgcctcgcgccgtct

SEQ ID NO: 149527 - DNA, 256 bp, Glycine max
catatcaggaggcacagcagaaacctggcggcacccctgtttttctctttttctcagttaataccagtgggcaatttgtggggcttgctgagatgattggtcctgttgattttaacaagagtgttgagtattggcagcaagacaagtggaatggttgctttcctcttaagtggcacattgttaaggatgttcctaacaatttgttgaggcacattaccttggacaacaatgagaacaaacctgtcactaacagtag

SEQ ID NO: 149528 - DNA, 257 bp, Glycine max
ctgagatttccccttccaccttgtatgccattgcttgtgttatggaaaatgttcctttcatcaatggaagccctcagaacacctttgtcccaggactcattgatctggccatcaaaaggaatagtttgattggaggagatgactttaagagtggtcagaccaaaatgaaatcggtgttggtggatttcctagtaggggccggcatcaagccaacatctatagtgagtcacaaccatttgggacacaatgatggcatg

SEQ ID NO: 149529 - DNA, 257 bp, Glycine max
catccaggtgaagagaatccatgaatataagcgacaattattgaacatatttggaattgtttaccgatacaagaagatgaaagaaatgagtgctgcagaaaggatagcaaattttgttcctagagtttgtatatttgggggaaaagcatttgctacatatgtgcaagccaagagaattgtgaaatttattacagatgttggggcaacagtaaatcatgatcctgaaataggagatctacttaaggttgtttttgtcc

SEQ ID NO: 149530 - DNA, 253 bp, Glycine max
gaagaagctgctgccatggctctctcatccccatccttggctggcaaggccgtgaagctgggcccatcagccccagaagtgggaagggtgagcatgaggaagaccgtcaccaagcaggtctcctcaggaagcccatggtacggcccagaccgagtcaagtacttgggcccattctctggcgagcccccgtcctacctaaccggtgagttcccaggcgactacggctgggacactgctgggctttccgcagacc

SEQ ID NO: 149531 - DNA, 250 bp, Glycine max
gtggagaagcttggtgagcctgcccagggctatgaagatttcactgccagccttcctgctgacgagtgccgttatgctgtttatgattttgagtatctgactgaagggaatgtccctaaaagcagaatttttttcattgcgtggtcccctgacacatcaagggtgaggagcaagatgatttatgcaagctccaaagacagattcaagagggagctggatggaattcaagtagagttgcaagcaactgatc

SEQ ID NO: 149532 - DNA, 248 bp, Glycine max
caacattgtttgttgtaggaagaggaatcttgagaaatggcaggggacagcaagagcaagattctgttcatcggagggactggttacatcggaaaattcatcgtggaagccagcgccaaagctggccacccaactttccttttggtgagggagtccactctctccaaccccgcaaaatcacccctcatcgacaatttcaaaggcctcggtgtcaatcttgttttaggagatctatacgatcaccaaag

SEQ ID NO: 149533 - DNA, 252 bp, Glycine max
ctccgttcctctttacgccaacaaagtcggtccctttcacaaccccagtgaaacggatcggtactttgacctgccattctgtgtaacaggtcatgagaaagataagactgatgccctcggtgaggtgttaaatggcgatcgccttgttagtgctccttatgaacttagtttcaagaaggagaaagactctaaggttgtatgcaagaggaagctcacaaaggagcaagttgctcagttccgagaagcagttaa

SEQ ID NO: 149534 - DNA, 252 bp, Glycine max
gcgagatcagccggcgcatcttagccacgaccaagtacatcagctacggtgcgctgcagaggaacactgtcccctgctctcgccgcggagcctcctactacaattgccagcctggcgctcaggccaacccttacagccgtggctgcagtgccatcaccaggtgcaggagctaaattatatatttattattattctcctttttttttaaaaaaaaatttcatattcgggtttcgttgtatacatgaccaagat

SEQ ID NO: 149535 - DNA, 256 bp, Glycine max
actggagaggtgttaaaaactccagtatcattggacatgcttggccgcatattcaatggttctggaaaaccaattgataatggtccacccattttacctgaggcttacttggacatatcaggaagttccatcaaccctagtgagagaacctatccagaggagatgatacagacaggaatatctaccattgatgtcatgaattctattgctagaggtcaaaagatccctctattctcagctgctggtctcccccata

SEQ ID NO: 149536 - DNA, 254 bp, Glycine max
gttgcgactaagagttgctgcttcttccgccactcagcacttcgctccctctgtgcttcaccaaccatggccgaaatcgaagctaccgttccagatccctctcaaatcgacgtcaaacttttcaaccgctggagcttcgacgacgttgaggttactgatatgtctctggctgattacattggagtgtccccgtcaaagcatgctacatatgttccgcacactgctggtaggtactcagtgaagaggttcaggaa

SEQ ID NO: 149537 - DNA, 252 bp, Glycine max
agagaatggctcaagcaatggcatcaatggctggcttgcgtggttcctctcaggctgtgttggaaggtagccttcaggtgagtggctccacacgcttgaatgtggggagtggaagcagggtggcctcagtcacacgtgcagggttcacagttagatcacaacaacaacaagtgagtggtgaggtacaaagcagccgtagggcagtgctttcacttgttgctgctggtttggccactggctctattgttcaag

SEQ ID NO: 149538 - DNA, 254 bp, Glycine max
aacaaagttagaagtaaagaagatcatggcttctctagcaaccttggctgctgttcaaccagctacgatcaatggccttgctggaagttccctctctggaactaagctctctttcaagccctctcgccacagtgtcaaatccaagaacttcagtgtaactaagcattacaggagtggtgccgtggtagcaaagtatggtgacaagagtgtgtactttgatttggaggatctgggcaacactacagggcagtggg

SEQ ID NO: 149539 - DNA, 195 bp, Glycine max
ttttccctcactttctcgctcgccaaacgcccctctctctcctccaatggccgaccagctcaccgacgaccagatcgccgagttcaaggaggccttcagcctcttcgacaaggacggcgatggttgtattactactaaggaacttgggactgtgatgcggtcactagggcaaaacccaactgaggcagaactgca

SEQ ID NO: 149540 - DNA, 249 bp, Glycine max
ctcattctccatacctcaacgaagaggttaaagagacggcaacactttgctgtccgccttgaccgagcagagcttcgtcttggccctcgattttgccctaaagtactctcagtcacaacagacaccgtcgtcgtcgtcgtcgtcatcaatggcaccgaagcagaccaaggctgagaagaagatcgcttacgatgcgaactgtgcgacctaatggaggagtacggccagatcctcgttgtgaactccgat

SEQ ID NO: 149541 - DNA, 249 bp, Glycine max
ccggagttttcaccgataaggacaaggccgccgcacatttgaagggtggtgcgaagaaggttattatttctgcccccagtaaggatgcccccatgtttgttgttggtgttaacgagcacgagtacaagccagagcttgatattatttccaatgctagctgcacaaccaactgccttgctccacttgctaaggttattaatgacaggtttggcattgttgagggtttgatgaccactgttcattccatca

SEQ ID NO: 149542 - DNA, 253 bp, Glycine max
cgcaacaaaaagaaagaatcccaggcgaggagaaagatggaggggaaggagcaggatgtgtcgttgggagcgaacaagttccccgagagacagccgattgggacggcggcgcagagccaagacgacggcaaggactaccaggagccggcgccggcgccgctggttgacccgacggagtttacgtcatggtcgttttacagagcagggatagcagagtttgtggccacttttctgtttctctacatcaccgtct

SEQ ID NO: 149543 - DNA, 252 bp, Glycine max
cgttagtgctttgtttaggtgaactaattcggagaccttgcaagacttcatcaatggctgtcaaagtttatattgtgtactactccatgtatgggcatgttgagaaactagcagaagaaataaagaaaggggcttcctctgtggaaggtgttgaggccaagttatggcaggtacctgagacactgctggatgaggtgcttggtaagatgagtgcaccacccaagagtgacgtaccagtcattacccccaatg

SEQ ID NO: 149544 - DNA, 247 bp, Glycine max
ggttctcagacttatcttagtttcctaatcggcaaggcacgtccaaagagcttttctacttcaccggcttccattttaagcccatcaagaatctccatttcttcttttgataaccctcttaagaaattttcctcgtcttcttgaaacattttgaacccttctgccaacttctgaaataaggtcgcctccgttttccccaccttctccacctcttcttctatctgtgcaacttcccttacaatggtct

SEQ ID NO: 149545 - DNA, 249 bp, Glycine max
cgtggagtttgccatcgggatatcaagcctcaaaatctattggtcaatccacacactcaccaggttaaattatatgactttggaagtgcaaaggttttggtaaaaggcgaaccaaatatatcatacatatgttctagatactatagagcacctgagctcatatttggcgccactgaatatacttcagccattgacatctggtctgttggatgtattctagctgagctgctacttggacagcctctgttc

SEQ ID NO: 149546 - DNA, 247 bp, Glycine max
aaatcacgtggcatagcacgagcaatgcttggtcaatgggaagaagctgcaaaggatcttcatgtggcttcaaagttagactatgacgaggaaataaatgctgtactaaaaaaggtggaaccaaatgctcacaagatagaggaacaccgtcggaaatatgaaaggctgcacaaagaaagagaggataaaaaacaggagcgtgagaggcagcggcgccgtgctgaagctcaggctgcctatgagaagg

SEQ ID NO: 149547 - DNA, 248 bp, Glycine max
agtaaatgtacccaaagttactactgaaggctgtaccagcaccttgtcccgaaccgatgctggccataagtcagatgtatcaatggcttcttccatggagaggaaacaagaacagctgcaagtatcaccaaaggatactcagagcaagcaaatttgtagaagtcgaaccaaggttcaaatgcagggagttgcagtgggtcgtgctgtggatttgaccatgttggatgggtacggtcaacttataaatg

SEQ ID NO: 149548 - DNA, 249 bp, Glycine max
gggtcttccccgagaccaatgtcggcatcattgtcttggccgagggtcgtttgatgaacttgggatgcgccacaggacaccctagttttgtgatgtcctgccccttcaccaaccaggtcattgctcagcttgagttgtggaaggagaagagtaccggcaagtacgagaagaaagtttacgttttgcccaagcaccttgatgagaaggtggctgcacttcaccttggcaaacttggagctaagctcacca

SEQ ID NO: 149549 - DNA, 250 bp, Glycine max
ttccaatatattccattctctctgtgtatttccctacctctcccttcaagatgcagatcttcgtcaagaccctcaccggcaagaccatcacccttgaggtggaaagctctgacaccatcgacaacgtcaaggccaagatccaggacaaggaaggaatccccccagaccagcaacgtctcattttcgccggaaagcaacttgaggacggccgtacccttgctgactacaacattcagaaggagagtactct

SEQ ID NO: 149550 - DNA, 252 bp, Glycine max
ccagaacacatgcattgccttgctatgttttggggccctcttgctcctcccaacactggggttgtagcctttcagaacttatcaaacaatcaggcaacatttaggattactgcaactgcagttgtacttgagtttaatcatgcagcaaggatagtgaagaaaatcaaattggttggttatccatgcaagatattcaagaagacagcacttatcaaggatatgtttacctcagatcttgaagtagctcgtttt

SEQ ID NO: 149551 - DNA, 255 bp, Glycine max
caacgttctttctatttcatcatttccactcactcaccattcactaaccaacttttactatggcttctcgctacgaactcgagctgaagctcgcatcagcgcgcggcctcaagaacgtgaactggcgccacggccctaaccgcccatacgccgtcgtttgggtggaccccaggaacaagtgttccacgcgtgtagacgaagacggcgataccgaagccacctgggaccaaaccctacttattcctctccccccgg

SEQ ID NO: 149552 - DNA, 254 bp, Glycine max
gctcagcttcgccctccatagacgctactcactctgctccggaaccatgtgcacggccacgtagcaaaagatctccgcagtacaagcgaggacttcagcctcttcgacaaggacggcgatggttgtattactactaaggaacttgggactgtgatgcggtcactagggcaaaacccaactgaggcagaactgcaggatatgattaatgaggttgatgctgatggcaatggaaccatcgacttcccagagttcct

SEQ ID NO: 149553 - DNA, 247 bp, Glycine max
gcaagctagatcccacagtgtatggtgatcaaactagtacaataaccaaagaacacttagagatcaaccttggtggactctctgtggaacaggcactgagtggtaacagattgttcatattagatcaccatgatgcattcatcgcatatctgaggaagatcaatgaccttcccactgcaaagtcttatgccacaaggaccatccttttcttgaaagatgatggcaccttaaagccattggccatcga

SEQ ID NO: 149554 - DNA, 244 bp, Glycine max
agcttggctagtgccaaattccctgccaaggtacctcaaaaagtggacagaaaatttttcttcactgtggggctagggactagtccttgccccaaaaacacaacatgccaagggccaagtaataacaccaagttcgcagcctcggttaacaacatttcttttgcacttccatcatctgtttccatcatgcaggcctactattcaggccaggccaatggggttttcaagactgattttcctgcca

SEQ ID NO: 149555 - DNA, 249 bp, Glycine max
gattctatacccttttcatccagcaaggtggaggttgtattcaacaagttttccgtaaaacccgggtcagaggaggcccagatcatgaagaatactctcagtgagtgtgaagagggtggcatcaaaggagaggaaaagtactgtgccacttcgcttgaatccatgattgatttcagcacttccaagcttggaaaaaatgttgaggttgtgtccacggaagtagtggaggacaaggaaacgggattgcag

SEQ ID NO: 149556 - DNA, 247 bp, Glycine max
gttgttctgcatgtgagatggctgttatttggatgcagaaccagctgaggcagaatcagacagaagataggataatagactatgccaatgagctttgtgaaaaattgcctaacccaatgggaccatcatccgttgactgtggaaagctctcttcaatgcctattgtttcctttactattggtggaaaagtttttgacctttcccctgaggagtatatactgaaggtgggtgaaggtcctgaagccca

SEQ ID NO: 149557 - DNA, 247 bp, Glycine max
cggctcgagcggctcgagcggctcgagagttaaaagaagagcatcactgaactaacaaagcaaccctatgtcgaaggtggcttgtgtcaccggagccagcggcgccatcggatcatgggtggtcctactcctcctccagcgtggttacaccgtccatgccaccgtccaagatatcaaggatgaaaatgagacgaaacatttggaggaaatggaaggagcaaagagtcatctccatttttttgaaatg

SEQ ID NO: 149558 - DNA, 248 bp, Glycine max
cgtcgtcgtcgatggaggttggagtcgtgccggacgggaacacaatgtcggagacatcgaactgcagctacagcaaggtgcctccggtgacggtgacggtgacggcgcagttctcggcggcggatagggaggcgagagtgttgaggtacagggagaagaggaagaaccgtaagttcgagaagacgattcgttacgcatcgagaaaagcatatgcggaggcgaggccaaggatcaaagggaggtttgcg

SEQ ID NO: 149559 - DNA, 243 bp, Glycine max
ttcggctcgatgtagaaaaaggacattcattcatctatggctacccttattgctcccagcaaccactctccccaagaagatgctgaagctctcagaggcgttttgaaggatggggaactgatgagaacactgtcatagtaattttgggtcatagaactgtgtatcagaggcagcaaatcagaagagtttatgaggaaatttaccaggaggatcttgtgaagcgcctagagtctgagatcaaag

SEQ ID NO: 149560 - DNA, 244 bp, Glycine max
cgcacactgtcacaggtgtagcggcgaaactgaggtcgtagaaagaatggcgaaaacgacgtcgttgttgctctttacactgctcctcttcggaaccttagctctcatccaggcgaagaaatcgaaggaggatttgaaggaagtgacccacaaggtttactttgatgttgagattaatggaaaagaagcaggtcgtattgtgatgggtctttttggaaaggctgtaccacaaactgcagagaac

SEQ ID NO: 149561 - DNA, 241 bp, Glycine max
ctcgagcgcaatggagctggtgagaagcgtaccttggaagttgacgctgtcattggcgccgatggggccaattctagagtcgccaagtctatcgatgccggtgattatgagtatgccatcgcttttcaggagagggtaagaattccggatgataagatggtgtattacgagaatcttgcggagatgtacgtgggggatgatgtttctccggatttctatggatgggtgtttccgaaatgtg

SEQ ID NO: 149562 - DNA, 244 bp, Glycine max
cgattcccgaagtgccttcctcctcctcctccttcttcccctctaatcggatccaaatccaaatccaaatccagttcaaagaagatgcaatacaagaacctggggcgatctggcctgaaggtgagccagctctcctacggcgcgtgggtgagcttcgggaaccagctggacgtgaaggaggcgaaggccctcctacagtgctgccgcgaccacggcgtcaacttcttcgacaacgccgaggtct

SEQ ID NO: 149563 - DNA, 246 bp, Glycine max
aaacctgtaccaaagccatttccagtgtataaacctataccaaagccagttccagttccagtgtacaagcctattccaaagccagtgtataagcctattccaaagccagttccagtgtacaagcctataccaaagccagttccagttccagtgtataagcctattccaaagccagtgtataagcctattccgaagccagtgtataagcctattccaaagccagttccagtgtataagcctatgcca

SEQ ID NO: 149564 - DNA, 244 bp, Glycine max
ccactttactctctcgttcactctgcatctgactcctatagtttcctctgctaattccatatccccgttttccttcactcttgaaccccgattcatttccaccagcacaagaagcatggctgcaatatcaataccttctcacatgaaagcttggacatactctgagtatggaaaatccaaggaagttctcaagtttaatcagagtgtggctttgcctgaggtgaaggaagaccaggtcctcatc

SEQ ID NO: 149565 - DNA, 146 bp, Glycine max
caacaagcacaacaaggtcactgtgttgaagttggtcgctttggacttgatgaagagattgatcgtttgaggcgtgacaagcacgtgttgatgatggagcttgtgaagctgagacagcagcaacagaacacaaggtcataccttca

SEQ ID NO: 149566 - DNA, 245 bp, Glycine max
tgaacacttctccactcgaagatggggttcaagactaggatctgggtcgttgacgccagacggtgcatggcaaggttcaagactaggctcgggatcgttgactcctgatggtattgggcttgcttcacgattaggctctgggtgtgtgacacctgatggtctggggctggaatccaggttaggttctggctgtttgacacctgacagtgctgggccaatcaatcaaaacaacatctctgtgcaaa

SEQ ID NO: 149567 - DNA, 246 bp, Glycine max
gtgaagagaatggctcccaagggtttaacctttctggctgtgttaatatgcgtttcagcactgtcactgagtccttctgttgcgggggaagggcaaaataatggccttgttatgaacttctacaaggaatcatgccctcaggctgaagacatcatcacagaacaagtcaagcttctctacaagcgccacaagaacactgctttctcctggctcaggaacatcttccatgactgtgctgttcagagt

SEQ ID NO: 149568 - DNA, 241 bp, Glycine max
aaaaatcatggcattttctcagcagggagctagagctgtatgcattttgtcagccaatggtgctgtctctactgtcacacttcgtcagccatcaacttcaggtggcactgtcacatacgaggggcgctttgagatagtgtgtctgtcaggctcttacttggtcaccgataatggtggctcacgcaatcgaactggtggattgagtgtgtcccttgctagtcctgatggtcgtgtcattggt

SEQ ID NO: 149569 - DNA, 239 bp, Glycine max
acagattcacttctacgaaacttgtccttaccttaagttcgcgcacttcaccgcaaaccaggcgattctcgaagcgtttcaagggaaaaatcgcgttcacgtgattgatttcggaatcaaccaggggatgcagtggccggcactgatgcaagcccttgcgcttcgcaacgacggccctccggttttccggctaaccggaatcggaccgccggcggggatcaactccgaccacctccagg

SEQ ID NO: 149570 - DNA, 237 bp, Glycine max
attaaagtctgggatgtatctggaaatttggaaggtaaaaaatttgaaggacctggagggggcattgagtggcttaggtggcatccaagaggacacatactcttagctggttctgaggatttcagcatttggatgtggaatactgataatgctgccttacttaatacatttattggtcatggtgatagtgtaacctgtggtgattttactcccgatgggaaaataatatgtactggt

SEQ ID NO: 149571 - DNA, 236 bp, Glycine max
tgatcgtgatgttactgtgctgaatgattttaagtatagaagcattgatggtgaccttgttggtgttgttggagattcatgggtgttggaaaccaatcctattcctgtgacatggaattctaacaaaggtgtggagaaagagtcttatggcgagattgtcacggcgcttgttaaggatgttcaagcgctgaattcttcagcaataggaacaaattcatcttatttctatgggaagc

SEQ ID NO: 149572 - DNA, 239 bp, Glycine max
ccatgctgctgagatccttgttgagttctttgagaagagcaaggctgatccatctcactgggacaaaatctcccagggtggactcaagcgtattcatgagaagtacacatggcaaatttactcggacaggctcttgacactcactggtgtgtatggcttctggaaacacgtgaccaatcttgaacgccgtgagagcaaacgttacctcgagatgttctatgctctcaagtaccgcaaat

SEQ ID NO: 149573 - DNA, 239 bp, Glycine max
cccaaacctcttacggaggacatatgttctcttcgttctgatgtggaaaggcttgcattctctgtcatatgggaaatgacacccgaagcagatattattgccacctcatacacaaaaagtgtcataaaatcttctgcggcattgtcttatgttgaagcacaggcaaggatggacgatagtcgattgatggatccgattactgcagatttgaggaatatgaatagtttagctaagaaaat

SEQ ID NO: 149574 - DNA, 239 bp, Glycine max
gttaatttttatcaggttgaggagctcttaaaagaatatgacaatgtgtgcaccctcagggttcgcatgccaatttcatctgacttgagcaatccacgcaatttcatcaccaagatttctcgttataacaaagtggtcaacattccaaacagcatgaccattttggatgaacttctgcctatttcaattgagatggcaaagcgaaacttgaggggcatctggaacttcacaaatcctgg

SEQ ID NO: 149575 - DNA, 245 bp, Glycine max
attagttggaatgaccatttcttcatcctcaaagttgaagctgatgcttactgcatcattgacactttgggggagaggctctatgaaggatgcaatcaggcgtatatcttgaaatttgacagcgacacagtaatatacaaaatgcaagatgttgctcgaggttctggcaaaaaaacagccagtgatcttcaaactgttgcagaagtattagagcagaatgaaaggcagatccagccaatcaatgg

SEQ ID NO: 149576 - DNA, 241 bp, Glycine max
atccagtgtcgtggttccaaggaacttcagattgctggaggagcttgagaagggagaaaaaggaataggagatggcacagttagttatggaatggatgatggtgatgacatttacatgcgctcttggactggaaccattattggtccctataatactgtacatgaaggaagaatttatcaattgaagctgttttgtgataaagactaccctgaaaagcccccgagcgtccggtttcattca

SEQ ID NO: 149577 - DNA, 240 bp, Glycine max
gtgatgctaaaaggggtgatttggtgaagtgtgaggcctatgaggcagacagatcagaggttgagggtgcaagcacaccgtcagaggctgcaaagaaggtaaaaattgggatatattttgcaacctggtgggctctgaatgtggtgttcaatatttataacaagaaggttctgaatgcctacccttacccttggcttacttcaactctctcacttgcatgtgggtctcttatgatgttga

SEQ ID NO: 149578 - DNA, 241 bp, Glycine max
gaaactttctctgagtatcctccccttggtcgttttgctgtgagggacatgcgtcaaactgtggctgtcggagtcatcaagagtgttgagaagaaagaccccaccggagccaaggtcaccaaggccgctgccaagaagaagtgattgcatttgggcaattttgctagcacatgtgatcatcatcgtggttactcctttatagtagttttatccttgcagagtcttaggtgttttgtttaag

SEQ ID NO: 149579 - DNA, 242 bp, Glycine max
cagtgatttttaataaggccagggatgagaaaaagacaggtggtaacccagattcaccaggaaagactgccactgatcctcatagcaaacctgctgtagagcctggcaaaactcaaactaaaaaatggttttgctgcatgcaaaacccttctgccgaatcatagcatagcaatggttgctcctgtgaaaagcctgaacagaagaacaatgtttgtgtaactagtgtcacagtattttctcta

SEQ ID NO: 149580 - DNA, 243 bp, Glycine max
  unsure (1)..(243): unsure at all n locations
atggcagatcatccncagcaccaagacatattcataggactccggtagctgttcaggccctcccagtccaatctcaggcattgggaccacagcaaaattcaataactaatttgaatagttccttgctacctagcaattcctctgctactcctcatatttctttgtccaaccctacctctgtagatactttgaatgccatactaagtgatacggaaagacaacaacatttttctcgaaccccaa

SEQ ID NO: 149581 - DNA, 238 bp, Glycine max
tgggtcgccaaaaccgcacacccaccatagttgttatatggtcagttttattggcttccattttctccttgctttgggtaagaattgacccgtttgtattaaaaactaagggacctgataccaagctatgtggaatcaactgttgaaagactggttttccaatagtatccatttgtgagcatcttttaaagatgcaagtaaatgtaaattcttgattgtgctgtatgatgcgtgagct

SEQ ID NO: 149582 - DNA, 247 bp, Glycine max
ctcaaccatggaatgaatcgttacgtcttcgttgtctatcgcaatgccatcgctgcattggcccttgctccttttgcattgattttcgagaggaaaattaggccaaagataacactccctgtcttcttacagatagtggcactgggatttgtggagccagtgattgaccaagggttcactttcttgggcatgcaatatacatcggcttcatttgcctctgccataatgaatgccgtgccttctgtca

SEQ ID NO: 149583 - DNA, 235 bp, Glycine max
gtgatgttgtgattgctgtgcctgactctggtgttgtggctgcgcttggttatgctgcgaaagctggggttccgtttcagcagggtttgattaggtcgcactatgtggggaggactttcattgagccctctcagaagattagggactttggtgtgaagctgaagctatcacctgttcgtgctgtgcttgaaggtaaacgtgttgtggttgtggatgattccattgtgagaggaac

SEQ ID NO: 149584 - DNA, 236 bp, Glycine max
gacaaccccttgattcctcttctagttccatgatcaaaatcaaggtctctcatggttcttaccaccatgaggtcactgttcctgcacaatccacttttgggcatctaaaaatggtgcttacatccgagactggtcttgagcctaaagagcaaaggttactatttagagggaaagagcaagaggatgaggaatgcttgcatatggtgggagtgaaagacatgtctaaggttatattg

SEQ ID NO: 149585 - DNA, 237 bp, Glycine max
cttaatccaaatacgatggcagccatggcaaccacaaccctctcttcaaaccccaaactctcattcttcaacggaaagcccgtcacatattcttcccgcgtcgcgcccaccaccaaattatcctcatccaaacaaggcacaatttccatgtccctaaccccacccccctacgacctccagtccttcaaattccagcccatcaaagaatccatcgtgtcacgggaaatgacgcgccgc

SEQ ID NO: 149586 - DNA, 241 bp, Glycine max
ctcggatactgtcaggactccgggttcaactaccaggcctacttgttcagctgaagcttatcgaagaacagagcatgcagctagaaggcaaatcccaacctcccgtgaaatggatgaattctttgctgaaattgaagaggctcagcaaaaaaaattcattgagaagtacaactttgatcctgtgaatgagaagccgctctcagggcgctatgaatgggaaaagttgaaaccctagaagggt

SEQ ID NO: 149587 - DNA, 238 bp, Glycine max
taacaaccacttatcccctttctccttctaacgagtgaggtaatatggcgcgtaagaagatcagagagtatgactcaaagaggttgttgaaggagcactttaagagactctctggcaaggagttgccgatcaagtctgcacaaattaccgcatcaactgatttcactgagctacaagagaaggaaccctggctttcatcttctaaattggttgttaaacctgacatgttatttggaaa

SEQ ID NO: 149588 - DNA, 237 bp, Glycine max
ctgtggcagaatctgtagctaatgaacttgtgctacaaagcttttcttcctcaaaaaatggccaatttggttctactgagcaacaagatgaagctgctaagaataaatcaaaagattcaaaaggtgtgaaaggtggtcgctcatctcatgaagaaaaaaaggtggctaaatcacatgaagagaagagatctaggccacggaagatgatggagtttcacaacatcaaaattagtcagg

SEQ ID NO: 149589 - DNA, 236 bp, Glycine max
caaccggcttgaagatggcttcaacattcattggcaactctacctccattcaggagatgttccgtagagtgagtgagcaattcactgctatgttcaggaggaaggccttcttgcattggtataccggggaaggcatggacgagatggagttcactgaggctgagagcaacatgaacgatcttgtgtcagagtatcaacagtaccaggatgccactgctgatgaggatgagtatgag

SEQ ID NO: 149590 - DNA, 241 bp, Glycine max
atcacttgctgatgtctcagaagggcttagttcgcaggagaacactgttagctatgaagactctctacacaggagtcaatggagaacgttacccatcaaggttttatgagtagggcttgctcaaggttggagatatagagtacgcattggcatacgttgatggcgcctgaagcggaacataccctgagatgcaaaagctaaggcacgcgctagtggactatgcattggccagtggagagta

SEQ ID NO: 149591 - DNA, 233 bp, Glycine max
atcccaaccaaggtccttgttgaagatgatatcagcgccaagacgacggcaaggactaccaggagccggcgccggcgccactggttgacccgacggagtttacgtcatggtccttttacagagcagggatagcagagtttgtggccacttttctgtttctatacatcactgtcttaaccgtcatgggagtcgccggggctaagtctatgtgcagtaccgttgggattcaagga

SEQ ID NO: 149592 - DNA, 236 bp, Glycine max
atcaaacaccaacaacagttccagaaaatgaaacaaccgaggtaatcaagacccaggaaacaaccccggaaccagtaccagccactgaggctcctgcaacagaacaagcagcagctgaggttcctgctcaagaagaacaacaagcaactgaggttcctgccccagaatcaaccaccgaagcaccaaaggaagaaaccaccgaagcaccaacaacagaaacagtagaaacaacaact

SEQ ID NO: 149593 - DNA, 234 bp, Glycine max
tttagaagatgcactgtcaccgacctgggaaaatcttattagtggtcaagtgaacttgaaggatgctgtggatgggacaataagcttccatgacaaagtaagaaacagggtttacaagctcaatgatcagacagcaaagctttttgtgagaccaagaggttggcatctacctgaagcacatattctgattgatggtgaacctgcaactggttgccttgttgattttggcctcta

SEQ ID NO: 149594 - DNA, 233 bp, Glycine max
cttccggcacctggatttcggagagcgcaacggctacctgaagggtgtcgtcactgacgtcatccacgatcctggccgtggcgcgcctctcgctaaggtcgccttccgccacccgttccgctacaagaagcagaacgagctcttcatcgccgccgagggtctctacaccggccagttcatctactgcggcaagaaggccaccctcgttgtcggcaatgtgttgcctcttcgat

SEQ ID NO: 149595 - DNA, 237 bp, Glycine max
caatatattccattctctctgtgtatttccctacctctcccttcaagatgcagatcttcgtcaagaccctcaccggcaagaccatcacccttgaggtggaaagctctgacaccatcgacaacgtcaaggccaagatccaggacaaggaaggaatccccccggaccagcaacgtctcattttcgccggaaagcaacttgaggacggccgtacccttgctgactacaacattcagaagg

SEQ ID NO: 149596 - DNA, 120 bp, Glycine max
accaatatcaggacattggcaatacatctcctgaaacatatcaagtgctaggccacctcaagacatgccttgtactaggatttggctacacattactgcatgaccctttcaccggaaggt

SEQ ID NO: 149597 - DNA, 233 bp, Glycine max
cagagatcggaacgtggaactgcggaaaccggaatatctcacttctcagatcagatcaatccgacgtcgttgcagttataatggctccattcagcggcgatgagacggcaccgtttttcggcttccttggagccgcagctgccctcgtcttctcctgtatgggagctgcctatggcacagcgaagagtggcgtgggcgtggcctcgatgggtgtgatgagaccggagcttgtg

SEQ ID NO: 149598 - DNA, 237 bp, Glycine max
cggccacaagaaatggattactggtatctcttgggaacctgtccacctgaatgctccatgccgtcgctttgtaagtgccagcaaagatggggatgctcgtatatgggatgtttctttaaagaaatgtgttatgtgtctcagtggccacacacttgcaataacatgtgtaaaatggggtggagacggcgtgatttatactggctcgcaggattgtacaattaaagtctgggaaaccac

SEQ ID NO: 149599 - DNA, 267 bp, Glycine max
ctcaaatcatggatttcttgcaagcacaagaaaatcagatacttgtgggtgtggccgtggccgttgtagccattgggcttggtgcagtatatctctattcatccaagaagaccaaaggttgcttggacccagagaactttaaggcattcaaacttgttaagcgtgcacagctgagccataatgttgcaaagttcacatttgcactcccaacacctacatctgttttgggtcttccaattgggcaacacataagttgcaggggtaaag

SEQ ID NO: 149600 - DNA, 262 bp, Glycine max
atttctccgagaacaaaaaaaaaaacgtgattcgctcttctcttagaataaaccacaaaaccaacaaacgagaagaggagtgagagaagatggggttgtcgttcacgaagctgttcagcaggttgtttgcgaagaaggaaatgaggattctgatggtaggtctcgatgctgctggtaagacaaccatcttgtacaagctcaagcttggagaaatcgtcaccaccatccccaccatcggatttaatgttgagactgtggagta

SEQ ID NO: 149601 - DNA, 272 bp, Glycine max
ggagttcggctcgagcttatccttttcccttccgttggtgccattcgtgcagcagcggatcctctcatttctccggcgataactgctcccgtttccggcgaattcaccgcttcctcgatatgaatcccgagtatgactatctgttcaagctccttctgattggagactctggtgttggtaaatcatgccttcttctaagatttgctgatgattcatacattgagagctacataagcaccatcggagttgattttaaaattcgcactgttgag

SEQ ID NO: 149602 - DNA, 259 bp, Glycine max
ctaacccagaggaagtggtttcaatggttgagatgagcatccagaacagcacagagataaggaagttgggatatttctcttgtggaacaggcaacccaattgatgattgctggcgttgtgaccccaactggcaacgcaaccggaagcgtctggcggattgtggcattggttttggccggaatgctatcggtggtcgtgatggaaaattttatgtggtgactgaccccagggatgatgaccctgtgaacccgaaacctgg

SEQ ID NO: 149603 - DNA, 262 bp, Glycine max
ttttcacttttgttcatcgtttgcgagacacacaggagagaagagctggcgacgagggtggtggcggaacagaagccgaagacgaagattgtgtgcacgctggggcccgcatcgcgctctgtcccaatgatcgagaagcttctgcgggcgggcatgaacgtggctcgcttcaacttctcccatgggtcccacgagtaccaccaggaaaccctcgacaacctccgcgccgccatggagaacaccggtattctctgcgccgtca

SEQ ID NO: 149604 - DNA, 267 bp, Glycine max
aggtcgcagtcatggtttatgtgggtgtagtagtttaatagtttttccaggtatggaaataaaattgttgcaatcaaagttctgcatcgtgggagcacttccgaataaagggcttccctagaaaatcgttttgctcgagaagttaatatgatgtctcgcgtccaccatgacaatcttgttaagtttattggagcatgtaaggatcctcttatggtaatagttacagagctattaccagggatgtcactgcgtaaatatttaacgagt

SEQ ID NO: 149605 - DNA, 221 bp, Glycine max
caaatgcccacttttattcttccaacgctcctcctccttctcatagccttcgccacctctgtctccggccgacgtgacctcgtcggagactttctccggctgccctccgaaactgataacgacgacaacttcaagggcacccggtgggccgtcctcctcgccggttccaatggttactggaattacagacatcaagctgatgactgtccaggctatcaaat

SEQ ID NO: 149606 - DNA, 275 bp, Glycine max
gatctgaggaaatcggccgtgaatctcattcccttccctcgtctgcacttcttcatggttggatttgcgcctctcacctctcgcggctctcagcaataccgcgcattgacagtgccagagctgacacagcaaatgtgggatgccaagaacatgatgtgtgctgcagatccaaggcacgggcgttacctcacggcatcagccatgttccgtggcaagatgagcaccaaggaggtggacgagcagatgataaacgtgcagaacaagaactcttcata

SEQ ID NO: 149607 - DNA, 257 bp, Glycine max
ctccttcaagaagggttctgctcgctctgccagtaaaagtcaggagaacaagtcatctggattatcaaagtcatcgactaatgcaaataattatggttcagtttcttctcaaagttcaagtgtacctgcaaacagtactgaggatgacatggatgattttgatccaagaggaacttctaccaaaacttcagctggaaactctaaccaggttgatctctttggacaagatttaatcggtgacctcatggatgctccaa

SEQ ID NO: 149608 - DNA, 254 bp, Glycine max
gattatacgaaccgataaaacatctgcacaagtgattcttgatctgataacagttggtaaaatcataaagaagacacctgttgtggtgggtaattgtactggctttgcagtgaataaaacattcttcccatattcacaaggtgcccatttgttggtcaacttgggcgtggatgttttcagaattgacacattgatacgcaactttggctttccgattggtcctttccagcttcaagacttggctggctatggag

SEQ ID NO: 149609 - DNA, 252 bp, Glycine max
atcaataacaatattattctcctcattccttcatttttaaacctagctccatctccctccacacaacatacgactctatcagatgcacatgctgacaacaccaacttctgtgtaaatgttagcaacaatggctacattagtgctaatgaccccttgaactggggtgcgacggcggaggctatggctgggagccacctcgactaggtcaagcgcatgctagaggagtaccggaggcccgtcgtcaagctcggt

SEQ ID NO: 149610 - DNA, 241 bp, Glycine max
gctttgttttgaatgtttgtccaatgccagcccaacaaagcccaatccaggaggtggaggggaaacatgtgcagaaactgggatcaacattttttttggcaagatcatcaagttgggagcagtcagaataagtggcatggttgaaaggctacaattatctcagcaaataagggagaatgtatactctcttttccagcggatccttaatcagtggacatctctctttttcaaccgtcatatt

SEQ ID NO: 149611 - DNA, 255 bp, Glycine max
ggagagctctgctagagccaggagtcaagcgtgcattaattgttggagtaggacttcaaatacttcaacaggctgctggtataaatgggtttctctactatgctccccagattcttgagaaagcaggagtaggggatcttttatcaaatttgggccttagttcagcatctgcttcttttcttgtaaatatcattacaacattctgtatgcttccttgtatagctattgcgataagactcatggatatttctggca

SEQ ID NO: 149612 - DNA, 254 bp, Glycine max
aaggaagggatcccacctgaccagcagagacttatctttgcgggtaaacagcttgaggatggtcgaacccttgccgactacaacatccaaaaggaatccactctccacctcgtgcttcgcctcaggggtggcatgcaaatctttgtcaagactttgactggcaagaccatcaccctcgaggtcgaatcctcggacaccattgataatgtcaaggccaagatccaggacaaggagggtatccctccagatcagca

SEQ ID NO: 149613 - DNA, 258 bp, Glycine max
cagtgtatcaacctggtggagctccaccattttcgtccaccagcaagcccataccggcgaggtggaggattctgcttcccgatgggtcctatggtgtgtacccagagcctcgtgcacttagcacttctgagatacctgaaatagtgcagcattatcgccaagcagcaattaatgcaattcgagcaggttttgatggaatcgagattcatggggcacatgggtatctcattgatcaattcttaaaggatggaatcaatg

SEQ ID NO: 149614 - DNA, 261 bp, Glycine max
gcagaaagcaagctcatcctagagttttaaaaatggcagcagcctcctccatggctctctcttccccatccttggttggcaaggccgtgaagctgggcccatcagcccccgaagtcgggagggtcagcatgaggaagaccgtcaccaagcaggcctcctccggaagcccatggtacggcccagaccgcgtcaagtacttgggcccattctctggcgagcccccgtcctacctcactggcgagttcccaggtgactacggct

SEQ ID NO: 149615 - DNA, 264 bp, Glycine max
gggatgttggaggtcaggacaagatccgtcctttgtggagacattacttccaaaatacacaaggacttatttttgtggttgatagcaatgacagggaccgagttgttgaagctagagatgagttgcatagaatgttgaatgaggatgagttgagagatgctgtgcttctagtttttgccaacaagcaagatcttccaaatgctatgaatgctgctgagataactgataagcttggtcttcattccctccggcagcgtcactggt

SEQ ID NO: 149616 - DNA, 246 bp, Glycine max
cgattgctagaatggaatttcgatgctcagtcatctcgtttaccattctcttctctcttgctcttgcaggagagagccatgtccatgcatcgctacctgcggaagattattgggaagctgtttggccaaacactcccattcccactgcactgcgagatcttctaaagcctctccctgcaggtgttgaaatcgatcgaatccctagccaattgatgatacacagtacccaaaaacattcttctataa

SEQ ID NO: 149617 - DNA, 252 bp, Glycine max
gtgttgtgttcggtgaagtgagtagtgaaggtgctgaatcgaatcgaatctccgaagatggccgcgagcgatcgcacagtgttgcaattctcttcatcatcttcttcttcgcagagcttgtccgcgaaggtccaccctctggtcatcttcaacatctgcgattgctacgttcgacgccctgaccaagccgatcgcgtcatcggaaccctactcggctccgtccttcccgatggaaccgtcgatatccgcaat

SEQ ID NO: 149618 - DNA, 248 bp, Glycine max
ctgataatgagtggttgtgtgttgggcttgtgcgtgggcataggaggttgtgtatgtgtggtggagaacgagaatggaagaatcatcattgatattagtcactcgtaccatcctgatatgcctgcctgggaatccaaggatagccttgggcagtttttgtggcttacaagaagcatggccaatggttctctggctaacttctcccaattcaagctccccgctcacagcggcacccatgtcgatgctcc

SEQ ID NO: 149619 - DNA, 250 bp, Glycine max
ggttttctgattaactctttcttctcataactctgccgccgcaacagccccaaatccaatggcttcagagaagaaactttcgaacccaatgagggagataaaggtgcagaagctcgtcctcaatatctccgttggcgagagtggagatcgtcttaccagagccgctaaggtgttggaacagcttagtggccaagcccctgtgttttccaaagcaaggtacacggttcgttcctttgggattagaagaaat

SEQ ID NO: 149620 - DNA, 242 bp, Glycine max
cgatgacaagcttggtgctctttgcatgcagtggttacaggataaggttcattcaattcgtgaagcagctgctaacaacttgaaacgccttgctgaagaatttggtcctgagtgggctatgcagcacataattcctcaggttttggagatgaacaacaacccacactatttgtatcggatgactattcttcgtgctatctctctgcttgctcctgtgatgggccctgaaatcacttgttcaa

SEQ ID NO: 149621 - DNA, 257 bp, Glycine max
ctctcctccaatggccgaccagctcaccgacgaccagatcgccgagttcaaggaggccttcagcctcttcgacaaggacggcgatggttgcattactaccaaggaacttgggactgttatgaggtcacttggtcaaaacccaactgaggcagaactgcaggatatgataaacgaggttgatgctgatggcaacggaaccatcgatttcccagagttcctcaacctgatggctcgcaagatgaaagacaccgactcag

SEQ ID NO: 149622 - DNA, 258 bp, Glycine max
gttgaacaagggtttctctgtctgcttcttcactttctctcgtttcaatcgaaaccaaaacaaaaacatgggcagaaaattcttcgtcggtggcaactggaaatgcaatgggaccactgaggaggtaaagaagattgttactactttgaatgaggctaaagtccctggagaagatgtcgtagaagttgttgtgagccctccttttgtgttccttcctgttgtaaaaagtttgctgcgccctgatttccatgtttcggc

SEQ ID NO: 149623 - DNA, 262 bp, Glycine max
atttttcgctgactccggcgtcactttccgttgagtctccgtccaccggcgtggcgatggactcggaatcttcaaactccgattctcaaccgcaccctctctcgaacccaatcgacgacgcgtgccacgacatgagctccctggaagagctcgcgaaccgcggcgcgtggcgttccatcattgacaaggtctcacgcgcccgcgccctctctctcctccacaagccccacgaccacctcacctgccttggccttcaacgccc

SEQ ID NO: 149624 - DNA, 275 bp, Glycine max
aatctgatgaaattagccatcaacttgtcctctgcctcccccacctagtgatttttatgacaagacagcttcaatgaacctagcaagaagtgtcaggcaaaatacatctgctagtggtgctcgtcctaatcctcaagggtcctttcattatggctccatcaatataactgatacttatgtgtttaaggttacatccctggtgccaatcaatggtacaaatcgagctactattaatgggatctcatttctcaagcctgaggttccattccggcttg

SEQ ID NO: 149625 - DNA, 251 bp, Glycine max
aacatatacaaattctctgtgttgtgttgtgtacttgtgttaattgtgttgttgttgtaggaaatttaagtgaagagagaatgatgatgaagtctgctatgtgtgcattggtgcttgtggcactggttgtggttgaagtggggcccatggctgaggctgcggtgacttgcaacccaacacagttgactccttgtcttccggcaattaattcaggttctgcaccttcgagtgcttgttgccagaagctgaag

SEQ ID NO: 149626 - DNA, 249 bp, Glycine max
gagaattccaactgataaaaagaatattcagagaattccaaagacagagatgactgtcattaaggaagagcaacaaccaaaccaaatagctggccacaaagaacttggtcacaaaagtctccttcagagcgatgcactctatcagtatatacttgaaaccagtgtgtacccaagagagcatgagagcttgaaggcgctacgagagttgccggaagaacacccttggaacctgatggctacaccaactga

SEQ ID NO: 149627 - DNA, 243 bp, Glycine max
agactggatgctcaacaaaagaagctcaaccttccaatccttccaaccaacactattggatccttccctcagactgtagaactgaggagggtacgccgtgagttcaaggctaacaagatctccgaggaagagtatgttaagtcaattaaggaggcaattcgcaaagttgttgaacttcaagaagagcttgatattgatgttcttgttcatggagaaccagagagaaatgatatggttgagtac

SEQ ID NO: 149628 - DNA, 246 bp, Glycine max
ctcgagccgaatcggctcgaggagaaccagaggaggctaaacaacaagaggaggaggaagcaccggcggttgattatgccatcacggatttcaatgcaggtgctattgctgctgatggccagtggcctggtacaattgatcaatcatggagtgatgcagttcctcaacctattccagcagtacctggtgtcaactggggggcacctgcagaagcacctgctgctgcaggaggagattggggggaag

SEQ ID NO: 149629 - DNA, 253 bp, Glycine max
gtgagcaatgaccaaattgctgctgaccttaaagagcatgttattaagcctgtcattcctgagaagtacctggatgagaagaccatcttccaccttaacccttctggccgttttgtcattggtggccctcatggtgatgctggtctcactggaagaaagatcatcattgatacctatggtgggtggggtgctcatggtggaggtgccttttcagggaaggaccctaccaaggttgacagaagtggtgcctata

SEQ ID NO: 149630 - DNA, 257 bp, Glycine max
gcggaggctgcaagacaaagtcttggaccaagatcactccaatctccatttggcttctccagaaaagcctcctttcttgttaaggcagctgctaccccccctgtcaagcaaggatcagacagacctttgtggtttgcatcaaagcaaagtctttcttacttggatggcagccttccgggtgactatggatttgaccctctgggactttcagaccctgaaggaacaggagggttcattgagccgaaatggctagcata

SEQ ID NO: 149631 - DNA, 251 bp, Glycine max
gccaagtgatcatcacattatggccacaaaaacctaaatggagaaatgttgattaaaaggagacgacaaaaaaaggggtaggaggaaggccaagggtttgggtggtataacagtgatgtagtagtccttgacctttcttcttcctacatttttatttgatggtttttgaatcccaccttaaaatgtcaattactggcaagtcctgctactaggctgtagtggaactgggacttcttagtgtgtcttctaaa

SEQ ID NO: 149632 - DNA, 247 bp, Glycine max
ccgcccggagctcgtatgagagttggtttaactgccctgactatggcggaatattttcgagatgtcaatgaacaagatgtacttctatttatcgacaatatctttcgcttcgtccaagcaggatctgaagtatctgccttattgggtcgaatgccttctgctgtgggttatcaacccactcttagtactgaaatggggtgcttacgagagagaatcacttctaccaaagaggggtccataacttcta

SEQ ID NO: 149633 - DNA, 245 bp, Glycine max
atcttttcaagccttaaatgagtaaaaaagagtgaagaaaggaaagaaaggagcaccatttttggtttcagaaacataattagcaagagagttcaaaatggggaagagagagtttaatggggtggtcttgatgatgctgtgtttgtgggtttgtggtgtcacagcctctgtgacttatgaccacaaagccattgtggttgatggcaagagaagaattttgatctctggctccattcattatccta

SEQ ID NO: 149634 - DNA, 245 bp, Glycine max
ttcagattctgtgaagaacaatgttaatggcaactcttggcttgcaagcagttcgtcctcctccattaacgtccacttccgacccaccacctctttttgatggcaccaccaggttgtacatcagttattcctgtccctatgcacaacgagtatggataactaggaactacaaggggcttcaagacaagatcaaattggtccctattgatcttcaagacaggccagcttggtataaggagaaagtc

SEQ ID NO: 149635 - DNA, 247 bp, Glycine max
ggggaatggatttcacaactgacaagctgaggtcattggtgcgaaaatggcaaactctaattgaagcccatgtggatgtgaagacaactgataactacacattgaggatgttttgcattggatttaccaagagaagagctaaccaagtgaagagaacctgctatgcacaatcaagccagattagacagattcgtaggaagatgagggagatcatgaccaaccaggcaacatcctgtgatttgaagga

SEQ ID NO: 149636 - DNA, 248 bp, Glycine max
ggcaaggttccgggactagcagttgtgatagtagggaacagaaaggattcacaaagctacgtgggaatgaagagaaaggcatgcgccgaattgggaatcaaatccttcgatgtggaccttcccgaacaagtcccaagctgaactaataaaacaagttcacgagttgaatgttaaccctgatgtacatggtatattggttcagcttccgttgcctaagcacataaatgaagagaaagttctgactgaaa

SEQ ID NO: 149637 - DNA, 252 bp, Glycine max
gaaaggacttgatggcattcaaggacctatgtatgtgggaactggatgtgttttcaatagacaagcactttatggctacagtccaccatctatgcccaaattaccaaaatcatcatcctgctgttgctgcccctcaaagaagcaaaccaaagacgtctcagagctttatagagatgcaaagagggaagaacttgatgccgccatttttaatctcagggagattgacaactatgatgaatacgagaggtcaat

SEQ ID NO: 149638 - DNA, 261 bp, Glycine max
gttgattcaagtgacgttgataggcttgtgatagctaaggaggagttccatgcaattttggaggaggaagaactaaaaggtgcagttgttctcattttcgcaaacaagcaggaccttcctggtgcacttgatgatgctgcagtgaccgaggctctagagttacacaagatcaaaaatcgccaatgggctatttttaaaacttctgccataaaaggagaaggactttttgagggccttgactggttgagcaatacactcaaa

SEQ ID NO: 149639 - DNA, 243 bp, Glycine max
ccgtaagctcccaagcagtgggaggaggctcgggactctgaccgcgtgcctgttgaagaatgagccggcgactcataggcagtggcttggttcagggaaaccaccggagccgtagcgaaagcgagtcttcacagggcaattgtcactgcttatggacccgaacctgggtgatctatccatgaccaggatgaagcttgggtgaaactaagtggaggtccgaaccgactgatgttgaagaatcag

SEQ ID NO: 149640 - DNA, 248 bp, Glycine max
ggctctcagtacagttgtttttgttggaggctcaaaaccatgggaggataaacttttagagcatgccaaagctcttaaagtaaatgccggaactgaacctgatacagatcttggtccggtgatcagcaagcaggcaaaggagagaatacacagattagttcaatctggggttgaaagtggtgccagactactgcttgatggaagaaatatagtggtcccaggatatgaatctggcaattttattggtc

SEQ ID NO: 149641 - DNA, 284 bp, Glycine max
ttcggttttcggctcgaggtcgcagtcatggtttatgtgggtgtagtagtttaatagtttttccaggtatggaaataaaattgttgcaatcaaagttctgcatcgtgggagcacttccgaataaagggcttccctagaaaatcgttttgctcgagaagttaatatgatgtctcgcgtccaccatgacaatcttgttaagtttattggagcatgtaaggatcctcttatggtaatagttacagagctattaccagggatgtcactgcgtaaatatttaacgagta

SEQ ID NO: 149642 - DNA, 255 bp, Glycine max
ataggagattgagcctgcattgaagaaacagctcatcatttccactgccttgatgactattgggattgcaattgttagttggattgcactcccaacttccttcactatcttcaattttggagtgcagaaagatgtcaagaattggcagctattcttgtgtgttgctgttggtctttgggcagggcttattattggatttgtaactgagtactatactagctatgcatatagtccggtgcaagacgttgcagactc

SEQ ID NO: 149643 - DNA, 262 bp, Glycine max
atcaagggtgagggccttccatggcttccgcttgtgcttcctctgcaattacagctgttgccatctctacgccgagttccgggcagaagaatggatcaggaggttgttttcttagtggaaggaaattgagggtgaaaaaggagagagcagcaattggaggacgatcgatgggcactacagtgtgcgcagttgctgagcctgacagacctctatggttcccaggcagcacccctcctccatggcttgatggcactctacctgg

SEQ ID NO: 149644 - DNA, 267 bp, Glycine max
gggagaagaaaaggaaagaaaactctcaaaaaactattatagcaatggcagaacaaaaccaaaaccaaacaactgaagctggaaggcaccaagaggttggtcacaagagccttctccagagtgatgctctttaccagtatattctggagacaagtgtctacccaagagaacctgaatccatgaaagaactgagagagttgacagcaaaacacccatggaacatcatgacaacctctgcagacgaagggcagttcttgaacatgctcc

SEQ ID NO: 149645 - DNA, 217 bp, Glycine max
aagattaatagtaccatagcatacaagtgccagggttcagccgcttagtccgcaaacgcagccgagtgcattgcacttgacggtgaaccatagtatgacattccattccgtcacctcaagctaaccaccccaagctttggtgacttgaaccatctgatctcagctacaatgtctggtgtcacttgttgtttgaggttccctggtcaacttaactctg

SEQ ID NO: 149646 - DNA, 220 bp, Glycine max
ctattatcatccgcagctgcttttattcgcaccgcaaacagtgagccatggccgtcggaaagaacaagcgcatctccaaggggaagaagggtggcaagaagaaggcagctgatccctttgccaagaaggattggtatgacattaaggctccttctgtttttcaagtgaaaaatgttggcaaaaccctcgtctctcgtactcagggtaccaagattgcttc

SEQ ID NO: 149647 - DNA, 220 bp, Glycine max
ctcgagccgttcgcctctcaactatccatccaagaaggaactcaatctcgctctctcggatcgccctatcatcatcgatcagggtatcaagagctttcaattggagagaaagagtgggaagaagtgttacatgcttgctgctagagctctcagcattatttggggtgacactgcgcaatactggaactggacaaccgataccaattccaggttcccggaa

SEQ ID NO: 149648 - DNA, 219 bp, Glycine max
cttttgtgttagtgagagaaagttctctctgcttgtctctctacgactcaaaaccctattgcgtgctttgcaatcgaccccgattatggccaacagtaacctccctcgaagaatcatcaaggaaacgcagcgtttgctcagtgagccagcacctggaattagtgcgtccccttcggaagacaatatgcggtatttcaatgtgatgatccttggcccaac

SEQ ID NO: 149649 - DNA, 219 bp, Glycine max
tggaatggtgctggtgctcacacaaactacagcaccaagtccatgagagaagatggtggctatgaagtgatcaaagcagcaattgacaagttggggaagaagcacaaggagcacattgctgcttatggagaaggcaacgaacgtcgtttgacaggacgccacgaaaccgctgacatcaacaccttcttatggggagttgcaaaccgtggagcttctgtt

SEQ ID NO: 149650 - DNA, 220 bp, Glycine max
tcgggactttcactagccgcagcagcctcaggaggagaataaggatgtctcacaggaagttcgagcacccaaggcacgggtcactgggatttctccccaggaagcgtgctgctcgtcacaggggaaaagtgaaggcattccccaaggatgacccatccaaggcacccaagctcactgcattcttgggttacaaggctggtatgactcacattgttagaga

SEQ ID NO: 149651 - DNA, 219 bp, Glycine max
tggctattgagcatgctgattttgatggtattgagcgtctggctttggtaactggtggtgaaattgcatcaacctttgacaatcctgagtctgttaagcttgggcattgcgaccttattgaggagattatgattggcgaggataaactgattcatttttctggtgttgctatggggcaggcatgtacaatagttttgagaggtgctagccaccatgttc

SEQ ID NO: 149652 - DNA, 239 bp, Glycine max
attcggctcgagattgtttgttcgttgtaactcgttcttcttcttttgttgttctgtgtttgtgtttgttttttctctcacctgaaaatgtcttgctgcggtggtaactgtggttgcggaagctcctgcaagtgcggcaacggctgcggaggctgcaagatgtacccagacttgagctacactgagtcaaccaccaccgagaccttggtcatgggagtggcacctgttaaggctcaatt

SEQ ID NO: 149653 - DNA, 223 bp, Glycine max
cggaattcgggtcgagaaaccatttctgatgggtttgatgaagttgggttcctagaggctgggagtcccaaggcctatatagatcgcttgtagcaagttggatcagaagcctttcatgagcttctcgagaaacttggcaaatctataaaccatattgagtgtgttatttatgattcattcttcccttgggcagtagatgttaccaatagattggggatacttg

SEQ ID NO: 149654 - DNA, 209 bp, Glycine max
ctcgggccgattcggctcagatctaacaaccacttatcccctagctccttctaacgaatgatgaaaaatggcgcgtaacaagatcagagagtatgactcaaagaggttgttgaaggagcattttaagagactctctggcaaggagttgccgatcaagtctgcacagattaccgcatcaactggtgtcactgagctacaagtctaggaac

SEQ ID NO: 149655 - DNA, 212 bp, Glycine max
ctcaacatcttacgagaagattggaaacctgtccttaatataaacactgtcatctatggcttgtatcatctcttcacggaaccaaattacgaggatccactgaatcatgatgctgctgctgtgttgagagagaaccctaagatgtttgaatctaatgtgaggagggcaatggctggagggtatgtggggcaaacctttttcccacgctgtat

SEQ ID NO: 149656 - DNA, 211 bp, Glycine max
ctcaatttagttttaacaataatattactagtttcattgatagttgcattgtatttgtcaatatcacctaaattgacaaatacaatgatatttatttttatagttacatttttttgaagggcagaaattgtagtgaaagcgataattctagtactagtataataactagtacgaatgatacaaatgatagtgattccactataggagaaag

SEQ ID NO: 149657 - DNA, 215 bp, Glycine max
ctcacccaccctccatacacactctctctgagtcggtcgagttgaatcggtgtgagtcagtgaccgagtcgaaccatgtcggacgaagaacaccatttcgaatccaaggccgatgctggagcctccaagacctatcctcaacaagccggaaccatccgcaaaaacggttacatcgtcatcaagggtcgtccctgcaaggttgttgaagtttctac

SEQ ID NO: 149658 - DNA, 211 bp, Glycine max
ataaacgccgcccaaaaccatttatagggttttcttttctttgccaagaaaatgagagagtgcatttcaatccacattggtcaggccggtatccaggtcggaaacgcctgctgggaactctattgccttgaacacggcatacagcccgatgggcagatgccgagtgacaagaccgttggaggaggagacgacgccttcaacacattcttca

SEQ ID NO: 149659 - DNA, 215 bp, Glycine max
gtttgttcttcttccttattttcttccctagtcaaggagattcatctctgcaggttgttttagacaagaaaaaatggtgaagatttgctgcattggtgctggatatgtggggggtccaacaatggcagtcattgctctgaagtgcccctccattgaagtggctgttgttgacatctccaaatcccggattgcagcatggaacagtgaccagcttc

SEQ ID NO: 149660 - DNA, 219 bp, Glycine max
gagatctacaagttgtacggccaattcagatggatatcctctcagatgaaccgtgtgaggaacggagagctctaccgtgtcatctgtgacacaaggggtgcctttgtgcagcctgcagtttatgaggcctttaggttgactttgggtaaggccatgacttgtgggtcgccaacgtttgccacatgcaatggtggtcctgctgagatcattgtgcatgga

SEQ ID NO: 149661 - DNA, 223 bp, Glycine max
caacaatggcttctgtgcctcaaccaaaaatctcccttctaaccttattcttcttctcgtccttcaccatcattgcgcatgcaattgttcctcaaaacgaaaccttcaaatttgagaactcaggtgaacttggaccctacatcgttgagtacggtgcagattacagaatgataagcatcttcaactctccattccaagttggtttctacaacaccaccccaaa

SEQ ID NO: 149662 - DNA, 216 bp, Glycine max
ctcgagccgaatcggctcgagccaccgatgaaacccccgagtaactgcccctcagccatacccttgcaaccaaacttggagctcgcctcacagaggttaggaagaatggcacctgtgcttggttgaggccagatggtaagacacaagtaaccgtcgagtactacaatgacaatggtgccatggttccagttcgtgtccacactgtcctaatttcca

SEQ ID NO: 149663 - DNA, 209 bp, Glycine max
gcaagatcttggtgaatgcatggtggctggccaacaaccctgcacactggaagaagccagaggagttccggcctgagaggttcttcgaggaggagtcgcttgttgaagccaatggcaatgactttaggtaccttccctttggtgttggcagaagaagctgccctggaatcattcttgcattgccaattcttggcatcactttgggacgt

SEQ ID NO: 149664 - DNA, 208 bp, Glycine max
ggtgccttctcgctgtggttttcatcgtcttccttctcttatattgcttttttgttttgtcttcgccgcacgccgaaacaatggccggaaaaggatagggtcctgctatcggaatcgatctcggaaccacctactcttgtgtcggtgtttggcaacatgaccgagttgaaatcatcgccaatgaccaagggaacagaacgacgccttc

SEQ ID NO: 149665 - DNA, 212 bp, Glycine max
atcccgagaagtttaaagagctggcgcaagctctatgaggttctgagtgaccctgagaagcgtgagatatatgatcagtatggtgaagatgcgcttaaggaaggaatgggtggtggcggtggccatgatccatttgatatcttttcatctttctttggcggtgggagtccctttggatcaggtggaagtagtcgaggtaggaggcagaggcg

SEQ ID NO: 149666 - DNA, 226 bp, Glycine max
ggctcgagctccggaagcccatggtacggcccagaccgcgtcacagtacttgggcccatatctctggcgagcccccgtcctacctcactggcgagttcccaggtgactacggctgggacactgctgggctttcggccgacgcagataccttcgccagaaaccgtgagctcgaagtgatccactccaggtgggccatgctcggggccttgggctgcgtcttccccga

SEQ ID NO: 149667 - DNA, 231 bp, Glycine max
attcggctcgagctcagaacacctttgtcccacgtttattattacacattatgcaaaaaatagctaacgttacaaaatttaaaaatatatgggtgaatttgtacttgtgttttcatcaggactcattgatctggccatcaaaaggaatagtttgattggaggagatgactttaagagtggtcagaccaaaatgaaatcggtgttggtggatttcctagtaagggccggcat

SEQ ID NO: 149668 - DNA, 222 bp, Glycine max
ctatccactcacctgcctcttcttcacccctttctccatctaacgagtaaggaaaaatggcgcgtaagaagatcagagagtatgactcaaagaggttgttgaaggagcactttaagagactttctggcaaggagttgccgatcaagtctgcacaaattactgcatcaactgatttcactgagctacaagagaaggaaccctggctttcatcttctaaattgg

SEQ ID NO: 149669 - DNA, 218 bp, Glycine max
cctcaccatgcaacttcctcatcttcggcctcacccatgagaccctcctttggaaagccctcaaccacaacggaagaaccgtcttcatcgatgaaaaccggtactacgccgcgtacttcgaagaaaaacaccctgaaatcgatgcctatgacgtgcaatacacgaccaaaaggagcgagttgaaggagctgatagcttcgacgaaagaacaggtggga

SEQ ID NO: 149670 - DNA, 214 bp, Glycine max
tggggattctgtacgcgctggttggtcgtggatcggtggtgctggcggagttcagcggcaccaccaccaacgccagcgcaatcgcgcgtcagatccttgaaaaaatccccggcaacaacgacacgcacgtttcttactctcaggatcgctacatcttccatgttaaacgcaccgatggactcaccgttctctgcatggccgacgacaccgccgg

SEQ ID NO: 149671 - DNA, 198 bp, Glycine max
ggctcgagccgattgctagaatggaatttagatgctcagtcatctcttttaccattctcttctctcatgctcttgcaggagagagccatgtccatgcatcgctacctgaggaagattattgggaagctgtttggccaaacactcccattcccactgcactgcgagagcttctaaagcctctccctgcaggtgttgaaa

SEQ ID NO: 149672 - DNA, 208 bp, Glycine max
tatagcccaagccctatacaaccaaaccctaacacacacccatttgattcagtttccatggctagcctcaaggttgcatttttggctgcagtgctctgcatggttgtggtgagtgcacccatggcacatgcagctatcacgtgcgggcaggtgacgaatagcctgatcaattgcatcggttacctccagaacggaggaacgccgccgt

SEQ ID NO: 149673 - DNA, 208 bp, Glycine max
ctgatgttgaagaatcagcggatgagttgtggttaggggtgaaatgccactcgaacccagagctagctggttctccccgaaatgcgttgaggcgcagagttgactagacatctaggggtaaagcactgtttcggtgcgggccgcgagagcggtaccaaatcgaggcaaactctgaatactagatatgacctcaaaataacaagggtca

SEQ ID NO: 149674 - DNA, 223 bp, Glycine max
atctggttcaaggcggaggttgcaagacaaagtcttggaaccaagatcactccaatctccatttggcttctccagaaaagcctcctttcttgttaaggcagctgctaccccccctgtcaagcaaggatcagacagacctttgtggtttgcatcaaagcaaagtctttcttacttggatggcagccttccgggtgactatggatttgaccccacaggcttttca

SEQ ID NO: 149675 - DNA, 213 bp, Glycine max
cgcgtcgctccgcaccagtttcaccgcacgaatatcttactgtttggagcgatccgagaaaaactctgtaaacatgttggtttaccaggacctccttacaggtgatgagcttctctctgactccttccgttacaaggaaattgagaatggaatgctgtgggaagttgaggggaagtgggttgttaaaggagcagttgatgtagacattggtgc

SEQ ID NO: 149676 - DNA, 216 bp, Glycine max
ctgctttctttggccatgttggcagcaagacctcttgtggttatggggtggctacagggggacccttagcctggggcttatgctacagcaaggaattgagtcctgataaattctactgcgatgactactataaattaacctacccttgcactcctggcgcagatactatggccgtggtgccatcccactttactggaactacaactatggaaaagc

SEQ ID NO: 149677 - DNA, 218 bp, Glycine max
ctctttacaaggcataccttgaagacttctatagattttgtcagaaacttggtggtgccacagctgagataatgtctgaccttctagcttttgaggctgatagaagggctgtgaatattaccataaatagcattggtactgagcttaccagagatgaccgtagaaaattgtactctaattttggtttgctatacccatatggtcatgaggaacttgct

SEQ ID NO: 149678 - DNA, 212 bp, Glycine max
tggaagagtggataaagtggaagccttgaagcactacaaatttagcttagcatttgaaaattctaatgaggaagattatgtaactgaaaaattcttccaatcccttgttgctggaactatccctgtggttgttggtgctccaaatattcaggattttgctccttctcctggttcaattttacatattaaagagatagaggatgttgagtctg

SEQ ID NO: 149679 - DNA, 212 bp, Glycine max
tgccaactttgttgcccctggttacaccaagggtgatggtcttggtgctgagattgttggcactttcatccttgtttacaccgttttctccgccaccgatgccaaacgtagcgccagagactcccacgtccccattttggcacccttgccaattgggttcgctgtgttcttggttcacttggcaaccatccccatcaccggaactggtatca

SEQ ID NO: 149680 - DNA, 210 bp, Glycine max
ctggtggatgcagtttgggaatgaccatgttatgggatactggacggctcctctattctcgtacctctctgacagcgcgtcaatgattgagtgggggggagaggttgtgaactctgagtccgacggccaacacacctcgactcaaatggggagtggccatttccctgaggagggttttggcaaggctagttacttcaagaacattcagat

SEQ ID NO: 149681 - DNA, 206 bp, Glycine max
gaagaacattcttgtttttgaccttgggggtggaacttttgatgttagtatcttgacaattgataatggtgtttttgaggttcttgctacaaatggagatactcatcttggaggtgaggactttgatcagagaataatggagtacttcattaaattgatcaagaaaaagcatggaaaggatattagcaaggacagtagagcacttg

SEQ ID NO: 149682 - DNA, 217 bp, Glycine max
gagcggttctgtgtcgtggcaaagaacccatggcgctatctgttgatcataaaccaaatcgagatgatgaatatgcaagaattgaggccgctggaggcaaggtgatacaatggaatggtcaccgagtatttggtgttctagcaatgtcaaggtctattggtgataggtatttgaagccatggattattccagaccccgaggtgacgtttcttcctcg

SEQ ID NO: 149683 - DNA, 217 bp, Glycine max
ccagaagatgcaacctgatgctgatgggaaatatccatacactggctccgttgattgtgctgtcaaaaccttcaaagcaggaggaccattcaaattttacaccggattccctgtctattgtgttaggattgctcctcatgtgatgatgacatggattttcctgaaccagatacagaaattgcagaaatcctacgggttgtagtttgtagttctccgt

SEQ ID NO: 149684 - DNA, 209 bp, Glycine max
gtggaactgaaaaatggggagacatataacgggcatttggttaattgcgacacatggatgaacatccatctgcgagaagtcatttgtacatctaaagacggagatagattttggaggatgcctgaatgctacatacgaggcaatacaatcaagtaccttcgagtacctgatgaggttattgataaagttcaagaagaaaccaagagccg

SEQ ID NO: 149685 - DNA, 208 bp, Glycine max
atagaatgtgtggtttttcttttctttcaggttatgagtaagtatggtcgagtgaagaacttccgcttggttagggacattgtgaccggagcttctcgtggttatgcttttgttgaatatgaaactgaaagggagatgcgacgagcatatatggatgctcatcatttgattgttgatgattctgaaatcatagttgattacaacaggc

SEQ ID NO: 149686 - DNA, 203 bp, Glycine max
gcaagagagttaacaatgaggcagaatttgcctatggtgctggtcaattgaacccaagaagtgctgtgagccctggtctagtctatgacatggatgccttaggttatatccagttcttatgccatgagggttacaaaggttccagtttatcagctttagttggttcacctgtaaattgctcctctttgcttcctggtcttggc

SEQ ID NO: 149687 - DNA, 207 bp, Glycine max
ctgagaaacaggcaccaatgtgtactgttcattcatttccacataacattgaccacggcttgacatgggctcggtcagagtttgagggtttgcttgagaaaactccagctgaagtaaatgcatatttatctaatccaaatgaatatactaatgcaatgaggaatgctggtgatgctcaagcgagggataacttagagcgtgttcttg

SEQ ID NO: 149688 - DNA, 212 bp, Glycine max
gtgatgtttatgaaggagttccaaaggattacaccggcgaagatgttactgttggtaacttttttgctgctttacttggaaacaagtcggcacttactggtggcagtgggaaggttgtggacagtggacctgatgatcatatatttgtatactatactgaccatggaggtccaggggtgctcgggatgcctgctggtccttacttatatgcg

SEQ ID NO: 149689 - DNA, 216 bp, Glycine max
ttttactttaagcctgctttgaatgacaagtccaaggccaagattgtcagggacagcaacggtgtctcagggttcgataagtctgatctgaagctggatgttttcatggtttagcacgacatggctaacatgtacatgtggggtttcaaggagaagctggagaacgcgctgggttagatgcagctgaggagttacatgaatgggcattctcgccaa

SEQ ID NO: 149690 - DNA, 257 bp, Glycine max
ctgagggggatgatagggaggtggagaacaagcttttgtttcaccttgagtttgataaattcagcctcattaagtttttgttgcggaataggttgaagattgtgtggtgcacgcggttggcgagggcgcaggaccaggaggagagggagaagattgaggaggagatgaaggggacggagttgcagccaattttggagcagttgcacgcaacaagggcttctgcaaaggagaggcagaagaatttggagaagagtatt

SEQ ID NO: 149691 - DNA, 259 bp, Glycine max
atggcaccgtaaatttgatggtctggcattgcactattcctggcaagaccgggactgattgggagggtggatatttcccactgacaatgcacttcagtgaagattaccctagcaagcctcccaagtgcaaattccctcaaggtttctttcaccctaatgtgtatccatctggaactgtttgcttgtctatacttaatgaagatagtgggtggagaccgctataacagtgaagcaaattcttgtgggcatccaagacctg

SEQ ID NO: 149692 - DNA, 97 bp, Glycine max
gttgtgtttgggggatgggatatcagtaacttgaacctggcagatgccatggccagggccaaggtgtttgatatcgacctgcagaaacagttgaggc

SEQ ID NO: 149693 - DNA, 261 bp, Glycine max
actcgagcgattcggctcgagggataacttcagatttgcatcagccactattgcccttaactggtgttatcttcctgggagcaaatttcatacctagcatttgggatgctttccagtttactggagcaactgccgcagtctgtataggattcatttttccagctgccatcactcttagggaccgctacaacattgcaactaaatcagacaagattttgtgtgtcattatgatagtcctcgcagtcttctcaaacgttgtgg

SEQ ID NO: 149694 - DNA, 257 bp, Glycine max
ctccataacacaaggcagaaagcaagctcatcctagagttttaaaaatggcagcagcctcctccatggctctctcttccccatccttggctggcaaggccgtgaagctgggcccatcagcccccgaagtcgggagggtcagcatgaggaagaccgtcaccaagcaggcctcctccggaagcccatggtacggcccagaccgcgtcaagtacttgggcccattctctggcgagcccccgtctaactcactggcgagtt

SEQ ID NO: 149695 - DNA, 96 bp, Glycine max
caccctcgccgactacaacatccagaaggaatcaacccttcacctcgtcctccgtctccgtggtggcatgcagatcttcgttaagaccctcaccgg

SEQ ID NO: 149696 - DNA, 94 bp, Glycine max
aaaagtagtagatcttttagctccttatcgtcgtggaggaaaaataggacttttcggtggagctggagtgggtaaaacggtactgattatggaa

SEQ ID NO: 149697 - DNA, 259 bp, Glycine max
aatccaaccacatcaatagccatgaaaaccacactctcactctctcctttacttctcttcctactcttctccctagtccaaggactcacccccaaatgtgacacccaagaccatggctcaacccttgaagttttccatgtgttcagcccatgttccccatttaggccatcaaagccactctcatgggcagagagtgtcctccagctgcaggccaaggaccaagccaggctacagttcctggctagcatggtggctggga

SEQ ID NO: 149698 - DNA, 95 bp, Glycine max
gttgataaggaagactggaaactagagacattatgtgacctttatgagactttggctatcacccagagtgtcatctttgtgaacacaaggcgtaa

SEQ ID NO: 149699 - DNA, 253 bp, Glycine max
aaaagtgaaaaccagaagtacgaacgaaagagaagagcgatttagaagtgagagaagatggggttgtcgttcacgaagctgttcagcaggttgtttgcgaagaaggaaatgaggattctgatggtaggtctcgatgctgctggtaagacaaccatcttgtacaagctcaagcttggagaaatcgtcaccactatccccaccatcggatttaatgttgagactgtggagtacaagaacatcagcttcactgtgt

SEQ ID NO: 149700 - DNA, 243 bp, Glycine max
atcaaagtttcacttcagccttatccggtttagggtttcggtttttgacccaacctttgacgtatcgaaaccttaagtttcggatcaggtctgagcaatctggttggtagaacctttggtcttagagagtcaagttttatgtctgaattagacgatcaaattcctactgccttcgatccttttgctgatgcaaatgctgatgactcgggtgctgggtcaaaggagtatgtgcatattcgcgta

SEQ ID NO: 149701 - DNA, 94 bp, Glycine max
cgacaccattgacaacgtaaaagctaagattcaagacaaggcagggatcccacctgaccagcagagacttatctttgcgggtaaacaacttgag

SEQ ID NO: 149702 - DNA, 103 bp, Glycine max
ctgtaacaatgacacaatgcaggaagacttgaaacgtcagctatttggtttgcctccaaggtatcgagattctgttagggctataacacctgggttaccatta

SEQ ID NO: 149703 - DNA, 249 bp, Glycine max
caggccgcccggaaagctcctgttgctgcacggggttttcgaattcaatgtaacaagtgggctgtgatagtgcgtttactgttgggagaaatacctgagcggactgtcttcatgcagaaaggaatggagaaagctctaaggccttactttgagcttacaaatgctgtgcggattggagacttggaactgtttaggaatattgcggacaagtttgccactacctttaatgcagacagaacccataatttg

SEQ ID NO: 149704 - DNA, 241 bp, Glycine max
cgaccgcgttcttttctacggagcctcgaccaagaagaatcgcagagagaagagggtcagagtgagaaagagagagagagagagagaaactgagagaaattcgcaaaccctaatttcggaaagatcggcgatggctgcctccaaggatcgcgagaacttcgtctacatcgccaagctcgccgaacaggccgagcgatacgaagaagatggtggatccatgatagacgttgcgaatctcgac

SEQ ID NO: 149705 - DNA, 123 bp, Glycine max
actgaaccaaatcatcacacacacatactaaggagcaacaattcttctacaatggatctcctccttctggaaaagaccctcataggtctcttcctcgctgcggtggtcgccatcgccgtctcc

SEQ ID NO: 149706 - DNA, 81 bp, Glycine max
caatatttgcccttagcagtaacaaaattgccgtggtcaagtattctctgttgggttctattctttcaaaccttcttctgg

SEQ ID NO: 149707 - DNA, 101 bp, Glycine max
cctgcccaacatcaaggttcctctcattcttggtatctggggaggcaaaggtcaaggaaaatccttccaatgcgagcttgtctttgccaagatgggaatca

SEQ ID NO: 149708 - DNA, 253 bp, Glycine max
gaggctgaagggttcaccggatgtttatctgagtggccccatccgaaagtacatcatggacagagggggcaggttccatcttaggtggggatgcagagaactgctttatgacaaatctgctgatgggagtatttatgttacaggactttccatgtcaaaggccactgccaagaaaattgtgaaagctgatgcttatgttgctgcttgtgatgtccctggaattaagagattacttccatcagagtggagggaa

SEQ ID NO: 149709 - DNA, 248 bp, Glycine max
attccaatatattccattctctctgtgtatgtccctacctctcccttcaagatgcagatcttcgtcaagaccctcaccggcaagaccatcacccttgaggtggaaagctctgacaccatcgacaacgtcaaggccaagatccaggacaaggaaggaatccccccggaccagcaacgtctcattttcgccggaaagcaacttgaggacggccgtacccttgctgactacaacattcagaaggagtgtac

SEQ ID NO: 149710 - DNA, 245 bp, Glycine max
atccctagtaagccgccatggtgaagtactcaagggagcctgacaatccaaccaagtcttgcaacgctagaggcgccgaccttagggttcattttaagaacactagggaaactgcctttgcaatcaggaagttgcccttggttaaagctaaaaggtacttagaagatgttcttgcgcacaagcaggccattccgttcagacgtttctgtcgtagtgttcgaaggacagctcaagcacagaataga

SEQ ID NO: 149711 - DNA, 248 bp, Glycine max
tgctgtgtcatggttcacgggggaggctgcacagagtgattttgaggatatagatgaagttgattatgatgatgaagaaggtgatgaggatgaggatgaggatgaggatgaggaggaggaggaggaggaagaggaggaaaagaaagggaagagcaggagtaagagtggtggcagggtcaaacctggtaaggatcagccgactgagcgccctcctgaatgcaagcagcagtagtgtttggctgtgtaca

SEQ ID NO: 149712 - DNA, 247 bp, Glycine max
ggatcaatcagtttgatcgtggagccatgcagatcagcacacttgaaggcaatggaagtagccaaggaatctgggtgcttgctctcctatgaccccaaccttcgtctacctttgtggccttcggctgaggaagctcgtaagcaaatactgagcatttgggagaaggctgatttgatcaaggtcagtgatgcggacttgagttcctcacaggaagtgacaagattgatgatgaatctgctttgtcatt

SEQ ID NO: 149713 - DNA, 241 bp, Glycine max
catatacaaattctctgtgttgtgttgtgtacttgtgttaattgtgttgttgttgtaggaaatttaagtgaagagagaatgatgatgaagtctgctatgtgtgcattggtgcttgtggcactggttgtggttgaagtggggcccatggctgaggctgcggtgacttgcaacccaacacagttgactccttgtcttccggcaattaattcaggttctgcaccttcgagtgcttgttgccaga

SEQ ID NO: 149714 - DNA, 238 bp, Glycine max
gcctgatgaatccaaggctcttgtcttggttgagaagactcaagaagttgctgaagtgaaaccaactgagggctctatcaaccgagatgcggtgcttgcaagagttgcaactgagaagaggttgtcattaatcatagcatgggaagaaagtgaaaaatcaaaagctgaaaacaaggctcacaaaaagctttcatcagtttctgcatgggaaaacagtaagaaagctgcagtggaggcg

SEQ ID NO: 149715 - DNA, 241 bp, Glycine max
gctcgaggacggccgcaccctcgccgactacaacatccagaaggaatcaacccttcacctcgtcctccgtctccgtggtggcatgcagatcttcgttaagaccctcaccggcaagactattaccctagaagtcgaaagctccgacaccatcgacaacgtcaaggctaagattcaggacaaggagggaatccccccagaccagcagaggctgatcttcgccgggaagcagctcgaggacgga

SEQ ID NO: 149716 - DNA, 241 bp, Glycine max
aaaagttattaagagcttttgcttttctttctgcgcgcttttcccaattaagtagttcttccttttctcaaagcaaaaaaaatcttcatcgagagtttcaaggttgagagtcctaacgtgaagtacacagagactgagattcagtccgtgtacaactatgaaaccactgaacttgttcacgagaacaataatggcacttatcagtgggttgtcaagcccaaaactgtcaaatatgaattta

SEQ ID NO: 149717 - DNA, 248 bp, Glycine max
gctcgagctcgagccgcttcatcattcccctccttccatgccacccccactctccgcccccacaggccacgcgcctccatgtccgcggcaggccaccgccgccctacgactccggctcgttccggttcgagccgattagggagtcgatcgtgtcgcgcgagatgacccgcaggtacatgaccgacatggtcacccacgccgacaccgacgtcgtcgtcgtcggcgcaggctccgcgggtctctcgtgc

SEQ ID NO: 149718 - DNA, 240 bp, Glycine max
attgaattcaaaaacttaagttcattccttgtgttttgctttcttcctcaaaaccaaacatgtcgaacacatgcggcaactgcgactgcgctgacaagactagctgcaccaagggaaacagctatggtgttattgtagagactgagaagagttacatcgagactgttgtcatggatgttccagcagctgagcatgatgggaagtgcaagtgtggcactaactgcacttgcacggactgca

SEQ ID NO: 149719 - DNA, 238 bp, Glycine max
cattttggctttcctcttctacaattctaaaatcacgcaaatggcatccaagagaatactgaaggagctcaaggacttacagagagatccaccaacttcatgcagtgcaggacctgtgggtgaggacatgttccaatggcaagcaaccatcattggtccaaatgacagtccctatgctggtggtgttttccttgtgaccatccatttccctcccgattatcccttcaaacctcccaag

SEQ ID NO: 149720 - DNA, 241 bp, Glycine max
aaggatttgaagcgtggttatgttgcctcaaactcaaaggatgaccctgcaaaggaggctgctaacttcacagcccaagtcatcatcatgaaccaccctggtcagattggaaatggctatgcccctgtcctcgactgccacacttctcacattgctgtcaagtttgctgaactcatgaccaagattgacaggcgatccggcaaagagcttgagaaggagcccaagtttttgaagaacggtg

SEQ ID NO: 149721 - DNA, 242 bp, Glycine max
attggggtttgaaaagaagccggtgctgtctccttgttctccatcgtaagatataactaattatttttatatcttcatcaagatgcgccgagggagaaccgccgccgccgctgccgccgttgtggatcccacgccggaccaggccaaggagacgacgcggttccgtggcgtgaggaagcggccgtggtggcgattcgcggcggagattcgagatccgtggaataagcagcgcgtttggctgg

SEQ ID NO: 149722 - DNA, 226 bp, Glycine max
ctcgagccgattcggctcgagttcagggttaagcggtgagattagcgaatctgagaaatggcggattcttctcgggaggagaacgtttacatggcgaaattggcggacaggccgagcgttacgaggagatggttgagttcatggagaaggttgcaaagactgtggaggttgaggagttgacggtggaggagaggaatctcctctctgtggcttacaagaacgtgat

SEQ ID NO: 149723 - DNA, 240 bp, Glycine max
gtcaggaggacctcactgagttggcacatggcattgagctttcaaatttgcctttcttttgggcattgaagaacctgaaagaaggtgtgcttgagttgccagaagggtttgaagaaagaaccaaggaacgtggcattgtttggaagacttgggcaccccagcttaagatcttggctcatggagcaattggacggtgcatgagtcactgtggctctggctctgtgattgagaaggttcatt

SEQ ID NO: 149724 - DNA, 240 bp, Glycine max
gttggattcaatgttaagaatgttgctgttaaggatctcaagcgtggttatgttgcctcgaactcaaaggatgatcctgccaacgaggctgctaacttcactgcccaggttatcatcatgaaccatcctggtcagattggaaatggctatgcccctgttcttgactgccacacttcccacattgctgtcaagtttgctgaactcatgaccaagattgacaggcgatctggcaaagagctt

SEQ ID NO: 149725 - DNA, 239 bp, Glycine max
ctggttgagtgcccacttcatagacgcgcaataccatataaagaaaccaatactggtggcagaatttgggatatcatttaagggttcgagttcctacgagagggatgaggtgttcaattcagtgtattacaaaatatacgcttctgcaaagagaggaggtgcagcgagtggagcactgttctggcagcttctaacggagggcatggagtctttccaagacggttacggaatcattcttg

SEQ ID NO: 149726 - DNA, 236 bp, Glycine max
cgcggtttcatcggccctagacatgtcgataatctcgtacgacaacgcccacgccgccacgtcgcgcagagatgtgagctgatgtccatgtacgaccagtggctagtaaagcacggcaaggtgtacaacgcgtacggagagaaggagaagaggttccagatcttcaaggacaacctgcgattcatcgacgaccacaactcccaagaggaccgaacctacaagctcggactgaaccg

SEQ ID NO: 149727 - DNA, 236 bp, Glycine max
atgaccactgccacaccaatgagtcgcactcttaatcctgatgctgaattcgcatatggcgcgggtctaattaatcctcttaaggcggcaaatcctggtttagtgtatgatattagcgaagggattatgtcaagttcttgtgtggagagggctatacagatgaaatgcttcgagttctcactaaagatcatagtagatgcagcaaacatgctagaaaggaagctgtatatgacctt

SEQ ID NO: 149728 - DNA, 240 bp, Glycine max
cacaaccactcttaatttctctctgccttgctcatttacacacctctccaacctatcactttcagctttatttgaatccctctctctcctttccaaatggccagcgttgaggttgcacatcaaacaccaacaacagttccagataatgaaacaaccgaggtaatcaagacccaggaaacaaccccggaaccagtaccagccactgaggctcctgcaacagaacaagcagcagctgaggtt

SEQ ID NO: 149729 - DNA, 238 bp, Glycine max
gccaaggtaggttaaacactcttcttcatcgtcgtcgcaatgggacgtgtgatccgtgcgcacgtaagggagcaggctcggtcttcaagtcccacacgcaccaccgcaagggcccggcccgcttccggagcctggatttcggagagcgcaacggctacctgaagggtgtcgtcactgacgtcatccacgatcctggccgtggcgcgctctcgctaaggttcgcttccgccacccgttc

SEQ ID NO: 149730 - DNA, 243 bp, Glycine max
ataacatcactcagtgatgatatatttgccttagccaagaaggaggaccatgtgccattcagaaactcaaagcttacatatctgcttcagccttgtctaggtggagactccaagacactaatgtttgtgaacatatcacctgatccttcttcagttggtgagtcactatgctcactcaggtttgcatcaagagtcaatgcttgtgagattggaacacctcggcgtcaaaccaatggacgttca

SEQ ID NO: 149731 - DNA, 239 bp, Glycine max
ccagccagaagaagaaccaacatggcacccacaatctataatttttcgtattctaaaaggttctcagagtcattcaattcttcaacatcaaaaaaaggagtcatccagttccaacatccttgctttccactccatagctcaatggaatgctcattataaagccaccaaagaaactaacaagctgatggtacttgatttcacagccacatggtgtggaccttgcaaactcatggaccctg

SEQ ID NO: 149732 - DNA, 238 bp, Glycine max
gaacattggtgctgcagatgacgttattgttggggatataagagatgctgaaagtattgttcctgcaattcaaggtatagatgccctcataatcctcacaagtgcagttccacagataaagcctggttttgatccaaccaaaggacaaagaccagagttctattttgaggatggggcatatcctgaacaggttgactggattgggcagaaaaatcaaatagatgtcgccaaggctgct

SEQ ID NO: 149733 - DNA, 237 bp, Glycine max
atcttctgccccaccctgcatttcagcagagtgattctgttcactacaatgccatcatcactatcctctttcctccatatggttcctattctctcccttcttgtactctcatgtgtgatttgttctagtagttctcagggaccaccttcacctggctactaccccagttccaaaattagtcctgttagtttttatcaagggtttagaaacctatggggacctcagcatcagaggcta

SEQ ID NO: 149734 - DNA, 239 bp, Glycine max
gaaggttttcgcgatggcatcgaaacggatcttgaaggaactcaaggatctccagaaggatcctcctacctcttgcagcgccggtcctgttgctgaagacatgtttcactggcaagcaacaattatgggtcctccagacagtccttatgctggaggtgttttcctagtcactattcatttccctccagattatcccttcaagccacccaaggttgcattcagaacaaaggtatttcacc

SEQ ID NO: 149735 - DNA, 228 bp, Glycine max
aagaatgtgacacagccattgaagttcctgtatcctgttgaactgagtataaaagagaaaatagaggcaatagcaaagtcatatggagccaggggtgttgagtactcagaacaggctgagaagcagattgagatgtatagcaagcaaggattttcaggtcttccaatctgcatggctaagactcagtattctttctcagacaatgctgcagcaaagggagctccaagt

SEQ ID NO: 149736 - DNA, 237 bp, Glycine max
cttgctgtcaccctcacacttggttggcacttgtacttggctttaaatgtttctggaaggccttatgatagatttgcttgccactatgacccatatggtcccatttactctgatcgtgaacgacttcaaatatatatatcagatgcaggagtacttgcagtatgctatggccttttccgtcttgccatggcaaaaggacttgcctgggtggtgtgtgtttatggagttccattgcta

SEQ ID NO: 149737 - DNA, 239 bp, Glycine max
ctattctgtaggttatgcgagaccccactggaatcggtagaggatcaggatttgttgcattttcaactcctgaggaagcatctcgtgctctcggtgagatgaatggtaaaatgattgctggaaaacctctgtacgttgcccttgcacagagaaaagaagacagaagagcaaggttacaggctcagttttcacagatgaggcctgttgcaataacgccttctggaataaccccgtatgcc

SEQ ID NO: 149738 - DNA, 239 bp, Glycine max
gaagatctctagagaaattgcagatgccagtggaaaaaccatgccagtagaggaaatcttgaccattaatgtcaagcctggctggaagaaaggaacaaagatcacattccccgagaagggaaatgaacagccaaacgtgacacctgcagaccttgttttcattatagatgagaaaccgcacagtgtcttcgcccgcgatggaaacgaccttgttgtaacccagaagatttctcttgcag

SEQ ID NO: 149739 - DNA, 261 bp, Glycine max
cctcgttctgcgcgctcgagctcaccatctctaaggtactgctttctatctgctcattgctgactgatccaaatcctgatgatccacttgttccggaaatcgctcacatgtacaaaactgaccgggccaagtatgaggccactgcacgcagctggacccagaagtatgccatgggctgatttgtgtttggataatgtatattgaaatggattgcatctatgaaaacttttgtgggtttgcttttcacttcctgttttctgg

SEQ ID NO: 149740 - DNA, 237 bp, Glycine max
atcaaggatagccttgataatgatgaagaaaaagttggagctgatattgtgaaaagagctcttagttaccctttgaaattaattgccaaaaacgctggtgtcaatggtagtgttgtcagtgagaaggtattgtccagcgacaatccaagatatggatataatgctgccaccggaaaatatgaagatttgatgtctgctgggatcattgatccaacaaaggtggtcagatgttgcctg

SEQ ID NO: 149741 - DNA, 235 bp, Glycine max
aaaatgaagagcctcctcttctctctcttcctcttcctcttcttagcctcctccgccgtcgccaccgtccccgcccacaacatcacccgcatgctggccgcacaccccggcttctccaccttcaaccactacctctccgtcacccacctggccgaagagatcaaccgccgccagaccatcaccgtcctggccctcgacaatgccgccatgtcctccctcctcgacaagcagctct

SEQ ID NO: 149742 - DNA, 235 bp, Glycine max
  unsure (1)..(235): unsure at all n locations
ctctctctctctctctctctgaagatggcttcacgcaggctcgtatcttctctgattcgatcctcccttcgtagatctcaatcgaagccctcaatttccgcatcgaaatcgcccctcacgtcatccaaccgtgnctcaccgcacggatacttgctgaaccgcgtcgccgagtacgccaccgccgcggctgctgctaccatcccacatgcctgattgttccggggaagaaggagct

SEQ ID NO: 149743 - DNA, 236 bp, Glycine max
caaatccttgcaccattcttctttggatcccttatctctgccgcgaacttgccccaagtcctacgcctcacaccccggtaatgcttccataccggtggcgcgtgaacttcacgctcctccctagggtgttctcttttgcatgctaaggaatcgtttgcatcatggacgacaccctccaagctgaacgtagggcttgggaatgcattgtacgttgcagaatagcaaacttcgtggtt

SEQ ID NO: 149744 - DNA, 237 bp, Glycine max
aatccctctctctctttctctttctctctcatccagatcttgcaaaaaaaaaaaaaacacaatggcagggagcgctcccattccacgcgaagagttcgtgtacatggcgaacatgggggaccaggccgagcgctacgaggagatggtggatttcatggagaaggtctccgcctccgccgagagcgaggagctgaccgtggaggagcgcaacctcctttccggagcttaaaagaaggt

SEQ ID NO: 149745 - DNA, 239 bp, Glycine max
attttcgtggcattcgtcactctcgtgtcgggtgaaggcgaaaaccaaatcaagatgctgagagtgggcgcaaagaggcttttgggaacgacgtcgttgggcgttagggttccggcgaggctgtaccacgagagggttgtggatcactacgacaacccccggaacgttggatcgttagacaagaacgacccgagcgtggggacgggtttggtgggggcgccggcgtgcggcgacgtgat

SEQ ID NO: 149746 - DNA, 236 bp, Glycine max
gactaatacattgaagacacgcagacgggatttggcggatgttttgataaataggggagtaaatttggatcctttaagcaagtggtcaaaggttggacttgttgtgtatgattctcaagtgcctattggtgccactccggagtatatggctggtttctacatgctgcaaagtgcaagctcttttctgcctgttatggctttggctcctcaagagaaggaacgtgtcattgatatgg

SEQ ID NO: 149747 - DNA, 235 bp, Glycine max
gtgctggaaattccagctatatgagatctgtgatgacaatagcttttgaatttgcatttgaaagccatatgcaagagcatgtagcatctatggcacgtcaatatgttcggagcattatatcatcggtccaaagggtagcattagcactttctccttctcatttgagttcacatgcagggcttaggtcaccattgggtactcctgaagcgcaaacccttgctcattggatttgcaa

SEQ ID NO: 149748 - DNA, 235 bp, Glycine max
ctctgggaaggatcctaccaaggttgataggagtggtgcctacattgtgaggcaagctgcaaagagcattgttgcaaatggacttgctaggagggcaattgtgcaagtttcctatgccattggtgtgcctgagcccttgtctgtgtttgttgacacttatggcactgggaagatccctgacaaggaaatcctcagcattgtgaaggagagttttgacttcaggcctggcatgatc

SEQ ID NO: 149749 - DNA, 236 bp, Glycine max
gtcgctccgcaccagtttcaccgcacgaatatcttgttgtttggagcgatccgagaaaaactctgtaaacatgttggtttaccaggacctccttacaggtgatgagcttctctctgactccttccgttacaaggaaattgagaatggaatgctgtgggaagttgaggggaagtgggttgttaaaggagcagttgatgtagacattggtgcaaacccttctgctgagggtggaggag

SEQ ID NO: 149750 - DNA, 235 bp, Glycine max
gatcgttgttgttctaaagcactcatccacacattctccgtcgccacgacaacaatggctccaaagaaaggtgcgaaaggtggagttgtagcagcaaagaagaaggttcaggagaaggtaacgaaccctttgttcgagaagcgtccgaagcagttcgggatcggaggcgcgctgccgccgaagcgggacctgacgcgcttcgtgaagtggccgaagaacgtccaaatccaacgca

SEQ ID NO: 149751 - DNA, 237 bp, Glycine max
caggaccaaacagcatccgcggcagcgacggtaaccctccaacaacaacacttccgctgcgaaaaatgtctctggtggcgaacgaggatttccagcacattctgcgtgtgctgaacaccaacgtggatgggaagcagaagataatgttcgcaatgacctccatcaagggtattggaaggagattcgccaacatcgcttgcaagaaggctgatgttgacatgaacaaaagggctggtg

SEQ ID NO: 149752 - DNA, 238 bp, Glycine max
gaaattaccaacagtgcttttgagccatcgtccatgatggccaagtgtgatcctcgtcacggaaagtacatggcgtgttgcctgatgtaccgtggtgatgttgtgcccaaagatgtaaacgctgctgttgccgccatcaagaccaagaggaccattcagtttgtggattggtgccctactggtttcaagtgtggtattaactaccagccacctaccgttgttcctggaggcgaccttg

SEQ ID NO: 149753 - DNA, 263 bp, Glycine max
ggcaattcgagtcttgaatccctctttcaaccttaacactcctcacttcgtttccgtcgcagctttttacacactccaccgctgcttccccttcacctccgatttcgttaatcagagatcaaaatgtctcgaagatatgacagccgtacaacaatcttctccccggaaggacgtctttaccaagtggaatatgcaatggaggctattgggatgctggtaccgcaatagggatcttatcaaaagatggggtagtgctggttggt

SEQ ID NO: 149754 - DNA, 259 bp, Glycine max
gtcttggctcgctccctctcggatcagatctgcgctctccgttttcagatcgcgttttgtttcaattcgacactttcctcgcttcaaagattaagcgaacaatatggttgtccttgctgcatccattgtgagcaaatctggcaaagtgctagtttctagacagtttgtggatatgactcgcataagaattgagggtcttctagcagcatttcccaagttggtagggactggaaaacagcacacgtatgttgaaactgag

SEQ ID NO: 149755 - DNA, 262 bp, Glycine max
cgaaccagcacttctcagcttcacgctccgattttccactaccctttaatgagaggaaatcttcacaacactatgcatcatcatcatcctcagcaacaacaaggagggagcccaactagctccactggtgaagttgaagccataaaagctaaaatcattgctcaccctcagtactctaatcttttagaagcctacatggattgtcaaaagataggagctacacccgaagtggtggcgcgtatggttgcggctaagcaagagt

SEQ ID NO: 149756 - DNA, 264 bp, Glycine max
gagcgatcatttccaatcacaatggcagatcaactcaccgatgaacagatctcggagttcaaggaagccttcagtttgttcgataaggatggcgatggttgcatcacaacaaaggagcttgggactgttatgcgttcgttgggtcagaatccaacagaggctgagctccaagacatgatcaatgaagtagatgctgatgggaatggcaccattgacttccctgagttcttgaacctcatggctagaaagatgaaggacactgat

SEQ ID NO: 149757 - DNA, 263 bp, Glycine max
aaaataaccaaaacacgaggtgtcaagctctctgatttccgtgtcatcaatcaggatccaccagccatttctgatgaagcagtcatcaaggcagtagagactgcaacaaaagaactaaacttgacaagcaagttgatgattagtagagcctatcatgattcattgtttatggccaggttgtctccaatgggcatgattttcattccatgttacaaagggtacagccataagcctgaagagtttgccaccattgaagatatgtc

SEQ ID NO: 149758 - DNA, 264 bp, Glycine max
aacactcattaattgcaagaatggcacttcgttgcttggtgatgtccctttctgttctcttcactcttggtcttgcgagagaaagccatgccagagacgaagatttttggcatgctgtttggccaaacactcccattccaagttcattgcgagatcttctaaagcctggccctgcaagtgttgaaatcgatgatcaccctatgcaaattgaagaaacacagtacccgaaaaccttctgctataaagaagaccttcatccaggca

SEQ ID NO: 149759 - DNA, 265 bp, Glycine max
agcaaatatggaatctgaagcactgatatggggtgacaaactcatactgaagggattgtcattccgtggttttcatggagcactaccggaagaaaggaagctaggccagaagttcgtggtagatgttgatgcatggatggatctgaaagcagctggcaaatctgatcacttatcagatacaattagttacacagatatatatgatatagctaaggaaattcttgaagggtcacctcaaaaccttctggagtcagtggcacaaaaa

SEQ ID NO: 149760 - DNA, 261 bp, Glycine max
caagggtgaagagaagcaatttgctgcagaagaaatctcttctatggtgctcatcaagatgcgtgagattgctgaggcttaccttggctccacggtgaagaatgctgttgtcactgtccctgcttacttcaatgattctcagcgtcaagctaccaaggatgctggagtcattgctggtcttaatgtgatgcgaattatcaatgagcctactgcagctgccattgcttatggtcttgataagaaggccacaagtgttggtga

SEQ ID NO: 149761 - DNA, 266 bp, Glycine max
  unsure (1)..(266): unsure at all n locations
gccacacttcgaccaactncnccaanancanctggtagtcttgacaaaagcttccgaagggacaccaaaaattgctaaaccagaaaaaaccggggaagagaaacctgcagcaaccaaagtctcaagtatgtttggtggaactagagataaatgtgccggttgtcaaaaaacagtgtatcccactgaaaaggttactgtgaatggnactccttatcacaagagttgtttcaaatgcactcatggagggtgtgttattagtccctcca

SEQ ID NO: 149762 - DNA, 257 bp, Glycine max
gcagagcaacaggagttgtttaagaagcacatcgagggagcaactaaatacctgctctctaagattaaagatttccaattttttgttggtgagagcatgggtgatgatgcttgcttggtctttgcctactacaaggacggcgctgctgatccaacattcctgtactttgcatatgccttaaaggaggtcaagtgctaagtgacttaatgtaccgagctatctactcattttatctagtttttttttacgttctgtcc

SEQ ID NO: 149763 - DNA, 257 bp, Glycine max
  unsure (1)..(257): unsure at all n locations
ccaactcaatgcacagctcctcactactaaatatacatgaatcaccattcttgncccagatgacagttccttctctgaactcaaagctggcttcctcaactctctttctgatggccaaaagctcgagctcttacagttccacgttatttcagactccgtgtctagctccaactttgatacactgaccaaccccgtgagaacactggcaggggctaaacctggaaaggtggaacttaatgtgataagttatggaggga

SEQ ID NO: 149764 - DNA, 256 bp, Glycine max
atctctatatataccccattcctctcgttcttgtttttccacattcacattttcacatcgtttcctttcattttccctcactttctcgctccccaaacgcccctctctctcctccaatggccgaccagctcaccgacgaccagatcgccgagttcaaggaggccttcagcctcttcgacaaggacggcgatggttgcattactaccaaggaacttgggactgttatgaggtcacttggtcaaaacccaactgaggc

SEQ ID NO: 149765 - DNA, 257 bp, Glycine max
atttaagtgaggagctagagaatgatgatgaagtctgctatgtgtgcagtggtggttgtagcacttcttcttctggcggaggtggggcccatggctgaggctgtgacatgcaccccaacagagttgagtccgtgtcttccagcaatcacttccggtgctaaaccttccaatgcttgttgcacgaagctgaagcagcaaaaaccatgcttatgtggctacctcaaaaacgctagcttgaagcagtatgttaactctcc

SEQ ID NO: 149766 - DNA, 260 bp, Glycine max
ttccctgtcacaaacacagattcacttcgaaactgaacgctgcagcagaagatgttcaaaaaattttctggcgaagatgtgtctgcacagaaccaagtgaaggcatctgttcaacgaaaaatacgacaaagtattgctgaagagtatccgggccttgaacctgttttggatgatatacttcccaagaagtcccctcttatagttgctaaatgtcagaaccatctcaatctggttcttgtgaacaacgtgcctttgttttt

SEQ ID NO: 149767 - DNA, 260 bp, Glycine max
attatcaactctttcaaaagggagaagaaaaggaaaggaaacaaaacgcacaaaggattattatagcaatggcagaacaaaaccaaaaccagacaactgaagctgccaggcaccaagaggttggccacaagagccttctccagagtgatgctctttaccagtatattctggagaccagtgtctacccaagagaacctgaatccatgaaagaactgagagagttgacagcaaaacacccatgggacatcatgacaacctct

SEQ ID NO: 149768 - DNA, 261 bp, Glycine max
cctgagcatcccaaggaattatggagatggaaatcaaaaaggctcaaaggtgtcagctcctgtcaagcctgaaacacaaaaggcacctccacctattgaagctccagccttatctttagatgagctgaaggagaagacagacaactttggttcaaaggcattaataggtgaaggatcgtatggaagggtgtattatgcaaccttaaacaatggaaaagcagtggctgtgaaaaagcttgatgtttcatctgaacctgaatc

SEQ ID NO: 149769 - DNA, 255 bp, Glycine max
ttattttgcacctgagtatgcaattgttgggagagcctctcttgagtcagatgtcttcagttttggagtggttcttcttgagcttataagtggtcggcaacccatccctaaatctgcaggcaaagaagaaagtcttgttatatgggcaacttcacgcttacaggatagtaggcgagcattaacggagttggctgatccacaattgaacgggaacttccctgaagaagagctgcagataatggcatacttagcaaa

SEQ ID NO: 149770 - DNA, 252 bp, Glycine max
attccaaacaagatcaaggaatgcaggtcttaccccttgtacaagtttgtgagagaggagttggggacagcattgctaactggtgaaagggttatctcaccgggtgaagagtgtgacaaagtgttcactgctttgtgccaagggaagatcattgatccacttttggaatgccttggggagtggaatggggcacctcttccaatatgttagtttttcttattttctgttttcttgaagagtggttcctttcct

SEQ ID NO: 149771 - DNA, 259 bp, Glycine max
ctttgaggttttatcagctcgccttggacgtaagcctgaggatatcgtgaagttagatgctaatgaaaatccttatggtccccctccagaggtcatggaagccctaggatcaatgccaatcccatatgtctatcctgacccagagagccgcagattgcgcgcagtcttgcccatgattcaggccttgaagctgaatatattcttgcagggtgtggtgcagatgagcttattgatttgatcatgcgttgtgtgctggatc

SEQ ID NO: 149772 - DNA, 246 bp, Glycine max
gatgataagcttggagctctttgcatgcaatggctaaaggacaaggtatactcaatccgtgatgcagccgctaataacatcaaacgcttggcagaagaattcggaccggattgggcaatgcagcacattattccccaggttttggacatggttactgatccacattatctgtatcggatgacaatcttacaagcaatttctctactagctcctgttctgggctcggagattacttcttcaaaactg

SEQ ID NO: 149773 - DNA, 94 bp, Glycine max
gccccaaataggtttgcctaaagttcaaggtcctccaccttataagaaacctcatgacctgaagtaggcatggaaagttggtgttctgactgca

SEQ ID NO: 149774 - DNA, 251 bp, Glycine max
atgtaattgcggatagaaacattgccatctccattcaagatctacgcccggtcaccaacaactttgcttcagaaaatgagctaggccatggtgcgtttggaactgtttacaagggtgagctagaaaatggtaaaaaaatagcagtgaagagaatggaatgtggagctgttagcagtagagcactggaggagtttcaagctgaaatagctgttctttccaaggtccggcaccggcatttggtatccctacta

SEQ ID NO: 149775 - DNA, 154 bp, Glycine max
ggagctgactggcctattgattatacaaaggagaattttgaagacctgtctgaaaagtttgatgtggtgtatgatacagtagggcaaactgaacaggcattcaaggttttgaaagaaggaggaaaagttgtgacaatagtaccacctggatttc

SEQ ID NO: 149776 - DNA, 253 bp, Glycine max
cggctcgagctggattccaaggtttccaagtcctgtgctgtgctttcaatacctacgtcatggaatttctcaaaaaggtttaagttctttggcgtggattcatatcaagttgcatttggattttgactttgagactctgcttggggtgctacttacgaatgttttcccggaaaaacgtaaatttcttctaatgctttatgaaaagaataacgaacaagttcaatgtataccgcctttataaaataataacaag

SEQ ID NO: 149777 - DNA, 251 bp, Glycine max
gtgagactgattcagggagtgacacaattgatgtggagggacatgatgaagagttggatgaggagaatcatgatgatgggtgtgagactgaggatgatgatgatgatgatgatgatgggcctggaccagcttctgacgaggaggatgaagtccatgtgagacaaaaagtgaccgaggtggaccctctggaagaagccaatttcgatcaggagctcaaggctgtagtacaggagagtatggaacagcgaagg

SEQ ID NO: 149778 - DNA, 253 bp, Glycine max
ctttctctctcttctttttactctctctctgtctctctctacgctttctcgttcgagatccctcaagggatccactaactgaaggagaaatggggttgacattcaccaagcttttcagccggcttttcgccaagaaggaaatgcgaattctgatggtgggtctcgatgcagctggtaagaccaccatcctgtacaagctcaaacttggagagatcgttaccacaattcccaccattgggttcaatgtggagac

SEQ ID NO: 149779 - DNA, 187 bp, Glycine max
ctaaactaaaaatggatcgagaatggggatcgaagccggggagcggaggtgcggcgtcggcgcagaacgaagccatagaccggcgagagcgtctccggcgattggctctggagaccatagacctggcgaaggatccctatttcatgcgcaaccacctcggaagctacgaatgcaaactctgtctcac

SEQ ID NO: 149780 - DNA, 219 bp, Glycine max
ctccgcaccagtttcaccgcacgaatatcttgttgtttggagcgatccgagaaaaactctgtaaacatgttggtttaccaggacctccttacaggtgatgagcttctctctgactccttcggttacaaggaatttgagatggatgccgtgggaagttgaggggaagtgggttgttaaaggagcagttgatgtagacattggtgcaaaccttctgctgag

SEQ ID NO: 149781 - DNA, 254 bp, Glycine max
ttaggactaaagttttccacccaaatatcaacagcaatggtagtatttgtcttgatatcttaaaggagcagtggagccccgccttgacaatatctaaggttttgctctccatttgctccctattgacggatccaaacccagatgatcccttggtgcctgaaattgctcatatgtacaagacagacaggtccaagtatgagacaactgctaggagctggactcagaagtatgcaatgggctagcaaattggaata

SEQ ID NO: 149782 - DNA, 120 bp, Glycine max
gttgtgcccaggaagacggaatttcccacctggcctccgacaccgttcattacgaccctacagatctctattcctgggtccaaagcatgttaaccgaactcaaccccgaacccaacaaca

SEQ ID NO: 149783 - DNA, 246 bp, Glycine max
gtatcctgacaggatgatgcttactttctccgtttttccttcgcccaaggtctccgacactgttgttgagccttataacgctactctctctgttcaccagttggtggagaatgctgattagtgtatggtgctggataatgaggcgctctacgatatctgcttcaggactctcaagttgaccatcctagcttttgtgacttgaatcacttgatctccgcaaccatgagtggtgttacatgctgtctt

SEQ ID NO: 149784 - DNA, 251 bp, Glycine max
ggtttctctttctctttctctgtctgcttcttcactttctctcgtttcaatcgaaaaaaatcatgggcagaaaattcttcgtcggtggcaactggaaatgcaatgggaccactgaggaggtgaagaagattgttactactttaaatgaagctaaagtccctggagaagatgttgtagaagttgttgtgagccctccttttgtgttccttccttttgtaaaaagtttgctgcgccctgatttccatgtctcg

SEQ ID NO: 149785 - DNA, 250 bp, Glycine max
gacttttaagcgcaggaatggaggtcgcaacaaacacggccgtggccacgtcaagttcattcgatgctccaactgcggcaaatgctgtcctaaggacaaggctatcaagaggtttctggtgaggaacattgttgaacaggctgcagtcagagatgttcaggaggcttgtgtctatgaacaatacacgcttccgaagctttatgtgaagatgcagtattgtgtttcctgtgctatccactctcatgttgtg

SEQ ID NO: 149786 - DNA, 251 bp, Glycine max
agagaagaaactttcgaacccaatgagggagataaaagtgcagaagctcgtcctcaatatctctgttggcgagagtggagatcgtctcaccagagcctccaaggtgttggaacaacttagtggccaaaccccagtgttttccaaagcaaggtacactgttcgttcctttgggattagaagaaatgagaagattgcatgctatgtcactgtcagaggtgacacagcaatgcaacttttggagagtggtttga

SEQ ID NO: 149787 - DNA, 205 bp, Glycine max
gagcaccataccaaaccacattgtttgcaaggcacaaaagcaggttgtccaagagggtgaggacactactaacattgtctctcgcaggttggccctcactgttctcattggtgctgctgctgttggctctaaggttgcacctgctgatgctgcctatggagaagctgccaatgtgtttggaaagccaaagacaaacactgacttc

SEQ ID NO: 149788 - DNA, 254 bp, Glycine max
gatggtcagctaggaatcggaagcaacgaagagaaagaatgggtctgcctcgtcaaagccctccagccccaccgtattcgctccgtcgtcgccggcagcagaaactccctcgccatcgctgacgacggcaaattgttcacttggggttggaaccaaagggccacacttgggcaccctgctgagaccaagtctgagaacaagactgagaacactcccagccaggtcaaggctctttccagtgttaaaattgttca

SEQ ID NO: 149789 - DNA, 271 bp, Glycine max
actaattcggagaccttgcaagacttcatcaatggctgtcaaagtttatattgtgtactactccatgtatgggcatgttgagaaactagcagaagaaataaagaaaggggcttcctctgtggaaggtgttgaggccaagttatggcaggtacctgagacactgctggatgaggtgcttggtaagatgagtgcaccacccaagagtgacgtaccagtcattacccccaatgaactatccgaggctgatggctttgtattcggcttcccaaca

SEQ ID NO: 149790 - DNA, 265 bp, Glycine max
acaacacaatcatggaaattgatggtaggtttctgaacactggcctcctccttgtggccacaatccttgtagccaaactcatctcagctttcatagtgcccaagtccagaaagagggtacccccaattgtgaaggggtggcccttaattggagggctaatccgtttccttaaaggtccaatctttatgctccgtgaggagtaccctaagcttgggagtgtcttcaccctcaagctcttccacaagaacatcacccctctcgttgg

SEQ ID NO: 149791 - DNA, 257 bp, Glycine max
ctttggtaaggtgagagaataggaaaaagggaaatatggcatttgcaggaacaactcagaagtgcatggcttgtgacaaaacagtttatctggttgataagttgacagcagataaccgagtgtaccataaggcttgcttcagatgccaccactgcaaaggaacactcaagcttagcaactataactcttttgagggggttctttactgcaggccacacttcgaccaactgttcaaaagaactggtagtcttgacaaa

SEQ ID NO: 149792 - DNA, 257 bp, Glycine max
ctgcatttttctttgcaaaaaccaaaaaatacccctggttttcatacagccgttgtccaccgaggtactgaacaaaaccaggggtactttttggtttctgcatttttctttgcaaagcttgtggagtgcctgacccgaaggcattggttctttaggttgcagcaagttggactccgaatccgagcgctgcttgtcacaatgatctataataaggctctgaccctttcttgtcaatcaaagcagggtcacacttctgg

SEQ ID NO: 149793 - DNA, 258 bp, Glycine max
caattcctaattgtttaaacctaattctcatttcttcatcgttcgattcttctcctcctaaagatgcagatcttcgtgaaaactttgaccggtaagaccatcacccttgaggtggagtcctccgacaccatcgataacgtgaaagctaagattcaagacaaggaagggatcccacctgaccagcagagacttatctttgcgggtaaacagcttgaggatggtcgaacccttgccgactacaacatccaaaaggaatcc

SEQ ID NO: 149794 - DNA, 262 bp, Glycine max
gtgcagcatcgtagagaaataagggaaaaatggtgtcgctgaaactgcagaagcgcctctccgcaagcgtgctcaagtgcggcagaggaaaggtttggcttgaccccaatgaagtcaacgaaatctccatggccaattctcggcaaaacatcaggaagttggttaaggatgggtttatcatcaggaagccaaccaagattcactcccgctcacgtgctcgtaggatgaaggaggcaaagaggaagggccgccactccggtta

SEQ ID NO: 149795 - DNA, 257 bp, Glycine max
ttctcttgttcctgcttctttctcggttcttaaagagggaaagagtggtgtgtctctcaaggactccaccttgttcggtctttcattttcagaacctatcaaagctaacttcagctcttctgcattgaggttcaagagggaattcgaacaaaagctctgtgctgtgagggccgaaacagtggctacagcctctccagcagttaccaagtctacaccagaagggaagataacattgaggaagggcagtgttgtgataa

SEQ ID NO: 149796 - DNA, 255 bp, Glycine max
cttttctcagctgctgttcctgcgcgtgaacaagcctcaggtaagccaaagccatggttaagcataacaatgttatccccaacggacacttccgtaagcactggcagaactatgtgaagacctggttcaatcagccagcacggaagacaagaagacggttggctcgtcagaagaaagctgtgaagattttccccagacctacagctggacctcttagacccattgtacatggtcaaactttgaaatacaacatga

SEQ ID NO: 149797 - DNA, 258 bp, Glycine max
tggagattcacaggtggaagctatgttggacaagactatatgtgccatgtctagcgtgttcattggagcccctggttccactttcactgaagacatcctgcggctgagaaaggactggggatcagcatccatgtgtgatgagtatctttgccaaggtgaggaaccaaacataatagcggaaaatgaatgacaacaaaaaaaggtcttctcaagcccatgactcaggtccagcacgtattttcttctgccatgattggg

SEQ ID NO: 149798 - DNA, 254 bp, Glycine max
agaaaatttgctattagatgcttatgggaaccttaaagtttctgattttggtttgagtgccctctcccagcaagttagggacgatggacttcttcatactacatgtggcactcctaattatgttgctcctgaggtccttaacgatagaggctatgatggggtaactgcagacttgtggtcatgtggggttattctctttgtattggttgcaggttacttgcctttcgatgaccctaatcttatgaacctgtata

SEQ ID NO: 149799 - DNA, 252 bp, Glycine max
caagctcaccgacaacggcgccgccactcccgccggcctcatctccgcttccatcgcccatgctttcgccctcttcgtcgccgtctccgtcggcgccaacatctccggcggccacgtcaaccccgccgtcaccttcggcgccttcgtgggcggcaacatcaccttactccgcggcatcgtctacgtcatcgcccagctcctcggctccatcgtggcctccatcctcctcgccttcgtcactgcctcccctgt

SEQ ID NO: 149800 - DNA, 251 bp, Glycine max
tttgaggccaggcaagccccactcaaccaccacactactcctcgtttacgctacccctttctgctcttcttctacctttcaacttttaaaagtataaaaatggcagagacattcctatttacctcagagtcggtgaacgagggacaccctgacaagctctgcgaccaaatctccgatgctgtcctcgacgcttgcctcgagcaggacccagacagcaaagttgcctgcgaaacatgcaccaaaaccaactt

SEQ ID NO: 149801 - DNA, 247 bp, Glycine max
ctgctcagtacaatccccgtcctaatagcagctcttctcatattagtcctgggaagtcttgtggatttgggatccactgcaaatgcatcaatctcaaccattagtgttattgtctatttctgtttctttgtcatgggatttggaccaattcctaatatactttgtgcagagatcttccccactcgagttcgtggtctctgcattgctatttgtgcccttaccttttggatctgtgatatcattgtca

SEQ ID NO: 149802 - DNA, 261 bp, Glycine max
gagtattaacccagatgaagctgttgcttatggtgctgcagtgcaggctgcgattctcagtggcgagggtaatgagaaagtgcaggatcttcttttgttggatgttactcctctatccactggtttggagactgcaggaggagtcatgactgtgttgattcccagaaacacaaccattcccaccaagaaggagcaggtgttctcaacctactctgacaaccagcccggtgtgttgattcaggtctatgaaggtgaacgaac

SEQ ID NO: 149803 - DNA, 256 bp, Glycine max
gaaggatctgcgtgtaaccatcccatggttctagttcagattcccatgtgtaatgagagggaggtgtatgagcagtctatttctgcagtatgccaaattaattggccaagggactgtttactaattcaagtacttgatgattcggatgatgagagcatacagtggttaattaagactgaggtcacaaaatggagccaaaagggaatcaacataatctacaggcatcgcttagtcaggacgggatataaagctgggg

SEQ ID NO: 149804 - DNA, 253 bp, Glycine max
cgagaccatcaagctgacttccttcgcctgataaatgaacctgcagaaggtgctgaagggaacatattggggcagatggcttctgcgatgccacaagcagtaaccgtcactcctgaggagcggcaggcaattgaacgtctttaagcaatgggtcttgatcgtgcaatcgtattggaggtgtacttcgcttgtcacatgaatgtggtattggctgccaactaccttttggatcacatgcatgagttcgaggaac

SEQ ID NO: 149805 - DNA, 252 bp, Glycine max
ctattatgaaatcgacaatacacctacaggaacttgtgctgtttgtgtggttggtggtgaaaggtcccttgttgccaacttatcagctgcaaattgctacaagtctgagcatttgacgagaccggaaaattgggcattagttgaaaaggccaagtattactacatttctggctttttcctcactgtatctcctgattccatacaattggttgctgaacatgcagctgcaaataacaagatcttcatgatgaa

SEQ ID NO: 149806 - DNA, 253 bp, Glycine max
gcaacatcaagagcttcaacctctccggcatgggttgcagtgctggcttgatatccgttgacttggctcgtgaccttctccaggttcaccctaactcaaacgccgtcgttgtaagcaccgagatcatcacccctaactactaccaaggcaaagagagagccatgcttcttcctaattgcctcttccgaatggggggtgctgctattctcttatccaaccgaacctccgaacgcaggagagccaagtacaggtt

SEQ ID NO: 149807 - DNA, 249 bp, Glycine max
ttgagacagagaaacacagtgggattgcagagttgcttgaaatattgggcagcataattaatggttttgctttgcctttgaaggaagagcataagctgtttcttgcccgtgcgttgatcccgcttcacaagcctaagtgtgttgctctttatcatcaacagctttcgtattgcataactcagtttgttgagaaggacgtcaaactagccgatactgtggtaagaggccttttgaaatattggccgataa

SEQ ID NO: 149808 - DNA, 249 bp, Glycine max
cagacttcgggctagctagattgggaccatctgatgggctgactcatgtctccacagcggtcgtaggaacaatgggttatgcagctccagaatatgttcaaactggacgtctcacgtcaaagagtgatgtatggagctatggtgtcttcctttatgaactcatcactggccgccgtccaattgatcgaaatcgccccaagggtgagcagaagctgttggaatgggtaaggccatacctttcagatggga

SEQ ID NO: 149809 - DNA, 252 bp, Glycine max
gaacttgccaatgggagattggctatgttggcattcttgggattcatagttcaacacaacgtgacaggcaaaggaccatttgagaacctcttgcagcacctctctgacccgtggcacaacaccatcatcaatacaattcgtggctactaagtttgtatccaatgacatggataagcctgtgtccttctcgtgtaatcctgaatggatgaattttgagagtgatttgggcgtgattgttgtgatccatctatt

SEQ ID NO: 149810 - DNA, 258 bp, Glycine max
cggctcgagctcgagccgatcggctcgagtgagaattgagaaatggtggagggaagagaaacgctatgaagctatgttgctcccatcggttgggtcatatttttcagagaagatatctgaagaaatctgcaattcagctgctaagatggccaataatttagaggtggatgcactttttgtgtacacaaagacagggcacatggcatctctattgtcacgctgccgtcctgactgcccaatctttgcttttactaccac

SEQ ID NO: 149811 - DNA, 259 bp, Glycine max
cagaacaaccagccgctgaggctcctgccccagaatcaaccaccgaagcaccaaaggaagaaaccaccgaggcaccaacagaaacagtagaaaaaacaactacagaagtagccccagaggagcctaaagaagttccagttgagaccgaggaggtggtggcaaaggagacagaggaagagaagccagcagaagagaaatcagaggagaaaactgaagaagtgaaagaagaagcagaggagcctaaagaaactactgaaac

SEQ ID NO: 149812 - DNA, 256 bp, Glycine max
gtgtttaatctgaaatttgtttgaccaaattcatggcggaactgatagggcctcgcttgtacagctgctctaattgtagaaaccatgtctcactccatgatgatattatttccaagagatttcatggaagaaacggccgagcctttctgttttcccatgcaatgaatattgtcacggggccaaaagaagacaggcatctcttgactggcctccatactgttgctgatgtttattgtggcgattgccgtgaagtgtt

SEQ ID NO: 149813 - DNA, 252 bp, Glycine max
gaaaagggtagaaccgtggtggtgtccgctctgcagtttgcttgcaccgatgatgtctcaacaaatgtcgccaccgccgagaggctagttagagctgcacataaacagggtgcgaacatcattcttattcaggaactctttgaaggttattacttctgtcaggcacagagagaggagttcattcaaagagctaagccacataaggaccatcccacaatcctcagaatgcagaaacttgcaaaagagttaggt

SEQ ID NO: 149814 - DNA, 253 bp, Glycine max
aaagctgtgagcatggctgatttagagcatgcaaaagacaagatcctgatgggaagtgaacgcaagtcagctgtcatatctgcggagtcacggaagttgactgctttccacgagggtggccatgcccttgtggccatccatactgatggggccctccctgttcacaaggcaactatagttccccgtggaatggctcttggcatggttactcaattgcctgaccaggaccagaccagcgtttcccgtaaacaga

SEQ ID NO: 149815 - DNA, 251 bp, Glycine max
gttgtaactcgttcttcttcttttgttgttctgtgtttgtgtttgttttttctctcacctgaaaatgtcttgctgcggtggtaactgtggttgcggaagctcctgcaagtgcggcaacggctgcggaggctgcaagatgtacccagacttgagctacactgagtcaaccaccaccgagaccttggtcatgggagtggcacctgttaaggctcaatttgagggtgctgaaatgggtgtgcccgctgagaacg

SEQ ID NO: 149816 - DNA, 246 bp, Glycine max
ctcgagccgattcggctcgaggctatttgtgcccttttccgtggaggattagatggcgagagcggactgctggcctcatacattctggcaatgagattttggagacatacacttattacccagatgccagtcttcaagagagagaacatgttttggaacagcaaactgtgttacgacaacttgagtcaatattgtctattcacaaattagtaaggcttggacattatgttgatgcattaagggagg

SEQ ID NO: 149817 - DNA, 246 bp, Glycine max
caaatcaggattggcaccaaatgtctcagatgctcatactattaatggccttccaggggcagttaccaattgttctacacaagatgtttacgaactacccgtggagagtggaaagacctacctgttgagaattatcaatgctgcactcaatgaagagctcttcttcaaaattgctggccacaagctcacagtggtagaagttgatgccacatatgtaaagcccttcaagattgaaacaattttgat

SEQ ID NO: 149818 - DNA, 246 bp, Glycine max
ccggaaagaccatcacccttgaggtggaaagctctgacaccatcgacaacgtcaaggccaagatccaggacaaggaaggaattcccccggatcagcaacgtctcatcttcgccggaaagcagctcgaggacggccgtaccctcgccgactacaacatccagaaggagtcaacccttcaccttgtccttcgtctccgtggtggcatgcagatcttcgtcaagactctcactggcaaaaccataaccc

SEQ ID NO: 149819 - DNA, 248 bp, Glycine max
tgcaggaggtatgcatgcgggattgcccaaatatgtccatgtaaatctgagagacatagaagatgctaaatttaaggaaggggaagaagtgtctctagagtcactgaaggcgaaaggtgtgattaatccatcaggaagagaaaggagacttcctttgaagatcttgggtgaaggagaactgagcaagcagttgacattaaaagcccgcgccttttccacatcagcaaaggagaaacttgagaatgctg

SEQ ID NO: 149820 - DNA, 241 bp, Glycine max
acaggttatgttgtataggataggctggccagattaagaaagtcatagtctgtgcgccggtcatgtcccaagagtgggccatgacactaatccttactatttgatgatgaacagataaagtaacttgattggaaaataagcattatttatggaatagcaggaggcctattataccttcatgaggactcttggctcagagtaaatcatagagatctcaaagctagcaatgttctattagacc

SEQ ID NO: 149821 - DNA, 255 bp, Glycine max
ctctctctccttctcgctctttcagctttgacttttgttggaaactaaggcctaatcaaaatggtgaagttcacagctgaagagctacgtcgtattatggactataagcataatatccgtaatatgtctgtcattgctcatgttgatcacggaaaatcaaccctcactgattctcttgtggctgctgctggtattattgctcaagaagttgccggtgatgtccgtatgactgatacccgtgcagatgaagctgag

SEQ ID NO: 149822 - DNA, 249 bp, Glycine max
cagcaatctcaactgcactgaaagaaagcaatccggtgtatataagcattagctgtaacttgcctgggattcctcaccccactttcagtcgtgatcctgttcctttttcgttatctccaagattgagtaacaagatggggttggaggctgcagtggaggcagcggcagaattccttaacaaggcagtgaaaccagtgctggtgggtggtcctaaactgagggtggcaaggcatctgatgcctttgttga

SEQ ID NO: 149823 - DNA, 247 bp, Glycine max
gcagaaaccagagaacattccgcccgaaaaaaagtactccttctgggagtaagggagctcaacttagaaaacatattgatgccacgttgggtagtggaaatctgagggaagcagtaaagctacctcctggggaggatttaaatgagtggctagctgtcaacactgttgatttcttcaaccaggtgaatctgctttatggtacccttacagagttctgtactcctgagaattgtcggacgatgtctgc

SEQ ID NO: 149824 - DNA, 248 bp, Glycine max
tggattatgagcaagaacttgagactgcaaagagcagttcttcagttgagaaaaactacgagcttcctgatgggcaagttatcaccattggagctgagagattccgttgccctgaagttcttttccagccttctatgattggaatggaagctgctggaattcacgagaccacctacaactccatcatgaagtgtgatgtggatattaggaaggatctgtatggtaacattgttcttagtggtggctca

SEQ ID NO: 149825 - DNA, 247 bp, Glycine max
aattgcggaatctgctagaattttctaataatggcgaaagacgttgagcaggtcacagagcaaggtgaatactccgcgaaggactaccatgaccctcctccggcaccgttgatcgacccagatgagctcacaaagtggtccttgtacagagccgccatagctgagttcatagcaacactcctttttctttacatcaccgtgttgaccattattggctacaagagacagagtgacaccaaaatccccg

SEQ ID NO: 149826 - DNA, 247 bp, Glycine max
tctctcaccaaattcttattagaacgaaaaaagaaaagaaaagaaaaaagagcgatttttccctcaccaaagaagaaccaaaacaatggcggatcaactcaccgatgaacagatctccgagttcaaggaagccttcagcttgttcgataaggacggcgatggttgcatcacaaccaaggagcttggaactgttatgcgttcattggggcaaaacccaactgaggcagaactccaggacatgatcaat

SEQ ID NO: 149827 - DNA, 253 bp, Glycine max
gattgacaggcgatctggcaaagagcttgagaaggaacccaagtttttgaagaatggtgatgctggttttgttaagatgattccgaccaaacccatggtggttgaaactttctctgagtaccccccacttggtcgctttgctgtcagggatatgcgtcaaactgttgctgtgggagtcatcaagaacgtggagaagaaggatcctactggagccaaggtcaccaaggctgcccagaagaagaagtgaatcgtg

SEQ ID NO: 149828 - DNA, 221 bp, Glycine max
agaggctcgtgaggaccttgctgctcttgagaaggattatgaggaggttggtgccgagtctggtgatggagatgatgatggtgaaggagatgatgattattagagtgtctgaaatatcgtgtgtttgatgtctactttttcgtcttctgtcggacatgtgtggtttttgaatgatgattgttatcaaatatatgtgctatgtatagcacagaagtttctat

SEQ ID NO: 149829 - DNA, 247 bp, Glycine max
atcgagaaggagaagcgccgtcaatgccgcggaatcgagctcatcgcctccgagaacttcacctccttcgccgtcatcgaggccctcggcagcgctctcacgaacaaatactccgagggcatgccgggcaaccgctactacggcggcaatgaatacatcgaccagatcgaaaacctctgccgctcacgcgccctccaagccttccacctcgacgcccaaacataaagcgtcaacgtccagccctact

SEQ ID NO: 149830 - DNA, 218 bp, Glycine max
gtggtgaggttgaacattgcccaggttttgacggtgatttctcagaagcagaaggctgcgttgagggatgcctacaagaataagaagtacttgcctctcgatctccgccctaagaagaccagggctattcgcaggaggcttactaagcaccaggcatcattgaagacagagagggagaagaagaaagagttatatttcccactaaggaaatatgctat

SEQ ID NO: 149831 - DNA, 247 bp, Glycine max
gcaattcactctgtacaattcttcgttcgttctctgcagttatatcctttttgagcttcaatggcggacgctgaaaccttcgctttccaggctgagatcaaccagcttctaagtctcatcatcaacacattctacagcaacaaggagattttcttgcgtgaactcatcagcaatgcttctgatgctttggataagattcgattcgagagcttaaccgacaagagcaagctcgatgctcagccagagc

SEQ ID NO: 149832 - DNA, 243 bp, Glycine max
gtgatttcagtgagtgatcggtgttcacttgatctcatcataatcgtcagcgtcaattgaagaagatgccgatcagaaacatcgccgtcggaaggcctgaagaggcgactcaccccgacacgttgaaggcggctttggctgagttcatctcaaccttcatcttcgtgttcgccggctcaggctccggtatcgcctacaacaagctcaccgacaacggcgctgccacccctgccggcctcatct

SEQ ID NO: 149833 - DNA, 247 bp, Glycine max
aagatatccatggctgagtccgacaacgagtcaggaggtcacacggggaacgcgagcgggagcaacgagttgtccggttgcagggagcaagacaggttcctcccaatagcaaacgtgagcaggatcatgaagaaggcgttgccggcgaacgcgaagatatcgaaggaggcgaaggagacggtgcaggagtgcgtgtcggagttcatcagcttcataacaggagaggcttccgataagtgccagaagg

SEQ ID NO: 149834 - DNA, 194 bp, Glycine max
ggaagaaccagctgaagaatctgatgatgacatgggtttcagtctgtttgactaatttatgtaatgcttttgttgagtttatttggttagaattgaagttgtgtttgcctttcatttcaggtgttattttagtgtattcatgttacattgcaactacttttaatttccatagttaattaaagcttcaacgtttc

SEQ ID NO: 149835 - DNA, 243 bp, Glycine max
gaagattctggtgaatgcgtagaaaaggaaaataaagaaattagcgtgaaaaatgttgggtgtgttcagcagctccatagtgtcgccgccggaggagctcgttgccgccggcagccgtacaccgtcgccgaagatgacggcggcggcgctgcggaagtggttcgaggagaagaacccctccgcagtgtcggtggaggtcggagagcatgtccagctcgcttatacccaccagaacgagtcgcc

SEQ ID NO: 149836 - DNA, 243 bp, Glycine max
gcaaaagttgcttcttgtgaatctgacgttgaaggatctcatgctaatggcttttgtgacttgaattggctttcctctggcaatgctatgaatgaagaagatgttttccaaaggtaccttacaatgacctcagcaaatgaggccaacggttggtatggaggtagtctccttggtgatcaagatgaaaacagtgagatatatgaacattatgcagagttatgtcagggacctgccttggaactt

SEQ ID NO: 149837 - DNA, 251 bp, Glycine max
gtttcccaatttccattgcctccgcttccacctcgcaaccatgatcatcccggagaagaaccgcaaggagatctgcaaatacctcttccaagagggagtttgcttcgcgaagaaggacttcaatttggccaagcaccctgagatcgacgtgccgaatctgcaggtgattaagctgatgcagagtttcaagtctcgcgagtacgtgagagaaacttttgcttggatgcactattactggttcctcaccaacg

SEQ ID NO: 149838 - DNA, 239 bp, Glycine max
gcgccccgcgccgtcttcgtggatcttgaacccaccgtgatcgacgaatccgaaccggtgcgtaccggcagctcttccacccggcgcagctgaccagcggcaaggaagacgccgccaacaactacgcgcgtggccactacaccatcgggaaggagctcgtcgatctccgcctcgagaggatccgaaagctcgccgacaactgcagcggtctccacggtttcctcggcttcaacgccgtc

SEQ ID NO: 149839 - DNA, 242 bp, Glycine max
ctcgagccgctttgcacaaaccctaacacctaaaagccagaagaagcgaaatcgtaatcgcaatctagcggatatgaaggtcgtcgctgcatacttgctcgcagtgttgggagggaatccatctccttctgccgatgatatcaaaaacatcctcggcgcagttggagctgaggctgagcatgagttgattgagttgctcttgaccgaagtcaagggcaaagacttcaatgagctacttgcta

SEQ ID NO: 149840 - DNA, 246 bp, Glycine max
  unsure (1)..(246): unsure at all n locations
gggctaccttaatttcatgggcaatgagtttggccatccagagtggattgatttcccaagagaaggcaatggatggagttatgagaagtgcaggcgtcagtggaatctggtggatacagatcacttgagatataagttcatgaatgcatttgacagagcaatacanaagcttgatgataaattctcattccttgcatcaacaaaacagattgtgagcagtgcagatgatgatgacaaggttatagt

SEQ ID NO: 149841 - DNA, 246 bp, Glycine max
cattcaggcaaaacctaaccacagagaataacgttggtgaaagaacgacgatgacggacgcagcgtccgattcacgaaacgatgcagccgtgcaagccaccaacgacgacgcttccgccagtaaattgtcatgtgtaaaaaagggatacatgaaagatgattatattcatctatttgtgagaaggcctgtgaggagatctccaatcattaatcgtggttactttgctcgctgggctgcatttcgga

SEQ ID NO: 149842 - DNA, 244 bp, Glycine max
atgctgtatatcatggacccgaaggacttaaaaccattgcccaacgggttcatggtcttgccggggtgtttgctcagggattaaaaaaacttggaaccgtggaagttcaggaccatccattctttgacactgtgaaaattaagactgccaatgcccatgcaattgctgatgctgctcgcaagaatgaaatcaatttgcgggttgttgatgggaacactatcactgttgccttcgatgaaacaac

SEQ ID NO: 149843 - DNA, 243 bp, Glycine max
gcctggtgtgcttatccaggtctttgagggtgaaagagcaaggaccagagataacaatttgttgggcaaatttgagctatctggcattccttctgcacccaggggtgttcctcagattacagtgtgctttgacattgatgccaatggtatcttgaatgtctctgccgaagataaaaccactggccagaaaaataagatcactatcaccaatgacaagggtagattgtcaaaggaagatattga

SEQ ID NO: 149844 - DNA, 243 bp, Glycine max
ggccaccgccgcgatggcgtggcgcgtccgacgccgacgacatcctgatccgtcaggtggtgccagatgttggcgaagcaccgaggaggacaacctgctgaacgccgagcaccacttcgcgagcttcaaggccaagttcgccaagacctacgccaccaaggaggagcacgatcatcgcttcggcgtcttcaagtccaacctccgcagagccaggctgcacgccaagctcgacccctccgccgt

SEQ ID NO: 149845 - DNA, 244 bp, Glycine max
gaaccacttgatctctgcgaccatgagtggtgttacatgctgtcttcgattccctggtcaactcaactctgatctgaggaaatttgccgtgaatctcattcccttccctcgtctgcacttcttcatggttggatttgcgcctctcacctctcgcggctctcagcaataccgcgcattgacagtgccagagctgacacagcaaatgtgggatgccaagaacatgatgtgtgctgcagatccaagg

SEQ ID NO: 149846 - DNA, 245 bp, Glycine max
ctccttcgttcactcttcttctcttgcggctagggttttagcgcacttcttctagatttaaggaagatgggtaaggaaaaggttcacatcagtattgtggttattggccatgttgactctgggaagtccactaccactggccacctgatctacaagcttggaggcattgacaagcgtgttattgagagatttgagaaggaagctgctgagatgaacaagaggtctttcaagtatgcctgggtgct

SEQ ID NO: 149847 - DNA, 246 bp, Glycine max
atgctgtatatcatggacccgaaggacttaaaaccattgcccaacgggttcatggtcttgccggggtgtttgctcagggattaaaaaaacttggaaccgtggaagttcaggaccatccattctttgacactgtgaaaattaagactgccaatgcccatgcaattgctgatgctgctcgcaagaatgaaatcaatttgcgggttgttgatgggaacactatcactgttgccttcgatgaaacaacca

SEQ ID NO: 149848 - DNA, 235 bp, Glycine max
cggacaggctcttgacactcactggtgtgtatggcttctggaagcacgtgaccaatcttgaacgccgtgagagcaaacgttacctcgagatgttctatgctctcaagtaccgcaaattggctgagtctgtgccccttgctattgaagagtaaattcatgtttgaagagaacatcaatggagaaaccggcttttggtcgtttgaagtcttatggagctttcataaataacgccatt

SEQ ID NO: 149849 - DNA, 241 bp, Glycine max
ctgatgcacaaattaaccaagtagttagtggagccttggatagattgcattatgaacgtgatccttgtgtacaatttgatggggaaaggaaactgtgggtttacttgcatagagaaagagaagaagaagattttgaggatgatggcacttcatccacaaagaaatggaagaggcagaaaaaggatgctgcagatcaatctgatcaaggaacagtaactgttgcctgtcctggaactgggga

SEQ ID NO: 149850 - DNA, 236 bp, Glycine max
ggcgaagatgttactgttgataactttactgctgctttacttggaaataagtcagcactgactggtggcagtgggaaattcatgatctgtggtcccaattagcatatctacatatactatacggaccatggatgtcctatggtgctcacaatgcctgcctgtccttacttatacgcggatgatctgattgaagtcttgaagtgaaagcatgcttctggcacatatacaaacctagt

SEQ ID NO: 149851 - DNA, 243 bp, Glycine max
ctcgagccgctcgagccgaatcggctcagcgagtatttgcccaatgggagcttgtggagaccggcttcacacgagtaggaagatggagcttgattgggaaaccaggtatgaaatcgctgttggggcagcgaaagggttggagtatttgcatcatgggtgtgcgaggcccgtcattcatagagatgttaagtctagtaacatattgttggatgagtttttgaaacctaggattgccgatttcgg

SEQ ID NO: 149852 - DNA, 239 bp, Glycine max
cgttgagcctgaaattcttcttgatggagaccacccaattgagcggatgctggaagtggctgagacggtctggtcagaagtctacttctatttggctgaaaacaatgacctcattgagggacttttgctcaaacctagcatggttacaccttaggctgaacaaaaaatctaaaattctccagaaaccattgctaaatatactctaaccatctatagaagaagagttcctcctgctgtcc

SEQ ID NO: 149853 - DNA, 245 bp, Glycine max
aaagctcccaggaagcagcttgcaaccaaggctgcacgtaagtctgcaccaacaactggtggtgtgaagaagcctcatcgttatcgccctggaactgttgctcttcgtgagattaggaaataccagaagagcactgagctcctaatcaggaagcttcctttccagaggttggttcgtgaaattgcccaggatttcaagactgatctgcgtttccagagccatgctgtgcttgcattgcaagaggc

SEQ ID NO: 149854 - DNA, 246 bp, Glycine max
cagaaagcaagaaagaaaatgggagtggagaagcagttgttgaggcctggcaccggtcccaagccaattcccggtcagaacgtcaccgttcactgcactggtttcgggaagaacggtgacctttctcagaaattctggagcaccaaggatcctggccaggaccctttcactttcaaaatcggccaaggttctgttatcaaaggatgggatgaaggtgtgcttggcatgcaaattggtgaagttgct

SEQ ID NO: 149855 - DNA, 247 bp, Glycine max
gcagagagtgcggtaggctcttccgagacccgaagcagccatggggatcgatctcaaggccggaggtaagagcaaaaagaccaaaagaacagcacccaagtccaatgatatctatctcaagctcttggtcaaggtttatcgcttccttgttcggagaactggcagcaacttcaatgctgttatacttaagagattgttcatgagcaaggttaacaaacccccattgtctttgtcaaggttgattaag

SEQ ID NO: 149856 - DNA, 238 bp, Glycine max
gatcaaatgctcccaaacagatgggaatggaagtcctgcaaagaggacagtgcttcatgatctttatgagaaagaagggcagagtccatggtatgataatctctgcagacctgttacagaccttcttcctcttatagcaagtggtgtcagaggcgtcactagcaaccctgcgatttttcagaaagctatctcatcatcgaatgcttacaatgatcagttcagggaacttgtgcaagca

SEQ ID NO: 149857 - DNA, 241 bp, Glycine max
gcttttgacaggagttggtttcttttctcttatattgtttgggggcccgcttgcacctggtcttgcaagtcttggaatgactccacttctagctgctgtatatgtgggtgctttgcagaacatatttagcaagagtgccaagtacagcttatttgatccctgcaaagaaatggcctacattccattggacgaggataccaaggttaaagggaaggcagccattgatgttgtgtgcaatcca

SEQ ID NO: 149858 - DNA, 241 bp, Glycine max
gtgttacttgatgaaaacctggaagctagagtctctgattttggaatggctaggtatatgagtgctatggatacacatttgagtgtgagcacactggcaggcacaccagggtatgttcctccggagtactatgagagcttcagatgctctaccaaaggtgatgtctacagttatggtgtggttttgttggagctgctaactgggaaaaggccaacagattcggctgattttggtgataata

SEQ ID NO: 149859 - DNA, 239 bp, Glycine max
cggacaggctcttgacactcactggtgtgtatggcttctggaagcacgtgaccaatcttgaacgccgtgagagcaaacgttacctcgagatgttctatgctctcaagtaccgcaaattggctgagtctgtgccccttgctattgaagagtaaattcatgtttgaagagaacatcaatggagaaaccggcttttggtcgtttgaagtcttatggagctttcataaataacgccattgatt

SEQ ID NO: 149860 - DNA, 241 bp, Glycine max
  unsure (1)..(241): unsure at all n locations
cgagcttcacaaagatgaatcgggaaaaattgatgaagatggccggtngcggttagaactgggggaaagggcaccgtngagaagaaagaagaaggctgtccacaagacaacaaccacagatgacaaaaggcttcagagcaccctgaagagaataggggtgaatgccancccggctattgaggaggtcaatatctttaaggatgacgtanttatccagtttctaaatcccaaagttcaagca

SEQ ID NO: 149861 - DNA, 239 bp, Glycine max
cttggaggcttccaagaaaaaggatccgatcctcaacgcttgtctaatactcatgttatcgtagatgacaccggaaaaattataagctcttatagtaagatacacctgtttgatgtagatgttccgggtggaagggtatacaaagaaagtagttttacagaatcaggcaaggatattgttgcagtagacagtcctgttgggcgtttgggcctcagtgtttgctatgatttgagatttcc

SEQ ID NO: 149862 - DNA, 240 bp, Glycine max
attccacaagaactctccaaggatcctccttcccacgagattctttggtgggaaaaatccaagaggtttgaaatttgaaggcagggaagatggattatttcaatgcaccaggaagaaaccatctctttgttccagggccgagttaacattccggaccagatcatccgggccatgaacagaaacaatgaggactaccgttctccagcaattccagctatgacaaaatctttgcttgaggat

SEQ ID NO: 149863 - DNA, 240 bp, Glycine max
cctcaggccccctaaggtagagaatcttgttcaatgtcctagggtcatccacagccctgatggtgtaggttccaatgtcctcttcctcaggccccctaagaacatttactcgttcaacgagcttgtggccttgtgggagaacaagattggcaagaccctcgaaaaaatttatgtaccagaggagaaggttctcaaggacatcgaagaggcacctcttccaatcaatgtggtattagcaat

SEQ ID NO: 149864 - DNA, 240 bp, Glycine max
cgaacttgttagcaacactgggggatctggagagggactccttcgtggctcttctttcgaagctgatcgctgaatcgaagtacgtccagaacaacccgccggtgctcattccccaagaggacagagtcgtgaagcacgtcttggacgttctgttaccgttcagcaccaccaccggcggtggacccttgctcgtaaaccacgtcacctaccacgtctgcagagggaacctcatcgtggagt

SEQ ID NO: 149865 - DNA, 240 bp, Glycine max
gtcaaatgtggtcaagtttgaagtgcagctttacaaaactcgtgaggagaaatatctgcttgatcttcaaagggtccagggcccacagtttcttttcttggatctgtgcgctgctttcctttcacagctacgtgttctctagtgaagctcacaagtcgcaaaggagaccttgaggtgtcttgtgtggcatgtgaataagcttacgttgtacatatcaatgccctttcagtatgggtatat

SEQ ID NO: 149866 - DNA, 243 bp, Glycine max
atgggccataaccttgttctctctctccaccctcccaaacactttggttatgggcatccctttgctcaaagggatgtatggtgacttctcagggagcctcatggtgcaaattgtggtcctccagtgcatcatttggtacaccttgatgctcttcttgtttgagtttagaggtgccagaatgcgcatctctgagcagttccctgacactgctgcctccattgtctccatccatgtggactctga

SEQ ID NO: 149867 - DNA, 244 bp, Glycine max
ttcgacacgcacggccaggctcttgacactcaccggtgtgtatggcacctggaagcccgtgaccaatcgcgaacgccgtgagagcaaacgctacgccgagatgttccaagctactcaagtaccgcaaattggctgagtctgtgccccttgctactgaagagtaacttcatgtttgaagagaacatcaatggagacaccggcttttggtcgtttgaagtcttatggagctttcataaataacgcc

SEQ ID NO: 149868 - DNA, 237 bp, Glycine max
ccagatctcactctcactctcactctgttttgctcagtgcagagtagagaagaaaatatggcggtgatggcggttcaccaattcgcgcaatgcatcacttgccacgcttggagccccgatcaatccatggttgctttatgtccaaacaataatgaagaccacatctataggttggtggacgacaaatgtgcaaagttgtatgctcttcaaaagacaacaaatgtgcagtgggctgtg

SEQ ID NO: 149869 - DNA, 217 bp, Glycine max
  unsure (1)..(217): unsure at all n locations
gtttccacacccaaganaagaagcaagagctcgaantctacagatccattcgaggaagatgaatgttcacccagatgtcaactttgaagaacttgctcggtccacagatgatttcaatggagctcaactgaaggctgtttgtgttgaggctggcatgttggctctacgccgtgatgcaactgaggtgaaccatgaggactttaatgaaggtattatt

SEQ ID NO: 149870 - DNA, 238 bp, Glycine max
ctttcttcttcttctcttaaaagagcctttgctttttctttaggcctttccgaattaagtacttgtttcattttctctcgaagcaagaaaaatgttcatcgagagtttcaaggttgagagtcctaacgtgaagtacacagagactgagattcagtacttgtacaactatgaaaccactgaacttgttcacgagaacaagaatggcacttatcagtgggttgtcaagcccaaaactgtc

SEQ ID NO: 149871 - DNA, 236 bp, Glycine max
cgttaagaccctcaccggcaagactattaccctagaagtcgaaagctccgacaccatcgacaacgtcaaggctaagattcaggacaaggagggaatccccccagaccagcagaggctgatcttcgccgggaagcagctcgacgacggacgcacccttgctgactacaacatccagaaggagtcaactctccacttggtgttgcgtcttcgtggtggtatgcagattttcgtgaaga

SEQ ID NO: 149872 - DNA, 237 bp, Glycine max
ctcttctccacttctcaatccacacaaacttcaaaacctacacctcttctctctgtttctcttcactctctctctccctccctcttcaactaacatggcaattcaaaaccaagacaccgctgtcagagaaatcaagcccaagaacaggagaatcatgggtgctggagggcctgatgatgaggacaataggtggccaccgtggttgaagccactgctgaaagagagcttctttgttca

SEQ ID NO: 149873 - DNA, 238 bp, Glycine max
tgggaattgaagcatggaaaagtgcccgggacagtacaggtttgacccctaacgaccatgcttgccttaggggctattactcttacattcaactagtccagaacaagaccaacaaaaaaggtgaaagacaacatttggttgatatccctggaactgttgtagatagtaacacaacgcagaagcaatcagatggaaataggacatgtagagttccaagcttaaagactgagaagattga

SEQ ID NO: 149874 - DNA, 238 bp, Glycine max
gggctaccttaatttcatgggcaatgagtttggccatccagagtggattgatttcccaagagaaggcaatggatggagttatgagaagtgcaggcgtcagtggaatctggtggatacagatcacttgagatataagttcatgaatgcatttgacagagcaatctccttgcttgatgataaattcgcattccttgcatcaacaaaacagattgtgaacagtgcagatgatgatcacaag

SEQ ID NO: 149875 - DNA, 232 bp, Glycine max
gacgcttaaaagaatgaataaattgattggcactactagatatcggaatgtgatggacatgaatgcaggccttggaggatttgcagctgcacttgaatcacaaaagtcttgggtgatgaatgttgtgccgtcaattgctgagaacactttgggtgttgtctatgagagaggtctgatcggcatttatcatgactggtgtgaaggcttttccacatacccaaggacatatgat

SEQ ID NO: 149876 - DNA, 233 bp, Glycine max
gaaagctgaaaatcgacgcgtggtttggttctcggaaaacatccgccgccattcgcaccgccttgagccacgtggagaatcttatcaccggcgtcaccaagggctaccgctacaaaatgatgttcgtttattcccatttacccatcaacgcaagcatcggcaacagcaacaagtctattgagatccgaaatttccttggcgagaagaaggtgaggaaagtcgacatgcttgat

SEQ ID NO: 149877 - DNA, 234 bp, Glycine max
gtgagatttgcgaatctgagaaatggcggattcttctcgggaggagaacgtttacatggcgaaattggcggagaggccgagcgttacgaggagatggttgagttcatggagaaggttgcaaagactgtggaggttgaggagttgacggtggaggagaggaatctcctctctgtggcttacaagaacgtgattggtgcgaggagggcttcgtggaggatcatatcctccattgag

SEQ ID NO: 149878 - DNA, 237 bp, Glycine max
  unsure (1)..(237): unsure at all n locations
ccaagcttgaacccgaaaggaaggtccaacttgcaaaagancttggcttgcagccaaggcaagttgctatatggttccaaaaccgaagagcaaggttcaagaccaagcagctagaaaaagactatggcgtgttgaaagctagttatgataggctcaaaggtgactatgaaagtcttgttcaagagaatgacaagttaaaagcagaggtgaattctctggagagcaaattgattcttt

SEQ ID NO: 149879 - DNA, 233 bp, Glycine max
ctcactgatggtgccagcaagggggtgatgcagatattaaatactatcatcagaggtcaagacgatgggattttggttccagtcccacaatacccactctactcagcaacaattgctctgcttggtggtacccttgttccatactaccttgaagagacagcaaattggggtcttgatgttaatgaacttcgtcaatcagttgagcaggctcgctttaaaggaataactgttaa

SEQ ID NO: 149880 - DNA, 239 bp, Glycine max
gtgattgagaggttcgagaaggaggctgctgagatgaacaagaggtcattcaagtatgcctgggtgcttgacaagctcaaggctgagcgcgaaagaggaattaccattgatattgctttgtggaagtttgaaaccaccaagtactactgcacagtcatcgatgcccccggacatcgtgactttatcaagaacatgattactggtacctcccaggctgattgtgctgtccttatcattga

SEQ ID NO: 149881 - DNA, 236 bp, Glycine max
cttcgcaggatgatctgaagaaggcttacaagaaagccgccattaagaatcaccccgacaagggcggtgatcccgagaagtttaaagagctggcgcaagcttatgaggttctgagtgaccctgagaagcgtgagatatatgatcagtatggtgaagatgcgcttaaggaaggaatgggtggtggcggtggccatgatccatttgatatcttttcatctttctttggcggtgggagt

SEQ ID NO: 149882 - DNA, 244 bp, Glycine max
ggggtgaacatgcactccgacgatatccaacaggagaggaacgctgcattgcttgcaaactttgtgaagctatatgtcctgcacaagcaatcacaattgaggctgaggagcgagaagatggaagccgcaggacaactcggtatgatattgacatgaccaagtgcatttattgtggattttgtcaagaggcatgccctgttgatgcgattgttgaagggccaaactttgaatttgctacagagac

SEQ ID NO: 149883 - DNA, 239 bp, Glycine max
gcctctgacaaccaacccatcactcgcagcattaaagaccaacacattgaggtttcaatggctaaatacatagtgaagcagtacgtggcggcggtgggaggagagcgtgctttgaatagtgtggacagcatgtatgctatggggcaggtgaagatggcaacatcagagttttcagcaggggaagggagtgtgaatagtaagaaggtgaagaacttgcagatgaagggagaggtgggggg

SEQ ID NO: 149884 - DNA, 241 bp, Glycine max
gcagatcttcgtcaagaccctcaccggcaagaccatcacccttgaggtggaaagctctgacaccatcgacaacgtcaaggccaagatccaggacaaggaaggaatccccccggaccagcaacgtctcattttcgccggaaagcaacttgaggacggccgtacccttgctgactacaacattcagaaggagagtactcttcacctcgtcctccgtctccgtggtggcatgcagatcttcgtt

SEQ ID NO: 149885 - DNA, 241 bp, Glycine max
cttccaggggataaaatattgggtttagcaaattttttcctgggaattggaatcccaggagatgccaaggacttcttcaatcaagttgaatcattagctcttctagagaacaacatggtttcgatcccattggtactgtcacttcctgcaacggtttattcattatccaaaaaagatcagctcaaggttagggtgaacactgtacttggttcagctgcaccacctttaacagttaagcttg

SEQ ID NO: 149886 - DNA, 240 bp, Glycine max
ccgtaaccacagcgccactcgaacaagtgcggccattcccaacgcttctcttcctttctaaggggagtctgaatcccgtgagttttcaatatgacgtcgttcttgaagcctgagaatgctctgaaaacggcggaagaattactcaatgttgggcataagcaggatgctttgcagactctccatgatctcatcacctcaaagcgatacagagcgtggcagaagacacttgaaaggattatg

SEQ ID NO: 149887 - DNA, 240 bp, Glycine max
agaacagtttgtacactctcttggattaagttttaatccttacgttgctcagattgaaactcatgactacatggcaaagctttttcattcgctcatccagttcaataatatattaatcgattttgatagagatgtgtggggctatatatctttgggttactttaagcagaccactaaggctggggagattgggtcatcaactatgcctcacaaagtgaatcctattgattttgagaacag

SEQ ID NO: 149888 - DNA, 242 bp, Glycine max
gttatgctgatcttgtggaagagttatctcgtgcggatgggaagattgtgaagattactagtagtatggagatggggctgaccaccacagtgcttgtacgtgggtctaatcagcttgtgctcgatgacgctgaacggagtatgcacgatgctatgtgtgtagttaggtgtttggttgccaagaggaacatcattgccggcggtggtgcccctgagattgagctctccaggcagctgggtgcc

SEQ ID NO: 149889 - DNA, 242 bp, Glycine max
agggagcttgtgccaacttgggcaatcgatcactcgccgtcttgcccatggagataagaaggctgttgctcgccgatgttttgcctcagaagctgagctgaaaaagacagtgtttcatgacttccatgttgctcatggtgggaagatggtcccatttgctggatggagcatgccaatccaatacaaggactctttcctggactctaccatcaactgtaggcagaatggtagcctttttgatg

SEQ ID NO: 149890 - DNA, 236 bp, Glycine max
aaaagcacacccatggcacaagatattccacaaaaagatgcctccagaagcaattgatcttgcatcccggcttttgcaatactccccaagtctccgatgcactgcgcttgaagcatgtgcacatcctttctttgatgaacttcgataaccccatgctcgcctgccatatggtcgtccatttcctcctctatttaacttcaaacaggaattatctgaagtatctcgagtgcttgtta

SEQ ID NO: 149891 - DNA, 227 bp, Glycine max
ctcgtttccagcgttaacaaccgattgcgaccaactttacactttctgatgaaattagggtttaatgggccccactcgctcacgtgtcagaccacattgcttctcgtttccagcgtggaggacacccttttgcccaagattgagtttttgaagggcttggggttcactcacgaagaggtggctaacatggtcgtgatgtcacctgggttgttgactcttagtgtgga

SEQ ID NO: 149892 - DNA, 237 bp, Glycine max
ttttgtgactaggtgcattgccatagcacctagtcttattgtttccatcattggtggttctcaaggggctggtcggcttatcatcatcgcatcgatgatactttcattcgagctcccattcgcattaattccactccttaagttcagcagcagcagtaccaagatgggacctcacaagagttctataattatcattgtcatctcttggatcctaggcttggtgatcattggtatcaa

SEQ ID NO: 149893 - DNA, 237 bp, Glycine max
actcaatcctgcatggaccccaatgtgatggaggctaaggtggtggtgagttcttgtggccatgatggaccctttggcgccactggggtgaagaggctcaagagcattgggttgattgatagtgtgccagggatgaaagcccttgacatgaacaaggcagaggatgccattgtgaagctcactagggaggttgtgcctggcatgattgttactgggatggaagttgctgagattgat

SEQ ID NO: 149894 - DNA, 208 bp, Glycine max
agtcgctgttgaacatgacgggtctgttacagttaagtgtcggagataaccctttcgacttaacgccctttcccaaagaggttgtgagtctcaagaatctcaattggttctacctatcgaactgcaccctcggatggaagcttccggtaggactcggcaacctcacggagctcaccgaattagaattctccgataacttccacacaac

SEQ ID NO: 149895 - DNA, 235 bp, Glycine max
cttggtttagagaactaccaactggggtattggaccctctttcgccagagcaggtgatgcaatcccagtcagaagaagaatgtgctcagcttgtgaggcttcttcctccaacagaagctgctttgctagattgggcaataaacttaatggcagatgttgctcaaatggaaaacttgaacaagatgaatgcacgcaatattgcaatggtttttgctccaaacatgactcaaatggc

SEQ ID NO: 149896 - DNA, 236 bp, Glycine max
cctcgagccgaatcggctcgagcggctcgagatagaagggacatggaccgctatggaagagtactacaagttgggaatagcaaagtccattggcatatgcaattatggtatcaaaaaactcactaaactcttggaaatagccaccattcctcctgcagtcaatcaggtggaaatgaacccatcttggcagcaagggaaactcagggagttctgcaagcagaaaggaattcatgtta

SEQ ID NO: 149897 - DNA, 248 bp, Glycine max
tataataacatctttctctctccgaacagatcacactatggccacctcaagcgccaaatcagtccatgatttcaccgttaaagatgccaagggaaatgatattaatcttggtgactacaaaggaaaggtccttatcattgtcaatgttgcctcacaatgtggcttgactaattcaaattacactgagctcagtcagttgtatgagaaatacaaacagaaaggtctggaaattctggcatttccatgca

SEQ ID NO: 149898 - DNA, 238 bp, Glycine max
gtttgttgttgtaactcgttcttcttcttttgttgttctgtgtttgtgtctgttttttctctcacctgaaaatgtcttgctgcggtggtaactgtggttgcggaagctcctgcaagtgcggcaacggctgcggaggctgcaagatgtacccagacttgagctacactgagtcaaccaccaccgagaccttggtcatgggagtggcacctgttaaggctcaatttgagggtgctgaaat

SEQ ID NO: 149899 - DNA, 227 bp, Glycine max
tctctccaatggccaaagacctcgaaacggagattcaaagtgggttgcctcacaaggactaccacgacccacccttcgccccattctacgaccccgccgagctccgaaagtggtccttcttccgagccctcatcgccgagttcgtcgccaccctcctcttcctctacgtcaccatcctcaccgtcatcggctacaaccaccagacagtcaccgccgccgagccctgc

SEQ ID NO: 149900 - DNA, 236 bp, Glycine max
cgcaacaaaaagaaagaatcccaggcgaggagaaagatggaggggaaggagcaggatgtgtcgtcgggagcgaacaagttccccgagagacagccgattgggacggcggcgcagagccaagacgacggcaaggactaccaggagccggcgccggcgccgctggttgacccgacggagtttacgtcatggtcgttttacagagcagggatagcagagtttgtggccacttttctgtt

SEQ ID NO: 149901 - DNA, 237 bp, Glycine max
acaagattggaggtattggaactgtgccagtgggacgtgttgagaccggtgtcttgaagcctggaatggtggtgacttttgcaccaactggactgacaactgaagtcaagtctgtggagatgcaccatgaatctcttacagaggcacatcctggtgacaatgtgggattcaatgttaagaatgttgctgttaaggatttgaagcgtggttatgttgcctcaaactcaaaggatgacc

SEQ ID NO: 149902 - DNA, 240 bp, Glycine max
cttactctccttctctctctaaagggattcctttgtgctcttccaacttccaagacatgtcgattatatcacgcagaggcatctgttacatgccaagactagatgcagccacagtatctgctgctttgctagacataggccaaaatcgtgtcatagatgcttcacttagacttattcgagaaagagcacagcctaaggcataacttctgcgtgctttgggacgcgctatagcaacttcaa

SEQ ID NO: 149903 - DNA, 233 bp, Glycine max
cgttcttcttcttttgttgttctgtgtttgtgtttgttttttctctcacctgaaaatgtcttgctgcggtggtaactgtggttgcggaagctcctgcaagtgcggcaacggctgcggaggctgcaagatgtacccagacttgagctacactgagtcaaccaccaccgagaccttggtcatgggagtggcacctgttaaggctcaatttgagcgtgctgaaatgggtgtgcccg

SEQ ID NO: 149904 - DNA, 233 bp, Glycine max
ctgaagtatggttcgcttgttattgctacaggatgtacggcatcaaggtttccagagaaaattgggggaaacctacctggtgttcactatattcgggatgttggagatgccgatgcactaattttatcgttggagaaagcaaaaaaggttgtagttgttggaggtggttatataggaatggaggttgctgctgctgctgttggttggaaacttgatacaacaatcatattccc

SEQ ID NO: 149905 - DNA, 236 bp, Glycine max
cgaacacaccgatgttgctgtgcttctcgacaacgaggctcatctacgacatttgcaggagatctcttgacatcgaacgccctacctacaccaacctgaaccgtctcgtttcccaggtgatatcatccctcactgcctctttgaggtttgatggagcactgaatgttgatgtgactgagtttcaaaccaacttggttccttacccaaggatccatttcatgctttcctcgtatgcc

SEQ ID NO: 149906 - DNA, 238 bp, Glycine max
tctcgagccgaatcggctcgagggctcgagatagaagggacatggacagctatggaagagtagctacaagttgggaatagcaaagtccattggcatatgcaattatggtatcaaaaaactcactaaactcttggaaatagccaccattcctcctgcagtcaatcaggtggaaatgaacccatcttggcagcaagggaaactcagggagttctgcaagcagaaaggaattcatgttagt

SEQ ID NO: 149907 - DNA, 240 bp, Glycine max
atcgaattttcctttcaactatatgatctcaagcagcagggttttattgaaagacaagaggtgaagcaaatggtagttgctactcttgctgaatctggcatgaacctatcagatgacgttatagaaagtataattgacaagaccttcgaggaagcagatacaaagcatgatggcaagattgacaaggaagagtggagaaaccttgttttgcgccatccgtcacttttgaagaacatgacc

SEQ ID NO: 149908 - DNA, 244 bp, Glycine max
tttcgtttctcagttttattcgaatccctctctcaatctcctttccaaatggccagcgttgaggttgcacagcaaacaccaacaacagttccagaaaatgaaacaaccgaggtaagcaagacccaggaaacaaccccagtcactgaggctcctgcaacagaacaaccagcagctgaggttcctgcaacagaacaaccagccgctgaggctcctgccccagaatcaaccaccgaagcaccacagg

SEQ ID NO: 149909 - DNA, 236 bp, Glycine max
gcggaggcgtatctaggttccaccataaagaatgcgatatgtcactgtgcctgcttacttcaacgactcacaacgtcaagccaccaaggacgctggtgtcatttctgggctcaacgtgatgcgaattatcaacgagcctaccgcggctgccattgcttatgggctcgacaaaaaggccactagctctggggagaagaatgttctcatctttgatctcggtggcgggacttttgatg

SEQ ID NO: 149910 - DNA, 230 bp, Glycine max
tttcactgcaggacctgatgaggttaagtgttggcaaattcgacgccaaacaaaggctccccaagctgcaggggctatccatactgattttgaaagaggatttatttgtgctgaggtgatgaagtttgaggatctaaaggaacttggtagtgagtcagctgtgaaggctgctggaaagtataaacaggaagggaaaacgtatgtggtccaagatggagacattatattct

SEQ ID NO: 149911 - DNA, 230 bp, Glycine max
caatcatcttttgtttgttcttcagtactttagtgtgtgatttaattccaagattttgagaatgtctagctgtgggtgtggaagtagctgcaactgtggcagcaactgcggttgcaacaagtactcttttgacttgagctatgttgagaagacaaccacagagactcttgttttgggtgttgggtctgtgaaggcccaattggagggtgctgaaatgggtgttgcagctg

SEQ ID NO: 149912 - DNA, 229 bp, Glycine max
cttaagcttgctactgagtttccacactgcataccttaggtcttccgaattcgaagttaatttgcaagatggctaaggaaaaggctcagatcaacattgtggtggttggtcatgtggaccctgaggaggcaaccaccattaacgagctgaagaagcctgttgtggagaaagaagctccagggcatgccatatgagggcatgcacgtacggcctcggaggggaaccagaa

SEQ ID NO: 149913 - DNA, 235 bp, Glycine max
taaagatggcagagacattcctatttacctcagagtcggtgaacgagggacaccctgacaagctctgcgaccaaatctccgatgctgtcctcgacgcttgcctcgagcaggacccagatagcaaagttgcctgcgaaacatgcaccacaaccaacttggtcatggtcttcggaggaatcacgaccaaggccaacgttgactacgagaagatagtgcgtgacacctgcagggacat

SEQ ID NO: 149914 - DNA, 240 bp, Glycine max
cccacgatagaattttcgttcgccggcgggtcacggtgaagctgcctccacagggtatactcttcgtggcgagtaccaagcaggtttgtttggcttttgccgcaaatggtgacgatagtgatgttactatatatgggaacgtacaacagagaacaatagaggttgtgtatgatgttggaggtgggagaattcggtttcgtgctagtgggtgcaagtgattaatgattaaacatgctttgg

SEQ ID NO: 149915 - DNA, 229 bp, Glycine max
aaggaactgttgcatgtgagtcatcatcatcatttgactttgactcatcatgatcatgtgtacagaaaccttctgaaagatctcattattcagtgtttgcttagactgaaagaaccttctgtcttattgagatgtcggaaagatgacctgcacttggtagagcatgtgctggattcagctgcacaggagtatgctgagaaagttaatgttgatcccccagagatcattg

SEQ ID NO: 149916 - DNA, 230 bp, Glycine max
gatcaatgtgcgcaccgatcccaatgcgctggtggatctcaccgaggatgctgaggttcaggccgagtttttgtacacggttaagtggaaggagactaacacgccattcgagaagaggatggacaagtactcgcagtcttcatcgctgccgcatcatttggaaatccactggttctcgattatcaactcctgtgtgacggtgttgctcttgaccgggttcctcgccacca

SEQ ID NO: 149917 - DNA, 231 bp, Glycine max
cactagctatagtaagctacacttatttgaggttggagaaatatggctacagatgttgaggttcaagagcaaggatgcgagtactctgcaaaagactaccatgaccctcctccagcacccttgttcgacccagaggagctcacagagtggtccttttatagagccctaatcgctgagttcatagcaacccttctcttcctttatgtcaccgtgctcaccattattggctag

SEQ ID NO: 149918 - DNA, 230 bp, Glycine max
gacactgaggaaattgttgatgcttaaattaagtttcaaattatataccttttcttttctgttttgtctctgcttatgatttgaattttagaataaatttttaaaaaaaaaaaaaaaaaaaaaaaaaaagaaaaaaaaaaaaaaaaaaagaaaaagaaaaaagtaaaaaaagaaaaaaaaaaaaaggaaaaaaaaaaataaagagaaaaaaaagggggggggggccatta

SEQ ID NO: 149919 - DNA, 224 bp, Glycine max
aataatatctgctagcattgctggcgatattgttcttgctgcagcatatgcacatgagctgccacgatatggtcttgaagtagggcttacaaattatgctgcagcttattgtactggtctcctgttggcccgaagagtcctcaaaacacttgaaatggatgaggagtacgaaggaaatgttgaggctactggagaggactattcagtggaacctgctgagagca

SEQ ID NO: 149920 - DNA, 117 bp, Glycine max
ttcaagcatagaatcaccaaccaaattatctggacatactgatcagggtttaatgaagaaatcaaaagggtttgatgggcttgcaatgtcaataggcaattgcaatgctgagagtgc

SEQ ID NO: 149921 - DNA, 270 bp, Glycine max
aatacacttatcacaaaattttttggtctgcacaggattaaaccttcaagtggtcaaaagtttcgctttgttgtaatgggaaatatgttctgcacagacttaaggatccatcggaggtttgatttaaaaggttcttcccttggaagatcatcagacaagatagaaattgatgagagtactacgctcaaagatttggatctgaactacagcttctacctggaaccatcttggcgagagtctttactaaagcagattgaaatagacagcaat

SEQ ID NO: 149922 - DNA, 120 bp, Glycine max
cggcccactgggccagaagcttgtcaagctcaagcatatgctattctagttagagaccaacgtacttggggctaatgtaggatctgctcaaggacctacaggtttcggcacatatctagg

SEQ ID NO: 149923 - DNA, 223 bp, Glycine max
cggctcgagctcgagccgaatcggctcgagtttctttcttcttcttcttctcaccttcttcacgattccgacgacgatccaagtgatagacactagttgcgatggaacttgtagctgaatccgagcgaactctgtacccatacgtgactggatcctctgtagtcgctatcaaatacaaagatgggattctaatggccgctgacatgggaggttcgtatggatc

SEQ ID NO: 149924 - DNA, 274 bp, Glycine max
ggaatacatgctgtctgttcccgagcattatggacagatgaaattgaaagtatttgatcatgacacattttctgctgacgatataatgggagaagcagacattgatcttcagtctctgataacatctgctatggcatttggagatgctggaatgtttggtaatatgcagataggaaaatggttaaaatcagatgacaatgcccttattgaggatagcacagtcaatattgttgatggtaaggtcaaacaaatgatgtcactcaagctccaggat

SEQ ID NO: 149925 - DNA, 236 bp, Glycine max
gatgtacttaacaagatcagtgatttccgaaagcctgaagcaaatccacttgccaaattactagctactggtcttgtaaactatgatggagaaaaatggaacaagcacagaagattaattaatcctgcattcagtttagaaaaattgaagattatgttaccaatattcttcaaaagttgcaatgatctaattatcaagtgggagggaatgtggcctaatgatggaccatgtgaaat

SEQ ID NO: 149926 - DNA, 268 bp, Glycine max
ctcgagcgtgcggagagagaaattgagtttccgagataaccagttttctctttgattcatcaatggcaactgcgaggaccgtgaaggatgtttcgcctcacgatttcgtgaaggcttatgcttcctccctcaagcgttccggcaagatggagcttcctgagtggaccgatattgtaaaaacagcaaaatttaaggagttggctccatatgatcctgactggtactacattagggctgcctcaatggcaagaaagatctatttgagagg

SEQ ID NO: 149927 - DNA, 228 bp, Glycine max
ctttgtacctggctctgctgatcccagtgatagttggaatagctgcaaggttaatatgagcaactgctcgcctgatcaactaagtaaattgcaaggcttcaagagtgaattcgaaagggcattgagtgaggtaggagattctccatctaaaggaatgtttattgactcttgctatgcccactgccaaacagaaccacaggagacatggttaaagactgactctcaaaa

SEQ ID NO: 149928 - DNA, 271 bp, Glycine max
atttccttgatatcttagttatctaattacctcaattaatcccttaattgcaagcatcatggctgaggagaaacaccaccaccacttccaccaccacaagggcgatgatgtgcctggcgaggttgattataagaaggaggagaagcaccacaagcatcttgagcaccttggggaacttggtgctgcggctgccggtgcttatgccttgcatgagaagcatgaggccaagaaagacccagagcatgctcacaggcacaaggtagaagaggag

SEQ ID NO: 149929 - DNA, 283 bp, Glycine max
cgcgaagagaagagatcaattaagatggaatggaaggagcaggatgtgtcgctgggagcgatcaagttcccggagagacagccgattgggacggcggcgcagagccaagacgacggcaaggactaccaggagccggcgctggcgccactggttgacccgacggagtttacgtcatggtccttttacagagcacggatagcagagtttgtggccacttatctgtttctatgcatcactgtcttgaccgtcatgggagtcgccggggctaagtctaagtgcagta

SEQ ID NO: 149930 - DNA, 267 bp, Glycine max
agggtttgtagtgtagcaggaacaagcagcaatggcgccgaaggtaacacgcaaggttagcagaaaccccgaattgataaggggaattggaaagtactcgaggtcgcagatgtaccacaagaggggcatttgggctatcaaggccaaaaatggtggcgttttacctcgccacgaccctaaacccaaacctgaaacacccgctgaaaaaccacccaaattttaccctgctgatgatatcaagaagccccttgtcaacaagcacaaacc

SEQ ID NO: 149931 - DNA, 272 bp, Glycine max
gactagttctagaaaggctacaaattctcagtgctgatctcagcaatccagaaagttttattgcttccattgaagggtgtatgggagttttccatgttgctacaccagtcgactttgaattaagagaaccagaagaagtagtgaccaaaagatccattgaaggtgcacttggcattttgaaggcatgcctcaattccaagacagtgaagcgagttgtttacacctctagtgcctctgctgtcgataacaataaagaagaaattatggatgaa

SEQ ID NO: 149932 - DNA, 283 bp, Glycine max
aactgctgtgccagtatggtacaatatggtgaagcaaaatcttgtaagcgaacaggtgttctctttttggctcaatggtgatccaaaagtgaaaaatggtggtgaactagtttttggaggtgttgatcctaaacacttcaaaggagaacatatctatgttccagttactaaaaagggttactggcagattgaaatgggagattttttcattggaggtctctcaacgggtgtttgtgagggtggctgtgctgctattgtggattcaggaacatctttgcttgct

SEQ ID NO: 149933 - DNA, 222 bp, Glycine max
ctcgagccgaggaaaggaaacaaaacgcacaaaggattattatagcaatggcagaacaaaaccaaaaccagacaactgaagctggaaggcaccaagaggttggccacaagagccttctccagagtgatgctctttaccagtatattctggagaccagtgtctacccaagagaacctgaatccatgaaagaactgagagagttgacagcaaagcacccatgga

SEQ ID NO: 149934 - DNA, 109 bp, Glycine max
gaaactttcctattcacatctgaatcagtgaacgaggggcaccctgacaagctctgtgaccagatctccgatgctgtgctcgatgcatgcttggatcaggaccctgaca

SEQ ID NO: 149935 - DNA, 267 bp, Glycine max
caagaagcgaaccacaacagactgagtcttgtcgaccggttcacggagtcactgcactattattcaaccctattcgactcgctggagggttcgcctgtgaaccctaacgataaggccatgtcggaggtttacttagggaagcagatctgcaacgtggtggcgtgcgagggaatggaccgcgtggaaaggcacgagacgctgaaccagtggcggaaccggttcgtttcgaccggattttcttcggtacactggggttcgaacgcgtac

SEQ ID NO: 149936 - DNA, 264 bp, Glycine max
acaccctgagcttccttgggccgaagcccatccccatgaagcacgcgggcatgcctccgaagcccacgaagctttacagaggggtgagacagaggcactggggaagctgggtggctgagatcagacttcccaagaaccggaccaggctgtggctgggaaccttcgacaccgccgaggaagccgctctggcatacgacaaggccgcgtacaagctccgaggtgacttcgccaggctcaacttcccaaacctgcgacaccagggtt

SEQ ID NO: 149937 - DNA, 265 bp, Glycine max
tttagatctatccactcacctgcctcttcctcacccctttctccatctaacgagtaaggaaaaatggcgcgtaagaagatcagagagtatgactcaaagaggttgttgaaggagcactttaagagactttctggcaaggagttgccgatcaagtctgcacaaattactgcatcaactgatttcactgagctacaagagaaggaaccctggctttcatcttctaaattggttgtgaaactgacatgttatttggaaagcgtggcaa

SEQ ID NO: 149938 - DNA, 222 bp, Glycine max
ggaatgaactttatcatgatttacccagcaagcagctcaaggtcaaagctgctgacagaacggctgttgttacaacaaatgcagaaactgtggttgtgagccctccgggtctacaagaaggcataaatgaagaaactgctaaggaccctcaaggtcgatgctttgtgcgaccatctggcactgaagatgttgttcgtgtgtatgctgaggcatccacacagg

SEQ ID NO: 149939 - DNA, 273 bp, Glycine max
aattcggctcgatctactgtcgtgtgtcattctgtacctttttagctcttctttgaatgatagtgatgctggatatttcaattaagactctctaggtgaagattggacttcgagttcttactcgcccggtgcccaaccaattacctacggtttatcggactcttggagagagttatactgcaagggtttcaccttcaatcatacatgaaactttgaaagccgtggttgcccgttacaatgccagccagcttatttatcagcgagaggctgtta

SEQ ID NO: 149940 - DNA, 259 bp, Glycine max
cttccctggcggcttccaccgcggctatgtcagaaatccttggaaaccccgttaacctcagatgcgcaaccaggtctgctccatcaccaactacacctgccaccttcaagaccgtcgcacttttctccaagaagaagccagctccacctccaaagaaaaagcctgccgctgtatcccccgccaatgaggaactcgccaagtggtatggtcctgacagaaggatcttcttgcctgagggtctcttggacggatctgagat

SEQ ID NO: 149941 - DNA, 268 bp, Glycine max
tcctttcatcaatggaagccctcagaacacctttgtcccaggactcattgatctggccatcaaaaggaatagtttgattggaggagatgactttaagagtggtcagaccaaaatgaaatcggtgttggtggatttcctagtaggggccggcatcaagccaacatctatagtgagttacaaccatttgggaaacaatgatggcatgaatctctcagcccctcaaaccttccgctcgaaggaaatttccaagagcaatgttgttgacgat

SEQ ID NO: 149942 - DNA, 276 bp, Glycine max
attgtttgttgttgtaactcgttcttcttcttttgttgttctgtgtttgtgtttgttttttctctcacctgaaaatgtcttgctgcggtggtaactgtggttgcggaagctcctgcaagtgcggcaacggctgcggaggctgcaagatgtacccagacttgagctacactgagtcaaccaccaccgagaccttggtcatgggagtggcacctgttaaggctcaatttgagggtgctgaaatgggtgtgcccgctgagaacgatggctgcaaatgtg

SEQ ID NO: 149943 - DNA, 111 bp, Glycine max
ccgaagcccttcagcaaccatgtcgaggagaaaggttagggagccaaaggaggaaaatgtcactcttggtccagccgttagagacggtgaacatgttttcggcgtggctcg

SEQ ID NO: 149944 - DNA, 259 bp, Glycine max
aagaaagattgcagggtgagcttggaggggtgtagagaaggtgtgaaggggcctatgactattgctgctgaggtttttgagttgacaccttccttggtggtggtggaggtcaagaaaaagggaggggataaggccgagtatgagaagttttgtaactctgagttgagacccgcgttggagaatttagggatggaggaatctgcttcttcttcttcttcttgtcatcaatctacacacactcaatctgaattccaacaac

SEQ ID NO: 149945 - DNA, 261 bp, Glycine max
gtcaaaaaggactacatgtgtctgtactgcaatgatcgatgttatccattcagcagcttggaagcagtcaggaaacatatggaggcaaaaagtcactgtaaagtgcattatggtgatggtgatgatgacgaggaggtagaattagatgaattctatgattatagcagcagttatgtggatgcatcaaggcaagcagcttgttgcatcttgtgatgcatctaacaatgtagaacttgttggtgggtctgagctcataatcac

SEQ ID NO: 149946 - DNA, 160 bp, Glycine max
cggatatacaacctgtgcagctagtggacctgggcattgcaagataaacaatggaggttgttggcatgaagctaggaatggacatgcatattctgcttgttcggatgatggaggggttaaatgcaagtgtcctgcaggctttaaaggtgatggtgtcaaa

SEQ ID NO: 149947 - DNA, 265 bp, Glycine max
gttgaaacaagccaaattgaatctaggcaaaactataaatgaacttggggagatacagtcctctgttgaatctttgaataagaagatgaagaaggagaaactttttctggagaggacaacgcgaaaagctagcaacaaagtttgcagcagtatctgctcaagagagggtccaagagcaaacaagattagatccaccagcacctcatgtagagttcaattttggtaacactgcaaataatttcaattctgattctaggcagtgcaa

SEQ ID NO: 149948 - DNA, 250 bp, Glycine max
agatgatgaccctatattagagcaagcaatagggacggagattgagtggcatccaggaaagtgtttgacacataagattcttaagaagaagccaagtaaaggatcaaagaatgctaaacccatcacaaaaacagaaaaatgtgaaagtttcttcaactttttcaatcctccccaggtctcagaggatgatgatgatattgatgacgatgctgtcgaagagctcgagaatttgatggaacagattatgaca

SEQ ID NO: 149949 - DNA, 236 bp, Glycine max
attatgataaccctagcaaacctatttacctgtatattaattcatctggaactctgaatgagaagaatgagaccgtgggatcagaaactgaggcatattccatagctgatatgatgtcttatgtcaaagcagatgtttatactgtgaattgtggcatggcatttggtcaagcagcaatgcttctgtcgcttggaacaaagggttatcgtgctgtacagccaaattcatctacaaaa

SEQ ID NO: 149950 - DNA, 225 bp, Glycine max
gcagatcttcgttaagacactcaccggcaagaccataaccctagaggttgaaagctccgacaccatcgataacgtcaaggccaagatccaggacaaggagggtatccccccggaccagcaacgtctcatcttcgccggaaagcagctcgaggacggacgcaccctcgccgactacaacatccagaaggaatcaagccttcacctcgtcctccgtctccgtggtgg

SEQ ID NO: 149951 - DNA, 142 bp, Glycine max
ggctattgagatcctcaagctcatgtcctccactttcctggtcgccctttgccaagccattgacttgaggcatttggaggagaatttgaagaacacggtcaagaacgttgtgagtcaagttgctaagaggactctcaccaag

SEQ ID NO: 149952 - DNA, 238 bp, Glycine max
cacctttctatcttttccatcagagcattatttgataccctctctgcagcaacgcatttttcctcattctcttaaacactttctcttttctccttcgtttgatctgcattaaaattgcataaatatataaaaaatgagaagtttgtactcaagttagatttgcatgatgacaaggataagcagaaggccttgaaaacagtttcaactctttcaggaattgatgccatcgccatggata

SEQ ID NO: 149953 - DNA, 234 bp, Glycine max
gcagcactggagctgctaaggctgtaggaaaagttcttccagcgctgaatggtaaattgactggaatgtccttccgagtccccactgttgatgtttcagttgttgacctaactgtcaggctagagaagccagcacctatgagcaaatcaaagctgctatcaaggaggaatcagagggcaaactgaagggtattttgggatacaccgaagatgatgttgtgtctactgattttgt

SEQ ID NO: 149954 - DNA, 230 bp, Glycine max
attccacctcaaagcaacactagaacactctcttgaacattcatggatccagtgagcgtgtggggtaacacgcccttggcgacggtggatcccgagatccatgacctcatcgagaaggagaagcaccgccaagccgcggcatcgagctcatcgcctccgagaacttcacctccttcgcagtcatcgaggccctcggcaccgccctcaccaacaaatactccgagggcatg

SEQ ID NO: 149955 - DNA, 233 bp, Glycine max
cacgacggaagaaagcacggcgcagctcaaaaaaccaaatggaagcacaaagctctcagcatacacaagttattgagatcagtggtgattttcctgatggtggaaggaagatttgtggggaagcaccgtgtggtttgcagatgctggatccatctctaaggattctgaagaaagatcaacttctatgcgaaagcttttcatggcagtggtcctttgtgttattttcatgactg

SEQ ID NO: 149956 - DNA, 233 bp, Glycine max
gttcttgtaggtactatttgaaagatgctgtccttgaagggggtattccatttaacaaagcatatggaatgacagcctttgaataccatggaacagatccaaggtttaacaaggttttcaacaaggggatggtgatcactccacaatcacaatgaagaaaattcttgagacctacactggctttgagggtcttaaatctctggttgatgttggtggaggaactggagccgtag

SEQ ID NO: 149957 - DNA, 235 bp, Glycine max
tggtttctctgtgtttgctggtgttggagaacgaacccgagagggtaatgacttgtacagagaaatgattgagagtggtgtcattaagcttgatgataagcagagtgaaagcaagtgtgctcttgtgtatggtcaatgaatgagccccctggtgcccgtgcccgtgttggtcttactgggcttactgtggctgaacacttccgtgatgctgaagggcaagatgtgcttcttttcg

SEQ ID NO: 149958 - DNA, 240 bp, Glycine max
actttctgcgcttcttggcggcgacgcggcggcggcggcgtcttcgccggagagttctacttctagagtctcctccttccactcgtcgccgcgctggcagctctacttcaacgagatcaaagataccgataagctcgtgtgatagatttctcggcgtcgtggtgcggtccttgcaaattcatagagccagcgattcacgccatggccgacaagttcaacgacgttgacttcgtcaagatc

SEQ ID NO: 149959 - DNA, 241 bp, Glycine max
gaaaaaagagaaacaaatggcagcactgggtggctttaccgacatcaccggagcacagaacagcatcgatatcgaaaatctcgctcgctttgctgttgatgaacacaacaaaaaagagaatgcagttctggagtttggagggtgattagtgcaaagaaacaagtggtttctggcaccttgtactatatcactttggaggcaaatgatggtgtgacgaaaaaggtttatgaaactaaggtgt

SEQ ID NO: 149960 - DNA, 219 bp, Glycine max
atttttgtttctcctagggttaagcggtgagatttgcgaatctgagaaatggcggattcttctcgggaggagaacgtttacatggcgaaattggcggacaggccgagcgttacgaggagatggttgagttcatgagaaggttgcaaagactgtggaggttgaggagttgacggtggaggagaggaatctcctctctgtggcttacaagaacgtgattgg

SEQ ID NO: 149961 - DNA, 233 bp, Glycine max
tggagaaccagagagaaatgatatggttgagtacttcggtgagcaattgtcaggctttgccttcactgttaatgggtgggtgcaatcctatggttcccgttgtgtgaagccaccaatcatctatggtgatgtagccgcccaaagccaatgactgtcttctggtcatctctggctcagagctttaccaagcgcccaatgaagggaatgcttaccggtcctgttaccattctcaa

SEQ ID NO: 149962 - DNA, 230 bp, Glycine max
ccatctccaatgccagacagctggaagctgagggagatatttgccactggtgttgtgctaggagcttacatggcactaatgacagtagtatttttctggctcatgaaggataccgacttcttctcggacagttcggtgtgaggtctataaggaacagccccggagaaatgatggcagccctgtacctacaagtcagtattataagtcaagcactaatttttgtgacaagg

SEQ ID NO: 149963 - DNA, 231 bp, Glycine max
ggaaacaagtcgtttgagcagacctgctttctggatgttaagggatactgtcgtgaagagaggagccacgaagggcttggaatgggtggttctgttgtctaccaaaaattcgggaagactagtgactgtggtcacctagatcaactctaaagtgctggaatgaggaagatgaggaagagtagtttccttaagtgtctttattattctgtccttgtgaaaataagtctggtt

SEQ ID NO: 149964 - DNA, 236 bp, Glycine max
tctctgtttccttcttcaccgcatcaatgctgctggacggcgttctcctcggcatgtgcaaccctctcctcgacatctctgccgtcgtcgacgacgctttcttgcaaaaatacggtatcaagttgaacgatgcgttctcgctgaggataagcacaaacctatgtatgaagaattggctaacaatcctaatgtggagtacattgctggaggtgctactcagaattcaatcagggttg

SEQ ID NO: 149965 - DNA, 240 bp, Glycine max
cttcttcgtctcaaatctcttcgttccttcgattcgttccatttcttccaaaatggccaaagacccagttcgcgttctcgtcactggagctgcagggcaaattgggtatgctcttgtccctatgattgctaggggatgatgttgggtcctgaccagcccgtgatcctccacatgcttgacattcctccggcagcagagtcattgaatggggttaaaatggaattggtggatgctgcattc

SEQ ID NO: 149966 - DNA, 104 bp, Glycine max
gaaagaaagagatgctattatgggagaatttcgtgctggaacaacccgtgtactaataacaactgatgtttgggcccgtggtcttgatgtacagcaggtttctc

SEQ ID NO: 149967 - DNA, 226 bp, Glycine max
gaagcacaatttctttttctctctttttttgtgtgtccaaaatggctcctagttctgctcacaacaatgggttctatgtgcttatgctagttgggatagtggttagcactatggttgctacctgtgcggtagcttctaccaagactttgatctaacatggggtggtgaccgtgctaagatattcaatggtggccagcttctatcactttccctagacaaagtctct

SEQ ID NO: 149968 - DNA, 229 bp, Glycine max
ggcatgcaaaggctaggatcaatgcaggggctaacttctatatcgttggtcgtgaccccgcaggcatgagccatccagttgagaaaagagatctgtatgatgctgaccatggaaagaaagtattgagctggcaccgggactagagcgtctaaacattcttcctttcagggttgctgaaatgacaagacttcagggtaaaatggcattctttgacccttcaaggcctcag

SEQ ID NO: 149969 - DNA, 225 bp, Glycine max
tgtttttcgtggtctcaccgtcgcgcttatgatacttgttgatgatgctggcggactcattcctgcactcaatcattcaccatggaatggtttaacgctagctgattatgtcatgccatttttcctattattgttggtgtttcgcttgcactcacatacaagaaactgtcttgcggagttgatgcatctaggaaagcaagtttacgggctctaaaacttcttgtg

SEQ ID NO: 149970 - DNA, 236 bp, Glycine max
  unsure (1)..(236): unsure at all n locations
tattattcagattttagagactgaaaacatcatggccaacctcgacctcgacccattccagacaagcatcttaacactcgtcccaatagcactcctggtggcgttactatctcgtactcgtcgaagagcacccacccaccaggcccaaagggtttaccaatcataganaacatgttaatgatggagcagctaacccaccgcggcctcgccaacctggccaaacactacggcggcat

SEQ ID NO: 149971 - DNA, 230 bp, Glycine max
tttaccatcaactatcactgtaagtgattttaagacgtattttgatcagtttggtacaattactgatgttgtagttatgtatgatcataatacacagaggccaagaggttttggcttcatcacttatgatctgaagaagctgtggatagagttctttacaaaacttttcatgaactcaatggaaagatggttgaggtgaagagggcagttcccaaagaactttcccctgg

SEQ ID NO: 149972 - DNA, 230 bp, Glycine max
accgagcagccacacctcccgcagcagccatggttctcaaaactgaactatgccgattcagtggtgccaagatctacccaggaaagggcatcatatttgttcgtggtgattctcaggttttcctgtttcaaactcaaaatgtaagaggtatttccacaatcgcctgaagccttcaaagctcacctggactgcaatgtacagaaagcaacacaaaaaggacattgctcaag

SEQ ID NO: 149973 - DNA, 224 bp, Glycine max
gtttgttgttgtaactcgttcttcttcttttgttgttctgtgtttgtgtttgttttttctctcacctgaaaatgtcttgctgcggtggtaactgtggttgcggaagctcctgcaagtgcggcaacgctgcggaggctgcaagatgtacccagacttgagctacactgagtcaaccaccaccgagaccttggtcatgggagtggcacctgttaaggctcaatttg

SEQ ID NO: 149974 - DNA, 226 bp, Glycine max
aacagcacaaagcgggttactgtctgttcaagctaccatctctctctctctttcttagtgcctccttgccagaagttaaaatggcccaagaaactttcctattcacatctgaatcagtgaacgagggcaccctgacaagctctgtgaccagatctccgatgctgtgctcgatgcatgcttggagcaggaccctgacagcaaggttgcctgtgaaacctgcaccaag

SEQ ID NO: 149975 - DNA, 226 bp, Glycine max
gtttacaccgagcagccacacctcccgcagcagccatggttctcaaaactgaactatgccgattcagtggtgccaagatctacccaggaaagggcatcagatttgttcgtggtgattctcaggttttctgtttgcaaactcaaaatgtaagaggtatttccacaatcgcctgaagccttcaaagctcacctggactgcaatgtacagaaagctacacaaaaaggac

SEQ ID NO: 149976 - DNA, 132 bp, Glycine max
ctcataacacaaagcacaaagcaaagctcatccttgagttaaaaaatggcagcagcttcttccatggctctctcatccccatccttggctggcaaggccgtgaagctgggcccatcagccccagaagtggaa

SEQ ID NO: 149977 - DNA, 129 bp, Glycine max
gtggagcaatatgctcacttgggattacgtacattatgtttggcttggcgtgagttaaagagagatgaatatcgagaatggtctttgatgtttaaagaggccagtagcactttggttgataggggtgga

SEQ ID NO: 149978 - DNA, 224 bp, Glycine max
caacagctgtttacgtgtatttgtattcagtatactactactatgtgaagacgaagatgtcaggcttcttccaaaccagcttctattttggatacactttgatgttttgtcttggactgggaatctgtgtggagctgtgggttatcttggttcgaatttgtttgtgaggaggatctacagaaacatcaagtgtgactaaggcttttgtaggagtctgagaccag

SEQ ID NO: 149979 - DNA, 219 bp, Glycine max
gagaaataggcagatagataaaaagagcgacttttgagttcaaaagatgactaacttcccattgatcaacttggagatgctcagtggtgaggaaagaaacgataccatggaaaaaattaaaatgcttgtgaaaactggggattctttgagctggtgaatcatggcattcctcatgacatattgatcgctgtggagatgttgaccaaagagcactacagg

SEQ ID NO: 149980 - DNA, 221 bp, Glycine max
aaaaggagcatcgagtaggtttcctactcccttctcatcgttggcaagatgagtgccatgaaattttgccgtgaatgcaataacattctgtaccctaaggaagacagagaccagaaagttctctcttcgcttgccgcaactgcgaccatcaggaggttgctgataacttctgtgtgtataggaatgagatacatcactctgttggagagcgcactcaggtg

SEQ ID NO: 149981 - DNA, 224 bp, Glycine max
attcgggctttccgctggagtcggagttggcaacgctttggtgttggagatcgtgatgaccttcggtttggtgtacacagtctacgccactgccgttgaccccaagaagggcaatttgggaatattgctcccatcgccattggtttcattgttggcgctaacattttgttgggtggggccttctccggagcagccatgaaccctgctgtgacatttgggcctgc

SEQ ID NO: 149982 - DNA, 230 bp, Glycine max
caagaactcgaaatggctccaagagaatctgacggatatggattccaaggtgaagcaaatgatcaagctgatcgaggaagatgcagattcatttgccaggagggctgaaatgtattataagaaacgccagagcttatgaaattagttgaagagttttatcgcgcataccgggcattggctgagagatatgatcacgcaactggagtgatacgtcaggcccatcatactat

SEQ ID NO: 149983 - DNA, 236 bp, Glycine max
tctggtcatcgttgggatctccatacgccggatctgctaaaatacgcttgatccatatgggcctcctcgaccacttgtgggacgacaccgtcgccggcccaaggccgaaaacggtctcggcaagctccgaaaacaccacaccttcactttccgacctagctccggcaaggaaacggagggcgggagcgtgagatcgtacggagacgaatcgtcggaggaagcgacgagagtgacgc

SEQ ID NO: 149984 - DNA, 234 bp, Glycine max
gttcttttcataaacaacaacattttaactcaagggttgcctgataacttagcctccactcatattctcttactcaccttagcaaacaacaagttcatgggtccaattccaagaagtcttcctaaggctttgtccactctaagtgaagtgcttttactaaacaaccagttaactggttgtttgccttatgagattggttttcttgaagaggcaacagtgtttgatgctggcaac

SEQ ID NO: 149985 - DNA, 234 bp, Glycine max
cacaacgccatcgccaaagggtttcagcaggttgaaataagtgatttgttataatcaacatgtcatctccaagcaagagaagagaaatggatgtaatgaaactgatgatgagtgattatacagtggagacgataaatgatggactcaatgagttcaatgtggagtttcatggtccaaaagaaagcctttatgaaggtggagtctggaaaattcgggttgagcttcctgatgctt

SEQ ID NO: 149986 - DNA, 228 bp, Glycine max
gttatgctgatcttgtggaagagttttctcttggggatgggaagattgtgaagattactggtattaaggagatggggaagaccaccactgtgcttgtacgtgggtctaatcagcttgtgctcgatgaggctgagcggagtttgcacgatgctttgtgtgttgttaggtgtttggttgccaagaggtttctcattgccggcggtggtgcccctgagattgagctctcca

SEQ ID NO: 149987 - DNA, 231 bp, Glycine max
accgaatgagagcatcaaactcttcttcttcgatttccattgcgaacgttactttttcttcttctttctcttcattttcttcgctcttcgatcttcgtccggggactgctccgaataccaccaccaccactcgccgatggccacgatcggaggcttacacgactcccaaggctctcaaaacagcgtcgaaaccgaagccctcgctcgattcgccgtagacgaacacaacaa

SEQ ID NO: 149988 - DNA, 230 bp, Glycine max
ccgctcgagcggctcgagcagtaccttccaggagattgctggaagcaaggacactgttggacagtatgagtctcacacagcctttacccctcctggactctaccgtgttgtgcacggcattgatgtctttgatccaaaattcaacattgtctcccctggagctgatcaaaccatttacttcccccccaccgaaactagccgtaggttgacctccttccaccccgaaatcg

SEQ ID NO: 149989 - DNA, 235 bp, Glycine max
gcattcctaacataaaatggtccggcatagatggggaggataatgtgcttgttattgacttgcttgggccgagtcttgaggatctctttgtgtattgtggaaggaagttttcattgaagactgtattattgttggctgatcgaatgatcactagaatagaatatgtgcattctaaaggatttttacacagggatattaaaccggataactttctcatgggacttggtcgaaaggc

SEQ ID NO: 149990 - DNA, 239 bp, Glycine max
gggatgatctggaatctcttggttatgtgctcatgtacttcttaagaggaagtcttccctggcagggactgaaggctggcaccaaaaaacaaaaatatgataaaatcagtgagaagacaatgtcaacttcgttagaggggctctgcaagtcatatccctcagagtttgtatcatattttcaatattgccgaacattgcgatttgaagacaagcctgattattcatatttaaagaggctg

SEQ ID NO: 149991 - DNA, 231 bp, Glycine max
ctctttcttcctcttcctcagtagtgcgattttcgattctcttctctgcaactatgcctaaccctaaggtcttcttcgacatgaccatcggcggtcaagctgccggccgcatcgtgatggagctctacgccgacgtgacacagagcaccgccgagaacttccgcgcgctctgcaccggcgagaagggcgccgggcggagcggcaagcccctccactacaaaggctcgtcct

SEQ ID NO: 149992 - DNA, 224 bp, Glycine max
cattcccatattgtcccattcactaagacatggaagccagcgctggactggtcgctgggtcacataaccgcaatgagctagttgtcattcatggccatgaagagccgaaggctttgaagaacttggatgggcaagtgtgtgagatttgtggtgatggcgtgggactcacggtggatggagacttgtttgtggcttgcaatgagtgtggttttccagtgtgcagg

SEQ ID NO: 149993 - DNA, 227 bp, Glycine max
cttgatgaagaacaaattgctgcaaacctagtaaagaatggccctcttgcagttgctatcaatgcagtttttatgcagacatatgttggtggcgtctcatgcccatacatctgtgggaagcatttggatcatggggttcttctagttggttatggtgaaggtgcatatgctcccattcgttttaagaacaaaccttactggatcattaagaattcatggggcgagag

SEQ ID NO: 149994 - DNA, 226 bp, Glycine max
cttctttttactctctctctgtctctctctacgctttctcgttcgagatccctcaagggatccactaactgaaggagaaatggggttgacattcaccaagcttttcagccggcttttcgccaagaaggaaatgcgaattctgatggtgggtctcgatgcagctggtaagaccaccatcctgtacaagctcaaacttggagagatcgttaccacaattcccaccatt

SEQ ID NO: 149995 - DNA, 225 bp, Glycine max
  unsure (1)..(225): unsure at all n locations
gggatgtggcagcactgtacaagtataagaacactgttattgatgttaaacttgacaccgcatcaactatctccacaaccctcacatttaatgacgttcttccatccaccaagactatcgnctcatttaagctgcctgattataattctggcaagttagaggttcaatacttccatgaccatgctaccttaacaacagctgttgcactgaagcaatcccctgtca

SEQ ID NO: 149996 - DNA, 231 bp, Glycine max
ctgagaggaagagagagggagattctttgtttgctaccttctctcggaaaaatggttacgttcaggtttcaccagtaccaggtggttgggagggctcttcccacggaagcagatcagcaccccgggatctaccgaatgaagctctgggccaccaacgaggttcgcgccaagtccaagttctggtattttctgaggaaactgaaaaaggtgaagaagagcaatggccaagtg

SEQ ID NO: 149997 - DNA, 234 bp, Glycine max
agaatatccagttgtaataaccctagaagaccaccttacaccagatcttcaggctaaagtggctgagatggttacccaaacatttggagacatactatttactcctaactcagaaagtgtgaaggaattcccttctcctgaatcacttaagaagagaattattatatcaaccaaaccacctaaggagtaccttgaggcaaaagaaaaggaaaaaggggatgattcacagcacga

SEQ ID NO: 149998 - DNA, 231 bp, Glycine max
gcgtgatttcgcatccgcaggcactcgcgcagtgcgagcacactctcaccaaactcggcctgaacgtggcgcgcgaggccgtggacgacaccgccggcgctgccgagttcgtcgccagcaacaatctccgcgacaccgccgccatcgcgagcgcacgcgcggcggagctctacggcctgaacgtgatggcggacggaatccaagacgatccgagcaacgtcacgcggtttg

SEQ ID NO: 149999 - DNA, 227 bp, Glycine max
caagaccaaggcaatggtagaggatctgctgaagaactatgataatgtgtgcacattgcgagtgaggatgcctatctcatccgatttattgaacccgcgcaattttatcactaagatcactcgatatgagaaggttgtggatattccgaattcgatgactatattggatgaactgcttccaatttcaattgagatggggaagaggaatctgactgggatctggaact

SEQ ID NO: 150000 - DNA, 227 bp, Glycine max
cgtcaacgttagtgctttgtttaggtgaactaattcggagaccttgcaagacttcatcaatggctgtcaaagtttatattgtgtactactccatgtatgggcatgttgagaaactagcagaagaaataaagaaaggggcttcctctgtggaaggtgttgaggccaagttatggcaggtacctgagacactgctggatgaggtgcttggtaagatgagtgcaccaccc

SEQ ID NO: 150001 - DNA, 226 bp, Glycine max
atttgttaaccaggtaaagcgatgtgcagaaatgtcaagaaagctacgattcttcgaggatcaaatcaataaagctggtctaatgtcttctccttcagtcttgcaaacagatatttatctggaggatttagagatacaacttgctgagcatgaacatgagctaattgaaatgaactctaacagtgagaaacttcggcaatcatataatgaactcctggagttcaag

SEQ ID NO: 150002 - DNA, 226 bp, Glycine max
agttaataggtctttatatttagttgttgacatcaacaaagtcatggaggaagttaatgtggttcaaaccaagaatggaactgttgcagtagcttctgcgtttgctggacataaggaagctatacagcaaagggaccacaaatttttaagaattgctgttgaagaagcctataaaggggtagactgtgaagatgggggtccctttggtgctattatagtatgtaat

SEQ ID NO: 150003 - DNA, 234 bp, Glycine max
ctccattttttttcaacaccctttatgacccttacagagaaggtgctgatttcgtccgtggatacccttttagtcttcgtgagggtgcccccactgctgtttctcatggcctctggctcaatatacctgattatgatgctccaacacagcttgtcaaacccctcgagaggaacaccaggtatgttgatgctgttcttaccattcccaaaggaacattgttccccatgtgtggta

SEQ ID NO: 150004 - DNA, 226 bp, Glycine max
ccgttatgttggaccgcattttgcggctcttggcttgctacaatatcctttctttttctctccgtactctccctgatggcaaggttgagaggctctatggtctcgcccccgttgctaagtacctggtcaagaccgaagatggtgtctccattgctgctcttaacctcatgaaccaggacaaagtcctcatggaaagctggtactatttgaaagatgctgtccttga

SEQ ID NO: 150005 - DNA, 218 bp, Glycine max
ccaaacgacagttgcgtcagaactacgctgtagaatatcatcaccatcaaagtgtttcgttggaaggggaatttggcagatcattggaagaaaatggcgggtggtggaaaggtttcgttcaaagtcacactcacctccgatccaaaattacccttcggagtgtttagcgttccagaggctgcgccttttactgccgttctcaaattcgccgccgaaga

SEQ ID NO: 150006 - DNA, 224 bp, Glycine max
atttgaagtgacatcatgaatatggaggggcagaagaaaaacaagagggtggctgttttggtgggttgcaattaccccaacactagcaatgaattgcatggttgcataaacgatgtgttggcaatgaaggacacgctggagaagcgctttgggtttgatccctctaacattgagcttctcactgatgcacctcactcttctaataaattgcccactggtgctaa

SEQ ID NO: 150007 - DNA, 230 bp, Glycine max
caaggatatccagtctctacaggaggaactgacagctgtttctcagaagagggacaaggcttttgagagcatgcagcagctaagaaaacagcgcgaggaggggaacacctatttctaccaaagtcgtacagttctgaacaaagcacgggagctggctgcaaagagcgatattaatgctcttgatgaagtttcacagacagaggttgagaaatttatggcactctggaaca

SEQ ID NO: 150008 - DNA, 223 bp, Glycine max
gtggcagtgggaaggttgtggacagtggtcctgatgatcatatatttgtatactatactgaccatggaggtcctggggtgctcgggatgcctgctggtccttacttatacgcggatgatctgattgaagtcttgaagaaaaagcatgcttctggaacatataaaaacctagtattttatctggaggcatgtgaatctgggagtatctttgaaggtcttcttcc

SEQ ID NO: 150009 - DNA, 227 bp, Glycine max
gaggatttgaagcaatatgagcctgtttaccaaattcggtttacgaaagaactctttcaagattatcatgattatttgaagcaattgaatctataccgccagagggtttggatgtgtaaagtcactggaaaaactggcttgacttatgaagaggctttggtgtctgaacaacttgctaccgagaaagttcaacagtttcctaaagaactgatgactgttgctttaag

SEQ ID NO: 150010 - DNA, 226 bp, Glycine max
gagtggtttcagtgagtgatcggtgttcacttgatccttcataagtcgtcatcatcatcatcatcatcaccgttgattgaagaagatgccgatcagaaacatcgccatcggaaggcctgaagaggctactcaccccgacacgttgaaggcggggttggctgagttcatctccaccttgatcttcgtgttcgccggttcaggttccggcatcgcctacaacaagctc

SEQ ID NO: 150011 - DNA, 223 bp, Glycine max
caagattgacaggcgatccggcaaagagcttgagaaggagcccaagtttttgaagaacggtgatgctggttttgttaagatgattccaaccaaacccatggttgttgaaactttctccgagtatcctccacttggtaggtttgctgttagggacatgcgtcaaactgttgctgtgggagtcatcaagaacgttgagaagaaggatcctaccggagccaaggtc

SEQ ID NO: 150012 - DNA, 225 bp, Glycine max
gttgtaactcgttcttcttcttttgttgttctgtgtttgtgtttgttttttctctcacctgaaaatgtcttgctgcggtggtaactgtggttgcggaagctcctgcaagtgcggcaacggctgcggaggctgcaagatgtacccagacttgagctacactgagtcaaccaccaccgagaccttggtcatgggagtggcacctgttaaggctcaatttgagggtgc

SEQ ID NO: 150013 - DNA, 226 bp, Glycine max
gtgcgagcaccacaaggggaagaagaggaagatcttccggcaagtgttctggtgcttagtggtgttccttttcatcgtgctggtcacaattcttttgatatgggcaatccttagacccaccaaacccaccttcacgctccaagacgtcaccgtctacgccttcaacgccaccgtggcgaacttcctcacttcgaattttcaggtcacgctcatctcgcgtaacccg

SEQ ID NO: 150014 - DNA, 242 bp, Glycine max
ctcgaagcacaattagcaaagaacagtgtcccagatggtaaatttactgggagatgagaacacaactgcaaattacctgagcaagtgcatttattcaattggaatgggtagcaatgattaccttaacaactatttcatgccgcggttctattccagcagcaggcaattcacaccacagcagtatactgacgtgcttgttcaagcatatgctcaacaactgaggattctttacaaatatgggg

SEQ ID NO: 150015 - DNA, 224 bp, Glycine max
aaatcaaggaactcagctatgactaccagagaaatccttcaaaagatgaaggtaaaagttggtttgggttcatcagaccctgactcagggaaaggaaagagcaagatgtcaaagaacataactcatggttatcatttggtgaaaggaaaatcatatcatgacatggaggattacgttgtggctcaatttaagcaaatagataacaatgaattgggtttgtttgc

SEQ ID NO: 150016 - DNA, 219 bp, Glycine max
tgctcatcaagtccaagaaccaacctaccttttgcaatctcaattcaatggcgtcctctctcattgcgaacgcttcctctcctcttccctcctctccaggtccctccttcgccccgccgcttccgcttcccaccgctctttcaacaccaacgccatgcgccagtatgacaaccgcgccgacgaccacagcaccgacatcgatcgtcactccgaacgctc

SEQ ID NO: 150017 - DNA, 221 bp, Glycine max
gatagaagcgtaacagcggttaccctaacctcgtcttcctctctactaatttcagctatggccgacgaagctgtggttgttccagatcccacccagatcgatgtcaagctctttaaccgctggagcttcgaggatattgaggttactgacatttcactggctgattacattggagttgcggcatccaagcacgccacatatgttcctcacaccgccggaag

SEQ ID NO: 150018 - DNA, 222 bp, Glycine max
aacggcaagactttcaatcaggttgaaatcaaacccgagatgattggccattatctcgctgagttctctatttcatataaacccgtcaagcatggtaggcctggtattggtgccactcactcttccaggttcattcctctcaagtgaaagccttaccgaaactcttgtcagattttctttttatttaagcattttatttttcacttgtctgtctatcatgac

SEQ ID NO: 150019 - DNA, 214 bp, Glycine max
atggaacaggaatggttaaggctggatttgctggagatgatgccccacgtgctgtgtttcccagcattgtaggtcgtcctcgtcacactggtgtgatggttggcatgggccaaaaagatgcatatgttggtgatgaggcacaatctaagaggggtattttgactctcaagtaccccattgaacatggaattgtgagcaattgggatgatatgga

SEQ ID NO: 150020 - DNA, 227 bp, Glycine max
aatcagagctcagcgataagcagaaagtggagatcgcgaaatggttcctcctcaactctcctcccggagaaatccaatacgttgccaaagatgtgaaatcgattctcaacaacgacgatttgtacaaggaagccgcttccgaggcttttccctattacaacaaatcgcacttgatttccattccaatgcccaaccgaagcggagacgtactggttacttcgttcggt

SEQ ID NO: 150021 - DNA, 243 bp, Glycine max
ctggcatcagtggggctccccaagacaataatattatgctttggaatgctgttatctttggaccagatgacaccccttgggatggaggtacgtttaagttgacacttcagtttacagaggattatcctaataaaccacctactgtgcgttttgtttctcgaatgtttcatcctaacatttatgcggatggcagtatatgcttggacattttacagaatcagtggagccctatttatgacgtag

SEQ ID NO: 150022 - DNA, 241 bp, Glycine max
cctcgctctatttctcagtctctgtgtttgcggctgaggattccgaacgagtgaccttcagtcgttctcgcaaagtttaagtaatcatgggtaaggaaaaggttcacatcaacattgtcgtcattggacatgtcgactctgggaagtcaactaccactggtcacttgatctacaagcttggaggtattgacaagcgtgtgattgagaggttcgagaaggaggctgccgagatgaacaagag

SEQ ID NO: 150023 - DNA, 232 bp, Glycine max
cgaatccccaataaggccattattagttctagggagatttcatcaaacagtactgcatctgatgatagacgatttgtgagacacatcattactttttcaaagatctggagcagcgaacaagaatacaacggtcgatgctcgttatgcagcagaaaacagatctcgcaagatggcagaatatgtagcatttggaggcctgtgtgtcctgttggatatatatatattggggata

SEQ ID NO: 150024 - DNA, 239 bp, Glycine max
attttaatttcctctcaaaccctaaccctaaccctaaccctccccgtcacaaaagaaaaccctctttgtccgatcatcgtcgtcaagatgttggaactccgtctcgtgcaaggctccctcctgaagaaggttttggaatccgtcaaggagctcgtgaacgacgcgaacttcgactgctcctccaccgggttctccctccaggccatggactccagccacgtcgccctcgtcgctctcct

SEQ ID NO: 150025 - DNA, 237 bp, Glycine max
agagaagagagtttcaagaatggggagcgaagaggagaagggtgaattctacttgcgatactacgtgggccacaagggcaagttcgggcacgagtttctggagttcgagttcagacccgatggcaagctccgctacgcgaacaactccaactacaaaaacgacaccatcatccgcaaggaggtttacctcaaccctgccgttttgcgtgagtgccgccgtatcatcgccgagagcga

SEQ ID NO: 150026 - DNA, 238 bp, Glycine max
attccaatatattccattctctctgtgtatttccctacctctcccttcaagatgcagatcttcgtcaagaccctcaccggcaagaccatcacccttgaggtggaaagctctgacaccatcgacaacgtcaaggccaagatccaggacaaggaaggaatccccccggaccagcaacgtctcattttcgccggaaagcaacttgaggacggccgtacccttgctgactacaacattcaga

SEQ ID NO: 150027 - DNA, 237 bp, Glycine max
ctctccgcatcgctgcgttttccgaatcgaaaggtacgtaagtaacaatggtggaggccaagggtaggaaagaggaggtcgtcactcgagagttcaccatcaacctccacaaacgcttgcatggctgcacattcaagaagaaggctcctaaagcaattaaggagataaggaagtttgctcagaaagcgatggggacgaatgatgtgagagtggatgtgaagctgaacaaggctgtgt

SEQ ID NO: 150028 - DNA, 241 bp, Glycine max
caaaacctgaagcctagaaccttcttccgtctcacagtttgccggaatcagcgatggatcctcagcctgagccagttagctacatctgtggagattgtggaatggagaatacgctgaagcctggtgacgttatacagtgccgtgagtgcggttaccgtatcctttacaagaagcgcactcgtcgcattgtccaatacgaggcacgctgaagaaaactgctctgacattggcaagtaatttc

SEQ ID NO: 150029 - DNA, 241 bp, Glycine max
actcgagcgattcggctcgagtgtagatttgtgatacacataaaagccggggcatacttcgagaatgtggaggtaatcaggaagaagaccaatctgatgttcgtcggagatgggattggaaagactgttgtgaaggccagtaggaatgttgtggatggctggaccactttccaatcagccactgttgctgtggttggagacggattcatagcaaagggtataacctttgaaaattctgctg

SEQ ID NO: 150030 - DNA, 241 bp, Glycine max
attggaaggttaaacttggtagaagggattccacgactggctttttcaaccgtgcaaacagtggtgtgcttccaggaccgaattcttccctcagcagccttatccaaagatttgatgatcaagggctctctaccaaggacatggttgcattatcaggagcacacacaattggaaaggcaaggtgtgtcagttatagagatcgcatatacaatgaaaacaacattgacagtttatttgccaa

SEQ ID NO: 150031 - DNA, 238 bp, Glycine max
ctcgagcgtgcggagagagaaattgagtttccgagataaccagttttctctttgattcatcaatggcaactgcgaggacactgaaggatgtttcgcctcacgatttcgtgaaggcttatgcttcccacctcaagcgttccggcaagatggagcttcctgagtggaccgatattgtagaaacagcaaaatttaaggagttggctccatatgatcctgactggtactacattagggctgc

SEQ ID NO: 150032 - DNA, 237 bp, Glycine max
cacgcatttcctcgtttttttcttcccttttctctttctccggcgacgatctcagattccggccactcctctcgccggcgagcccttactcttccctcctccgtcgagccctctccgattcgaatcgttcccagcctcgcaccaccatgaatcccgaatacgattatttgttcaagcttttgctgattggagattctggtgtaggcaagtcatgtcttctcctgaggtttgctgatg

SEQ ID NO: 150033 - DNA, 236 bp, Glycine max
cctttgcaaacatctgcaatgtagggataaagaatgagcaaatggctgaggcctctgcacaagcttgtgtctctattccttccaatccttggagttctctgcaaaggggtttcagtgcataataattcctgtaatgtgcaccagtaaagaccaaagtatgattattgttacattatgctatatgattgtacttgtatatacatattttgtcccgcctttgtaaatacaattgggac

SEQ ID NO: 150034 - DNA, 236 bp, Glycine max
cttcctagtgctgcttcttgcagcccttatcctcatgcctcaagggcttgctacttactacaaaccaattaagaagccaccagtgtacaagcctccagtgtacaagccaccagtgtacaaaccaccggtttataagccaaaaccaccggtttacaagccgaaaccaccggtttacaagccaccatataagaagccaccatacaagaaaccaccttatggaaagtaccctccagtag

SEQ ID NO: 150035 - DNA, 236 bp, Glycine max
aagatctctgtgttgtcatcacacttcgctagatccagccccatcatggcttcagagaagcaagcggctcttgccgtcactccctctgatgctgatgctcctaccatatttgacaagatcatcaataaggagattccttctactgtggtttatgaggatgacaaggtgcttgccttcagggacataactcctcaagctcctacacatattcttatcattcctaaattcaaagacgg

SEQ ID NO: 150036 - DNA, 239 bp, Glycine max
cacttgtcaatcaatgcattgatagggtggccagatcagaccttgaccagatttcatctgaccaagagcttccaaatgaactctcacaaaaagttaaattgctccgccgcaaccctcatcgagatgttgaaaacgatgcttctatagtggatgctttgtctctaaaaagaatcactagaatactcaaggcattggattcagatgatgttgagcttgttaaacttcttttaaatgaatca

SEQ ID NO: 150037 - DNA, 240 bp, Glycine max
gcaagctacaaagatgaggtctcagatacatcttttgtggggaaccttgttgtatgaacgttctgttgtggaatataagcttggccttcccacatgggaggaatcgtttggaggttgcagtcgaaaagtttgaactagctgggacttctgcaacggatattgctttcattgtaaagaatcactgctcaaatgaaacagcacttgaaggattcaaaattgatgagatagtacaggcatgga

SEQ ID NO: 150038 - DNA, 233 bp, Glycine max
ggccaggcaagccccactcaaccaccacacctctcctcgttcacgctacccctttctgctcttcttctacctttcaagttttaaaagtataaagatggcagagacattcctatttacctcagagtcggtgaacgagggacaccctgacaagctctgcgaccaaatctccgatgctgtcctcgacgcttgcctcgagcaggacccagacagcaaagttgcctgcgaaacatgca

SEQ ID NO: 150039 - DNA, 235 bp, Glycine max
ttcttctcttgcggctagggttttagcgcattcttctagatttaaggaagatgggtaaggaaaaggttcacatcagtattgtggtcattggccatgtcgactctgggaaatccactaccactggtcacctgatttacaagcttggaggcattgacaagcgtgttattgagaggtttgagaaggaagctgctgagatgaacaagaggtctttcaagtatgcctgggtgctggacaa

SEQ ID NO: 150040 - DNA, 235 bp, Glycine max
cagaggcattacccttcttcagaggatgggaattggccttgtaatccacacactgatcatgatcattgcatctgggactgaaagctatagactcaaggttgcaagagaacatggggtagttgaaagtggagggcaagtccctttgagcatattcattttgcttcctcagtttatactcatgggaactgctgatgcattcttagaggttgcaaaaattgagtttttctatgatcaa

SEQ ID NO: 150041 - DNA, 240 bp, Glycine max
ctcgagccgaatcggctcgaggtcgtcgcgtgtactttcttgcgacaacagaagggcgaagaggcaaacacaacttttttgattttttgtagagcgagagagaaaaaaatgttggggatcttcagcagttccgtggtgtcgccgccggaggagctggtggctgccggcagcagaacgccgtcgccgaagacgacggcggggaagctgctgaaccggttcgtggagaacaaggcgtcggcg

SEQ ID NO: 150042 - DNA, 237 bp, Glycine max
gaaaccaacattttcgaatggagtgtcaccataattggaccgcccgatactctttacgaggggggatttttcaatgctattatgagtttcccatccaattacccaaatagtccaccttcagttatgttcacttcagagatatggcatcccaatgtatatcccgatggccgggtttgcatatcaattcttcatcctcctggtgaggatccaaatggttacgagcttgcgagtgagcgc

SEQ ID NO: 150043 - DNA, 234 bp, Glycine max
ggcgtcttcataaacgccgcccaaaacttctcatacccgtttattcattccattcgtttctagggttttctattctttgccgagaaaatgagagagtgcatttcgatcccattggccaggccggtatccaggttggaaacgcctgctgggaactctattgccttgaacacggcattcagcccgatggacagatgccgagtgacaagaccgttggcggaggagactacgccttca

SEQ ID NO: 150044 - DNA, 231 bp, Glycine max
aaactgccagccatgccaacaagacattgagaattactgcagcaagaagatctggtcttacaatgatgtttatgtcgatggaaaacccacacagggtggctttgctgaaaccatgatcgttgagcaaaagtttgtggtgaagattccagagggtttggcgccagagcaagtggcaccattactgtgtgcgggtgtgacagtgtacagtccactggtacactttgggctgaa

SEQ ID NO: 150045 - DNA, 229 bp, Glycine max
ctttagccgaggtcaggaggagcactagctaagttcacaatttcaaaatggctaggggactaaagaagcatttgaaaaggctcaatgctcctaagcattggatgcttgacaaactgggtggtgcatttgcgcctaaaccctcatctggaccacacaaatcgagggagtgcctccccctcattcttattctgcgaaaccggctgaagtatgctctgacataccgtgaagt

SEQ ID NO: 150046 - DNA, 228 bp, Glycine max
ggcggtggatatggtggtcgtagtggcggtggcggtggcggtggtggataccgtagccgtgacggtggttatggcggtgggtatggtggtggtggtggtggtggttatggcggtggcagagaccgtggttactctcgtggtggtgatggtggtgatggaggctggagaaactaaggcttgatgtcgtcaattagggtttatgattatgccccgtatttttagttgttg

SEQ ID NO: 150047 - DNA, 229 bp, Glycine max
cattctctctgtgtatttccctacctctcccttcaagatgcagattttcgtcaagaccctcaccggcaagaccatcacccttgaggtggaaagctctgacaccatcgacaacgtcaaggccaagatccaggacaaggaaggaatccccccggaccagcaacgtctcattttcgccggaaagcaacttgaggacggccgtacccttgctgactacaacattcagaaggag

SEQ ID NO: 150048 - DNA, 236 bp, Glycine max
cagatatatatcgtattgctagttgtggcatggataatactgtaaaaatatggtctatgaaggagttctggacatatgtagaaaaatcatttacatggactgatcttccttctaagtttcccacaaaatatgtccagtttcctgtatacaatgcttcagttcatttaaattatgttgactgtaataggtggctaggtgattttatcctctcaaagagtgttgacaatgaaattatc

SEQ ID NO: 150049 - DNA, 206 bp, Glycine max
aggaaatatgccgttacctctataatcatcaaaacaaggatggtgggtggggtttgcatattggaggtccaagcaccatgtgtggctctgtcttgagttatattactctgagattgctaggtgaggggcctaatggtggacaaggggaaatggagaaggcacgtgactggattctagggcatggtggtgctacttatattacgtca

SEQ ID NO: 150050 - DNA, 227 bp, Glycine max
gtttgaaccaacaaaggatggggatatgtgatgcagttgctgtggcaaagatactgaatgctactctggtgattccataccttgaattaaatcctgtatggcgagattcaagctccttcatggatatatttgatgtggatcatttcattgatgtattgaaggatgatatttctatagttaaagagctgcctaaagagttcagctggagcacaagagagtactatggc

SEQ ID NO: 150051 - DNA, 230 bp, Glycine max
gtttcgacctctgttgttgagccttacaacagtgtcctctccactcattctcttcttgagcacactgatgtggctgtcctgctcgacaatgaagccatttatgacatctgcaggcgttcactggacattgagaggccaacctacaccaaccttaatcgtttagtttctcaggtgatatcatcactgactgcttccctgaggtttgatggagccttgaatgttgatgtcaa

SEQ ID NO: 150052 - DNA, 231 bp, Glycine max
cagacatcaggctgatgtttgtcacgcctatcaaatactaaggaaaggtggcctgaaagaagaaaatattattgtttttatgtatgatgacattgcattcaatggggaaaacccaaggcctggagtcatcattaacaaaccagatggaggtgatgtttatgaaggagttccaaaggattacaccggcgaagatgttactgttggtaacttttttgctgctttacttggaaa

SEQ ID NO: 150053 - DNA, 233 bp, Glycine max
tggaaatgcaatgggaccactgaggaggtaaagaagattgttactactttgaatgaggctaaagtccctggagaagatgtcgtagaagttgttgtgagccctccttttgtgttccttcctgttgtaaaaagtttgctgcgccctgatttccatgtttcggcacaaaactgttgggttcgcaaaggtggtgcttataccggtgaggttagtgctgaaatgcttgttaatttggg

SEQ ID NO: 150054 - DNA, 233 bp, Glycine max
cctttcctctccgaaccctcgatcactctcacgcgctcctatattcgctcctccaccgtcgctctctcgaacaaccacaacaccatcttcatcacatggcaaacgcagcatctggtatggcagtccatgatgactgcaagttgaggtttttggagctgaaggcaaaaaggacacaccgtttcatagtttttaagattgaggagcagcagaagcaggtcattgtggagaagctt

SEQ ID NO: 150055 - DNA, 229 bp, Glycine max
ctactgtaggacacctgcagctagctgatcaagataagatcatttctgcaattaaagaagcaggaaatgttaagaagttctatccatctgagtttggaaatgatgtggaccggactcatgcagttgaaccagccaagtctgcatttgcaacaaaggccaaagttcgccgagctattgaggctgaaggaattcccttcacttatgtgtcaagcaacttctttgctggtta

SEQ ID NO: 150056 - DNA, 231 bp, Glycine max
gttctgttttgttctcattctgtgactctgtgcttagttaacgttaacagtgacttaagatggcggattctgcagatgtcacccacgatgttgtgtccctcctctcttctcctcaaagggactttcttcttcgaaacaacggcgatcatgttaaaattgacagcttgaagggtaagaaacttggtttgtatttttcggcatcctggtgtggtccatgtcaaacatttacgc

SEQ ID NO: 150057 - DNA, 229 bp, Glycine max
cttaatttctctctgccttgctcatttacacacctctccaacctttcactttcagctttatttgaatccctctctctcctttccaaatggccagcgttgaggttgcacatcaaacaccaacaacagttccagaaaatgaaacaaccgaggtaatcaagacccaggaaacaaccccggaaccagtaccagccactgaggctcctgcaacagaacaagcagcagctgaggt

SEQ ID NO: 150058 - DNA, 228 bp, Glycine max
tatatatccctatatgtataggactgcctctttaatgaagacagggaatgttcaaggtgcactggctgaaatcaaccggattcttggctttaaactttcgttagagtgcttggaattacggttttttatctatctggcccttgaggactacaaagcagcagtccgagatgttcaagcaattcttaccctgtgtccatcttataaaaaaaaaaaaaaagggcggccgcc

SEQ ID NO: 150059 - DNA, 230 bp, Glycine max
atcatctttacgtgtttgttcgagaccatggccaaaagccccttcaagcttgaacatcccttggaaagaaggcaggctgagtctgctcgcattagagacaagtatcctgatagaatacctgtgattgttgagaaagctgaaagaagtgacatcccagacatcgataagaagaagtaccttgtcccagcagatttgactgttggccaatttgtttatgttgtccgtaaaag

SEQ ID NO: 150060 - DNA, 239 bp, Glycine max
cagaagtatcgtgtggagaacttgtatgagggtcctcttgatgatcaatatgcttctgggctgttgatggagagggtagatgaaatatcatcagcccagaagtatcgtgtggagaacttgtatgagggtcctcttgatgatcaatatgcttctgctatcagaaattgtgatcctgaaggtcctctgatgctctatgtctccaagatgcttccagcatctgataaggggagattttttgc

SEQ ID NO: 150061 - DNA, 237 bp, Glycine max
aaactggattcttcctgaaatgcctgggcttataactgattttctgatttctcttgatgatcggtttaggtatgttgtaaactggcttcatggggatataaggcagtgtaacatcgaggacgttaaaaatcctaaactgactggacaagtatgggttggtggacttatccagaaaggaagccctgtagtagctataactgatgatggtgaaacatggcaagctgaagttccagagat

SEQ ID NO: 150062 - DNA, 233 bp, Glycine max
agccaacacagagaggtacagcaacgtggttgtgggactaaacgacaccatggaaaacctctttgcttccttggacaggaatgaggctgagatttccccttccaccttgtatgccattagcttgtgttatggaaaatgttcctttcatcaatggaagccctcagaacacctttgtcccaggactcattgatctggccatcaataggaatagtttgattggaggtgatgacttt

SEQ ID NO: 150063 - DNA, 236 bp, Glycine max
atcagttggaatcaatcttgatatgtataattcccttggtagtaagaactacaaatttgaacagcatctcatttcaggagtgaaaggagtgggaagaagtgggaagtctcttcattataaagggagcacattccataggattataccgagctttatggtccaagggggtgatttcacccgtggtgatggaagaggtggagaatcaatctatggtgataagtttgctgatgaaaact

SEQ ID NO: 150064 - DNA, 180 bp, Glycine max
agaaaagggtttctctgtctgcttcttcactttctctcgtttcaatcgaaaccaaaacaaaaacatgggcagaaaattcttcgtcggtggcaactggaaatgcaatgggaccactgaggaggtaaagaagattgttactactttgaatgaggctaaagtccctggagaagatgtcgtaga

SEQ ID NO: 150065 - DNA, 239 bp, Glycine max
atgggtgggatgatcctcgtttgatgacactagctggtttgcggcgtagaggcatgactccaactgcaatcaatgcttttgtacgaggaattggaataactagaagtgatggcactttgatttctgtggaacgccttgaatatcatgttagggaagaattgaacaaaacagcttctcgtgcaatggttgtcctacatccactcaaggttgttattactaatcttgaagccaactcagta

SEQ ID NO: 150066 - DNA, 234 bp, Glycine max
caaccctaacgcgtgcagagcagagagagacgcagccatggggcgaagacccgcgaggtgttataggcaaattaagaacaaaccataccccaagtcacggttttgccgtggtgttcctgatcccaagatcaggatttacgatgttggtatgaagaagaagggtgttgatgagtttcctttctgtgtccatctggttagttgggagaaggaaaacgtttctagtgaggccctgga

SEQ ID NO: 150067 - DNA, 237 bp, Glycine max
ctcgtttaaggattctgcttgtcgctgctttgggtacatggtgtctaagaagaagtacatctacaccatcgacgacgactgcttcgttgctaaagatccttctggaaaggacatcaatgcacttgagcagcacattaagcatctcctatgtccatccacaccatttttcttccacaccctttatgatccttacagagctggtgctgattttgtccgtggatacccttttagtcttcg

SEQ ID NO: 150068 - DNA, 236 bp, Glycine max
ccacctcctgttccggttcatcctccagttaaacctcctgttccggttcaccctccagttaaacctcctgttccggttcaccctccagttaaacctcctgttccggctcaccctcctgttaaacctccggttgttccggttcaccctcctgttaaacctccggttgttccggttcacccctttcctagaagctttgtcgcagttcaaggagttgtttatgttaagtcctgcaagta

SEQ ID NO: 150069 - DNA, 235 bp, Glycine max
cgtgaatgcgtataaaaggaaaataaagaaattagcgtcaaacatgttgggtgtgttcagcagctccatagtgtcgccgccggacgagctcgtggccgccggcagccgtactccgtcgccgaagatgacggcggcggcgctgcggaagcggttcgaggagaagaacccctccgccgtatcggtggaggtcggagagcatatccagctcgcttatacccaccacaacgagtcgccg

SEQ ID NO: 150070 - DNA, 235 bp, Glycine max
caagaatggcacttcgttgcttggtgatgtccctttctgttctcttcactcttggtcttgcgagagaaagccatgccagagacgaagatttttggcatgctgtttggccaaacactcccattccaagtccattgcgagatcttctaaagcctggccctgcaagtgttgagatcgatgatcaccctatgcaaattgaagaaacacagtacccgaaaaccttcttctataaagaaga

SEQ ID NO: 150071 - DNA, 232 bp, Glycine max
cacatctttgggcccgctgtgtctgtgactcacctcttcggttccaagtcgccacccaagctttgcgtctttactctcagatgctctgctggcaatggagaaaggccttggaaaacttcaggcgctagacttatgttagaagatggatcaatctggaaagcaaagtcatttggtgcttcaggaacccaagttggagaagttgtttttaatacatcattgactgggtatcaag

SEQ ID NO: 150072 - DNA, 235 bp, Glycine max
ccaatatattccattctctctgtgtatttccctacctctcccttcaagatgcagatcttcgtcaagaccctcaccggcaagaccatcacccttgaggtggaaagctctgacaccatcgacaacgtcaaggccaagatccaggacaaggaaggaatccccccggaccagcaacgtctcattttcgccggaaagcaacttgaggacggccgtacccttgctgactacaacattcaga

SEQ ID NO: 150073 - DNA, 231 bp, Glycine max
caactctttgggcttgatctcatctagaaagacaaatgaagccatcgagatccttaagctcatgtcttccacattcttgattgcactttgccaagcaattgacttgaggcatttagaggagaatttgaaaaactcggtcaagaacaccgtgagccaagtttccaaaaggattcttaccacaggtgtcaatggagaactccatccttcaagattttgtgagaaggatctgct

SEQ ID NO: 150074 - DNA, 234 bp, Glycine max
agcgaccatgccggcaccggcacggttgacggtggtaacagctggggaggagtacaatgcatgcaggtgtggccaccaattggcaagaagaagttcgagactctttcctacttgccagacctcgatgatgcccaattggcaaaggaagtcgaataccttctaaggaaaggatggattccttgcttggaattcgagttggagcacggtttcgtgtaccgtgagcacaacaggtca

SEQ ID NO: 150075 - DNA, 227 bp, Glycine max
cttgtgctctgctcgtgcctctagggttatcatatctccatttccatttcctctctctcagtttccaagaatcttaagctatgggaaagtcttacccaaccgtgagcgctgattaccagaaggccgttgagaaggcgaagaagaagctcagaggcttcatcgctgagaagagatgcgctcctctaatgctccgtttggcatggcactctgctggaacttacgacgtg

SEQ ID NO: 150076 - DNA, 248 bp, Glycine max
tcggaattcagcgcgagggatagcaatcctgctaaagtaagcaatgaatttgtggacaaccttattaaagatggtgatacattgggtatcaaatatgaacaaatgacatatacgtcagagtacttccctgagttgatggagatggctgaaaaattaattcgccagggtaaagcatatgttgatgacacaccacgtgaacaaatgcaaaaagagagattggatggcatagattctaaatgcagaaataa

SEQ ID NO: 150077 - DNA, 233 bp, Glycine max
aaccagccaagaggccttgaagatcctgaacttcttgctagagagactgtgttcagtgtaagcgaaatagaagcactttacgagctcttcaaaaagattagcagtgctgtaatcgacgatgggttgattaacaaggaagagtttcagttggcattgttcaagacaaataaaaaagaaagtctgtttgctgatcgggtatttgatttatttgacacaaagcacaatgggatact

SEQ ID NO: 150078 - DNA, 230 bp, Glycine max
ttttagtctagcaagatttgctcagatgatgtggcggcttaatttctttgtggtgttcagttgtattgtacttaacaacagttacatgttatactacatctgccccatgcacactcttttcactcttatggtttatggggcacttggtattctccacaagtacaatgagcttgggtcagtcattgctgtaaaaatcattggttgcgtcttggttgttatcttagtatggg

SEQ ID NO: 150079 - DNA, 230 bp, Glycine max
ctatggcttctgcagaagtagagttccgatgctttgttggtggacttgcttgggccaccgaccacgatgctctcgagaaagccttctctcaatttggcgaaatcgtcgaatcgaaggtcatcaacgatcgtgaaactggaagatccagagggtttcgatttgtgaccttcgccacagagcaggcgatgagagacgcaattgaaggaatgaacggccagaacctcgacggt

SEQ ID NO: 150080 - DNA, 228 bp, Glycine max
gtggttttgaacgatcgattggggaagaaggtgcgcgtgaagtgcaacgacgatgataccatcggcgacctgaagaagcttgtggcggctcagactggcacaagagccgacaagatccgcatccagaagtggtacaccatctacaaggatcacatcactctcaaggattccgagatccatgacggcatgggtctcgaactctactacaactaaacacaacaaggtgtg

SEQ ID NO: 150081 - DNA, 229 bp, Glycine max
ggaactcggagacactctcagagctaaattccccaacgccaaacttgaccagggatacggaatgactgaggcagggcctatgctaacaatgtctttagcttttgctaaagaaccgatagacgtgaaaccaggtgcatgtggaaccgttgtaagacatgcagagatgaagattgtcgatcctgaaaccggtcattctttacccagaaaccaatccggtgaaatttgcata

SEQ ID NO: 150082 - DNA, 223 bp, Glycine max
cgattggtcccattgattccgaagagaaaagaaaagatgtttgagccacaacagctatacactcgcgcgaagaccgaggaattcgacctcgaatcaggagaaaccctctacccagggctgagcgtcggcgagaaccagctccgatggggtttcatccgcaaggtctacggcatcctctccgcgcagatcgtcctcaccaccctcgtctccgtcaccaccgttt

SEQ ID NO: 150083 - DNA, 226 bp, Glycine max
tcgtcccactttcttctccttttagggtttcctttttgtttctcctttccagatctgcatcttccattttttaggattaagcggtgagattcgtgaatctgagaaatgtcggattcttctcgggaggagactgtttacatggcgaaattggcggagatgccgagcgttacgcggagatggttgagttcatggagaaggtagcaaagactgtggaggttgaggagtt

SEQ ID NO: 150084 - DNA, 234 bp, Glycine max
  unsure (1)..(234): unsure at all n locations
ctaagagttgctgcttcttcagccactccgcaccttgagcagcctctagggncctcaacaaccatggctgaaatcgaaactaccgttccagatcccacccaaatcgacgtcaaactcttcaatcggcggagcttcgaggatgttgaggttaatgatatgtctctggctgattacattggagtgtccccatcaaagcatgctacatatgttcctcacactgctggtaggtactca

SEQ ID NO: 150085 - DNA, 229 bp, Glycine max
gacttcactttcctgaaaaaaagaattttgaacctgcctctgttaaagtttgcattttttttgggtgggttgatagtactgtgcaagctttggaacttcttcacaagctgctacttcaatggccactgaagaggttaacaaacctcaatcgcttcctccataccctgagatgatagtgaaagcacttgaagccttgaatgaggctgatggatcgaataaatcagcgata

SEQ ID NO: 150086 - DNA, 229 bp, Glycine max
gaaattcccgaggataacgatgtggatgccgcagacatggaagaggatgtcgatggcgaccttgccgaccttgaaaacctaaactatgatgacttggacagtgtttccaagttgcagaaaacccagaggtacactgatgttatccagaaagtggaagaggcacttaataaaaaggaggctgaggtcttgttgcatctagtggatatagacagatgatcctgaataccaa

SEQ ID NO: 150087 - DNA, 198 bp, Glycine max
agtgactttgtctacttgtgtcccccagaagccttaaagctcttctctgctttgaaaatggctgattggggcccggtggtgatcgcagtggtgctgttcgtgctgtgaagcccggggtttctgtttcagatgccagccaggggaagggtagcagagtttgggaacatgcaaaccagtggggcctccattttggttcac

SEQ ID NO: 150088 - DNA, 226 bp, Glycine max
tgatttgaggccaggcaagccccactcaaccaccacacctctcctcgttcacgctacccctttctgctcttcttctacctttcaagttttaaaagtataaagatggcagagacattcctatttacctcagagtcggtgaacgagggacaccctgacaagctctgcgaccaaatctccgatgctgtcctcgacgcttgcctcgagcaggacccagacagcaaagttg

SEQ ID NO: 150089 - DNA, 226 bp, Glycine max
gtcacccgtagcaatgacggagctgcagaagctatgtgataaagttccttcatttgcagatgatgtggctatggctctaattgaggaggagcttggtcagccatggcaaaacatctattctgaactatcatcttctcccattgcagctgcatctcttggacaggtatacaagggtcgcctaatggaaaatggggatttggtagctgttaaagtgcaaagacctttc

SEQ ID NO: 150090 - DNA, 226 bp, Glycine max
gtttgagttacccaactgcttcatattccacaatgccaatgcttgggaggaggaagatgaagttgttctgatcacatgccgccttcagaatccaaatttggatttggtcggtgggactgccaaggaaaagcttgaaaatttctcaaatgagctgtatgaaatgagatttaacatgaaaacgggtgaagcttctcaaaagaaactatcagcatctgctgtagatttt

SEQ ID NO: 150091 - DNA, 227 bp, Glycine max
ctacgcactgcggagagagaaattgagtttccgagataaccagtagtctctttgattcatcaatggcaactgcgaggaccgtgaaggatgtttcgcctcacgatttcgtgaaggcttatgcttcccacctcaagcgttccggcaagatggagcttcctgagtggaccgatattgtaaaaacagcaaaatttaaggagttggctccatatgatcctgactggtactac

SEQ ID NO: 150092 - DNA, 220 bp, Glycine max
ctttgagcagagcaaggctgatccatctcactgggcaaaaatctcccccggtggactcaagggtatcatgaggcatacacatggccaatttactcggacaggctcttgacactcactggtgtgtatcgcttctggaagcacgtgaccaatcttgaacgccgtgcgagcaaacgttacctcgagatgttctatgctctccagtaacgcaaattggctgagt

SEQ ID NO: 150093 - DNA, 219 bp, Glycine max
ggaatgaactttatcatgatttacccagcaagcagctcaaggtcaaagttactgacagaacggctgttgttacaacaaatgcagaaactgtggttgtgagccctccgggtctacaagaagccataaatgaagaaactgctaaggagccccaaggtcgatactttatgcgaccatctggcactgaagatgttgtacgtgtgtatgctaaggcatccacac

SEQ ID NO: 150094 - DNA, 223 bp, Glycine max
gcgaagaagaagaaacgacagagcaagaaggaaatggcgaccaacattgggatcatggatgcggcttacttcgtcggcagatctgagattctttcttggatcaactcaactctgcaactcaatctctccaaagtcgaagaggcatgttccggcgcggttcactgccagcttctcgatgccgctcatccagggatcgtgcctatgcacaaggtcaatttcgacg

SEQ ID NO: 150095 - DNA, 240 bp, Glycine max
caaacacaagccaagtgaaagtgagacaaaataaaaatcaaagagcataatgtcagggatcattcacaagattggggagacccttcatgtgggagggcacaagaaggaggaggagcataagggtgagcaccatgctggagaatacaaaggggagcaccatggtgaacacagtagtgagtacaaaggagagcatcatggtgaacacaaagctggagagtaccatggtgagcacaagccaga

SEQ ID NO: 150096 - DNA, 236 bp, Glycine max
tgtctctctctctccaccattgccatggatccttacaagctccgtccatccagcgccttcaattctcccttctggactacaaattctggtgctcctgtttggaacaacaactcctctttaaccgttggagctagaggtccaattctgcttgaggattatcatcttgtggagaagcttgcaaactttgacagggcacgtatcccagaacgtgttgtccatgccaggggagctagtgc

SEQ ID NO: 150097 - DNA, 238 bp, Glycine max
caagattgcgtctttccagcagtttatccctcatgattttgatgccagtgctcatgggacatcgagcttccctgttgcttctgtgcatcgtatagggattttggacattaggattcttaacacggataggcatgctgggaacttgttggttaggaaacttgatggcatcgggagttttggtcaggtggagttgattcccattgatcacgggctctgcctgcctgaaactttggaggat

SEQ ID NO: 150098 - DNA, 244 bp, Glycine max
ggcaaaaaggacacaccgtttcatagtttttaagattgaggagcagcagaagcaggtcattgtggagaagcttggtgagcctgcccagggctatgaagatttcactgccagccttcctgctgacgagtgccgttatgctgtttatgattttgagtatctgactgaagggaatgtccctaaaagcagaatttttttcattgcgtggtcccctgacacatcaagggtgaggagcaagatgatttat

SEQ ID NO: 150099 - DNA, 246 bp, Glycine max
cgccagtgcatgtgtcagttggctcaaagtctccatttgattacgtctacgccgccacggaaactcaattacacgatgaccccaacgtggcactcttcttcttggaaaaggacttgcattctggaacaaagttggacttgcacttcaccaggagtacatctaatcaagccacgttcttgtcacgccaagttgcggattcgatacccttttcatccaacaaggtggactttatattcaacaagtttt

SEQ ID NO: 150100 - DNA, 244 bp, Glycine max
tctgaggggactgctgcactccgtattactgatggaggtctagttgtggtccgttgtgtggaaggcgtttgtgtccaaactgaaactgtgctaagacaagcccttggagaaaggattaggcctgttctgactgtcaataagatggacaggtgcttccttgaactaccaagttgatggagaggaggcttaccagacattccagaaggttattgagaatgctaatgttatcatggctacatatgaa

SEQ ID NO: 150101 - DNA, 250 bp, Glycine max
gctcgagcactcatcaatctcgtttgttctcactaactattacttcatcatgtcgtcgagcacagttggtcaagtcatcaaatgcaaagctgcggtttcatgggaggcagggaagccacttgtgattgaagaagtagaggtggcaccaccacaagctggtgaagtgcgtttgaagatcctctacacctctctttgccacactgatgtttacttctgggaagccaagggccaaactccattgtttcctcgt

SEQ ID NO: 150102 - DNA, 242 bp, Glycine max
gaagaagaagccctttgggttctctcgctccaacaacaaggctgcttctaagcctctctctcgtggagcaacaactgtgaaatctgtggaatcaaaggggcaagctgagaagtgtgccaagagaaagaggaagaaccagtatcgcggaatccgccagcgtccatggggaaagtgggctgctgagattcgcgacccaagaaagggggttcgcgttttggcttggaactttcagcactgctgaa

SEQ ID NO: 150103 - DNA, 239 bp, Glycine max
gaagtatgccatgggctgatttgtgtttggataatgtatattgaaatggattgcatctatgaaaacttttgtgggtttgcttttcacttcctgttttctgggtaagattatgtttctgttatgaggggctagggaagggaggtgtcttaatttgataaaaaaaataactgtgttcaacaaccactgtgatgtttttatcatgatgcaaacgcatgaacaggatgttatttgtgtcattg

SEQ ID NO: 150104 - DNA, 241 bp, Glycine max
caaaaaaaaaattctttaattaaatctttaatgaaattaaatatttaaattaataaaattagtcgtgttttattcgattttttgaattggttttttttttacagtagctaatgctagtcatcgaacttagtcaatgagctagaatgggttataaagatatctatagatatatatagatatatttatctatagatatctttagaaaaaaaaaaagacaataaccaaataagacgtatcattt

SEQ ID NO: 150105 - DNA, 240 bp, Glycine max
gatttatcttgttcataccgggtttctactacacgcggattgcgtattatgcttacaaaggatacaaagggttctctttctctaacataccacccgtgtagctctactagctagccatgtctcatactttaggttcacatagcttcctcttgtacagatcttccatggttgtactctatgttctttctttctggtgttgtgtttttttttttgcaaccatagaaagtgccagtatatgat

SEQ ID NO: 150106 - DNA, 245 bp, Glycine max
cttttgttgtttgtgtgtttgttttttctctcacctgaaaatgtcttgctgcggtggtaactgtggttgcggaagcgcctgcaagtgcggcaacggctgcggaggctgcaagatgtacccagacttgagctacaccgagtcaaccaccaccgagaccttggtcatgggagtggcaccagttaaggctcaattcgagagtgctgaaatgggtgttcccgctgagaacgatggctgcaaatgtggag

SEQ ID NO: 150107 - DNA, 237 bp, Glycine max
caagatcggaatcaacggatttggaagaattggccgtttggtagccagagtggctctgcagagagacgatgttgaactcgttgccgttaacgaccctttcatcaccaccgattacatgacatacatgtttaaatacgacagtgttcatggacactggaagcatcacgatgtcaccgttaaggacgagaagacccttctcttcggtgacaagccagtcactatttttggacacagaaa

SEQ ID NO: 150108 - DNA, 237 bp, Glycine max
gtttgcatctaatgggtctcttcatgatattttacacggcagagaaggtgttaaaggagcacagcctggcccagttttgacatgggcacaaagagtaaaaattgccgtaggggcggcaagaggacttgaatacttgcatgagaaggctgatccacacattatccaccgggacatcaagtcaagcaatgtgctaatctttgatgatgatgttgctaaaattgcagattttgatttatc

SEQ ID NO: 150109 - DNA, 241 bp, Glycine max
tggggacctgtgcaatatgcctttacacaatgaaaccagggcagggacatgccatttttactgcagaatgttctcactctttccatttccattgcatcacttctaatgtgaaacatgggaaccagatttgccctgtctgcagagcaaaatggaaagaagttccttttcagagtcctgcttcaaatatgccctatgatcgactcaaccaagtatctcctcgggaagaaggctgggcgactgt

SEQ ID NO: 150110 - DNA, 237 bp, Glycine max
gagctgcagaggttttgatgttgaaacccctaatcatatatcacttgaagaattttttcttggtgaagactgaaaaggatagggaagaggctatggatcctgggagtattggtttcaacactggagaacctcgaatacaattgtactttttgctgggtctagtctatgcttcagttacacctactgttcttcctttcataatagttttctttgggctcgcctatgttgtgttccgtc

SEQ ID NO: 150111 - DNA, 239 bp, Glycine max
tggcatcaaagtctctgacatccgatcaattaatcgattttgtgagcctcctgaaaaaaggctgatgtgtgacttgctctggagtgatccacaacctctccctagcacgggaccaagcaagcgtagtgtaagcctttcttttcgtgcagctgttacaaaaaggtttttgcaggtaaataatttagctttcgttgtgcgctctcatgaagtaaaggccgagggttatgagattgaacatg

SEQ ID NO: 150112 - DNA, 181 bp, Glycine max
gctcggaattcgaggcgagatgaagggggcgaaagggcgtatcctggttggtaaatacgagttgggaaaaacaattggagagggaagctttgccaaggtgaagttcgccaggaacgtccagaacgataactatgtcgccatcaaaatcctcgaccgtaaacatgtcctccgcctcaacatg

SEQ ID NO: 150113 - DNA, 242 bp, Glycine max
ggactgtccaagatcagtaaggatgcaatgctgaaaatgcacgtgaagccggagacttctctgattcgtccatatgttgtatgtgctgtattaagaggtataacttttgataaagcaagatacaacagctttatcgatctccaagacaagcttcaccaaaacatatgtcgccgaagaacccttgttgccattggaacccatgacctggatacattggaggggcctttcacctatgaggcttt

SEQ ID NO: 150114 - DNA, 138 bp, Glycine max
tgctggggagagaatggatattacaagatctgcagaggtcgacatgtgtgtggagtagattccatggtctcaactgtagctgcgatatatccatccagccattaaatacaaagatgtgcctgattgtggttgtgatgt

SEQ ID NO: 150115 - DNA, 237 bp, Glycine max
aattggagagcgctgccaagaatctggcagctgtcaatccagaaaggaccatctttgatgtcaagagacttattggaagaaagtttgaagataaggaagttcaaagagatatgaagcttgttccttataagattgttaacaaggatggaaaacctggcatacaggtgaaaattaaggatggtgagaccaaggtgttcagccctgaggaaatcagtgccatgattctgactaagatga

SEQ ID NO: 150116 - DNA, 187 bp, Glycine max
gtattttcctagtcatgagcctcatactgtggaagtgtgtcccccttgtgtaggatacctcttcctctatgggtgcttgatgagatacagaaagatatagagttagcgtattgtgacaggtttggaagaagaaatattgaatacatttcccttggatgtgatattcttcctgtgctacatgggcgtt

SEQ ID NO: 150117 - DNA, 238 bp, Glycine max
ctacaatttgctcacaaaggaggaaaaatggcacctttcgtttccctctctttgttgcttctctttctcaaccaccccctcctttccctctcaaccaaccctgaagggaacgctctgcatgctttgagaagcaggctttctgatcccaacaatatgttgcagagttgggacccaacactggttaatccctgtacttggtttcatgttacctgtgactccaacaatcatgtgattcgct

SEQ ID NO: 150118 - DNA, 240 bp, Glycine max
cacattttagaagaataccccctcttttgctgcatcagaggagttgtaaattaagagcatggctgcacaagctcttgtatcatcatcttctcttaccttctcagcggaggctgcaagacaaagtcttggaccaagatcactccaatctccatttggcttctccagaaaagcctcctttcttgttaaggcagctgctaccccccctgtcaagcaaggatcagacagacctttgtggtttgc

SEQ ID NO: 150119 - DNA, 235 bp, Glycine max
ccacgggtcacccatgagatccgcagtgtctggatatcatacagaaaggttccccatacctcctgctatctgcagtggaaggcgtgaaaagtgtggaattgagaaggagaacaacttcaagcagcccggagagagataccggtcttgggcacctgacaggcaagatagatttgctcgccgatgggttgatgctttatctgacccacgggtcacccatgagatccgcagtgtctgg

SEQ ID NO: 150120 - DNA, 140 bp, Glycine max
caaggctcggatcttgttaatgtccgcaaggttctggggccacatgcaaagaatattcagttgatgtcaaaggttgagaatcaggagggagtcctgaattttgacgaaatcctgcgggagactgatgcattcatggtggc

SEQ ID NO: 150121 - DNA, 233 bp, Glycine max
gagtggtgtcattaagcttgatgataagcagggtgaaagcaagtgtgctcttgtgtatggtcaaatgaatgagccccctggtgcccgtgcccgtgttggtcttactgggcttactgtggctgaacacttccgtgatgctgaagggcaagatgtgcttcttttcgtagacaacattttccgttttacccaagctaactcagaggtgtctgctttgcttggtcgtatcccatctg

SEQ ID NO: 150122 - DNA, 235 bp, Glycine max
gtctttcctttatcttgtcactggtaacatggagaaactgtccaagatgttgaaaattgctgaagtcaagaatgatgtgatgggccagtttcacaatgccctatatatgggtgatgttcgagaacgtgtcaagatattggaaaatgtgggccatttgccactgtgcttacatcactgcatcagtccatgggctacatgatgttgcagagcggcttgcaactgaactgggagataa

SEQ ID NO: 150123 - DNA, 229 bp, Glycine max
  unsure (1)..(229): unsure at all n locations
gaaattctcagatgaaagttccttaattaaaacaacctttttgcctaggttggaggaccttcttggcctgttgcattaggccgaagagatgcaacaaaagccaatcggatggaagctaatcaacaaattccttcaccgttcgaactgctnagataacatcattgcaaagtttacttcaaagggtcttaacttgagagatgttgtagccctttcaggggcacatacaatt

SEQ ID NO: 150124 - DNA, 238 bp, Glycine max
tgttttttgacggatatggatatcatgggacatcatttgagcagatatatcgatgctacccagcttcctttattgaaaagccccaaattgaaagtggtgacaaaattatcatgcctccatcagcccttgaccgtctagcatctctgcatattgattacccaatgttgtttgaactccgtaatgatgctgccgagcgggtttctcattgtggggttctggagttcattgctgaggaagg

SEQ ID NO: 150125 - DNA, 240 bp, Glycine max
gcagaaagcaagctcatcctagagttttaaacatggcagcagcctcctccatggctctctcttccccatccttggctggcaaggccgtgaagctgggcccatcagcccccgaagtcgggagggtcagcatgaggaagaccgtcaccaagcaggcctcctccggaagcccatggtacggcccagaccgcgtcaagtacttgggcccattctctggcgagcccccgtcctacctcactggcg

SEQ ID NO: 150126 - DNA, 231 bp, Glycine max
attgggatgatactatcaaacaatgaagactatggggaagagttagttgctgactcctatctcctccctgcagcagctttgggccagaaatcaagcaatgagttaaagaagtatgttttctcatctcccaatcccacagctaagcttggatttggtggcacccaattaggggttcaaccatccccagtggtggcagctttcagctcaagagggccaaatgtgctcacacca

SEQ ID NO: 150127 - DNA, 231 bp, Glycine max
gtcttcaggtttggttccagtcacggcacacgccccggctgagaaaggggtgtctggatttttgttggatttcctgatgggcggagtgtcggcggctgtgtccaagacagctgcggctccaatcgaacgagttaagttgctcatccaaaaccaggatgaaatgatcaagagtggtcggttgtctgaaccatacaaaggaattggcgattgtttcactcgaaccatgaagga

SEQ ID NO: 150128 - DNA, 231 bp, Glycine max
tggcactcttcctggtgacaatggatttgaccctctggggctagctgaggacccagagaacttgaggtggtacgttcaagccgagcttgtgaatggacgttgggccatgttgggtgttgtaggaatgttgcttcctgaggttttcaccaaggttggaatcatcaatgcccctcaatggtatgatgctgggaaatcagagtactttgcatcttcctcaaccctcttcgtgat

SEQ ID NO: 150129 - DNA, 232 bp, Glycine max
cctgccagtagtcatatgcttgtctcaaagattaagccatgcatgtgtaagtatgaactaattcagactgtgaaactgcgaatggctcattaaatcagttatagtttgtttgatggtatcttctactcggataaccgtagtaattctagagctaatacgtgcaacaaaccccgacttctggaagggatgcatttattagataaaaggtcaacacaggctctgcctgttgctt

SEQ ID NO: 150130 - DNA, 235 bp, Glycine max
gcatactatgggatgagcacaaatcttgtgacttatttcaatactaaactaaatcagtctggtcctactgcttccaagaataatgcaaattggggtggaacatgctacatcactccgttgattggagcatttgtggctgatgcctatcttggaagatatcttaccatcctttgtttttccatagtttatgttattggaatgacactcttgacactgtctgcttcagttccaggca

SEQ ID NO: 150131 - DNA, 234 bp, Glycine max
gtatcatgcagtgtcttggagccatctgtggggctggtgtggtgaagggatttgagggcaatgctaggtatgagatgttcaaaggtggagccaattttgtgaattctggatacaccaagggtgatggacttggagctgagattgttggcacttttgttcttgtctacaccgttttctctgccactgatgccaagagaaacgctagagactcacacgttcctattttggctccac

SEQ ID NO: 150132 - DNA, 238 bp, Glycine max
cggctcgaggaaacagtgctggtgttgtcacacagaataataggagtagtgtaagctacttggagttcagaaagaagagattgaatgcaagtaacttctgctgcaataagagccatgcttctatattctgcctcagtactagaccttgcaacaactgattgcttcttagaccaccaagagatgagttcaggtccaagaaaaatagcaggtccaggggtagacctcctatcatcaggat

SEQ ID NO: 150133 - DNA, 230 bp, Glycine max
tgaagtcggctctacgcacatccacgaaaaggaagcagagaaaactaaccagcaagagatatcacaggaaaaccaggaggctgagatcaagcaattgaggaagaccatgactttcaaagccactccaatgccaagtttctacaaggaacctcctccaaaagttgaattgaagacgataactataacgcgctcagaatctccaaagcttggtaggcacgcacgatctgctg

SEQ ID NO: 150134 - DNA, 226 bp, Glycine max
cttccaatccttccaaccaccactattggatccttcagtcagactgtataattgaggagggtacgacgtgagttcaatgctaacaagatcagagaggaagtgtatgataagtcaattaaggaggaaattcgcaaagttgttgaacttcaagaagagcttgatattgatgttcttgttcatggagaaccagagagaaatgatatggttgagtacttcggtgagcaat

SEQ ID NO: 150135 - DNA, 223 bp, Glycine max
gttaaagcaaaaaccaaagtgagagagcaaatgatgaagccatcgatgctcagatctcttcactctgccgccacccgcggcgcctcccacctctcccgccgtggctacgcctccgagccggtgccggagcgcaaggtggccgttctaggtgccgccggcgggatcgggcaacccctctcccttctcatgaagctcaaccccctcgtttccagcctctccctct

SEQ ID NO: 150136 - DNA, 230 bp, Glycine max
cgtggatactattcagtggagactgttacacttttggtggctttgaaagtccgttatagagatagaatcacaattctcaggggaaatcatgaaagccgtcaaattactcaagtgtatggcttctatgatgaatgcttgagaaaatatggaaatgcgaatgtctggaaatactttacagacttgtttgattatttgcctctgactgccctcattgagagtcagattttctg

SEQ ID NO: 150137 - DNA, 229 bp, Glycine max
agctacaccagtcaagctttgagccagaacctacaaggactaagggcgagaagtccgatacgtaggatgagccgcagaatgctgtactacttgcaagaaaattggcggagactttgggttttagcattgtggatttccgctatgattggactgtttacctggaagttcatcgagtacaagagaaaaaatgcttatcatatcatgggtaactgtctactagcggccaaag

SEQ ID NO: 150138 - DNA, 233 bp, Glycine max
ctgcatcggaagaaaccctagccactctcccggcgtcacgatgcagatcttcgtgaaaaccctaacgggtaaaacgatcacgttggaggtggagtcttcggacaccatcgacaacgtgaaggccaagatccaggacaaggaaggcatccctccggaccagcagcgcctcatcttcgccgggaagcagctggaggacggccgcaccctcgccgactacaacatccagaaggagt

SEQ ID NO: 150139 - DNA, 212 bp, Glycine max
ctaacgagtaaggaaaaatggcgcgtaagaagatcagagagtatgactcaaagaggttgttgaaggagcactttaagagactttctggcaaggagttgccgatcaagtctgcacaaattactgcatcaactgatttcactgagctacaagaggaaggaaccctgggctttcatcttccaaaatggtttgggaacctgacatggtatttggaa

SEQ ID NO: 150140 - DNA, 179 bp, Glycine max
ctttctctcttctctctctgtccgaagatggcttcacgcaggttcgtatcttctctgattcgatcctcccttcgtagatctcaatcgaaaccctcgatttccgcatcagattcgagtacacacgtcatccaaccgtgcctctccgcacggttacttgctgaaacgcgtcgccgaatacg

SEQ ID NO: 150141 - DNA, 224 bp, Glycine max
ctttaggttgggatttgggaattagggttattcgcgtggcgaagatgattgaggtggttttgaacgatcgattggggaagaaggtgcgcgtgaagtgcaacgaccgatgataccatcggcgacctgaagaagcttgtggcggctcagactggcacaagagccgacaagatccgcatccagaagtggtacaccatctacaaggatcacatcactctcaaggatta

SEQ ID NO: 150142 - DNA, 220 bp, Glycine max
gtcggaatttctttgaatgacaactttgtaaaacttgtttcctggtatgacaacgaatggggttacagttcccgtgtgattgatttgattgtccacattgcatccgtggcttaaagaattgagtctgagcttggatatcatcgctacaccgttccaaatttttatcttaatcgagtttattttagtgtgaattcggaataaacactttgtgttgctgtga

SEQ ID NO: 150143 - DNA, 225 bp, Glycine max
aattcccaccgcaaggtaaaaaaaaaaaaaaaaaccagtggtgcgcgatgccaccgaagttcgatcccttgcaggtggtggacgtgttcgtccgattcaccggcggcgaggtcggcgcggcgatttccctcgctccaaagatcggtccattgggtctctccccaaagaagatcggagaagacattgcgaaggaaaccgcgaaggactggaagggcctccgcgtga

SEQ ID NO: 150144 - DNA, 227 bp, Glycine max
cttaaagaccaatggttaacgatggctctgatgggcggttttgctagaataaacaataatgagatcactgttttagtaaatgatgcggaaaagggtagtgacattgatccacaagaagcacagcaaactcttgaaatagcagaagctaatttgaataaggcggaaggcaagagacaaacaattgaggcaaatctagctcttagacgagctaggacacgagtagaggc

SEQ ID NO: 150145 - DNA, 224 bp, Glycine max
cgtcgtcgttatcttcttctcttgttgtctgtgtgtttgttttttctctcacctgaaaatgtcttgctgcggtggtaactgtggttgcggaagcgcctgcaagtgcggcaacggctgcggaggctgcaagatgtacccagacttgagctacaccgagtcaaccaccaccgagaccttggtcatgggagtggcaccagttaaggctcaattcgagagtgctgaaa

SEQ ID NO: 150146 - DNA, 229 bp, Glycine max
ggcaaatcctggcaagttgaggttacttgacttgactgaaaatgatagagtgttcaatattggtaagtacagcaagaatgaaaataaatctgatgcccacagaatggtgaggactggtcttcaaaaagaaggatcaagagtgatttttggtgttcctaaacctgggaagaaaagaaaatttatggaagtaagcaagcattatgttgcagatgggacaagcaagatcaat

SEQ ID NO: 150147 - DNA, 229 bp, Glycine max
atttccactcgcaaaccctcccatttaacagtcagagcctccgctgcctccatcaccccggcgcaggctccggtacagccatggcaaggcgctgccataaaaccgctaatagcctccatcgcgacgggagtaatcctctggttctcaccggttcccgccggcgtgaaccgcaacgcgtggcaactactcgcgattttcctaggcacaatcgtcggcattataacgcaac

SEQ ID NO: 150148 - DNA, 226 bp, Glycine max
taaaaatggagttaaaattgtgaaacatgtcaaaggggggttgaatccaagctccctccatcagttagacttcaataacccctacattggagaagtggccaaaattggactagtggttgctgtcgttgcccttactgagtctattgctgttgggcgatcctttgcatccatcaaaggataccaacttgatggaaacaaggagatgatgtcaataggtttgacaaac

SEQ ID NO: 150149 - DNA, 228 bp, Glycine max
gtagtttcaggcgctctaggaaataccagtccaggaggattcccaattgctcgacctggtacaggtggtttgatgccagggatgccagggaccaggaggatgcctgggatgcctggaattgataatgacaactgggagatgcctaagacaagatcaatgccgagagtagacatgtcaggcatgcaaactggaggacatagccagtctccctttctttccaagacatcc

SEQ ID NO: 150150 - DNA, 193 bp, Glycine max
  unsure (1)..(193): unsure at all n locations
ggggatatcgttaaatcacaagatctcgagagcggaagtagttctgcagacaatgtcgaatctggaactgcagtttttctcgtggagcttgaggaaaaaagagctattaaggtttttgggaagagcactttgattggattggctctaacattctttgctggactttgcttctctatgntctcaccagcattca

SEQ ID NO: 150151 - DNA, 226 bp, Glycine max
gagtgatttcagtgagtgatcggtgttcacttgatctcatcataatcgtcagcgtcaattgaagaagatgccgatcagaaacatcgccgtcggaaggcctgaagaggcgactcaccccgacacgttgaaggcggctttggctgagttcatctcaaccttcatcttcgtgttcgccggctcaggctccggcatcgcctacaacaagctcaccgacaacggcgctgcc

SEQ ID NO: 150152 - DNA, 220 bp, Glycine max
atctcatcaacctcaatctctcagaatccacagaaaagatcgttgctgagtacatatgggttggtggatctggtatggacctcagaagcaaagccaggactcttcctgggccagtgagtgaccctgcaaagcttccaaagtggaactacgatggctctagcacagaccaagctccaggggatgacagtgaagtcatcctatacccacaagctattttcaa

SEQ ID NO: 150153 - DNA, 221 bp, Glycine max
tgttgaacaagggtttctctgtctgcttcttcactttctctcgtttcaatcgaaaccaaaacaaaaacatgggcagaaaattcttcgtcggtggcaactggaaatgcaatgggaccactgaggaggtaaagaagattgttactactttgaatgaggctaaagtccctggagaagatgtcgtagaagttgttgtgagccctccttttgtgttccttcctgtt

SEQ ID NO: 150154 - DNA, 225 bp, Glycine max
cctcgagtccctcaggcccattagggaggacgaggtcaccaccatggttgagtccgtttacaatcactgcaccaccactggatatttatggaaagcaatattggtgaggaagcacttggggtctgtggcattcaacaacatcaccaggttggcatttggaaaaagatttgtgaactcagaaggtgttatggatgagcaaggagtagaattcaaggccattgtgga

SEQ ID NO: 150155 - DNA, 224 bp, Glycine max
caatgacgaaattgctgctgacctcaaagagcatgtgatcaagcctgtgatcccagagaagtaccttgatgagatgaccattttccacttgaacccttcaggccgttttgtcattggtggccctcatggcgatgctggtctcaccggccgcaagatcattatcgatacttatggaggatggggtgctcatggtggtggtgctttctccgggaaggaccctacca

SEQ ID NO: 150156 - DNA, 226 bp, Glycine max
  unsure (1)..(226): unsure at all n locations
gcaaattgtggtatcatcatttgagcaagcagcgggttatggggcggcaaaatcttacactgcccttgccctaaaaactatctcaaagcaattcaggtgcctgaaagatgcaatctctgcacaaatcaaagccacgagcaagacattgggtgaagatgattgcttaggagttaaagtagannggtcaaggcttaggtatgttgaccaccatcttcggcaacaaagg

SEQ ID NO: 150157 - DNA, 226 bp, Glycine max
gtcaatcttcaatgtaaatgggaaggtaaaggatactctaatttttaatacttttgttctctgccaagttttcaacgagttcaactctagaagtatggagaaacttaatgtgttccaaggcactcacaaaaaccacttgtttcttggaattgtggggattactttggttcttcaagtattgatggtggaactcctaaggaagtttgctgatacggagagattaaca

SEQ ID NO: 150158 - DNA, 223 bp, Glycine max
gtttgttgttgtaactcgttcttcttcttttgttgttctgtgtttgtgtttgttttttctctcacctgaaaatgtcttgctgcgttggtaactgtggttgcggaagctcctgcaagtgcggcaacggctgcggaggctgcaagatgtacccagacttgagctacactgagtcaaccaccaccgagaccttggtcatgggagtggcactgttaaggctcaattt

SEQ ID NO: 150159 - DNA, 229 bp, Glycine max
atcaacgatccctcttctgtgcccacttccaaatcttctcctctcgctatgggttgcggctcctcccttccagataggggctcaaggcagttgggtcgacccaattcagagaatggtggagggcaggacgccaagaatctgagggtcaagcttgttctcttaggtgattctggtgttggtaaaagctgtattgttctacgatttgttcgtggtcagtttgatccaacat

SEQ ID NO: 150160 - DNA, 217 bp, Glycine max
agaatgatgcttactttctctgttttcccatctccaaaggtttcagacactgttgtggaaccctacaatgctactctctctgttcaccagcttgttgaaaatgcagacgagtgcatggtgcttgacaatgaagctttgtatgacatctgcttccgtaccctcaagctaaccacccctagctttggtgacttgaaccatttgatctcagcgacaatgt

SEQ ID NO: 150161 - DNA, 223 bp, Glycine max
cggatctagagtcttcagtttctcctcgttgttcttcgctttcctgttttcaatttcgattctttcgttaatttaataagatgtttgggagggcaccgaagaagagcgataatacgaggtactacgaaatcctcggcgtctccaagaacgcttcgcaggatgatctgaagaaggcttacaagaaagccgccattaagaatcaccccgacaagggcggtgatcc

SEQ ID NO: 150162 - DNA, 216 bp, Glycine max
cttcttcatactacatgtggcactcctaattatgttgctcctgaggtccttaacgatagaggctatgatggggtaactgcagacttgtggtcatgtggggttattctctttgtattggttgcaggttacttgcctttcgatgaccctaatcttatgaacctgtataaaaaaatctcagttgctgaatttacttgccccccatggctttctttcagt

SEQ ID NO: 150163 - DNA, 224 bp, Glycine max
ctcgagccgttttctctctgcaactctcccttttcttccttcgtagatcgaaagggaatcaccttccatggcctccaagcggattctgaaggagcttaaggacctccagaaagaccctccaacctcttgcagcgccggtcctgtagcggaagatatgtttcattggcaagcgactataatgggtccccctgatagcccttatgctgggggtgtttttctagtta

SEQ ID NO: 150164 - DNA, 223 bp, Glycine max
aatttccatggcttctgcggatgttgaataccgatgctttgttggtgggctcgcttgggccactgacaactacgatctggagaaagccttctctcagtacggtgacgtcgttgaatcgaagattatcaacgatcgtgagactggaagatccaggggatttggatttgttaccttcgcctccgaggattcaatgagggatgcgatcgaagggatgaacggtcag

SEQ ID NO: 150165 - DNA, 230 bp, Glycine max
tatagcccaagccctatacaaccaaaccctaacacacacccatttgattcagtttccatggctagcctcaaggttgcatttttggctgcagtgctctgcatggttgtggtgagtgcacccatggcacatgcagctatcacgtgcgggcaggtgacgaatagcctgatcaattgcatcggttacctccagaacggaggaacgccgccgtcgggatgctgcaacggagtgaa

SEQ ID NO: 150166 - DNA, 234 bp, Glycine max
caatactattttcttgtcgttgagaagcttcgcgaacgaaagcaaagaaccctagaccgtcacagaaccattccatagccatgtctggtgttggccctctttctcaggattgggaacctgtcgtcctccgcaagaaggctcccaccgccgccgccaagaaggacgagaaagccgtcaacgccgcccgccgctctggcgccgaaatcgaaaccctaaaaaagtataatgctggga

SEQ ID NO: 150167 - DNA, 216 bp, Glycine max
agcagccacacctcccgcagcagccatggttctcaaaactgaactatgccgattcagtggtgccaagatctacccaggaaagggcatcagatttgttcgtggtgattctcaggttttcctgtttgcaaactcaaaatgtaagaggtatttccacaatcgcctgaagccttcaaagctcacctggactgcaatgtacagaaagcaacacaaaaagga

SEQ ID NO: 150168 - DNA, 216 bp, Glycine max
cagatagggcacgtctctcgcggcctcttctctccctcgcgccgcccacactaaaaggttattgctctattattgtttgacgatggctgatgctcatgggactgataagaacattgaggtgtggaaaatcaagaaattgatcaaagctcttgaggctgccagaggaaatgggacaagtatgatttcccttatcatgcctccacgtgatcaaatatc

SEQ ID NO: 150169 - DNA, 217 bp, Glycine max
gtcggattttcatatggaaaaagaaaagtggtcagcttattcgtgtcatggatctgtgtcatctcaatccaagatggatgctgatgagaaagtcaccccgcaagtttttaagggacacaggaattgtgagacggtgaagggtgttaacttttttggacctaaatgtgagtatgtggtgagtgggtcagattgtggtcggattttcatatggaaaaag

SEQ ID NO: 150170 - DNA, 218 bp, Glycine max
caggaggagcactagctaagttcacaatttcaaaatggctaggggactaaagaagcatttgaaaaggctcaatgctcctaagcattggatgcttgacaaactgggtggtgcatttgcgcctaaaccctcatctggaccacacaaatcgagggagtgcctccccctcattcttattctgcgaaaccggctgaagtatgctctgacataccgtgaagtca

SEQ ID NO: 150171 - DNA, 220 bp, Glycine max
gcaaatacagcggccattttagcggtttgagaaaggaatttctaaaacgaagaaaaaagggtaagctaccaaaggatgcaaggatagcactcatggactggtggaacacccatcatagatggccttatcctacggaagaggagaaagtgaagttgtcagaaattactggactggatcaaaagcagatcaataattggttcatcaatcagagaaaacgtca

SEQ ID NO: 150172 - DNA, 222 bp, Glycine max
cctcctcacacaacacaaacaccaaatcaaacatggccaccacttttctttctctcctcttcctcatcttctctctcctcaccccagccctcatttcctcttcccctgtccaagaccctgaatttgtggcccaagaagttaacaggaaaatcaatgcttccgtagctagaaggaatttggggtacttgtcctgtgcgacagggaaccccattgacgattgtt

SEQ ID NO: 150173 - DNA, 227 bp, Glycine max
gcaacccttctcttcctttatgtcactgtgctcaccattattggctacaaaaggcagactgatacaacggtaggtggcaccgactgtgatggggttggcattttgggcatcgcttgggcctttggtggcatgatcttcatccttgtttactgcaccgccggtatttcaggaggacacataaacccggcggtgacattcgggttgttcctaggacgcaaggtgtcgtt

SEQ ID NO: 150174 - DNA, 215 bp, Glycine max
actcaagttagatttgccagatgacaaggcaaagcagaaggccctgaaaacagtttcaacactttcagggattgatgccatctctatggacatgaaggagaagaaattaacagtgataggaacagttgatccagtgaatgttgtgagcaaactccgcaagtattggcagacagacatactctcagtaggtccagcaaaggagcccgagaagaaag

SEQ ID NO: 150175 - DNA, 219 bp, Glycine max
aagctgttgatcttttgatggaggttgaagatctggatatgttgagtggacatgttgacaaaacaaattttaaaaggacttgcctatatctcaccagttctgcaagatacctcccaggaccagatgatatgctagttttggacattgcatattcaatttacaaacaatttgaagaatatccaaatgcactccaaattgcattgttcatggataattcgc

SEQ ID NO: 150176 - DNA, 216 bp, Glycine max
ctcattctccatacctcaacgaagaggttaaagagccggcaacactttgctgtccgccttgaccgagcagagcttcgtcttggccctcgattttgccctaaagtactctcagtcacaacagacaccgtcgtcgtcgtcgtcgtcatcaatggcaccgaagcagaccaaggctgagaagaagatcgcttacgatgcgaactgtgcgacctaatggag

SEQ ID NO: 150177 - DNA, 214 bp, Glycine max
attaacatatacaaattctctgtgttgtgttgtgtacttgtgttaattgtgttgttgttgtaggaaatttaagtgaagagagaatgatgatgaagtctgctatgtgtgcattggtgcttgtggcactggttgtggttgaagtggggcccatggctgaggctgcggtgacttgcaacccaacacagttgactccttgtcttccggcaattaattc

SEQ ID NO: 150178 - DNA, 222 bp, Glycine max
aaaagttagggttcacaacttttccttttccttttgcttgcgaatctgaatcaaataatcaatcatccattcattattcatcatgtcgtcggcgaagaaaatcacgctgaagagttcggacggcgaggctttcgaggtggaggaggcggtggcgctggagtcgcagacgataaagcacatgatcgaggacgactgcgccgacagcggcatccctctgccgaa

SEQ ID NO: 150179 - DNA, 253 bp, Glycine max
tagatcaccatgatgcattcatcgcatatctgaggaagatcaatgaccttcccactgcaaagtcttatgccacaaggaccatccttttcttgaaagatgatggcaccttaaagccattggccatcgaattaagtttgccacatcctaggggagatgagtttggtgccgttagtagagtcgtcttgcccgcagaccaaggtgctgaaagtacaatttggctaattgccaaggcatatgttgttgtcaatgactc

SEQ ID NO: 150180 - DNA, 252 bp, Glycine max
caccattctcacaaaacaactttcaaactctgagaaagaatggctgccaacacattgatgagtactgctatctcagccttcccatctctcctttcttcctcaaaatccagatttgccaccgcagttcctctttctagctttggtgtcaccaatgcctcttcttctcgcttttctatgagtgctgactggatgccaggccagcctagacctccttaccttgatggttcagcacctggtgactttggattcgac

SEQ ID NO: 150181 - DNA, 248 bp, Glycine max
atattattaagatgatcaacattattggagcacttgttctactctttgcatttctcttcctcagttgtgtgtatgcacaagacacaacaacccttgtgcctgcaatcataacttttggtgattctgctgtggatgtagggaacaatgactatcttcccacccttttcaaggctgattaccctccttatgggagggactttgttaaccaccaacctactgggaggttttgcaatggcaaattagctact

SEQ ID NO: 150182 - DNA, 247 bp, Glycine max
ctgtctctctctctctctctcgatcaatcatggctttgcccaatcagcaaaccgtcgattaccctagtttcaaactcgtcatcgtcggtgacggtggtacaggaaagacaacgttcgtgaaaaggcatcttaccggtgaatttgagaagaaatacgaaccgaccattggagtggaggttcacccattggatttcttcacaaactgtggaaagattcgcttctactgttgggatactgccggacaaga

SEQ ID NO: 150183 - DNA, 250 bp, Glycine max
atggcttctcacgacggcatctccgctgcttcttcagattccgtcttcaatcacctcgttcgtgctcccgaagatcctatcctcggggtaactgttgcttataacacagatccaagtccagttaagctcaacttgggagttggtgcttaccgaactgaggaaggaaaacctcttgttttgaatgtagtgaggcgagttgagcagcaactcataaatgacgtgtcacgcaacaaggaatatattccgattg

SEQ ID NO: 150184 - DNA, 250 bp, Glycine max
gacatggtcaattggctaggaagttgtcagctgttgatctcgttggaattggggttggagctaccataggagctggagtgtatattctcattggaacagttgctagagagcaagcaggaccagcacttgtgatatcacttctcattgctggaatagctgctggactgtcagctttttgctatgctgagcttgcatgtcggtgtccgtctgcggggagtgcttatcattatacatacatatgcattggaga

SEQ ID NO: 150185 - DNA, 252 bp, Glycine max
cagcacaaagcgggttactgtctgttcaagctaccatctctctctctctttcttagtgcctccttgccagaagttaaaatggcccaagaaactttcctattcacatctgaatcagtgaacgaggggcaccctgacaagctctgtgaccagatctccgatgctgtgctcgatgcatgcttggagcaggaccctgacagcaaggttgcctgtgaaacctgcaccaagaccaacatggtgatggttttcggagag

SEQ ID NO: 150186 - DNA, 257 bp, Glycine max
ggaaggcagacagtgccacaacctcatttctctcaccacatttgcactttggtgaggtgagtgtgaagaaagttttccaccttgtccgcatcaagcaagtgttttgggccaatgaaggaaacaaggctggtgaagagagtgtgaacttgtttctcaagtctattggcctcagagagtattcgagatacattagtttcaaccacccttatagtcatgagaggccccttctagcccaccttaagtttttcccttgggtg

SEQ ID NO: 150187 - DNA, 245 bp, Glycine max
gaagaatggtggcctcaaattggtctacctaaagatcaaagccctccaccttacaagaaaccacatgacctaaagaaggcatggaaggttggtgttctcactgcggtcatcaagcatatgtcccctgatattgccaaaattcgcaagcttgtgaggcagtctaagtgtcttcaagacaaaatgactgcaaaggaaagtgcaacctggcttgccatcatcaaccaagaggaagccttggctagaga

SEQ ID NO: 150188 - DNA, 248 bp, Glycine max
cctcgagccgattcggctcgagggcatagtcagcaactgggacgatatggagaagatttggcaacacacattttacaatgagctacgtgttgcccctgaagaacaccccgtacttcttaccgaggcaccactcaatcccaaggccaacagagagaagatgacccaaattatgtttgagactttcaatgtgcctgccatgtatgttgcaattcaggctgtcttgtctctgtatgccagtggacgtacta

SEQ ID NO: 150189 - DNA, 251 bp, Glycine max
aatcaaggtctcaacccctcacgctgcttccatcattctcgaccctttccctccctctcaggcttacttcaaccaatccctcgtttccgttattctccctctccttcagttcctttcacgaaccggttcccctctcatgatgaacctttacccctactacgtcttcatgcagaacaaaggtgtggttcctctcgacaatgctctcttcaaacccctcactcctaataaggaaatggtcgaccccaacacct

SEQ ID NO: 150190 - DNA, 267 bp, Glycine max
gaagacccatatcaagttttatccaattggggtacggtgaaatcagatccttgtaactggtttggcgtcttatgcactatggttcgagatcatgtcatcaagctaaacatatcaggatcatcattaaaggggtttcttgcaccagagctggggcaaatcacctacttgcaggcactaattttgcatggcaacaatttcattggaacaatacctagagagttgggtgtgttggaatctctcaaggtgttggatttgggaatgaaccaa

SEQ ID NO: 150191 - DNA, 250 bp, Glycine max
cttccgttcctttcttcgttccttccccaacccaatcttcgccttcgcccacaacaactcctccttcaggatcgctgccaacgttactttccatttttacccttcatcctcgagaaaaaaatggcgaacgcagcatctggtatggccgtccatgatgagtgcaagctaaagtttctggagctcaaggcgaagaggacgtaccggtatatcgtttttaagattgaggagaaatcgaagcaagttattgtgg

SEQ ID NO: 150192 - DNA, 245 bp, Glycine max
ggaataccgataatcttgaagaactcgatagtgttgcagacattcggcgtcattcaccagcatccgtgtcaagaggttgagaatgtggtgataccgccttacgtttcgccggaaagtgtaaggagtacgctggaaaagtttccggtgaccggccggcgagacatttttgcttttttccgagggaaaatggaagtccatcctaaaaatgtcagccgacggttttacagcaagcgagtgaggacgga

SEQ ID NO: 150193 - DNA, 248 bp, Glycine max
  unsure (1)..(248): unsure at all n locations
ggtttttccagagttgtctttgaagtcctaaaacttgctgcacaaaataacaaactatttcgggtcttctgcacagagggaagaccagaccgaacaggtttgcggttgtcgaatgagctggccaaacttgatgtttcagtgaaacttctaatagattctgctgttgcatatactatggatgaggtggacatggtttttgtgggtgcggatggagttgntcgaaagtgggggcataatcaacatgatgg

SEQ ID NO: 150194 - DNA, 247 bp, Glycine max
cttgaattcacatttcaacaaccatagccatggctttctccttctccaaagcacttgtccttgcctgctccttctgcttatttgcgtctttggcttttggacgcgatttctccattgtgggctattcatcggaggacttaaagtccatggataagctcattgaactctttgaatcatggatgtcaaaacatggcaagatttaccaaagcattgaggagaagcttcttaggttcgagattttcaagga

SEQ ID NO: 150195 - DNA, 249 bp, Glycine max
cttaagcttgctactgagtttccacactgcataccttaggtcttccgaattcgaagttaatttgcaagatggctaaggaaaaggctcagatcaacattgtggtggttggtcatgtggaccctgaggaggcaaccaccattaacgagctgaagaagcctgttgtggagaaagaagctccagggcatgccatatgagggcatgcacgcacggcctcggaggggaaccagaaaattatgttaacaaaataat

SEQ ID NO: 150196 - DNA, 250 bp, Glycine max
gaaatgcttcagcaacatagtagtctaaagacaatcaagaagaaacttattaggaaagcccttgatatgatccgtaggattgctgatgaggatcctgatgagtccactgacaaagaaaagaaagatacgtcatctgacaataatgacgagaaaggtcaatattccaagttctggaatgagtttggtaaatccattaaacttggtatcatcgaggatgccaccaacagaaatcgtttggcaaaactgctca

SEQ ID NO: 150197 - DNA, 241 bp, Glycine max
caaaagacaatactattggaactgctaataatcccaattcaaatgtgggtaaaagaagttgggattttaaaggatcagtaatggggaaaattaaggttcattgtggtgtcctttttcatgatttctggtgtaggagcactcattgaagataaaggaattagtaaaggacttggtataaatgaagaagtgcaacctagcatggaatcaagtacaaaatttagtgatgtacaaggtgtcgatg

SEQ ID NO: 150198 - DNA, 107 bp, Glycine max
gacaaagtccccggtgttgtctatacaatgcccgaggttgcatctgttgggaagacagaggagcaggtgaaggaacttggagttgaataccgtgttggcaagttccg

SEQ ID NO: 150199 - DNA, 251 bp, Glycine max
ttccaatatattccattctctctgtgtatttccctacctctcccttcaagatgcagatcttcgtcaagaccctcaccggcaagaccatcacccttgaggtggaaagctctgacaccatcgacaacgtcaaggccaagatccaggacaaggaaggaatccccccggaccagcaacgtctcattttcgccggaaagcaacttgaggacggccgtacccttgctgactacaacattcagaaggagagtactctt

SEQ ID NO: 150200 - DNA, 246 bp, Glycine max
aattatcaactctttcaaaagggagaagaaaaggaaaggaaacaaaacgcacaaaggattattatagcaatggcagaacaaaaccaaaaccagacaactgaagctggaaggcaccaagaggttggccacaagagccttctccagagtgatgctctttaccagtatattctggagaccagtgtctacccaagagaacctgaatccatgaaagaactgagagagttgacagcaaaacacccatggaac

SEQ ID NO: 150201 - DNA, 246 bp, Glycine max
cagaatattctgcttttcgagaagcaagctacggacattccacactggagataaaaaataggacccatgctatctaccactggaatcgcaatgatgatggcaagaaagtaccgactgactcttttgtactgcataatcagtactggggacacaatcgcagaagaagaaaactgaagcattttctattgaaagttattgatgaagttgccagcatgtaatttgaagttgaagcactagcatatttgg

SEQ ID NO: 150202 - DNA, 247 bp, Glycine max
cacacacacaaattctcaaacccaaatcccaagtctcctaaaaccctaattcgcagtgaaaatgagagaaatcttgcacatccagggagggcaatgcggtaaccagatcggagcgaagttctgggaggtgatatgcgacgagcacggcatcgaccacaccggaaagtacagcggcgactccgagctccaattggagcgcatcgctgtttattacagtgaagccagcggcggaaggtacgttccacgc

SEQ ID NO: 150203 - DNA, 252 bp, Glycine max
tgaaagatctctcccttcaccctagaatcccaggcacatgctgtgattctagggtgaagggagagttctttcaccaaaccacatttagcatcagtttgtctgttgcaaaaaaatttattgaagatgtgcaaaatctagttcaattggagccgaagggattttgtggcatagagctttacaatggaattctcatgcgttatgtcaaggcttcgagtgcctatttggggaagcaagatgatgctttagacattg

SEQ ID NO: 150204 - DNA, 255 bp, Glycine max
gttggtgcaaagcatccttcgtttcaatttctctctctcagcgctttctgcaatcgaacctttcatctccaaagggatccacaggccgaaggagaaatggggctgacattcacaaagcttttcagtcggcttttcgcgaagaaggaaatgcgaattctgatggttggtcttgatgctgctggtaagaccactatcctgtacaagctcaagctcggagagatcgttaccacaattcctaccatcgggttcaatgtt

SEQ ID NO: 150205 - DNA, 249 bp, Glycine max
ggcttccgcttgtgcttcctctgcaattacagctgttgccatctctacgccgagttccgggcagaagaatggatcaggaggttgttttcttagtggaaggaaattgagggtgaaaaaggagagagcagcaattggaggacgatcgatgggcactacagtgtgcgcagttgctgagcctgacagacctctatggttcccaggcagcacccctcctccatggcttgatggcactctacctggagacttcgg

SEQ ID NO: 150206 - DNA, 263 bp, Glycine max
ctccgtggtggcatgcagatcttcgtcaagactctcactggcaaaaccataaccctagaggtcgaaagctctgacaccattgacaacgtcaaggccaagatccaggacaaggagggaatccccccagaccagcaacctctcatcttcgccggaaagcaacttgaggacgggcgcaccctcgccgactacaacatccagaaggaatctacccttcacctcgtcctccgtctccgtggtggcatgcagatcttcgttaagaccct

SEQ ID NO: 150207 - DNA, 237 bp, Glycine max
ctctctccatccaacatcgaaagccggtcgttttgtgttccgccgaaggcaccggaggttgtagcaggctagcagctatggatttggcatccaatctcggtggcaagattgacaaagccgaagttctctctgccgttcagaagtatgagaagtatcatgtttgctatggaggtcaagaggaagagaggaaagctaattataccgatatggttaataaatactacgatcttgttacca

SEQ ID NO: 150208 - DNA, 235 bp, Glycine max
ctgtttgatgctgtggtttacctgatgctgactaatgatgtcattcatgggctcttccctgaggctgttacaattggtgaagatgtgagtggaatgcctacattctgccttcctacacaagatggtgcccttggctttgattatcgcctgcacatggccattgcagacaagtggattgagattctcaagaagaacgatgaagactggaaaatgggtgatatcatccacacaacat

SEQ ID NO: 150209 - DNA, 242 bp, Glycine max
gcaaagagagagtgtgtgaaaagtgaaacaaaaaacagaacaacaatggcgacacttaaggttcctcagcctcttccccccgttgcagatgattgtgagcagctccgaaaagccttctcaggttggggaactaacgaggagctgattgtatcgatcttggctcataggaatgctgctcagaggaagcttatcagagaaacttatgcccagacctatggagaagatctcctcaaggccttgga

SEQ ID NO: 150210 - DNA, 241 bp, Glycine max
cttgtggatttcctatcccatgctgcaatagtaggatttgtagcaggagcagccattgtgattgggcttcaacagttaaagggactcttaggaatcacccattttacgaccaaaaccgacatagtctctgtcatgaaagctgtttgggaagcagttcataatccatggagccctcgaaattttatcctgggatgctccttcttggtcttcatcctaacgacgagatttttgggtaaaagga

SEQ ID NO: 150211 - DNA, 246 bp, Glycine max
attaattgcaagaatggcacttcgttgcttggtgatgtccctttctgttctcttcactcttggtcttgcgagagaaagccatgccagagacgaagatttttggcatgctgtttggccaaacactcccattccaagttcattgcgagatcttctaaagcctggccctgcaagtgttgaaatcgatgatcaccctatgcaaattgaagaaacacagtacccgaaaaccttcttctataaagaagacct

SEQ ID NO: 150212 - DNA, 248 bp, Glycine max
cacttctggatgcagaccttgaaagtgatatcttgggttggcaatatatctcaggaggcttaccagatggccatgagcttgagcgcttggacaatcctgagattcaaggggctaaatttgatccagaaggtgaatatgtgaggcaatggctacctgagttggcaagaatgccaactgagtggatccatcatccttgggatgcaccacttactgtgcttcgagcagcaggagttgagctgggccagaat

SEQ ID NO: 150213 - DNA, 259 bp, Glycine max
tgagaattccctgctgttttatacagcaggtcttgagattcaagggcaggtcttggggcgaaacagacccgagattcggtgagacgtgtcgctatgtggccgaggcacatgttcaggcactgcagtttgatgaggctgagaagctgtgccagatggctcttgacattcacaggggaaatggagctcctgcttccatcgaggaagctgctgataggagactaatggggcttatctgtgactcaaagggtgattatgaagc

SEQ ID NO: 150214 - DNA, 207 bp, Glycine max
tcgaattctgctttcttctgatggagagatgttgagttctatgaaccttcttctttacatggctccgattactgtagttatgccgcttcctgctagacttataatgtaagaggatgcagcatgtattacatatgctcttgtctgatatgatgtgaagaacattaggtatctgctatttacttcagcacttggttattttgtcaacct

SEQ ID NO: 150215 - DNA, 241 bp, Glycine max
gttcgtgtccattcctagtgctgatgctatttacatgaagtggattctgcatgactggagcgacgagcactgcatcaagatcttgaagaactgcaggaaggcaataccagagaagacaggataagtcataatcgtggatcacgttcttcgacccgaaggcaacgaactcttcacagacgttggcatcgcattcgacatgatgcttctcgctcacaacgccggtggcaaagagaggaccgaa

SEQ ID NO: 150216 - DNA, 241 bp, Glycine max
gaccttggctgcatttgatgaggataacttgattccttgttttggatttggggatgcatcaacacatgatcaagatgtctttagtttctatccagatgaacgaatttgcaatggatttgaagaagtgttgagtcggtatagggaaattgttcctattattcgacttgcaggtcctacttcatttgcaccaatcgttgaaatggccatgacaatagttgagcagactggaggccagtaccat

SEQ ID NO: 150217 - DNA, 242 bp, Glycine max
tgcagacaagatgagccacatctccactggtggtggtgccagcttagagcttcttgaggggaagcaactccctggtgtccttgcccttgatgatgcttgagtaaacatcactagttcctctgtaatttgtgctttatattattattatggttggatttcagccaacagtggattgaggtacaatgagagagctcttgttgctcctgtagaggcttaatataggttaggtttcgaaataagag

SEQ ID NO: 150218 - DNA, 252 bp, Glycine max
ctctttaccagtatattctggagacaagtgtctacccaagagaacctgaatccatgaaagaactgagagagttgacagcaaaacacccatggaacatcatgacaacctctgcagacgaagggcagttcttgaacatgctccttaagctcatcaatgccaagaacaccatggaaattggtgtctacactgggtattcacttcttgccaccgctctcgctcttcctgaagatggaaagatcttggccatggaca

SEQ ID NO: 150219 - DNA, 254 bp, Glycine max
gttatcttctagtatttttcaagtaacttaaggtttcaaacctaggaagttggaagtcatggcagcaacattgatggcagcaacaagttctggcactcttaaagcaactcctttcctaggccaaggcaagggtgccaatgccaatgctcttagggatgttgtttccatgggaactgggaagtacaccatgggcaatgatttgtggtatggaccagacagagtgaaatacttgggacccttttcagctcagaccc

SEQ ID NO: 150220 - DNA, 259 bp, Glycine max
gtggaaagtgctacctctatttaggaacatacaccacagtccagacaacttcaaggagccagaaaaatttgatccctcaagatttgaggctgctccaaaacccaacacttttatgccatttggcagtgggatccacatgtgtccagggaacgaattagccaagttggagattttggtcctcctacatcatctgaccacaaagtacaggtggtctgttgtgggtgcaaagaatgggattcaatacggcccttttgctctt

SEQ ID NO: 150221 - DNA, 239 bp, Glycine max
cactccttcatctacgtaatttccttccttcctttctttctttctttctttctttatcttctcatttttctcaatacaatttttttctttctttctcaagttttgctacttttctcttctcaaccatagttcacatattatatcatcacatatcatagtgatatcatatcacaatgtgtggcatacttgctgtgcttggttgctctgattcatctcaagccaaaagggtccgcgtcctt

SEQ ID NO: 150222 - DNA, 238 bp, Glycine max
cgcaacaaaaagaaagaatcccaggcgaggagaaagatggaggggaaggagcaggatgtgtcgttgggagcgaacaagttccccgagagacagccgattgggacggcggcgcagagccaagacgacggcaaggactaccaggagccggcgccggcgccgctggttgacccgacggagtttacgtcatggtcgttttacagagcagggatagcagagtttgtggccacttttctgtttc

SEQ ID NO: 150223 - DNA, 238 bp, Glycine max
caggacggtggaagagtttcagaaagggcatgtggatgcagagaagatcattaacgttgcatacatgtttaatacaccagaaggcagagtgaagaatccagaatttcttaaggaggtttcatatgcttgcaagaaagaagatcatatcatcgtgggttgtcaaagtggagtgagatctctgtatgcaactgctgatcttctaacggaaggatttaaggatgtgagcaacatgggagga

SEQ ID NO: 150224 - DNA, 240 bp, Glycine max
cttgattcccttcatgttcactaagtatttgcaagatgtgtttaaggttcctttggttatatagctcactgatgatgagaagttcttctggaaaaatctttctatagacgagtgccgaagacttgcaagggagaatgcaaaggacatcattgcttgtggttttgacatttcaaagacattcatcttctctgatttcaattatgttggcggttccttctacaagaacatgtgtgaggttgg

SEQ ID NO: 150225 - DNA, 247 bp, Glycine max
cacttctggatgcagaccttgaaagtgatatcttgggttggcaatatatctcaggaggcttaccagatggccatgagcttgagcgcttggacaatcctgagattcaaggggctaaatttgatccagaaggtgaatatgtgaggcaatggctacctgagttggcaagaatgccaactgagtggatccatcatccttgggatgcaccacttactgtgcttcgagcagcaggagttgagctgggccagaa

SEQ ID NO: 150226 - DNA, 248 bp, Glycine max
caatatttgcccttagcagtaacaaaattgctgtggtcaagtattctctgttgggttctattctttcaaaccttcttctggttcttgggacctctcaattatgtggtggcaatgaaaccttaaagtggaacaaaaatatgacagaagacaagcagatgtgaactcacttatgctgttgttgggattgttgtgctacttgcttccaatgctgttcaaatacagtggtgcctcagctgctctcactgtag

SEQ ID NO: 150227 - DNA, 252 bp, Glycine max
ttgatgactagagagcaaagttgtatgctagtattgtggataaaggttgtgccgcaacgtttgcatttgcagctataatatttggtgaatcctcagaagctctgttttggctacagctgcctcaggcacttaaacatttgttgaacaaggtattgagaaagcctccaccaaaagaatccacagcagcacctatctctgatgttgatcatgagacatctctactatctcggatatcatcaaagggaaaaccga

SEQ ID NO: 150228 - DNA, 159 bp, Glycine max
agtcccatccgaatatggtaattcttggtgacgaagttgctgcatcaaagcttaacctttgctgcaattgtcaaacacggttactgaatgcaattcaggctagagctatagaagacaaataccatggaggtcatctccttccagaaaggctgatagaga

SEQ ID NO: 150229 - DNA, 259 bp, Glycine max
ctcagaattctctaaaagagatctttttctgctctttgaagaaagaagggtctttgcttgattttggagatgtctctgctctcagatctcatcaaccttaacctctccgataccaccgagaaggtgatcgcagagtacatatggatcggtggatcaggaatggacctgaggagcaaagcaaggactctcccaggaccagttagcgacccttcagagcttcccaagtggaactatgatggttccagcacaggtcaagctc

SEQ ID NO: 150230 - DNA, 254 bp, Glycine max
ctaagatgcaggttgtggttgataaatatcctacatggggtgatgttgttcaagtagacacgtgggtttctgcatcagggaagaatggtatgcgtcgtgattggcttgtgcgtgacgccaaaactggtgaaatcttgacaagagcctccagtgtttgggtcatgatgaataaagtgacaagaagactgtctaaaattcccgaagaagtcagggcagagataagctcttattttgtggattctgctccagttgtg

SEQ ID NO: 150231 - DNA, 254 bp, Glycine max
aaagaatgcccgtggacagcaggggtcttatccaatcaagtcattttatacctccaacatgcccattattcttcagtctgcccttgtttccaatctctacttcatttctcagcttctacacagaaagtacagtggaaacttcattgtagatctattgggcaaatggaaggagtctgaatatggaggtggtcagtctgttcctgttggtggtattgcatactacatcactgcaccttccagcttagctgatatgg

SEQ ID NO: 150232 - DNA, 256 bp, Glycine max
gcgaagagaatggctcccaagggtttaatctttttggctgtgttatgcttctcagcactgtcactgagtcgttgtcttgcggaggataatggacttgttatgaacttctacaaggaatcatgccctcaggctgaagacatcatcaaagaacaagtcaagcttctctacaagcgccacaagaacactgctttctcctggctcagaaacatcttccatgactgtgctgttcagagttgtgatgcttcactgttgctgg

SEQ ID NO: 150233 - DNA, 255 bp, Glycine max
agtaggagcccttacaccttgcagaatcatctctacattcccaagggctcctactacgcaataactccaagcccgatctcaaattaatatttcatttactcatcttaatcaatattaaataagaaaagatgggagagatgtcaaacttccaattgggtgtgattggtgcactatttctctctgtggcttcttctgtctccattgtcatctgcaacaaagccttgatgagcaatcttggcttcccttttgccacaa

SEQ ID NO: 150234 - DNA, 252 bp, Glycine max
ggaagtaaatggtttgatcagctccaggggagacatccttccaccctgaaatcgaagaactcctttacagctcagtggagaatgaagaacacatatgtgtgctgaaggaccgcagcaagccaattatcttcaccatggcaaggttggatcgagtgaagaacatcacaggacttgtggagtggtacggtaagaacgcgaactcgagggagctggtgaaccttgtggttgttgctggagacaggaggaaggagt

SEQ ID NO: 150235 - DNA, 248 bp, Glycine max
tgttgaagcatgagacaaagcatgaacacatctttgtggttggaaatactggcaagaagtttgagattattcttgattttcttggtttggtggagaaattttattacctctcagggagatatgacattgagctgactgtcggggatgctgtcatggagaactctttcttatggctgcttggtcaagttgatttagatcttcctgaagcacctgagaaggcagcccgtcttcctccactccctgttgat

SEQ ID NO: 150236 - DNA, 250 bp, Glycine max
ctgccacaatgcctcctgaggcccttgagatcaccaggaagtttatgaacaaacctgtgaggatccttgtgaagcgtgatgagctcaccttggagggtattaagcaattttatgtcaatgttgaaaaggaggaatggaagctggacacactctgcgatctttatgagacattagctatcactcagagtgtcatttttgttaacaccagaaggaaagttgattggttgactgacaagatgagaagccgtga

SEQ ID NO: 150237 - DNA, 251 bp, Glycine max
aagacaacgactgttgtctgacatttcgagattggaggccaaagtggagaggcttgaaggtcaactacaagtcaaagacagggagatagcgactattactagaacggaagctaaaaacactgcagctctgaaggcccaaattgagaagctgcaacaggagagggatgaattccagagaatggttattggtaatcagcaagtaaagactcaacaaatgcatgagatgaagaagaaggaaaaagaatacataa

SEQ ID NO: 150238 - DNA, 267 bp, Glycine max
tccgctcgagagagcagtgtcgtgtgtgtgtgtgtctctctctttctctgcttttgagtaattaaatgagagcaaaaatgacgctcaaaacagcggcggtggctgtggctatagtgtgcatttctgcctttagcatcactgtggtggctgaagatccatacaggttcttcaactggaatgttacatacggagacatttatccacttggtgttcgccaacagggaatacttatcaacggtcaattcccaggtccagacattcattctg

SEQ ID NO: 150239 - DNA, 254 bp, Glycine max
ggcaactaacagacctgacattattgacccagcacttcttcggccaggccgtctggatcaattgatctatattcctctccctgatgaggattcccgtcatcaaatctttaaagcctgcttgaggaagtcacctgtcgcaaaaaatgttgatttgagaacattggctaggcatactcaagggttcagtggtgctgatattacagaaatatgccagcgagcatgcaaatatgcaataagagaaaacatagagaagg

SEQ ID NO: 150240 - DNA, 252 bp, Glycine max
gcaaaacctgatctggtaaagaaagccttgaagtatgtacattctgctgtacttgataaacttggtgggaaagaactagagttgttgattgccattcttccagacaacaatggctagctgtatggcgatctcaaaagaatctgtgaaaccgatctggggttgatttctcagtgctgtcttacaaaacacgtattcaagatcaataggagttatttggcaaatgtggcactaaagatcaatgtcaagatggga

SEQ ID NO: 150241 - DNA, 252 bp, Glycine max
caggcgaggagaaagatggaggggaaggagcaggatgtgtcgttgggagcgaacaagttccccgagagacagccgattgggacggcggcgcagagccaagacgacggcaaggactaccaggagccggcgccggcgccgctggttgacccgacggagtttacgtcatggtcgttttacagagcagggatagcagagtttgtggccacttttctgtttctctacatcaccgtcttaaccgttatgggagtcgcc

SEQ ID NO: 150242 - DNA, 250 bp, Glycine max
gaatgttttggaggcatttcgaagggctataacaacttggagtagatggattgatgccaacataaatcaatctaagtctatggtattcttcagaggctattctgcttcacatttcagtgggggacaatggaattctggtggacaatgtgacagtgaaaccgtgcctatcaagaatgagaagtacttgagggaatacccccctaagatgagggtattggaaaaggttttgaagaacatgaaagcccatgtc

SEQ ID NO: 150243 - DNA, 248 bp, Glycine max
aagcacaaaaaaaaagtgtctggtcccaaaatacaacaagagtgtaaaatggtggtggcagagttcactagtggtggcttgaggggaatgaaggccttcagctaccatgttctcacggggcgttggttcatgctatttgcatctttactcatcatgtccgttgcaggggcaacctacatgtttgggatatactctaacgaggtcaaaacctcattaggggtacgaccaatccactctcaacttgctaa

SEQ ID NO: 150244 - DNA, 249 bp, Glycine max
aaaaatgaaacctgttttctgtggaaacctggatttcgacgcgcgtcaatctgacgtggagaggctcttcagaagatacggcaaagttgatagagttgacatgaaatccgggtttgcttttgtctacatggaagatgaacgtgatgctgagtatgcaatcagaaggcttgatagaacagaatttggtagaaagggtcgccggaaccgtgttgagtggactaagcaagaacgtgacagtagaagatcagg

SEQ ID NO: 150245 - DNA, 249 bp, Glycine max
cgctgagaagcttgaaatgctgtccattgcatttgctggggagagcgacaagggaatgctctatgtgttgaatggatgcaagaagcttaggaagcttgagattagagactgcccttttggcaatgtggcacttctgacggacgtagggaagtatgaaacaatgcgatccctttggatgtcgtcctgtgaagtgaccgtcggagcctgcaagttgctagcgaagaagatgccgaggttgaacgtggagat

SEQ ID NO: 150246 - DNA, 252 bp, Glycine max
gtggttcagaaacaaatgaggtttacacctactatagatcgcttcccatgccagttcacttcacacaaatttgggtccattgatcccatttctggtaaagacactgatgatgacaatggtcagtttgtttcaagtgtgtgctggagagggaaatcgggcatgcttattgcggccaattcaagtggatgtgtaaaagtgttacagatggtttaaagaaaaggttccatgtgacggcgactttcttacatttgc

SEQ ID NO: 150247 - DNA, 252 bp, Glycine max
gccatggcggtttccgcaattggttttgaaggtttcgagaaaaggttggaaatatcctttttccagccgggactttttgctgaccctgaaggaaggggtctaagggctcttacaaaatcccagttgggtgagattctaacaccagctgcttgcaccattgtttcttcgctcaaaaacgataatgtcgactcctatgttctatctgagtccagcctctttgtttatgcctacaagatcatcatcaaaacctgt

SEQ ID NO: 150248 - DNA, 252 bp, Glycine max
gttcgtagaaacccctgaagatggtggcaaaaacttcgacgatgatggacgagtcagaagaacgggtacatggataactgcgagtgcccatatcataacggcagtgatagggtcaggagtgttgtcacttgcatgggcaattgcacaaatgggttgggtggctggccctgccgttctctttgccttctctttcatcacttacttcacttccactcttcttgccgactgttatcgttcacctgatcctgttca

SEQ ID NO: 150249 - DNA, 252 bp, Glycine max
aaagaaagaaagaaagaaaaccctagcttaccttttcaactttcaagatgcaaatctttgttataacactcactggtaagacaatacacccttgaggtggagagttcagataccatagataatgtaaagtccaagattcaagacaaggaagggatcccaccagaccagcaacgtctcatttttgctggcaagcagcttgaggatggacgtacacttgctgattacaacattcaaaaggagtccactctacac

SEQ ID NO: 150250 - DNA, 249 bp, Glycine max
gtttgttgtttcgtttttcctttcctttccgccagaatccgttgagaatggcgttgccggtagtcgtcgatgcagagtacctcaaggaggtcgacaaggctcgccgcgatctccgcgcactcatcgctaacaggaactgcgctcctctcatgctccgattagcctggcacgatgccggaacttacgatgctaagaccaagaccggtggacctaacggttcgatccggaacgaggaagagtattctcacg

SEQ ID NO: 150251 - DNA, 247 bp, Glycine max
ctctaacctacctctttttcttctctctcaacaacttcaccttcttcctcctcgatcatgtctcacttcaagggcaagtaccatgatgagcttatcgccaatgctgcgtacattggcactcctggaaagggtattcttgctgctgatgagtcaacagggacaattggcaagcgtttggccagcatcagtgtagagaacattgaatccaacaggcgagctcttagggagctgcttttcactgctcctg

SEQ ID NO: 150252 - DNA, 245 bp, Glycine max
gattcgaatcgttcccagcctcgcaccaccatgaatcccgaatacgattatttgttcaagcttttgctgattggagattctggtgtaggcaagtcatgtcttctcctgaggtttgctgatgattcataccttgacagctatatcagtaccattggagtggactttaaaatccgcactgtggagcaggatgggaagactattaaacttcaaatttgggacactgcgggtcaggaacgtttccgaac

SEQ ID NO: 150253 - DNA, 247 bp, Glycine max
ggctccatggctcagtatgttcctgctcttaagcactacagtgatgggaaattgcctttggtttgtaccatgtatgcttcttctgagtgctactttggggttaatctgaagcctctttgtgatcctggtgatgttgcttttacgctcttgcctaacatgggttactttgagttccttcctcttggacataacgggacgctgttgatggactttgatgaaggggagcaggttcccaatgataagcttg

SEQ ID NO: 150254 - DNA, 157 bp, Glycine max
ctggaatgctttgattgcagtgtaataatcttgtgagtatgaaaagtcacgggatctgcgtgttgcgaagaaagtgtttgatgcttgagaaatgatgactataatctctatctttgtacttttttagtggggtacctgtatacattacactggtttt

SEQ ID NO: 150255 - DNA, 248 bp, Glycine max
ctgcatcggaagaaaccctagccactctcccggcgtcacgatgcagatcttcgtgaaaaccctaacgggtaaaacgatcacgttggaggtggagtcttcggacaccatcgacaacgtgaaggccaagatccaggacaaggaaggcatccctccggaccagcagcgcctcatcttcgccgggaagcagctggaggacggccgcaccctcgccgactacaacatccagaaggagtccacgcttcacctcg

SEQ ID NO: 150256 - DNA, 247 bp, Glycine max
gcagcatcaaaatgcaagaagggaactctaagatactggctcagtgcaggtcctggagatttcttgctatcatcagcaggatgtccaacatctgcattctatgcagtagtcattgaccaagatatttcccaatgcaaagagggagttaaagtgattacttccaacataccaatgaagccttctctatttgccacagccaaaaatgtgaactatcttccaaatgtcctttcagtaatggaagctgaag

SEQ ID NO: 150257 - DNA, 244 bp, Glycine max
ctcatgatccctgagccatggtaccatttccctcataaaattctctcttcctttttgggttctcctattccaagcttcaatcttttctctcttctcacagccttcttcactcacaggaggtgaagatgtcgactccggctaggaagagactgatgagggattttaaaagattgcaacaagatcctcctgctggcatcagtggggctccccaagacaataatattatgctttggaatgctgttat

SEQ ID NO: 150258 - DNA, 243 bp, Glycine max
aaagtggtggttggaaagcttgctcctttgttgttgtatatgaggtattcgaaagaatggcttattatgggatatcatcaaatttgatcctttatcttacaacaaagcttcaccaaggcacagtatcctctgcaaacaatgtcaccaattgggttggcaccatttggatgacacccatattaggcgcctacgttgctgacgctttccttggccgctattggacttttgtcatagcctccacca

SEQ ID NO: 150259 - DNA, 263 bp, Glycine max
ttcggctctcggttctagatcatctctaccctcttggcttttgcaattaaagctcaaaatcatggcatcagtgcgattggaaaatttcaacaaggaataaatcctccatcatggaatatgttgctctttcatggaagtcacctaggcctagttatgaaaacagggcttatcaccgggattttgtccctcactgaaggtattgcagtaggaaggacatttgcagctctcaaaaactacaaagtggatggaaataaggaaatgat

SEQ ID NO: 150260 - DNA, 245 bp, Glycine max
ctccagagagaagaagaaacttaatcgatcatcacttcacttcactaatacatcatggcagacgagacccagaacaagtatgagagctctgaggttgaggtccaggatcgtggtgtttttgactttctcggtaagaaaaaggatgaagaagacaagcctcatcctcaggaggaggtcatcgccaccgagtttcaaaaagtcactgtctcagaccaaggagagaacaagcacagcctcttagaaaa

SEQ ID NO: 150261 - DNA, 244 bp, Glycine max
cactcattaattgcaagaatggcacttcgttgcttggtgatgtccctttctgttctcttcactcttggtcttgcgagagaaagccatgccagagacgaagatttttggcatgctgtttggccaaacactcccattccaagttcattgcgagatcttctaaagcctggccctgcaagtgttgaaatcgatgatcaccctatgcaaattgaagaaacacagtacccgaaaaccttcttctataaag

SEQ ID NO: 150262 - DNA, 239 bp, Glycine max
gtgatttggagtttggagcgactgaactaatcattaatttgcactcgctgtttcagcttcatcacccttcttttgcatcatttatatctcttgagaaatggcacaagaaacctttctattcacatctgaatctgtaaacgagggtcaccccgacaagctgtgcgaccagatctctgatgcagtacttgatgcgtgccttgaacaggaccctgacagcaaggttgcctgtgagacatgca

SEQ ID NO: 150263 - DNA, 247 bp, Glycine max
tatatgcggatgatctgattgaagtcttgaagaaaaaacatgcttctggaacgtataaaaacctagtattttatctggaggcatgtgaatctgggagtatctttgaaggtcttcttcccgaagatatcaatatttatgcaaccacagcttccaatgcagaagaaagtagttggggaacatattgccctggggagtatcctagtcctcccccagaatattcaacctgcttgggtgatctgtacagtgt

SEQ ID NO: 150264 - DNA, 244 bp, Glycine max
gcaggtggtgggttggccacctgtgcggtccttccggaagaacatgttggctgtgcaaaagagcgttggagaagagagcgagaagaacagcagccctaatgcaagctttgtcaaagttagcatggatggagcaccttaccttcgcaaagtggacttgaagatgtacaagagttaccgagagctctctgattctttaggcaaaatgttcagctgcctcacctttggcaattgtgaatcccaagga

SEQ ID NO: 150265 - DNA, 245 bp, Glycine max
cttagttatctaattacctcaattaatcccttaattgcaagcatcatggctgaggagaaacaccaccaccacttccaccaccacaagggcgatgatgtgcctggcgaggttgattataagaaggaggagaagcaccacaagcatcttgagcaccttggggaacttggtgctgcggctgccggtgcttatgccttgcatgagaagcatgaggccaagaaagacccagagcatgctcacaggcacaa

SEQ ID NO: 150266 - DNA, 242 bp, Glycine max
tagtgttcttccacccccgtaccgtctctgcctctctgcaatccacagccgaaaatgcctttcaagaggtacgttgagatcgggagggttgctcaaatcaactacggcaaggaatatggcaggctcgtcgtcatcgtcgacgtcattgaccagaacagagcacttgtcgatgcccctgatatggtgaggtcccaagtcaatttcaaaaggctttcccttaccgacatcaagattgacatcaa

SEQ ID NO: 150267 - DNA, 244 bp, Glycine max
gcgaatccctctctctatctctcacacacactttctctctctctctctctcacccagatcttgtagcaatggcgagcgctcccactccacgcgaagagttcgtgtacatggcgaagctggcggagcaggccgagcgctacgaggagatggtggagttcatggagaaggtctccgcctccgccgagagcgaggagctgaccgtggaggagcgtaacctcctctccgtcgcctacaagaacgtgat

SEQ ID NO: 150268 - DNA, 247 bp, Glycine max
gtgataagctgtaatagtctttccaagatgccaaacattacgttcacaattggaaataaaccttttgtcctcacaccagagcagtatattctaagaactggagaaggcattacagaagtctgccttagtgggtttattgcttttgatgttcctcctccaaagggtccattgtggattcttggcgatgttttcatgagggcatatcacaccgtctttgactatggaaatctccaagttggctttgccg

SEQ ID NO: 150269 - DNA, 246 bp, Glycine max
ctttggcagaaccaatggatgttgatgatgcggacaatcgaagtagctggagaagtccacgtgaacagcttcaacattggcagatgaacaggaggaagttggcattttcaacagtggggacaccagactacattgctcctgaagtacttttgaaaaaaggatatgggatggaatgtgattggtggtcactgggagcaataatgtatgaaatgctggttggttacccaccattttactccgatgatc

SEQ ID NO: 150270 - DNA, 243 bp, Glycine max
gtgcaaagggtaaccgttctgctttgccatcatcaacaataatgataagacagccaattgcaaggtttcaaggtcaagcaacagatgttaaccttgcaagaagagaagtcaataatgtgaagacagaattggttaaattgtatgcaaagcatatggaaaaaacacctgagcagattgaagctgatattcagcgtccaaagtattttagccctagcgaagtgtatgagtatggcatcatagata

SEQ ID NO: 150271 - DNA, 242 bp, Glycine max
aattgaatttcaatttccctaggggcttaatatctccccgcatttgtgcctagcctcattattatcatagtagatattcattccccttatctttctctcttctctctccccgcccaaaccctaactccctaccctattccgctttctctcatccatcatgaaaggaggaaagtccaagaccgaatctaagagagccgatgccaaacttgctgtgaataagaagggcgccgccaccaagacta

SEQ ID NO: 150272 - DNA, 241 bp, Glycine max
accagtttcactgcataaatttgagagaaaactctgcaaacatgttggtttatcaggacctccttacaggtgatgagcttctctcggactccttccgttacaatgaaattgagaatggaatgctgtgggaagttgaggggaagtgggttgttaagggagcagttgatgttgacattggtgcaaacccttctgctgagggtggagaagatgagggagtcgatgacgcagctgttaaggttgt

SEQ ID NO: 150273 - DNA, 241 bp, Glycine max
gcgacgacgatccaagtgatagacactcgttgcgatggaacttgtagctgaatccgagcgaactctgtacccatacgtgactggatcctctgtagtcgctatcaaatacaaagatgggattctaatggccgctgacatgggaggttcgtatggatctaccctgcggtataagagtgttgagcgtatcaagcctattggaaagcattctcttcttggtgctagcggggagataagtgacttt

SEQ ID NO: 150274 - DNA, 244 bp, Glycine max
ccaccacacctctcctcgttcacgctacccctttcagctcttcttctacctttcaagttttaaaagtataaagatggcagagacattcctatttacctcagagtcggtgaacgagggacaccctgacaagctctgcgaccaaatctccgatgctgtcctcgacgcttgcctcgagcaggacccagacagcaaagttgcctgcgaaacatgcaccaaaaccaacttggtcatggtcttcggagaa

SEQ ID NO: 150275 - DNA, 247 bp, Glycine max
ggtttggtgtggcgattgctactggcacccaatttattcagaattttcctgagcgaacttataaatcaatgcttattccacttctgcaagaagataatagagctggcgaaacaactcgcaaagggttttatttgtatgatgataaacgcaaggctagtcctgatcctgaattgaagaactatattgagaaggctaggagcatttctggtgtctccgttgatccaaagcttgccaaattacaagaaaa

SEQ ID NO: 150276 - DNA, 245 bp, Glycine max
gggcaagcccatccaagccgcctaatgcacgccaccacaatagatcgatctttgcaataccacgtccaggagttcgagaggaccctgcaggagaaatttccagcatgctccatagccgcaaagagacggatttcttcaacaacaacaatattgcatgtacagggcttgggaatgaaaaatttctcacgtactgctgcaaatctcttgtctgctgtgacaaaaatagatagcagttactatcctga

SEQ ID NO: 150277 - DNA, 246 bp, Glycine max
atttcaacccaaggagcttgggaacaaactcctgctccttcttctccttggtcataggcaatgggaggtgcactgggaaagagtgaatcacctagaaagggatcgatgccagaaactaagctcgaggctaaaatggttgaagcaatgcagcggagggaatctcaaggaagttccgtgaaatcattcaacactataatcttgaaattcccaaagattgatgagagccttagaaaatgcaaagtcata

SEQ ID NO: 150278 - DNA, 244 bp, Glycine max
aaaatggatgctactacacccaagtattccaaggccaggtatgatgaaattgtgaaggaagtctcttcctacttgaagaaagtaggatacaaccctgacaagattccttttgttcctatttctggttttgagggagacaacatgattgagaggtccacaaaccttgactggcacaagggtccaactctgcttgatgcacttgaccagattagtgagcccaagaggccctctgacaagcccctca

SEQ ID NO: 150279 - DNA, 235 bp, Glycine max
gttcgtcagcgcagttcatgtataataacgatgccttaattacaaaaagtgtttggctttcaaggtgcaaaatagtctattatacagtattcagctgcttgtatggatttgtaggatcttgtgcacacctagctatggtcaattcatcttggactaaatcccatattgaaaatctttggagatttcctgaccgtattaagcgagtttatcctccttgtgatacttcaggactcca

SEQ ID NO: 150280 - DNA, 244 bp, Glycine max
atcatcttgctttcttggaatgcaatatgctactctttccctttcctactgtttttgcttttgtgttgttgtgtgccactaatgagcaccctccttggatacaacatgagcatggggtcctctgctagaggggcatctgaagatcaaatctcacaactcccaagttggagatataaaggggttcacaccaacttggaccttggcaatgactctcaaagcagtgaaagattgatcaatgaagatc

SEQ ID NO: 150281 - DNA, 242 bp, Glycine max
cgcacgacgtatctgccaccaggagcaatctaggacttttgctatttgtagtttgaaatacaacccagctagtggtgaagactcagaaatgcacttcgtccgcttgctggatgaccagacttttgagttcatatcaacttattctcttgacacttatgagtatggttgcttcataattagctgctccttctcagatgacaataatgtgtattactgtgttggaactgcatatgtactgccag

SEQ ID NO: 150282 - DNA, 242 bp, Glycine max
tttggcttctgcctttccttttccagggagctcattgacaatggctgaaacaaagtgggtcatgaaggacaaaagatggtctctccatggaatgacagctctagtcacaggaggcacccgaggcatagggcatgccattgttgaagagttagctgagtttggagcaactgttcatatctgtgcacgtaatcaagatgatattgataaatgtttagaagagtggaaaaacaagggacttaatg

SEQ ID NO: 150283 - DNA, 239 bp, Glycine max
ggaaaaaggaaaccataatgaaagaggaagatgctaggaaacaagcgacaaatggtgttggttctgaagtagaatacacaccaattcccagtggacctggcagtgacattgcaaaggacaccagaaacgaggaggtgtctatgcttgacaatgtgtactggaaggagtttggacttcttgtttttgtttgggtttcattccttggaatacagattgccatgaaccagacaagcaaatgt

SEQ ID NO: 150284 - DNA, 240 bp, Glycine max
gaagctctctatgacatctgcttccgcacgcttaagctcaccactccaagctttggggatctgaaccatctaatttcagccaccatgagtggtgtgacatgttgtcttcgtttccctgggcaactcaactcagatcttcgcaaacttgctgtgaatctcattcccttccctcgtctgcactttttcatggtgggttttgccccactcacatctcgtggttcccaacagtacagagctctt

SEQ ID NO: 150285 - DNA, 239 bp, Glycine max
gcgtcttcttgttcctctcgcccagaatccgagatcaaccctgacccctaaggccaggggtttttctcggcttcttcagagtcctgaaatggcgtctgtttcagctttagccaagtacaagctcgtcttcttgggtgaccaatccgtgggcaaaaccagcatcatcactcgcttcatgtacgataaattcgataacacctatcaggctacaattggtattgattttctatcaaaaacta

SEQ ID NO: 150286 - DNA, 240 bp, Glycine max
taattcacccactaaatcacttgagggctgttcgaaatctggttccagggataaaaagtctggatcttcagcacacaaaagactaggagaagccgtagttcagagacttcacaaatcttttaaagaaaatcagtatccagatagaaccacaaaagaaagcttggcacaagaacttggacttacttatcagcaggttgccaaatggtttggcaatacacgttggagcttccggcattcatc

SEQ ID NO: 150287 - DNA, 243 bp, Glycine max
gtttaatcagagtgtggctttgcctgaggtgaaggaagaccaggtcctcatcaaggtcgctgctgcttcccttaaccccattgatcataagagaatggaaggctatttcaagaacagcgactcccctttacctactgctccgggttatgatgttgctggagtggtggttaaagtgggaagtgaagtgaagaaatttaaggttggggatgaagtttatggtgatatcaatgtgaaagctttgga

SEQ ID NO: 150288 - DNA, 242 bp, Glycine max
catgcctgcaggtttagcctatcaactctgtttttttcccacagtaagtgatccttacagttactttttgtttggtagaaggacaagataagctggtttattattatttttttttcattgcttctgcaggagagaataccatgagttctcttggtcggttggtgatgctcatatggttatttgtggttttgatcctcacttccagctacactgcaagtttaacatccatactcacagtgcag

SEQ ID NO: 150289 - DNA, 239 bp, Glycine max
caatcaaattgttttatacctccaacatgcccatcattcttcagtctgcccttgtttccaatctctacttcatctcccagctgctccaccgtaagtacagcggaaacttcttcgtagatctattgggaaaatggaaggaatctgaatatggaggtggtcagtctgttcctgttggtggcattgcatactatatcactgcaccatccagcttagctgatatggcagccaatcctttccat

SEQ ID NO: 150290 - DNA, 238 bp, Glycine max
ggtgtatgctcaatgtatgtaatgtgtcacagaggttctgcagtctatttccaaggttgcaaaatctgcaaagctggagaaaactgaaattcctgcaaagattaagttgctgccggatccatggactcctgaatctggattggtcactgcagctctcaagataaagagagagcagctgaaagccaaattcaaagacgatcttcagaagttgtatgcatgaaatgtagtatctaacctc

SEQ ID NO: 150291 - DNA, 237 bp, Glycine max
gtgtttggacaaggagaagtgtgagacttttgaagattgtattacatgggctaggctaaagtttgaagattattttgctaaccgagtaaagcaattaatttatacttttcccgaagatgctgcaactagtactggagctcctttctggtctgcaccaaaacggttccctcatccactgcaattctcatcctctgatctgggtcatcttctgtttttgatggcagcttctatattacg

SEQ ID NO: 150292 - DNA, 237 bp, Glycine max
aagaagtttttgggcatggtttttccactaaattgagtagtgctggtcttgtttataagcattttggaaaggagattatagccaaagaacttgaggtagatgaggaacaccgagatgtgcatcacatatatttggctgtttacaagagcttcatggaggcaattgatgctatagacaatgggatcaatcagtatgatacagaccagcctccaagatacgtgaataatactcatttat

SEQ ID NO: 150293 - DNA, 237 bp, Glycine max
gttgagagaaggaaagggaaaatgggtaaggatctgagcgaggaacaagtgtcttccatgaaggaagccttctctctattcgacactgacggagacggtcggatcgctccgtcggagctggggatcctgatgaggtctctgggaggtaacccgacgcaggcccaactcaaagccatcgtggctgaagagaacctcacggcccccttcgacttcccccgattcctcgatctaatggcc

SEQ ID NO: 150294 - DNA, 237 bp, Glycine max
cctcaatcagccaaaccggttcaggaaaacaatgatcagtttgctgcaacaaatgcccatgcaattgctcctgctgctaaggcacaagttgtgggatggccaccaattcgatctttccgaaagaacacgatggcctctaatttgacaaagaacaatgatgaagctgagggaaaatcaggatttggttgtctctatgtgaaagtcagtatggatggtgccccttatcttagaaaggtt

SEQ ID NO: 150295 - DNA, 238 bp, Glycine max
ggaacattatggagcccagattcgtaatctccgcatcggaggccgaatcccaatcaatctccaaactcctcccttccctcgtttcctcttctcagtccctcgcccgtccttccatctccaactttcccgtcgccgccgtcggactcgccgcctccggccgcatcttcgtgggcgtgaacgtggagttccccggcctccccttccaccacaccatccacgctgaacagttcctcctcac

SEQ ID NO: 150296 - DNA, 236 bp, Glycine max
gttttccttgtttcccctattattatctcgctctcacaaaatcatggcattctctagtgctttgattctgtggtcgttgctagcaatcaacatggccctgccaaccctcgcaaccgtctacaccgtgggagatacttcaggttgggcaattggtactgattatagcacttggactggcgacaagatcttttcagtgggtgatagtctcgcgttcaactatggagctgggcacacag

SEQ ID NO: 150297 - DNA, 238 bp, Glycine max
actcggttctgccttcacaaaaaaattatcgagatcccctttttctcctaagagaagccatggctaagggtcccggtctctactctgacatcggcaagaaagccagggatctgctgttcaaggactaccacagtgaccagaagttcaccatcaccacctactcacccactggagttgctataacagcatcaggaaccaggaaaagtgaactgtttgtggctgatgtcaacacccagtt

SEQ ID NO: 150298 - DNA, 251 bp, Glycine max
taaggtcgagttttaaaagagagtaatgattttgctactgttgggaagactagagatagctcagatagggccttttacaaagatttggttaaggtcattgaagcctctgatgtcttactggaggtgcttgatgcccgggatcccttgggtactcgttgtgttgatatagaaaagatggtgatgaaatcgggacctgataaacgtctcgtcttgcttttaaataaaattgatcttgttcctaaagaagcttt

SEQ ID NO: 150299 - DNA, 239 bp, Glycine max
cctgtccttcgttgcacttcgctttttccaaaaccaatcacatcagcatcactctcgtcgccgccgtcgtcgaccaccgcaagagccatcgcactccgccgtcatccgttagggcaaaaatgagtcgaggaagtggaggtggatacgatcgtcacatcactattttctcccctgaaggacgtctcttccaagtcgagtatgctttcaaggctgttaaggccgcaggaatcacctcaatt

SEQ ID NO: 150300 - DNA, 238 bp, Glycine max
atttcattgctcagagttcccaaattctccccaagagataaaatgtctctaatcccaaacttcttcggtggccggagaaacaatgtgttcgatcctttctcactggacgtgtgggatcccttcaaggattttcctttcccaaatacgctttcttcagcttccttccctgaattttctcgggaaaattcagcatttgtgagcacccgtgtggactggaaggagaccccagaggcgcacg

SEQ ID NO: 150301 - DNA, 235 bp, Glycine max
cctcccttacttaattggactaattttccgtgaccgcattcatcaatggttaaagagatggcccaagaatgccgcaatgattaggcttgctggggaaggaagctggttccatcaatttcaagtagttgctctgtttagagtttctccttttccgtataccatattcaactatgctgtagtagtgacaaatatgaggttttggccgtacttatgtgggtcaatagcaggaatggtg

SEQ ID NO: 150302 - DNA, 236 bp, Glycine max
ttagggtttgcagtcactgctttgtttagatcagaaccagatcgtgttctcttcttccattggcaaacatggcaactcaaatgagcaagaagagaaagtttgtggcggatggagtgttcttcgccgaactgaacgaggttctgacacgtgagttggcggaggacggttactccggcgtggaggttagggttacgccgatgcgcaccgagattatcatcagagccaccagaacccaa

SEQ ID NO: 150303 - DNA, 234 bp, Glycine max
ggacaaggttacgaggttggcaacagaaaagggtgtggtggttttcaccaagagctcttattgcctctgctatgcagtcaacattctgttccaagagcttggagtgatccctgtggttcatgaaattgacaaagaccctgagggcaaggaaatagagaaagctataacaaggttggggtgtcctacacctgttcctgcagtcttcatcggagggaagctggtggggtccaccaa

SEQ ID NO: 150304 - DNA, 232 bp, Glycine max
tccatcacctaatcacttccccacttcccgtgtaagacacgtttagttcgcacaaggttttaaaaaatggctgatgctgaggacattcaacctcttgttgttgataatggaactggaatggtcaaggcgggttttgcaggtgatgacgctcctagggccgtgttccccagtattattgggcgaccacgccataccggtgtaatggttgggataggtcagaaggatgcttacg

SEQ ID NO: 150305 - DNA, 230 bp, Glycine max
ggaacaagcttcagtgattgcagcattcaacagtcaattgcctggcacacagtccattgctctaacgttgtttgcagcgacgccaccggttccagacaatgtgttaaccaaggcgttccaggtgggtaccaaggaggttgagaaaattaagtctaggcttgctcctaagaaataattaatactaatgtgggatgtggttgtaatgtctctctcattgttcttacttctta

SEQ ID NO: 150306 - DNA, 233 bp, Glycine max
ctcataaattgcaggtgcagcagcagagagtgcggtaggctcatccgagaccggaagcagcaatggggatcgatctcaaggccggaggtaaaagcaaaaaaaccaaaagaacagcacccaagtccaatgatatctatcttaagctcttggtcaagctttatcgcttccttgttcggagaactggcagcaaattcaatgccgttatactcaagagattgttcatgagcaaggtt

SEQ ID NO: 150307 - DNA, 232 bp, Glycine max
cccaatttccattgaacagaaaaggaccacctcatgggttgccaatggaaaaacttattacagatactcaacagtcgtgactaacaaatctaacaacagtctcaattctctcaatctttcaatatccaagctttatggtccaatctggggtgtcacaaagtcaggtgattcatacacattcccatcatggctcagctcattatcagctggcaaaagccttgaatttgtctac

SEQ ID NO: 150308 - DNA, 231 bp, Glycine max
cttgcatgaatggcattttcgttcagggcttgaccgctacatatggataattggaatgatttatgcttattatcatccaactgttgaacgatggatggaaaaattggaggaagcagaaatcaagcgcagaatatcaatcaaggcaactgttgttctgatatgttcattggtgggttatttatggtttgagcatatatacaagctggacaaggtcacatacaataaatacca

SEQ ID NO: 150309 - DNA, 232 bp, Glycine max
cctccctcctctcggtgtcttcctcaagtatggatgcaaggtagagttctggatctgtttggtgcttactctttttggttacattcctggaattatctatgctgtctatgctatcaccaagtgatcatattcatcacctcttgtagacaatgaataatttgtcaaagtacaacggttatgcatgtttctcaactccagcattgatataatcgtttgatctcagaacaatgtg

SEQ ID NO: 150310 - DNA, 233 bp, Glycine max
gagagaagagaagatgactacacgcttcaagaagaacaggaagaagagaggccacgtgagtgccggccatggccgcatcgggaagcaccggaagcaccctggaggacgcggtaatgccggaggctgcaccaccaccggatcctctttgacaagtaccaccctgggttcttcggcaaggtcggaatgcgctattttcacaagctccgcaacaaattctactctccgatcctcaa

SEQ ID NO: 150311 - DNA, 233 bp, Glycine max
tacgactccgatgttcgcgatgatactgaaaccttcctcaatcggatagttcctgaggtttctttctttctatcaccaatttgatgcattcatctgctccatggaagcatactctagaggggccagatgacatgccagctcatattaaatcatcgatgtttggttgtacactcgcggtgcccattacaaatgggaagcttaacatgggcacatagcagatgcacacaagcaca

SEQ ID NO: 150312 - DNA, 239 bp, Glycine max
ggtttttccagagttgtctttgaagtcctaaaacttgctgcacaaaataacaaactatttcgggtcttctgcacagagggaagaccagaccgaacaggtttgcggttgtcgaatgagctggccaaacttgatgtttcagtgaaacttctaatagattctgctgttgcatatactatggatgaggtggacatggtttttgtgggtgcggatggagttgtcgaaagtgggggcataatcaa

SEQ ID NO: 150313 - DNA, 236 bp, Glycine max
cttacgtgaattagaccttgctcatcctgctgcaaagtctatgcttgagttaagtcgcacccaagatgaagaagtcggagatggaacgacatctgtcatcattcttgctggtgagatgcttcatgtcgccgatgcattcattgacaaaattcaccctacagttatttgccgagcatataacaaagctttggaggatgctattgctgtccttgacaaaattgcaatgcctattgatg

SEQ ID NO: 150314 - DNA, 245 bp, Glycine max
gtccctttggtcttcatcttctgttctgatccaggtatggcttctaaacgcatcttgaaggagctcaaggatttgcagaaggatcctcctacctcatgcagtgcaggccctgtggctgaggacatgtttcactggcaagccacaatcatgggacctgctgatagcccatatgcaggtggtgttttcctagtttcaattcattttcctcctgactatcccttcaagccaccaaaggttgcttttcg

SEQ ID NO: 150315 - DNA, 249 bp, Glycine max
ggcagaaagcaagctcatcctagagttttaaaaatggcagcagcctcctccatggctctctcttccccatccttggctggcaaggccgtgaagctgggcccatcagcccccgaagtcgggagggtcagcatgaggaagaccgtcaccaagcaggcctcctccggaagcccatggtacggcccagaccgcgtcaagtacttgggcccattctctggcgagcccccgtcctacctcactggcgagttccca

SEQ ID NO: 150316 - DNA, 231 bp, Glycine max
gttttccatgcaaattgctatgagacaggggaaactgtggctataaagaaagtgcttcaagacaagaggtacaagaaccgggaattgcaaaccatgcgtcttctggatcaccccaatgttgtaactttgaagcattgcttcttttcaacaactgaaaaagacgagctttatcttaatttggtacttgagtatgttcctgagactgtccaccgagttatcaggcattacaac

SEQ ID NO: 150317 - DNA, 205 bp, Glycine max
ctcgccgaagagatcaaccgccgccagaccatcaccgtcctggccctcgacaatgccgccatgtcctccctcctcgacaagcacctctccctccccaccatcaaaaacgtcctctccctccacgtcctcgtcgactacttcggcgccaaaaagctccaccagatcaacaacagcaccaccctcgtctgctccatgttccaggcca

SEQ ID NO: 150318 - DNA, 238 bp, Glycine max
aaggaatcgagtttttgcatacagggattgtccctggtgtatattccaatgatctgaagatagaagatgttttattggatcagaatcttgttgcaaaaatcagcagttaccacctgcctttgttatctaacatgggaaaggttcggtgtggaaattcttccagtggattaagaaattctagcaatagtaaaagtgtaaagcatgaagataaggctgatatatacgactttggagtgat

SEQ ID NO: 150319 - DNA, 228 bp, Glycine max
gaaaccctcttcggcttgacacgagcctcgaagtggatccttcgcgacacgaaaatgaccctagcacccatgttgctgctggagaaccacccaattcacctgaaccctgcgcactacatcagtgagattattagagaaggcacaaaaaatggcactgctttctttaagtgccatggacatgagcaatttgagatgacgggtttggatcctgagtataataggttgttc

SEQ ID NO: 150320 - DNA, 236 bp, Glycine max
aatcggctgaggtaaaaaaaggacattcattcagctatggctacccttagtgctcccagcaaccactctccccaagaagatgctgaagctctcagaaaggcttttgaaggatggggaactgatgagaacactgtcatagtaattttgggtcatagaactgtgtatcagaggcagcaaatcagaagagtttatgaggaaatttaccaggaggatcttgtgaagcgcctagagtctga

SEQ ID NO: 150321 - DNA, 247 bp, Glycine max
agcgtcctcactacccggttggatagtcgaatccaaccgtgccgtccggtacattgattctgatcattactctgttccacaaggcaggagagccattgagttgctctcaggaaaggaaggaatcatatctcaaatggttgagaccaaaccagacaagctctacagcttgaccttctcattgggtcatgctgatgacaagtgcaaggagcctcttgctgttatggcctttgctggtgaccaggctcag

SEQ ID NO: 150322 - DNA, 226 bp, Glycine max
aagaggcggaagatgagtggtagggtttctgggaaggtgaagtggttcaatgatcagaaggggtttggattcataagcccttgcgatggcagcgacgatctcttcgttcaccaatctcagatcaaatctgacggtttccgaagcctcgccgaaggagagtccgttgagttcgccattgaatctgaatctgacggacgcgcgaaggctgttgatgtcaatgggcccg

SEQ ID NO: 150323 - DNA, 232 bp, Glycine max
ctcgagccgcttcccctatggctcgtcactccttgctcttagccctcctcctcttcgccgccgtggccaccgccgcgatggcgtggcagcgtccgacgccgacgacatcctgatccgtcaggtggtgccagatgttggcgaagcgaagaggaggacaacctgctgaacgccgagcaccacttcgcgagcttcaaggccaagttcgccaagacctacgccaccaaggaggagc

SEQ ID NO: 150324 - DNA, 236 bp, Glycine max
ggctgctaatgacttaccatccatcaatgatgtgacttgttctgagctagttgaaattatatcaaagttaaaggatgaagatggacagcttgtgggtgtcagtacttcaaatctcttaattgcgaactctggcaatgatttacctgtcattgatcttacaagagtgtcacaggagcttgcttaccttgccagcgatgcagatcttgtcatcttagaagggatgggtcgtggaatag

SEQ ID NO: 150325 - DNA, 242 bp, Glycine max
ccgagaccttggtcatgggagtggcacctgttaaggctcaatttgagggtgctgaaatgggtgtgcccgctgagaacgatggctgcaaatgtggaccaaactgctcctgcaacccctgcacttgcaagtgaggtgttgggagagcaagcttcaagcagagatagcccttaattaggaataatgataaactattaatgtgtagctaaaaacttatgtattatgtctgtgatggttttcgtgca

SEQ ID NO: 150326 - DNA, 249 bp, Glycine max
ctcgcgtcttcgagtttcacagcgaagtcgtaggagggtttcaaaagatggagaacatgcagagcttctggcaattgggcgatgaactccgtggacactcaaaagcatcggaggatcacaaatggttaatggttgcttcgaaattggcggaacagacaagattgaagggggagcgtgtgaacaaccttgatctttcaaagggccccattgaaacaaggtcaagggataaatttgggttccaggaagaga

SEQ ID NO: 150327 - DNA, 259 bp, Glycine max
tttctgatacatttcggcgtatactcataacatctcaggctgagattcttccctcattggacgacgaacaaattgtaaatataccatatagtggtgaatgcctaattcaagggaagaacaaaatctggattggcatatctcgtgctgtgggttccaagtgtgaaagatgctggaattattcagagcaggttggttcatttttggaccaccctaccctctgcagccgctgccacgatgttgttgctgttcagatgccccc

SEQ ID NO: 150328 - DNA, 237 bp, Glycine max
ctctagcacacaaaacttgctatagcagtaagctataactcatttgaggctctgtgagaattgagaaatggctaaagatgttgaggttcaagagcaaggaggagagtactctgccaaagactaccatgaccctcctccagcacctttgttcgacccagaggagctcacacagtggtccttctatagagccctcatcgctgagttcatagcaacccttctcttcctttatgtcactgt

SEQ ID NO: 150329 - DNA, 234 bp, Glycine max
gaccattctctcagcctagctaataagatttgtgagagaaagggagaaagggtgtgagaatggagagcaaagaggaagatgtaagggttggagcaactaagttctcagaaaggcaaccaattggtacagcagctcagggtgacaaggactacaaagaaccacccccagcacctttgtttgagcctggtgagctaaagtcatggtccttctacagagctggaattgctgagtttg

SEQ ID NO: 150330 - DNA, 239 bp, Glycine max
gatcggtccaggttgggagaaccctcgcgagcttatagctgatgatgcctggttgaatggtgaattcattactactgttcaacaacgtggtgctgcaattatcaaagctagaaagctttcaagtgcactatcagctgctagtgctgcttgtgaccatattagagattgggttcttggaactcctcagggcacctgggtgtcaatgggagtatattctgatggttcctacaatgttccag

SEQ ID NO: 150331 - DNA, 238 bp, Glycine max
cagccaccgccataccaagaagaagaagaagaagaaagtggttgaagagtttggtggcaaaccagatattaaatggagactttatgttttcaaggctggtgaagtgctaaacgagcccctttatatacatcgccaaagttgttatctttttggaagggaaagaagggttgctgatatccctacagatcatccatcttgcagcaagcaacatgctgttattcaattccggcaagtcgaa

SEQ ID NO: 150332 - DNA, 244 bp, Glycine max
ttctggttcagtggagataaatgatgggaaaataatatctgtcgttgagggacatgctattcaggggaagcctaagcaagaagaagtaattgattatggagatgctgttatcatgcctggcttgattgatgtgcacgtacatcttaatgagcctggaagaactgagtgggaaggatttgatactggtaccagagctgctgctgctggtggtgtaaccacagtggttgacatgcctctaaactgt

SEQ ID NO: 150333 - DNA, 239 bp, Glycine max
gaaaaatttgcaaatgtcgaatttcctgagcaacactaatccggaacctaacaagtcctttgaggtgaatcagcctcccactgattccgtgtccagtctcagcttcagtcccaaagccaacttcctcgtcgccacttcttgggacaatcagggtcgttgttgggaggtagcacagaatggagttaatgttgccactgttcccaaggcttctataacgcacgatcatccggttttgtgct

SEQ ID NO: 150334 - DNA, 256 bp, Glycine max
caaccactcttaatttctctctgccttgctcatttacacacctctccaacctttcactttcagctttatttgaatccctctctctcctttccaaatggccagcgttgaggttgcacatcaaacaccaacaacagtgccagaaaatgaaacaaccgaggtaatcaagacccaggaaacaaccccggaaccagtaccagccactgaggctcctgcaacagaacaagcagcagctgaggttcctgctcaagaagaacaa

SEQ ID NO: 150335 - DNA, 165 bp, Glycine max
ctgggctgacaactgaggttaagtctgttgagatgcaccatgaggctctcacagaggctcttccaggtgacaatgttggatttaatgtgaagaatgttgcagtcaaggatctcaagcgtggttttgttgcatccaactccaaggacgaccctgccaaggaagctg

SEQ ID NO: 150336 - DNA, 238 bp, Glycine max
cttcaaattgctcggaccaggaccaggatattcatgtggccctgccaagattgttccatccactgccatcctcacagatgatcgcaggcgaaaaatgcaggcattgatgtcctggaatgtgacatgcacttactcacagtttcttgcctccaagaatccaagctgttgtgtttctttgtcatctttctacagtgacaaagtcacaggttgcccaccttgtgcttgtggttgccagaat

SEQ ID NO: 150337 - DNA, 233 bp, Glycine max
gaagtgtgaggcttctggattttgctatgttaatgatatagtccttgcaatcttagaacttctcaaacaacatgagcgtgttctatatgtggacattgacatccaccatggagacggtgtggaggaagctttctacactactgacagagtcatgactgtttctttccataaatttggtgactattttcctggtactggggatgtacgtgatattggatatggaaaaggaaaat

SEQ ID NO: 150338 - DNA, 234 bp, Glycine max
attttggagtccaagtgtaggtattaaaagatttcacttggactccaaaatgttgagaattggttgaatcatgcacatatagatattattctattctgctgcaaaaggcttgtgaaactaagcagagcagcatccagactttttaacagctgagacatcatccctactgccaacattgatggtctgccccttgggcaagtttattgttttctctttttctttttcttttctttt

SEQ ID NO: 150339 - DNA, 244 bp, Glycine max
cgttcgttcactttcactttaccaactcctaacaatttctctctgtttccttcttcaccgcatcaatggacttggacggcgttctcctcggcatgtgcaaccctctcctcgacatctctgccgtcgtcgacgacgctttcttgcaaaaatacggtatcaagttgaacgatgcgattctcgctgaggataagcacaaacctatgtatgaagaattggctaacaatcctaatgtggagtacattgc

SEQ ID NO: 150340 - DNA, 134 bp, Glycine max
cagagatcggaacgtggaactgcggaaaccggaatatctcacttctcagatcagatcaatccgacgtcgttgcagttataatggctccattcagcggcgatgagacggcaccgtttttcggcttccttggagcc

SEQ ID NO: 150341 - DNA, 234 bp, Glycine max
catgactttcaagcgcaggaatggaggtcgcaacaaacacggccgcggccacgtcaagttcattcgatgctccaactgcggcaaatgctgccctaaggacaaggctatcaagaggtttctggtgaggaacattgttgaacaggctgcagtcagagatgtgcaggaggcttgtgtctacgaacaatacacgcttccgaagctgtatgtgaagatgcagtattgtgtttcctgtgc

SEQ ID NO: 150342 - DNA, 234 bp, Glycine max
cacaaggcagaaagcaagctcatcctagagttttaaaaatggcagcagcctcctccatggctctctcttccccatccttggctggcaaggccgtgaagctgggcccatcagcccccgaagtcgggagggtcagcatgaggaagaccgtcaccaagcaggcctcctccggaagcccatggtacggcccagaccgcgtcaagtacttgggcccattctctggcgagcccccgtcct

SEQ ID NO: 150343 - DNA, 236 bp, Glycine max
gcgcaacttcattcattcaggctaaatggggaggatcaaacctcaggctctgctacagcaaagcaaaaggaagaaggggccttctcgcataagtgccaccattgttacattctatgcattgattcttgtcatgcttgtgtttatcctgtttgttacatacagacattggtccaacaggacaagacttcaaccagagagctatatatcagtctctgaggatgaatatacatctgtgg

SEQ ID NO: 150344 - DNA, 238 bp, Glycine max
ggtgttgaaggccgtcgttcacggcgatgaaaacctattcaacagctacccagaattgcaagatgccttggtttgggtctactttcactcaaacattccagaattcaacaaggtggaatgttggggcccactgaaggaagcgtcacacccacaggtggggtccaggaggaggggttggcaattccacagccatgccaagaagaatgccaatgttgctttccaccgcttacgttgagcc

SEQ ID NO: 150345 - DNA, 142 bp, Glycine max
ctgggactgattatagtgaaagggccatcagccttgcccaaagccttgctaatcgtgatggattttccaacgtcaaatttttggttgatgatgtcctcgagacaaagttggaacaagagtttcgacttgtcatggataaagg

SEQ ID NO: 150346 - DNA, 250 bp, Glycine max
agcgaggttcgcacgtttgacccatacgacgctgactttttcttcgtccccgtttacgtgtcttgcaacttcagcaccgtgaatggcttccccgcgattggccacgcgcgctccctcatcgcgtccgcggtaaacctcatctcctcggagtaccccttctggaaccgaagcagaggctccgaccacgtcttcgtcgcgtcgcacgatttcggctcgtgtttccacaccctggaggaaaaagcgatggctg

SEQ ID NO: 150347 - DNA, 183 bp, Glycine max
gggatgcatcttatagctccacggctgaacttgtcactgtggatgaggaagagggtcctgtcacaagcgttgcctgggctcccgatggatgccatgtagccatcggtttgaacaactcgcatgtcctgctctgggattctaatgtttctaggctggtaagaacattgagaggtggacatcaac

SEQ ID NO: 150348 - DNA, 249 bp, Glycine max
atccctttagcttaattttttggctacgttatggggatccttagcgatcatcataatcagaagcatcaccaccaccaccaacaacaagagaagaaggaggatctgaaggacattccaaaagggtgtttggccatcttggtagggcaaggggaggagcaacagaggtttgtgatccctgtgatgtacatgaaccacccattgttcatgcagttgctgaaaaaacctgaagaggaatacgggttcgcccag

SEQ ID NO: 150349 - DNA, 119 bp, Glycine max
ttttatttggcattgaaaagggtccagaagtactcaacgctgttagaccggctggatcggcacttgttgatgactggcactgcctgaaaaccatggtgaggacttttgagacacattgt

SEQ ID NO: 150350 - DNA, 248 bp, Glycine max
atgatttgctgctgtaacaaaatggatgctactacacccaagtattccaaggccaggtatgatgaaattgtgaaggaagtctcttcctacttgaagaaagtaggatacaaccctgacaagattccttttgttcctatctctggttttgagggagacaacatgattgagaggtccacaaaccttgactggtacaagggtccaactctgcttgatgcactctagctgattagtgagcccaagaggccctc

SEQ ID NO: 150351 - DNA, 247 bp, Glycine max
cttagcggccattatcatcactgctgtgattggtctaatagattatcaatctgcatacaaattatggaaggttgacaaacttgatttcttggcctgtttgtgctccttttttggggttctgttcatttcagtgcttttaggccttggtatagcggttatcatatcagtcttcaagatcctgcttcatgtcactcgaccaaacactttggttttggggaatataccaggaacacaaatattccacaac

SEQ ID NO: 150352 - DNA, 248 bp, Glycine max
gcaaaatttaaaatttactggcagccaacctatcaagtgattcagccaatcaacggtgacccattcattggaagcctggaaaccccagttacatccagccctttgatcgcatggtacttgtccaacctgcccgcatacagaaccgcagtgagcccactactaagagggatcgaggtgggcctggtccacggataccttctggtgggcccattcgtgaaggccgggcctcttaggaacaccgagatcgc

SEQ ID NO: 150353 - DNA, 234 bp, Glycine max
ggcgtcgtcacaaccagagatggagcatccaaagaaggtttttggttgggctgctcgggactcatctgggcttctctccccattcaacttctccagaagagaaacgggggagaaagatttggtattcaaagtgcaatactgtggaatatgccactcagatctacatatgttaaagaacgagtggggcaacacaacctatcctctggttcctgggcacgagattgctggtgtggt

SEQ ID NO: 150354 - DNA, 254 bp, Glycine max
caacagcacaaagcgggttactgtctgttcaagctaccatctctctctctctttcttagtgcctccttgccagaagttaaaatggcccaagaaactttcctattcacatctgaatcagtgaacgaggggcaccctgacaagctctgtgaccagatctccgatgctgtgctcgatgcatgcttggagcaggaccctgacagcaaggttgcctgtgaaacctgcaccaagaccaacatggtgatggttttcggaga

SEQ ID NO: 150355 - DNA, 250 bp, Glycine max
tgggcatctaattaatgtaactgaggtcatgctcagtgaagttgtattaaaagggagacatcaagagcaggagcacaatggaggaagatctaatagtggactaaagtttccaagggtaagcatatatagaggtcaccctgtagttagaagagaaaaatgttccatggaagctgggaagctaataaggttgcctgattcaatagaggaactaaaaactattgcaggtaacatttcaagttcccatcaattc

SEQ ID NO: 150356 - DNA, 222 bp, Glycine max
tttagttgcctttaaaccttatttccaaattggaggcattgtccaccgttatctaggcggtcaaacccttgttatggaagatgttcaagaaattgctacaaatatttttggaaggatgtccctcttaagagattattccctgagggattacgatggattaattggagcttggagagacaggatcataatgtgcacagggacatatgggcctactcctgacct

SEQ ID NO: 150357 - DNA, 250 bp, Glycine max
acttctggtatcgccaccgccggttgcttaacgaagcaatcaataccttacataatgctcgagagagaagactgtttcgcttcgctgtggcagaaatacacctacgatcgtctccaccttcatttgaggaagcaagtttgcgagttaccgcacttaccgtttcccaagtcttaccctcactacgtgcctcggaagcagttcatagactacttgggaaactacgttaaccactttgagatcaagcctctgt

SEQ ID NO: 150358 - DNA, 255 bp, Glycine max
ctcttcagacaccaccactgaggagtttctcaatgagaaccaagttgaccaccccgtgtggctcattgccactgtggggttgcaagaatcgatcatcaactccatcacggtttgcaagtacaagaagaatgaagggttggttgaaggaaccgagtgttcggtgtgtttgaacgagtttcaagaagaggagacattacgactcttgccaaagtgcaaccatgcttttcacgttccttgtattgacacttggttgag

SEQ ID NO: 150359 - DNA, 238 bp, Glycine max
ggaactgggaaaacagcaactttctgctctggaattctgcagcaacttgactatcgtgtgactgaatgccaagccttggttttagcaccaactagggagcttgctcagcaaattgaaaaggttatgcgggcactcggagattatcttggtgtgaaggtgcacgcatgtgtgagaggtaccagtgttcgtgaagaccaacgcatatctatcaagtggtgttcctgatgttggtggtact

SEQ ID NO: 150360 - DNA, 241 bp, Glycine max
tgtaataagagtgtcggagatacagaaatttctggacataacaggggtccaaacttacattataaacagtgccaagattgtgttcttgaatgagaggcctcaacctaggcctggcaaaggagttaccaacacctgccaagtctgtgagcgcaccttctcgattcattcagcttctgttcccttggttgtcagatagtaggaacctccaagaagttccggaagaagaaaatgttagctgaga

SEQ ID NO: 150361 - DNA, 246 bp, Glycine max
gtcttgttggtaaagaaagagaagaaaagagtggaatcgaagacgaagacgaagatggaggacgcatcagcatcaaagttcatcccacaccaaatcggaggggtccaaaacgacgtgcttcgatttggtctccatggagtcaagagcgacatcgttggttcccaccctcttcaatcttcactccaatctacaaggagaatggatgaagcgatgaagaagcaatgcaaagttaacctgtacggaact

SEQ ID NO: 150362 - DNA, 246 bp, Glycine max
gcgaactgtctgaatcgactgtgttatggtggatcaatgagttggaatatggtgaatgtaggagctttggtactattcaaggggcactgggttgatttcaggtcaattgtaaggtctttcttgccttttattgtggttgtttgcttaggtgtttttatggttggatggcccttcttacttgggctactatccttctctttactcttaatagggtggtttatattgggtacttacctatttagaaac

SEQ ID NO: 150363 - DNA, 250 bp, Glycine max
tgtctggaaggcggttatcatgttttagacgaatcaactcattacagcagtgatcttcgcccaactgcgaaacagctgtggaagtccagtattggagttcttgaactgggtatattgagtgctcatggtttgatgccgatgaaaacaaaagatggtaaggggacaactgatgcttattgtgtagcgaaatatgggcagaagtgggtgcggacaaggacaatcattgacagctttgcaccccggtggatga

SEQ ID NO: 150364 - DNA, 238 bp, Glycine max
tttgatcgctagataggagctccacccgaagtggtggcgcgtatggctgcggctaagcgcgagtttgaggcacggcaacgatcttcagatggttccaaggaaacttcagaagaccctgaacttgaccacttcttggcaggatactatggcgtgcttgtgaagtatagtgatgaattagcgcggcgtattcacgaggctatggatttcatgcgaaggatacatcctcagctagatatgc

SEQ ID NO: 150365 - DNA, 254 bp, Glycine max
  unsure (1)..(254): unsure at all n locations
ggaaaatggggagctgttcgtggcttgtcatgtgtgaggatttcctagttgccgancgtgttatgcgtgcttcaggagtgtattgaatctgagatgtccttaatgcaacactcgagtataagttctacggacgttgtcctagagtagctcgagacgtagaggacaactttgatgcagatgattttgatgatgcgttgccggttaagaatcatcgtgacgatctagatcggaaccccaatgttagtcatattggc

SEQ ID NO: 150366 - DNA, 256 bp, Glycine max
tgagcccatctcctggttttcagatgatgcagtcaaacgaggtgcagcagtttgggcatattgactcaaatagtacaaagtcatttgctgttgtaaatacttcaacatctagccttccagatttgaacacttctgcttctccacctattttgtttcatcagcctttcacagatcagcagcaagtacaattacgtgcacagatcttcgtatatggagctttgattcaaggcacagtaccggatgaggcttatatgat

SEQ ID NO: 150367 - DNA, 170 bp, Glycine max
aagcaaatggcttcctcaatgatctcttccccagctgttaccactgtcaaccgtgccggtgccggcatggttgctccattcactggcctcaagtccatggctggcttccccaccagaaagagcatcaatgacattacctccattgctagcaacggtggaagattgcaatg

SEQ ID NO: 150368 - DNA, 245 bp, Glycine max
cacggatcaacatgacttgtgttaatcatgaaactggagtggttgaaccaaagaaatttggtcttcttgcaaattggcaaagagagtacaccatggaggacatactgacccagctgaagaaggaaatggccgctcctcataaccggaagcttgtccaaccaccagaaggtacctacttttagcacccaagatggtataaatgttggatcgcattgcatatttggcggaatcaaaaaatagtgggg

SEQ ID NO: 150369 - DNA, 231 bp, Glycine max
cacagcgtcaagggaaagactttgatgttgaatgacagaattcaaaacccagatgcactccaacatgttctgaggcaagctgaggagtatctgggcacagtgcctcctgaaactccctactcagaatttgagcacaagttccaggagattggtttggcgagagggtgcggtgacaacgcagagctagttcttgagtccattcaacttctctaggatctacttgaggcgcct

SEQ ID NO: 150370 - DNA, 245 bp, Glycine max
cttaacaacagcacaaagcgggttactgtctgttcaagctaccatctctctctctctttcttagtgcctccttgccagaagttaaaatggcccaagaaactttcctattcacatctgaatcagtgaacgaggggcaccctgacaagctctgtgaccagatctccgatgctgtgctcgatgcatgcttggagcaggaccctgacagcaaggttgcctgtgaaacctgcaccaagaccaacatggtg

SEQ ID NO: 150371 - DNA, 245 bp, Glycine max
gagcggagagactcatcgctacgacctgtcgtctattcgcgctgtggtcaccggcgcggcacccttaggaggggaacttcaagaagccgttaaggctaggctaccacacgctacttttggacagggatatgggatgacagaagcaggaccacttgccattagcatggcatttgcaaaagtaccctctaagattaaaccaggtgcatgcggaaccgttgtgagaaacgccgagatgaaaatcgtgg

SEQ ID NO: 150372 - DNA, 250 bp, Glycine max
cttatacgcggatgatctgattgaagtcttgaagaaaaagcatgcttctggaacatataaaaacctagtattttatctggaggcatgtgaatctgggagtatctttgaaggtcttcttcctgaagatatcaatatttatgcaaccactgcttccaatgcagaagaaagtagttggggaacatattgccccggggagtatcctagtcctcccccagaatatacaacctgtttgggtgacttgtacagtgtt

SEQ ID NO: 150373 - DNA, 250 bp, Glycine max
tggtgatagttgcggacggccaggtaacaagaagtattgacactgagcatgggagactaagtccacaggagcagagcactgtggatgccattgttgaggccagtaaatttcctctttcaatcatattggttggtgttggagatggtccttgggacatgatgaaggagtttgatgacaatatcccagcccgggtctttgataattttcagtttgtgaatttcacagaaattatgtcaaagaatattcctcc

SEQ ID NO: 150374 - DNA, 210 bp, Glycine max
tgaagagtgttagagaattgatctacaagaggggctatggaaaagttaacaagcagagaattgctttgacagacaaccctataatggacaagcttttggggaagcatgggatcatttgcgttgaagatctgatccatgagatcatgactgttggactcacttcaagggggccaaaaattttcctggggcttaaaaaactcaaaccccccg

SEQ ID NO: 150375 - DNA, 197 bp, Glycine max
agaagtgcaagtttcattgaagggatctccaaatcgtcatatgtgaagcatgcatctgacattaaaggttcctctgttaaggttctaaattgccatgagtctgctatatacatcttagcacctttgagatatgcaactgtctatggatgttcagatgcaacaatagttataggagcagttggcaaggctgtgaaagt

SEQ ID NO: 150376 - DNA, 239 bp, Glycine max
gccgttgtaggtatgaaagatgaagctgcaggagaaattccagttgcatttgttgtaaggtcaaatggttctgagattaccgaggatgaaataaagacatacatttcacaacaggtggtattttacaagagaataggtagagttttcttcacggactctattcctaaagcaccccccggcaaaattctgcgaaaggtattaactgcaagacttaacgaaggtttggtggtggccaatta

SEQ ID NO: 150377 - DNA, 243 bp, Glycine max
gtctgaggaaagtgagtgagagaaagagatcgcagacacagagcagaatggcttctacccaatgtttcttgcaccaccatgctcttaccacccctgccagtgccagatccccatcactacgcatcttggttagcaccaagcctaaccagcttgtttgcaaggcacagaaacaacaaacaccacaagaggatattgatgtcagcccaatctctcgccgtttagctctaactgtgctcattggtg

SEQ ID NO: 150378 - DNA, 228 bp, Glycine max
ctaggatccatttcatgctttcctcatacgcccctgttatctctgctgagaaagcataccatgaacagctttccgttgctgagatcaccaacagtgcctttgagccatcctccatgatggccaagtgtgaccctcgccacggcaagtacatggcgtgttgtttgatgtatcgcggcgatgtcgtgccgacagatgtgaatgctgcagtggccaccatcaagaccaaga

SEQ ID NO: 150379 - DNA, 247 bp, Glycine max
tttgcatgatcattgtgacccgaagattattcatcgtgatgtgaaagctgcaaacatattgctggatgaagagtttgaggctgttgttggggactttggattggccaaacttatggattacaaggacacgcatgtgacaactgctgtacggggaactattgggcatatagctcctgagtacctctccaccggtaaatcttcagagaaaactgacgtttttggttatggtatcatgcttctggagctg

SEQ ID NO: 150380 - DNA, 248 bp, Glycine max
tctctctgttctcttctacctctcaagtttttgaagtatagagatggcagagacattcctatttacctcagagtcagtgaacgagggacaccctgacaagctctgtgaccaaatctctgatgctgtcctcgacgcttgcctcgaacaggacccagacagcaaggttgcctgcgaaacatgcaccaaaaccaacttggtcatggtcttcggagaaatcacgaccaaggccaatgttgactacgagaaga

SEQ ID NO: 150381 - DNA, 237 bp, Glycine max
gggacatgcgtcaaactgttgctgtgggagtcatcaagaacgttgagaagaaggatcctaccggagccaaggtcaccaaggctgcccagaagaagaagtgaatcgtgcgggctggttcatcaggggatgttggttacaataaatgttggtttcttttctgtactcttgtgtcttcttttctaggtagcttgtttttcggacaaagtttgaagtctccaccatcatctcgcaactgtt

SEQ ID NO: 150382 - DNA, 237 bp, Glycine max
  unsure (1)..(237): unsure at all n locations
ccggcgaacgcgaagatctcgaagggacgcgaaggagacggtgcaggaatgcgtgtcggagttcatcagcttcataacgggtgaggcgtcggacaagtgccagagggagaagcgcaagaccatcaacggcgacgatcttctctgggcnatnaaaacncngggtttcnaagtnncgtggacctctgaagatttacctccagcgttccgcgagatggagggagagaagaccgtggccgc

SEQ ID NO: 150383 - DNA, 243 bp, Glycine max
atggaattgaaatacgcattgcaagaatctttaacacatatggaccacgcatgaatattgatgatgggcgtgttgtcagcaacttcattgctcaagcactgcggggggaaccattgacagtccaatgtccgggaacacaaactcgaagtttctgttatgtctctgacctggttgatggccttatccgtctcatggaaggatcaaacaccggaccaatcaaccttggaaacccaggtgaattta

SEQ ID NO: 150384 - DNA, 246 bp, Glycine max
cggtccttcagtccattttcctttccatttcggatctgataggaatagatttcgtcagtgttgaaatcacgagaaattcatggctgctccaccggcaagagctcgtgcggattacgattatctcataaaacttctcttgattggcgatagtggtgtcggaaagagttgccttcttctatgattctctgatggttctttcacaactagtttcatcacaactataggcattgattttaagataagaac

SEQ ID NO: 150385 - DNA, 216 bp, Glycine max
aatcgtcccaacggcaatagcaacagcattaataataatccctcccttggtcagctggcttcacattacatagcggttaagtttaaaaggctttattcatctcttacaggacgaaagttgtatgtgtcgccggtgaaggggttggagcctggtagtgttgatgcatcacttaaatacgccaaagaaattttgaagtggagtgaagagagaccaaac

SEQ ID NO: 150386 - DNA, 205 bp, Glycine max
gggaaaaatcaaatcaacatgctgagagtgggcgcaaagagggttttggaaacgacgttgtttggggttagggttccggcgaggctgtaccacgagagggttgtggatcactacgacaacccccggaacgttggatcgtttgacaagaacgacccgagcgtggggacgggtttggtgggggccccggcgtgcggcgatgtgatga

SEQ ID NO: 150387 - DNA, 206 bp, Glycine max
atattttgatgcttgtaggggatgtgccatgggaaatgttcattgagacttgcaaaaggctgaaaattatgaagggttctgatgccattggtttagctcccagggccatggaaaagtctaaaagcaggatttagggtatcctggatttcctcttttgtctaatcaagtgtttattgttggatcctccgaattgggaaaaccaaagg

SEQ ID NO: 150388 - DNA, 236 bp, Glycine max
attgaagctgtcaggatgtccaaaaaagctggatggggtgtcatggccagtcacagaagtggagagactgaggataccttcattgctgacctttctgttggtttggctacgggtcaaattaagactggagctccatgcaggtctgagcgtcttgctaaatataaccagctcttgagaattgagaggactttggctctgaaccagtgtacgccggagctaacttccgtacccccgtt

SEQ ID NO: 150389 - DNA, 238 bp, Glycine max
tagaaagaaaaaaacttaaatcaaaatacttaatagcatggcgatacatttatacaaaacttctaccccaagcacacgcaatggagccgtagacagtcaagtaaaatccaatccacgagatcatttgatctatggacagcatcgttgtggtaaaggccgtaatgccagaggaatcattaccgcaggcatagagggggaggtcataagcgtctataccgtaaaattgattttcgacgga

SEQ ID NO: 150390 - DNA, 184 bp, Glycine max
tttcgatgctcagtcatctcttttaccattctcttctctcttgctcttgcaggagagagccatgtccatgcatcgctacctgaggaagattattgggaagctgtttggccaaacactcccattcccactgcactgcgagagcttctaaagcctctccctgcaggtgtagaaatcgatgcactcc

SEQ ID NO: 150391 - DNA, 236 bp, Glycine max
ggcttcctctgcaattacagctgttgccatctctacgccgagttccgggcagaagaatggatcaggaggttgttttcttagtggaaggaatttgagggtgaaaaaggagagagcagcaattggaggacgatcgatgggcactacagtgtgcgcagttgctgagcctgacagacctctatggttcccaggcagcacccctcctccatggcttgatggcactctacctggagacttcg

SEQ ID NO: 150392 - DNA, 240 bp, Glycine max
aacaacaacaaaaatcaagccaatgtttgtgggttttggtttcatttcattaagatgatctgtttatctcttttcttctttttaaaatttaaagtctttgtattttgtatgtaaagatgtaaaattatgattattaggtggtgcatgtgtcgcgtcatgggccaatgttatcctctgcttttaagttggaagaggcccaactcatgtgtgatgtacggctgtgattgtgtaatttaattt

SEQ ID NO: 150393 - DNA, 248 bp, Glycine max
acacaacaaaaaaagacaacacagagagaagcgtcttaataaacgctcttctctgaaaaacctgatttcttctcttcttctcttctctttcgtttcgatcttcgatctctgaaaatgagagagtgcatttcaatccacatcggtcaggccggtattcaggtcggaaacgcctgctgggagctctactgcctcgaacacggcattcagcctgatgggcagatgccaagtgataagactgttggtggagg

SEQ ID NO: 150394 - DNA, 251 bp, Glycine max
tcggccagaacctcgacggtcgtaatataaccgtgaacgaggctcaatcccgtggaaaaggtggcggcggcggcggcggcggctacggaggaggtggtggtggttacggtggcggcggaggttacagccgcggtggaggaggatatggtggcggaggaggccgccgtgaaggtggttataaccgcaacggtggtggaggaggatatggtggcggtggcggcggatatggaggtggtggagttatggtggcg

SEQ ID NO: 150395 - DNA, 249 bp, Glycine max
aggctggcttcgccaccggaatttggttccgttgctggggtggtgtcgccgccgtggtgacctcctccttgtgtatgatttcatggacaatgggagcttagataagtacttgtttgatgggccaaaaacaatcttaagttgggagcaaaggtttaaggtcatcaaggatgttgcttcagcccttttgtatcttcatgagggctatgagcaggtggtgatacatagagatgtgaaggctagcaatgtgct

SEQ ID NO: 150396 - DNA, 248 bp, Glycine max
gctttttcagttttcctcttctgaatccaccgccactgcagcgtggacggaatcggagtgcagccatatcagcagcagcagaagtccttgaagtgctgctctagtttgaggcacaatgagattggagaaatgctggttttgctcttcaaccatataccctggacatggaatccagtttgttcgtaatgatgcaaagatttttcggttttgtagatctaaatgccacaagaactttaaaagaagagaaa

SEQ ID NO: 150397 - DNA, 245 bp, Glycine max
gatcactggagttttgcttaatggacttgatcatggacaaaaagatttgacttggcagaagtggtcataccagattggtctaagaggagaggctatgaatttggtggctcccaatggggtctcatctgttgactgggagaaagactcactagctgtccgaagccagtcacagttgaaatggcacaaggcatatttcaatgcacctgagggagttgaaccattggccttggacctgacagcatggg

SEQ ID NO: 150398 - DNA, 248 bp, Glycine max
aagcttgctactgagtttccacactgcataccttaggtcttccgaattcgaagttaatttgcaagatggctaaggaaaaggctcagatcaacattgtggtggttggtcatgtggaccctgaggaggcaaccaccattaacgagctgaagaagcctgttgtggagaaagaagctccagggcatgccatatgagggcatgcacgtacggcctcggaggggaaccagaaaattatgttacaaaataatctg

SEQ ID NO: 150399 - DNA, 247 bp, Glycine max
gggagtgatgctgagccacaaggggctggtgaccagcattgctcagcaggttgacggtgataatcccaacctctattaccactgccacgacaccatcctctgcgtgcttcccctctttcacatttactctctcaactccgttcttctctgtggcttgcgtgccaaggctaccattctcctcatgcccaagttcgatattaactccttgcttgctctcattcacaagcacaaagtcatattgcccctg

SEQ ID NO: 150400 - DNA, 250 bp, Glycine max
gcgtacgacaaggccgcgtacaagctccgaggtgacttcgccaggctcaacttccccaacctccgacaccagggttcctccgtcggtggtgacttcggggagtataagcctcttcattccgccgttgacgccaagcttcaggccatttgcgagggcctggctgagctgcagaaacaggggaagaccgagaagcctccgaggaaaacgcgatccaaactcgcttctccgccagagaacgcaacaacaacga

SEQ ID NO: 150401 - DNA, 246 bp, Glycine max
cagcaacgtctcatcttcgccggaaagcagctcgaggacggccgtaccctcgccgactacaacatccagaaggagtcaacccttcaccttgtccttcgtctccgtggtggcatgcagatcttcgtcaagactctcactggcaaaaccataaccctagaggtcgaaagctctgacaccattgacaacgtcaaggccaagatccaggacaaggagggaatccccccagaccagcaacgttcatcttcg

SEQ ID NO: 150402 - DNA, 245 bp, Glycine max
caatttctattcttttgaccaagcatgatcaaatggaatggtggaaatgtctagtgaaaggtgatcctgaaattgatacccaaaaggttgaacctgaaaacagcaaacttggtgacctggatcctgagactcgacagactgttgaaaaaatgatgtttgaccagaggcagaagtctatgggcctccctaccagtgaagagctccagaagcaggaaatgttgaagaaatttatgtcgagcatccgg

SEQ ID NO: 150403 - DNA, 245 bp, Glycine max
gcgagcaagtccaagatctacatcgccatggagctcgtccgcggcggcgagctcttcaacaagatcgccagacgccgtctccgggaggagatggccagactttacttccaacaactcatctctccactggacttctgccacagccgcggcgtctaccaccgtgacctcaagccagagaaccttctcctcgacgacgacggcaacctcaaggtcaccgacttcggcctcagcacttctccgagcac

SEQ ID NO: 150404 - DNA, 245 bp, Glycine max
gaaaagaccaagtaccctgagtctgacatttactggaaaaaatttgaagagaaatatcatttctcatgccaatttactgctgatctttttgcaatgaaccacacagactttatcatcaccagcaccttccaagagattgctggaagcaaggacactgttggacagtatgagagtcacactgccttcacccttccaggactttaccgtgttgttcacggtattgatccatttgatcaaagttcaac

SEQ ID NO: 150405 - DNA, 249 bp, Glycine max
caagtagttgagaactaagaaggagaagcaaatggcttcctcaatgatctcttccccagctgttaccactgtcaaccgtgccggtgccggcatggttgctccattcactggcctcaagtccatggctggcttccccaccagaaagaccaacaatgacattacctccattgctagcaacggtggaagagtgcaatgcatgcaggtgtggccaccagttggcaagaagaagtttgagatctttcctacctg

SEQ ID NO: 150406 - DNA, 245 bp, Glycine max
tcaagtttatgaagtatagagatggcagagacattcctatttacctcagagtcagtgaacgagggacaccctgacaagctctgtgaccaaatctctgatgctatcctcgacgcttgcctcgaacaggacccagacagcaaggttgcctgcgaaacatgcaccaaaaccaacttggtcatggtcttcggagaaatcacgaccaaggccaatgttgactacgagaagatagtgcgtgcacctgcagg

SEQ ID NO: 150407 - DNA, 244 bp, Glycine max
ggctgttgtggctggatatggtgatgttggcaagggttgtgctgctgcaatgaagcaggctggtgctcgtgtcatcgtgaccgagattgatcccatctgtgcccttcaggctctcatggaaggccttctggttctgaccttggaggatgttgtttctgaggctgatatctttgtcaccaccaccggtaacaaggacatcatcatggttgaccacatgaggaaaatgaagaacatgccattgttt

SEQ ID NO: 150408 - DNA, 242 bp, Glycine max
caccgtcgccggggaagggagggaacactccatgtccaccaccaaagtctcctgcacaggctacatgccccattgacacgctcaaactaggtgcttgtgtggatcttcttggtggcttggttcacattggcttgggagaccctgttgcgaaccagtgctgccccgtgcttcaaggcctggttgagcttgaagctgcggtgtgtctttgcaccactcttaagctgaagcttctcacctcaaca

SEQ ID NO: 150409 - DNA, 245 bp, Glycine max
gttggacggcgttctcctcggcatgtgcaaccctctcctcgacatctctgccgtcgtcgacgacgctttcttgcaaaaatacggtatcaagttgaacgatgcgattctcgccgaggataaacacaaacctatgtatgaagaattggctaacaatcctaatgtggagtacattgctggaggtgctactcagaattcaatcagggttgctcagtggatgcttcaagcaccaggtgcacaagttatat

SEQ ID NO: 150410 - DNA, 244 bp, Glycine max
aaaggctccatctttctctggttctgttgttgcctaagaatgggaggaaattccagtttcagggatgaatataccttcgaacaaaggcttggagaatcgcgggatattgtggccaaataccccgatcgagtccccgtgattgtggaaagatatgcgaaatgcgatctgcctgagttggagaagaaaaaataccttgttcctcgagacttgtctgttgggcatttcattcatatttgagttccag

SEQ ID NO: 150411 - DNA, 244 bp, Glycine max
atcgctgccattaaggaagccggtaatgttaagaggtttttcccttcggaattcggtaacgacgtggatcgtgtccatgccgtggaaccagcaaaatctgcattagctatcaaagcccaaattcgacgcagcattgaagccgaaggcatcccctatacgtacgtttccagcaactacttcgctggctattttcttcccacattagcacaaccaggtgcttttgctccacctccaccaaagacaa

SEQ ID NO: 150412 - DNA, 243 bp, Glycine max
gaagacccttctcttcggtgacaaggcagtcactgtttttggacacagaaaccctgaagagatcccatgggggtcaactggagctgacatcattgttgagtccaccggagttttcaccgataaggacaaggctgccgcacatttgaagggtggtgccaagaaggttattatttctgcccccagtaaggatgcccccatgtttgttgttggtgttaatgagcacgagtacaagcagagcttgat

SEQ ID NO: 150413 - DNA, 244 bp, Glycine max
cccttgaggtggaaagctctgacaccatcgacaacgtcaatgccaagatccaggacaacgaaggaatccccccggaccagcaacgtctcattttcgccggaaagcaacttgaggacggccgtacccttgctgactacaacattcagaaggagagtactcttcacctcgtcctccgtctccgtggtggcatgcagatcttcgttaagacactcaccggcaagaccataaccctagaggttgaaag

SEQ ID NO: 150414 - DNA, 245 bp, Glycine max
agaaaacagaagaagagaaaggacccaaatgcacccaagagggcaatgtctggtttcatgttcttttctaaattggaaagagagaatctaaagaaaactaatcctggaatttcatttacggatgtgtcaagagtacttggagagaaatggaaaaagttgtcagtggaagagaaggaaccatacgaggcaaaggcacgtgaagataaaaaacgttacaaggatgagattagtggtacaagaatccg

SEQ ID NO: 150415 - DNA, 242 bp, Glycine max
gtaaccaatcatctttagttcttcagtaatttattgtgggattctattctaagattttgagaatgtctagctgtgggtgtggaagcagctgcaactgtggcagcaactgcggttgcaacaagtactcttttgacttgagttacgttgagaagacaaccacagagactctagttttgggtgttgggcctgtgaaggccaattggagggtgctgaaatgggtgttgcatctggaacggtggctg

SEQ ID NO: 150416 - DNA, 243 bp, Glycine max
caagtagttgagaactaagaaggagaagcaaatggcttcctcaatgatctcttccccagctgttaccactgtcaaccgtgccggtgccggcatggttgctccattcactggcctcaagtccatggctggcttccccaccagaaagaccaacaatgacattacctccattgctagcaacggtggaagagtgcaatgcatgcaggtgtggccaccagttggcaagaagaagttgagactctttcc

SEQ ID NO: 150417 - DNA, 242 bp, Glycine max
cttttcccctagattcagccacagttggaaaaaaaaaaaaaaacttgttcgaaatggcacgtacgaagcaaactgctcgtaagtccacaggaggaaaggcacctaggaagcagctcgcaaccaaggctgcacgtaagtctgcaccaactactggtggtgtgaaaaagccacatcgttatcgccctggtaccgttgctcttcgtgagattaggaaataccagaagagtaccggcttttgatca

SEQ ID NO: 150418 - DNA, 240 bp, Glycine max
ctcagtagtgtcatttacgcttctcttctctgcagcaactatgcctaaccctaaggtcttcttcgacatgaccatcggcggtcaatctgctggccgcatcgtgatggagctctacgccgacgtcactccccgcaccgccgagaacttccgcgcgctttgcaccggcgagaagggcgtagggcggacggcaagcccctccactacaagggctcgtccttccaccgcgtgtcccgagtttca

SEQ ID NO: 150419 - DNA, 241 bp, Glycine max
gagagcgagagagagagagagaatggcagcacttggtggcaatcgtgatgtggcaggaagccagaacagccttgagatcgatggtttagctcgctttgctgttgaagaacacaacaaaaaacagaatgcccttttggagtttgaaaaggtagtaagtgcaaaacagcaagtggtttctggtaccttgtacaccatcactttggaggcaaaagatggtgggcaaaagaaggttatgaagcca

SEQ ID NO: 150420 - DNA, 232 bp, Glycine max
ggtagcacaaacgataaggtatcagcaaactcagttcctcagactcctcggagagagggtgagatcttgcagtcatccaatttaaagagctttaccttgtcagaacttaagacggccactagaaatttccgtccagatagcgtgttaggagaaggtggttttggatcagtttttaaggggtggattgatgagaattcattgaccgctaccaaacctggcactggcattgtat

SEQ ID NO: 150421 - DNA, 240 bp, Glycine max
cttggttgggatgatcactggatcttctgggtgggacctttcattggtgctgcacttgcagcactctaccaccaggtcgtaatcagggccattcccttcaagtccaagtgattcaatcaaaccgttcatgcttaatcaagttgggaacaacaaaaaaaatcaaaacaatgtttctgggtttcggtttcatttcatcaagatgatctgtttatcttttttttttaattttaattaaagtct

SEQ ID NO: 150422 - DNA, 243 bp, Glycine max
acctaattggtacttgcaattagtgtagaagatgagtacgttggatgcaacaagggctgaacttggtcttcttgttttatatttgggcaaggctgaagcaagggacaaaatatgcagggcaatacaatatggttccaaatttttgagtaacggggaacctggtactgctcagaatgtcgacaaaacaaccagcttggcacgaaaagtcttccgtcttttaagtttgtcaatacctacatgctt

SEQ ID NO: 150423 - DNA, 243 bp, Glycine max
ctttcaaaagggagaagaaaaggaaaggaaacaaaacgcacaaaggattattatagcaatggcagaacaaaaccaaaaccagacaactgaagctggaaggcaccaagaggttggccacaagagccttctccagagtgatgctctttaccagtatattctggagaccagtgtctacccaagagaacctgaatccatgaaagaactgagagagttgacagcaaaacacccatgaacatcatgaca

SEQ ID NO: 150424 - DNA, 239 bp, Glycine max
ctggtaggaagcctgtggatatgtcacagccaactggacaagagaaccttgttacttgggctaggccaatccttagagataaggagcggttggaagagattgctgatccaagacttgggggagagtatccaaaggaagattttgtacgtgtttgcactattgctgcggcctgtgttgctccggaagcaaaccaacgacctacaatgggtgaagtggtacaatcacttaaatggtgcagc

SEQ ID NO: 150425 - DNA, 241 bp, Glycine max
ggcggctcttgatgttttcactgaggagccaccacccaaagacagcaagttgattctgcatgagctcgttactgcaacacctcatcttggtgccagtaccatggaagctcaggaaggtgtggctattgaaatagcagaagctgttgttggggcattgaaaggggagcttgctgctactgcagtcaatgcaccaatggttccctcagaggtgttaacagaattgaaaccatcattgatcttg

SEQ ID NO: 150426 - DNA, 242 bp, Glycine max
cctagattcagccacagttggaaaaaaaaaaaaagttgttcgagatggcacgtacgaagcaaactgctcgtaagtccacaggaggaaaggcacctaggaagcagctcgcaaccaaggctgcacgtaagtctgcaccaactactggtggtgtgaagaagccacatcgttatcgtcctggtaccgttgctcttcgtgagattaggaaataccagaagagtaccgagcttttgaccaggaagctc

SEQ ID NO: 150427 - DNA, 240 bp, Glycine max
cactcagagtgcaagctagagagagagagatggaggatctcgaggaggaagagaacggagcggaggaggtgttggggtcaagcttgaccatggagaaggtggcggcggcgaagaagttcattgagaatcattatagggctcagatgaagaacatccaagagaggaaggagaggcgttgggttttagaaagaaaattggcgtcatcggatgtgccaaatgaggaacggacaacctcatcaa

SEQ ID NO: 150428 - DNA, 238 bp, Glycine max
cgaaccttttctccgataatcagagagagataataatggattggggaaacgtaaccgcggaggatctgatcgacgcgctccgtgaggtggattggtcgtcgccgccgcgccctctgtcggaattcttctcgcgattcaccgttcccaggtcttcctccaaatggaacagccgcctcaaatgcaatctctactactaccggaccaactacttcattttgattgtttcgttctcatattg

SEQ ID NO: 150429 - DNA, 239 bp, Glycine max
tgaaccctctctataaaagcgcttccttctcatttggaacctattccattctctaaaccctaaacgactctatctctcttcgttttgttcttccttgcgctcctcctcgttcgttcgttctccctcgcgtagatcggcaatggcggagaccgagacgtttgctttccaggctgagatcaaccagctcctcagtctcatcatcaacaccttctactccaacaaggaaatctccttcgtga

SEQ ID NO: 150430 - DNA, 241 bp, Glycine max
ctaggcacccagagacgaggaagggcgtagtaagcgacgaaatgcttcggggagttgaaaataagcgtagatccggggattcccgatataggtcaacctttcgaactgctgctgaatccacgggcaggcaagagacaacctggtgaactgaaacatcttagtagccagaggaaaagaaagcaaaagcgattcccgtagtagcggcgagcgaaatgggagcagcctaaacgtgaaaacgggg

SEQ ID NO: 150431 - DNA, 240 bp, Glycine max
cacttagttgacagattgatggaaaatgaaaaaaatgaggtaattgttgctgacaactacttcactggatccaaggacaacctcaaaaaatggataggtcatccaagatttgagcttatccgtcatgatgtcacggagcctttattgatcgaggttgatcagatctaccatcttgcatgccctgcctctcctattttctacaaatacaatccagtaaagacaataaagcaaatgtgattg

SEQ ID NO: 150432 - DNA, 240 bp, Glycine max
cttacagggtccatgtatgtgagcgttgtgggttgatagctattgcaaatctcaaaaagaattcttttgagtgcagggggtgcaagaacaaaactgacattgttcaggtttatattccttatgcttgtaagctcctcttccaagagttaatggctatggccatagctccaagaatgcttacaaaggaggtcaaaactacaaaccaaaagaagggagcctgataaactttttgacgaaagc

SEQ ID NO: 150433 - DNA, 239 bp, Glycine max
attgatgatcatcacacaaatgaagacgttgcccttgctattggaacagctttgctgcatgcccttggtgataggaagggtattaaccggtttggtaacttctctgctcctcttgatgaagcattgatacatgtttcactggatttgtctggccgaccacatctaagttataatttggacatacccactcagagggttgggacatatgatactcagttggtggagcattcttccaatcc

SEQ ID NO: 150434 - DNA, 233 bp, Glycine max
ctcttcttctcttgcggctagggttttagcgcagttcttctagatttaaggaagatgggtaaggaaaaggttcacatcagtattgtggttattggccatgttgactctgggaagtccactaccactggccacctgatctacaagcttggaggcattgacaagcgtgttattgagagatttgagaaggaagctgctgagatgaacaagaggtctttcaagtatgctgggtgctt

SEQ ID NO: 150435 - DNA, 236 bp, Glycine max
gagcatcactgaactaacaaagcaaccctatgtcgaaggtggtttgtgtcaccggagccagcggcgccatcggatcatgggtggtcctactcctcctccagcgtggttacaccgtccatgccaccgtccaagatatcaaggatgaaaatgaaacgaaacatttggaggaaatggaaggagcaaagagtcatctccatttttttgaaatggatcttcttgacatcgctccattgccg

SEQ ID NO: 150436 - DNA, 266 bp, Glycine max
gcaagccccactcaaccaccacacctctcctcgttcacgctacccctttctgctcttcttctacctttcaagttttaaaagtataaagatggcagagacattcctatttacctcagagtcggtgaacgagggacaccctgacaagctctgcgaccaaatctccgatgctgtcctcgacgcttgcctcgagcaggacccagacagcaaagttgcctgcgaacatgcaccaaaaccaacttggtcatggtcttcggagaaatcacgac

SEQ ID NO: 150437 - DNA, 259 bp, Glycine max
gtggagatggaggctagcatcatggatggtccaaaacgacgatgcggcgccgtttcgggtcttaccaccgttaagaacccgatctcgcttgctcgtttggttatggacaaatccccgcattcctacctcgccttctccggcgccacagaatttgctaggcaacagggtgtggaggttgtggacaacgagtactttatcacacctgacaacgttgcatgctcaagctggcaaaggaagcaaacacaatcctgtttgatta

SEQ ID NO: 150438 - DNA, 260 bp, Glycine max
gccacccactaacttgtttggtccaagacatggctctgatcctgcatgctaccaaaacaaacaagaatgccttcaagactctgattgcggcagagtacagtggcgtccaagtggaattggcccctaatttcgagatgggtgtctctaacaaaactcctgaatttctcaagatgaatcctattggaaaggttcctgttttggaaacgcccgatggtcagtctttgagagcaatgcaatcgctcgttacgttgctcgactaa

SEQ ID NO: 150439 - DNA, 270 bp, Glycine max
ggatatattcagatgaagactgcagcgaactgttcttacctggtagttatatctacgagttgttcatcgcctaagttcacaacggataagatcggtatcacgtttggggatgctaatggcaaccaggtatatgaaccaagactggatgatccaatttcaaggacatttgagcagtgttcttcagatacatttcagatagatggtgcttgtgcatctccaatttctatgtgtacctatatagatctggggcagaggaaggttgggagcctg

SEQ ID NO: 150440 - DNA, 265 bp, Glycine max
cttctcttaaaagagcctttgctttttctttaggcctttccgaattaagtacttgtttcattgtctctcgaagcaagaaaaatgttcatcgagagtttcaaggttgagagtcctaacgtgaagtacacagagactgagattcagtccgtgtacaactatgaaaccactgaacttgttcacgagaacaagaatggcacttatcagtgggttgtcaagcccaaactgtcaaatatgaatttaaaaccaacacccatgtccctaaact

SEQ ID NO: 150441 - DNA, 262 bp, Glycine max
gtttgacaacttgtacgggagccgtcactctctccctgatggtttgatgagggctactgtcgtgatgattcgtggaaaggtggctgttgtggctggatatggtgatgttggcaagggttgtgctgctgcattgaagcaggctggtgctcgtgtcatcgtgactgagattgaccccatttgtgcccttcaggctctcatggaaggccttcaggttctaccttggaggatgttgtttctgaggctgatatctttgtcaccacca

SEQ ID NO: 150442 - DNA, 261 bp, Glycine max
gttgattggtcccattgattccgaagagaaaagaaaagatgtttgagccacaacagctatacactcgcgcgaagaccgaggaattcgacctcgaatcaggagaaaccctctacccagggctgagcgtcggcgagaaccagctccgatggggtttcatccgcaaggtctacggcatcctctccgcgcagatcgtcctcaccaccctcgtctccgtaccaccgttttctatactccaatcaatgacctcctcaagggcaattc

SEQ ID NO: 150443 - DNA, 260 bp, Glycine max
cacaaggccgaaagcaagctcatcctagagttttaaaaatggcagcagcctcctccatggctctctcttccccatccttggctggcaaggccgtgaagctgggcccatcagcccccgaagtcgggagggtcagcatgaggaagaccgtcaccaagcaggcctcctccggaagcccatggtacggcccagaccgcgtcaagtacttgggcccatttctggcgagcccccgtcctacctcactggcgagttcccaggtgact

SEQ ID NO: 150444 - DNA, 259 bp, Glycine max
agcacacacaaaccctcccctcacactctccaaaccctagcggcactacacacgttatctctctctctctctctctctctccctctctccttccccaagatgtcgagcgccgatcccgagcaccgagaagaggaggaggcacccgccgtcggcgacgacgaggacaccggagcacacgtcgctcccatcgtcaagctcgaggaggttgctgtcaccccggcgaggaggacgaagatgcaatcctagatctcaaatcgaa

SEQ ID NO: 150445 - DNA, 260 bp, Glycine max
tatggtggttcaatggacgaaaatgacttatttattgaaccgacaatattgctggatccgccacttgattcagcagtcatggctgaggaaatctttggccctgtacttccaataatcaccctggagaagattgaagacagtgttgagttcataagctcgaggcctaaagctttagctatttatgccttcacgaaaaaccaaactctgcagagaagatggtatctgaaacatcatcaggaagtcttgtattcaacgatgca

SEQ ID NO: 150446 - DNA, 258 bp, Glycine max
  unsure (1)..(258): unsure at all n locations
tttctccaacgctatcgagccaaacccaaacgttaactcagaagaagaccnnnnnnnnnnnnnnnnnnnnnnnnnnnnccgaaccactttcaactctccaacgtcgccacacgattcatcgcgtttcgcaggctgcaatggcgacgttcgaactgtaccgcagtacgacgatcggaatgtgcctgacggagacgctggacgagatggttcagacggcactctcagccccgagctcgcgattcaggttctggtccattc

SEQ ID NO: 150447 - DNA, 259 bp, Glycine max
gggaatattaggtctgcatacacaaaagattttaccagtaaagatattacaaagcagcaaattgctgttgctacttatcttattgataaactagctctgagggctggcaatgagaaggatgatgatgaagctgatactgttggttgctgcacattaaaagtagagaatgtgacaagagaaccccccaacaaacttaagtttaacttccttggtaagattctatcaagtacgaaaatacggttgaggttgagcttcctgt

SEQ ID NO: 150448 - DNA, 258 bp, Glycine max
ctctgccacttcttcgtcggtgtcaaactcacacaaactcagcattcaaaaccctcttcctgcgccaccgccggaaaatggaggcggtgggttcgagactcagccgcgcctcctcccgctacggcgcccccaccgtgttcagcggccccgtcagaaagtggaagaagaagtgggtccacgtcaccccctcttccttacccaacaacagctctcatctcacactaacaactccaccaccaccagcagcgcttcctctcg

SEQ ID NO: 150449 - DNA, 258 bp, Glycine max
atcgttgggatctccatacgccggatctgctaaaatacgcttgatccatatgggcctcctcgaccacttgtgggacgacaccgtcgccggcccaaggccggaaaacggtctcggcaagctccgaaaacaccacaccttcactttccgacctagctccggcaaggaaacggagggcgggagcgtgagatcgtacggagacgaatcgtcggaggaacgacgagagtgacgcgtagtatcatgatcgtgaaaccgcccggg

SEQ ID NO: 150450 - DNA, 258 bp, Glycine max
tcttacttcatttaacctcacaacaatcaagttttgaatggcaactgtgagaagtctgaagatcaagacaagtacctgcaaacgtatagtgaaggagctgcattcttatgagaaggaagttgagagagaagctgccaaaacagctgatatgacggaaaaaggagctgacccccatgatctcaagcaacaggaaaatgtgttggcagagtctagatgatgattcctgactgccgcaagcgccttgaggccgctttggca

SEQ ID NO: 150451 - DNA, 255 bp, Glycine max
cagaatccgagatcaaccccgacgaaggcaaggggtttttctcggcttcttcagaattctgaaatggcgcctgtttcagctttagccaagtacaagctcgtcgtcctgggtgaccaatccgtgggcaaaaccagcatcatcactcgcttcatgtatgataaattcgataacacctatcaggctacaattggtattgattttctatcaaaaacatgtatcttgaagatcgaactgttcgactgcagttgtgggata

SEQ ID NO: 150452 - DNA, 261 bp, Glycine max
gaaagaagagctcaaaaagtctaaggttattaaaatagactctcaaaaatcatgggaacaccacatctcttatgctaccaatcaaaagtaccctattgtagttcatttctctgctttctggtgtgtcccttctttagttatgaatcctttctttcaagaattggcctccacttatgaagatgttttgtttctgacgttggatgtggatgaggttaggaaattgcctccaagatggaaatcaaagccatgcccacctttctg

SEQ ID NO: 150453 - DNA, 259 bp, Glycine max
ctgcttctcactgatctccattcccattccatggcttccactgaatcatcccctttcaagaaaattcagattcaaagggatgacactacatttgacgcatatgtggttggaaaagaggatgctcctggaattgttgtgattcaggagtggtggggtgtggattacgaaattaagaaccatgccgtgaagatttctcagcttggtagtgggtttaagctcttattccagatttatacagaggaaaggttggtctggatgt

SEQ ID NO: 150454 - DNA, 260 bp, Glycine max
gcagtgctcttatgatgaaagggggaacagtgtcccaacgattctgctgctcgctcgcaaagcgattgtattcagagggaggccttaaagcggaaggaatattccgaattaatgctgataacagccaagaagaatttgtgcgtgatcagctaaacagaggtctggtaccacttggaattgacgttcattgtttatctggtttaataaaggcttgtttagagagcttccaacgggggtacttgattccctcacccccgaac

SEQ ID NO: 150455 - DNA, 260 bp, Glycine max
caagaagctcaactcagctgcaacgagtcttcaaaagcaacttcctggtcttaagattgcggttttcgacatttacaagcctctctatgaccttgttcaatccccttcaaaatctggttttgtggaggcaaacagaggatgctgtggtaccgggactgtagagacaacatccttgttgtgtaatccaaaatcaccaggaacttgttctaatgcacacagtatgtgttttgggacagtgtccatccttcacaagctgctaa

SEQ ID NO: 150456 - DNA, 258 bp, Glycine max
ccgcctgctgtatgacaccaaaggccgattccgtcttcactcagtcatagatgacgaggctaagttcaagctttgcaaagttcgctcagtgcagtttgggcaaaaaggtatcccatacttgaacacctacgatggtcgcactatccgctacccagaccctctcatcagagctaatgacaccattaagttggatttggaggagaacaagattgcgatttcatcaagtttgatgttgggaatgtagtcatggtgacaggt

SEQ ID NO: 150457 - DNA, 258 bp, Glycine max
gaaaatttacatggaggtaatcaaattcagtgtgctagtgttagccatgatggtcacattctggttacaggggctgatgatgggctagttaatgtatggagagttagcaagtttgggccccgcgccttacgacgcttgaagttggagaagccactttgtggtcacacagccaaaattacatgccttcaagttagccagccttacatgcttattgtagtggatcagatgattgcacagttattatatgggatctcagct

SEQ ID NO: 150458 - DNA, 256 bp, Glycine max
gtcttgcgttgtgttggaatcccaaattcatttctgtttctcattctcaattcttcttctattctcattctgatttgccacacacgcagaaaggttgaaaatagtgggactttattcactggaggtggagaaagatggctaacaacgcagctgcttgtgctgagagagctgctagtgatatgctcattggtccagactgggcaatcaacataacttgtgtgatatcattaatatggaccctgggcaagccaaggat

SEQ ID NO: 150459 - DNA, 255 bp, Glycine max
tcgcgaagttgtcaacttaatagcatgtgaaggagaagaaagagttgaacgtcacgagcttctgaataagtggagaatgcgtttcacaaaggctggatttacaccttatccattgagctccgttattaattcttcaatcaaggatcttctgcagagctaccatggacactacactctagaagagagagatggtgcactatttcttggttggtgaatcaagttcttgttgcatcttgtgcttggagatgaaaatcc

SEQ ID NO: 150460 - DNA, 256 bp, Glycine max
ttgccacactacaccgagattccccctaaacccgtttgcgttgttgtttgcgaagaaatgccgactaagaggagcgtgggaacgttgaaggagggtgatttgaaagggaagagggtgttcgtgagggtcgatctgaacgtgcctttggatgacaaccttaacatcaccgatgacactagagtccgtgctgctgttcccaccatcaagtactaactggtcatggagccaaagtgatcctttctagccacttgggacg

SEQ ID NO: 150461 - DNA, 258 bp, Glycine max
gccgcagagtcagagagagagattcactgaaacagagcgcagaagaaaatacataaactaatccagacaatgagcagcggcgctggaaaggtggtgtgtgtcaccggcgcttccggttacattgcttcctggatagtcaaattcctcctcaatcgcggctacaccgttaaggccaccgttcgcgacacaagtgatccgaaaaaaataaaccattggttggcctcgacggtgctaaggagaggctgcacctctacaagg

SEQ ID NO: 150462 - DNA, 252 bp, Glycine max
ttttcttgtgaaaaaaaaaatcctcagaaccaaaatcggttttcttctgtctctgatctctcaaagcttcaaattctccttgtttggtttgtttgtgtgtttggagtatgatgtcgccgccggcggtggtaacggaggaggaggggcggacaacgtgtcgtcgaccgtggcgtccggttcttcgcaatccttggaccgtttctctcagatggggctggattgaaagaacgaaattacttagggttatctgat

SEQ ID NO: 150463 - DNA, 256 bp, Glycine max
agccattgcattcctccagctttgacattttggatcattcttttcaaattagagattgttcttcttcctccaatcaagcaatacagaatgggtttccgtttacctgctgttcgacgggcatcattcacggctagccaagcagcttcaaaatctgtacaagttccaaagggctatcttgcagtgtatgttggagagaaacaatagcggttctggttcccgtatcatacttgaatcaaccttcattcgaagatctttt

SEQ ID NO: 150464 - DNA, 257 bp, Glycine max
atggagttgagcagaacagaaagacatattttgaaagaactgggattcatttgtcatgttgaacatcctcataagttcatatcaaattaccttgctaccctcgaaacacctccagaattgagacaggaagcttggaatctggctaatgatagtttgagaactacattgtgtgttcgatttaagagtgaggttgtggcttgtggagttgtatatctgctgctcgcaggttccaagtaccccttcctgagaatccaccg

SEQ ID NO: 150465 - DNA, 265 bp, Glycine max
caagtggtgaagaaggagaatccaaagtaacagagcaaaccagcaacaagaatggcaaatccaacgcaaataaaaacaacaacagagaaacaacctctgcggagacttccaaggataattcgaaaggctccgaggttcaaaatcagaagccagagtacattcatgtccgagcgcgtcgtggacaagccacggatagtcatagcttagctgaaagagttggagggagaagattagtgagagaatgaagtatttgcaagatttagta

SEQ ID NO: 150466 - DNA, 260 bp, Glycine max
ctggaaggacttgcccacgaagattcaccacaaggtctccgagaattggatcagcgccactcttttgctcggtcccctcgtcggcacctacgcgtatgttcaaaactacctggaaaaggagaagctggctcacaggtactgagctcttgcaagagctgattggataaccttctagtttgttgccttgatcttgtttagccacccaataatgtgcactgttgaaacttgctctaccgtttggttttgatatgtctgagttt

SEQ ID NO: 150467 - DNA, 257 bp, Glycine max
atccgagatcaaccccgacgaaggcaaggggtttttctcggcttcttcagatttctgaaatggcgcctgtttcagctttagccaagtacaagctcgtcttcctgggtgaccaatccgtgggcaaaaccagcatcatcactcgcttcatgtatgataaattcgataacacctatcaggctacaattggtattgattttctatcaaaaactattatcttgaagatcgaactgttcgactgcagttgtgggatacagctg

SEQ ID NO: 150468 - DNA, 252 bp, Glycine max
ccctttctctctctcattctcttctccatcgcgcgtaagaaacacattttagttgctactaatgggaactgttgaagctgcaaacaaggatgcaaatggaagtctcctagagaaaaatccttcagttgtttttgtgttaggtggcccaggaagtggaaagggtacccaatgtgcaaatattgtccaaaattttgggtatactcatctcacgctggtgatcttctgcgagcagaaatcaaatctggttctgaa

SEQ ID NO: 150469 - DNA, 255 bp, Glycine max
ggccaacaagagactgcaaatacagcaaagacaaaggagagccagttcttttcctactgctatagttaccggcagatgcaaagacaaggtttacagttttgttcgcttggctgagctatattatgctggaagccatggcatggatattcaagggccaacaagagactgcaaatacagcaaagacaaaggagagccagttctttttcaactgccagtgaatttcttcccatgattgatgaggtgcaccatcaatta

SEQ ID NO: 150470 - DNA, 247 bp, Glycine max
attgcagatttttgtcggcaatttggatcctaacgtcacggatgaccatttgagacaagtttttgggcattatggagagttagttcatgtgaagattccagctggcaagcgatgtggatttgtccaatttgcggaccggtaatttagtcattcagatatttggtgttttatcttgtgttaaattactttgtctatatgtaggtccttttattgtaccatgaggtttcgttttcatgcatcaggagct

SEQ ID NO: 150471 - DNA, 260 bp, Glycine max
ctgaggttactgatgctacgctgtttgcatgcttttctgtctatcccacttgttcagatgctagggttatgtgggatcagaagactgggcgttcaaggggatttggatttgtttcattccgtaatcaacaggatgcacaaagtgctataaatgatttgactggtaagtggcttggaagtagacaaatacgctgtaactgggcaacaaaaggtgtggtggtactgaagagaagcaaaactcagatgcaaaaagtgtggtgg

SEQ ID NO: 150472 - DNA, 266 bp, Glycine max
agaatgtcttacgcttatctcttcaaatacatcatcatcggtgacaccggagttggaaagtcttgtcttctacttcaattcacggacaagcgctttcagcccgtccatgacttgaccatcggtgttgaatttggtgccaggatgatcacaattgataacaagccaatcaagttgcaaatatgggatacggctggtcaagaatcattcagatctattacaaggtcttattacagaggggctgcaggtgcattgcttgtttatgatat

SEQ ID NO: 150473 - DNA, 260 bp, Glycine max
ctctgctcgtgcctctagggttatcatatctccatttccatttcctctctctcagtttccaagaatcttaagctatgggaaagtcttacccaaccgtgagcgctgattaccagaaggccgttgagaaggcgaagaagaagctcagaggcttcatcgctgagaagagatgcgctcctctaatgctccgtttggcatggcactctgctggaacttacgacgtgagctcgaagaccggtggtcccttcggaaccataaagcac

SEQ ID NO: 150474 - DNA, 260 bp, Glycine max
gacagacacaatttgcgaacagaaactctgcaccaacaatataaattggttaaagagaggactatatctggagattcatactatggctctcacgtgatgcagtatggtgatgtagggcttagcagagatgttctcttccattatttgggtacagatcctgctaatgataatttcacttttgtggatgaaaactccttatggtcaccttcaaaaccagtcaaccaacgtgatgctgatctcatccatttttgggataagtt

SEQ ID NO: 150475 - DNA, 252 bp, Glycine max
agctccttcacctccttagtttcgaaagcatggcttccctggcggcttccaccgcggctatgtcagaaatccttggaaaccccgttaacctcagatgcgcaaccaggtctgctccatcaccaactacacctgccaccttcaagaccgtcgcacttttctccaagaagaagccagctccacctccaaagaaaaagcctgccgctgtatcccccgccaatgaggaactcgccaagtggtatggtcctgacagaa

SEQ ID NO: 150476 - DNA, 253 bp, Glycine max
gccagggaacaacactcgcgatcatccaggaatgattcaggtatatttaggaagtgccggtgcgctagacgtggaaggcaaggaacttcctaaacttgtgtacatttcacgtgaaaaacgtcccggctatccacaccacaagaaagctggtgccatgaatgctttggttcgagtttctgctgctcttacaaatgcaccattcatgttgaatctggattgtgatcactacgtcaataatagcaaagcagtcaga

SEQ ID NO: 150477 - DNA, 257 bp, Glycine max
atggaatccatggttccactccccggaatctatgacccggatttcattgctgccaaccaaggagaccgtgccactaacgtaatcaggggcacaaagaaagaacaagttcaacaaatcatcaaagacattaaggagttcaaagaaagcactaaggttgacaaggtggttgtcctgtggacagccaacacagagaggtacagcaacgtagttgtgggactaaacgacaccatggaaaacctctttgcttccttggacag

SEQ ID NO: 150478 - DNA, 253 bp, Glycine max
ctctctctctctctgtctctctctctctagacttagattttgtgaatggctgaagtggaagagggacaggtcatcggcgtccacaccgttgatgagtggaagctgcaactccagaatgcaaaagactccaaaaaactgattgtggtggattttactgcttcctggtgtggtccatgccgttttatggccccagttcttgcagagattgcaaagaaaactcctgaattgatcttcctcaaagtggatgtggatg

SEQ ID NO: 150479 - DNA, 254 bp, Glycine max
gttgctgaattcaggacacaaaatgccagttataggcatgggaacttcagttgagaatcgtccatcaaatgagacccttgcttctatctatgttgaagccattgaggtgggttaccgtcattttgacactgctgcagtgtatggaacagaggaagccataggcctagccgtggccaaagccatagacaaaggccttataaagagtagagatgaagttttcatcacttcaaagccttggaacacagatgcacacc

SEQ ID NO: 150480 - DNA, 257 bp, Glycine max
gagggacccaagggtggtccgggaatgcctgagatgttaacaccaacaagtgcaataatgggtgcaggtcttggaaaggaagttgcattattgactgatggaagattttcaggaggttcacatggatttgtggttggccatatatgtcctgaagcacaggaaggtggtccaattggcttgattcaaaatggagacgtaatcaatgttgacatcaagaataggagaattgatgttttggtatcagatgaggagatgga

SEQ ID NO: 150481 - DNA, 264 bp, Glycine max
tttcttcgcttcttctgtacagcacccaagattgaagatgatagaccttgcgcgcgtgcagaaggagctcgtggaatgcagcaaggacgcggagggatcgggcatcaaagtctgccccaaaagcgacaaccttgttctcttgatcggcaccattcctggccctgtcggaactccttatgaagggggcattttccagattgatatcacattgccagatgggtacccgtttgaaccccccaagatgaagtttaaaaccaaagtttg

SEQ ID NO: 150482 - DNA, 258 bp, Glycine max
gtggaaagggaggcaagggtttgggtaagggaggagccaagaggcacaggaaggtgctccgcgataacatccagggaatcacaaaacccgccattcgccgtttggctcgcagaggcggcgtcaagagaatcagtggcctcatctatgaagaaacccgcggcgtccttaagatcttcctcgagaacgttattcgcgacgctgttacctacaccgagcatgctaggaggaagactgttaccgctatggatgttgtttatg

SEQ ID NO: 150483 - DNA, 247 bp, Glycine max
gttgctctccttcaaactccatctttccaaatcctctctttgttcttgtgctttgatctgcttcctactgcgatagtttctctactgttacatggccatggcggtttccgcaattggttttgaaggtttcgagaaaaggttggaaatatcctttttccagccgggactttttgctgaccctgaaggaaggggtctaagggctcttacaaaatcccagttgggtgagattctaacaccagctgcttgc

SEQ ID NO: 150484 - DNA, 253 bp, Glycine max
actacctctgccaattcttggtcaaaatgggggtcacctaatggtaattttgattggccagttggtgcttctgatgaaataggtaagctaagaaggtcatcatcatttgagcttgggaacaatggtgaggagcctgatttatcttgggtgcagtcacttgttaaggaatcaccagctgacgttaaaggtaaatttgcaaccactgtctcaaatgtttcagcagcagcagctggatcctccagtgagggatcaa

SEQ ID NO: 150485 - DNA, 252 bp, Glycine max
gaatcaccatcagcagagttggtggttcctccgtcgccgcacctcccatcctcttcgattatcatcttatcgaccaaaaacttctccaaaacatagtctacgatgctcttgtctggagcaccctcaactgcctccttgttggtgacaaatcagttcagagatcaggaacagttcctggtgttggcctggtgcatctcccgctttctttattacctgggccatttcctgaaaatcattggaagcaagcgtgcg

SEQ ID NO: 150486 - DNA, 251 bp, Glycine max
ccatcacctaatcacttccccacttcccctgtaaatcacgtgtagttcgcacaatgttttaaaaaatggctgatgctgaggacattcaacctcttgttgttgataatggaactggaatggtcaaggcgggttttgcaggtgatgacgctcctagggccgtgttccccagtattattgggcgactcacgccataccggtgtaatggttgggatgggtcagaaggatgcttacgtgggtgatgaagctcaatc

SEQ ID NO: 150487 - DNA, 252 bp, Glycine max
gttgaacgatgcgattctcgctgaggataagcacaaacctatgtatgaagaattggctaacaatcctaatgtggagtacattgctggaggtgctactcagaattcaatcagggttgctcagtggatgcttcaagcaccaggtgccacaagttacataggttgcataggaaaggacaaatttggagaggagatgaagaagaaatgtacacttgatggtgtaaaggttaactattatgaaatcgacaatacacc

SEQ ID NO: 150488 - DNA, 251 bp, Glycine max
gttaatgggtgggtgcaatcctatggttcccgttgtgtgaagccaccaatcatctatggtgatgtgagccgcccaaagccaatgactgtcttctggtcatctctggctcagagctttaccaagcgcccaatgaagggaatgcttaccggtcctgttaccattctcaactggtcctttgttagaaatgaccaacctagatctgagaccacctaccagattgctttggctatcaaggacgaagcggaggacct

SEQ ID NO: 150489 - DNA, 255 bp, Glycine max
catatctccatttccatttcctctctctcagtttccaagaatcttaagctatgggaaagtcttacccaaccgtgagcgctgattatcagaaggccgttgagaaggcgaagaagaagctcagaggcttcatcgctgagaagagatgcgctcctctaatgctccgtttggcatggcactctgctggaacttacgacgtgagctcgaagaccggtggtcccttcggaaccataaagcacccctccgaactcgctcacg

SEQ ID NO: 150490 - DNA, 257 bp, Glycine max
ctagctcgtcaggcacagagtaaggtgaaaacgctggcaaaaatggaacgtggtggacttgcagagaaggtggtcagagacagagttttggtattccgttttaccgatgttgggaaacttccccctccagttctccagtttgttgaggtgtcatttggttatactcctgataatctcatctacaagaacattgactttggggttgatttagactctagggttgcactggttggacccaatggtgctgggaagagtac

SEQ ID NO: 150491 - DNA, 261 bp, Glycine max
cactctttcattctcattgccgtcacacagagagagaagagacaatgaagtttaacccaagggtttcctcaagccgtcgaaagagccgcaaggctcacttcaccgctccgtcgagcgtgcgtcgcgtcctgatgagcgcgcctctctcgaccgatctccggtcgaagtacaacgtgcggtccattccggttcgcaaggacgacgaggtgcaggtggtgaggggaacctacaagggccgcgagggcaaagtggtccaggtct

SEQ ID NO: 150492 - DNA, 254 bp, Glycine max
  unsure (1)..(254): unsure at all n locations
ggcggagatcaagcacgcccgtctcgccatggtgggcttcttgggncgtgcagtccaagctgccgccactggcaagggcccgctcaacaactgggccacccacttgagtgacccactccacacaaccatcattgccaccttctcatcctcctcttaagaagaagcaaaagaagaagaatagtctttcttgtgcctggtcattctagttatattgtaaaagtctttttctatcttcttcggctttgggttgtaat

SEQ ID NO: 150493 - DNA, 251 bp, Glycine max
agcagaagcatgttgaagagttagttcgattaccggattgcttcctttgtcacactccttcccctgaggctggtcctgtttgtccaactcctgctctttccaatggcttcgttacatttggtagttttaacaatcttgccaagattacacccaaggtactgcaggtctgggcaaagatactatgtgcaattccaaattctcgtcttgtggtgaaatgtaaaccgttttgctgtgatagtgtgagacagagg

SEQ ID NO: 150494 - DNA, 246 bp, Glycine max
gtttccttcggcgcttgcttccgtgacttgagaaaaagaaatttagggtcttaagggtttcattctgcggcatcagacatgggaggaggcaatgggcaaaaggcaaagatggcacgcgagaagaacctcgagaagcagaaggccgcctcaaagggaagccagctggattcaaacaagaaagcaatgtcgattcagtgcaaggtgtgcatgcgaacatttatgtgcaccacatcggaattgaagtgt

SEQ ID NO: 150495 - DNA, 193 bp, Glycine max
  unsure (1)..(193): unsure at all n locations
gccgtcgccgccggctacgcctccgccgacgacgccgctcctcagaactccgggcgccaccgcgagcgcgagcgaanagcgaggagttccgtggacggaggaagaacacaagttgtttttggttggattgcagaaagtagggaaaggtgattggagaggaatctccaaaaactacgtcaaaacgcgaactccg

SEQ ID NO: 150496 - DNA, 257 bp, Glycine max
gcggtttcattttcgccctccgattgaatcacagcatgagcgacggattcggcatagcgaaattcatgaaagccttagccgaaatcgcctgtggcgcaacggaaccttccctcactccagtgtggtgcagggagctcttgaatgcaagaaacccacctcgaatttcacgcacccatcacgaatacgaggtggaaaacaaagccaaaggaactatgatgatcccattaaacgacgtggtgcaacgttgtttcttcttc

SEQ ID NO: 150497 - DNA, 252 bp, Glycine max
gcttgaagggtaagaaacttggtttgtatttttcggcatcctggtgtggtccatgtcaaacatttacgccaactttggtggatgtgtacaatgaggttgcaaaaaaaggtgacttccagatcgttttcattacggctgatgaagatgatgagtcctttaacggttacttttccaagatgccatggcttgcaatcccattttctgattcagacacacgcagccgccttgatgaattgtttcatgtgaggggga

SEQ ID NO: 150498 - DNA, 252 bp, Glycine max
tggcgaatgaagttcggcagctagcatcaaacaggccaatcacagtactgaatgggggttctgaacaaagtaatttatcatctctcgtcgttccagctgctgccttgggtgctctgggttatggctacatgtggtggaagggaatttcattctcagatctcatgtatgtgactaaacggaatatggaaaaagctgttgcagatttaaccaaaaagttgcagcatgcgtcagatgtcattgctgataccaaga

SEQ ID NO: 150499 - DNA, 249 bp, Glycine max
cgctccgaattagggttttccaattcgcagagcaactcaacacaacggcccaaaccaacaatgtcgcagccgcagcctcagtcgcagccgcaacacgggcaagcggcgctggagcaggtgcagtgcttcggtcgcaagaagacggcggtggccgtgacctactgcaagcgcgggcgcggcctcatcaagatcaacggctgccccatcgagctcgtcgagccggagatcctccgctttaaggccttcgag

SEQ ID NO: 150500 - DNA, 245 bp, Glycine max
gaagaacgaatcgaaaaaagatagatcatggcgatggcaaacttggctcgacggaagggttacgccgtcgttttgtcgtcgaggtcgtcgctttgtctgacaaggtggagggggttcgcgtccggatctgacgaaaacgacgtcgtggtcatcggcggcggtcccggcggctacgtggcggccattaaagcggcgcactgggtctgaaaaccacttgcatcgaaaaacgtggcactctcggcggt

SEQ ID NO: 150501 - DNA, 245 bp, Glycine max
ctcacagggagaaatagagcaagagaagtttgattcatatgatgcacatttctatgcaccatcaagggaagagatagaagaagaggtgaggaaatcagggtcattgaagatggagaggctagagatgtttgagatggacaagagtaataatgagcaagaaagtagtgagagctatggcacacaggttgctgtggcagttagggccattcaagaatcaatgatctcacaccactttggagaaggga

SEQ ID NO: 150502 - DNA, 248 bp, Glycine max
attttgcgaggcaatcccattctcatcttccatttccaccatcaatactattttcttgtcgttgagaagcttcgcgaacgaaagcaaagaaccctagaccgtcacagaaccattccatagccatgtctggtgttggccctctttctcaggattgggaacctgtcgtcctccgcaagaaggctcccaccgccgccgccaagaaggacgagaaagccgtcaacgccgcccgccgctctggcgccgaaatc

SEQ ID NO: 150503 - DNA, 238 bp, Glycine max
gaactgcttcagatggctgggcgtgctggacgcagaggcattgatgaaaatgttcatgtatttctcatccaaactcctaatgaaggtgctgaagagggctgcatagtactgttcgctggactagagcctctagtgtcacaggatactgcttcatatggtatggccatgaatctacttgctggtgtgaaatccatacataggtcaaatgaatcagatgacatgataccttccacaggta

SEQ ID NO: 150504 - DNA, 248 bp, Glycine max
cttcctctggtggcgacaatgtcgactcctgctaggaagaggtcgatgagagacttcaagaggctgcaacaagacccgcctgcagggatcagtggtgccccccaggataacaacataatgctgtggaatgctgtcatatttggtcctgatgatactccatgggatggaggcacgttcaagttgacactccaatttactgaggactatccaaataaaccaccgactgtacgatttgtgtctcgcatgtt

SEQ ID NO: 150505 - DNA, 251 bp, Glycine max
gggatattggcgctttaactattcggcaaccacttgtttgccaatactatattactccttcatcccttcactttatctccttaaagccattcccttgtttccaaagatgtctagcccatggttcatacctttcgcatatgtaatactcggggagagttcttctactttgattgatggtttgatttctggaggcacaatcaagggttggtggaatgacttatggatgtggttgtacataagaccaagttctt

SEQ ID NO: 150506 - DNA, 256 bp, Glycine max
cgattcctcagttttgaagaaaattggatgctgctcaaactagatgcatcatctatggcagttggtttttgtagactgtttcatcttgtaaatgcctacactggaatcgtgatatcatgtagaataaggctagtcttgcatattgttttgaatttacaatttacaagcatcatccatacataggattatgtttccgtgaaacggtcattctaaagacgtgcttgaaacaaataggtctacatcaaagttcatatag

SEQ ID NO: 150507 - DNA, 251 bp, Glycine max
atctgatctgagagaatggctcctcggtctagcagcaaggacgcccaagaccttttccgcgctctttggtctgcttatgctgcaacccccactaatctcaagatcattgatctctatgtcatctatgccgtattcaccgctttcatccaggttgtttacatggctttggttggatcatttccatttaactccttcctatcaggagtactttcttgtgtaggaactgctgttcttgctgtttgtctcaggat

SEQ ID NO: 150508 - DNA, 251 bp, Glycine max
cacacactctctctcatctatcaaatggcgacccccccaaacgacgccgcatcgacgaagaagccacaacccatcccttggacccaccaggagaccgtgcacctcattcgcgcctaccaggagaagtggtacgccctcaagcggggcccactgcgccacaaccagtgggaggaggtcgccgtcgtcgtcgccgcacgctgcggctacgaccttgcccaccccgccaagtccgcccttcagtgccgccacaa

SEQ ID NO: 150509 - DNA, 245 bp, Glycine max
ctgtagcgacccgagggggcttcttttagtctacgattacatccctaacggaaccctagcggaacacctgcataaccgtaagggctcgctgacgtggcaggtgaggctcgacatcgcgttgcaaacggcgttagcgatggagtatcttcacttctcggtggtgccgccgattgtgcacagggacataacgtcgtcgaatattttcgtggagagggatatgaggattaaggttggggattttggac

SEQ ID NO: 150510 - DNA, 246 bp, Glycine max
tgacctttcctagagataacatggtctatagagagagacactgccccccagaagaagagaagttgcagtgtatgatccctgcacccaaggggtcctgtaacaccatttccatagccgaagagccgtgattatcttccgtatgctaatgctccctacaagagccttatagttgaggatgctattcagaatttgatccaatacgattgaaatgtgttctacttcccttgtggcggaacccaatttcct

SEQ ID NO: 150511 - DNA, 246 bp, Glycine max
ccactctctctctttccgaccaaaatgtcgatcaacagcgaatctacgccgccaccggtgatcggaaaaatcgggccttacaccgtcttcatgacgccgccgtctacacccaaacccgccgacgacaaccccgttaccaccaccaagatcgcacctccgccgcctcagattcccaaagccgttccttcccccaaacccaaacctctctccgattccgacgattccgttttcggcttcttcagaaac

SEQ ID NO: 150512 - DNA, 242 bp, Glycine max
tccatccaacatcgaaacgaggtcgttttgtgttccgccgaaggcaccggaggttgtagcaggctagcagctatggatttggcatccaatctcggtggcaagattgacaaagccgaagttctctctgccgttcagaagtatgagaagtatcatgtttgctatggaggtcaagaggaagagaggaaagctaattataccgatatggttaataaatactacgatcttgttaccagcttttatga

SEQ ID NO: 150513 - DNA, 247 bp, Glycine max
ggccgtccatgatgagtgcaagctaaagtttctggagctcataggcgaagaggacgtaccggtatatcgtttttaagattgaggagaaatcgaagcaagttattgtggagaagctgggtgaccctgcaaatggctatgatgaattcgctgccagtcttcctgctgatgagtgtcgatatgctgtttatgattttgattttgtcactgaagagaattgccaaaagagcagaattttcttcattgcttg

SEQ ID NO: 150514 - DNA, 247 bp, Glycine max
atgatttgttgctgtaacaagatggatgctactacaccaaagtactccaaggccaggtatgatgaaattgtgaaggaagtttcttcctatttgaagaaagtaggatacaaccctgacaagattccttttgttcctatatctggttttgagggagacaacatgattgagaggtccacaaaccttgactggtacaagggtcctactctgctagatgcacttgaccagatctctgagcccaagaggcctt

SEQ ID NO: 150515 - DNA, 249 bp, Glycine max
gcagagattgtgccagaaccactgggggttgtgttggtcatctcaacatggaactttcttttcttgttatcaatggatccagtcattggagccatttccgcaggcaatgctgtggtcctgaaaccatcagaaatttctccagcaacatcatcactgcttgcaaatttgatcgaacaatatctagacaactctaccataagagttgttgaaggggctattcccgaaacatctgcactcctggatcagaag

SEQ ID NO: 150516 - DNA, 246 bp, Glycine max
ggatttgctattggtaatggattaaccaatcctgaaattcagtaccaggcgtatacagactacgcattagacaggggactaattaaaaaggctgaatataacagtatcaacaagttgatcccaccatgcaagcaggccatagaagcttgcggaactgaaggtggagaaacatgcgtatcttcattatatgtttgcaataagatattcaatcggatcatgaccattgctgatgatgttaattactat

SEQ ID NO: 150517 - DNA, 234 bp, Glycine max
gaaggacttggtcggaaactgatggtggattgtactggggaaggtgttttgttcattgaggctgatgcagatgtcactcttaagcaatttggtgatgctcttcaacctcctttcccgtgctgggaggaactcctttatgatgtacctggttctcaaggagtgcttaacactccccttctgcttattcaggtaacgcggctcaagtgcgggggtttcatattagctgtccggctg

SEQ ID NO: 150518 - DNA, 241 bp, Glycine max
cgagtacctagctgctgaggtgcttgagttggctgggaatgctgcacgtgacaacaagaagaacaggattattccgagacatgtgctattggctgtgaggaacgatgaggagttggggaaattgcttgctggtgtcaccattgcacatggtggtgtgcttccaaacattaaccctgttttgttgcctaagaagacggagagggctgccaaggagcctaagtctccatccaaggctactaaa

SEQ ID NO: 150519 - DNA, 239 bp, Glycine max
cggtagcagtgtgccacactgacacatcagaatggaaccctaaacatttggcctttcaggtgctcaaagttaagccaggaactattcctgtctgccacttccttcctgaggatcatgttgtttgggttcccaagtagatttgcattcaagtcctttttccatatatgtccttgaataactagcttcaatagcatcagctacagaactcgatgcatgtatttgctcgtactatatagttc

SEQ ID NO: 150520 - DNA, 249 bp, Glycine max
gttgtgaacaagttcaaacccaagaccccttacgttggtagatgcctgctcaacacaaagatcactggggatgatgctccaggagaaacttggcacatggtcttcagcaccgagggagagattccttacagagaaggacaatcaattggggtaattcctgatggtgttgacaagaatggcaaacctcataaactgagattgtattctattgctagcagtgccattggtgattttggagattccaagact

SEQ ID NO: 150521 - DNA, 237 bp, Glycine max
gtaaaaaatctgggtgcctcaagaagtactgtgagtgcttccaagccaacattctttgttctgaaaattgtaaatgcatggattgcaaaaactttgagggaagtgaagagagacaggctttgtcccatggagatcagattaacaacatggtgtatttccacaagcggccaattgtgccataactggagctatcgggtcctctggctaatcctccaccaccatattcaaggaaaggaa

SEQ ID NO: 150522 - DNA, 279 bp, Glycine max
cgcatgcatgcggactcaagattctggtgcatgcgtataaaaggaaaataaagaaattagcgtgaaaaatgttgggtgtgttcagcagctccatagtgtcgccgccggaggagctcgttgccgccggcagccgtacaccgtcgccgaagatgacggcggcggcgctgcggaagtggttcgaggagaagaacccctccgcagtgtcggtggaggtcggagagcatgtccagctcgcttatacccaccagaacgagtcgccgtttcagcccagatcctttg

SEQ ID NO: 150523 - DNA, 252 bp, Glycine max
gatacccttcacctcgtcctccgtctccgtggtggcatgcagatcttcgttaagaccctcaccggcaagactattaccctagaagtcgaaagctccgacaccatcgacaacgtaaggctaagattcaggacaaggagggaatccccccagaccagcagaggctgatcttcgccgggaagcagctcgaggacggacgcacccttgctgactacaacatccagaaggagtcaactctccacttggtgttgcgtc

SEQ ID NO: 150524 - DNA, 251 bp, Glycine max; identical to SEQ ID NO: 149815

SEQ ID NO: 150525 - DNA, 251 bp, Glycine max
cttccaccttgtatgccattgcttgtgttatggaaaatgttcctttcatcaatggaagccctcagaacacctttgtcccagggctgattgatctggccatcaagaggaacagtttgattggaggagatgactttaagagtggtcagaccacaatgaaatctgtgttggtggatttccttgtgggggccggcatcaagccaacatctatagtgagttacaaccatctgggcaacaatgatggcatgaatctc

SEQ ID NO: 150526 - DNA, 252 bp, Glycine max
aaagcattgaattcaaaaacttaagttcattccttgtgttttgctttcttcctcaaaaccaaacatgtcgaacacatgcggcaactgcgactgcgctgacaagactagctgcacaagggaaacagctatggtgttattgtagagactgagaagagttacatcgagactgttgtcatggatgttccagcagctgagcatgatcggtagtgcaagtgtggcactaactgcacttgcacggactgcacctgtggc

SEQ ID NO: 150527 - DNA, 237 bp, Glycine max
agaccacaaaaatctccgccgtcggatcgcccccaatttcacccctaaagccctctccacctacacctcgctccagcagattatcatcctcaaccacctcaagtcatgggtcagtcaggaccaagcccaaggctcctactctattccgctccgcatcctggctcgtgacatgaacctcgagacctcacagaccgtctacgctggtccgcacttgggcctcagaccccgagagcgatt

SEQ ID NO: 150528 - DNA, 250 bp, Glycine max
caacaagctccacccctacacctcatggattccaattactgtatacatttgcttgaggaatttcagtcagcggcttcggaatttctctttaaccctctttgcgtggcttggcagattactttggagacatacatttcccagtttcatatttggttaaggtctaacatgccaaacggacagcccaagtggcttctttctcttatcccggagtatcctatgctcaacttcatgctaacaactgctatatacg

SEQ ID NO: 150529 - DNA, 247 bp, Glycine max
gggaaataggacatgtgaaatttgccattctgttgctcggaatgtttacggaggaaatgaggagtcgacggagcatttgagcgacgttaacaatgctactacagcagccaactctccacacctgctccttcagcagaacctcgaagattttggcacggccatcgcttcctgaatttcttgcttgcttgtatggtttttgcgtttgtcatatcatggctattccactttaatgtgccatcatcctaga

SEQ ID NO: 150530 - DNA, 251 bp, Glycine max
cctacctctcccttcaagatgcagatcttcgtcaagaccctcaccggcaagaccatcacccttgaggtggaaagctctgacaccatcgacaacgtcaaggccaagatccaggacaaggaaggaatccccccggaccagcaacgtctcattttcgccggaaagcaacttgaggacggccgtacccttgctgactacaacattcagaaggagagtactcttcacctcgtcctccgtctccgtggtggcatgca

SEQ ID NO: 150531 - DNA, 247 bp, Glycine max
cccagacaagattccatttgtgcccatctctggtttcgagggtgacaacatgattgagaggtccaccaaccttgactggtacaagggaccaactctccttgaggctcttgaccaaatcaatgagcccaagaggccctcagacaagccactcaggcttccattgcaggatgtctacaaaattggtggtattggtaccgtgccagtgggacgtgttgagactggtgtcgtgaagcccagtatggtggtg

SEQ ID NO: 150532 - DNA, 250 bp, Glycine max
gtccttttcagcttaccaagaacttgtctcttgtgtggaatgactatggctgggacaaggcatcaaatattatatttgtagaccaacccactgggacgggtttcagctatacttctgatgagagtgacattcgccatgatgaagagggtgttagcaatgatttgtatgacttcttgcaggcatttttcaaggagcaccctcagctcactaagaatgacttttatattactggagagtcatatgctggaca

SEQ ID NO: 150533 - DNA, 249 bp, Glycine max
cgttgattgaagaagatgccgatcagaaacatcgccatcggaaggcctgaagaggctactcaccccgacacgttgaaggcggggttggctgagttcatctccaccttgatcttcgtgttcgccggttcaggttccggcatcggctacaacaagctcaccgacaacggcgccgccactcccgccggcctcatctccgcttccatcgcccatgctttcgccctcttcgtcgccgtctccgtcggcgccaac

SEQ ID NO: 150534 - DNA, 246 bp, Glycine max
cgagaccaagttggatgacgagatcaagtcatggctagcatttgctgcacaaaaaattgttgaagttaacgcattggctaaggcattgtctgtcaacaaggatgtggcttcttctctgctaatgctgcagctcaggcttcaaggaagtcctctccaagagtgtccaacgaggctgttcagaaggctgctgctgcattgaagggttcagatcatcgccgtgctacaaatgtcagtgccagactggat

SEQ ID NO: 150535 - DNA, 246 bp, Glycine max
caaaacttgctatagcagtaagctataactcatttgaggctctgtgagaattgagaaatggctaaagatgttgaggttcaagagcaaggaggagagtactctgccaaagactaccatgaccctcctccagcacctttgttcgacccagaggagctcacacagtggtccttctatagagccctcatcgctgagttcatagcaacccttctcttcctttatgtcactgtgctcaccattattggctac

SEQ ID NO: 150536 - DNA, 246 bp, Glycine max
gtaagcactatagtaaaaaaaggacattcattcatctatggctacccttattgctcccagcaaccactctccccaagaagatgctgaagctctcagaaaggcttttgaatgatggggaactgatgagaacactgtcatagtaattctgggtcatagaactgtgtatcagaggcagcaaatcagaagagtttatgaggaaatttaccaggaggatcttgtgaagcgcctagagtctgagatcaaagg

SEQ ID NO: 150537 - DNA, 245 bp, Glycine max
tgaagatggtgaagagcccaaatctgctgccgttagggaacttcgagaagaaactggaatagtgtctgctgagataattgctgaggttcagaaatggttgacatatgatttccctcctgctgtgaaggctaaagtcaatcgtctatggggaggtgaatggcatggacaggctcaaaagtggtttcttatgagattaacaaaagatgacagtgaggtcaacttagctaatggggaagcagaacgtg

SEQ ID NO: 150538 - DNA, 245 bp, Glycine max
catcgttaaaggctgcctgggagccctggacaccgcccagaagagcaccgggagcggcggcaagaagaagggccccgcccagctcagagtatacaatctggggaacacttcaccggtgccggttgggaccttggtgtccattctggaaggtctgctaagcaccaaggccaagaagcacgtcattaagatgccatcaaacggcgacgttcccttcacacacgccaatgtcagcttggcctacaggg

SEQ ID NO: 150539 - DNA, 250 bp, Glycine max
ctttctcctcggtgcatacagaggactatacattctcaactggatctatcgctactttactgagccccactttgtccattggataacatggatttctggccttgttcaaacactactctatgctgatttcttctattactatttccaaagctggaagaacaacaaaaagcttcatttgccagcatgagtttattcttctgttcttgaaaacaagggtctaagtggacaattaacagtaagcagagaggat

SEQ ID NO: 150540 - DNA, 245 bp, Glycine max
gggatattacaagatctgcagaggtcgcaatgtatgtggggtggactcgatggtctcaactgtcgctgctatacatgtttctaacaattaaatataaggatggatgcctaaacgtggtaggggcaccagtatagtatgtatgtaaataatttgcacgatgtaatgttatgaaggaggaaactgctaagcacatgtttatgcttttattctgtaattctctatggtagctagtccagccacaaatc

SEQ ID NO: 150541 - DNA, 248 bp, Glycine max
gattgtgatcattatgttaacaacagcaaggccgttcgggaagtaatgtgttttctcatggatccaggagttggtagccatgtgtgttatgtgcagttcccccagagatttgcaggtattagatcgcagtgatcgatatgccaatcgcaacacagttgtctttgatgttaacatggaaggacttgatgggattccaggaccagtatatatgggaactggatatgtcttcaatagacaagcactttatg

SEQ ID NO: 150542 - DNA, 248 bp, Glycine max
gcaggctatccaatggctagatggaaaccaacttgctgaggctgacgaatttgaggataagatgaaggagttggagagcatttgtaatcccatcatagcaaagatgtaccagggtgctggtggtgatgcgggtggagccatggatgaggatggtcctgcagctggcagtggaagcggtgctggacccaaaattgaggaagtcgattaagcagaagattctcatgggttgttcttgattttgtcaaaga

SEQ ID NO: 150543 - DNA, 250 bp, Glycine max
cttcttctcttgcggctagggttttagcgcagattcttctagaattaaggaagatgggtaaggaaaaggttcacatcagtattgtggtcattggccatgtcgactctgggaaatccactaccactggtcacctgatttacaagcttggaggcattgacaagcgtgttattgagaggtttgagcatggagctgctgagatgaacaagaggtctttcaagtatgcctgggtgctggacaaacttaaggctga

SEQ ID NO: 150544 - DNA, 248 bp, Glycine max
aactctttcaaaagggagaagaaaaggaaaggaaacaaaacgcacaaaggattattatagcaatggcagaacaaaaccaaaaccagacaactgaagctggaaggcacaagaggttggccacaagagccttctccagagtgatgctctttaccagtatattctggagaccagtgtctacccaagagaacctgaatccatgaaagaactgagagagttgacagcaaaacacccatggaacatcatgacaa

SEQ ID NO: 150545 - DNA, 243 bp, Glycine max
ggaaaagatggttcttggcttgcatggcttgattctaagaaagagggctctgttctctatgtgtgttttgggagcatgaacaacttccctaccacccagctttgggaaatagctcatgcccttgaagattctggtcatgatttcatctgggtggttgggaaaactgatgaaggtgaaactaaaggttttgtggaggaatttgagaagagggtgcaagcaagcaacaaagggtatctaatatgc

SEQ ID NO: 150546 - DNA, 239 bp, Glycine max
caaagttagaaacaaggagaaagaaagaagatggcaggaaagaaaatcccagatgtgttgctgaattcaggacacaaaatgccagttataggcatgggaacttcagtggagaatcgtccatcaaatgagacccttgcttctatctatgttgaagccattgaggtgggttaccgtcattttgacactgctgcagtgtatggaacagaggaagccataggcctagccgtggccaaagccat

SEQ ID NO: 150547 - DNA, 241 bp, Glycine max
attgatgatcatcacacaaatgaagacgttgcccttgctattggaacagctttgctgcatgcccttggtgataggaagggtattaaccggtttggtaacttctctgctcctcttgatgaagcattgatacatgtttcactggatttgtctggccgaccacatctaagttataatttggacatacccactcagagggttgggacatatgatactcagttggtggagcatttcttccaatccc

SEQ ID NO: 150548 - DNA, 238 bp, Glycine max
cttcggcgggatgaagctgttcttcccgaacgtgctgaagtggatcggacgcgccggggtgaagctccacgcgcgcctggcggaggagattcgctccgccgtgagaggcgccggcggggagatcaccatggcggcgatggagaacatgccgctgatgaagtcggtggtgtacgaggcgttccgcatcgacccgccggtgccgttgcagttcgggagggcgaagagggacttgatcatc

SEQ ID NO: 150549 - DNA, 222 bp, Glycine max
tctcaagtctctcgaagcctctttctctctcttctagaagctatctgtgtttggtgttactaagtctccaacaagcaaagtacatggttgatttggaaatccaggtccccaccccattcgacccgtttgccgaggcgagagaatcggatgcccccggagcaaaggagtatgtgcatattcgaattcagcagaggaatgggaagaagagtctgaccacagtgc

SEQ ID NO: 150550 - DNA, 240 bp, Glycine max
ctcgagccgaatcggctcgagagcctggcaaaccccagctgcagagcccgggaaagctgattgggaattggcattggtagagactgctagcaatttgtcaaagcagaaggcaactttaggtggtgggtttgatcctctattgttgactggcatgtatgatcaaggaatggtgaggcagcatgtcagcactacccaactgagtggagggagtgcaagcagtgtggcattgccaggacctgg

SEQ ID NO: 150551 - DNA, 243 bp, Glycine max
aaatgatgcttcaaaatacagcatgagtgttagtatgtatcgaggaggtaggggaaccggaaggccaaaaactgctccaccagatctgccttctttgctcttggatgctcgaatatgctatctgggtatgccgattgtaccagctgtgacagaacttattgttgctcaatttatgtggttggattatgataaccctaccaaacctatttacttgtatattaattcatcaggaactctgaatga

SEQ ID NO: 150552 - DNA, 243 bp, Glycine max
tgctgagatgggtaccatgttccctgaaaacagtggttatgtggtttgggtttcatctgctttgggtcccttttgggggtttcagcaaggttggatgaaatggcttagtggggtgatagacaacgcattataccccgttttatttcttgactatctgaagtcaggaatcccggctttaggtggtgggtttcctagagttgttgcaacatggggtctgactatagttctcacttacttgaacta

SEQ ID NO: 150553 - DNA, 231 bp, Glycine max
tcacatttcaacaaccatagccatggctttctccttctccaaagcacttgtccttgcctgctccttctgcttatttgcgtctttggcttttggacgagattctccattgtgggctattcatcggaggacttaaagtccatggataagctcattgaactctttgaatcatggatgtcaaaacatggcaagatttaccaaagcattgaggagaagcttcttaggttcgagatt

SEQ ID NO: 150554 - DNA, 238 bp, Glycine max
aaacatggagcttccactcctagcacatcatgcactctttgcactaagcttttgcatctcaattttcttggcatcgtgtgatgatgattttctatccgtgaaaagaattcaagttcatctccatttcctagcaactttctttttggaactgcatcttcttcatatcagtttgaaggagcttacttgactgatggtaagggactaaataactgggatgttttcactcataagccaggca

SEQ ID NO: 150555 - DNA, 238 bp, Glycine max
gccaaatatggcattgatgggtcagcttttcctgaataaaaccatagagtggtcagagtttcaggatgcagtggttgaaggtcaccaaaatagacaaggcgaaccaaggctgaggaagccaaaacaatcaatatatacatatccagctcctgattgcatgtgccaagcttagtgactagtagtatacttaaattattattgctcacgatgtagcctgtgtattttatagttcggtgtc

SEQ ID NO: 150556 - DNA, 236 bp, Glycine max
ggccgacatcataatgacatgcaatttgtatttgggttttgcaaacatcctggttaagagctttacctctgagtttcctcatgttgagagatacttttggaccttggtcaatcagccaaacttccgaaaaataattgggcaggtcaagcaggctgaagctattcctcctgttcaatctgcaaagaagccttcccagccaaaagaatccaaggccaaggcaaaagatgaaccaaaga

SEQ ID NO: 150557 - DNA, 237 bp, Glycine max
aaatttcacagcttgtgcaaagtgctcttgatggttacaaggtttgcatccttgcctatggtcagacagggtcagggaagacctatacaatgatgggaaggcctggacatccagaggagaagggcttgatacctcgttcattagaacagatatttcaaactaagcagtctcagcaacctcagggctggaaatatgaaatgcaggtgtcaatgttggaaatatacaacgaaacgatcc

SEQ ID NO: 150558 - DNA, 237 bp, Glycine max
ctcgagccgcaacaaaggagttgtaaattaagagcatggctgcacaagctcttgtatcatcatcatctcttaccttctcagccgaggctacaagacaaatcttggaccaagatcactccaatctccatttggcttctcaagaaaagcctcctttcttgttaaggcagctgctactccccctgtcaagcaaggatcagacagacctttgtggtttgcatcaaagcaaagtctttccta

SEQ ID NO: 150559 - DNA, 242 bp, Glycine max
attcattcaagattcagcaagtgcgttttggaagcagagaccgaaatacttcgagatggcccgtacaaagcaaactgctcgtaagtcaactggaggaaaagccccaggaagcagcttgcaaccaaggctgcacgtaagtctgcaccaacaactggtggtgtgaagaagcctcatcgttatcgccctggaactgttgctcttcgtgagattaggacataccagaagagcactgagctcctaat

SEQ ID NO: 150560 - DNA, 224 bp, Glycine max
ggccactgagatgatggggccaacaatggtggcagaagcaagaacttgtgagtctcagagccaccgtttcaaggggccatgtttgagtgacaccaactgtgggtctgtttgccgaaccgaacgtttcactggaggacactgccgtggcttccgtcgcagatgcttctggaccaaacattgttaattttaaaaaattaattaagagtgccgtgatagaagatgat

SEQ ID NO: 150561 - DNA, 261 bp, Glycine max
gccaaagcgtttcttcgtcgtcgcttgatgtcggagtggtgccggacgggaacacagtgtcggacatgtcgtattcgagtgggattgtggcgtcgggtggacaaggcgcgacgcagttgtgtgggatggatcgggaagcgagggtgctgcgatacagagagaaaaggaagaaccgaaaatttgagaagacgattcgatacgcatcgcgaaaggcttatgcggaaacccggcccaggataaaaggccggttcgcgaaacgaa

SEQ ID NO: 150562 - DNA, 246 bp, Glycine max
gcagtttcctcgctctcttttctgcaattttcttttttgttccttctctgcggttatctttttgagcttcaatggcggacgctgaaaccttcgctttccaggctgagatcaaccagcttctcagcctcatcatcaacaccttctacagcaacaaggagaatctcttgcgtgaactcatcagcaacgcttctgatgctttggataagattcgatttgagagtttaaccgacaagagcaagctcgatg

SEQ ID NO: 150563 - DNA, 257 bp, Glycine max
ctgtgctattggttacgggcccaggttgattcaggtcattaccggatcgccgcccaattgtcctcggaggaggcccttgccggagaatctcaattacccgtcgtttgtggcggtcttaccggtgtcgtcgtcgttgttgagcaagacgttcttcaggacggtgacgaatgtgggcccgccgagtgcggtgtatcgggtgagggtggagacgcaggcggagggggtggcggtgacggtgaggccgtcgcagcttgtat

SEQ ID NO: 150564 - DNA, 260 bp, Glycine max
aacagatgatttgctgctgtaacaaaatggatgctactacacccaagtattccaaggccaggtatgatgaaattgtgaaggaagtctcttcctacttgaagaaagtaggatacaaccctgacaagattccttttgttcctatctctggttttgagggagacaacatgattgagaggtccacaaaccttgactggtacaagggtccaactctgcttgatgcacttgaccagattagtgagcccaagaggccctctgacaag

SEQ ID NO: 150565 - DNA, 259 bp, Glycine max
agggaattgatttctactccactgttactcgtgccagatttgaggagctcaacatggatctcttcaggaaatgtatggagccggtggagaaatgtttgagggatgctaagatggacaaaagaagtgttgatgatgttgtccttgttggtggttctaccagaattcccaaggttcaacaactgctgcaggacttctttaatggaaaagagctttgcaagagcattaatcccgatgaggctgttgcatatggtgcggctgt

SEQ ID NO: 150566 - DNA, 269 bp, Glycine max
attgaactttatctctcaaggatacctcgacgtagcaaacgagagaagttttggaagaaaggaaaagattggtataggttggatggaaggactgagagttctgagaggcagaagcttgttgagagatttaatgagcctttgaataagagggtaaagtgcactctgatttcaactagagcaggctctttgggtattaatcttcatgcagctaatcgtgttgttatagttgatggttcttggaatccaacatatgatctccaggccatcta

SEQ ID NO: 150567 - DNA, 254 bp, Glycine max
cttggagacaatatcaaaactggaggagagaataaaagaagctgaggagaatgcaagaaggattaaggagcatgccgatatagcagaaaaagaaatcgaagctttggaattacaagttactaaacttaatgaagaaaaggaagatgctgctctccattatcagcaatgcatggagataatttccagtttggagtataagctctcttgtgctgaagaggaggtgcataggctaaattccaagatagttgatgggg

SEQ ID NO: 150568 - DNA, 259 bp, Glycine max
cttaaggtttcaaacctaggaagttggaagtcatggcagcaacattgatggcagcaacaacaagttctggtactcttaaagcaactcctttccttggccaaggcaagggtgccaatgccaatgctcttagggatgttgtctccatgggaactgggaagtacaccatgggcaatgatttgtggtatggaccagacagagtgaaatacttgggacccttctcagctcagaccccttcatacttgaaaggagaattccctgg

SEQ ID NO: 150569 - DNA, 257 bp, Glycine max
tttctcctttcgtttagcaacaacaacaatggttgcagccaagaaaaccaagaagacccatgagagcatcaacaacaggctcgctcttgtcatgaagagtggaaaattcaccctcggttacaagacggttctcaaatcacttaggagctccaaagggaaattgattatcattgctaacaactgcccccctttgaggaaatcagagattgaatactatgctatgttggccaaggttggagttcatcattacaatggga

SEQ ID NO: 150570 - DNA, 257 bp, Glycine max
cataactgaacaaacaaagcaaccctatgtcgaaggtggtttgtgtcaccggagccagtggcgccattggatcatgggtggccctcctcctcctccagcgtggttatacggtccatgccaccgtccaagacatcaaggatgaaaatgagacgaaacatttggaggaaatggaaggagcaaagagtcgtctccatttttttgaaatggatcttcttgacatcgactccattgccgctgccataaagggttgctccggc

SEQ ID NO: 150571 - DNA, 257 bp, Glycine max
ccaatatattccattctctctgtgtatttccctacctctcccttcaagatgcagatcttcgtcaagaccctcaccggcaagaccatcacccttgaggtggaaagctctgacaccatcgacaacgtcaaggccaagatccaggacaaggaaggaatccccccggaccagcaacgtctcattttcgccggaaagcaacttgaggacggccgtacccttgctgactacaacattcagaaggagagtactcttcacctcgt

SEQ ID NO: 150572 - DNA, 259 bp, Glycine max
gtaagaaagctgcagtggaggcggacctgaaaaagattgaagaagaactggagaagaaaaaggcagaagctgcagagaaaataaaaaacaaaattgctacaatccacaaggaagctgaagaaagaagagcaataattgaggcaaagaaaggggaagatcttcttaaggcagaggagcaagctgcaaagtatagagcaactggaacagctccaaagaaactccttggttgtttctaatgctttaaatcttaagcattgtg

SEQ ID NO: 150573 - DNA, 263 bp, Glycine max
ggcaatttctgataataaggagcgtgaagatgacaaacctgaagatattgctcgatctcttctaagaatgatctcaaataatattggacagatctcttacttaaatgcccttcgctttgggatgaagaggattttttttggtggattttttattcggaggcacccttttactatggacacattatctgttgctgttaattcgtggtctaaaggtgaggctaaggcaatgtttttgcggcatgaagggtttctaggaggtgtag

SEQ ID NO: 150574 - DNA, 262 bp, Glycine max
aattcttcaatttaaacacagaaacaaaatcaccaccttcaaagtcttctctctcgagaatcatcgaataaaactagggtttccgatcgtcgtcgaggagaatgccgaagaacaagggaaagggaggaaagaaccggaagcgcgggaagaacgaggcggacgacgagaagcgggagcttgtgttcaaggaggacggccaggagtacgcgcaggtgctccggatgctggggaacggccgctgcgaggcgatgtgcatcgacgg

SEQ ID NO: 150575 - DNA, 256 bp, Glycine max
tgttggtgctggggtttttgagaggaaggaccaggatgcaatttttgccgctgttgaaaccattgcgcaaaaagcaaatgttgtcagacctgactggaatggccttaatgttttacttctccatgctgcccaggctgctgcccttgaccttggacttgttccacaatctgagaaaagccttgagtctgcaaaatttgtatatttgatgggtgctgatgatgtaaacttagacaagatcccagatgatgcttttgtt

SEQ ID NO: 150576 - DNA, 252 bp, Glycine max
tggatttggaaacttctcctattattatgttagaaaagattttagccttccacgttttgctcagatgatgtggcggcttaatttttttgtggccttctgttgtattgtgcttaacaatgactatatgctctactatatatgcccaatgcacacgcttttcactttgatggtgtatggagcattgggtatatataacaagtataatgaaattccctctgtaatggctgcaaagattttggcatgctttcttgt

SEQ ID NO: 150577 - DNA, 261 bp, Glycine max
tttttctctcacctgaaaatgtcttgctgcggtggtaactgtggttgcggaagctcctgcaagtgcggcaacggctgcggaggctgcaagatgtacccagacttgagctacactgagtcaaccaccaccgagaccttggtcatgggagtggcacctgttaaggctcaatttgagggtgctgaaatgggtgtgcccgctgagaacgatggctgcaaatgtggaccaaactgctcctgcaacccctgcacttgcaagtgaggt

SEQ ID NO: 150578 - DNA, 243 bp, Glycine max
gagaaagagatagtgtggtagagagagaggagcggaggagagaaaatgacgacgaggttcaagaagaacaggaagaagagaggccacgtcagcgccggtcacggtcgtatcgggaagcaccgcaagcatcccggtggtcggggtaacgccggtggcatgcaccaccaccgcatcctcttcgacaagtaccatcccggtttcttcggaaaggtgggtatgcgctacttccacaaactccgcaac

SEQ ID NO: 150579 - DNA, 252 bp, Glycine max; identical to SEQ ID NO: 133916

SEQ ID NO: 150580 - DNA, 253 bp, Glycine max
gccgtcaccgagcgtgtccttgcagcatgctacaaggctttgaatgatcaccatgtccttcttgagggtaccctattgaagccaaacatggtcacccctggatcccaatctgctaaggtttcccctcaggtggttgccgagcacactgtcagagcccttcagagaaccgtgcctgctgcagttcctgctgtcgttttcttgtctggtggccagagtgaggaggaggcatccgtcaacctcaacgccattaacc

SEQ ID NO: 150581 - DNA, 251 bp, Glycine max
ttctgcgagtaaagagtgcagaaggaaaatgggcgaggcatatgcattgaataaagaattaaatggtttggttagtgaagatgatctgaaaaatttgaggaggaaattagatgagagtgaagggcaagaggctggagctaaaagatataagcaacagctgattggctgacccaaaattttactcgttttttcaactgccgtgctttgagttgcagtttatacgtgttagggatattttattttatgcatta

SEQ ID NO: 150582 - DNA, 253 bp, Glycine max
aaaccctaaacgactctatctctcttcgttttgttcttccttgcgctcctcctcgttcgttcgttctccctcgcgtagatcggcaatggcggagaccgagacgtttgctttccaggctgagatcaaccagctcctcagtctcatcatcaacaccttctactccaacaaggaaatcttccttcgtgaactcatcagcaacgcctctgatgctttggacaagattagatttgagagtttgacggacaagagcaag

SEQ ID NO: 150583 - DNA, 243 bp, Glycine max
gtttcaccgcacgaatatcttgttgtttggagcgatccgagaaaaactctgtaaacatgttggtttaccaggacctccttacaggtgatgagcttctctctgactccttccgttacaaggaaattgagaatggaatgctgtgggaagttgaggggaagtgggttgttaaaggagcagttgatgtagacattggtgcaaaccccttctgctgaggtggaggagaagatgagggagtcgatgatg

SEQ ID NO: 150584 - DNA, 247 bp, Glycine max
atcaactagaaaggagtcattttatgaccttcagcttgatgttaaaggttgtcgtgatgtttatgcttcctttgataagtatgtcgaagttgaaagtcttgagggggataacaaatatcatgctgaacagtatggtttgcaggatgctaagaaaggtgtcctatttattgattttcctcctgtccttcaactccagctaaaaagatttgaatatgattttatgcgggatactatggttaagattaat

SEQ ID NO: 150585 - DNA, 248 bp, Glycine max
caggagaggaacgctgcattgcttgcaaactttgtgaagctatatgtcctgcacaagcaatcacaattgaggctgaggagcgagaagatggaagccgcaggacaactcggtatgatattgacatgaccaagtgcatttattgtggattttgtcaagaggcatgccctgttgatgcgattgttgaagggccaaactttgaatttgctacagagactcatgaggagcttttatatgacaaggagaagctg

SEQ ID NO: 150586 - DNA, 248 bp, Glycine max
attgagcaagaatataccttgttgcagaaagatgtaaatgggccacttgggtggccacttggtgggtttcctggaccacagggcccatactactgtggaactggtgctgataaagcatatggccgtgatattgtagatgcacattacaaagcttgtatttatgctggcatcaatattagtggcatcaatggagaggttatgcctggtcagtgggaatttcaagttggtccttctgttggtatatctgc

SEQ ID NO: 150587 - DNA, 249 bp, Glycine max
caaatgttgccgaggaagaaacctatgtgatcacagccagaatggaaccggctgttgccattgaagtcaaccctccagcaatgactatcaaagcaggcgcatcgcgcagtttttggtgtcacttacagtgcgctcggtgacaggaaggtatagttttggagaggttttgatgaaagggagcagagggcacaaggtgaggattcctgttctggccaacggataccgacgatagatagcatagtgaagttt

SEQ ID NO: 150588 - DNA, 249 bp, Glycine max
aggaaactgaaggtgaacaactttacagcaccagttggagcacgatccagcactacagtttgcgcagttgctgagcctgataggcctctgtggttcccaggcagcacccctcctccatggctagatggcagtttgccaggagattttggctttgatcctctaggtcttgcatctgatcctgagagcctgagatggaatgtccaagcagagcttgtgcactgcagatgggccatgttgggagctgctggc

SEQ ID NO: 150589 - DNA, 246 bp, Glycine max
gaacaacaaacaaattgcaggtacatatgcacaacttgggggataggaatggatattaaagatgatgtaaaaagggaggaggtgacaacacttgtgaaagaaatgataaccggagaaagggggaaggaattggccaaagtgtctggagtggaaaaagaaagcattagaagccatggatatgggaggatcatcatataatgatttccatcgattagtgaaggaggttcttcacaatgatgttgtttg

SEQ ID NO: 150590 - DNA, 256 bp, Glycine max
tatggaaggccttccaagaatatagtaattcgaaaccttgttgttcgctctaacgtcagtgctggcatctcaataggcagtgagatgtctggtggggtatccaatgtcctggtggagaacattcttgtatgggaatcaaggcgtgccatgagaatcaagactgctccaggaagaggcggatatgtgcggcaaataacatacaaaaatctaatgttaaaaaatgtgcgcgttggaattgtgatcaagacagattaca

SEQ ID NO: 150591 - DNA, 247 bp, Glycine max
ctcagatgcaccttcaccctacaaccctcttcagagcaagttcttcgagacatttgctgctccattcacaaagaggggattgttactcaagtttctgatattgggaggtggttccacccttgcatacttcagtgcaactgcctcaggtgacattctaccaatcaagaagggaccacaactcccaccaaagctcggttctcgtggcaagatctaatttgatttgtatcagaactccatctattgagtt

SEQ ID NO: 150592 - DNA, 243 bp, Glycine max
ctatttttcaagtaacttaaggtttcaaacctaggaagttggaagtcatggcagcaacattgatggcagcaacaacaagttctggtactcttaaagcaactcctttccttggccaaggcaagggtgccaatgccaatgctcttagggatgttgtctccatgggaactgggaagtacaccatgggcaatgatttgtggtatggaccagacagagtgaaatacttgggacccttctcagctcaga

SEQ ID NO: 150593 - DNA, 244 bp, Glycine max
gagagcatggcgtcttgggatcaaatgggggaacttgcaaatgtggcacagttgactggtgtagatgctgtgcggctgattgggatgattgtgagagctgcaagcactgcacggatgcataagagaaactgcaggcagtttgcacagcatctgaagttgattgggaacttgctggagcagctcaagatctcggagctgaagaagtacccggaaactagggagcctctggagcagctggaagatg

SEQ ID NO: 150594 - DNA, 247 bp, Glycine max
cacttggcatcgcttctcctctctcccaagaaagaatcatcaatggcgattgaacacgaagacgatctcaaagacgagaagaaccctcgacctctcgacgaggatgacatcgccctcctcaagacctacggtttgggaccttactccacaagcataaaaaaggcggagaaggaaatcaaagatatggccaagaaagtgaatgacttatgtggtataaaggagtctgatactggtttagctgcaccaa

SEQ ID NO: 150595 - DNA, 247 bp, Glycine max
tcttcttcgtctcaaacctcttcgttccttcgattcattccatttcttccaaaatggccaaagacccagttcgcgttctcgtcactggagccgcaggcaaattggatatgctcttgtccctatgattgctaggggagtgatgctgggtcctgaccagcccgtgatcctccacatgcttgacattcctccagcagcagagatggagaatggggttaaaatggaattggtggatgctgcattccctctt

SEQ ID NO: 150596 - DNA, 247 bp, Glycine max
caaaacggcaggctagaaactaaaatggaagttgttaaccaaagagatgcagaacttttgttcatgtggcaaatgtatcagagatcaaaccatcagtcagaaaataagacagacatcctcaaacaaattgcggagacagtgaagcataggaaacacatagatggtagcgtggaattgattggagttttactgtatggaccaggaaaaggttcttctgttctacaatccgtgagggctcctggttcgt

SEQ ID NO: 150597 - DNA, 246 bp, Glycine max
gctttgttgacacaagtaaccgtgtctttacccagaacttgaggcccggtgagtcgtttgtgttcccaaagggcctggtccacttcttgttcaatagtgattccagggaaccagcaattgccatatccggtctcaatagtcagaacccaggtgcacaaattgcatcacttgcaacatttgctagcaagcctccaatccctgatgacattcttaagaaggctttccaaatttccaaaggagaagtgg

SEQ ID NO: 150598 - DNA, 249 bp, Glycine max
ccgaggagacacaccttcagcagcagcagccatggttctcaaaaccgaactatgccgattcagcggtgccaagatctacccagggaaaggcatcagatttgttcgtggtgattctcaggttttcctgtttgctaactcgaaatgtaagaggtatttccacaacaggttgaagccatcaaagctcacctggactgcaatgtacagaaagcaacacaagaaggacattgctcaagaagctgtgaagaaaag

SEQ ID NO: 150599 - DNA, 258 bp, Glycine max
ttagttatctaattacctcaattagtcccttaattgcaagcatcatggctgaggagaaacaccaccaccacttccaccaccacaagggcgatgatgtgcctggcgaggttgattataagaaggaggagaagcaccacaagcatcttgagcaccttggggaacttggtgctgcggctgccggtgcttatgccttgcatgagaagcatgaggccaagaaagacccagagcatgctcacaggcacaaggtagaagaggaga

SEQ ID NO: 150600 - DNA, 254 bp, Glycine max
ggagaacatcccatggaatggagtagacgagtgggcactaaaggatgaagtgaacagactcattaatgtgacccttgtggaacgagagagagaaattattcgactttattatggactggaaaaagaatgtcttacgtgggaagacataagcaaacggataggtttgtcaagagaaagagtaaggcaagttggacttgttgcattggagaaactaaaacatgctgcgaggaagagacaaatggaagccatgctat

SEQ ID NO: 150601 - DNA, 145 bp, Glycine max
tgaaaatgctgctactttgaatcacgcgattccgttgtcccaacagttgagttatttcaaggaataccaaggccagctggccaaggtagctggcagtaaaaaagcagcctcaatcatcaaggatgcgttgtatgtgctcagtgct

SEQ ID NO: 150602 - DNA, 258 bp, Glycine max
gttttctatatcactctcaactttactcctcttcaatcagttgcatattctttgctattccaatggccactgttgaggttgtgtcagccaaggttgccctcccagaggacacaaaagaggcatcattgaaggttgacgaggagaagaacacagaagaagttgttgagactccaacaccagaaactgtggtcactgagcaaaccaaggaggaaagtactgaggccccacgacctgcagcttcagaagacaagccctcgg

SEQ ID NO: 150603 - DNA, 255 bp, Glycine max
gtttgttgtaggaagaggaatcttgagaaatggcaggggacagcaagagcaagattctgttcatcggagggactggttacatcggaaaattcatcgtggaagccagcgccaaagctggccacccaactttccttttggtgagggagtcaactctctcaaacccggaaaattcacccttcaatggccatttccaaaggcttggtggcaatcctggtttagggagtctatacggtcaccaaagtttggtgagtgcta

SEQ ID NO: 150604 - DNA, 238 bp, Glycine max
cttcgttgcttggtgatgtccctttctgttctcttcactcttggtcttgcgagagaaagccatgccagagacgaagatttttggcatgctgtttggccaaacactcccattccaagttcattgcgagaccttctaaagcctggccctgcaagtgttgaaatcgatgatcaccctatgcaaattgaagaaacacagtacccgaaaaccttcttctataaagaagaccttcatccaggca

SEQ ID NO: 150605 - DNA, 247 bp, Glycine max
ctcagaccaaaattaattacatcctcgtcggcagcgaggttctccactggggcgacaccaacatgatccgcagcctcgtccctgccatgagaacccttcactcagccctcctagccgagggcataaccgacattaaggtaaccactgctcactctctggcgataatgcggtcatcgataccaccaagtatgggctgtttcaggcccgggtacgcaaagcacgtgttgaccccaatgctgaagtctct

SEQ ID NO: 150606 - DNA, 252 bp, Glycine max
tgtgaaaagacttggttgaaccggccagaccttgtgtctgaaatctggagtgttcttgaaccattcaaagcaacttgcattgacacgccaccacatttgatttctaagaagcttcgtcggattccttcccattttgtctgccccattgtccaggaagtaatggaagatccatacatagctgcagatggctttacgtacgaagaagaggcaataagaggatggttgaatagtggccacgacacttcccccatg

SEQ ID NO: 150607 - DNA, 251 bp, Glycine max
tagcaatggcagaacaaaaccaaaaccaaacaactgaagctgtaaggcaccaagaggttggtcacaagagccttctccagagtgatgctctttaccagtatattctggagacaagtgtctacccaagagaacctgaatccatgaaagaactgagagagttgacagcaaaacacccatggaacatcatgacaacctctgcagacgaagggcagttcttgaacatgctccttaagctcatcaatgccaagaac

SEQ ID NO: 150608 - DNA, 252 bp, Glycine max
gtgttttccttgtttcccctattattatctcgctctcacaaaatcatggcattctctagtgctttgattctgtggtcgttgctagcaatcaacatggccctgccaaccctcgcaaccgtctacaccgtgggagatacttcaggttgggcaattggtactgattatagcacttggactggcgacaagatcttttcagtgggtgatagtctcgcgttcaactatggagctgggcacacagtggatgaagttaaa

SEQ ID NO: 150609 - DNA, 253 bp, Glycine max
ggaatactgggacttggatttcaggagatctcagttgaaaatgctgtgcccgttatggttcaaaatggtggagcaaaaacttatcagtgagaaggtgttctctttttggcttaatggggatccgaatgcgaaaaaaggtggtgaattagtttttggtggtgttgacccaaagcacttcaaaggaaaccacacttacgttccaattactgaaaaaggttactggcagattgaaatgggagattttttcgttggt

SEQ ID NO: 150610 - DNA, 255 bp, Glycine max
cttgggctcgctaagcgagtaggagcaaggattctgcttacatcaacttcagaggtatatggggatcctcttgtgcatccccaacctgaaagttattggggcaatgttaaccctattggtagattccttcatttcattctcaacttgctaaagcgcttataataaggaactatttctgtatctttttatacatattaataaagatgtagactgaggacttaaatatatgataatatcaggagttcgtagttgcta

SEQ ID NO: 150611 - DNA, 255 bp, Glycine max
gttttctatatcactctcaactttactcctcttcaatcagttgcatattctttgctattccaatggccactgttgaggttgtgtcagccaaggttgccctcccagaggacacaaaagaggcatcattgaaggttgacgaggagaagaacacagaagaagttgttgagactccaacaccagacactgtggtcactgagcaaaccaaggaggaaagtactgaggccccacgacctgcagcttcagaagacaagccct

SEQ ID NO: 150612 - DNA, 247 bp, Glycine max
tggtggcgacaatgtcgactcctgctaggaagaggctgatgagagacttcaagaggctgcaacaagacccgcctgcagggatcagtggtgccccccaggataacaacataatgctgtggaatgctgtcatatttggtcctgatgatactccatgggatggaggcacgttcaagttgacactccaatttactgaggactatccaaataaaccaccgactgtacgatttgtgtctcgcatgtttcatcc

SEQ ID NO: 150613 - DNA, 251 bp, Glycine max
gtttggaattactgtagttccatctgttctgttagatattggaatgactatctctccagaaagtcctcggtggctctttcagcaaggaaaaatatctgaagctgaaaaagctgttaaaacactatatggaaaagaaagagtggctttggttatgcatgacttgacagcagcaagtgaaggttcttctgaacctgaagcaggatggtttgatctgtttagtagtcgatataggaaagtggtcagtgtagggg

SEQ ID NO: 150614 - DNA, 252 bp, Glycine max
  unsure (1)..(252): unsure at all n locations
ggttttctgaatcagaaatatactcggagaaagaaactgaatcgcttacgcacgcgttaacattaccactttcttacttacagcacagcactcctgctaanctttcgtcttcaatttccctttggatttcattcattagatggattcgagttcggggcatcaagaattcgattatttgtttaagttgttgatgattggagactctggggttggcaagagtagtcttcttctcagtttcacctccgatgcttt

SEQ ID NO: 150615 - DNA, 251 bp, Glycine max
gctttggcgactagatgcccccatctgaggtccctaggactgtactactgcaagaacatcacagatagagcaatgtattccttggcacacagcaaggtgaacaacaggatgtggggaactgtgaaaggaggaggaaatgatgaagatggtttaaggactttgaacattagccaatgcactgcactcaccccatctgctgttcaagctgtttgtgactcattcccttctctccacacatgctcagggaggca

SEQ ID NO: 150616 - DNA, 246 bp, Glycine max
cagcattggagctgtgggcaagtcaggaagaggtgtttgtgagctcttgggtgtggatactgctgatgttgacattatgatgggtacattcaccaaatcttttggatcctgtggaggttacattgcaggatcgaaggaccttatccaacacttgaagtacgcttgccctggtcatctttatgcaacttcaatttcaccagcagctgcacaagaaatgaatatcatccataagagttattcttggag

SEQ ID NO: 150617 - DNA, 248 bp, Glycine max
cttgtgtacaccccaaccaactattgttagatggtcatctacacctccagtgtcagatgaagttagacttcagtggaaaggcttttgtgcccttatagcaaatgcatattttatgaagggaatggcttggtgagatgccatccttgcatcttttcttttcttgatatgcttctagtattgcacccccacccccccaaaaaaaaaaagaatattatctaccagaatcgttctctaatctagcggatttg

SEQ ID NO: 150618 - DNA, 248 bp, Glycine max
tgatttgatgctaggcaagccccattcaaccaccactcctctcctcgttcacgctacccctttctgctcttcttctacatttctagttttaaaagtataaagatggcagagacattcctatttacctcagagtcggtgaacgtaggacaccctgacaagctctgcgaccaaatctccgatgctgtcctcgacgcttgcctcgagcaggacccagacagcaaagttgcctgcgaaacatgcaccaaaac

SEQ ID NO: 150619 - DNA, 249 bp, Glycine max
gctgccactgccgctgcaggcatagcttccttgttttcttcttctattaacagtgtcaaatgtcttcgttcctccaagaactgctccattatagacccccttataaccacagtgccctcaaaccgtggcatgtttgtgtcacacttggtggaacctttgtccattgggggtgccattaattcgcacaagttgtgggggcctagaatttctgctgctgttgcacaagaagaggctgttgttgtggctgat

SEQ ID NO: 150620 - DNA, 242 bp, Glycine max
cttgtcagtattggcaccgatcgttgaatccgaagaagctaattgatgttggattttcaaggcttggggctaggatgacgatgagccgcactataaaactttacaaattgcctgattcaacggttactcctggattcaggaaaatggagcttcgggatgtccctgctgttactcggctgcttaggaactacttgagccagtttgttgttgcacctgattttgatgaaaatgatgttgcacat

SEQ ID NO: 150621 - DNA, 140 bp, Glycine max
gagatgcaccatgaggctctcacagaggctcttccaggtgacaatgttggctttaatgtgaagaatgttgcagtcaaggatctcaagcgtggttttgttgcatccaactccaaggatgaccctgccaaggaagctgccaa

SEQ ID NO: 150622 - DNA, 244 bp, Glycine max
ggagttgatgatgcagctgttaaggttgttgacattgttgacacattcagacttcaggagcaacccgcattcgataagaagcagtttgttaccttcatgaagaggtttatcaagaatttgactcccaagctcgatgcagagcaacaggagttgtttaagaagcacatcgagggagcaactaaatacctgctctctaagattaaagatttccaattttttgttggtgagagcatgggtgatgatg

SEQ ID NO: 150623 - DNA, 141 bp, Glycine max
gtttctgcaagccattggatcattccctaattcgaagccttgcaaaatcgcacgaggttttgatcaccgtggaagaaggatcaataggaggatttgggtctcatgttgctcagttcatggcccttgatggccttcttgatg

SEQ ID NO: 150624 - DNA, 241 bp, Glycine max
ctcttttggtctttcctctttcgttctctctctttcactcgcgtcttcgagtttcacagcgaagtcgtaggagggtttcaaaagatggagaacatgcagagcttctggcaattgggcgatgaactccgtggacactcaaaagcatcggaggatcacaaatggttaatggttgcttcgaaattggcggaacagacaagattgaagggggagcgtgtgaacaaccttgatctttcaaagggcc

SEQ ID NO: 150625 - DNA, 158 bp, Glycine max
gaaacatatgctccattcaagagcctgcttccaatggtgaaccctgatgatgttgtgtttgggggatgggatatcagtaacttgaacctggctgatgccatggccagggccaaggtgtttgatatcgacctgcagaaacagttgaggccgtacatgga

SEQ ID NO: 150626 - DNA, 236 bp, Glycine max
ttagcagactctgctgcagtgaggtgaggggaggtttgtttgttgtttcgtttttcctttcctttccgccagaatccgttgagaatggcgttgccggtagtcgtcgatgcagagtacctcaaggaggtcgacaaggctcgccgcgatctccgcgcactcatcgctaacaggaactgcgctcctctcatgctccgattagcctggcacgatgccggaacttacgatgctaagcccaa

SEQ ID NO: 150627 - DNA, 245 bp, Glycine max
gaaagagacattctaacgactattaaaccagaattactacaatcactaaaaggtggactaactagcgaaagaaaaatagaactagaaaaattcttaaaagaaaaaggtggaacttactatatatgatgatgatgaaaaaaattaaacaatatctaatcatcttgtttttttcctgcttagtgaagtattcgttttcatcattttttgatattgatacgctccttgcttttttcacgcccgccttt

SEQ ID NO: 150628 - DNA, 156 bp, Glycine max
gggaagggattgaggatgctattgttgggaagagaaggtttcagtatgaggatgaagtgaagaagaatccgttgaattatgattcctggttcgattacataaggttggaagaaagtgtgggggataaggagagaatcagggaggtttatgagaggg

SEQ ID NO: 150629 - DNA, 244 bp, Glycine max
tcgctggccaaatgtgattgtgcagtttgaagatttccaaagcaaatgggcatttaagttattacagcggtatagaaatacctacagaatgttcaatgacgatgtgcagggaacagctggagttgcaattgctggacttctaggtgctgtacgggcgcaaggaagaccaatgattgacttcccaaagcagaagattgttgttgctggtgctggaagtgctggaattggggttcttaatgcagcg

SEQ ID NO: 150630 - DNA, 256 bp, Glycine max
ccgaatctcccagagaaacaaagaaaagaagaaaatggctgtggccaacaatgtgctttgcattttcttcattatctccttaacatgtatggttcaagctcgaatcccaggggtttactctgctggtgcatggcaaagtgcccacgccaccttctacggaggctccgatgcttccggcaccatggggggagcgtgtgggtatggaaacctgtacagccagggttatggtgtgaacacggcggcattgagcacggcg

SEQ ID NO: 150631 - DNA, 247 bp, Glycine max
tggagacaaagcagtgatgtgtcatatgctaaatttcagagctggagtattttactgccatgaagtccgtgaaacaacagcttgcatggatccattggtggctggtgatggaaccaaaactcaggcacttgctatttgccactcatatacttctggaatgaatcatcacatgcttcatcaacttatgggagttgaccctggaactaaccctgtttgccattgccttggacgcaaggccagttcatgg

SEQ ID NO: 150632 - DNA, 250 bp, Glycine max
atgggtcagccaagcaacctacctaggcaatccagttccatggggcaccctacccaccattctggccattgaattccttgctatttcctttgtggagcaccaaaggagcatggagaaggacccagagaagaagaaataccctggtggtgcttttgatcctttgggatactctaaggaccctaaaacattccatgaatacaaagtcaaagaacttaagaatggacgtcttgctatgttggcttttgtggga

SEQ ID NO: 150633 - DNA, 234 bp, Glycine max
tgctgctataccaagtggtcatgtggcacctaatattgatccagtgttgaataaccacatgaatgagatgtctgcataccatgcaaccatgatgtctagcactcttggaacctcaactgttgtcttcactagaacgggtttcattgctgtccttctgagccattatcgtccttcgggcaccatatttgcttttacagatgagaagagggtacaacagaggctggctttgtatca

SEQ ID NO: 150634 - DNA, 250 bp, Glycine max
caacaaatcagaaagatttatgaggaaatttaccaagaggacctcatcaaacgcctagagtctgagctctctggtgactttgagagagctgtgtaccgttggatgctggaacctgcagatcgtgatgctgttttggccaatgttgccatcaagaatggcagcaaaggttaccacgtgattgtggaaattgcttgtgtgccttcagctgaagaggtcttgcgcgtgaagcgtgcctagcacaaccgttaca

SEQ ID NO: 150635 - DNA, 252 bp, Glycine max
gttctcttgagcgggatgaagtatttgtgccaaagcagaagtcctgtatcaagtggtactctaaataccttaacaatcctccaggcagagtcctcactcttgctgtcaccctcacacttggttggcccttgtacttggctttaaatgtttctggaaggccttatgatagatttgcttgccactatgacccatatggtcccatttactctgatcgtgaacgacttcaaatatatatatcagatgcaggagtac

SEQ ID NO: 150636 - DNA, 253 bp, Glycine max
caaggttctggtgatgctaggaaccaagcacagttatatcaagactcgtccatattatatcattttagagacatgcagagaagacaggttgagtttataaaaaaaagagttcttctcttggaaaaagggctcaatgctgagtaccagaaagaatactttggtgatccaaaagcaaatgaagtaacaaatgaagaacttaaaagtgaaaccaaggctactaattttccaggtgataaattaggggacactgaca

SEQ ID NO: 150637 - DNA, 248 bp, Glycine max
tcatggtcttccaagtttgaggagacatggctgagccaaacattgctagcagatggtctttacaggggatgacagctctcgtcactggtggatccaaaggaatcggatatgctatcgtggaggagttggcacagcttggagccactgtgcacacttgcgctcggaacgaagctgaactcaacgaatccttaaatgaaccgaacacaaaaggatacagagtaactggttccgtctgtgacgtggcgtct

SEQ ID NO: 150638 - DNA, 253 bp, Glycine max
cagcttccaaggcttcgttgattccggcagccgctacctctccgcctcctggggcgggatccagtgggagaagcaggtccgcacctccgcccagatccaccgtcaaggcggcatgtccgtcctcgtcaccggcgctgccggcttcgtcggctcccacgtctccctctcgttaaaacgacgcggagacggcgtcgtcggactcgacaacttcaacgactactacgatccgtctctgaaaaaagcccgcaagtcc

SEQ ID NO: 150639 - DNA, 251 bp, Glycine max
gttagcaagacgagaaaagcttccagatcctgttgagagagagaaaggtgttagtctttggtcaatgatcaaggacaatgtgggaaaagatctaacgagagtttgtctcccggtatactttaatgagccgagatcatccctacatgaatgttgtgaggacttggagtactcttatcttctggatcaagcttatgagtacgggaaatcaggaaacggtctccttcgggcactgtatgttgctgcctgtgcag

SEQ ID NO: 150640 - DNA, 255 bp, Glycine max
aacgaggataagcagaaggagcaaaagcaatggcgccgaagaagccgagaaccacgacaaggaaccctgatttggttagggggattggcaagtattcgaggtcgcagatgtaccacaagaggggcatctgggccatcaaggccaaaaacggtggcgttttgccccgccacgatcccaagcccaagcccgaggccccggcccagaagccgcccaagttctaccccgcggacgatgttaagaagcccctcgtcaaca

SEQ ID NO: 150641 - DNA, 256 bp, Glycine max
cccaatttccaaaaacacaaacaagtggcctcattctgaactctgaaactcaaccttctttcttctcttctctctcgtgtttaactgttcagggcatcctagtttctctcagttagccaaaatggtagctgcaaatgagagggtcgtcgctgtgatcatggttggaggacccactaaaggtactagattccgaccattgtcattcaacgtacccaagccactttttccattagcaggacaacccatggttcatcat

SEQ ID NO: 150642 - DNA, 254 bp, Glycine max
tagaattcaacgtttgcaaattgcatattgttcttctcttcctctcttcctctgcatccatgtcgtcgataacgggcatccaggggcaacctcttgaggttacggtggtttcgtgctccaagttgaaggacacagaatggatttcaagacaagatccgtacgtttgtgttgagtatggcagcacaaagttccgaaccagaacctgcacagacggcggaaaaaacccggtattccaagagaagttcatctttccc

SEQ ID NO: 150643 - DNA, 249 bp, Glycine max
  unsure (1)..(249): unsure at all n locations
ctgatagcccttatgctgggggtgtttttctagttactattcattttcctccggattatccattcaagccacccaaggttgcatttaggactaaagttttccacccaaatatcaacagcaatggtagtatttgtcttgatatcttaaaggagcagtggagccccgccttgacaatatctaaggttttgctctccatttgctccctattgacggatccaaacccgnatgatcccttggtgcctgaaattg

SEQ ID NO: 150644 - DNA, 248 bp, Glycine max
ccagaggagaaatatgccaatgcttttcttggatttggccctgaacaatcccattttgttgtggaattaacatacaattatggggtgacctcatatgatattggaactggatttggacattttgctatcgcaactccagatgtttacaaattggttgaagacatccgggctaagggtggaaatgtcaccagggagcctggtccagttaagggtgggaaatctgttattgccttcgtgaaggatcctga

SEQ ID NO: 150645 - DNA, 257 bp, Glycine max
tcggcagagcaagaagttgatacaatcaaggatattgtattcacatatgatgttgccttcacgggaagtgatatcagatgggcatcacggtgggacacatatcttttaatgaatgatgatcagatccactggttctccatcattaactctctgatgattgttcttgtcctgtctggaatggtggcaatgatcatgatgagaactcttttcatagacattgccaatgataatcagctagaaacccaagatgaggccca

SEQ ID NO: 150646 - DNA, 248 bp, Glycine max
cgagaagcaaggatcaaagcttcacaagaaggaaacttgtgagcctattacaattattgagacccctccaatagttattgttggtgttgtgggttatgtgaaaactccacgtggtctccgaacattgaacactgtctgggctcagcatttgagtgaggaattgaaacgtaggttctacaagaactggtgcaagtccaagaagaaggccttcaccaagtactctaagcagtatgaaactgaggagggaa

SEQ ID NO: 150647 - DNA, 249 bp, Glycine max
gaagaagaaacttaatcgatcatcacttcacttcactaatacatcatggcagacgattcccagaacaagtatgagagctctgaggttgaggtccaggatcgtggtgtttttgactttctcggtaagaaaaaggatgaagaagacaagcctcatcctcaggaggaggtcatcgccaccgagtttcaaaaagtcactgtctcagaccaaggagagaacaagcacagcctcttagaaaagcttcaccgatct

SEQ ID NO: 150648 - DNA, 250 bp, Glycine max
tcgcgagcggcgccctttatagtagttttatccttgcagagtcttaggtgttttgtttaagttatatttttaagtttctgccgatttcatgtagccgtaactttcaaaactaggttcttgatcggcggtggtcaattttcattgctgtttgtttttgatgagtactgttttttgttttgatggtaagaagagtctgagatatttcgaatttcacaagcagctatagggttttagtccatttcctttgctg

SEQ ID NO: 150649 - DNA, 252 bp, Glycine max
gtgaatttctgcatagagcagctgatcttacattggtgccatcagctgccattgcaaaagatcttgaagaagctcgagtaacagcagcgaacaagatttgtctttggaacatgggtgtcgattctgaaagtttccatccacgattcaagtcccatgaaatgcgattaaggctgagcaatggtgaacctgagaagcccttgatagttcatgttggacggcttggagttgagaagagttagattttctcaaaag

SEQ ID NO: 150650 - DNA, 251 bp, Glycine max
cacaaccaagatgtgaactctctggggctgatttcatcaaggaagactcatgaggctattgagatcctcaagctcatgtcctccactttcctggtcgccctttgccaagccattgacttgaggcatttggaggagaatttgaagaacacggtcaagaacgttgtgagtcaagttgctaagaggactctcaccacaggtgtcaatggagagcttcacccttcaaggttttgtgagaaggacttgctcaaggt

SEQ ID NO: 150651 - DNA, 249 bp, Glycine max
tctatccggaattcgttgttagctttaaagtctcgtctgacgctgcaggacatttttatggcagtgaagtctcagaatgttcagcgggcaaatacccattgttacctgccgctgggcccgaaacacacgcactcgccaactgcaactcatggacaactgcaatgaatcatcacatgcttcatcaacttacgggaatcccctcggataccatccccggtgcccattgccgttatcgcagagccggttcca

SEQ ID NO: 150652 - DNA, 247 bp, Glycine max
gcctttctctctcttctttttactctctctctgtctctctctacgctttctcgttcgagatccctcaagggatccactaactgaaggagaaatggggttgacattcaccaagcttttcagccggcttttcgccaagaaggaaatgcgaattctgatggtgggtctcgatgcagctggtaagaccaccatcctgtacaagctcaaacttggagagatcgttaccacaattcccaccattgggttcaat

SEQ ID NO: 150653 - DNA, 251 bp, Glycine max
tcttaatttctctctgccttgctcatttacacacctctccaacctttcactttcagctttatttgaatccctctctctcctttccaaatggccagcgttgaggttgcacatcaaacaccatcaacagttccagaaaatgaaacaaccgaggtaatcaagacccaggaaacaaccccggaaccagtaccagccactgaggctcctgcaacagaacaagcagcagctgaggttcctgctcaagaagaacaaca

SEQ ID NO: 150654 - DNA, 243 bp, Glycine max
ggactctctagctagcacctctctctattctctccctaagtgactcctacttcataatcagagggcatgcctgaatgtccagagaaagggagagatttgatgagatagggaagaagatcaagagggaaggagatgtttcatctcaaatgggaagaagacacatgttaggccctccaggaaccctaaatactatcaccccttgtgcggcatgtaagttgttgagaagaagatgtgcccaagaat

SEQ ID NO: 150655 - DNA, 248 bp, Glycine max
ctgtgtttttctctcgtcgtcctcctcctattttgtttctcatgcctttcatttgtaattttttacatgatcaactaaaaaatgtactctctgttttccgaccattgtgtctcttaatatcagtatcaaaaagaatgttccaagttaaaaaaaaaaaaaaaaaaaaaaaaaaaaaaaaaaaaaaaaaaacaaaaagaaaaaaaatgaatttaagcacctaattgggctgtaaagtgaattggtttcag

SEQ ID NO: 150656 - DNA, 254 bp, Glycine max
caaatcatattaagccatggccacctccaacttctcaattgttctctctctctccctagccttctttctagtgctactcaccaaggcaaactcaaccaacaccgtttctttcaccgtcagcaagttttccccacgccaacaaaaccttatcttccaaggagatgctgctatctcaccctccggggtgttacgactcaccaaggttgacagcaacgacgtgccaacgacgggatccctaggacgtgccctttatg

SEQ ID NO: 150657 - DNA, 235 bp, Glycine max
aatgcttataaacaccctaatattattgcagaatttatagctggacaattaaagaatagagtttcgtttcgtaaagcaatgaaaaaagctattgaattaactgaacaggcgggtacaaaaggagttcaagtacaaattgcaggacgtatcgacggaaaagaaattgcacgtgttgaatggatcagagaaggtagagttccacacaacatacgagatagcgaaagggggatgtgct

SEQ ID NO: 150658 - DNA, 254 bp, Glycine max
cggctcgagcggctcgagcaaccctctctctatattccattgccacccagttttgaatatatttttattccttctttgtttcttcactttcttccatacacataaccatgtcttctcagactgttgtcctcaaagttggtatgtcatgtcaagggtgtgctggagcagtgaacagggttttgggaaaaatggaaggtgttgagtcatttgacattgatctgaaggagcagaaggtgacagtgaaaggaaatgtg

SEQ ID NO: 150659 - DNA, 214 bp, Glycine max
tgtgcacgctcttgttgttgaggagttgcaacctgctgagtacctgcacttcaaggaagaacttgttgacggaagttctaatggcaactttgtgcttgagttggactttgaaccattcaatgcagccttcccccgcccaactcttaacaagtcaattggaaatggtgtgcaattcctcaaccgtcacctttctgccaaactcttccacacaaca

SEQ ID NO: 150660 - DNA, 158 bp, Glycine max
cttcttctcttgcggctaggggggtagcgcagttcggtctagatttgaggatgatgggtaaggataaggttcacatcagtattgtagtcattgtcctggtcgactctgggatagccactaccactaggtgaactgatttacaagctaggttggattga

SEQ ID NO: 150661 - DNA, 247 bp, Glycine max
aaaccctaatccctatttttcttcctcagtagtgtcatttacgcttctcttctctgcagcaactatgcctaaccctaaggtcttcttcgacatgaccatcggcggtcaatctgctggccgcatcgtgatggagctctacgccgacgtcactccccgcaccgccgagaacttccgcgcgctttgcaccggcgagaagggcgtagggcggagcggcaagcccctccactacaagggctcgtccttccac

SEQ ID NO: 150662 - DNA, 245 bp, Glycine max
  unsure (1)..(245): unsure at all n locations
cttcttcgtctcaaacctcttcgttccttcgattcattccatttcttccaaaatggccaaagacccagttcgcgttctcgtcactggagccgcagggcaaattggatatgctcttgtccctatgattgctaggggagtgatgctgggtcctgaccagcccgtgatcctccacatgcttgacattcctccagcagcagaattcctgantngggttaaaatggaattggtggatgctgcattccctc

SEQ ID NO: 150663 - DNA, 247 bp, Glycine max
ttccattctctctgtgtatttccctacctctcccttcaagatgcagatcttcgtcaagaccctcaccggcaagaccatcacccttgaggtggaaagctctgacaccatcgacaacgtcaaggccaagatccaggacaaggaaggaatccccccggaccagcaacgtctcattttcgccggaaagcaacttgaggacggccgtacccttgctgactacaacattcagaaggagagtactcttcacctc

SEQ ID NO: 150664 - DNA, 247 bp, Glycine max
gccaagcatcactggcctcgcgggtttagatgcaacggacacattatgctcaattctgagaaaatgtccaagtccactggaaatttcaggacgttgcgtcaggcaattgaggagttttcagctgatgctactcggttctctttggctgatgctggtgatggtgttgatgatgcaaattttgtctttgagactgcaaatgctgcaattctccggctcaccaaagagattgcatggtatgaagataatc

SEQ ID NO: 150665 - DNA, 241 bp, Glycine max
ggagaatcaatcagcggattgtaaaattgattgtggaacttatgaggaatcatgagactgcagaatcattggtaattgtggcaagttcatcagatttactactgcgagccacagatgggatgctggttgatggagaagcttgcactttaccacagctggagctattggaagcaacagctagagcagttcagccagtgctcgagtttggagaatctggattggctgtggcagatggcctttt

SEQ ID NO: 150666 - DNA, 248 bp, Glycine max
ctcgagccgatttgttcttagattccattttccaatgttgtatatattgaacattcggacttccggatgcaagattcaaaagattattatggccttgctcctgggaaatctgtgatactcagatatgcatttcctataaagtgcactgaagttattctagctgatgataatgagactattcttgaaattcgagccgagtatgatccttcaaagaagaccaagcctaagggggttctccattgggttgc

SEQ ID NO: 150667 - DNA, 243 bp, Glycine max
tggagacaaagcagtgatgtgtcataggctaaatttcagaactgcagtattttactgccatgaagtccgtgaaacaacagctttcatggttccattggtggctggtgatggaaccaaaactcaggcacttgctatttgccactcatatacttctggaatgaatcatcaaatgcttcatcaacttatgggagttgatcctggaactaaccctgtttgccatttccttggaagcaaggccatttt

SEQ ID NO: 150668 - DNA, 246 bp, Glycine max
acggactgaagctactataccaggtggtcaaatgccacctaatattggtccagtgttgaagaaccacatgagtgagatgtttgcataccatgcaaccatgatgtctaacactcttggaacctcaactgttgtcttcactagaacgggtttcatggctgtccttctgagccattatcgtccttcgggcaccatatttgcttttacagatgagaagagggtacaacagaggctggctttgtatcaagg

SEQ ID NO: 150669 - DNA, 246 bp, Glycine max
ctagaactagaactagggtttcatctttgccatcagaaacaacaatgatttacgacgttaactctccccttttccgatccttcctcagccagaagggaggctcctccgataagaggaaaacggatgaacagaagccaaaagagcagaaacccaaagccagcgagaacaaacctataatgacagagtgacaacaaatttgctgcattcagttgtagaatgataataggtggtagatattgcatttgg

SEQ ID NO: 150670 - DNA, 248 bp, Glycine max
gttgtgtttgggggatgggatatcagtaacttgaacctggcagatgccatggccagggccaaggtgtttgatatcgacctgcagaaacagttgaggccttacatggaatctatggttccactccccggaatctatgaccccgatttcattgctgccaaccaaggagaccgtgccaacaacgtgatcaagggcacaaagaaagaacaagttcaacaaatcatcaaagacattaaggagtttaaggaaag

SEQ ID NO: 150671 - DNA, 245 bp, Glycine max
gaatagctctgctcagtgttgctgttggacttccaaatgtgggaggacatttcgagacttggaacacaggaatccttggtccagttgtactccgtggacttaaccaaggaaagttggacttatcttggcagaaatggacttatcaggttgggctgaaaggtgaggccatgaatcttgcatctccaaatggtatctcttctgtagagtggatgcagtctgcattagtttcagagaaaaatcaacca

SEQ ID NO: 150672 - DNA, 247 bp, Glycine max
aatttgtccaaggaggaattcgtacatatactgcgtcgccaaagtactggtttctcaagaggaagttctaaataccgaggagtaacactccacaagtgtggccggtgggaagctcgaatgggacaattccttggcaaaaagtgaggacatatttttatatatcaacttaagtagtgatctactgtggttatatgagatattatgaatttaagcacctattgggctgtaaagtgaattggtttcagct

SEQ ID NO: 150673 - DNA, 250 bp, Glycine max
caaaaacaaagaaaaaaaaaaacccttagccaacacaaccatcatggccacctctgctattcagcaatcagcattcactggtcaaactgctctgaagcagctcaatgagttcgtccgcaagaccggtggcgccggcaaaggtcgcactaacatgcgccgcaccgtcaagagtgctcctcagagcatttggtatggccctgaccgtcccaagtacttgggtccattctcggagcagattccatcatacctg

SEQ ID NO: 150674 - DNA, 250 bp, Glycine max
cacacttaactaccaactacctaagaaactaacaaaaatcttagtggttgtgataacatggctcttacacttcaacgtgcattatctgaactactcaccctaatagctattctctcaatattcctagtgatcccttccttttgtttcaaccccaaaaagctttataatgcttcatattattctccatctagttcagattggtcacctgcagtggccacttggtatggacctgccaatggagatggaagtg

SEQ ID NO: 150675 - DNA, 219 bp, Glycine max
tgaatctcagaattctctaaaagagatctttttctgctctttgaagaaagaagggtctttgcttgattttggagatgtctctgctctcagatctcatcaaccttaacctctccgataccaccgagaaggtgatcgcagagtacatatggatcggtggatcaggaatggacctaaggcgcaaagccaggactctcccaagaccagttagcgatccttcag

SEQ ID NO: 150676 - DNA, 249 bp, Glycine max
gggtggcactttgatttcttacgaaggaagggttcagctcctggaaattgcacaagtccccgatgaacatgtcaatgagttcaagtcaatagagaagttcaaaattttcaacacaaataatttgtgggtgaacttaaacgcagttaaaaggcttgttgaagctgatgctcttaagatggaaattattcccaatccaaaggaagttgacggaataaaagttcttcagctggaaactgcagctggtgctgc

SEQ ID NO: 150677 - DNA, 243 bp, Glycine max
gttcacaatcttgctcgatttatttcagtcatgcagtttcatcctttatcttggcgaacttcccactcttatgttatggtagatcgttttgaagacatcactcctcctgaaaaagtgcacgcaaataataaatgtgacagaaaagtcactctttatggttatcttagaggctgtaatttgaaaatgggcaataaggtgcacatagcaggagtgggtgattatcatgtagctggtattactgct

SEQ ID NO: 150678 - DNA, 247 bp, Glycine max
ctcgagccgctcgagccgtccggtgaccctctccaccctcagggcgccaccacccacgtccacaaagacgccggcagcaaccccacgtggaactaccccgtgaaattctctgtcaacgaatcgctggcgaaggaaaatcgtttatctcttgagatcaagctcatctccgaccgcaccctcggcgacaccgtcatcggcaccgtccatgttcctctcagggaactcctggataaccccggcgatgaca

SEQ ID NO: 150679 - DNA, 250 bp, Glycine max
cacctcttccccacatcctcacctttcactaccccacaagtctttcacttgtagaagccaggctgagccatcttctgattcagccaaagtccaagaactgagtgtgtatgagatcaatgagagagatcgtggaagccctgcttatcttagattgagccagaaaactgtcaattcccttggtgatctagtccccttcagcaacaagttgtattctggatgtttgcaaaagagggtggggataacagctgga

SEQ ID NO: 150680 - DNA, 252 bp, Glycine max
caatgtgcctgccatgtatgtggccatccaagctgtcctctccctatatgcaagtggtcgcacaactggtattgttttggactctggcgatggtgttagtcacactgtgccaatctatgagggctatgcactccctcatgccattcttcgtttggatcttgctggccgtgatctgactgactctttgatgaagatcctcactgagagagggtacatgttcaccacctctgccgagcgggaaattgttcgtga

SEQ ID NO: 150681 - DNA, 255 bp, Glycine max
ccaacatctgcgacggaatcctcaagctcctcgacacgcgcctcgtcccctccgccgcctccggcgactccaaggtcttctacctcaagatgaagggagactaccacaggtacctcgctgagttcaagaccggcgccgaccgcaaggaagccgccgagagcacgctctccgcctacaaagccgctcaggacattgctaacaccgagctgcctccaactcaccctatcaggctgggtcttgctctgaatttctctg

SEQ ID NO: 150682 - DNA, 251 bp, Glycine max
gatgctatgaaaatccaaagaataagattactgcagtccctgctgaggaagaggaaatctggggtgcatttttcaaggtggaaggatcaactgttcttgcagccacagagtagaagattcattttcaaatagagtaccgtgtgatgcattaatggcgtaatgcatttatgtgcttgtgacggtaaggcatgcatgaggggtcatgtaaataatgttaatgatgactatgacaagagtgcgactggtggaag

SEQ ID NO: 150683 - DNA, 254 bp, Glycine max
aaacaaaatacggtacgttgaatggtggtgccaactttgttgcccctggttacaccaagggtgatggtcttggtgctgagattgttggcactttcgtccttgtttacaccgttttctccgccaccgatgccaaacgtaacgccagagactctcacgtccccattttggcacctttgcctcttgggttcgcggtgttcttggttcacttggcaaccatccctatcaccggcactggtatcaaccctgctcgtagt

SEQ ID NO: 150684 - DNA, 253 bp, Glycine max
gccattgagttgctctcaggaaaggaaggaatcatatctcaaatggttgagaccaaaccagacaagctctacagcttgaccttctcattgggtcatgctgatgacaagtgcaaggagcctcttgctgttatggcctttgctggtgaccaggctcagaacattcactacactcccaattccaattccaccttccaaactgctaacgtcaatttcactgccaaggctgagaggactagaattgcattctatagca

SEQ ID NO: 150685 - DNA, 242 bp, Glycine max
aagaggtaccacaagatgaaggacagaatcgtcggtgtctccgaagagaccaccaccggtgtcaagaggctctaccagatgcaggccaatggctccctcttgttccctgccatcaacgtcaatgactcggtcaccaagagcacgtttgataacttgtatggataccgtcactcgcttcccgatggactgatgagagccactgatctgatgattgccggaacggtagctgttgtgtgtggcta

SEQ ID NO: 150686 - DNA, 249 bp, Glycine max
atgagttgccaagtactttcaaggcctaccgctaccaacagcaccgttggtcttgtggtccagccaatctttttaggaaaatggtcatggagatcataaataacaagaaagtgtcattgtggaagaagatacatgtgatttacagcttcttctttgttcggaaggtcgtagcacacataaacacgtttgtgttttattgcattgtattacctgcaacagttttggtgcctgaggttgtggtcccaaagt

SEQ ID NO: 150687 - DNA, 251 bp, Glycine max
ggggggctgtattagagggacacattgacctattaagttctgatcattcaccaactgttcctgaactcaagcttatggaggaaggtgacttcttaaaggcttgggggggcatatcttctttgcagtttaatcttccagtgacgtggtcatatggtaagaaatatggactaactctggaacaattgtcgttattgtggagcaagaaacctgcaacattggcggggttagaatcaaagggggccattgcagtt

SEQ ID NO: 150688 - DNA, 253 bp, Glycine max
cctcgagcgaatcggctcgactgtttcgttccactccctaatcgctgctacagttacagcataacttctattctataagtctttctactcgcaagcaaatcagaagaagagaatggcagcagcagaggggctaaacagagcgcagtacgtgtacttggcgacctgtcggagcaggcggagcggtacgaggagctggtggagttcatgcagaaggtggtggtcgggtcgacgccggcgtcggagctcacggtgg

SEQ ID NO: 150689 - DNA, 249 bp, Glycine max
gtcaccacctctgaactctctctctcatctataagtcaacatggctcatcatgaagattcaagtgcatggaattcgagtaaacctcaccctaagctcaatgaaagaattctgtcttctctgtcacggagaactgttgctgctcacccctggcacgacttagagattgggccaggagctccagcagttttcaactgtgtggttgaaattggcaaaggaataacgtaagtatgagctggcagacaagtgga

SEQ ID NO: 150690 - DNA, 252 bp, Glycine max
gcgactacggctgggacactgctgggctttccgcagacccagaaaccttcgccaagaaccgtgaactcgaagtgatccactccaggtgggccatgctcggagccttgggctgcgtcttcccggagttgctgtcccgcaacggggtgaagttcggagaagccgtgtggttcaaggccgggtcccagatcttcagcgagggtgggctcgactacttgggcaacccaagcctgatccacgcccagagcatcctcg

SEQ ID NO: 150691 - DNA, 248 bp, Glycine max
cttcaatcgtacgtgaggtgctctcaaatgtctcccagtctgatccccgcatacttgcaagtctcatcaggctccattttcacgactgttttgttcaggggtgtgacgcatcaattctgctgaacgacacggacacgatcgtgagcgagcaaagtgcagtgccaaacaacaactcaataagaggtttggatgttgtgaaccagatcaagactgcagtggaaaatgcttgtcccggcatagtttcttgt

SEQ ID NO: 150692 - DNA, 249 bp, Glycine max
cacacactctcatagctgtagcggcgacactaagatcggagaaagaatggcgaaaacgacgtcgttgctgctctttacactgctcctcttcggaaccctagctctcatccaggcgaagaaatcgaaggaggatttgacggaggtgacccacaaggtttactttgatgttgagattaatggagaagaagcaggtcgtattgtaatgggtctttatgggaaggctgttccaaaaactgcagacaacttccg

SEQ ID NO: 150693 - DNA, 248 bp, Glycine max
cagaaaatcctcaattttctgagcagccaaacactctctctctgtctctcgaaaattctcagtttgcagagaaaatctgaatcatgtcgtggcaagcgtatgtcgacgatcaccttctgtgtgacatcgaaggtaaccacctcactcacgctgctatcatcggccaagacggcagcgtttgggctcagagtaccgacttccctcagttcaaacctgaggagataactgccatcatgaatgactttaat

SEQ ID NO: 150694 - DNA, 251 bp, Glycine max
cgctgttgttgctgctcatcctccgtaacctccgagctctgcaccgaagaacgaagccatggggaagacacatggaatgggatctgctcgcaagctcaagtcccaccgcaggaggcaaaggtgggctgacaagtcatacaagaaatcacatcttggaaatgaatggaagaaaccttttgctggttcatcccatgccaagggaattgtccttgaaaagataggtattgaggctaagcagcccaactctgcca

SEQ ID NO: 150695 - DNA, 254 bp, Glycine max
ctcacctggcatgggaactgttccatgggttgtgaactcagagatctatcccttgaggtacagaggggtttgtggaggaatagcatccacaactgtttggatttccaacctcattgtttctgagtccttcttgtccctcacaaaagctctagggacagcatggacattcatgatgtttggacttgtggccattgtggcaatcttctttgtcattatttttgtgcctgagaccaaaggggttcctatggaggaag

SEQ ID NO: 150696 - DNA, 248 bp, Glycine max
ctaacactcattaattgcaagaatggcacttcgttgcttggtgatgtccctttctgttctcttcactcttggtcttgcgagagaaagccatgccagagacgaagatttttggcatgctgtttggccaaacactcccattccaagttcattgcgagatcttctaaagcctggccctgcaagtgttgatatcgatgatcaccctatgcaaattgaagaaacacagtacccgaaaaccttcttctataaag

SEQ ID NO: 150697 - DNA, 247 bp, Glycine max
gtgaatttctgcatagagcagctgatcttacattggtgccatcagctgccattgcaaaagatcttgaagaagctcgagtaacagcagcgaacaagatttgtctttggaacaagggtgtcgattctgaaagtttccatccacgattcaagtcccatgaaatgcgattcaggctgagcaatggtgaacctgagaagcccttgatagttcatgttggacggcttggagttgagaagagtttagattttct

SEQ ID NO: 150698 - DNA, 249 bp, Glycine max
gagcgccaaacaggccttgcaggaggctgtgattttgcctgtaaagttccctcagttctttactgggaaaagacgaccctggagagctttcttgttgtatggacctcctggaacgggaaaatcatatttagccaaggcagttgcaacggaagccgagtccacgtttttcagtgtttcttcatcagaccttgtttcaaagtggatgggtgaaagtgaaaagctggtttcaaaccttttcgaaatggctcg

SEQ ID NO: 150699 - DNA, 250 bp, Glycine max
accaagagaggcatctcggatcttaagtctggaaagatagtgactcctttacctccaaaggccacatttcttgatgatccattacgagttcttcgagcaattagatttggtgctagatttgaatgtactctagatgaagatctgaaagtagctgctgcatgtgatgatgtgaaagatgctactagctgctaaaattagcagagagcgcattggaactgagattgatctgatgatatccggaaatcaacct

SEQ ID NO: 150700 - DNA, 243 bp, Glycine max
gcactggacatgggcataattcagaaggctgactatgaacgcatcaagaaagtgatggttccagcctgcgaaatggcaataaaactatgtggcactgatggaaaaatcgcatgcacggcatcatattgtgtttgtaatacaatattcaattccatcatgtcacatgctggggatatcaatgattatggacatcagaaagatgtgtgtagggagccattgctcatgatttttcgaacttggaga

SEQ ID NO: 150701 - DNA, 247 bp, Glycine max
cgcaacacaaagaaagaatcccaggcgaggagaaagatggaggggaaggagcaggatgtgtcgttgggagcgaacaagttccccgagagacagccgattgggacggcggcgcagagccaagacgacggcaaggactaccaggagccggcgccggcgccgctggttgacccgacggagtttacgtcatggtcgttttacagagcagggatagcagagtttgtggccacttttctgtttctctacatca

SEQ ID NO: 150702 - DNA, 254 bp, Glycine max
gttcaaaggtaaggtaggttaacactcttcttcatcgtcgtcgcaatgggacgtgtgatccgtgcgcacgtaagggagcaggctcggtcttcaagtcccacacgcaccaccgcaagggccctgcacgcttccggagcctggacttcggggagcgcaacggctacctcaagggcgtggtcaccgacgtcatccatgaccctggccgcggcgcgccgctcgccaaggtcgccttccgccaccctttcagatacaag

SEQ ID NO: 150703 - DNA, 267 bp, Glycine max
tcggctcgaggggttccaaagtcaggaccctggttttgctctctttgttttgcttagctctatttgtgtccttgcaccaagcaagggcagcaaagtcacataataatgataataatcataatgtggctcgcttgaaggggagaaaggagttgaatagatgtaatttgttcattggaagttgggttattgaccctccttccacatcctctctatgaatcttcaagctgcccctttatagatgctgagtttgattgccaaaagtatggg

SEQ ID NO: 150704 - DNA, 247 bp, Glycine max
gtttccgagggggttgagactgcatttactggtttgaaaaagaagaagaagaagcctgttgaaatgggtaacttgaatgatgagagtggagatgcaattgaagatttggatgatcaccctgaagatgatgaaggagaaatggttgttccccaggctcgttatccttgggaagggagtgatcgtaattatgaatatgaggagctgcttggcagggtgtttaacattctacgtgaaaataatcctgaac

SEQ ID NO: 150705 - DNA, 246 bp, Glycine max
ttttgtgtacatgtgtggactaaaaggaatggaaaagggaattgatgacattatggtgtcattggctgccaaagatggcattgattggactgagtacaagaggcaattgaagaaagcagagcaatggaatgtcgaagtctattaatttctgttcacttgcacaaatatcatctcctactttatgctgcagcaagtctatcaaccctcctgcgttgtgtagatatatgacgaccctgtaatttttct

SEQ ID NO: 150706 - DNA, 246 bp, Glycine max
cggctcgagcggctcgagcggctcgagcggctcgagatttgttccccccacagcctatacttatggagcatacgatcaagctctcgggagacaatcctgctggtactgcttgttatgatgtgatggttgatgttccttttcctattcagagggagttgtctgccttattggctaacgtggaaaagaacaaagagattgagacatgtgatgaagcaatatgtggaatcattagaaaaatccatgagc

SEQ ID NO: 150707 - DNA, 243 bp, Glycine max
ggaggaggaaggcctcggggacggtgacccttgcggtggcatagaggaacgctgcgacgtcataattctcggggcagtccagcatgaccttgcggaagaaggaggccttgccgtagcggctggcgccgcagtagagcgagttcttgtcgttgttgaaggcgtcgtaggtggcttggatgaggtccccgcaccggaggatcagggagcggagagaggggtggagagggtctagtaggcccgccc

SEQ ID NO: 150708 - DNA, 246 bp, Glycine max
gtctactcgtttggggtggtgctcttggaggtattgtctgggaggcagcccttgatccgcactgcagagaagcaaaagatgtcactggttgattgggcaaagcatcgctacgcaaagggatctctgggtgagattgtggatcctgcactgaagggccagatagcaactgagtgtatacacaaatttggtgaggttgcgctgagttgtttgcttgaggatgggactcaaaggccctccatgaaggac

SEQ ID NO: 150709 - DNA, 249 bp, Glycine max
gatggttgaaagagttgagagatcacacagaccccaacattgtggtcatgcttattggaaataagtcggatcttcgacaccttgttgctgtcccaacagaagatggaaaatcttgtgcggagaaggaatctctctacttcatggaaacttctgcattagaagcaaccaatgttgaaaatgcatttacagaggttctttctcagatataccgaatagtgagcaagagaactgttgaggccggcaagaatg

SEQ ID NO: 150710 - DNA, 250 bp, Glycine max
aaacaaagaaaaaaaaaaacccttagccaacacaaccatcatggccacctctgctattcagcaatcagcattcactggtcaaactgctctgaagcagctcaatgagttcgtccgcaagaccggtggcgccggcaaaggtcgcactaacatgcgccgcaccgtcaagagtgctcctcagagcatttggtatggccctgaccgtcccaagtacttgggtccattctcggagcagattccatcatacctgacc

SEQ ID NO: 150711 - DNA, 246 bp, Glycine max
agaatctgtctggttgatttgtgtgaaggaggcgagaccttcaagttggaatgcagctgcaaaggtgaacttgctctggctcaccaagaatgtgctattaaatggtttagtataaagggtaacaagacctgcgatgtgtgcaaagaggaagttcgaaacttacctgtcactctattacggatccaaagtattcgaacatctgaataatggtggtaataggactcagctggaagatgtaaatggata

SEQ ID NO: 150712 - DNA, 246 bp, Glycine max
ctcagaggagagcccctcaagcttgtggacggtggccagtcccagagaacctttgtttacattaaagatgctattgaagctgtcttgctgatgattgaaaaccctgccagggccaatggccacatatttaatttgggtaacccaaacaatgaggttactgttaggcagcttgctgaaataatgattaaggtttattcaaaggtaagtggcgaacaaactcctgaaacacctaccgttgatgtgagc

SEQ ID NO: 150713 - DNA, 230 bp, Glycine max
gttgatcttaagtgcaagctggttgattttggtaatgcttgttggacctataaacaattcacaaatgatattcagacaaggcagtataggtgtcctgaggttcttcttggatctaaatactcaactccagcagatctgtggtcctttgcttgcatttgctttgagcttgcctctggcgatgttctttttgatcctcatagtggtgacaactatgatagggatgagatcat

SEQ ID NO: 150714 - DNA, 247 bp, Glycine max
cttgaaccccactagaatggccactttagacgaacgcccttctgcgaaaaggtggcttcctctcgaagctaaccctgacgtcatgaaccagttcctttggggtcttggccttccagtggatgaggcagagtgcggtgctgtgtttggcttagatgaagcgactctggaaatggttcccaagccagttctcgccgtgctttttctttatccaattaccgcgaagtctgaagaagaaaggttgcaacag

SEQ ID NO: 150715 - DNA, 249 bp, Glycine max
gatgccttcaatagatttgtggatgacatcaatagtttagctacttatcactggtgggaagggtctatttacagtatcctttgcatcattgcatatcccctagcttggtcatggcttcaaatgtgtcggagaaagaaattacagaaacttagagaatttgttcgatcagagtatgaccatgcatgcttgcgttcttgccgttcacgagcactttatgaagggctgaaggtaggtgcaacatctgatctg

SEQ ID NO: 150716 - DNA, 249 bp, Glycine max
gtcgctccgcaccagtttcaccgcacgaatatcttgttgtttggagcgatccgagaaaaactctgtaaacatgttggtttaccaggacctccttacaggtgatgagcttctctctgactccttccgttacaaggaaattgagaatggaatgctgtgggaagttgaggggaagtgggttgttaaaggagcagttgatgtagacattggtgcaaacccttctgctgagggtggaggagaagatgagggagt

SEQ ID NO: 150717 - DNA, 260 bp, Glycine max
aaacaaacccactaagatggcttcctttgtatccttcctagtgctgcttcttgcagcccttatcctcatgcctcaagggcttgctacttactacaaaccaattaagaagccaccagtgtacaagcctccagtgtacaagccaccagtgtacaaaccaccggtttataagccaaaaccaccggtttacaagccgaaaccaccggtttacaagccaccatataagaagccaccatacaagaaaccacttatggaaagtaccc

SEQ ID NO: 150718 - DNA, 242 bp, Glycine max
  unsure (1)..(242): unsure at all n locations
gtgcctgctgcagttcctgctgncgttttcttgtctggnggccagantgaggaggagncatccgtcaacctcaacgccattaaccaggtcaatgggaagaagccatggtcactctctttctcctttggaagggcacttcaacagagcacccttaaggcatggggcggaaaagaagagaatgtgaagaaggctcaggaagcccttttggtaagagccaaggctaactcagaggcaactctggg

SEQ ID NO: 150719 - DNA, 263 bp, Glycine max
aaggcttatggtggatacctaggcacccagagacgaggaagggcgtagtaagcgacgaaatgcttcggggagttgaaaataagcgtagatccggggattcccgatataggtcaacctttcgaactgctgctgaatccacgggcaggcaagagacaacctggtgaactgaaacatcttagtagccagaggaaaagaaagcaaaagcgattcccgtagtagcggcgagcgaaatgggagcagcctaaaccgtgaaaacggggttg

SEQ ID NO: 150720 - DNA, 267 bp, Glycine max
tgatctcgttgcgcttattgattctcttggtgcagagcaagtgttccttgtggctcatgactggtgagccatcataggttggtacctctgcatgtttcgccctgacaaagtgaaggcctatgtctgcctcagtgttcctttcatccgcagaaaccccaacgtcagaaccgtcgatggcatgcgcgctatgtatggagaagactactatatctgcagatttcagaaaccaggggaaatggaggctcagatggctcaagttggcacaga

SEQ ID NO: 150721 - DNA, 268 bp, Glycine max
tcgtgttcagcgaagatccgaatcccaacccgaacccgatcgtgatccgagatgtttgggcctccaatctcgaatccgaattcgaactcatccgcgaactcatcgatcgctacccttttatctcaatggacacagaatttcccggtgttattttccgaccacatgtggaccccaccaaacccttcaaccaccgcaaccgtccctccgaccactaccgcctcctcaagtccaacgttgacgctctcaacctcatccaggtcggcctcac

SEQ ID NO: 150722 - DNA, 266 bp, Glycine max
cttagttcagagtcaaaaaatctgttccacggttacaaattgtcatacttgttgttggaactagaggcgacgtacaaccttttctggccattgcaaagagacttcaggagtatggtcatcatgttaggctggcaactcatgataattttaaaacatttgtgaagtcagctaatgtagatttctatcctctgggtggtgatcctcgtattttggctggatacatggcaaggaataaaggtttaatcccttctggaccggctgaaata

SEQ ID NO: 150723 - DNA, 267 bp, Glycine max
gtcaatttcaaaaggctttcccttaccgacatcaagattgacttgttacctcaccatatcaagggcatcgacaagtgctctgttctggtcaatgacgtcgacgatgactacgagcctgatatggtgaggtcccaagtcaatttcaaaaggctttcccttaccgacatcaagattgacatcaagagggtctctaagaagaaagatcttgtcaaagccatggaggatgctgatgttaagaacaaatgggagatgggttcatggggtata

SEQ ID NO: 150724 - DNA, 271 bp, Glycine max
cccacatctccgcctccggccgctcccacatccgctactaccaagccggctcctccgagatgttcggcgccacccctccgccgcaatcggaaaccacccccttccacccccgctccccctacgccgcctccaaatgcgccgcccactggtacaccgtgaactaccgcgaggcctactccctcttcgcctgcaacggcatcctcttcaaccacgagtccccccgccgcggcgagaatttcgtgacccgcaagatcacgcgggccgtgggccg

SEQ ID NO: 150725 - DNA, 237 bp, Glycine max
ctctctgcgaggtcgtgtgtgggaatttccttaagatgccgtttgtcgacaacagcttcgacggagcgtactccatcgaggccacgtgtcacgctcccaagctggaagaagtgtacgccgaaatcttccgagttctgaaaccgggggcgctctacgtttcctacgagtgggtgacgacggataagtacatcggcgatgaccctgaaacgtggaggtcattcaggggattgagagggg

SEQ ID NO: 150726 - DNA, 262 bp, Glycine max
ggccgccgttcaccggggcttcggtcgtcggctcccctgtcatcaggtcaccaacttccttgaccttccggcactgggcaggcgtcagccccatacatggtcttacgactttgcggagacctgtgtttttggtaaacagtcgcccgggcctggtcactgcgaccccctttgtgaggaggcaccccttctcccgaagttacggggctattttgccgagttccttagagagagttgtctcgcgcctctaggtattctctaccta

SEQ ID NO: 150727 - DNA, 262 bp, Glycine max
atttttattagttttgttgctgagtgtgtgtgaaactgtgaaagagagttatggcaggaggtggtggagctccagcacctaagattgatgagccacaacctcatcccccgaaggatcagttaccgaatgtttcttactgcattacgagtactcctccatggcctgaggccatacttcttggttttcaacattatcttgtgatgctcggtacaactgtgctaattcccactgctcttgttccccagatgggaggtggcaatga

SEQ ID NO: 150728 - DNA, 264 bp, Glycine max
caggtgtttcccattatcccaattcaccgtttggacgaaaagccttcggtgaggggtattctctcggacttgacttgtgacagcgacgggaagattgacaagttcatcaacggagagtccagcctgccgcttcatgagatggaaggaggaagaacttactatctgggaatgtttttgggtggggcttacgaggaggcgctcggtggagtccacaacttgttcggcggccccagcgtggtcagggtgtcgcagagcgatggccct

SEQ ID NO: 150729 - DNA, 265 bp, Glycine max
ctgcaaaggattctacccgccgctcgatgggaattgcgcttcaaggcgtctcgtagggctaatccgcctcacgagggtcaccaacggcacgtgcctttggggggccgaggccccctactgctggtcggcaaacggacggcgggcgcacgcgtcgcttctagcccggattctgacttagaggcgttcagtcataatccaacgcacggtagcttcgcgccactggcttttccaccaagcgcgatgaccaattgtgcgaatcaacggt

SEQ ID NO: 150730 - DNA, 263 bp, Glycine max
ggggtgccttcgggaacgcggacacaggtggtgcatggctgtcgtcagctcgtgccgtaaggtgttgggttaagtcccgcaacgagcgcaaccctcgtgtttagttgccaacactcttggcaagggacttttgcactactactggcttcttattatctgattgctaaaattttctctatgtttccttccctcttactcaattctgtttttttttttctgtatttttttatgaatttccccctttttttttgtgtacttgtatg

SEQ ID NO: 150731 - DNA, 266 bp, Glycine max
aaaagaaagcaaaagcgattcccgtagtagcggcgagcgaaatgggagcagcctaaaccgtgaaaacggggttgtgggagagctatacaagtgtcgtgctgctaggcgaacagcagagaatgctgcaccctagatggcgagagtccagtagccgaaagcatcactagcttacgctctgacccgagtagcatggggcacgtggaatcccgtgtgaatcagcaaggaccaccttgcaaggctaaatactcctgggtgaccgatagtga

SEQ ID NO: 150732 - DNA, 245 bp, Glycine max
  unsure (1)..(245): unsure at all n locations
gtgcctgctgcagttcctgctgnccgttttcttgtctggnggccagagtgaggaggaggcatccgtcaacctcaacgccattaaccaggtcaatgggaagaagccatggtcactctctttctcctttggaagggcacttcaacagagcacccttaaggcatggggcggaaaagaagagaatgtgaagaaggctcaggaagcccttttggtnanagccaaggctaactcagaggcaatctgggaac

SEQ ID NO: 150733 - DNA, 267 bp, Glycine max
gttgtaggtcgcgagctgccgctcgcgatctaaggctcgaggttcggaagccagaaccctagcagccggcgagaatggcagacgttgaggttgacgtggcggcggcggcggcggcggcggctgcagggcagccaaagaagagaacgttcaagaagttcagcttcaggggggtggatctggacgcgcttctggacatgtccactgacgaactcgtgaagatgttcagtgatcctgcacgcagaacgttccagagaggtctcaccagaa

SEQ ID NO: 150734 - DNA, 269 bp, Glycine max
gtgactcgttcttcttcgtcgttatcttcttcttttgttgtttgtgtgtttgttttttctctcacctgaaaatgtcttgctgcggtaggaactgtggttgcggaagcgcctgcaagtgcggcaacggctgcggaggctgcaagatgtacccagacttgagctacaccgagtcaaccaccaccgagaccttggtcatgggagtggcaccagttaaggctcaattcgagagtgctgaaatgggtgttcccgctgagaacgatggctgcaaa

SEQ ID NO: 150735 - DNA, 260 bp, Glycine max
gtttgtgtttgttttttctctcacctgaaaatgtcttgctgcggtggtaactgtggttgcggaagctcctgcaagtgcggcaacggctgcggaggctgcaagatgtacccagacttgagctacactgagtcaaccaccaccgagaccttggtcatgggagtggcacctgttaaggctcaatttgagggtgctgaaatgggtgtgcccgctgagaacgatggctgcaaatgtggaccaaactgctcctgcaacccctgcac

SEQ ID NO: 150736 - DNA, 260 bp, Glycine max
ggaagagtgcgaaagaaagatcgttctcgatgacagaggggaacggtgacaaaactctgcgaaagatcgcagacgcattcaatgaccttgcaaacgttttcaccgattctcagagcgcagaagcagaggtcaaggttgctcccttctctcatgcctgctctctcgtctcccctctcttcggttgcttgggcgtcgccttcaagttcgccgaaatggattacgtcgccaaggttcatgatctggcagaggcgtccaagtct

SEQ ID NO: 150737 - DNA, 260 bp, Glycine max
tagacatgattagattagctgtggattcttacatccgccattttttctagtatatagaaatgaacatgctcttgactcgacatcgtttgttctgttccactagaacttattgttttggggacgggaaagcagttgatgatgtaagttgatgatgtaaatagtacatgatggagctcgagtttattcatttatcaggggcaagtatctaaggttagtaaaaattaataagttagaaaaacttcgtaagtttatttttgata

SEQ ID NO: 150738 - DNA, 236 bp, Glycine max
atggcgttaactgcaaggttctcatcaacattgtgtaggagagtactgatattggtcaggatgtataggggtaccttatcaacaaagctgaagaaagttgggatggtgaggaaggtcagatgattcggctatagagtagatgaaacacctgagattgatgtcattgagcgaagttcttgcaagggaactctgtgctcgactcaccgaggtactaaagtacggtacctgcgcttgga

SEQ ID NO: 150739 - DNA, 264 bp, Glycine max
gtccactggagccactcaactcttttttaatcatttatatgatcctctgtcacttgtcagggatcaccgagcaaaggaggttctgactgctcagggcataacagtacgttccttcaacgcggacttattatatgaaccatgggatgtgaatgatgcacatggccgaccattcacaacttttgctgctttttgggaaagatgtcttagcatgccttatgaccctgagtcacctcttctcccacctaaaaggataattccaggtga

SEQ ID NO: 150740 - DNA, 265 bp, Glycine max
agcagctcaatgagttcgtccgcaagaccggtggcgccggcaaaggtcgcactaacatgcgccgcaccgtcaagagtgctcctcagagcatttggtatggccctgaccgtcccaagtacttgggtccattctcggagcagattccatcatacctgaccggagaattccctggtgactacggatgggacactgctggattatcagctgacccggaaaccttcgccaggaaccgggagctggaggtgattcacagcagatgggcaat

SEQ ID NO: 150741 - DNA, 264 bp, Glycine max
tttttggatcggaacctcttctgcggcgtagaatgggacactccaacgtttggaactctcacccaaaaaactacggtcctggttctcgcacttgccgtgtgtgtgggaatccacatggactgatcaggaagtatggccttatgtgctgcaggcagtgcttccgtagcaatgccaaggaaattggcttcatcaagtatcgctaaaagagcagttgtcaactacggaccaatattgtgttctggcactaggatgttttgaggatgt

SEQ ID NO: 150742 - DNA, 265 bp, Glycine max
attgaagtctaagaaagaaaacagagagcgaagaaggagaagagatcagaaaaatggcgtccaaagctccaaagaaggccaatctcctcgatcaccactccatcaagcacatcctcgacgagtcagtctccgaggtggtaacgagtcgtgggtttgtggaagacgtgagattgagcaatgtgaggcttctcattggggcaatcatcatcgtcattgctctcttcgcccaattctacaagaagaagttccctgaaaatagggattt

SEQ ID NO: 150743 - DNA, 253 bp, Glycine max
tccaacttatgttgttggtgtaaatgaaggggactacactcatcagatctctaacattatgagcaacgcttcctgcaccacaaactgtcttgctccctttgtgaagatcctggatgaagagtttggaattgtgaagggaaccatgacaaccacacattcctacacaggagaccagaggcttttggatgcttcacaccgtgacttgagaagagccagggctgcagcactgaacattgtcccaaccagcactgga

SEQ ID NO: 150744 - DNA, 256 bp, Glycine max
gtttaaaccccaaccgtaggaagggcaggaaggcacgtgctgtgagtctggaccactccatgtggtttcacagacctttacgagctgatgactggatactatttgtgatctttagtcctactgccaataatgcacgtggctatgtcactggccaaatgttcaatcagaagggagagctacttgtatcagtggttcaagaaggtgtaatgagggaagttatttctgcaaagtcagccatcaaatctaatttgtgaaa

SEQ ID NO: 150745 - DNA, 259 bp, Glycine max
gagagacgcttcgcaaatctcaatcgaatctcagaaaaatgagagaaatcatcagcattcacataggtcaggccgggatccaggtcggaaactcctgctgggaactctactgcctcgaacatggcatccagcccgacggcatgatgccttctgactccaccttcggtgtagcccacgacgccttcaacaccttcttcagcgaaaccggatctggcaagcacgtcccccgtgctgtcttcgtcgacctcgaacccaccgt

SEQ ID NO: 150746 - DNA, 259 bp, Glycine max
gcaaaagtcccacaaaaagttgatcattcacttctcctcactgttggtttggggattaacccttgtccatcttgcacagctggcaatgggagtagagtagtggctgctgtcaacaatgtgacatttgtgatgccaaccactgcactgcttcaggctcattacttcaacatcaagggggtgttcaccactgatttccctggcaacccttctcatgtttacaactacacggcgactccgccggcggcagcatggcagacca

SEQ ID NO: 150747 - DNA, 262 bp, Glycine max
ctcgagccgattcggctcgagcagatcttgtagcaatggcgagcgctcccactccacgcgaagagttcgtgtacatggcgaagtggcggagaggccgagcgctacgaggagatggtggagttcatggagaaggtctccgcctccgccgagagcgaggagctgaccgtggaggagcgtaacctcctctccgtcgcctacaagaacgtgatcggcgctccgttccccctcctggcgcatcatctcctcaatcgagcagaaggag

SEQ ID NO: 150748 - DNA, 261 bp, Glycine max
gaaagacccaccaacttcttgcagcgctggtccagtagctgaggacatgttccattggcaagcaacaataatgggtcctgctgatagtccttatgctggaggtgtattcctagtcactattcacttccctccggattatcctttcaagcctcctaaggttgcctttaggactaaggtgtttcacccgaacatcaatagcaatggtagcatttgtcttgatatcctgaaggagcagtggagccctgcactcaccatctctaa

SEQ ID NO: 150749 - DNA, 262 bp, Glycine max
cgtaactcccaagcagtgggaggaggctcgggactctgaccgcgtgcctgttgaagaatgagccggcgactcataggcagtggcttggttaagggaaaccaccggagccgtagcgaaagcgagtcttcacagggcaattgtcactgcttatggacccgaacctgggtgatctatccatgaccaggatgaagcttgggtgaaactaagtggaggtccgaaccgactgatgttgaagaatcagcggatgagttgtggttagggg

SEQ ID NO: 150750 - DNA, 263 bp, Glycine max
atcattttcttactttcctctcacgctctgccacaaaactccgtctccgcaataacggaataaaaaaaacaagtttaattactattatggcgccgagggatcataagacaagcaacgctaaggctaacggtaacggtaacagcggggtgaaggaggtgcattttcgtggagtgagaaagaggccgtgggggagatacgccgcggagatcagagatcccggcaagaagagccgcgtctggctcggaaccttcgacacggcggag

SEQ ID NO: 150751 - DNA, 265 bp, Glycine max
tcagggttcaagtgccatctccagtgctgatctttttggtgactcaagagacaacaacattgatcttactgctggtgacctcatcaatcgattatctttccaggcacaacaggatctctcttcccttaagaacattgcaggagagactggaaagaagctgagctcattggcctccacattgatgacagatcttcaggaccgaatcctctaaaatgtgtatgctctgtatttaagagaattttggtcttttttacatatgccagcc

SEQ ID NO: 150752 - DNA, 267 bp, Glycine max
gtctctccgcagcagccacacttcttcgccgtttcagctgaagagccatccgcaggtaagcaatggttaagcataataatgttatccccaatgggcacttccggaaacactggcaaaactatgtgaagactcggtttaatcaaccagcccgaaagaccagaagacggttggctcggcagaagaaggctgtccagattttccccagggctactgctggaactctcaggcctattgttcatggccagactctgaaatacaacatgaaag

SEQ ID NO: 150753 - DNA, 259 bp, Glycine max
gccatggccacccacgcggctctagcttctacaaggatccccactaacaccaagttcccatccaaggcttcacactctttcccaacccaatgcgcctcaaagagacttgaggtgacagaattctctgggctaagatccacttcatgtgtgacatatgctaacgatgctagagaatcttccttttttgatcttgtagcttcccaactcactcccaagaccaatggatcatcgactcctgtgaggggagagacagtggcca

SEQ ID NO: 150754 - DNA, 256 bp, Glycine max
gcagatttgaagaagctaagaagtttggggtcaatgaatttgtgaacccaaaagatcatgacaaacctgtacaagaggtgattgctgcaatgacaaatgggggtgtggatcgtgctgttgaatgtactggcagcatccaagccatgatctcagcattcgaatgcgtccacgatggttggggtgttgctgtacttgttggagtgccaaacaaagatgatgcattcaaaactcatccagtgaatttcttgaatgagag

SEQ ID NO: 150755 - DNA, 258 bp, Glycine max
  unsure (1)..(258): unsure at all n locations
gaatagtacttttttattatgatggccgtggcccgaaaggaaatggaccggatcaagggcccgtggngcccggaggaggacgaggctcttcagaagctcgtggagcggcatgggcccagaaactggtccctcatcagcaggtccattccgggccggtctgggaaatcgtgcaggctccgatggtgcaaccagctgtcgccacaggtcgagcaccgggccttcacgccggaagaggacgagaccataattagggcccat

SEQ ID NO: 150756 - DNA, 260 bp, Glycine max
gttttgttcgggaaccagacattagggccgttcttccagcaccacaagaacaccaccttcgtgaatccccttttcaagggccagcgcgtgacgccactcgccgggaaccaggtcgaggtgtttgacaaggagaagggttcgggtgtttacaccatcgatttgaagctctttatggtggttcggttcaagttcttgctgttacaagagtgcgagcgtgaagcccaagattcggtgtgcgttgcacgtgccgctgaaatcgc

SEQ ID NO: 150757 - DNA, 261 bp, Glycine max
caccattatttgagtacatacctcagtgcacccttgctgccattgtgatctctgctgtgataggtctggtagattatgatgaggccatttttttgtggcgtgtagataagaaagattttcttctttggaccattactagcactacaacattgttccttggtattgagattggcgtccttgttggggttggggtttcacttgcttttgtcattcatgagtcagcaaatccacatattgctgttttgggtcgtttgccaggga

SEQ ID NO: 150758 - DNA, 263 bp, Glycine max
ctcacattattattcatatctctctctctctcccccaagaaattcaacagagttttgattaacttgaaatttcaacaagaaatggagaattcattgggaaagtacggaaaagagcttaatctcgaggctacagagttgaggttggggttgcctggaagcgatgagcctgagaaacgttctgctgttagaagcaacaagagatcttcaccagaagcaagtgaagaagagtgcataagcaagggcaacatgaattcttctgatgg

SEQ ID NO: 150759 - DNA, 263 bp, Glycine max
gcctttcaagccccagggttttcttcaacgcatcaccctcaccgcaaaacacgtacgccgtaaagttcgcagttccactcagccaagggattccgacttggtagtgtcaggttgggtcgggtgatgaggatccgacccgttcgcgcagtccagagcgcatttcggagaaggtggaggagagcataaagaacgcgcaggaggcgtgcgccggcgacccgacgagcggcgagtgcgtggcggcgtgggacgaggtggaggagctc

SEQ ID NO: 150760 - DNA, 263 bp, Glycine max
gtgaaataccactacttttaacgttattttacttattccgtgaatcggaagccgggcactgcccctctttttggacccaaggtcggcttcggccggtcgatccgggcggaagacattgtcaggtggggagtttggctggggcggcacatctgttaaaagataacgcaggtgtcctaagatgagctcaacgagaacagaaatctcgtgtggaacaaaagggtaaaagctcgtttgattctgatttcctgtacgaatacgaaccg

SEQ ID NO: 150761 - DNA, 262 bp, Glycine max
ctcgagccgcaccaagtatcgtttcccaagatgggattgccaatggtgtgaaccattgacatggatgcttcttatgtatttagcatgttcagcttggtatgtgttgactaatatatagaaaggcatgatgtgatgcataaaatttgtaaataatatataactaaaaatgtgtgatttgagaatttttacaacagttatgttagtaatccctccttttgtgataagttgaggaatggaagtgagaattcctagtttgttaatg

SEQ ID NO: 150762 - DNA, 256 bp, Glycine max
caaagggcttctccagcctagtttgttctcagatcatcttcttccatggaccagtacgagaaggtggagaagataggcgagggaacatacggcgtcgtttacaaggctcgcgaccgcgccaccaatgagacaatcgctctgaagaagattcgcctcgagaaggaggacgaaggcgttcccagcacagccattcgcgagatttatgttctcgaagagctgcagcataggagcattgttaggttgcagggtgttgtgc

SEQ ID NO: 150763 - DNA, 250 bp, Glycine max
gccggatctgctaaaatacgcttgatccatatgggcctcctcgaccacttgtgggacgacaccgtcgccggcccaaggccggaaaacggtctcggcaagctccgaaaacaccacaccttcactttccgacctagctccggcaaggaaacggagggcgggagcgtgagatcgtacggagacgaatcgtcggaggaagcgacgagagtgacgcgtagtatcatgatcgtgaaaccgcccgggtaccagagtg

SEQ ID NO: 150764 - DNA, 255 bp, Glycine max
gcttgatggggagcatggtattgacagaacttttgaagtagcaaaaaaggtctgggcagaggttttcttctaccttgctgagaacaatgtcctttttgagggtattcttcttaagcctagcatggttacacctggagctgagtccaaggacaaggccagtcctcagacagttgctgattacaccctcaagctccttcacaggagaattccccctgctgtccctggaattatgtttttgtctggtggacagtctga

SEQ ID NO: 150765 - DNA, 257 bp, Glycine max
gttgctttgatgattcatgataactcgtcggatcgcacggcctttgtgccggcgacgcatcattcaaatttctgccctatcaactttcgatggtaggatagtggcctaccatggtggtgacgggtgacggagaattagggttcgattccggagagggagcctgagaaacggctaccacatccaaggaaggcagcaggcgcgcaaattacccaatcctgacacggggaggtagtgacaataaataacaataccgggct

SEQ ID NO: 150766 - DNA, 261 bp, Glycine max
aagatgagggagttgatgatgcagctgttaaggttgttgacattgttgacacattcagacttcaggagcaacccgcattcgataagaagcagtttgttaccttcatgaagaggtttatcaagaatttgactcccaagctcgatgcagagcaacaggagttgtttaagaagcacatcgagggagcaactaaatacctgctctctaagattaaagatttccaattttttgttggtgagagcatgggtgatgatgcttgcttgg

SEQ ID NO: 150767 - DNA, 249 bp, Glycine max
ggccgggtcgtgcctccggtgctgttactttgaagaaattagagtgctcaaagcaagcctacgctctgtatacattagcatgggataacaccacaggattctgatcctattgtgttggccttcgggatcggagtaatgattaacagggacagtcgggggcattcgtatttcatagtcagaggtgaaattcttggatttatgaaagacgaacaactgcgaaagcatttgccaaggatgttttcattaatc

SEQ ID NO: 150768 - DNA, 261 bp, Glycine max
taaatggcttcctctgttgctttagttttgggtctatgtctagcactcaacatggttctgccgacacgtgcagctacccacacagtgggagacacctcaggttgggcactcggtgctgattacagtacatgggccagtggcttgaaattgaaagtcggagatagtcttgttttcaattatggggctggtcacacagtggacgaagtgaaagaaagtgattacaagagctgcaccacaggcaattcactaagcacagacagc

SEQ ID NO: 150769 - DNA, 265 bp, Glycine max
catttgtgaaactaacaacaacacaaggccatcatcatggcagctgcttccccaatggcaagccaactcaagtccaccttcactaggactcttgtagctcccaagggcctctctgcctcttcaccacttcacctcgtgccttctagaaggcaatttagcttcactgttaaggccatccaatcagagaagccaacctatcaagtgattcagccaatcaacggtgacccattcattggaagcctggaaaccccagttacatccagcc

SEQ ID NO: 150770 - DNA, 264 bp, Glycine max
gcagaagaacaagtagttgagaactaagaaggagaagcaaatggcttcctcaatgatctcttccccagctgttaccactgtcaaccgtgccggtgccggcatggttgctccattcactggcctcaagtccatggctggcttccccaccagaaagaccaacaatgacattacctccattgctagcaacggtggaagagtgcaatgcatgcaggtgtggccaccagttggcaagaagaagtttgagactctttcctacctgccaga

SEQ ID NO: 150771 - DNA, 266 bp, Glycine max
ttttcttcctcagtagtgtcatttacgcttctcttctctgcagcaactatgcctaaccctaaggtcttcttcgacatgaccatcggcggtcaatctgctggccgcatcgtgatggagctctacgccgacgtcactccccgcaccgccgagaacttccgcgcgctttgcaccggcgagaagggcgtagggcggagcggcaagcccctccactacaagggctcgtccttccaccgcgtgatcccgagtttcatgtgtcagggtggcga

SEQ ID NO: 150772 - DNA, 267 bp, Glycine max
gtgaaatgacttgagaggtgtaggataagtgggagctggaaacagcgaaagtgaaataccactacttttaacgttatttacttattccgtgaatcggaagcggggcactgcccctctttttggacccaaggtcggcttcggccggtcgatccgggcggaagacattgtcaggtggggagtttggctggggcggcacatctgttaaaagataacgcaggtgtcctaagatgagctcaacgagaacagaaatctcgtgtggaacaaaag

SEQ ID NO: 150773 - DNA, 266 bp, Glycine max
agaaattggtgctggtgaccagggtcacatgtttggctatgccactgatgaaacccctgaattgatgccattgagccatgttcttgcaacaaaactcggtgctcgtctcaccgaggttcgcaagaacggtacctgcccttggctgaggcctgatgggaagacccaagtgaccgttgagtattacaatgacaatggtgccagggttcctattcgtgtacacaccgtgctaatctccacccaacacgacgagactgtcaccaatgacg

SEQ ID NO: 150774 - DNA, 266 bp, Glycine max
attgttgaacaagggtttctctgtctgcttcttcactttctctcgtttcaatcgaaaccaaaacaaaaacatgggcagaaaattcttcgtcggtggcaactggaaatgcaatgggaccactgaggaggtaaagaagattgttactactttgaatgaggctaaagtccctggagaagatgtcgtagaagttgttgtgagccctccttttgtgttccttcctgttgtaaaaagtttgctgcgccctgatttccatgtttcggcacaaa

SEQ ID NO: 150775 - DNA, 266 bp, Glycine max
ccgtagaccatccgcatgggggtggtgaagggagggccccaattggtagaaaaaaacccgcaactccttggggttttcctgcacttggaagaagaagtagaaaaaggaagaaatatagtgataatttgattcttcgtcgtcgtactaaatagtagagaaaatagaaattgtttcttcgtctttacaagaaaaaggagtaattaactgtgacacgttcactaaaaaaaaatccttttgtagcgaatcatttattaagaaaaataaat

SEQ ID NO: 150776 - DNA, 267 bp, Glycine max
ttccaattagggtttcgcttagagtaaccaattaccatgggagtcttcacctttgtcgttcgcaaatccggcgccgaatggagcgccaagcaacattccggcgacatcgaggcctccgccgactccacctacgatctccaaaggaagctcgtgcaagccgctctcgccgttgattcctccggtggagtccagtcctccttctctcccgtgtctcctacctccgctgtgttccaggtgatagtgggtggtgctgtattcgttggaggt

SEQ ID NO: 150777 - DNA, 263 bp, Glycine max
ttgctactgagtttccacactgcataccttaggtcttccgaattcgaagttaatttgcaagatggctaaggaaaaggctcagatcaacattgtggtggttggtcatgtggaccctgaggaggcaaccaccattaacgagctgaagaagcctgttgtggagaaagaagctccagggcatgccatatgagggcatgcacgtacggcctcggatgcgaaccagaaaattatgttaacaaaataatctggaaccctaatgtatcagt

SEQ ID NO: 150778 - DNA, 264 bp, Glycine max
cagagaaagcttcgcaggtgctggtcacaggacttgcataagcgcttcttgcatgcccttcagcagcttgggggtgcagattgtgagtatctcaatatatactgccacaccaaagcaaatcagagagctgatgaatgttgatggcctcacaaatgatgaagtcaaaagccatttgcagaaataccgtttgcacactagaaggccaattcccatggttcacaacagttccgatccacaagcagcaccttttgtccttgtagggaa

SEQ ID NO: 150779 - DNA, 264 bp, Glycine max
gcggatgttgacgcaatgtgatttctgcccagtgctctgaatgtcaaagtgaagaaattcaaccaagcgcgggtaaacggcgggagtaactatgactctcttaaggtagccaaatgcctcgtcatctaattagtgacgcgcatgaatggattaacgagattcccactgtccctgtctactatccagcgaaaccacagccaagggaacgggcttggcggaatcagcggggaaagaagaccctgttgagcttgactctagtccgac

SEQ ID NO: 150780 - DNA, 263 bp, Glycine max
  unsure (1)..(263): unsure at all n locations
ccttcacttgcttggagcaatggctaaagccttgttggcatcagtgccgcttttcctgctcctagcagtgagtagtagtgtggttgctgaagagcttgaaactcttccaccttcttaccctcaccctcactctcccacacaagcacctcttgcanccaccagcaagtgctcctcacccccaccaccaccaccaccaccaccctccagcaccagcacctgcacctgttcatccaccttctcctcctacgcagcacaattaccct

SEQ ID NO: 150781 - DNA, 263 bp, Glycine max
ctctctctctctctctctctctctgaagatggcttcacgcaggctcgtatcttctctgattcgatcctcccttcgtagatctcaatcgaagccctcaatttccgcatcgaaatcgatatatacgtcatccaaccgtgcctcaccgcacggatacttgctgaaccgcgtcgccgagtacgccacagccgcggctgctgctaccactcctccctctcctcctcctccggggaagaaagagctcggcggcggcgggaagatcaccg

SEQ ID NO: 150782 - DNA, 263 bp, Glycine max
  unsure (1)..(263): unsure at all n locations
aggttcttctgaaaagatgtctcgcgtgtatgttggtaacttggattcacgagtcactgagagagatctcgaagacgaattccgcgttttcggagttattcggagtgtttgggttgcacgtagaccacctggtnatgcttttattgactttgatgaccgcagagacgcacaggatgctatccgngaattggatggcaagaatggttggagggttgagcttctcacaactctagaggtggaggtggtggtcgtggtggtcgctc

SEQ ID NO: 150783 - DNA, 264 bp, Glycine max
aaggactggaggggtggaagagctgcttccttcaatataattcccagcagcactggagctgctaaggctgtaggaaaagttcttccagcactgaatggtaaattgactggcatgtccttccgagtccccactgtagatgtttcagttgttgacctcactgttaggctagagaagccagcaacctatgagcaaatcaaatctgctatcaaggaggaatcagagggcaaattgaagggtattttgggttacacagaagatgatgtt

SEQ ID NO: 150784 - DNA, 264 bp, Glycine max
attaaatcagttatagtttgtttgatggtatctactactcggataaccgtagtaattctagagctaatacgtgcaacaaaccccgacttctggaagggatgcatttattagataaaaggtcaacacaggctctgcctgttgctttgatgattcatgataactcgtcggatcgcacggcctttgtgccggcgacgcatcattcaaatttctgccctatcaactttcgatggtaggatagtggcctaccatggtggtgacgggtga

SEQ ID NO: 150785 - DNA, 263 bp, Glycine max
ttcagtgctttgcgaccaccggtgatgggtccattgttgtggggtctcttgatgggaagataaggttgtactcgaagacgtcgatgaggatggctaagacagcatttcctgggcttggttcgccgattactagtgttgatgttacttatgatggcaagtgggtgcttggcactacggatacctacttggtgctcatttgtaccttgtttacggataaagatgggaggacgaagaccggatttagtggtagaatggggaacagg

SEQ ID NO: 150786 - DNA, 264 bp, Glycine max
ctcgagccgaatcggctcgagcggctcgaggagtggggttaccagttgtctgaggtttcctggacaactgaactctgacatcaggaagctggctgtcaatctgattccatttccccgtcttcacttctttatggtggggtttgcacctctcacttctcgtgggtctcagcaatatgtctcccttactgtcccagagctgactcaacaaatgtgggatgccaaaaatatgatgtgtgctgctgatccccgacacggccgatactt

SEQ ID NO: 150787 - DNA, 247 bp, Glycine max
ataagaaagaagttcgacattgagtaggttcatgttggattttaatagccatagtgacgtattgatcattcttggcctttcaactaaatagtatttgtgtagtaaattaaaggcacttggatgtaccaaacttcatgctttttgtaggagtgcgtaggttttaaaaattttctgatgtatctttcatgtgtttgttggttttgtaacagaatatttcctatattatacatatatttgagtcactagt

SEQ ID NO: 150788 - DNA, 263 bp, Glycine max
aaaggattctacccgccgctcgatgggaattgcgcttcaaggcgtctcgtagggctaatccgcctcacgagggtcaccaacggcacgtgcctttggggggccgaggccccctactgctggtcggcaaacggacggcgggcgcacgcgtcgcttctagcccggattctgacttagaggcgtttcctcataatccaacgcacggtagcttcgcgccactggcttaccaaccaagcgcgatgaccaattgtgcgaatcaacggttc

SEQ ID NO: 150789 - DNA, 266 bp, Glycine max
cccgaagcagccatggggatcgatctcaaggccggaggtaagagcaaaaagaccaaaagaacagcacccaagtccaatgatatctatctcaagctcttggtcaagctttatcgcttccttgttcggagaactggcagcaacttcaatgctgttatacttaagagattgttcatgagcaaggttaacaaacccccattgtctttgtcaaggttgattaagtatacgaaggggaaggaagataagattgcagtggtggtggggtctat

SEQ ID NO: 150790 - DNA, 262 bp, Glycine max
gcaaaggattctacccgccgctcgatgggaattgcgcttcaaggcgtctcgtagggctaatccgcctcacgagggtcaccaacggcacgtgcctttggggggccgaggccccctactgctggtcggcaaacggacggcgggcgcacgcgtcgcttctagcccggattctgacttagaggcgttcagtcataatccaacgcacggtagcttcgcgccactggcttttcaatcaagcgcgatgaccaattgtgcgaatcaacgg

SEQ ID NO: 150791 - DNA, 261 bp, Glycine max
tggatctaatattgaaactaaggaaagtgctttggtctggcatcatcaagatgcagaccctgattttggctcatgccaagccaaagaattgttaaatcatctggaaagtgtccttgctaatgaacctgcagttgttatcaggggccagcatattgttgaagtcaagccacagggattaaacaagggattggtggctgaaaaggttctttccactatggttaatgatggcaatccaccagattttgtgatgtgtgtgggaga

SEQ ID NO: 150792 - DNA, 256 bp, Glycine max
gccatattgcaagagattgcagggttggagttgctcaccattgagaaatttcccaagttatataaatggagtcaagagtttatcaatcaccctgtgatcaaggagggcctgcctcctagagatgaattgtttgctttcttccaagcttctgctaaaaagtagagccgttttagaggtaggattcctaataagttagcatgattttgttgggaaataatgataatcttgttgtgagtaaaagattgttctgttttaa

SEQ ID NO: 150793 - DNA, 264 bp, Glycine max
gtccatctggttagttgggagaaggaaaacgtttctagtgaggccctggaagctgctcgtattgcttgcaacaagtacatggccaaatttgctggaaaggatgctttccacttgagagtcagggtgcacccattccatttcttaggatcaacaagatgctttcgtgtgctggagctgataggctccaaactggaatgagaggtgcttttggaaagccacagggtacttgtgctagagtggctattggacaggtccttctttctg

SEQ ID NO: 150794 - DNA, 263 bp, Glycine max
agacaattgatgcagaagtactgaattccatggcagttacaaatgagcatttccagactgcccttggaacaagcaacccatcagctttacgtgaaactgttgttgaagtgcctaatgtcagctgggatgacattggaggcctcgaaaatgtcaagcgtgaactgcaagagactgtacaatatccagttgagcacccagaaaagtttgagaagtttggtatgtctccatcaaaaggagtactcttctatggtcctccgggatgt

SEQ ID NO: 150795 - DNA, 262 bp, Glycine max
aaaacatcagattcactcttgtgaatatcagctcaaatcgttggctaaccataaggctagaaacattaggaggcctgatgatttggttgatagcaacatctgctgtcttgcagaatgcaagagctgcaaaccaggcaatgtttgcatctacaatgggtttacttctcagttatactttgaacataacaaatctcttgagtggtgtcctcagacaagcaagtagagctgaaaacagtttaaattctgttgagcgtgtcgacac

SEQ ID NO: 150796 - DNA, 261 bp, Glycine max
gttttaatggcaagaaaaagcttgttctgtcaactactagctggcttggtgggaagaatgacttccttggcattgcctatctcactgttggaggattgtgcttctttttggcattggcttttaccattgtatattttgtcaagccaaggcaacttggagatccctcatatttgtcatggaataggaatccaggagggcgctgagcaaagaaactcactatgctcgttggttatttccatgattataggccttgggtatttt

SEQ ID NO: 150797 - DNA, 262 bp, Glycine max
gaaactgcctgttttgcgtgtgcacctcctcttgttgttgcatctggggtagatgaacgtacgctcaagcgggaaggggtttgtgctgcatctttacccaccactatgggggttgttgctggccttctagtccaaaacactctaaaattattgctaggctttggacaagtctccccgtatttgggatataattctcttaaggattttttcccaactatgcaaatgaagccaaaccctcaatgttcaaatgtagcttgtttgg

SEQ ID NO: 150798 - DNA, 264 bp, Glycine max
cttcattgtcctggggattctgctgggttattttgtgggaagctattctgattgagacagttgggggatggcggttcatgtatggatttagtgctccagttgctgtattaatggggcttggaatgttgactctccccaattctccacggtggttgcttctcagagcagtgcaaggaaaaggttcttttcaagatttgaaggaaaaggccattttttccctgagcaaattaaggggccgaccacctggtgacaaagaatccgaga

SEQ ID NO: 150799 - DNA, 262 bp, Glycine max
cgtgtaccaacaagtgcaagttcgaatcaatggccagcgctcagctcacagcaatagcgtcatcgatctctacggcgtcgtttgaagggcttcgaccttccgctgttcagtttgcttccacgggcagaattagaattggcaatctctcccaaaggtccttccggggcttggttgtcaaagccgccaccgttgttgcccccaaatacactgcgataaagcctctgggagatagagtgctaataaaaattaaggaagcagagga

SEQ ID NO: 150800 - DNA, 264 bp, Glycine max
tctcgagccgattcggctcgaggaaaaccttagcccaaccggatcaccacgattaggagatagctaagtcgaagaaccacaacgctcacaaccagtcctacaaggcccacaagaatggcatcaaaaagccaaagaggcaccgccacacttccaccaaagggatggatccaaagtttctgacgaaccaaaggtacgcgaggaagcataacaagaagagcggtgaaacagccacggaagaagagtaaagtgtcactctcaaatggg

SEQ ID NO: 150801 - DNA, 261 bp, Glycine max
ggattctacccgccgctcgatgggaattgcgcttcaaggcgtctcgtagggctaatccgcctcacgagggtcaccaacggcacgtgcctttggggggccgaggccccctactgctggtcggcaaacggacggcgggcgcacgcgtcgcttctagcccggattctgacttagaggcgttcagtcataatccaacgcacggtagcttcgcgccactggctacttcaaccaagcgcgatgaccaattgtgcgaatcaacggttc

SEQ ID NO: 150802 - DNA, 260 bp, Glycine max
ccaattaagctttcaagagacaaactgctttgaaaaatgggatccaaggttgttgcatccgttgcccttctcctctccatcaacattcttttcatttccatggttagctccagcagccactacgatccacagccccaaccttctcacgtcactgctcttattacacgacctagttgtccggatctgagtatttgcctcaatattttaggcgggtctctaggaaccgtggatgattgttgtgccctcatcggtggtcttgg

SEQ ID NO: 150803 - DNA, 261 bp, Glycine max
gaattggacaggggaaagtggctatgttcaggccgcattttcaagagagaagcaaatatctgacccactgacaactggtgctgtactttgtgggcagaaacagatgaccgaggaagtgacatcaattcttgttgctgatggagtatccgctgataagatattgaagaacttctgaccaaaatggatttttgagcactgttgtatcattttttgatactccataattatttcattgactttgctgagtatcaagcatctcag

SEQ ID NO: 150804 - DNA, 263 bp, Glycine max
cttagccgttgctctgcttcaacattgcggaagcagaagaagcgacgcagctatggtgaagtactccagagaacccgacaatcccaccaagtcctgcaaggccagaggcagctgacctcagagttcattttaagaacactagggagactgcctttgccatcaggaagttgccccttgttaaagctaaacgatacttagaggatgttttggcccacaaacaggctattcctttccgacgcttttgtggtggtgttgggaggacg

SEQ ID NO: 150805 - DNA, 262 bp, Glycine max
tgtagatgctgggtgagaatctctacccccttgtggaacagttagagcctgataatgctgccaaagtgacaggcatgcttcttgagatggaccagactgaagttctgcatttgcttgagtcgccagaagccctgaaagcaaaggtggctgaggcaatggacgtcctaaggaatgttgctcagcagcaggctggcggtactgctgatcagctggcttccttatctcttaatgacaaccttgtttcttaaggtttatattttgg

SEQ ID NO: 150806 - DNA, 261 bp, Glycine max
gaaagtgcaggatcttctgttgttggatgttactcctctctcccttgggttggagaccgcgggaggagtcatgactgtgttgattcccagaaacacaaccattcccaccaagaaggagcaggtattttcgacctattccgacaaccagcctggtgtgttgaaccaggtctatgaaggtgaacgtacgaggactcgtgataacaatttgcttggcaaatttgagttatctggaattcctcctgctccgagaggtgttcctca

SEQ ID NO: 150807 - DNA, 258 bp, Glycine max
gttcgagtgagagcatacctgtcgggacccgaaagatggtgaactatgcctgagcggggcgaagccagaggaaactctggtggaggcccgcagcgatactgacgtgcaaatcgttcgtctgacttgggtataggggcgaaagactaatcgaaccgtctagtagctggttccctccgaagtttccctcaggatagctggagcccgcgggcgagttctatcgggtaaagccaatgattagaggcatcgggggcgcaacgc

SEQ ID NO: 150808 - DNA, 261 bp, Glycine max
gttacaaccatgaaatgagtcctatgcagtcatactgtgatgactacttcaaactcacatacccctgtacacctggtgctgagtactatggtcgtggagctattcccattttctggaactacaactatggtgctgttggagaagctttgaagatcgacctactcagccatccagaatacatagagcagaatgccacccttgctttccaggctgctatttggagatggatgacaccaatgaaaaagtcacagccctctgcgc

SEQ ID NO: 150809 - DNA, 255 bp, Glycine max
ggagtagcggcattaaaaatgcagatcttcgtgaaaactctgacagggaagactataaccctcgaggtcgagagcagcgacaccatcgacaatgtcaaggccaagattcaagacaaggaaggcattcctccggatcagcagcgtttgattttcgccggaaagcagcttgaagatggaaggaccctggccgattacaacatccagaaggaatcaacccttcatctcgtcctcaggcttcgtggtggcatcattgag

SEQ ID NO: 150810 - DNA, 257 bp, Glycine max
agctccagggcatgccatatgagggcatgcacgtacggcctcggaggggaaccagaaaattatgttaacaaaataatctggaaccctaatgtatcagtgtcatcatcagtgtgtagtttaagctagctttgctatggttacgttctttgagatgagagtcttgatgaacagtaccattctgatgtattgctttccttgaaagttaatgcatgcttcttatcttctgtctaaaaaaaaaaaaaaaagggcggccgccg

SEQ ID NO: 150811 - DNA, 260 bp, Glycine max
ccttagaacctaagaagtctgcaagggccttcagtgccttcacttccatgtccatacttgcagcaatatttgggaatggcatattgcccgagatacaagcaactctagcaccctctgccactgggaagatggtaaaaggcctttttatgtgctattccgttatttttgtaacattctatcctgctgcagtttctgggtattgggtatttggaaacaaatccaactcaaacattttgaagagtctgctgccagatagtgga

SEQ ID NO: 150812 - DNA, 257 bp, Glycine max
ggagaattcgccgctcaaggctattgactttggcctctccatattcttcaagccaggtgagaggttctcagaaattgttggaagtccatattatatggctccagaagtgctcaagcggaattatggaccagaaatagatatatggagtgcaggagtaattctctacatcttattgtgtggtgttcccccattttgggctgaatctgagcaaggagttgcacaggccattcttcgaggacttatagattttaaaaggg

SEQ ID NO: 150813 - DNA, 258 bp, Glycine max
gaagaatatttgctgtgttttggatattgacaggtactattactttagctcagcttttcgtctacattgctgaactaaacactgaaatcagacaaaaggaacttgtcaagtgggtacttacaaggaaagtgaccaatttagatttggaggctgcagatcttgatgaggatgggactgttggggctgcggaattcgttatttataagctcaaagagatggggaagattagtcaagaagatatatcacttgtgatgcagg

SEQ ID NO: 150814 - DNA, 260 bp, Glycine max
gccgtcgccaccgccgcgatggggtggcgcgtccgacgccgacgacatcctgatccgtcaggtggtgccagatgttggcgaagcgcaagaggacagacaacctgctgaacgccgagcaccacttcgcgagcttcaaggccaagttcgccaagacctacgccaccaaggaggagcacgatcatcgcttcggcgtcttcaagtccaacctccgcagagccaggctgcacgccaagctcgacccctccgccgtccacggcgtc

SEQ ID NO: 150815 - DNA, 260 bp, Glycine max
tagagctcaggattttagtagatggtatgatgagccactatgccgaaatgtttcgcatgaaatctgctgctgcaaaagcagatgttttctatgttatgtccggtatgtggaaaacaacagctgaaagatttttcctgtggattggaggctttcacccctcggagcttctaaaggttcttggtcccctgattgaacccctgacggagcaacagcgtttgaatatctataaccttggacaatcatgtcagcaagcagaagat

SEQ ID NO: 150816 - DNA, 247 bp, Glycine max
ctcgagccgaatcggctcgagcggctcgagcaaaccccgacttctaggaagggatgcatttattagataaaaggtcaacacaggctctgcctgttcgctttgatgattcatgataactcgtcggatcgcacggcctttgtgccggcgacgcatcattcaaatttctgccctatcaactttcgatggtaggacagtggcctaccatggtggtgacgggtgacggagaattagggttcgattccggaga

SEQ ID NO: 150817 - DNA, 258 bp, Glycine max
aaagaatgttagacagcagctatatgatagtattacttcaaaagacaaaagtggaaaggattggtcattcatacttaagcagataggcatgttctcattcacgggcttgaacacgaaccagagtgacaacatgacaaacaagtggcacgtatacatgacaaaggatggaaggatttccctggcaggattgtcattggctaaatgtgaataccttgcagatgctattattgactcatatcataatgtcagctgaaactc

SEQ ID NO: 150818 - DNA, 257 bp, Glycine max
attctttcgcaccttcgaaaatcaattttctgtcttctctgcctctccttcctctatcactcgtcccccatggctactaccaagcaaaccgctcgcaaatccaccggtggaaaggctcctaggaagcaactcgccaccaaggctgcaaggaaatctgcaccgacaaccggtggagtcaagaagcctcatcgctatcgccctggaactgttgctcttcgtgagatccgaaaataccaaaagagcacagagcttctgat

SEQ ID NO: 150819 - DNA, 257 bp, Glycine max
ctcgttttttctcagaaccttctgaggttaaagcaaaaaacaaagagagagagagagagaaaatgatgaagccatcgatgctcagatctctccactccgccgccacccgcggcgcctctcatctcttccgccgtgggtacgcctccgagccggtgccggagcgcaaggtagccgttctcggcgccgccggcgggatcgggcagcctctctcccttctcatgaagctcaatcccctcgtttcgagcctctccctttac

SEQ ID NO: 150820 - DNA, 258 bp, Glycine max
catgactgctactttgtttctcacggtgggactttgggtatttggagggcttcttaatgttgatgctgtatctgctgcaattcttggattatctgtacttcttgtcactggggttgtaacatggaaggagtgcttagctgaaggagttgcctgggataccctcacatggtttgctgctctcatagcaatggctgggtatttgaacaaatatggtctcatttcttggttcagtcaaactgtagtcaagtttgtcggtgg

SEQ ID NO: 150821 - DNA, 258 bp, Glycine max
ggtggatacctaggcacccagagacgaggaagggcgtagtaagcgacgaaatgcttcggggagttgaaaataagcgtagatccggggattcccgatataggtcaacctttcgaactgctgctgaatccacgggcaggcaagagacaacctggtgaactgaaacatcttagtagccagaggaaaagaaagcaaaagcgattcccgtagtagcggcgagcgaaatgggagcagcctaaaccgtgaaaacggggttgtggg

SEQ ID NO: 150822 - DNA, 250 bp, Glycine max
tttcaaccgacgtgctccgtagctttgccaagtcccagattgattacatccttggaaataacccaaggaaaatgagttatgtcgtaggttttggtaatcattacccaaaacacgtccaccatagaggagcatctgtaccgaagaacaagatcaagtatagctgtaaaggtggatggaaatggagggacacttctaagccaaacccaaatacaattgttggtgccatggttgccggtcctgacaagcatga

SEQ ID NO: 150823 - DNA, 245 bp, Glycine max
tcagctttcaagagacaaactgctttgaaaaatgggatccaaggttgttgcatccgttgcccttctcctctccatcaacattcttttcatttccatggttagctccagcagccattacgatccacagccccaaccttctcacgtcactgctcttattacacgacctagttgtccggatctgagtatttgcctcaatattttaggcgggtctctaggaaccgtggatgattgttgtgccccatcgg

SEQ ID NO: 150824 - DNA, 237 bp, Glycine max
ctcgagccgaatcggctcgaggtgaaagcgtggcctatcgatcctttagtccttcggaatttgaagctagaggtgtcagaaaagttaccacagggataactggcttgtggcagccaagcgttcatagcgacgttgctttttgatccttcgatgtcggctcttcctatcattgtgaagcagaattcaccaagtgttggattgttcacccaccaatagggaacgtgagctgggtttaga

SEQ ID NO: 150825 - DNA, 235 bp, Glycine max
cacaggctctgcctgttgctttgatgattcatgataactcgtcggatcgcacggcctttgtgccggcgacgcatcattcaaatttctgccctatcaactttcgatggtaggatagtggcctaccatggtggtgacgggtgacggagaattagggttcgattccggagagggagcctgagaaacggctaccacatccaaggaaggcagcaggcgcgcaaattacccaatcctgaca

SEQ ID NO: 150826 - DNA, 234 bp, Glycine max
gcccttcctacttcaacaacaataataacagcgatgctgccaattttgaatgcaacatttgctttgaattagcgcaagacccgataattactttgtgtggtcatcttttctgctggccttgtctttacaaatggcttcactttcactcacaatcacgagaatgcccggtgtgcaaggctctcgtggaggaggagaaattggttcccttgtatgggagaggaaagtcgtccactg

SEQ ID NO: 150827 - DNA, 230 bp, Glycine max
gttactgatgctatgctgcaagagacttttgctggccgatattcatctattaagggagcaaaagttgtcattgattctaataccggccgctcaaaaggctatggttttgtgaggtttggtgatgaaaatgcgagaacgagggcaatgactgcaatgaatggtgtttattgttctagtaggcccatgcgaataggtgttgcaactcccaagaacacttatggctaccaaca

SEQ ID NO: 150828 - DNA, 228 bp, Glycine max
cagaaccctcgatcactcccacgcgctcctatatcctctccttcaccgtcgctctctccaacgatcacaacaacatcgtcatcccatggcaaacgccgcatctggtatggcagtccatgatgactgcaagttaaggtttttggagctgaagacaaagaggacacaccgtttcatagtttttaagattgaggagcagcagaagcaggtcattgtggagaagcttggtga

SEQ ID NO: 150829 - DNA, 222 bp, Glycine max
ctcgagccgttattattgagtattgagcatggaggcgccatctctcaccaaacccaacgacccaacaaaaccttccaacacttccagcacccttagtctggagggggggccgggcgaagcgcgcccactccgaaaaatgtttgcggtggcgtccatcgccgccggcatacagttcgggtgggctctgcagctgtctctcttaaccccctacgttcagctctt

SEQ ID NO: 150830 - DNA, 223 bp, Glycine max
caaccatcatcatggccacctctgctattcagcaatcagcattcgcaggtcaaactgctctgaagcagctcaatgagttggtccgcaagaccggtggcgccggcaaaggtcgcaccaacatgcgccgtaccgtcaagagtgctcctcagagcatttggtatggccctgatcgtcccaagtacctgggtccattctcagagcagattccgtcatacctgaccgg

SEQ ID NO: 150831 - DNA, 223 bp, Glycine max
ctcgagccgaaaggattctacccgccgctcgatgggaattgcgcttcaaggcgtctcacagggctaatccgcctcacgagggtcaccaacggcacgtgcctttggggggccgaggccccctactgctggtcggcaaacggacggcgggcgcacgcgtcgcttctagcccggattctgacttagaggcgttcagtcataatccaacgcacggtagcttcgcgcc

SEQ ID NO: 150832 - DNA, 232 bp, Glycine max
ggggatgttaagattgcagacttcggagtcagcaaactcatgtgccgctcgctcgaagcgtgtaactcttatgtcggcacgtgcgcgtacatgagtcccgaccggttcgacccggaagcgtatggcgggaactataacggttttgctgcggatatttggagtttgggtttgaccctatttgaactctatgtgggtcacttcccatttcttcaagcgggtcagagacccgact

SEQ ID NO: 150833 - DNA, 232 bp, Glycine max
ttcctggattgattgtgaagatggctgagtcggacaacgactcgggaggggcgcagaacgcgggaaacagtggaaacttgagcgagttgtcgcctcgggaacaggaccggtttctccccatagcgaacgtgagcaggatcatgaagaaggccttgccggcgaacgcgaagatctcgaaggacgcgaaggagacggtgcaggaatgcgtgttcggagttcatcagcttcataa

SEQ ID NO: 150834 - DNA, 231 bp, Glycine max
ggacagtggaggacactacaacccccgcaccgtcgaagaggttttccgggacttcaagggccgccgggctggcatgatcaaagccctcaccactgatgttgaggaattttaccagcagtgtgatcctgaaaaggagaatttatgtctgtatggattccccactgaacaatgggaagtaaatttgcctgctgaagaagttcccccagaacttcccgagccagcactgggcat

SEQ ID NO: 150835 - DNA, 227 bp, Glycine max
aatccgccttatggaaggagaacacgtgggacctttcaatcttggaaatcccggagaatttaccatgcttgaacttgccaaggtggttcaagaaacaatagaccctgatgctaggatagagtacaggcccaacacagaggatgacccgcacaagagaaagcctgatataagtagggctaaggatcaacttggctgggaacccaaggttgacctgcgcaagggcctcc

SEQ ID NO: 150836 - DNA, 225 bp, Glycine max
gcaaaggattctacccgccgctcgatgggaattgcgcttcaaggcgtctcgtagggctaatccgcctcacgagggtcaccaacggcacgtgcctttggggggccgaggccccctactgctggtcggcaaacggacggcgggcgcacgcgtcgcttctagcccggattctgacttagaggcgttcagtcataatccaacgcacggtagcttcgcgccacaggcttt

SEQ ID NO: 150837 - DNA, 223 bp, Glycine max
ctcagagactaaaccataccaaaaaaaacaacatgtgttccgcagagaaggacgggatcatgctcttcggcgtgcgcctctccgtcgtggataaccaccccacctccttcagaaagagcgctagcatgaccaacctttctcagtacgagtctccaccaccgcacgatcccaacgcagggtatgcctcagacgacgtcgttcacccctcccgtcacacccgcga

SEQ ID NO: 150838 - DNA, 221 bp, Glycine max
gtggaaagtgggaaaacgttttttgctgatgctgctgttattgctgtcccacttggggtgctcaaggcaaagaaaatattgtttaagccaaagcttccagactggaaggaagctgccattgcggatcttgggattggacttgagaataaaatcattttacactttgaaaatgtgttttggcctaatgtggagttcttgggagtagttgcagatacatctta

SEQ ID NO: 150839 - DNA, 227 bp, Glycine max
tgcagctctactagctagggtttcgcaagtgcgatcgaagaagaacgatggcgatggctgctgctctgcgtcgcgaaggaaggcgtttgacccaaccaatcaacgccctccgttcctctctcatctccgaagaccaatcccctcatggcgcgcgcttcatttccactcaagtggtgagaaaccgaatgaagagtgtgaggaatatccagaagatcaccaaggccatg

SEQ ID NO: 150840 - DNA, 235 bp, Glycine max
attaagctttcaagagacaaactgctttgaaaaatgggatccaaggttgttgcatccgttgcccttctcctctccatcaacattcttttcatttccatggttagctccagcagccactacgatccacagccccaaccttctcacgtcactgctcttattacacgacctagttgtccggatctgagtatttgcctcaatattttaggcgggtctctaggaaccgtggatgattgtt

SEQ ID NO: 150841 - DNA, 230 bp, Glycine max
aacgaagctggtgcacgttttgccaaatggcgtgcagtgctgaagattggtcccaacgagccatctgagctgtctatccatgagaacgcctatggcttggctagatacgccgtcatatgccaggagaatggcctggttcccattgttgagcctgagatccttgttgatggacctcatgacattcacaagtgtgctgccgtcaccgagcgtgtccttgcagcatgctacaa

SEQ ID NO: 150842 - DNA, 226 bp, Glycine max
aatgatctttaccttttacaaggctcatggttattcagttgggtcatctcttgtggaggtagacaagcttagccttgcaactacacttcttgaaaaggccaaggctaaaggggtttctttgttgcttccaactgatgttgtcatagcagacaagtttgctgctgatgctaacagcaagactgtgccggcatcaagcatcccagatgggtggatggggttggatatt

SEQ ID NO: 150843 - DNA, 233 bp, Glycine max
ctcgagcgattcggctcaggggtaattatctagattcttcacgctaaagtagaagcagctcacagttccagaaccccttctggaatttcaaaaactagaccttcatctgttcctcccaacttatctattctgtcatatagtgaagcaagtgatttctcaaatcttcccacaccgaggtccgagggtgaaatcttgtcttccccaaatcttaaggcctttacctttaacaagct

SEQ ID NO: 150844 - DNA, 230 bp, Glycine max
ctcatttatagtttactattgaaagatgggtttgaaaatggcaatactgatcctaggcctgctggccatgttccttttggtctcctcagaggtggcatccacgaattcaaaagaggtgacaaatggagttgaagatgccaaatatcctggtggaggctatggtgggggttacccaggcaatggcggtggtggctatcctggccgtggtggtggctaccctggtcgtggtg

SEQ ID NO: 150845 - DNA, 232 bp, Glycine max
ccagtttcaccgcacgaatatcttgttgtttggagcgatccgagaaaaactctgtaaacatgttggtttaccaggacctccttacaggtgatgagcttctctctgactccttccgttacaaggaaattgagaatggaatgctgtgggaagttgaggggaagtgggttgttaaaggagcagttgatgtagacattggtgcaaacccttctgctgagggtggaggagaagatga

SEQ ID NO: 150846 - DNA, 228 bp, Glycine max
gtttgatggacgccgcctccgagctgagcagactccagatgagttggaaatggaggacggggacgagattgatgccatgcttcaccagacaggaggttctgttgtctgaaggatgtgattacctttgctcctcattataagtaggaattagttaacttagagctatgtatggcatacgatacatattttattatctgctattatatacagcttttgccggtggatttt

SEQ ID NO: 150847 - DNA, 227 bp, Glycine max
aacgtgcagaacaaaaactcttcgtactttgtcgagtggattcccaacaatgtcaagtcgagtgtgtgtgacattgctcctagagggctctccatggcgtccacattcattggaaactcgacctcgattcaggagatgttcaggagggtgagcgagcagttcacggccatgattaggaggaaggctttcttgcattggtacactggtgaaggcatggacgagatgga

SEQ ID NO: 150848 - DNA, 237 bp, Glycine max
gatcgaagtttcacatcagccttatccagtttagggtttcggttccttaccctacctttgacgtatcgaaaccttaaatttgggattaggtctgagcaatctggttggtagaacctttggtcttagagagtcaagttttatgtctggattagacgatcaaattcctactgccttcgatccttttgctgatgcaaatgctgatgactcgggtgctgggtcaaaggagtatgtgcatat

SEQ ID NO: 150849 - DNA, 228 bp, Glycine max
gaccaacatggtgatggttttcggagagatcacaaccaaggccaacgtggactatgagaagattgtgcgtgacacatgcaggaacattggttttgtctctgatgatgttggtcttgatgctgacaactgcaaggtcctcgtcaacattgagcaacagagtcctgatattgctcaaggtgtgcacggccacctcacaaagtggcctgaggagattggtgctggtgacca

SEQ ID NO: 150850 - DNA, 226 bp, Glycine max
agctcacgcaggtctgcgccagcatcctcaacctcctcgactccaacctcgtaccctccgtcttcgccagcgagtccaaggtcttctacttgaagatgaagggcgattaccaccgctatctcgcagagtttaaggttggggatgagagaaaaaccgctgctgaggataccatgttgtcttacaaggctgcccaggacattgcttctggggatcttccccctactca

SEQ ID NO: 150851 - DNA, 225 bp, Glycine max
attcttcatccatagacatggccaccgtcacttctgcagccgttgctattccctcattcactggcctcaaggcaagcgcaggcaaagtgagtgccgcagttaaagtctcagctccccaagccacaaggttgggcatcaaggcttcgctgaaagacgttggagtcgctgttgtggccactgccgcgagtgcagtgctggctagcaacgccatggccattgaagtgt

SEQ ID NO: 150852 - DNA, 228 bp, Glycine max
gtccgcacctccgcccagatccaccgtcaaggcggcatgtccgtcctcgtcaccggcgcaggcgattcgtcggttcccacgtctccctagccttaaaacgacgcggcaaaggcgtcgacgaattcgataactgctgccacttatacgatcgcgtcgctctgataagggcgcaagtcgctactggccacgcatgctatcttcatcgtcgaaggggatatcaacgacgcg

SEQ ID NO: 150853 - DNA, 235 bp, Glycine max
ggcgagctccactcaaccaccacacctctcctcgttcacgctacccctttctgctcttcttctacctttcaagttttaaaagtataaagatggcagagacattcctatttacctcagagtcggtgaacgagggacaccctgacaagctctgcgaccaaatctccgatgctgtcctcgacgcttgcctcgagcaggacccagacagcaaagttgcctgcgaaacatgcaccaaaac

SEQ ID NO: 150854 - DNA, 226 bp, Glycine max
tgctttgaaaaatgggatccaaggttgttgcatccgttgcccttctcctctccatcaacattcttttcatttccatggttagctccagcagccactacgatccacagccccaaccttctcacgtcactgctcttattacacgacctagttgtccggatctgagtatttgcctcaatattttaggcgggtctctaggaaccgtggatgattgttgtgccctcatcgg

SEQ ID NO: 150855 - DNA, 224 bp, Glycine max
cagaattctctaaaagagatctttttctgctctttgaagaaagaagggtcttgccttgattttggagatgtctctgctctcagatctcatcaaccttaacctctccgataccaccgagaaggtgatcgcagagtacatatggatcggtggatcaggaatggacctgaggagcaaagcaaggactctcccaggaccagttagcgacccttcagagcttcccaagt

SEQ ID NO: 150856 - DNA, 228 bp, Glycine max
gtccgaaagagaaaatggggcaaatgggtatccgaaataagactacccaacagccgtcagaggatttggttgggatcctacgacacccccgagaaggccgcgcgtgccttcgacgcggcaatgttctgcttacgtggccgcaacgccaagtttaatttccccgacaacccacccgctatcgccggcggaacgtccatgacgccgtcgcagattcagatcgccgccgca

SEQ ID NO: 150857 - DNA, 224 bp, Glycine max
ccaaggttgataggagtggtgcctacattgtgaggcaagctgcaaagagcattgttgcaaatggacttgctaggagggcaattgtgcaagtttcctatgccattggtgtgcctgagcccttgtctgtgtttgttgacacttatggcactgggaagatccctgacaaggaaatcctcagcattgtgaaggagagttttgacttcaggcctggcatgatctccatc

SEQ ID NO: 150858 - DNA, 218 bp, Glycine max
acttgagcgattcggctcactagattaatgaaaacatcctaggcaaatgctttcgacgttgttcgtctttcataaatccaagaatttcacctctgactatgaaatacgaatccccccgactgtacctgttaatcattactccgatcccgatggccaacacaataggatcagaatcctgtggtgttatcccatgctaatgtatacagagcgtaggcttg

SEQ ID NO: 150859 - DNA, 232 bp, Glycine max
cttcttcgtcgttatcttcgtcttttgttatttgtgtgtttgttttttctctcacctgaaaatgtcttgctgcggtggtaactgtggttgcggaagcgcctgcaagtgcggcaacggctgcggaggctgcaagatgtacccagacttgagctacaccgagtcaaccaccaccgagaccttggtcatgggagtggcaccagttaaggctcaattcgagagtgctgaaatgggt

SEQ ID NO: 150860 - DNA, 219 bp, Glycine max
ctcgagccgctcgtgatcacattgtcactgattgggaccaacctcgcattcttccccgcgacattgccaagattatgaaaaatttgctcctcatttgagccaagtttgtataatgtggtgcagaacaatggaggaaacagttctatatgtgtttcatgaacctcctttcttttcctttttggagaactcagttaaggttgtatttggaaaactctatgc

SEQ ID NO: 150861 - DNA, 223 bp, Glycine max
ctatcctccccgtccccgacaacaagatctccctaccagccttcttgttcgtaaccttcgtcatgactgtaggcctgaggatcttcgcagaccttttggtcaatttggtcctctcaaggacatttaccttcctaaggattactacactggagaaccccgtggctttggttttgtccaatttgtggatcctgcggatgctgctgatgccaaatatcatatggat

SEQ ID NO: 150862 - DNA, 224 bp, Glycine max
gagtggcacctgttaaggctcaatttgagggtgctgaaatgggtgtgcccgctgagaacgatggctgcaaatgtggaccaaactgctcctgcaacccctgcacttgcaagtgaggtgttgggagagcaagcttcaagcagagatagcccttaattaggaataatgataaactattaatgtgtagctaaaaacttatgtattatgtctgtgatggttttcgtgca

SEQ ID NO: 150863 - DNA, 226 bp, Glycine max
gagagcagcaattggaggacgatcgatgggcactacagtgtgcgcagttgctgagcctgacagacctctatggttcccaggcagcacccctcctccatggcttgatggcactctacctggagacttcggctttgaccctcttggtcttggatctgacccggagagtctgagatggaatgttcaggcagagctagtgcactgcagatgggcaatgttgggtgctgct

SEQ ID NO: 150864 - DNA, 229 bp, Glycine max
tcttgttactggaatcaaggttgttgacctgcttgcaccatatcaaagaggaggaaagattgggttgtttggtggtgctggtgtaggaaaaactgtgcttattatggaacttattaacaatgttgcaaaagctcatggtggtttctctgtgtttgctggtgttggagagcgaacccgagagggtaatgacttgtacagagaaatgattgagagtggtgtcattaagctt

SEQ ID NO: 150865 - DNA, 229 bp, Glycine max
cgcttattctctcgcattccgtggagatctagtgcttctgctgcaagacctcgctgaaaattagggtttcgattcggaggtagacgaagatgttcggaagggctccgaagaaaagcgacagcaccaggtactacgaaatcctcggcgtttccaagaacgcttcgccggatgacttaaagaaggcttacaagaaagccgccattaagaaccatcctgacaaaggcgggga

SEQ ID NO: 150866 - DNA, 226 bp, Glycine max
ctactgagtttccacactgcataccttaggtcttccgaattcgaagttaatttgcaagatggctaaggaaaaggctcagatcaacattgtggtggttggtcatgtggaccctgaggaggcaaccaccattaacgagctgaagaagcctgttgtggagaaagaagctccagggcatgccatatgagggcatgcacgtacggcctcggaggggaaccagaaaattatg

SEQ ID NO: 150867 - DNA, 225 bp, Glycine max
ctccacttgtttgcccttcatggcggcatctcaggcaagccttctccttcaaaagcagctcaaagatctttgcaaaaaccccgtcgacggcttctctgccggtttggtcgatgaaaccaacattttcgaatggagtgtcaccataattggaccgcccgatactctttacgaggggggatttttcaatgctattatgagtttcccatccaattacccaaatagtcc

SEQ ID NO: 150868 - DNA, 223 bp, Glycine max
gagatcactttgagcaatggtgaaggctgtggcagttcttggcagcagcgagggtgtcactggaactattttcttcactcaggagggaaatggtccaaccaccgtaactggatctcttgctggtcttaagcctggtctccatggcttccatgtccatgccttgggggacactaccaatggttgcctgtcaactggagcgcatttcaatcctaataacaacgag

SEQ ID NO: 150869 - DNA, 221 bp, Glycine max
atccagtggccttgaagctacttggcaaggcaggggagatgaacactctggaggctcctgaagatgagagcattaaaactctctatgttggtggactagatgctagggtcactgagcaggatttgcgggatcacttctatgcgcacggagaaatcgaatccatcaaaatggttctccaacgggcttgtgcttttggaacatatacaaccagagaaggtgca

SEQ ID NO: 150870 - DNA, 223 bp, Glycine max
atgatcaaggaatggtgaggcagcatgtcagcactacccaactgagtggtgggagtgcaagcagtgtggcattgccgggaccagggaagactccggttttggctctccccgccccagatggatctgtgcagccggttaatcaggatccatttgctgcatcgctgagtgttccaccaccatcctatgtgcaaatggctgatatggagaagaagcagcacttgct

SEQ ID NO: 150871 - DNA, 227 bp, Glycine max
ctcgagccgcgggcgtcgaacagtcaactcagaactggtacggacaaggggaatccgactgtttaattaaaacaaagcattgcgatggtccctgcggatgttgacgcaatgtgatttctgcccagtgctctgaatgtcaaagtgaagaaattcaaccaagcgcgggtaaacggcgggagtaactatgactctcttaaggtagccaaatgcctcgtcatctaattagt

SEQ ID NO: 150872 - DNA, 229 bp, Glycine max
ctttcaagagacaaactgctttgaaaaatgggatccaaggttgttgcatccgttgcccttctcctctccatcaacattcttttcatttccatggttagcgccagtagccactacgatccacagccccaaccttctcacgtcactgctcttattacacgacctagttgtccggatctgagtatttgcctcaatattttaggcgggtctctaggcaccgtggctgattgtt

SEQ ID NO: 150873 - DNA, 222 bp, Glycine max
gatcgagataactagaaacagtgtgatgaaaaggaaggtccttgtattctgcggtgctacaattttggtagcatgggaatgccatgcgtaggatatgttccctctccgaatgaacactggctatggtgcccggactccggaggtgaaatgcgcaagtgggaggcttgctgtcgaagcacacaacatctttggctgtgagagcagtcctgaagagtgcgttga

SEQ ID NO: 150874 - DNA, 222 bp, Glycine max
atgggggcttaatcctgaaccgtccaactctagccagaaggtttatcccagctgaaggaaccccagagtatgatgagatggtgaagaatcctcaaaaggcttatctgagaacaatcacacccaagtttgagacccttattgatctttcagtgatagagatattgtcaaggcatgcttctgatgagatataccttggagagagggagactccaaattggacta

SEQ ID NO: 150875 - DNA, 223 bp, Glycine max
gaccggaaaaacaataactttagaagttgaaagttctgagaccatcgataacgtgaaggcaaagatacaggacaaagaggggattccaccagaccagcagaggcttatctttgctgggaagcagctggaagatggtcgtactcttgctgattataatatccagaaggagtccactctgcatttggtgttgaggcttcgtggaggtatgcagatatttgtgaag

SEQ ID NO: 150876 - DNA, 225 bp, Glycine max
gggcaatgcaccggcactgcccgagactcttaagaattacaacaagctggtgtctcttggcttcaagattatattcttgtcaggaagaacactggacaaacaggccgtaacagaagcaaacttaaagaaggctggctaccacacatgggaaaaatgaattctcaaggatccacaagatccttccactccaaatgcagtttcatacaaaacagcagcgagagagaa

SEQ ID NO: 150877 - DNA, 226 bp, Glycine max
ggctgctaaaagtcctttcttctacaaggtagatgtctattttttattggttagatttgaaaatttctgctaaaaatgtgtttgcttagttgtgtttattttgcagcttttttcaaatggaatgagggagtcggagcagaggcatgttgccctaagaattaatgcttctgaggaagctgctcttatggagcttctgaatttcatgtatagtaataccttgagcatt

SEQ ID NO: 150878 - DNA, 221 bp, Glycine max
gcaaaggattctacccgccgctcgatgggaattgcgcttcaaggcgtctcgtagggctaatccgcctcacgagggtcaccaacggcacgtgcctttggggggccgaggccccctactgctggtcggcaaacggacggcgggcgcacgcgtcgcttctagcccggattctgacttagaggcgttcagtcataatccaacgcacggtagcttcgcgccactgg

SEQ ID NO: 150879 - DNA, 219 bp, Glycine max
atggagtctgggatgtactgtgttggagatgttaacgggccaaattccatactctcacttagaatgtatgcaggcattgtttagaattggaagaggtgagcctcctcatgtgcctgagtctcttgcaagagaggcacgggagtttagtctggagtgtctaaaagttgatccagatgaacgccccagtgctgctcaactcttaaaccataccgttgtcca

SEQ ID NO: 150880 - DNA, 219 bp, Glycine max
cagagactgcagcaggggatgaaggtcctattgtgactgaagctgacatacagcatattgtctcatcctggactggtattcctgttgagaaagtctcaacagatgaatctgatcgcctcctgaagatggaagagactttacataagcgagtcattggtcaggatgcagcagttaaagccattagtcgggctatccgtcgagctcgggttggactaaaaa

SEQ ID NO: 150881 - DNA, 222 bp, Glycine max
gtgaaaagtgggggtgctccagttttggataaacccaaacggagaacaccagtatcttatgggggaaggtcgagtagtgtgccagataaatcctcgcagcgttcctcccgcagcatgtctgtcagtcctgatcgtgttcgagtgaggggccggtctccagcctttaatgccctagcagctaattttgagaaccctaatgctaggaacctttcaaccccgcct

SEQ ID NO: 150882 - DNA, 234 bp, Glycine max
tgaattttcaggttatatgtgaccatttgggcttgggagtgaagactggccttccatacatctggcacagcaaagcaagcaacccttttgtcaatctcaaaaaggagtacaagggcatcttctggcaagaagaaatcattccattcttccaaagtgccactctttcaaaagagtgcacgtctgtccaaaaatgttacattgaactctccaagcaagtcaaggagaagcttgggg

SEQ ID NO: 150883 - DNA, 230 bp, Glycine max
ttctcgagccgattcggctcgagccttatatggaaatgaaagaatcgggagtaattaatgaagccaatattgcagaatcaaaagtagctctagtatatggtcaaatgaatgaaccgcccggagctcgtatgagagttggtttaactgccctgactatggcggaatattttcgagatgtcaatgaacaagatgtacttcgatttatcgacaatatctttcgcttcgtccaa

SEQ ID NO: 150884 - DNA, 219 bp, Glycine max
ttctattccatcatcaatggagaacaccgagggatccggatctgcgacgaacggggtgctggctccgccgcgcaaggtggcattgataaccggaattaccggacaagacggttcgtacctgacggaattcctcctggactaggggtacgaggtgcacggcctgatctgccgctcgtcgaagtaaggaacgcagcgcatcgaccacatatacgtggatcc

SEQ ID NO: 150885 - DNA, 223 bp, Glycine max
ggagaattagggttcgattccggagagggagcctgagaaacggctaccacatccaaggaaggcagcaggcgcgcaaattacccaatcctgacacggggaggtagtgacaataaataacaataccgggctcattgagtctggtaattggaatgagtacaatctaaatcccttaacgaggatccattggagggcaagtctggtgccagcagccgcggtaattcca

SEQ ID NO: 150886 - DNA, 224 bp, Glycine max
caatttctcattctccctttcctctccgaaccctcgatcactctcacccgctcctatattcgctcctccaccgtcgctctctcgaacaaccacaacaccatcttcatcacatggcaaacgcagcatctggtatggcagtccatgatgactgcaagttgaggtttttggagctgaaggcaaaaaggacacaccgtttcatagtttttaagattgaggagcagcag

SEQ ID NO: 150887 - DNA, 226 bp, Glycine max
cgtttgatatccaaaaactgctcggcaacagtcggacaagtgggaaatgttggagtaaaccagaaaaatttaggtagagccggatctaaatgttggctaggtaagcgtcctgtagtaagaggagtagttatgaaccccgtagaccatccgcatgggggtggtgaagggagggccccaattggtagaaaaaaacccgcaactccttagggttttcctgcacttggaa

SEQ ID NO: 150888 - DNA, 243 bp, Glycine max
cgcacgcacgcgtagtacggcattcggctcgagcttcttcgtcgttatcttcttcttttgttgtttgtgtgtttgttttttctctcacctgaaaatgtcttgctgcggtggtaactgtggttgcggaagcgcctgcaagtgcggcaacggctgcggaggctgcaagatgtacccagacttgagctacaccgagtcaaccaccaccgagaccttggtcatgggagtggcaccagttaaggctca

SEQ ID NO: 150889 - DNA, 204 bp, Glycine max
ggctcgaggagaaatcacgaccaaggccaaagttgactacgagaagaccgtgcgtgacacctgcaggaccatcggcttcgtctcaaatgatgtgggactggatgccgacaactgcaaggtcctcgtcaacattgagcagcagagccctgatattgctcagggtgtacacggccaccttaccaaaaaacctgaagaaattggtgc

SEQ ID NO: 150890 - DNA, 218 bp, Glycine max
cgactataatgggtccccctgatagcccttatgctgggggtgtttttctagttactattcattttcctccggattatccattcaagccacccaaggttgcatttaagactaaagttttccacccaaatatcaacagcaatggtagtatttgtcttgatatcttaaaggagcagtggagccccgccttgacaatatctaaggttttgctctccatttgc

SEQ ID NO: 150891 - DNA, 200 bp, Glycine max
gcttcggggagttgaaaataagcgtagatccggggattcccgatataggtcaacctttcgaactgctgatgaatccacgggcaggcaagagacaacctggtgaactgaaacatcttagtaaccagaggaaaagaaagcaaaagcgattcccgtagtagcggcgagcgacatgggagcagcctagcccgtgaaaacagggt

SEQ ID NO: 150892 - DNA, 215 bp, Glycine max
attttatctactaatagcggacaaattggagtattaccaaatcatgcgcctattgccacagccgtagatataggtattttgagaatacgtcttcttaaagaccaatggttaacgatggctctgatgggcggttttgctagaataaacaataatgagatcactgttttagtaaatgatgcggaaaagggtagtgacattgatccacaagaagcaca

SEQ ID NO: 150893 - DNA, 210 bp, Glycine max
cgcacatcgctattctcttcattccatggctttgcccaaccagcaaaccgtggattaccctagtttcaaactcgttatcgtcggcgatggtggcacaggaaagacaacctttgtgaaaaggcatctcaccggagaattcgagaagaaatatgagccaaccatcggtgtggaggttcacccattggattttgtcacaaactgtggaaagat

SEQ ID NO: 150894 - DNA, 217 bp, Glycine max
gtcttgctgcctgtgaaggggcaagggtttctggtgcatctagaatcatcggggttgatttacttcccaatcgatttgaacaagccaaaaaatttggggtcactgattttgtaaacccgaaagatcacaacaaaccagtccaagaggtcattgctgaaatgactaatggaggagtagatcgtgctattgaatgcactggaagcatccaagcttcaat

SEQ ID NO: 150895 - DNA, 223 bp, Glycine max
tttctaaattctccacccctccgttccactgcttcgtcgcaacacgttacaataatggcttcgaagaattctcaacaagacacgcgcttagcgagaatcgcctctgcaatccgagtcatccccgactttcctaagccaggaattttgtttcaggacataaccacgctgcttcttgatacaaaggctttcaaagacaccattgacttgtttgttgagaggtaca

SEQ ID NO: 150896 - DNA, 227 bp, Glycine max
gcgggtgcctcttcagcctcatcttcaagctcatcctaaccgtgatcatcatcattggcatcgccgtgttccttttctggctcatagtccgtcccaacgtggtgaaattccacgtcaccgaggccaccctgacgcagttcaactacacccccaacaacacgctccactacgacctcgccctcaacatcacggtccgaaaccccaacaagaggctcggaatctactac

SEQ ID NO: 150897 - DNA, 266 bp, Glycine max
atctgcactggcaacactttgtggccaagcttttggagcaggaaaaattcaatctacttgtatttatgttcaaagatcatggattatacttactgccacttgtataatcctcttgcctatttatgtatatgccactccaatcttaaagttgcttggccaagatgaaggaatagctgaagttgctggaagatattctatacaagtaattccctacatgttttcttttgctgtagcttttcccatccagagatttcttcaggcccaga

SEQ ID NO: 150898 - DNA, 266 bp, Glycine max
tgttcaccaattaagctttcaagagacaaactgctttgaaaaatgggatccaaggttgttgcatccgttgcccttctcctctccatcaacattcttttcatttccatggttagctccagcagccactacgatccacagccccaaccttctcacgtcactgctcttattacacgacctagttgtccggatctgagtatttgcctcaatattttaggcgggtctctaggaaccgtggatgattgttgtgccctcatcggtggtcttgg

SEQ ID NO: 150899 - DNA, 265 bp, Glycine max
cagtagtgtcatttacgcttctcttctctgcagcaactatgcctaaccctaaggtcttcttcgacatgaccatcggcggtcaatctgctggccgcatcgtgatggagctctacgccgacgtcactccccgcaccgccgagaacttccgcgcgctttgcaccggcgagaagggcgtagggcggagcggcaagcccctccactacaagggctcgtccttccaccgcgtgatcccgagtttcatgtgtcagggtggcgacttcaccgc

SEQ ID NO: 150900 - DNA, 265 bp, Glycine max
cctgaatgatgcacccacactctgtaaataccttgaatcattttataccttgcgtaacctgtggcatccaccataaatacattggcaggtgctctttacaaagtattttgtgcatcccctgatctggcaaggaaggaaatgcgccaagcttgcttcgattatctcagccttggaggcctattctcggaaggaccagtctctttactttctggattaaaccctcgtcccttgagcttggttctccatttctttgctgttgcaatat

SEQ ID NO: 150901 - DNA, 264 bp, Glycine max
cttcaccaacgtgtcatcaccatcagccaaagccaaactgagactgttgtttgaggtagctcctttggggttcttgattgaaaaagctggaggttacagcagtgatggtcatcagtctgtgctagacaaagtcatcagtaacattgatgacagaactcaagttgcttatgggtccaagaatgagataatccggtttgaagaaaccctgtatggtaaatccaggctcaagggtggtgtagctgttggagcagctgcttaatctgt

SEQ ID NO: 150902 - DNA, 263 bp, Glycine max
ccagaagaaaggttgattggctgactgacaagatgcgaagtcgagaccacacagtctcagcaacccatggagacatggaccagaataccagggacattattatgcgtgaattccgttctgggtcatcccgtgttttgataactactgatcttttggcccgtggtattgatgtccagcaagtgtctttagttataaattatgatctcccaacgcagcctgagaactatctccatcgtattggacgtagtggaaggtttggtagg

SEQ ID NO: 150903 - DNA, 256 bp, Glycine max
gagtatcaacaaatggcaaccactgtgatgaccagtctcccccaattcagtggtcttagaccccaattctcagctgcccctgtgaagaacttggttgctgtgcaacccatgagtcgcaaggggaagggtgcattgggagctcgatgtgactacattggttcatccactaatctgattatggtggcttctacaaccctgatgctgtttgctggaaggtttggattggctccatcagcaaacaggaaagccactgcag

SEQ ID NO: 150904 - DNA, 261 bp, Glycine max
aagctaaggagatcgtgtcgtccaattccgtcgtcgttttcagcaaaacctattgccctttctgcgtcgatgtgaagaagctcttcggtgacctcggtgccaattacaaggccatcgaactcgacactgaatccgatggaaaagagctccaagcagcattagttgagtggacggaccagcgaaccgtgcctaatgtgtttattggtggaaaccacattggtggctgtgactcaacaactgccctgcacactcaggggaagc

SEQ ID NO: 150905 - DNA, 261 bp, Glycine max
cggagcaaacagagtattgctcaggcagtgcttgcagtttcctcccctggagatgaggttattattccagctccattctgggttagttacccagaaatggcaaggttggctgatgcaacacctgtgattcttccaaccttaatatctgataatttccttttggatcccaaactcctcgaatccaaaattactgaaagatcaagactgcttattctttgagctccatctaacccaacgggatctgtctaccccaaagaatta

SEQ ID NO: 150906 - DNA, 264 bp, Glycine max
attcattcagttctatacaaaatcctcaaaaactcttcctctctgccatgaccatggaatacagaaccttagaactcaacatcatatccgcaaaggacatcaagaatgttaatctcttctccaagatggacgtatacgccgccgtttcgctctccggtgaccctctccaccctcagggcgccaccacccacgtccacaaagacgccggcagcaaccccacgtggaactaccccgtgaaattctctgtcaacgaatcgctggcga

SEQ ID NO: 150907 - DNA, 266 bp, Glycine max
agtgaacaggttagagctatgactgaaatgcaaggggttctttgttcaacaaggcccatgcgaattggaccagcctctaataaaaaccctagcactcagtctcagccaaaagcatcatatcagaatcctcaaggggcacagaacgagcatgatccaaataatacaactatttttgtcggcaatttggatcctaacgtcacggatgaccatttgagacaatttttgggcattatggagagttagttcatgtgaagattccagctggc

SEQ ID NO: 150908 - DNA, 263 bp, Glycine max
ctcgagccgctcgagccgaccttgaaaaggctggcatcactgttatccaaattgatgaagctgctttacgagagggtcttccactgaggaaatcagagcaagctcactacttggactgggctgtccatgccttcagaatcaccaatgttggtgtccaggataccacccagatccacactcacatgtgctactcgaacttcaacgacatcatccactccatcatcgacatggacgccgatgttatcaccattgagaactctcgc

SEQ ID NO: 150909 - DNA, 263 bp, Glycine max
acaaggaccaagcttgggatgaccattggatattttgggttgggcctttcattggggcagcacttgcagctttgtaccatcagatagtgatcagggccatccccttctcgtcgaagtgatgcaacattgaagatgaattgaaggaataatgcctcaaaaataaaagtagtaactagttgagtccaagacagcattcccacgtaaaagatgttcctatgacttctgctaatgatttactactactactactattaatttatgca

SEQ ID NO: 150910 - DNA, 261 bp, Glycine max
ctcaggtggttgccgagcacactgtcagagcccttcagagaaccgtgcctgctgcagttcctgctgtcgttttcttgtctggtggccagagtgaggaggaggcatccgtcaacctcaacgccattaaccaggtcaatgggaagaagccatggtcactctctttctcctttggaagggcacttcaacagagcacccttaaggcatggggcggaaaagaagagaatgtgaagaaggctcaggaagcccttttggtaagagcca

SEQ ID NO: 150911 - DNA, 262 bp, Glycine max
gttgaaaatgcttacagattcaagcaaatcaatggtcgacgaagccctaacaataatgtcagttcttgccagccaccaagaggcaaaagttgccatagtaaaagccagcactataccagttttgatagatcttttgaggaccggattgcctcgcaataaagagaatgcagctgctattcttcttgccttgtgcaagagggatgcagataatcttgcttgtataagtagacttggtgttgtcatacctctctctgaacttgct

SEQ ID NO: 150912 - DNA, 259 bp, Glycine max
gttggaaatgatgtaattgcagagaattggctcaaggcacatggacctggtgaccgaacccttgcacaaggattgaagggagatcctacctatcttgttgtggagaaagacagaacccttgcaacatatgcaattaatgccgtgtgcactcaccttggatgtgtcgtgccatggaatcaagcagagaacaagttcatctgcccttgccatggatctcagtacaatgaccaaggaagagttgtgagaggacctgctccct

SEQ ID NO: 150913 - DNA, 248 bp, Glycine max
cgatcaggtgataagtcgatgattaagaagctctacatgtacttaaacgaagagatcctgaaggagaatcccagtgtttgtgcatatatggcaccttcgttggatgcaaggcaagacatggtggttgtggaggtaccaaagttgggaaaagaggctgcaactaaggcaatcaaggaatggggtcaacccaagtccaagattacccatctcatcttttgcaccactagtggtgtcgacatgcctggtgc

SEQ ID NO: 150914 - DNA, 263 bp, Glycine max
acaggctctgcctgttgctttgatgattcatgataactcgtcggatcgcacggcctttgtgccggcgacgcatcattcaaatttctgccctatcaactttcgatggtaggatagtggcctaccatggtggtgacgggtgacggagaattagggttcgattccggagagggagcctgagaaacggctaccacatccaaggaaggcagcaggcgcgcaaattacccaatcctgacacggggaggtagtgacaataaataacaata

SEQ ID NO: 150915 - DNA, 260 bp, Glycine max
cttgaggacggccgtacccttgctgactacaacattcagaaggagagtactcttcacctcgtcctccgtctccgtggtggcatgcagatcttcgttaagacactcaccggcaagaccataaccctagaggttgaaagctccgacaccatcgataacgtcaaggccaagatccaggacaaggagggtatccccccggaccagcaacgtctcatcttcgccggaaagcagctcgaggacggccgcaccctcgccgactacaa

SEQ ID NO: 150916 - DNA, 262 bp, Glycine max
agctcacgcaggtctgcgccagcatcctcaacctcctcgactccaacctcgtaccctccgtcttcgccagcgagtccaaggtcttctacttgaagatgaagggcgattaccaccgctatctcgcagagtttaaggttggggatgagagaaaaaccgctgctgaggataccatgttgtcttacaaggctgcccaggacattgcttctggggatcttccccctactcaccccatcagattgggtctcgctctcaacttctccgt

SEQ ID NO: 150917 - DNA, 262 bp, Glycine max
aagagatggcttctcctcttcttactccttacaagatgggcaaattcaatctgtcccatagagttgttttggcaccgctgaccagacagaggtcttacgacaacgtcccacaaccccatgccatcctctactactcccagagaacttccaacggaggccttctcattactgaagccactggcgtctctgacacggctcaaggctatccgcaaacccctggcatatggactaaagaccatgttcaagcttggaaacccattgt

SEQ ID NO: 150918 - DNA, 257 bp, Glycine max
taatacgtgcaacaaaccccgacttctggaagggatgcatttattagataaaaggtcaacacaggctctgcctgttgctttgatgattcatgataactcgtcggatcgcacggcctttgtgccggcgacgcatcattcaaatttctgccctatcaactttcgatggtaggatagtggcctaccatggtggtgacgggtgacggagaattagggttcgattccggagagggagcctgagaaacggctaccacatccaa

SEQ ID NO: 150919 - DNA, 258 bp, Glycine max
gtccaagaggcaataaacgaaaataagctgtttatgattgattatcatgatatatatctacctttcttagaagggatcaatgcccttgatggtaggaaatcatatgccacacgcaccatctttttcttgacaccacgtggcactctcaagcctgtggctatagaacttagcctccctcatgctggacctaattcccggtcaaagcgcgtggttacacctcctgttgatgctactactaattggatgtggcagcttgcc

SEQ ID NO: 150920 - DNA, 259 bp, Glycine max
attaagatggctaattcctacttatccttgcttgtcttgatccttgtagctctgctcctcacccctcaagggcttgctgatgaatctgattcttactataagccaccagtttacaagaaaccaccagtgtacaagcccaagcccaagccacccattcacaagcccaagccacccgtttacaagcccaagccacccgtttacaagaaacccccttatggtaagtacccaccagttcaagacaacgatcacttctaaacca

SEQ ID NO: 150921 - DNA, 257 bp, Glycine max
caaacccttctgctgagggtggagaagatgagggagtcgatgacgcagctgttaaggttgttgacattgttgatacattcagacttcaggagcaacccgcttttgataagaaacagtttgttaccttcatgaagaggtttatcaagaatttgactcccaagctcgatgcagagaaacaagagttgtttaagaagcacattgagggagcaactaaatacctgctctctaagattaaggatttccagttttttgttggg

SEQ ID NO: 150922 - DNA, 259 bp, Glycine max
gctgaatctttctctgttggatatattcagatgaagactgcagcgaactgttcttacctggtagttatatctacgagttgttcatcgcctaagttcactacggataagattggtattacgtttggcgatgcttatggcaaccaggtatatgaaccaagactggatgatccaatttcaaggacctttgagcagtgttcttcagatacatttcagatagatggtgcatgtgcatctccaatttgctatgtgtacctatata

SEQ ID NO: 150923 - DNA, 263 bp, Glycine max
acaccattgacaatgtgaaggccaagattcaggacaaggaaggcatcccaccggaccagcagaggctgatttttgctggcaagcagctcgaggatggaaggaccctcgctgactacaacatccagaaggaatcaacccttcaccttgtcctccgtctccgtggggggttttaagctcgttgtgtaatgttggatgtgttcccaaaacagttgaagaactttgatgtttaatgggtctgtaataatgtcccttgaaaataagtt

SEQ ID NO: 150924 - DNA, 256 bp, Glycine max
ctctccctcaaccacaccgaggccaccaaaaccttcgtcgcaaaatgcaacaaattcagaggcctcaaaccgagagaatacgctgccttgaaggactgcgctgaagaaatcagtgacagcgtcgaccggctcagccgtcgctgaaggaactcaaattgtgtaaggtgaagggtgaggacttcacgtggcacatcagcaacgttgagacgtgggtgagttcggctttgaccgatgagagcacttgcggcgatgggtt

SEQ ID NO: 150925 - DNA, 258 bp, Glycine max
gagaaagttctctctgcttctctctcttagactcaaaaccctattgcgtgctttgcaatcgaccccgattatggccaacagtaacctccctcgaagaatcatcaaggaaacgcagcgtttgctcagtgagccagcacctggaattagtgcgtccccttcggaagacaatatgcggtatttcaatgtgatgatccttggcccaactcagtcgccttatgaagggggagttttcaagttggaattatttttgccagaaga

SEQ ID NO: 150926 - DNA, 255 bp, Glycine max
ccaggagtggagcctgcggcttaatttgactcaacacggggaaacttaccaggtccagacatagtaaggattgacagactgagagctctttcttgattctatgggtggtggtgcatggccgttcttagttggtggagcgatttgtctggttaattccgttaacgaacgagacctcagcctgctaaatagctatgtggaggtaaccctccacggccagcttcttagagggactatggccgcttaggccacggaagt

SEQ ID NO: 150927 - DNA, 254 bp, Glycine max
caattttctgtttcccatgcacgttacagtaagccagatggcatatatgccagggttcaattgacagtatttctttctcaactgatgggacttacatagctactgttggacgagatggttatttacgagtatttgattacttaaaagaacaacttatatgtggtgggaaaagttattatggtgctttgttatgttgtgcttggagcatggatggaaagtatattttgacggggggagaggatgatttagttcaa

SEQ ID NO: 150928 - DNA, 255 bp, Glycine max
gtgacaactactacagctgtgctgatagtgctacttgttgctgtattttcgagttcggaaatgcttgctttgagtggggttgctgtcctcttgagggtgctacctgctgtgatgaccactacagttgctgccctaacgactatcccatctgcaacacttatgctggaacttgtctcaagagcaagaacaacccattcggagtgaaggcattgaggcgtactccggctaaaccccattggacctttgggcgtaaga

SEQ ID NO: 150929 - DNA, 252 bp, Glycine max
ggaaaaggttggccttgatgtctgagaaatttggcatcccagttgagtttcatggagttcctgtttttgctccaaatgtgacaagggaaatgcttgatatcaggccaggagaggccttggctgtgaattttcccttgcaactccatcacacagctgatgagagtgttcatgtgagcaacccaagggatggacttctgagattggtaaggtcactttctcccaaggtgaccacactggtggagcaggaatcaa

SEQ ID NO: 150930 - DNA, 254 bp, Glycine max
ctcgagccgagaagactgatagacctgaatacaagtatactatagctatgcttgggtatgcagaggaacatgagacaactgtgttggagctgacatataactatggtgtcactgaatacaccaagggaaatgcttatgcacaggttgctattggtactgatgatgtatacaagagtgctgaggttgtcaacatagtcacacaagagcttggagggaagattactcggcaaccaggaccaattcctggccttaac

SEQ ID NO: 150931 - DNA, 256 bp, Glycine max
gccttggaactttgccgtgaatttgaggataagtttctacagcacattaccacgagcgagggagtgcttggaaaattgtttcctgttttgaggggagatttcctgatagaatgaagcaattacctttagataggcattttgatatcaacaatgtgaagaggattgtgttagaagcagatggttatcagccttatcttatttcccctgaaaagggattgagatctctaatcaaaggtgttctagagcttgcgaaaga

SEQ ID NO: 150932 - DNA, 259 bp, Glycine max
gccagaaatacaccgatgactgcgaggctaccataaacgaacagatcaatgtggagtacaatgtttcgtatgtttatcatgcgatgtttgcctacttcgatagggacaatgtcgcgctcaagggtcttgccaagtttttcaaggagtcaagcgaggaggaaagggagcatgctgagaaattaatggaatatcaaaacaaacgaggtggaaaagtgaagttgcaatccatagtgatgcctctttctgagtttgaccatga

SEQ ID NO: 150933 - DNA, 259 bp, Glycine max
gggaaacagctatggtgttatagtagagactgagaagagctacatcgagactgttgacatggatgttccagcagctgagcatgatgggaagtgcaagtgtggcactaactgcacttgcacggactgcacttgtggccattaaggaatatgtatgaaaatgtaattgccatgtgtttggcaatacaaatctccaaataatgtaatcttcgtatgaataaatgtgtgctgttatcctacttcagggtctgtgtagtcatgc

SEQ ID NO: 150934 - DNA, 191 bp, Glycine max
aaattctctgtgttgtgttgtgtacttgtgttaattgtgttgttgttgtaggaaatttaagtgaagagagaatgatgatgaagtctgctatgtgtgcattggtgcttgtggcactggttgtggttgaagtggggcccatggctgaggctgcggtgacttgcaaacccaacacagttgactccttgtcttcc

SEQ ID NO: 150935 - DNA, 257 bp, Glycine max
ccgtcaccaagcaggcctcctccggaagcccatggtacggcccagaccgcgtcaagtacttgggcccattctctggcgagcccccgtcctacctcactggcgagttcccaggtgactacggctgggacactgctgggctttcggccgacccagaaaccttcgccagaaaccgtgagctcgaagtgatccactccaggtgggccatgctcggggccttgggctgcgtcttccccgaactgttgtcccgcaacggggtc

SEQ ID NO: 150936 - DNA, 255 bp, Glycine max
attctacccgccgctcgatgggaattgcgcttcaaggcgtctcgtagggctaatccgcctcacgagggtcaccaacggcacgtgcctttggggggccgaggccccctactgctggtcggcaaacggacggcgggcgcacgcgtcgcttctagcccggattctgacttagaggcgttcagtcataatccaacgcacggtagcttcgcgccactaccttttcaaccaagcgcgatgaccaattgtgcgaatcaacgg

SEQ ID NO: 150937 - DNA, 255 bp, Glycine max
ggatgattgttgtgccctcatcggtggtcttggtgacattgaagccattgtgtgcctttgcatccaactcagggccctcggaatattaaaccttaaccgtaatttgcagttaatattaaactcctgtggacgaagctacccgtcaaacgccacttgcccccgaacctaagaacagaatatgtatggcactaattaccatattacttcgtatcatggtgtttgtttgtttgtctgtgtttaaagttaaggatgtta

SEQ ID NO: 150938 - DNA, 253 bp, Glycine max
gtttcaggtcactccatttgatggtcttctggattctctttgagaatgtcatgtctctgcatcgaacaaaggcaacgattattggtttacttgaggcaagtcgagtgaacgaatgggttgtcactgaaaaacttggtgatgctctcaagactaaagcaggaggtaaagcacctaaaaagcctcgattcaggattggagacaggattcacttgttggaacttggtgtcgcattctacctcttcttttgtggctg

SEQ ID NO: 150939 - DNA, 255 bp, Glycine max
tggttgacccctttttggtcgaggctctccagaaccctcgtcaccgcctcaccattttgaggatggagctggacatccagaagtttttgaataatgctgatcagcagcattttgagtttcaacatttcccttcttcctacctccgactggctgcacaccgtgttgctcaacactacaacatgcaaacaatggttcaagataatggcttagatggccagggaagtaaaattctggtgaggaagttaccagaaagca

SEQ ID NO: 150940 - DNA, 255 bp, Glycine max
ctttaagaaggatagagatggctactggaaatggtttgctggcaacttggcctctggtggtgctgctggtgcatcatcccttttgtttgtttactctcttgactatgcccgtacccgtcttgccaatgatgcaaaggctgcaaaaaagggtggagagagacaattcaatggtctcgttgatgtctacaggaagacattggcatctgatggtgttgccgggctctaccgtggtttcaacatctcatgtgttggaat

SEQ ID NO: 150941 - DNA, 260 bp, Glycine max
aaaaattgttgaagttaacgcattggctaaggcattgtctggcaacaaggatgtggccttcttctctgctaatgctgcagctcaggcttcaaggaagtcctctccaagagtgaccaacgaggctgttcagaaggctgctgctgcattgaagggttcagatcatcgccgtgcaacaaatgtcagtgccagactggatgctcaacaaaagaagctcaaccttccaatccttccaaccaccactattggatccttccctcaga

SEQ ID NO: 150942 - DNA, 256 bp, Glycine max
ggaggagatgccgcctctgcgacccccggttcagctcggcgagatcacagcggaggagctcaaggcctacgacggcaccgatcccgagaagcccttgctcatggccatcaaggcccagatctaggatgtctcccagagcaggatgttttatggacctggtggaccttatgccctatttgctggcaaggatgctagcagagccttagcaaagatgtcttttgaagagaaagatctgactggggatatttctggtctt

SEQ ID NO: 150943 - DNA, 257 bp, Glycine max
attgtgctagccttcagaggacacaatgttttgcccgaaatacaggggacgctgccttcaaatttcgaacaaacatccaaaagaccaatgcgaagaggagttagcatatcatatgtactcatttccatgtgcatgtttcccctcgcaattgccggattttgggcctatggaaaccagataaatgacgggggattgttaacttcgttcccacaattccacaagaggcaaatcacaaaattctctatgggtgcaatata

SEQ ID NO: 150944 - DNA, 257 bp, Glycine max; identical to SEQ ID NO: 132322

SEQ ID NO: 150945 - DNA, 257 bp, Glycine max
ttctgcttcgcgtggaccaacaagaagtgtaagttttcattcaatggccagcgctcagctctcagcaatatcttcgtcgatctctacggcgtcgtttgaagggcttcgaccttcggctgttcagtttgcttccgcgggcagaattagaattggcaatctctcccaaaggtctttccggggcttggttgtcaaagccgccaccgttgttgcccccaaatacaccgcgattaagcctctgggagacagagtgctgataa

SEQ ID NO: 150946 - DNA, 253 bp, Glycine max
tgaatactcaatggctgttgtccaggccaacaacctgctcgaggaccagagccagattgagtctggtcctctcagcctgcttgacactggcccttatgggacctttgttggtgtatatgatggacacggtggacccgagacgtcgcgctacgtctgtgatcatctcttccaacatctaaaacgatttgcatctgagcagaagtccatgtctgaggaggttattcggaaggcataccaagccacagaagaaggt

SEQ ID NO: 150947 - DNA, 255 bp, Glycine max
tcgcaaaccaattttcacattctttgtattgagttacttgagctagccgcaaccatggaaccatccaaaaactcgcagaagccctcacatttccatgactacctccccgtgatggcgaacaagctcggcggggacggcctcatcgatgagctctgcaacggcttcaacctgctcaaggactccgacagaggggtgataacctttgagagcctcaagaggaacgctgctctgctgggcctgcaaggactcggcgat

SEQ ID NO: 150948 - DNA, 230 bp, Glycine max
gcagaagataatgttcgcaatgacctccatcaagggtattggaaggagattcgccaacatcgcttgcaagaaggctgatgttgacatgaacaaaagggctggtgagttgactgctgctgagttggatagtgtgatgactgtggtggcgaaccctaggcagttcaagatcccagactggtttttgaacagaaagaaggattacaaggatggcaaatactctcaaagtgtgt

SEQ ID NO: 150949 - DNA, 257 bp, Glycine max
atcaattctctctcatactctcactactctctttgctctttgttttctccactatggctgcacaacgaaacttccaagactacttgcctgtgatggccaacaagcttggtggggatggcctaattgatgaactgtgcaatgggttcaatctgttgaaggattctgataaaggggtcatcacctttgagagcctcaagaggaactctgccttgtttggccttcagggtcttagtgatgaagatcttcggtccatggtt

SEQ ID NO: 150950 - DNA, 253 bp, Glycine max
gtcacggttgcattcttgaatttgatcatcatgttttcagtagtctctacaagcaagtcactgagcttaaactactattcaaaaacatgccctgatgtggaatgcattgttgccaaggcagtgaaggatgccactgctagggacaaaactgttccagctgcacttctgcgaatgcacttccatgactgtttcgttcgggggtgtgatgcctctgtgctgctaaattcaaaaggaagcaacaaagcagaaaaag

SEQ ID NO: 150951 - DNA, 251 bp, Glycine max
ccaccacctgttgcatcattggagcatggtgaaggtgctcatcatgaaggagaggccaaggagaagaaaggtatattagaaaagataaaagagaagcttcctggttatcactccaagacagaggaggaaaaggaaaaggaaaaggagagtggtgctcattgatatttaagattgagacaaggcttttttgttggttggagatgcatgattgtggtgtgctttgttttcatttcatcatatgacagccttgt

SEQ ID NO: 150952 - DNA, 245 bp, Glycine max
ctcgagccgtgagcgggtcgtatttaaataagaatttcttttccttttttcttagtttctatcgaaaaaaaaaagattcgatagaaactaagaaaataaacaaattgattcgccgagaaagaggagagagagggattcgaaccctcgatagttctttgttccgaactataccggttttcaagaccggggctatcaaccactcagccatctctccaaaagctaatttatattttatctttattcca

SEQ ID NO: 150953 - DNA, 247 bp, Glycine max
cagcctctggtcgatggaacaatgtaggcaagggaagtcggcaaaatggatccgtaacctcgggaaaaggattggctctgagggctgggcacgggggtcccagtcccgaacccgtcggctgtcggtggactgctcgagctgcttccgcggcgagagcgggtcgtcgcgtgccggtcgggggacggattgggaacgggcccttcggggcctcttccccgggcgtcgaacagtcaactcagaactggta

SEQ ID NO: 150954 - DNA, 247 bp, Glycine max
ggcaagccccactcaaccaccacacctctcctcgttcacgctacccctttctgctcttcttctacctttcaagttttaaaagtataaagatggcagagacattcctatttacctcagagtcggtgaacgagggacaccctgacaagctctgcgaccaaatctccgatgctgtcctcgacgcttgcctcgagcaggacccagacagcaaagttgcctgcgaaacatgcaccaaaaccaacttggtcat

SEQ ID NO: 150955 - DNA, 248 bp, Glycine max
ttttacttattccgtgaatcggaagcggggcactgcccctcttttctggacccaaggtcggcttcggccggtcgatccgggcggaagacattgtcaggtggggagtttggctggggcggcacatctgttaacagataacgcaggtgtcctaagatgagctcaacgagaacagaaatctcgtgtggaacaaaagggtaaaagctcgtttgattctgatttccagtacgaatacgaaccgtgaaagcgtg

SEQ ID NO: 150956 - DNA, 255 bp, Glycine max
aattgaattctccagagagaagaagaaacttaatcgatcatcacttcacttcactaatacatcatggcagacgagacccagaacaagtatgagagctctgaggttgaggtccaggatcgtggtgtttttgactttctcggtaagaaaaaggatgaagaagacaagcctcatcctcaggaggttgtcatcgccaccgagtttcaaaaagtcactgtctcagaccaaggagagaacaagcacagcctcttagaaaag

SEQ ID NO: 150957 - DNA, 246 bp, Glycine max
gtccagccaagcataagggggagaaatgtttatgtccagttttcctcacatcaagaactaactacaatggatcaaaatcaagcacgagaagatgagccaaatcgaattctcttagttacagttcatcacatgctgtatcctataacagcggatgtgctacatcaagtgttttctccccatggatttgtggaaaagattgtaacattccagaagtcagctggctttcaggctctcatccagtatcaa

SEQ ID NO: 150958 - DNA, 246 bp, Glycine max
  unsure (1)..(246): unsure at all n locations
aaaaccctaggtagagagctcttcctccctttctcacagcaatggccgccgcagcacgccctctcgtcaccgtgcaggccctcgatggtgacatggcaaccgatgcctcctccaccgttcccatccctgacgtcatgaaggcctctatccgccccgacatcgtcaatttcgtacactcgaacatctccaagaacagccgccagccatacattgtncatcgtcgcgctggtcaccagacctccgccg

SEQ ID NO: 150959 - DNA, 245 bp, Glycine max
atagcccaagccctatacaaccaaaccctaacacacacccatttgattcagtttccatggctagcctcaaggttgcatttttggctgcagtgctctgcatggttgtggtgagtgcacccatggcacatgcagctatcacgtgcgggcaggtgacgaatagcctgatcaattgcatcggttacctccagaacggaggaacgccgccgtcgggatgctgcaacggagtgaagagcctcaatgccgcc

SEQ ID NO: 150960 - DNA, 246 bp, Glycine max
cgcgttctttgctaatccaggggagtggtgggacaacaggaacaacaagaggaatccaaaagctcctgatttcaaacacaaagatacaggggaagctctgtggatagaaggcagatacagtccgccatgggtcaagtctcaactggaaatactagactcaagaatggggtcttttgctggccaaaatgctaggatgcctgtaggtatggtagctgcagatgaaatcgtgtctttctaatcacttat

SEQ ID NO: 150961 - DNA, 245 bp, Glycine max
gttaggaggggtggccgaaagaggccagttcccaaaggtattgtttatgggaagcccacaaaccagggtgttacccaactgaaatttcagcgtacaagaggtcagttgctgaggagcgagctggacggaagctgggtggacttagggtcctcaattcttactgggtgaatgaggactctacttataaatactttgaggtgattctggtggtagtggctcatgctgctattagaaatgatcccaga

SEQ ID NO: 150962 - DNA, 91 bp, Glycine max
ctcgagccgggcaaaggaagtagaataccttcttaggaagggatggattccttgcttggaattcgagttggagcacggtttcgtgtaccgt

SEQ ID NO: 150963 - DNA, 251 bp, Glycine max
ctcgagccgtgcagaagctaaatgggacaacgattggcaagcaaacggtccgtctttcttggggtcgtaatccagcaaataagcagtttagaatggatttcggcagcccttggactggggcatattacggggcccctatgtatgatggttatgggtatgcattgccccctcgtcatgatcccagcatatatgctgctgcttatggtgcttaccccctttatggaggccaccaacaacaagtaagctgaatg

SEQ ID NO: 150964 - DNA, 249 bp, Glycine max
atttgatccatcaccatctcttcttagcagtgaggtgaggtgaggtcactacaatggcttctgcttgtgtgaccctgaaagccaatacccatttagcaaactctgagaaaggctttcttggagaaagaataaaaagtggcttcaacaacagtgccttggtgatgaatcagttggctatacgttctagaagccacaagagggtgaaacatggtgttggtgttgtatcttctgttctcacatcaaacatgc

SEQ ID NO: 150965 - DNA, 259 bp, Glycine max
gtgagagcatgggtgatgatgcttgcttggtctttgcctactacaaggacggcgctgctgatccaacattcctgtactttgcatatgccttaaaggaggtcaagtgctaagtgacttaatgtaccgagctatctactcattttatctagtttttttttacgttctgtcctaagttacttgaaactttgacctggtattttgattttaatggtgagacgtgtgctactgctacatcataattcccatcaaatttaattat

SEQ ID NO: 150966 - DNA, 254 bp, Glycine max
agaacaccaacggcgaaagcactctgctgggccgacactgacactgagagacgaaagctaggggagcgaatgggattagataccccagtagtcctagccgtaaacgatggatactaggcgctgtgcgtatcgacccgtgcaatgctgtagctaacgcgttaagtatcccgcctggggagtacgttcgcaagaatgaaactcaaaggaattgacgggggcccgcacaagcggtggagcatgtggtttaattcgat

SEQ ID NO: 150967 - DNA, 245 bp, Glycine max
gggtactggcatgaaggtgtctattaggcaccttggtccttctatgattcagcaaatgcagcatccttgcaatgagtgtaagggtactggagagacaatcaatgacagagacaggtgccaacagtgcaagggagagaaggttgttcaggagaagaaagtacttgaagttgttgtggagaagggaatgcagaatggacagaagattacattccctggtgaagctgatgaagcgcctgatacagtca

SEQ ID NO: 150968 - DNA, 244 bp, Glycine max
gtcattagggagggaagtaagtaccaagagttggaaaaatggatcagtgaagaagggtttgaggaaaggaccaaagggagaggccttataattcgaggttgggctccacaggtactaatattatcgcaccctgccattggaggattcttaacacattgtggttggaattcaacacttgaagggataagtgttggagtgccaatggttacctggcctctatttgctgatcaatttttaaatgaaa

SEQ ID NO: 150969 - DNA, 243 bp, Glycine max
aaaggattctacccgccgctcgatgggaattgcgcttcaaggcgtctcgtagggctaatccgcctcacgagggtcaccaacggcacgtgcctttggggggccgaggccccctactgctggtcggcaaacggacggcgggcgcacgcgtcgcttctagcccggattctgacttagaggcgttcagtcataatccaacgcacggtagcttcgcgccactggctttagaaccaagcgcgatgacca

SEQ ID NO: 150970 - DNA, 243 bp, Glycine max
gtttcaccgcacgaatatcttgttgtttggagcgatccgagaaaaactctgtaaacatgttggtttaccaggacctccttacaggtgatgagcttctctctgactccttccgttacaaggaaattgagaatggaatgctgtgggaagttgaggggaagtgggttgttaaaggagcagttgatgtagacattggtgcaaacccttctgctgagggtggaggagaagatgagggagttgatgatg

SEQ ID NO: 150971 - DNA, 239 bp, Glycine max
cagaaaaacaagtagttgagaactaagaagaaggaaatggcttcctcaatgatctcctccccagctgttaccaccgtcaaccgtgccggtgccggcatggttgctccattcaccggcctcaaatccatggctggcttccccacgaggaagaccaacaatgacattacctccattgctagcaacggtggaagagtacaatgcatgcaggtgtggccaacaattggcaagaagaagttcga

SEQ ID NO: 150972 - DNA, 245 bp, Glycine max
gtccctgcggatgttgacgcaatgtgatttctgcccagtgctctgaatgtcaaagtgaagaaattcaaccaagcgcgggtaaacggcgggagtaactatgactctcttaaggtagccaaatgcctcgtcatctaattagtgacgcgcatgaatggattaacgagattcccactgtccctgtctactatccagcgaaaccacagccaagggaacgggcttggcggaatcagcggggaaagaagacc

SEQ ID NO: 150973 - DNA, 231 bp, Glycine max
ccaggatgcaggcatcgcgggcaaggttgttcaaagagtacaaagaggtgcagcgggaaaaggccgttgatcctgatattcaactagtttgtgatgattcaaacatttttaaatggaccgctcttatcaagggaccctctgagactccttttgagggtggtgtgttccagcttgccttttctgttccggagcagtatcctctacagccacctcaagtccggtttttgacta

SEQ ID NO: 150974 - DNA, 251 bp, Glycine max
gcaacctgtgtgagctactcaggatcaacactgacaggggtgttatgctgagtgatggaaaaacaaggttctccaaaaatggccaacccatttaccacttcgttggaacctccactttcagtgaatacactgttctccatgaaggatgtgtagccaagattaaccctaatgccccacttgacaaagttgctattgtcagctgtggattctgcacaggttttggggctactgtgaatgttgcaaaaccaaag

SEQ ID NO: 150975 - DNA, 250 bp, Glycine max
ctagttctagatcacgagcgaagacgtgtcgaagtgaaagcccctgggattattgaacgtaaatctgtgcacgagcctatgcaaacagggttaaaagcagtagatagcctggttcctataggccgtggtcaacgagaacttataatcggggaccgacaaactggaaaaacagctattgctatcgataccatattaaaccaaaagcaaatgaactcaagggccacctcagagagtgagacattgtattgtg

SEQ ID NO: 150976 - DNA, 231 bp, Glycine max
ctcaacgagaacagaaatctcgtgtggaacaaaagggtaaaagctcgtttgattctgatttccagtacgaatacgaaccgtgaaagcgtggcctatcgatcctttagtccttcggaatttgaagctagaggtgtcagaaaagttaccacagggataactggcttgtggcagccaagcgttcatagcgacgttgctttttgatccttcgatgtcggctcttcctatcattgt

SEQ ID NO: 150977 - DNA, 239 bp, Glycine max
agtcaacgggcgagtaaacccgtaaggcgcaaggaagctgattggtgggatccccctgtgggttgcaccgccgaccgaccctgatcttctgtgaagggttcgagtgagagcatacctgtcgggacccgaaagatggtgaactatgcctgagcggggcgaagccagaggaaactctggtggaggcccgcagcgatactgacgtgcaaatcgttcgtctgacttgggtataggggcgaaag

SEQ ID NO: 150978 - DNA, 244 bp, Glycine max
gcagacgcggtcgtgagtagaactgtcacaaacgttgacgaagaagatgaaacagtgtacttccccgttgttgaagctcctagtgaagtaattgtcacactctttccatataatcttgagtttacgacaagtattaaaaaacaaagctacaatattactttcagaccgaagacctccttgaagaaagatttgtttggatctatcacttggagtaacgacaaatatatggttcgaattccttttg

SEQ ID NO: 150979 - DNA, 241 bp, Glycine max
gaagccaccaatcatctatggtgatgtgagccgcccaaagccaatgactgtcttctggtcatctctggctcagagctttaccaagcgcccaatgaagggaatgcttaccggtcctgttaccattctcaactggtcctttgttagaaatgaccaacctagatctgagaccacctaccagattgctttggctatcaaggacgaagtggaggaccttgaaaaggctggcatcactgttatccaa

SEQ ID NO: 150980 - DNA, 242 bp, Glycine max
cttgttcctctcgcccagaatccgagatcaaccccgacgaaggcaaggggtttttctcggcttcttcagatttctgaaatggcgcctgtttcagctttagccaagtacaagctcgtcttcctgggtgaccaatccgtgggcaaaaccagcatcatcactcgcttcatgtatgataaattcgataacacctatcaggctacaattggtattgattttctatcaaaaactatgtatcttgaaga

SEQ ID NO: 150981 - DNA, 246 bp, Glycine max
agaaattttgaggacctttcacaatcagacaagcataatcatgtgctcctatctaccagttttcacaagctttaacagaaccaaaggtggcttgattcaattaaaccatggtaggcctcagcctctccaatatgtggtcaatgcggcctttttggctgccctatatagtgattatcttgatgctgctgatacacctggatggtattgtggccctaatttcttttcaaccgacgtgctccgtagctt

SEQ ID NO: 150982 - DNA, 245 bp, Glycine max
gtacccagagattgatccagctctgaaccctgaccacgtccctcacattctgaagaagtgccctgatgccattccagaccctaaggccgtgcagtacgtgagaaacgaccgtggcacccccatgattctagacaacaattactacagaaatatattggacaacaagggcttgttgatagtggatcaccaactagccaatgacaagaggaccaagccttatgtgaagaaaatggccaagagccagg

SEQ ID NO: 150983 - DNA, 252 bp, Glycine max
atgactctgaaaaggatggttttttgaagaggcttttaagagatagcaaaggtgatgatgagttcggtcagaagattcgtgatgcttttctcttccgtaagtcatctgagaaatatgacgaagattctgaaaaggacaatatcttaaaaaggctcttgagggatggtagaggggatgatctagaatctgaaaaggatggtttctttaggaggctcttgagagacagtaaagctgaggatgaggatttggcct

SEQ ID NO: 150984 - DNA, 240 bp, Glycine max
gaaatataactaatattctttagaataatcaaaaagaatattaaattcaaataaattttagatagaaaaaagacttaaaaaggaggatttgaaatgcgagatctaaaaacatatctttccgtggcaccagtagtaagtactctatggttcggggctttggcgggtctcttgatagagatcaatcgtttttttccagatgcattgatattcccttttttttcattctagttattgacacgg

SEQ ID NO: 150985 - DNA, 241 bp, Glycine max
ttgggtggcatgttatttgggtaaagaatggaaataatggctatgatgatattcgtgctgccattaaggaagcaaaagctgtcaaagacaaacccacattaatcaaggtcacaacaaccattggttatggttctcctaacaaggctaactcctacagtgtgcatggaagtgcactgggtgccaaagaagttgatgccacaaggcagtcccttggatggtcacatgagccattccacgtgcc

SEQ ID NO: 150986 - DNA, 239 bp, Glycine max
cactattggagctgcgcacaaggagcgttctggattcgagggtccctggacctctaatcctcttattttcgacaactcatacttcaaggagttgttgagtggtgagaaagaaggcctccttcagctaccttctgacaaggcacttttgtctgaccctgtgttccgccctcttgttgagaaatatgcatcggacgaagatgccttcttcgctgattacgctgaggctcaccaaaagcttt

SEQ ID NO: 150987 - DNA, 225 bp, Glycine max
ggctcgagcggctcgagcaccgctggcatctcagggggacacataaaaccggcggtgacatttgggctgtttttggcgaggaagttgtcgttgcccagggcgattttctacatcgtgatgcaatgcttgggtgctatttgtggcgctggcgtggtgaagggtttcgaggggaaaacaaaatacggtgcgttgaatggtggtgccaactttgttgcccctggttac

SEQ ID NO: 150988 - DNA, 241 bp, Glycine max
ggaatcttgagaaatggcaggggacagcaagagcaagattctgttcatcggagggactggttacatcggaaaattcatcgtggaagccagcgccaaagctggccacccaactttccttttggtgagggagtccactctctccaaccccgcaaaatcacccctcatcgacaatttcaaaggcctcggtgtcaatcttgttttaggagatctatacgatcaccaaagtttggtgagtgctata

SEQ ID NO: 150989 - DNA, 242 bp, Glycine max
  unsure (1)..(242): unsure at all n locations
attctacccgccgctcgatgggaattgcgcttcaaggcgtctcgtagggctaatccgcctcacgagggtcaccaacggcacgtgcctttggggggccgaggccccctanctgctggtccggcaaacggacggcgggcgcacgcgtcgcttctagcccggattctgacttagaggcgttcagtcataatccaacgcacggtagcttcgcgccactggcacttcaaccaagcgcgatgaccaat

SEQ ID NO: 150990 - DNA, 244 bp, Glycine max
gttgaactcgttgccgttaacgaccctttcatcaccaccgattacatgacatacatgtttaaatacgacagtgttcatggacactggaagcatcacgatgtcaccgttaaggacgagaagacccttctcttcggtgacaagccagtcactatttttggacacagaaaccctgaagagatcccatgggggtcaactggagctgacatcattgttgagtccaccggagttttcaccgataaggaca

SEQ ID NO: 150991 - DNA, 248 bp, Glycine max
gagaatggctcccaagggtttaacctttctggctgtgttaatatgcgtttcagcactgtcactgagtccttctgttgcgggggaagggcaaaataatggccttgttatgaacttctacaaggaatcatgccctcaggctgaagacatcatcacagaacaagtcaagcttctctacaagcgccacaagaacactgctttctcctggctcaggaacatcttccatgactgtgctgttcagagttgtgatg

SEQ ID NO: 150992 - DNA, 241 bp, Glycine max
cgaataataatcaatcaatcatcatgtcgtcggcgaagaagatcacactgaagagttcggacggcgaggctttcgaggtggacgaggcggtggcgctggagtctcagacgataaagcacatgatcgaggacgactgcgccgacagcggcatccctctgccgaacgtgacgagcaagatcctggcgaaggtgatcgagtactgcaagaagcacgtcgaggccgcgaatcccgaagacaaacc

SEQ ID NO: 150993 - DNA, 238 bp, Glycine max
gtgattgagaaggagattgagaagcatgctgctgatgggcttgggagagtggattatgctcttgccagcggcggtggtacggtggtgaagcattcggaggtgtttgatctggggaggggcaattggttcttgaagtctgctagaaatggtgtcaaccccaacgccgagaagatgttgaaaccgagctttggcgagcctgggcagtgtttccccttgaaggatactagagggtttgtgc

SEQ ID NO: 150994 - DNA, 236 bp, Glycine max
gggatccaaggttgttgcatccgttgcccttctcctctccatcaacattcttttcatttccatggttagctccagcagccactacgatccacagccccaaccttctcacgtcactgctcttattacacgacctagttgtccggatctgagtatttgcctcaatattttaggcgggtctctaggaaccgtggatgattgttgtgccctcatcggtggtcttggtgacattgaagcca

SEQ ID NO: 150995 - DNA, 246 bp, Glycine max
accaattaagctttcaagagacaaactgctttgaaaaatgggatccaaggttgttgcatccgttgcccttctcctctccatcaacattcttttcatttccatggttagctccagcagccactacgatccacagccccaaccttctcacgtcactgctcttattacacgacctagttgtccggatctgagtatttgcctcaatattttaggcgggtctctaggaaccgtggatgattgttgtgccct

SEQ ID NO: 150996 - DNA, 250 bp, Glycine max
ggagaacaagaagagtgaggaagaactgaagcatctcgggtttgtgaagattgcggcaatgaaagccttagtgtgtgtgtcgaatctctacggcttcgcaaagcaaaactcgggacttttgagatctgctgttggaaccgtggaagacactgtaaccaccgttctgggtcccgtctaccacaaattcaacgctgttcccaaccacatcctcctttttgtcgacaacaaggtggatgaagctgctcacaat

SEQ ID NO: 150997 - DNA, 255 bp, Glycine max
ctccagcagccactacgatccacagccccaaccttctcacgtcactgctcttattacacgacctagttgtccggatctgagtatttgcctcaatattttaggcgggtctctaggaaccgtggatgattgttgtgccctcatcggtggtcttggtgacattgaagccattgtgtgcctttgcatccaactcagggccctcggaatattaaaccttaaccgtaatttgcagttaatattaaactcctgtggacgaag

SEQ ID NO: 150998 - DNA, 248 bp, Glycine max
aatttttgcgtgccggttgggttgcttccggggtaccgggtcctttggggctcttttgttctcctgatgggtctgtgaattttgctattttctcgagacgtgctgagagtgtggttttatgcttgtatgatgagaatgacatggagaagcctgctttggagcttgatttggatccttatgtgaataggacaggtgatatctggcatgtctcgtttgagagtgccaagggtttcatgagctatggttat

SEQ ID NO: 150999 - DNA, 249 bp, Glycine max
gggtgctggtggtgatgcgggtggagccatggcatgaggatggtcctgcagctggcagtggaagcggtgctggacccaaaattgaggaagtcgattaagcagaagattctcatgggttgatcttgatttggtcaaagacccttttgaagtgtagataacagcgtgtcattatgtctctattgcgattatatgattctcgtgatcgatgaatgtacttttccccgtatctacttgaacaatgatgataag

SEQ ID NO: 151000 - DNA, 248 bp, Glycine max
cttatccttctttctgcaactccaaaatgggttccaaaggggcacaaaaatctagcactctcttcagccttgttgctccttttggtcggttttgcaacctcagacatcaatcaagacaaagcagaatgtacggataaacttcttggtctagctggttgtctttcctatgttggtggcgaagcaacagtccccaccatggattgttgctctggtatcaaagaggttattaacaagagcaagaggtgcct

SEQ ID NO: 151001 - DNA, 247 bp, Glycine max
gaaatcgcatttccggcaagattccgacggacatcgggaacctctggagtctcaccctattgagtctgggtgacaacgagatctctggcgagatcccaatgtcagttgtaaaccttgccagactcaagcatctagacctcagcaacaaccgactcactggcgaaattccctatgatttcgggaaactcgccatgctgagtcgggcgttgctgagtgaaaaccaattaaccggttcgatccctaagtc

SEQ ID NO: 151002 - DNA, 246 bp, Glycine max
cttttattccccacagcagattcagcaaggccattttcaatgcatggccttggtgatattgttatccctggtatttttgtagcattggctttgcgatttgatgtgtccagaggaaaacagccccagtatttcaagagtgcatttgtaggatacactgttggcttggtccttacaattgttgtgatgaactggtttcaggctgcacagccggctcttttgtatattgtaccttctgtaattgggttt

SEQ ID NO: 151003 - DNA, 247 bp, Glycine max
ctttcatcttatgctcctgtaatttcagccgagaaggctcaccatgagcagctatcagttggtgaaatcaccaacagtgcattcgagccatcatctatgatggccaagtgtgatccccgccatggcaaatacatggcgtgctgtctcatgtacagaggtgacgtagtgcctaaagatgttaatacagctgttggaattatcaagaccaagcgcactattcaatttgttgactggtgccccaccgggt

SEQ ID NO: 151004 - DNA, 245 bp, Glycine max
gttcaaggccggtgcacagatcttctcagagggaggccttgactacttgggcaacccaaacctgatccatgctcagagcatccttgctatctgggctgttcaggttgtgctcatggggtttgttgaaggttacagagttggtggaggaccacttggtgaaggacttgacccaatctaccctggtggtgcttttgaccctcttggtctggctgatgaccctgatgcattcgctgagttgaaggtca

SEQ ID NO: 151005 - DNA, 245 bp, Glycine max
gcaaaggattctacccgccgctcgatgggaattgcgcttcaaggcgtctcgtagggctaatccgcctcacgagggtcaccaacggcacgtgcctttggggggccgaggccccctactgctggtcggcaaacggacggcgggcgcacgcgtcgcttctagcccggattctgacttagaggcgttcagtcataatccaacgcacggtagcttcgcgccactggcacttcaaccaagcgcgatgacca

SEQ ID NO: 151006 - DNA, 241 bp, Glycine max
gcttgttgggctgctatgttgggattgcttgttggattggggtttgtaatgggtccaattcaacttcttaagctttatggtgttccctatgttatattcgttatgtggttggatttggtgacttatttgcaccatcatggccatgaagacaaattaccttggtaccgtggaaaggaatggagctacctcaggggtggtctaactactcttgatcgtgattatggatggatcaataacattc

SEQ ID NO: 151007 - DNA, 242 bp, Glycine max
catcagtgcctccttctggtctccctggtgttggtctcctacgctgcccggtcggaatcagcgctgggcggctggagccccatcaaggacgtaaacgacagccacgtggcggagatcgccaactacgcgctgagcgagtacgacaagggttctggggccaagctcagccttgtcaaggtcgtcaagggcgagactcaggtcgtttccggcaccaactaccgtctcgtcctcaaagccaagga

SEQ ID NO: 151008 - DNA, 244 bp, Glycine max
caaaaatattgacattacaaagattactccatccactagagttgcactccgcaacgacagttatgttcttcacttagttctgccaagtaaagttgatccattggtcaatctgatgaaagttgagaaagttcccgattctacatatgacatgattggtggtttagaccagcaaattaaagaaataaaagaggtcttgagctaccaatcaaacatcctgagctgtttgaaagtcttggaattgcac

SEQ ID NO: 151009 - DNA, 247 bp, Glycine max
ctactcttgaagagcattcatctttgattactgatgtccgtttcagtcctagcatgcctcgtcttgcaacatcttcattcgacaaaactgtcagggtttgggatgttgacaatcctggttattcacttcgcaccttcacgggacattcaacatctgttatgtcactagattttcatccaaataaagatgacctcatctgctcttgtgatggtgatggtgagatacggtattggagcataaacaatgg

SEQ ID NO: 151010 - DNA, 248 bp, Glycine max
ctttgtttcccaacctccattgcctccgcttctacctcgatacaatgatcattcctgagaagaaccgcaaggagatctgcaaatacctcttccaagagggagtttgctttgcgaagaaggacttcaatttggcgaagaccctgagagtgacgtgccgaatctgaaggtgattaagccgatgcagagtttcaagtctcgcgagtatgtgagggagacttttgcttggatgcactattactggttcctca

SEQ ID NO: 151011 - DNA, 245 bp, Glycine max
ctcgagccgctctggagcttatagactcaacgttaaatggattgtgttctcagaatgaagttttcagatgtattcatattggcctcttgtgtgtacaagatcaagcaacggatagacctacaatggtagatattgtttcatttctatcaaatgatacaatccaacttccccaaccaatgcagccagcatacttcatcaatgaggttgtggaagagtcagagcttccttacaaccagcaagaattt

SEQ ID NO: 151012 - DNA, 242 bp, Glycine max
tgaggatggtgtgttgaaattgaggagatcatggaaagtaaagacttttaccaaaggattggaatttttcaggataatagctggtcttgctgaagctgaaggtcatcatcctgatcttcaccttgttggctggaataatgttactatagagatttggacgcattctgtgggtgggctgacacagaatgacttcattctagctgctaagatcaatgagcttaatttgcatgacttgctaagac

SEQ ID NO: 151013 - DNA, 243 bp, Glycine max
aaaggattctacccgccgctcgatgggaattgcgcttcaaggcgtctcgtagggctaatccgcctcacgagggtcaccaacggcacgtgcctttggggggccgaggccccctactgctggtcggcaaacggacggcgggcgcacgcgtcgcttctagcccggattctgacttagaggcgttcagtcataatccaacgcacggtagcttcgcgccactggctcttcaaccaagcgcgatgacca

SEQ ID NO: 151014 - DNA, 244 bp, Glycine max
agcggggctacccgctgagtttaagcagaagtgacggaggagaagaaggaagcagaagtgacggaggagaagaaggaagttgaagtggcggaagagaagaaggaagttgaagggacggaggagaagaaggaagttgaagtggcggaagagaagaaggaaacagaagtgataaaagagaagaaggaagttgaagtgacggaagagaagaaggaagttgaagtgacggaagagaagaaggaagcag

SEQ ID NO: 151015 - DNA, 241 bp, Glycine max
cagtagtgtcatttacgcttctcttctctgcagcaactatgcctaaccctaaggtcttcttcgacatgaccatcggcggtcaatctgctggccgcatcgtgatggagctctacgccgacgtcactccccgcaccgccgagaacttccgcgcgctttgcaccggcgagaagggcgtagggcggagcggcaagcccctccactacaagggctcgtccttccaccgcgtgatcccgagtttcat

SEQ ID NO: 151016 - DNA, 240 bp, Glycine max
ctcgagcgctttagttgtaactgacaaagttttctgagaaaataaggattattattgagagaatggctggctcatcggaagagggacaagtcattagctgccacaccgttgaagaatggaacgatcaactccagaagggcaacgaatccaagaaactcattgttgtggattttactgcttcttggtgtggaccatgccgtttcactcgaccattcttggctgagctggctaagaagttca

SEQ ID NO: 151017 - DNA, 248 bp, Glycine max
agttttgatagatcttttgaggaccggattgcctcgcaataaagagaatgcagctgctattctacttgccttgtgcaagagggatgcagataatcttgcttgtataagtagacttggtgctctcatacctctctctgaacttgctcgaaatggcacagagagggccaaacggaaggctacttcattattggaacatattcataagttgcagcaactttgaatggtgtagttctgcaaagaactttaag

SEQ ID NO: 151018 - DNA, 247 bp, Glycine max
cacaatcaaggatgacaagattgcttccaaactgtcttctgatgataagaagaaaattgaagatgcgattgagcaggctatccaatggctagatggaaaccaacttgctgaggctgacgaatttgaggataagatgaaggagttggagagcatttgtaatcccatcatagcaaagatgtaccagggtgctggtggtgatgcgggtggagccatggatgaggatggtcctgcagctggcagtggaagc

SEQ ID NO: 151019 - DNA, 246 bp, Glycine max
gtggaatcaagaaattcagatctgctgcttactctaactgttctcgcaaaccatcctgatacacatccggattgatagttcgttgcatgcaaccatagttttattaggatttttttcttctttgttttcaattaggtttttttgttgctctccttcaaactccatctttccaaatcctctctttgcgattgtgttttgatctgcttcctactgcgatagtttctctactgttacatggccatggcg

SEQ ID NO: 151020 - DNA, 244 bp, Glycine max
ctcccaagggtttaacctttctggctgtgttaatatgcgtttcagcactgtcactgagtccttctgttgcgggggaagggcaaaataatggccttgttatgaacttctacaaggaatcatgccctcaggctgaagacatcatcacagaacaagtcaagcttctctacaagcgccacaagaacactgctttctcctggctcaggaacatcttccatgactgtgctgttcagagttgtgatgcttc

SEQ ID NO: 151021 - DNA, 243 bp, Glycine max
ttcgtgttgtagctagctcctcgaaaatgctggcacgcctcgccgcgagtcgcttcaacgagatccgtcagattttccgtcagccttctagggctttctcgaccgctctgaactaccaccttgacacaccggacaacaaccctaaacttccatgggaattcaccgaggccaatcaagcaaaggttaaggagattttgtctcactatccatccaactataagcaatctgctacaattcctcttt

SEQ ID NO: 151022 - DNA, 240 bp, Glycine max
cccgccgctcgatgggaattgcgcttcaaggcgtctcgtagggctaatccgcctcacgagggtcaccaacggcacgtgcctttggggggccgaggcccctactgctggtcggcaaacggacggcgggcgcacgcgtcgcttctagcccggattctgacttagaggcgttcagtcataatccaacgcacggtagcttcgcctcactggcttttcaaccaagcgcgatgaccaattgtgcga

SEQ ID NO: 151023 - DNA, 240 bp, Glycine max
gtctttgaatacatggaccatgatttaacaggtcttgctgaccgacctgggatgagatttacagttccccaaattaagtgttacatgagacagcttttgactgggcttcactattgtcatgtaaatcaagtacttcatcgtgatatcaaaggctcaaatcttcttatagacaatgaaggaaatcttaagcttgcagattttggactggcacgatcattttctaatgaccaaaatgcaaat

SEQ ID NO: 151024 - DNA, 240 bp, Glycine max
atctcaccatatcgtcaatcaaaagactcctatctacgatgtctgctccccagttcgaccccaagaacatgatctacaggaacatgggccctaccggcctccgtgttcctgtcttcagctacggtggatggcttaccgtcggcggtacccagaagggtgacatcgtcaaggagctcatgaagacctgctttgacaatggtatcaacatgttcgacaatgccgaggcttacaatgccggcg

SEQ ID NO: 151025 - DNA, 239 bp, Glycine max
gtcttgctgcggtggtaactgtggttgcggaagcgcctgcaagtgcggcaacggctgcggaggctgcaagatgtacccagacttgagctacaccgagtcaaccaccaccgagaccttggtcatgggagtggcaccagttaaggctcaattcgagagtgctgaaatgggtgttcccgctgagaacgatggctgcaaatgtggagctaactgcacctgcaacccctgcacttgcaagtgag

SEQ ID NO: 151026 - DNA, 240 bp, Glycine max
tcaacctgctgatcctcactttttcaatttactatctaatatctatttgtactataagcaggtcatgtaagcttctactttccaggttctggggcaatttttactggagacaccttgttcagcttatcatgtggcaagctcttagaaggaacccccgaacaggttgatttgaattgcttttagtttctcattttgttttctggttgtacatttctatcttcagggacaagtgattgcatc

SEQ ID NO: 151027 - DNA, 239 bp, Glycine max
ctctttcgaatttcgatactttgatcagatccacaacacttctacatccatgacgcttggttcttcaggatccagtgtcgtggttccaaggaacttcagattgctggaggagcttgagaagggagaaaaaggaataggagatggcacagttagttatggaatggatgatggtgatgacatttacatgcgctcttggactggaaccattattggtccctataatactgtacatgaaggaa

SEQ ID NO: 151028 - DNA, 238 bp, Glycine max
ctcgagccgattcggctcgagcagaaaatggctcatcctgagggagaatatgcaacagcacgagctgcatctgctgctggaacaatcatgactttgtcttcatgggctacttcaagtgttgaagaggtagcttcaacaggacctggcattcgctttttccagctatatgtgtacaaggacaggaatgtggttgctcagcttgtgagaagagctgaaagggctggattcaaagccattg

SEQ ID NO: 151029 - DNA, 242 bp, Glycine max
tagattcccacctcccaattcattctcccgcaacaagcaacgtagtaacagggatcacaggaaggttgtctgcgcctgcatcgcacctccgcagaacttcaagagccaggactcttccgccattaatttcaatggttcgtccaaatcagaacaactgagcacggcgtgggatcatgaggatgattctgatgttcttattgagtgtagagatgtgtataagtcttttggggaaaagaaaatct

SEQ ID NO: 151030 - DNA, 240 bp, Glycine max
aaccgtagtaattctagagctaatacgtgcaacaaaccccgacttctggaagggatgcatttattagataaaaggtcaacacaggctctgcctgttgctttgatgattcatgataactcgtcggatcgcacggcctttgtgccggcgacgcatcattcaaatttctgccctatcaactttcgatggtaggatagtggcctaccatggtggtgacgggtgacggagaattagggttcgatt

SEQ ID NO: 151031 - DNA, 238 bp, Glycine max
gggggaagcccgtctgatagcgctctgtgcgcgtactccgaaagggaatcgggttaaaattcctgaaccgggacgtggcggctgacggcaacgttagggagtccggagacgtcggcgggggccccggaaagagttatcttttctgtttaacagcctgcccaccctggaaacggctcagccggaggtagggtccagcggctggaagagcaccgcacgtcgcgtggtgtccggtgcgccc

SEQ ID NO: 151032 - DNA, 79 bp, Glycine max
cgagatttcatcatcctgtatttttggtttctgttttcggacttcaatggcaattaatggatgagaactaatgaataag

SEQ ID NO: 151033 - DNA, 238 bp, Glycine max
tgtggcttggctggcctttctgctggcatggctattggtattgttggtgatgccggtgttagagccaatgcacaacaaccaaaactttttgttggaatgattctcatcctcatttttgctgaagcacttgccctttatggtctcattgttggtattatcctgtcttctcgtgctggccagtctagagccgactaagaaaggagttgtgctgcaaaatattctttgaccacccatctgt

SEQ ID NO: 151034 - DNA, 238 bp, Glycine max
gttggagagatatcaacatggccaagtgccagtaatgtcattccaggccaggttacatataccgtggatatacgagcaattgatgaccttggacgcgaggctgttatctatgatttatctaaacaaatttaccaaatatgtgacaagcgttcggtttcctgtattattgaacacaagcatgatgcaggtgctgtgatttgtgattctgatctgagttcacagctcaagtctgcagctt

SEQ ID NO: 151035 - DNA, 234 bp, Glycine max
gcgattcttccattggatttttaggccggtgctactgatggatgcagccgaacggtcggaaattttctttacacggttgcgacgaagtaccctgcaaatgccttgccgcatcgcccaacattactacagtacattgtctcgttaaaggtgaaaacaactgcccagttagatgcagcattatcatttcttgctaccacaggctccgagaatcttgatttggaccggtttgaagaa

SEQ ID NO: 151036 - DNA, 235 bp, Glycine max
aaagtctacactcctgatcagtattcgtcctacttaattggttcattctcaagttttgttaaggacttgtatggattgggaggcaggagacttggagtgacttcactcccaccattgggttgcctacctgctgcaaggactatatttggtttccatgagaatggttgtgtctcaagaatcaacactgatgctcaaggatttaacaagaagctcaactcagctgcaacgagtcttc

SEQ ID NO: 151037 - DNA, 241 bp, Glycine max
cagggttcctccgtcggtggtgatttcggggagtacaagcctcttcattccgctgttgacgccaagcttcaggccatttgcgaaggcctggctgagctgcagaaacaggggaagaccgagaagcctccgaggaagtcgcgttccaaactcgcggagaaggttgtttccgacaaggagaacaacaactcttgtaaggtggaagctgcgtcctggtcgtcggaaggttcttcgccgctttcgg

SEQ ID NO: 151038 - DNA, 244 bp, Glycine max
ctctttcttaatccataatctctcttctcttcttctctttctatctgcaaaacaaaaatgtctcacttcggacgttcgggtcccccagacatttccgacacttactctcttctcgttctcaacatcaccttccgtaccaccgccgacgacctattccctctcttcgacaagtacgggaaggtcgtcgacatcttcatccccaaggatcgaagaactggtgagtcaaggggttttgcattcgtgc

SEQ ID NO: 151039 - DNA, 242 bp, Glycine max
gcaaaggattctacccgccgctcgatgggaattgcgcttcaaggcgtctcgtagggctaatccgcctcacgagggtcaccaacggcacgtgcctttggggggccgaggccccctactgctggtcggcaaacggacggcgggcgcacgcatcgcttctagcccggattctgacttagaggcgttcagtcataatccaacgcacggtagcttcgcgccactggcttttgcaccaagcgcgatga

SEQ ID NO: 151040 - DNA, 237 bp, Glycine max
gcacaatggcctcgacacaatgctttttgcaccaccacgccctcaccactccagctagagcttcaacacagacgcctagttgtgagcaccaaaccaaaccacattgtttgcaaggcagcacagaagcaggttactgtccaagagggtgaggacactactactggccttgtctctcgcaggttggccctcactgtgctcattggtgctgctgctgttggctctaaggtggcacctgct

SEQ ID NO: 151041 - DNA, 236 bp, Glycine max
atagatttgggaacacttcctcaagctccatttggtatgagttggcttacattgaagccaaagggaggatcaagaagggtaacaggatttggcaaattgcgtttggaagtggtttcaagtgtaacagtgcggtttggcaggctctgaggaatgtgaggccttctcctaatggaccatgggaagattgcattcataagtatcctgtggaaatagtcacatagtgatcatagttcagt

SEQ ID NO: 151042 - DNA, 235 bp, Glycine max
gctcaacttgggagttggtgcttaccgaactgaggaaggaaaacctcttgttttgaatgtagtgaggcgagttgaacagcaactcataaatgacgtgtcacgcaacaaggaatatattccgatcgttgggcttgctgattttaataaattgagtgctaagcttatttttggggctgacagccctgctattcaagacaacagggttaccactgttcaatgcttgtctggaactggt

SEQ ID NO: 151043 - DNA, 234 bp, Glycine max
cctaagtctttgggaatagtgctgcaatggcttcaagtcaggaggaggtgacccttttgggagctactggaagcccatttgtgtgcagggttcatattgccctcaagttgaagggagttcaatacaaatatgtcgaagaaaatttgaggaacaagagtgaactgcttctcaaatccaacccagttcacaagaagattccagtgtttattcacaatgagaagtccatagcagagt

SEQ ID NO: 151044 - DNA, 238 bp, Glycine max
  unsure (1)..(238): unsure at all n locations
ggctcgagccgattcggctcgagctcangagcgccaacttccctcagaccaaagctgaggaaaaccctgctatcatgaatgacactaacgagcctggatcacttgctccaactggattgtttctcgctgccaccaaatacatggtcatccagggcgagcctggtgccgtcattcgaggcaagaagggtcctggtggtgttactgtgaagaagaccggtgcggccttgatcattggcat

SEQ ID NO: 151045 - DNA, 235 bp, Glycine max
aggcgataaagtgtggtgtataggccctgtgtcactcattaacaaggatcatttggataaggctcaaagaggtagggcctcaattgatgtgtcccaatacttagaatggcttgattgtcagaagccagggactgtaatctatgcatgtcttggaagcctatgcaatttaacaacaccccaattgatagagcttggtttagccttggaagcatcagaaagacccttcatttgggtt

SEQ ID NO: 151046 - DNA, 237 bp, Glycine max
attttctagcttccaaaccctaacactcctcttcctcttcgatcatcacctctccacaatgccgccgaagttcgacccctcccagatagtcgacgtcttcgtccgcgttaccggcggcgaagtcggcgcggcgagttccctggccccgaagatcggtcccctcggtctctcccccaagaagatcggagaagacatcgccaaagaaaccgccaaggactggaagggcctccgcgtcac

SEQ ID NO: 151047 - DNA, 239 bp, Glycine max
gcaagaaggactcgacgacggcttcaggattgtaattaacgatgggccgaaaggatgccaatcagtttaccacattcatgtgcacctcctcgggggaagacagatgaactggcctccaggctaaagtgtatgagagtaataatctgcttgtgctatcttttaataatggtttaagacaactaataagttgctacattgaagtgacaccatgtagttaaagataatcagtgttgaatgtg

SEQ ID NO: 151048 - DNA, 237 bp, Glycine max
gcagcggagtaaagaggggagaggagagaggagaagagaagctaaagaaagaaaggagatgggagtggagaagcagttgttgaggtctggcaccggtccgaagccaattcccggtcagaacgtaaccgttcactgcactggtttcgggaagaacggtgacctttctcagaaattctggagcacaaaggatcctggccagaacccattcactttcaaaatcggccaaggttctgttat

SEQ ID NO: 151049 - DNA, 236 bp, Glycine max
gggaattgttcgcaaatggatctcaagattcgaagtctggccatacctagagacttacactgaggatgtcgcccttgaacttgccaaggagttgcaagccaagccagatctgattgttggaaactacagtgatggaaacattgttgcctctttgttagcacataaattaggagtaactcagtgtaccattgctcatgctctagaaaagaccaagtaccctgagtctgacatttact

SEQ ID NO: 151050 - DNA, 235 bp, Glycine max
ggaggtttggaatgacagaaatcccttgttgccttctgacccttaccagagagctcaggctagattctgggctgattatgttgataagaagatatatgatcttggaaggaagatttggacatcaaaaggagaagaaaaagaagctgccaagaaggagttcatagaagcccttaaattgttggaggaacagctgggagacaagacttattttggaggagacaatctaggttttgtg

SEQ ID NO: 151051 - DNA, 235 bp, Glycine max
gcggcggcaacagggagagaagatgaagttcaatccacgtgtgtcgagcagccgccgcaagagccgaaaggtcatttcacggcgccgtcgagcgtgcggcgggtgcttatgagcgcccctctgtcggcggagctgcggtccaagtacaacgtgaggtcgatcccagtacggaaggaggacgaggtgcaggtggtgcgaggaacatacaagggtcgcgaggggaaggtgactcagg

SEQ ID NO: 151052 - DNA, 236 bp, Glycine max
ctcgagccgattcggctcgaggtctgatgtatatagttttggggacgtcttcttggagctgacttactggccgtaaagccaatgacagcactcgaccccatggagaacaaaaccttgtcacatgggcacgtccactgttcagtgaccgcaggaagtttccaaagttagcagatccacagctgcagggacggtatcccatgcggggtctttaccaagctctagccggcatcaatgtg

SEQ ID NO: 151053 - DNA, 232 bp, Glycine max
ctctctctctctgtctctctctctctagacttagattttgtgaatggctgaagtggaagagggacaggtcatcggcgtccacaccgttgatgagtggaagctgcaactccagaatgcaaaagactccaaaaaactgattgtggtggattttactgcttcctggtgtggtccatgccgttttatggccccagttcttgcagagattgcaaagaaaactcctgaattgatcttc

SEQ ID NO: 151054 - DNA, 235 bp, Glycine max
acagactgtggttggtgatttggccactcaaggggagaggctgcagtctttgctcagctggagagatccaagagccactgccctctttgtgattttctgtctggttgctgcaattgtactgtatgtcaccccattccaaattgtggcccttttcactggaatttatgtgttgagacacccgaggttccgccacaagcttccttcagtgcctctgaatttcttccggaggctgcct

SEQ ID NO: 151055 - DNA, 234 bp, Glycine max
gtcaagttcgccgactgcgcgatctgcctcaccgagttcgcagccggagacgaaatccgagtgcttcctcagtgcggacatggcttccacgtcagctgcatcgacgcctggctcagatcgcattcctcctgtccatcctgccgtcagattctggtggtttctcgctgcgacaagtgcggcgggatcccggctccggcgagttccagctcggcgccaccgctggcggactcgggg

SEQ ID NO: 151056 - DNA, 236 bp, Glycine max
ctcgagccgctcgagccgcccgtcgcgccgttcaatttcctcggcctcagccaggaccagagtaacggtaacgtcctcgtcaccatccgagccgagggtagggttcgttggaaggtcggcaccttcatctccggccgctaccacctctacgttcgctgcccggcgttcatcagctttggaccccgcagcaatggaatcgtcgtcggagagaacgccatcaagttccagattatcca

SEQ ID NO: 151057 - DNA, 232 bp, Glycine max
ctgcgactgcgcttcagcacaatgggtgcctacaagtatgtttcggagctatggcgcaagaagcagtctgatgttatgagattcttgcagcgggtgaggtgctgggagtatcgccagcaaccttctattgtccgtttgacaaggtctactcgcccagataaggctcgtcgcttgggtttcaaggctaagcagggttacgtgatttaccgtgttcgcgtacgaaggggtggcc

SEQ ID NO: 151058 - DNA, 252 bp, Glycine max
gaaaaataaccaatttgacccttagtccaagtattatatttggatatttattaaaatcaccttttgggggagaagggtggattgttagtgtggacgatttggaagatataattggggggcatgtattgttgggttccatttgtatacttggtggaatctggcatatcttaaccaaaccttttgcatgggctcggcgtgcacttgtatggtctggagaagcttacttatcttatagtttaggtgctttatctg

SEQ ID NO: 151059 - DNA, 252 bp, Glycine max
acaggctctgccgttgctttgatgattcatgataactcgtcggatcgcacggcctttgtgccggcgacgcatcattcaaatttctgccctatcaactttcgatggtaggatagtggcctaccatggtggtgacgggtgacggagaattagggttcgattccggagagggagcctgagaaacggctaccacatccaaggaaggcagcaggcgcgcaaattacccaatcctgacacggggaggtagtgacaata

SEQ ID NO: 151060 - DNA, 251 bp, Glycine max
ctgataaaggcaggacattgttgcttggtgtggatgacatggatgttttcaagggaataagtttgaagttgttggccatggagcagcttctcattcagcatcctgagtatcgggaaaaggtggtgctggtccagatagctaatcctgcgaagtggcgaaggtaagctgtgccacaagtgcaaacctagacgactgccactgtggaacgaattgctgatgcatttggtgaaacgctggtatgatcccgtcat

SEQ ID NO: 151061 - DNA, 250 bp, Glycine max
tcgagcgaatcggctcgagctgatgttgctttgggatggtaggttgcccttggttctagcattcacttttgccactagcttagagcaggagtacaggagtgatatctttggggagagaggaattttacttggtgctgttcatggagttgtggaatccttgtttaggagatacactgataatggaatgaacgaagatctggcctataagaatactgttgagtctataacagggattatatctaaaaccatc

SEQ ID NO: 151062 - DNA, 251 bp, Glycine max
cggcaaatggagcaattgctgaagctctgaaggaggaaagtgaagtccacatagttgactttcagattggccagggaacccagtgggtgagcttgattcaggctctagctcaccgccctggagggcccccgaagatccgaatatccggtgttgatgactcctattcggcttatgccaggggaggagggcttgatattgttgggaaaaggttatctgcacatgcacagtcatgtcatgtgccttttgagttc

SEQ ID NO: 151063 - DNA, 256 bp, Glycine max
aaaagttccctcctgttcccttgttgaagtcttttctcaaggatgctaagaaagttgcggcttctattttggaagatcctaataatgcaggccgagctgcgtacctagctgcaaggaaagagcagtctgcactcagggctgtgattaaatgcattgaagaatacaaacttgaggatgagttccctccagaaaatctgaagaagcgacttgaccagttagagaaggtgaagaccgagaaaaggaaaccagtggcagt

SEQ ID NO: 151064 - DNA, 258 bp, Glycine max
gaaacatgagtgagaatagtaaaaccctgcgtttcggcatcttaggctgcgccaacatcgccagaaaagtggctcgagccattgctctcgctccgaacgccactctctgcgccatcgcgagccgttccagagagaaggcggagaagttcgccgccgagaacgggtttccggcgaccgtgagggtttacgggagctacgatcaggtgttggaggatccatgcgtggacgccgtgtacctccccctccccacgagtctgc

SEQ ID NO: 151065 - DNA, 263 bp, Glycine max
ggccaggcaagccccactcaaccaccacacctctcctcgttcacgctacccctttctgctcttcttctacctttcaagttttaaaagtataaagatggcagagacattcctatttacctcagagtcggtgaacgagggacaccctgacaagctctgcgaccaaatctccgatgctgtcctcgacgcttgcctcgagcaggacccagacagcaaagttgcctgcgaaacatgcaccaaaaccaacttggtcatggtcttcggag

SEQ ID NO: 151066 - DNA, 263 bp, Glycine max
  unsure (1)..(263): unsure at all n locations
aaaagatgcaggcacggcagaattaccggaatttatggcacaccgatctcatgagatccattcaggccgatactccttattgttgcctcgcgttgtggtgtgcaccatgtgtgtcttaccttcttcgcaaacgagctctctatgatgatatgtcaaggtacacatgttgtgctggctacatgccttgcagtggtaggtgtggagaaagtaaatgtccngaatttngcctttggnnnnaggtttccccncggntttgaattcag

SEQ ID NO: 151067 - DNA, 255 bp, Glycine max
ggctctgcctgttgctttgatgattcatgataactcgtcggatcgcacggcctttgtgccggcgacgcatcattcaaatttctgccctatcaactttcgatggtaggatagtggcctaccatggtggtgacgggtgacggagaattagggttcgattccggagagggagcctgagaaacggctaccacatccaaggaaggcagcaggcgcgcaaattacccaatcctgacacggggaggtagtgacaataaataa

SEQ ID NO: 151068 - DNA, 253 bp, Glycine max
cgcgtcgctccgcaccagtttcaccgcacgaatatcttgttgtttggagcgatccgagaaaaactctgtaaacatgttggtttaccaggacctccttacaggtgatgagcttctctctgactccttccgttacaaggaaattgagaatggaatgctgtgggaagttgaggggaagtgggttgttaaaggagcagttgatgtagacattggtgcaaacccttctgctgagggtggaggagaagatgagggagtt

SEQ ID NO: 151069 - DNA, 253 bp, Glycine max
gggggtagggtttggggtttacagtgggcaaggacgactgtgagctggcgcccacgtcgtccatacaaaaggcgggcgtgaaaaaagcaaggagcgtatcaatatcaaaaaatgatgaaaacgaatacttcactaagcaggaaaaaaacaagatgattagatattgtttaatttttttcatcatcatcatatatagtaagttccacctttttcttttaagaatttttctagttctatttttctttcgctagtt

SEQ ID NO: 151070 - DNA, 250 bp, Glycine max
cgtatttgtctacaaactggtgctaatgtcgatggttacagtcctatctacgacaccaaggactggtctccaaccggtgatgtctacgctggcggtacgactggcttggctatctgggctgtgactctacttggtcttcttgctggtggtgcacttcttgtctacaacacaagtgctttggcgcaataaactttgcaaatcgatgttttaagctcaaacttagtccatgtaactatctaaaaatgaagaa

SEQ ID NO: 151071 - DNA, 232 bp, Glycine max
ctttgtttgcttctcaagtctctcgaagcctctttctctctctgctagaagctatctgtgtttggtgttactaagtctccaacaagcaaagtacatggttgatttggaaatccaggtccccaccccattcgacccgtttgccgaggcgagagaatcggatgcccccggagcaaaggagtatgtgcatattcgaattcagcagaagaatgggaagaagagtctgaccacagtg

SEQ ID NO: 151072 - DNA, 253 bp, Glycine max
ggaagaacgggacatgcccttggctgagacctgatggcaagacccaagtcactgttgagtactacaatgacaagggtgccatggttccaatccgcgtccacactgtgctcatctccacacagcatgatgagactgtcacaaatgatgagattgcagctgatcttaaagaacacgtgattaagcctgtgattcctgagaagtaccttgatgagaagaccattttccatttgaacccttctggcaggtttgtcat

SEQ ID NO: 151073 - DNA, 226 bp, Glycine max
aacagcctctggtcgatggaacaatgtaggcaagggaagtcggcaaaatggatccgtaacctcgggaaaaggattggctctgagggctgggcacgggggtcccagtcccgaacccgtcggctgtcggtggactgctcgagctgcttccgcggcgagagcgggtcgtcccgtgccggtcgggggacgcattgggaacgggcccttcggggcctcttgcccgggcgtc

SEQ ID NO: 151074 - DNA, 253 bp, Glycine max
tggcatttgagtttccttattgacaatcccaaacagtctacagtttttgatattctcttgggaatctctcaagagtttgaaattgctggtaatactcttatgccagctttttctgttccacaggctactgccagatcttctgaaaatgcggaatcctctgcatgatctggaatttgtgttttctttcgcttgttcgtttgtttaattcaataaaggaaattaggcatgaccctcttgttgagtatgctctgcc

SEQ ID NO: 151075 - DNA, 244 bp, Glycine max
ctggtggtgttattgctaaccgagagggtatttcatgggcaacaaaggacaagattcaacaagccaattactttgggtcgctgacccaggcatcagctatcagagtggggtctttccaaggggaagaaatatatgctccattcaagagcctgcttccaatggtgaaccctgatgatgttgtgtttgggggatgggatatcagtaacttgaacctggctgatgccatggccagggccaaggtgtt

SEQ ID NO: 151076 - DNA, 250 bp, Glycine max
cgtgtgcccatcatcgtcaccggtaacgatttctccacactctatgcgcctctcatccgtgatgggcgtatggagaagttctactgggcaccaacaagggatgaccgcattggtgtctgcactggaatttttcgcaccgattcaattcctgaacaggacgttgtcaagattgttgacaccttccctggccaatccattgatttctttggtgcactgagggccagagtatatgatgacgagtgaggaagtg

SEQ ID NO: 151077 - DNA, 246 bp, Glycine max
gaaaaaaaaaaaaagttgttcgaaatggcacgtacgaagcaaactgctcgtaattccacagggggaaaggcccctaggaagcagctggtaaccaaggttcaacgtaagtctgcaccaactactggtggtgtgaagaagccaatcgttatcgtcctggtaccgttgctcttcgtgagattaggaaataccagaagagtcccgagcttttgatcaggaagctccccttccaaagggtggttcgtgaaa

SEQ ID NO: 151078 - DNA, 249 bp, Glycine max
gttcctgtagtcacagtgcaactcagatacaatggttgggttacagagttgcaggatctagaaaagtcaaggcgactggggaaagctgttgggttggataaccttctctatacacccgatgcagatttttcttgctttgcagaccttgcactttcatctccagaggattattacattgagggacaaggatcattgctccaatgtgttctgacgccaggagatccatacatgcccttaccaaatgacgaa

SEQ ID NO: 151079 - DNA, 254 bp, Glycine max
ttcaatgtgggatgctgatttctatgtcaaggtggatgatgatgtccatgtcaatttaggtgtcctggcaacaacccttgctcgtcatctatcaaaacccagggtctacattgggtgtatgaaatcgggacctgtcctttctagaaaggatgtcaaataccatgaacctgagttttggaagtttggagaagaggggaacaaatacttccgacatgcaactgggcagatatatgcaatctcaaaggatttggcca

SEQ ID NO: 151080 - DNA, 256 bp, Glycine max
ctcgagccgtttttattggcattggaaacacattacactatggcagggtaatgtttcacagtttaatgaatcttctacctatttgatgggatggttaagagattatctatggttgaactcttcacaacttatcaacggatataacccttttggtatgaatagtttatcagtctgggcatggatgttcttgtttggacatcttgtttgggctactggatttatgttcttaatttcctggcgcggatattggcaggaa

SEQ ID NO: 151081 - DNA, 259 bp, Glycine max
ggtaaattagaagactgccttcaactgttggtagaaagcaatcgaattccagaggcagctttaatggctcgatcttatctcccaagtaaggtctcagagatagtggcaatttggagaaaagacctcaataaggtcaatccaaaagctgctgaatcattggctaatcctgaagaatatccaaatttgtttgaagattggcaagttgcactagctgtcgaatctaaagctgtggaaacaaggaatgtgtaccctcctgcgg

SEQ ID NO: 151082 - DNA, 252 bp, Glycine max
cgacgctccgcaccagtttcaccgcacgaatatcttgttgtttggagcgatccgagaaaaactctgtaaacatgttggtttaccaggacctccttacaggtgatgagcttctctctgactccttccgttacaaggaaattgagaatggaatgctgtgggaagttgaggggaagtgggttgttaaaggagcagttgatgtagacattggtgcaaacccttctgctgagggtggaggagaagatgagggagttg

SEQ ID NO: 151083 - DNA, 253 bp, Glycine max
gggagagctggccactgagaaacatgttcgatatatattatcagttgaaaagaggaaagataactttgaatctgtcgtaatggagcatctaagaatgaatggggcatattggggattgaccactctggatcttctaggaaagcttcataccgtcgatgttgatgaggttgtttcgtggttgatgagttgtcagcatgactcagggggatttggtggaaatgttgaacatgatccgcacatcctctatacacta

SEQ ID NO: 151084 - DNA, 249 bp, Glycine max
gaaacaagcaaactagtcaatctgaaggttatgggtttattgagtttaatagtcgtgctggagctgagagaattcttcaaacatataatggggcaataatgccaaatggggggcagagtttcaggttgaattgggcaacttttagtgctggtgagaggtcgcgccacgacgattctccagattacaccatatttgttggtgacttggctgcagatgttactgattatcttcttcaggagacatttaggg

SEQ ID NO: 151085 - DNA, 248 bp, Glycine max
atatagcccaagccctatacaaccaaaccctaacacacacccatttgattcagtttccatggctagcctcaaggttgcatttttggctgcagtgctctgcatggttgtggtgagtgcacccatggcacatgcagctatcacgtgcgggcaggtgacgaatagcctgatcaattgcatcggttacctccagaacggaggaacgccgccgtcgggatgctgcaacggagtgaagagcctcaatgccgccg

SEQ ID NO: 151086 - DNA, 244 bp, Glycine max
tgcaaaggattctactcgtcgctcgatgggaattgcgcttcaaggcgtctcgtaagcccaaatccgcctcacgagggtcaccaacggtacgtgcctttagggtgccgaagccccctactgctggtcggcaaacggacggcgggcgcacgcgtcgcttctagcccggattctgacttagaggcgttcagtcataatccaacgcacggtagcttcgcgccactggcttttgtaccaagcgcgatga

SEQ ID NO: 151087 - DNA, 249 bp, Glycine max
ggattctacccgccgctcgatgggaattgcgcttcaaggcgtctcgtagggctaatccgcctcacgagggtcaccaacggcacgtgcctttggggggccgaggccccctactgctggtcggcaaacggacggcgggcgcacgcgtcgcttctagcccggattctgacttagaggcgttcagtcataatccaacgcacggtagcttcgcgccactggactttcaaccaagcgcgatgaccaattgtgcga

SEQ ID NO: 151088 - DNA, 243 bp, Glycine max
gctgtgtacatagggttatattattgatgcactgtatttgtattcaaattccaattccaaatggcgaacatatttgattgctgttagtttcccaggttatgtagactatgtgacaatgcagcattatttggatttgcccgatattctggctatttcatttgcttataatgtggaattcaaaaaaaaagaaaaaaaaaagaaaaaaaaaaaaagaaaaaaagaagaagaagaagaaaaagaggg

SEQ ID NO: 151089 - DNA, 257 bp, Glycine max
attgtgaggagaccactttgcatgatgtcaactttaaggaggagatgagacgaaagcagcaacagcaatatcgcgaggcatatgatgaagatgatgatgagccatctggtcaacgagtgcaatgtgctcaacagtagtgcaatttatggtagtagaggttctataatttctgcatggtttttatcttttgtttgcataatgcagttataactgcgtgataaatttaccctttaggttttggctggtaacgttattta

SEQ ID NO: 151090 - DNA, 244 bp, Glycine max
cgtcaacctctgcaaccaccgattccaaacatgcttcccctttcccttctcaagactgcccaaggccaccccattgtcgtggaactgaaaaatggggagacttataacgggcacttggttaattgtgatacatggatgaacatccatctccgagaagtcatttgtacctctaaagatggagatagattttggcgtatgcctgagtgctacattcgtggcaataccattaagtaccttcgggttc

SEQ ID NO: 151091 - DNA, 250 bp, Glycine max
caattttataagattgaatcgactaaaaaatgaaatgaatcatttcatattgatagtattgctatgcttagtccccaaagaaccagatttcgtaaacaacatagaggaagaatgaaaggaatatcctatcgagggaatcatatttgcttcggaagatatgctcttcaagcacttgagccagcttggataacatctagacaaatagaagcgggacggcgggcaatgtcacgaaatgttcgccgaggtggac

SEQ ID NO: 151092 - DNA, 249 bp, Glycine max
gcgagagaacaagaacataagggaaccacagcggcggtaacagaagaacaagcagagaatgggtcgagtgagaacgaagacggtgaagaaatcctctcggcaggtgatagagcgtcactactcgcgcatgaccctggacttccacacgaacaagaagcttctggaggaagtggcgataatcccgtcgaagaggctaaggaacaagatcgcggggttctcgacgcacctgatgaagcgcatccagaaggg

SEQ ID NO: 151093 - DNA, 248 bp, Glycine max
gacagaacaagaagagactgcaaaggggtggccggagaagctgaagcatgaattacatgagcatgagcttgtgttgacgcgccgcagggtgtattactgtgatgcttgcaatgaagagggacatatatggtcctactactgtggagattgtgactttgatctccatccaaaatgtgcattggaaaaggaggacaaagacggaagcaaagatgatgccaaggaagagaagtccaaagatgaatgggttt

SEQ ID NO: 151094 - DNA, 247 bp, Glycine max
ccaaattgacctcagtactgtagaacactgcgactcttcacacttttcttcttcccttcgtcttcagcttctgcttcttctcttgttgctgcttcaaaacagtgagaaaaatatggggttctcctcctttctgggtcgcgtcctctttgcttccctcttcatcctctcagcatggcagatgtttaatgaatttgatgacactggtggacccattgcaaaggagttgattcccaagttcactgttctg

SEQ ID NO: 151095 - DNA, 253 bp, Glycine max
ctcgagccgaatcggctcgagctggctcgagcattgcgatggtccgtgcggatgttgacgcaatgtgatttctgcccagtggtctgaatgacaaagtgaagaaattcaaccaagcgcgggtaaacggcgggagtaactatgactctcttaaggtagccaaatgcctcgtcatctaattagtgacgcgcatgaatggattatcgagattcccactgtccctgtctactatccagcgaaaccacagccaagggaa

SEQ ID NO: 151096 - DNA, 253 bp, Glycine max; identical to SEQ ID NO: 151072

SEQ ID NO: 151097 - DNA, 251 bp, Glycine max
ccaatatagcccaagccctatacaaccaaaccctaacacacacccatttgattcagtttccatggctagcctcaaggttgcatttttggctgcagtgctctgcatggttgtggtgagtgcacccatggcacatgcagctatcacgtgcgggcaggtgacgaatagcctgatcaattgcatcggttacctccagaacggaggaacgccgccgtcgggatgctgcaacggagtgaagagcctcaatgccgccg

SEQ ID NO: 151098 - DNA, 248 bp, Glycine max
cagaaatgatgttccgaaggacaacagtggcataaacctgaattttgacagtactagctgcacaccaacaatgtcatccactaggtcttttatctcttccttgagcatagatggaagtgtggctaacttggatggaagtgccttccatttaatcggagctccacactcttcttatcagaattcccagcagcacaagagaaagtgttctgccagaggtgatgagggaagcttgaaatgtgggagcagtg

SEQ ID NO: 151099 - DNA, 247 bp, Glycine max
gagactttgggtggtatctttaccaggttgattaaccgcaacaccacaattcctactaaaaagagtcaggtgttttcaacagcagctgacaatcagactcaggttggtatcaaggtgctacaaggtgagagggagatggctgtagacaacaaatcgcttggagaatttgagcttgttggcattcctcctgccccaagaggcatgcctcagattgaagtcacatttgatatagatgccaatgggattg

SEQ ID NO: 151100 - DNA, 247 bp, Glycine max
gcttatggaaattcttccaatgggactttaggtgacggtaatgaaggaacattgtttcctcaattgaatcaaatgatggctgggaattttaatgctcaagcaagggttccttgtctagatctcggtaatgaagactcatcatcaattcatgcagatgagcggaagcccaaaaaaagaggtaggaaacctgccaatgggagagaggagccgctgaaccatgttgaagctgagagacaaagacgtgaga

SEQ ID NO: 151101 - DNA, 246 bp, Glycine max
tctcgagccgattcggctcgagaagaagcagatagaccagaagatggattctacatccgatgaggaatcaccatcataatggagaaggcaaccatagaagatggcactgtcatataaatggatagggctcatttctgggctgattacccaaatgcgctggaagaggaatgctcccatctttggacagaagggtagctgtttgcaatgctgtgttacaatgcagaaagcagcagaacaccccatgtg

SEQ ID NO: 151102 - DNA, 247 bp, Glycine max
tacctaggcacccagagacgaggaagggcgtagtaagcgacgaaatgcttcggggagttgaaaataagcgtagatccggggattcccgatataggtcaacctttcgaactgctgctgaatccacgggcaggcaagagacaacctggtgaactgaaacatcttagtagccagaggaaaagaaagcaaaagcgattcccgtagtagcggcgagcgatatgggagcagcctaaaccgtgaaaacggggtt

SEQ ID NO: 151103 - DNA, 249 bp, Glycine max
aggcattctctcttctattctattctaaactcgaaacaatcttagagaaagaagcagaagaaaatgccgatttctagaattgccattggaaattcttcggagttgaaccaatctgatgcacttaaggctgcactagctgagttcatctcaatgctcatctttgtttttgccggggaaggctctggaatggcttataataagctgacaaacaatggttcagcaacacgagcagggttagtggcagcatca

SEQ ID NO: 151104 - DNA, 238 bp, Glycine max
ggatttcaagactgatctgcgtttccagagccatgctgtgcttgcattgcaagaggctgctgaggcataccttgttgggctctttgaggacactaacttgtgtgccattcacgccaagcgtgtgactattatgcccaaggatattcagctggcaagaaggattcgtggtgaccgtgcttgagttggtgcgttctgtgtttgtgaagatggattgttggtggctgcggatggtgtttgg

SEQ ID NO: 151105 - DNA, 251 bp, Glycine max
gaaatataactaatattctttagaataatcaaaaagaatattaaattcaaataaattttagatagaaaaaagacttaaaaaggaggatttgaaatgcgagatctaaaaacatatctttccgtggcaccagtagtaagtactctatggttcggggctttggcgggtctcttgatagagatcaatcgtttttttccagatgcattgatattcccttttttttcattctagttattgacacggaaagggtgaag

SEQ ID NO: 151106 - DNA, 254 bp, Glycine max
ggaaaaggctcagatcaacattgtggtggttggtcatgtggaccctgaggaggcaaccaccattaacgagctgaagaagcctgttgtggagaaagaagctccagggcatgccatatgagggcatgcacgtacggcctcggaggggaaccagaaaattatgttaacaaaataatctggaaccctaatgtatcagtgtcatcatcagtgtgtagtttaagctagctttgctatggttacgttctttgagatgagag

SEQ ID NO: 151107 - DNA, 257 bp, Glycine max
gcagaggccaggtaccccactatacaacatcaaggcatacctccctgtcatcgagtcctttggtttctcgagcacattgagggctgcaacatcaggccaggccttcccacaatgtgtgtttgatcactgggacatgatgtcttctgacccattggaggctggatcacaagctgcacagcttgtcactgacattcgcaagaggaagggcttgaaggaacagatgactcctctctccgagtttgaagacaagctttaaa

SEQ ID NO: 151108 - DNA, 256 bp, Glycine max
attcttttcatttccatggttagctccagcagccactacgatccacagccccaaccttctcacgtcactgctcttattacacgacctagttgtccggatctgagtatttgcctcaatattttaggcgggtctctaggaaccgtggatgattgttgtgccctcatcggtggtcttggtgacattgaagccattgtgtgcctttgcatccaactcagggccctcggaatattaaaccttaaccgtaatttgcagttaa

SEQ ID NO: 151109 - DNA, 258 bp, Glycine max
cacttttcatccttcgatcatacacttagttgcttccaattaagatggttctgctagagaagctctgggatgatgttgtggctggccctcaacctgagcgtggccttggcaagctcagaaaactcaccaccctcaaaactattgatgaaggagaaagtagcaagctgcagaagacgttgtcgatgccgtcgacaccaacaaccccgatgactccgacgactccaacgacaccgggatcggcccgtaaagctgacaacg

SEQ ID NO: 151110 - DNA, 255 bp, Glycine max
ttcgagcgattcggctcaggccaacagcaacctccctcgaacaatcatcaaggaaacgcagcgtttgctcagtgagccagcacctggtattagtgcctccccctctgaagagaatatgcgatatttcaatgtgatgatccttgggcctacccagtcgccttatgaaggaggcgttttcaagttagaactatttttgccagaagaatatccaatggctgctccaaaggttaggtttctaacaaaaatatatcatcc

SEQ ID NO: 151111 - DNA, 258 bp, Glycine max
aatttggagcgtgaagtgtaatgaaataaaattctatcgatttttttatttttagaggtggtatccagattattactcgaaattatgaataatttatggttggcttgattgaaccaataaaataaagtacccaggctctgtttagaaaaaaccaattggtaatatatctacgatcaccacttctatcatatccgtatattttacagaaaatattaaataagaaattcagaaaaggaagaagttttaacaaaaatacgt

SEQ ID NO: 151112 - DNA, 249 bp, Glycine max
cgaagatccttctccgacggcaagggtggttccgaggttacggggcggaaggaagggctgctgtggtacaaggatgcggggcagcacttgtttggtgaatactcaatggctgttgtccaggccaacaacctgctcgaggaccagagccagattgagtctggtcctctcagcctgcttgacactggcccttatgggacctttgttggtgtatatgatggacacggtggacccgagacgtcgcgctacgtc

SEQ ID NO: 151113 - DNA, 257 bp, Glycine max
ggaagcccgtctgatagcgctctgtgcgcgtactccgaaagggaatcgggttaaaattcctgaaccgggacgtggcggctgacggcaacgttagggagtccggagacgtcggcgggggccccggaaagagttatcttttctgtttaacagcctgcccaccctggaaacggctcagccggaggtagggtccagcggctggaagagcaccgcacgtcgcgtggtgtgcggtgcgcccccggcggcccttgaaaatccgg

SEQ ID NO: 151114 - DNA, 256 bp, Glycine max
gaaaaacgagccaattcatcattttctctcttctctgcttcttcttgttcaaatcttaggagctgaggagaatcaatcgagagaaatatgtctggtatcgctcgtggacgccttgctgaggaacgaaagtcatggcgcaaaaaccatccacacggtttcgttgccaagcccgagactctacctgatggcaccgtaaatttgatggtctggcattgcactattcctggcaagaccgggactgattgggagggtggat

SEQ ID NO: 151115 - DNA, 255 bp, Glycine max
ctcaacgagaacagaaatctcgtgtggaacaaaagggtaaaagctcgtttgattctgatttccagtacgaatacgaaccgtgaaagcgtggcctatcgatcctttagtccttcggaatttgaagctagaggtgtcagaaaagttaccacagggataactggcttgtggcagccaagcgttcatagcgacgttgctttttgatccttcgatgtcggctcttcctatcattgtgaagcagaattcaccaagtgttgg

SEQ ID NO: 151116 - DNA, 255 bp, Glycine max
aggaatcatgccctcaggctgaagacatcatcacagaacaagtcaagcttctctacaagcgccacaagaacactgctttctcctggctcaggaacatcttccatgactgtgctgttcagagttgtgatgcttcactgttgctggactccacaagaaggagcttgtctgagaaggaaacagatagaagctttgggttgagaaatttcaggtacattgagaccatcaaagaagctttggaaagagaatgccctggag

SEQ ID NO: 151117 - DNA, 257 bp, Glycine max
atagctcccactcactttctcgcagaaacgtattgtttttctctctttccgcggcctagatctgagcagtttggaaaccctaactgctctcaccaacgacatcaccactctctccgatcaactacctctttcgtcgccctaagtcatggcaggaattgcacccgagggatcacagtttgatgctcgtcaatatgataccaagatgaatgagctgcttacgtccgatggtcaggatttcttcacatcctacgatgagg

SEQ ID NO: 151118 - DNA, 249 bp, Glycine max
gagagaggaagatagccagctcttgagaaatgggttgagtccaaatgcaaaggggaaagtgaggcctgaagcagttattgaggctgcaactcttgctgccaatatgcagccatttgaggttgtttactatccccgggcaagtgccccagagttttgtgtgaaggccaatttagttagagccgcattgcaggttaggtggtgtcctggaatgaggttcaagatgccctttgaaacagaggactcctcgcg

SEQ ID NO: 151119 - DNA, 205 bp, Glycine max
ccagattgctttggctatcaaggacgaagtggaggaccttgaaaaggctggcatcactgttatccaaattgatgaagctgctttgagagagggtctgccactgaggaaatcagaacaagctcactacttggactgggctgtccatgccttcagaatcaccaatgttggtgtgcaggataccactcagatccacacccacatgtgc

SEQ ID NO: 151120 - DNA, 259 bp, Glycine max
ctcgagccggcaaactatgacattttcagtgtggctagtaacgcgaatgcaacttctagcagtggcatttataggctcaagttcaacacaacggtggatattatacttcaaaacgccaacactatgaacaaaaacaatagcgagacacacccgtggcaccttcatgggcacgatttttgggttcttgggtatgggaagggaaagtttgacgtgaacaatgacaccaaaaagtataatttggagaaccccattatgaaga

SEQ ID NO: 151121 - DNA, 259 bp, Glycine max
ctcgagcgtgatttttggttatggccttggcttcgttataataatggttggaacaaccattgggatggtgctgccatacttaattgggctactgttccgtgaccgaattcatcaatggttaaagagatggccccagaatgctgcactgattaggcttgctggggaagggaactggtctcgtcaatttcaagtggttgcactgtttagggtttctccttttccctatactatattcaattatgccgtggtagtcacaaat

SEQ ID NO: 151122 - DNA, 259 bp, Glycine max
  unsure (1)..(259): unsure at all n locations
cctgggtttcggttccaccgtactgatgaaatanttgtagttcactacctcaagataaaagcagcttctgctcctcttccggtatccatcatcgccgaggttgatctctacaagttcgatccatgggagctacccgctaaggccgcgtttggggagcaggagtggtatttctttactccgagggacaggaagtatccgaacggcgcgaggccatacatggcggcgacatctgggtattggaaggctactgggactgata

SEQ ID NO: 151123 - DNA, 254 bp, Glycine max
ctctcaagcctgtggctatagaacttagcctccctcatgctggacctaattcccggtcaaagcgcgtggttacacctcctgttgatgctactactaattggatgtggcagcttgccaaggcccatgtttgctccaatgatgctggggtgcaccaacttgttaaccattggttacgtacacatgccaacttggaaccatttatattggcggctcataggcaattaagtgctatgcatccaattttcaagttgttg

SEQ ID NO: 151124 - DNA, 253 bp, Glycine max
gtgtatgacaacatgagaaaaccagcatttgtttttgatggaaggaacattgtggatgtggagaagctacgtgagattggtttcattgtgtactcaattggcaagccattggatccatggctcaaggacatgccagctgtggcataagagagacatttcatctcaaggattttgaggcattattcagtttggttcaattttattactactggcaattgttttttggaacaattttcttggttgccatttttca

SEQ ID NO: 151125 - DNA, 215 bp, Glycine max
cggctcgagtcagtttcgggggaagagatccagcagcaatggtgtacgtcaaggctcagaaatcaaaagcctacttcaagagatatcaagtcaagttcaagagaagaagagagggaaaaaccgattaccgtgccaggattcggttgattaatcaggacaagaacaaatataacactccgaaataccgatttgtggttcgctttagcaacaaggac

SEQ ID NO: 151126 - DNA, 216 bp, Glycine max
ctcgagcctctcgagccgcttctaatgtctccgccgagtcttactggcccagcctcttcgccaagctcgcccagaataagaacatcgaagacctctttttgaacgccggcggtggtggggccgccgttgcagttgccgctcccgccggcggtggtggtggttcctctgctgcagccgcacccgccgccgagtcaaagaacgaagaagtgaaggaag

SEQ ID NO: 151127 - DNA, 255 bp, Glycine max
gtgatttcagtgagtgatcggtgttcacttgatctcatcataatcgtcagcgtcaattgaagaagatgccgatcagaaacatcgccgtcggaaggcctgaagaggcgactcaccccgacacgttgaaggcggctttggctgagttcatctcaaccttcatcttcgtgttcgccggctcaggctccggcatcgcctacaacaagctcaccgacaacggcgctgccacccctgccggcctcatctccgcctccatcg

SEQ ID NO: 151128 - DNA, 255 bp, Glycine max
ctcgagccgctcgagccgctcgagccgattcggctcagatggggtcggggtggtgccgaccggagctactgggggaaatgtacgagcgccttcacgcgcacttggagagtgcgggtattgatggggtcaaagttgatgtcatccacttgctagaaatggtgtgtgagaaatatggagggcgagtggatatggcgaaagcatattacaaagctctcactgcttccgtgagaaaacattttaagggcaacggcgtca

SEQ ID NO: 151129 - DNA, 259 bp, Glycine max
tgaccgttgagtattacaatgacaatggtgccagggttcctattcgtgtacacaccgtgctaatctccacccaacacgacgagcatgtcaccaatgacgaaattgctgctgacctcaaagagcatgtgatcaagcctgtgatcccagagaagtaccttgatgagaagaccattttccacttgaacccttcaggccgttttgtcattggtggccctcatggcgatgctggtctcaccggccgcaagatcattatcgatac

SEQ ID NO: 151130 - DNA, 174 bp, Glycine max
ggaacaaggtggtgctagcgaatttcgacaagggcacggattggaagttcgagtgggaacccataacggaggggttccacgtgaagctgagaagctggtgcgggaagtacctcagaggtaacggcggcacggtgccatggagaaactccgttacgcacgatgaccctgctagct

SEQ ID NO: 151131 - DNA, 251 bp, Glycine max
ctaattcagactgtgaaactgcgaatggctcattaaatcagttatagtttgtttgatggtatctactactcggataaccgtagtaattctagagctaatacgtgcaacaaaccccgacttctggaagggatgcatttattagataaaaggtcaacacaggctctgcctgttgctttgatgattcatgataactcgtcggatcgcacggcctttgtgccggcgacgcatcattcaaatttctgccctatcaa

SEQ ID NO: 151132 - DNA, 254 bp, Glycine max
gtcgcttctagcccggattctgacttagaggcgttcagtcataatccaacgcacggtagcttcgcgccactggcttttcaaccaagcgcgatgaccaattgtgcgaatcaacggttcctctcgtactaggttgaattactattgcgacactgtcatcagtagggtaaaactaacctgtctcacgacggtctaaacccagctcacgttccctattggtgggtgaacaatccaacacttggtgaattctgcttcac

SEQ ID NO: 151133 - DNA, 252 bp, Glycine max
tcaagagacaaactgctttgaaaaatgggatccaaggttgttgcatccgttgcccttctcctctccatcaacattcttttcatttccatggttagctccagcagccactacgatccacagccccaaccttctcacgtcactgctcttactacacgacctagttgtccggatctgagtatttgcctcaatattttaggcgggtctctaggaaccgtggatgattgttgtgccctcgatcggtggtcttggtga

SEQ ID NO: 151134 - DNA, 257 bp, Glycine max
ggtgatgctctaaaaaccaacatcaccacactaggacccttggtgctacccttttctgagcagcttctcttctttgccacccttgtgtggaggcacttatttggcagcaaaaatggtgggaattcaccctcaatgaagaagccttacattcctgactacaaactagcttttgagcacttttgtgtgcatgctgcaagcaagaccattcttgatgagcttcaaaggaacttggaactgagtgacaagaacatcgaagc

SEQ ID NO: 151135 - DNA, 258 bp, Glycine max
gtttccggtgatccaagacgtgcagtgtgcacaggtatcaccatcttcctcctcttagccggcgtcactctcctcgtcctctggctggtctaccgtccccacaagccgcgcttcacggtcatcggcgccgccatctacggcctcaacaccagcacgccgccgctcatgtcaaccaccatgcagttctccgtcctcataaagaacccgaacaggcgtgtctccatttactacgacaggttctccgcctttgtctcgtac

SEQ ID NO: 151136 - DNA, 260 bp, Glycine max
cttcagatctctctcccttccttccatcccaaccacaaggttgctgagaagacataaaaaatggtgaagatttgctgcattggagctggctatgttggtggcccaaccatggctgtaattgccttgaagtgtcctgagatcgaggtggtcgtggtggacattgctgcaccgcgaatcaacgcgtggaacagcgaccacctcccgatatatgagcctggccttgatgatgtggtgaagcagtgcagggggaagaatctctt

SEQ ID NO: 151137 - DNA, 253 bp, Glycine max
ctcgagccgctctctgagacagcgtcactggtacattcagagcacctgtgcaacctctggggagggcctttacgaaggtctggactggctttccaacaacattgccaataaggcttaatgcctttgggagacgggagtcttgcggattggtatttctggatgcagggttgaacattatctagcttttatttcttggtcctcttccaagacaactcgaatttgtgttcatgtaatgtggtttaggacatctcgg

SEQ ID NO: 151138 - DNA, 254 bp, Glycine max
ggaagagctcgacttcaaagttttccaactaacctcacacaacattctcagcactcaaggagaaagccaagggtagcaccaatgctcgtgccactgggtttaatgttatcactgcccatatatggagatgcaaggccttatctgcaccctacaacccctctaggtcatccaccatactatatgccgtggacatacgtccacggctgaaccctcccctccccaaatcctttgcgggtaatgctgtgttaaccgcg

SEQ ID NO: 151139 - DNA, 252 bp, Glycine max
aaaagaagccggtgctgtctccttgttctccatcgtaagatataactaattatttttatatcttcatcaagatgcgccgagggagaaccgccgccgccgctgccgccgttgtggatcccacgccggaccaggccaaggagacgacgcggttccgtggcgtgaggaagcggccgtgggggcgattcgcggcggagattcgagatccgtggaagaagcagcgcgtttggctggggaccttcgattccgccgagg

SEQ ID NO: 151140 - DNA, 251 bp, Glycine max
gctcgtagttggaccttgggttgggtcgatcggtccgcctccggtgtgcaccggtcggctcgtcccttctgccggcgatgcgctcctgtccttaactggccgggtcgtgcctccggtgctgttactcttgaagaaattagcgtgctcacagcaagcctacgctctgtatacattagcatgggataacaccacaggattctgatcctattgtgttggccttcgggatcggagtaatgattaacagggacagt

SEQ ID NO: 151141 - DNA, 252 bp, Glycine max
gcagcagccaccgaccagaccacagaggcaccggttgggttcaccccaccggaactggacccaaacaccccttccccgatcttcggaggcagcaccggcgggctcctgcgcaaggcccaagtggaggagttttatgtcatcacatgggactccccgaaagaacagatctttgaaatgcccactggcggcgctgccatcatgagggagggtcccaaccttctccagttcccgccgaaggagcagtgcttggct

SEQ ID NO: 151142 - DNA, 253 bp, Glycine max
gaaaggcttatggtggatacctaggcacccagagacgaggaagggcgtagtaagcgacgaaatgcttcggggagttgaaaataagcgtagatccggggattcccgatataggtcaacctttcgaactgctgctgaatccacgggcaggcaagagacaacctggtgaactgaaacatcttagtagccagaggaaaagaaagcaaaagcgattcccgtagtagcggcgagcgaaatgggagcagcctaaaccgtg

SEQ ID NO: 151143 - DNA, 252 bp, Glycine max
aaaacggtaaaactctgggatttgtcgaacaaccaaccctcttgtgtagcatctaaatctccgagagcaggggctatctttaaaatttctttctctgaggacaaccccttcttgttggctataggaggctcaaagggtaaattgcaagtatgggacaccttatctgattctggcatctctagaagatacgggaactacaacaagaatagatcgcaatctgggtcttgatataattgagttgtgctgctgaag

SEQ ID NO: 151144 - DNA, 255 bp, Glycine max
accgaatgagagcattaacctcttcttcttccactttcattccaaagcgttattccttcttcttcttcctctccattctcttcgctcttcgatcctcgtccgggggctgctccgaataccaccaccaccacgcgccgatggccacgataggaggcttacgcgactcccaaggctctcagaacagcgtccaaaccgaggccctcgctcggttcgccgtcgatgaacacaacaagaagcagaattcacttctggagt

SEQ ID NO: 151145 - DNA, 258 bp, Glycine max
ctcgagccgctcgagccgaacaaacctcgacttctggaagggatgcatttattagataaacggtcaacacaggctctgcctgttgctttgatgattcatgataactcgtcggatcgcacggcctttgtgccggcgacgcatcattcaaatttctgccctatcaactttcgatggtaggatagtggcctaccatggtggtgacgggtgacggagaattagggttcgattccggagagggagcctgagaaacggctacca

SEQ ID NO: 151146 - DNA, 238 bp, Glycine max
atatagcccaagccctatacaaccaaaccctaacacacacccatttgattcagtttccatggctagcctcaaggttgcatttttggctgcagtgctctgcatggttgtggtgagtgcacccatggcacatgcagctatcacgtgcgggcaggtgacgaatagcctgatcaattgcatcggttacctccagaacggaggaacgccgccgtcgggatgctgcaccggagtgaagagcctc

SEQ ID NO: 151147 - DNA, 252 bp, Glycine max
cgcgtgcatagcagagtcagagacagagacgcagccatggggcggagacctgcgaggtgttataggcaaattaagaacaagccataccccaagtcacgtttctgccgtggtgttcctgatcccaagatcaggatttatgatgttggtatgaagaagaagggtgttgatgagtttcctttctgtgtccatctggttagttgggagaaggaaaatgtttcaagtgaggccctggaagctgctcgcattgcttgc

SEQ ID NO: 151148 - DNA, 251 bp, Glycine max
attttccctcactttctcgctccccaaacgcccctctctctcctccaatggccgaccagctcaccgacgaccagatcgccgagttcaaggaggccttcagcctcttcgacaaggacggcgatggttgcattactaccaaggaacttgggactgttatgaggtcacttggtcaaaacccaactgaggcagaactgcaggatatgataaacgaggttgatgctgatggcaacggaaccatcgatttcccagag

SEQ ID NO: 151149 - DNA, 252 bp, Glycine max
gcccaaaaggccattgagaagctgaatggaatgctgctgaatgataaacaagtgtatgtgggacccttccttcgcaagcaagagagagaaagtactgctgacaaggcaaagttcaacaatgtttttgtgaagaatctgtcagaatcaaccactgatgatgaattgaagaatgtttttggtgaatttggaactattactagtgctgtcgtaatgagggatggagatgggaaatcaaagtgttttggatttgtg

SEQ ID NO: 151150 - DNA, 253 bp, Glycine max
aaggattctacccgccgctcgatggtcattgcgcttcaaggcgtctcgtagggctaatccgcctcacgagggtcaccaacggcacgtgcctttggggggccgaggccccctactgctggtcggcaaacggacggcgggcgcacgcgtcgcttctagcccggattctgacttagaggcgttcagtcataatccaacgcacggtagcttcgcgccactggcctttcaaccaagcgcgatgaccaattgtgcgaat

SEQ ID NO: 151151 - DNA, 167 bp, Glycine max
ctaacatttccctttacttgctaaaacatggtccaagaaaagaaactagttgacgaggtgtccggttggctcaaaatttatgacgacggttcagtggaccggacatggtccggaccggaccaattcaagttcatggccgaaccggcccctccccatgaacaattcat

SEQ ID NO: 151152 - DNA, 245 bp, Glycine max
ttagggttttccaattcacagagcaacacaacgaaccaacaatggcgcagctcagccgcagtcgcagccgcagcacgggcaagcagcgctggagcaggtgcagtgcttcggtcgcaagaagaccgccgtggccgtgacctactgcaagcgcgggcgcggtctcatcaagatcaacggctgccccattgagctcgtggagccggagtcctccgcttcaagccttcgagcctatcctctgttgggta

SEQ ID NO: 151153 - DNA, 233 bp, Glycine max; identical to SEQ ID NO: 150038

SEQ ID NO: 151154 - DNA, 239 bp, Glycine max
gagcggaggagagaaaatgacgacgaggttcaagaagaacaggaagaagagaggccacgtcagcgccggtcacggtcgtatcgggaagcaccgcaagcatcccggtggtcggggtaacgccggtggcatgcaccaccaccgcatcctcttcgacaagtaccatcccggtttcttcggaaaggtgggtatgcgctacttccacaaactccgcaacaaattctactgccccatcgtcaaca

SEQ ID NO: 151155 - DNA, 236 bp, Glycine max
gcctggaaacattgattttagcaaaatcttgagtgaccctgaactgatggcggcatttagtgatccggaggttatggctgctcttcaagatgttatgaagaaccctgctaattttgccaagcaccaatcaaatccaaaggtaggtcctgtaattgcgaaaatgatgaccaaacttggaggtggtcccaagtgaatacttttagatgcttataagttatatgagacttcaacattcc

SEQ ID NO: 151156 - DNA, 235 bp, Glycine max
cgcctctgagggagtggggtccactcacacaggaagccaccgcgatttcgatctgaacctcccggcttttccggacttttcaacaaggttcttcgttgatgacgaggttaccagtcctcatccatccaagaaatcccgtctcaatttgaccatacccaagattgaaatccctcaatactgatgatccatagatccaaaaaatattcagtgtttttttcttctttcttttttaaag

SEQ ID NO: 151157 - DNA, 237 bp, Glycine max
gtttttggtgctgcatggaaatccgttttcacagctgatgagaaagagcgtgagaagaatgttgaggaagcaattgaggctctgcagtttcttgagaatgagataaaggacaagaagttctttggaggagaggagattgggttggtagatattgctgctgtctacatagcattttgggtccctatggttcaagaaattgcagggttggagttattcacaagtgagaaatttcctaag

SEQ ID NO: 151158 - DNA, 246 bp, Glycine max
gttagctccagcagccactacgatccacagccccaaccttctcacgtcactgctcttattacacgacctagttgtccggatctgagtatttgcctcaatattttaggcgggtctctaggaaccgtggatgattgttgtgccctcatcggtggtcttggtgacattgaagccattgtgtgcctttgcatccaactcagggccctcggaatattaaaccttaaccgtaatttgcagttaatattaaac

SEQ ID NO: 151159 - DNA, 237 bp, Glycine max
gtcccagattgattacatccttggaaataacccaaggaaaatgagttatgtcgtaggttttggtaatcattacccaaaacacgtccaccatagaggagcatctgtaccgaagaccaagatcaagtatagctgtaaaggtggatggaaatggagggacacttctaagccaaacccaaatacaattgttggtgccatggttgccggtcctgacaagcatgatggcttccatgatgttcg

SEQ ID NO: 151160 - DNA, 222 bp, Glycine max
aacgagcgattcggatcgcgattatagcgaaccctggcgaaggcgaattgcattctatctacggaacgattatttgaggaaacgcagagggacgaagacagagcaaaatcatactttgaccaagccattcacgccgctccaaatgattgtacggttcagggatcatatgcgcacttcatgtgggaagcaggagaggaagaagaagttgttaacggaggagtg

SEQ ID NO: 151161 - DNA, 237 bp, Glycine max
aaatgttgtacgaaacttagaaagccagtgaatagggaccataaataaatagaggactgctgaatgaagttgcttgagtggaactcaagcttggttggataatattcttttaaagttcagacattgtttccatttttcttatatttaagtattttgaatttttgggaggatggttttgctctcatccttccacttgctgaaaactttgtaggtagcaatgatataattttgcatgtt

SEQ ID NO: 151162 - DNA, 236 bp, Glycine max
gaggtgtcaagctctctgatttccgtgtcatcaatcaggatccaccagccatttctgatgaagcagtcatcaaggcagtagagactgcaacaaaagaactaaacttgacaagcaagttgatgattagtagagcctatcatgattcattgtttatggccaggttgtctccaatgggcatgattttcattccatgttacaaagggtacagccataagcctgaagagtttgccaccatt

SEQ ID NO: 151163 - DNA, 233 bp, Glycine max
atattctgaaatcccatccaatcgaaggctgtgaagtgtgtgatgcactctatccttctttctcttgaacccataattccatgactcggcgttgctcccactgcagcaacaacggccacaattcccggacatgcccttcgcgtgggggcggaggtgtgaagcttttcggggtcaggctgacggatggatcaatcattaagaatagcgccacatgggcaacctaaacctctcct

SEQ ID NO: 151164 - DNA, 236 bp, Glycine max
gtgaccgagttgaaccatgtcggacgaagagcaccatttcgaatccaaggccgatgccggagcctccaagacctatcctcagcaggccggaaccatccgcaaaaacggctacatcgtcatcaagggtcgtccctgcaaggttgttgaagtttctacttccaagactggtaagcacggccatgctaagtgtcactttgttgggattgatattttcactgccaagaagcttgaagata

SEQ ID NO: 151165 - DNA, 75 bp, Glycine max
ggagtcagaaagccatggatccctacaagaatcggccatcaagcgccttcaattctcccttctggactacaaatt

SEQ ID NO: 151166 - DNA, 238 bp, Glycine max
gatctccgcagcaatggtgaacgttccgaagacaaagaagacctactgcaagagcaaggagtgcaggaagcacacgctccacaaggtcacccaatacaagaagggcaaggacagcatcgccgctcagggaaaacgccgttatgaccgcaaacagtccggttacggtggccagactaagcctgttttccacaaaaaggccaaaaccaccaagaaaattgtgttgaggctccagtgtcag

SEQ ID NO: 151167 - DNA, 240 bp, Glycine max
atctgtggtgcctccattttttacgtggcgtgtatgaaccatttgggagacatcatgaagattccaagttccaagcaactggttgtgggatttgcacttggaaatgaaggataggcaacgttggagagctgaagaggatgctttactacgcgcatatgtcaaacagtatggtcctagggaatggaatctggtgtctcagcgcatgaacacacctcttaacagggatgccaagtcatgctt

SEQ ID NO: 151168 - DNA, 207 bp, Glycine max
ccggaaagaccatcacccttgaggtggaaagctctgacaccatcgacaacgtcaaggccaagatccaggacgacggaaggaattcccccggatgcagaacgtctcatcttcgccggaaagcagctcgaggacggccgtaccctcgccgactacaacatccagaaggagtcaacccttcaccttgtccttcgtctccgtggtggcatc

SEQ ID NO: 151169 - DNA, 238 bp, Glycine max
ccctcatccagaaaacacctgcttctggcgtcttaaaaatacgtcacactccttctcaaccctaaaatcagtgttctttgtttttttgcagaaaagattaggagatggcgaacgcttgattccctgcttcaatcgcattctcatcgagaaaatcgtccctccctccaaaaccagcgccggcattctactcccggagaagacctcccagcttaattccggtaaggtgatagcggttgga

SEQ ID NO: 151170 - DNA, 237 bp, Glycine max
cggctcgagctcgagcgaatcggctcgagcggctcgagtcatgagccactggtcaaatactcaccctgacgattgaaccatttgtcatagcaacaaacaggcatcttagtgtgctccaccctatttataaacttttgttgcctcactatcgtgacaccatgaacatcaatggactcgcaagacaatcactcatcaatgcaggtggcattattgagcaatcatttctgcctgggccat

SEQ ID NO: 151171 - DNA, 234 bp, Glycine max
cggctcgagctcgagcgaatcggctcgagacaggttgaagtgggggaatgattccttgaagactatggtcagagcctggttcacactcccaggttaaccctcaggcactggagagcatcaaaagggttaagaagttgaccaagatgtctgagaaggttgccactggtgtcctctctggggttgtcaaggtgtctggattcttcacaagttctgtagtcaactccaaagctggaa

SEQ ID NO: 151172 - DNA, 227 bp, Glycine max
atttttccatcttagttcctggaagcaccaggaacctgacccaataaacaaactcttattttcatttctaatttttctaaagtttcattttttaatccaatggcaacttgggtattatcagaatgtagcttgaagcctcttgctccagtaatccctagacctagacctggggcagttttgtccagcacctcataggttggatttttggagacaaccaaggtattgga

SEQ ID NO: 151173 - DNA, 130 bp, Glycine max
gtctgtaatgacctttgaaaataagtttggtttgtgttgaactctattgtcccattaatgttactactgtttgttatcaatttgtggagctgatatataattatcaatcgtatgctggcatattgtgttt

SEQ ID NO: 151174 - DNA, 237 bp, Glycine max
atccactcacctgcctcttactcacccctttctccaactaacgagtaaggaaaaatggcgcgtaagaagatcagagagtatgactcaaagaggttgttgaaggagcactttaagagactttctggcaaggagttgcggatcaagtctgcacaaattactgcatcaactgatttcactgagctacaagagaaggaaccctggctttcatcttctaaattggttgtgaaacctgacatg

SEQ ID NO: 151175 - DNA, 238 bp, Glycine max
agaggacaagagttactctaacagccctgaagccacttccatggttcttgtgggttgccctcgctgcctcatgtatgtgatgctctctgaggatgatccaaagtgccccaaatgcaaaagcaccgttttgcttgatttcctccatgacaccaaaaaccccaccataaggaggagttagagttatagagttagggtcctctgtttgtagctccgttttcatctgttcctaatagtagga

SEQ ID NO: 151176 - DNA, 207 bp, Glycine max
ctcgagccgcaaagaaccaggcagattctgtggtgtaccagacagaaaagcaattgaaagagcttggagacaaggttcctggccctgtaaaagagaaggttgaagcaaaactaggggagcttaaagatgcaatttctgggggttcaacccaagctattaaggatgccatggctgcactgaaccaggaagtcatgcagcttggtcagt

SEQ ID NO: 151177 - DNA, 232 bp, Glycine max
gcaaagagccgtgttttgtctgtgcccacttggatgggccccttggagcccaagattggtagaagctgtgatatttggttgcatccctgttattattgcagatgacattgttcttccattcgctgatgcaatcccatgggaagagataggggtgtttgttgatgaggaggatgttcccaagttggatacaatactcacatctatcccaccagaagtcatattaaggaaacag

SEQ ID NO: 151178 - DNA, 231 bp, Glycine max
ctgctccccatggagttcgtcttttgattgaggactatccttatgcttctgatgggctagagatatgggatgccatcaagtcctgggtgcaagaatatgtctcattctactacaagtcagatgaggaactccaaaaagaccctgaactccaagcttggtggaaagaacttgtagaggtgggtcatggtgatttgaaagataagccatggtggcaaaagatgcaaactcgtg

SEQ ID NO: 151179 - DNA, 229 bp, Glycine max
gctactgcaacatctgcctcacccgtctttgttgctgctccagcagagaaaggccattttcttttagactttctcatgggaggtgtttcagcagctgtctccaaaactgctgctgctcccattgaacgtgttaagcttttgatccagaaccaggatgagatgatcaaaactggtaggctttctgagccctacaaaggtattggtgattgtttcaagagaacaatggcag

SEQ ID NO: 151180 - DNA, 232 bp, Glycine max
ggaccttcggggcctcttccccgggcgtcgaacagtcaactcagaactggtacggacaaggggaatccgactgtttaattaaaacaaagcattgcgatggtccctgcggatgttgacgcaatgtgatttctgcccagtgctctgaatgtcaaagtgaagaaattcaaccaagcgcgggtaaacggcgggagtaactatgactctcttaaggtagccaaatgcctcgtcatct

SEQ ID NO: 151181 - DNA, 237 bp, Glycine max
aaaggattctacccgccgctcgatgggaattgcgcttcaaggcgtctcgtagggctaatccgcctcacgagggtcaccaacggcacgtgactttggggggccgaggccccctactgctggtcggcaaacggacggcgggcgcacgcgtcgcttctagcccggattctgacttagaggcgttcagtcataatccaacgcacggtagcttcgcgccactggcttttcaaccaagcgcga

SEQ ID NO: 151182 - DNA, 242 bp, Glycine max
ctgctttgaaaaatgggatccaaggttgttgcatccgttgcccttctcctctccatcaacattcttttcatttccatggttagctccagcagccactacgatccacagccccaaccttctcacgtcactgctcttattacacgacctagttgtccggatctgagtatttgcctcaatattttaggcgggtctctaggaaccgtggatgattgttgtgccctcatcggtggtcttggtgacat

SEQ ID NO: 151183 - DNA, 235 bp, Glycine max
gtgtgttttccttgtttcccctattattatctcgctctcacaaaatcatggcattctctagtgctttgattctgtggtcgttgctagcaatcaacatggccctgccaaccctcgcaaccgtctacaccgtgggagatacttcaggttgggcaattggtactgattatagcacttggactggcgacaagatcttttcagtgggtgatagtctcgcgttcaactatggagctgggca

SEQ ID NO: 151184 - DNA, 235 bp, Glycine max
cgtagttggaccttgggttgggtcgatcggtccgcctccggtgtgcaccggtcggctcgtcccttctgccggcgatgcgctcctgtccttaactggccgggtcgtgcctccggtgctgttactttgaagaaattagagtgctcaaagcaagcctacgctctgtatacattagcatgggataacaccacaggattctgatcctattgtgttggccttcgggatcggagtaatgatt

SEQ ID NO: 151185 - DNA, 212 bp, Glycine max
gggtacttcaaggtcctcggaaaaggtgttctgccccaaaatcagccttttgttgttaaggccaagcttatttccaagatcgccgagaagaagattaaggaagccggtggcgctgttcttctcaccgcttaggtttaaaaactgttttttaattgtgttgttttgtttcggataacttttttgattatatattgcaagtgacactgtgtgtt

SEQ ID NO: 151186 - DNA, 234 bp, Glycine max
gacgaactccgtaacctcctcaccaaaaaacccgaatcagtttgctacgatggcttcgaaccctccggacgaatgcacattgctcacggtgttatgaagacaatcaatgtgaacaagctaactgctgccggttgcatcgtcaaaatatggattgctgagtggtttgccaagctcaacaacaagatgggacgagatttcaagaaaattgagaccgtgggccgttacttgatcgag

SEQ ID NO: 151187 - DNA, 261 bp, Glycine max
gctgctctgttgagccgcgccatggaatcgagagctccaagtgggccatttttggtaagcagaactggcgatgcgggatgaaccggaagctgggttacggtgcccaactgcgcgctaacctagaccccacaaagggtgttggtcgattaagacagcaggacggtggtcatggaagtcgaaatccgctaaggagtgtgtaacaactcacctgccgaatcaactagccccgaaaatggatggcgctaaagcgcgcgacctata

SEQ ID NO: 151188 - DNA, 261 bp, Glycine max
cgaagatccaggacaaggaaggaatcccaccggaccagcagaggcttatttttgctggcaaacagctagaggatggaaggaccctcgctgactacaacatccagaaggagtcaactctgcacttggtgttgcgtcttcgtggggggttttaagctggagctgatttctgtgtgatgttcgatgttggattttcccaaacattttaagaagaaatgtgatgtgtaatgggtctgtaatgacctttgaaaataagtttggttg

SEQ ID NO: 151189 - DNA, 260 bp, Glycine max
cttttaacgttattttacttattccgtgaatcggaagcggggcactgcccctctttttggacccaaggtcggcttcggccggtcgatccgggcggaagacattgtcaggtggggagtttggctggggcggcacatctgttaaaagataacgcaggtgtcctaagatgagctcaacgagaacagaaatctcgtgtggaacaaaagggtaaaagctcgtttgattctgatttccagtacgaatacgaaccgtgaaagcgtgg

SEQ ID NO: 151190 - DNA, 258 bp, Glycine max
cgatccacagccccaaccttctcacgtcactgctcttattacacgacctagttgtccggatctgagtatttgcctcaatattttaggcgggtctctaggaaccgtggatgattgttgtgccctcatcggtggtcttggtgacattgaagccattgtgtgcctttgcatccaactcagggccctcggaatattaaaccttaaccgtaatttgcagttaatattaaactcctgtggacgaagctacccgtctcacgccac

SEQ ID NO: 151191 - DNA, 259 bp, Glycine max
cctggctcaggatgaacgctggcggcatgccttacacatgcaagtcggacgggaagtggtgtttccagtggcggacgggtgagtaacgcgtaagaaccctccgatacccccaaacccctcgtcgccaccctccgcctccccctcaaagacctccacgactcaactcgcctccgcaagttccccctctcccgcccctccgccgccctcacggcaagatccacctcaaactcggcctcctcggccgtccccaattcgatta

SEQ ID NO: 151192 - DNA, 256 bp, Glycine max
gctttaatctggggggagcagtcctccggggcagtcccttttggaacaatgtttgctctagtctgcttatggtttggtatatcagtacccttggtctttgttggcagttacttgggttttaaaaagccagcaattgaagacccagtgaagactaataaaattcctaggcaggtacctgagcaggcgtggtatatgaaacctgtcttctcaattcttattggaggcattcttccatttggggcagtgttcatcgagc

SEQ ID NO: 151193 - DNA, 255 bp, Glycine max
aaacggaattgagactccagagaatatgccaaaatgtattaataattgtcacaacttggaaggcttttggaaaaactggcatgcttccttcaacaagtggcttgtgaggtatatatacattcctcttgggggatctaagaaaaagctactaaatgtgtgggttgttttcacatttgttgcaatctggcatgatttagagtggaagcttctttcatgggcatggttgacgtgtttattcttcatccctgagttggt

SEQ ID NO: 151194 - DNA, 261 bp, Glycine max
aaaggattctacccgccgctcgatgggaattgcgcttcaaggcgtctcgtagggctaatccgcctcacgagggtcaccaacggcacgtgcctttggggggccgaggccccctactgcaggtcggcaaacggacggcgggcgcacgcgtcgcttctagcccggattctgacttagaggcgttcagtcataatccaacgcacggtagcttcgcgccactggctttacaaccaagcgcgatgaccaattgtgcgaatcaacggt

SEQ ID NO: 151195 - DNA, 265 bp, Glycine max
cagcgatcgaagtttcacatcagccttatccagtttagggtttcggttccttaccctacctttgacgtatcgaaaccttaaatttgggattaggtctgagcaatctggttggtagaacctttggtcttagagagtcaagttttatgtctggattagacgatcaaattcctactgccttcgatccttttgctgatgcaaatgctgatgactcgggtgctgggtcaaaggagtatgtgcatattcgcgttcagcagcgaaatggtag

SEQ ID NO: 151196 - DNA, 273 bp, Glycine max
gtacgttcgctcttcggctcgagctcgagccgaatcggctcgagagcatggcttcccttgcagcatccactgctgctgcttcccttggcatgtcagaaatgcttggaaaccccatcaacctcagtggtgccacaaggccagctccatctgcctctagccctgcctccttcaagactgtggctcttttctccaaaaagaaggctgcacctccaaaaaaagctgcagctgctgctcctgccaatgatgagcttgccaagtggtatggtcctgaca

SEQ ID NO: 151197 - DNA, 263 bp, Glycine max
cttactgtgggaatccggttgggactgttgcagctaatgatcctgcggacaaacagccgctgaattatgatcaagtctttatccgtgattttgttccatcagctcttgccttcttgcttaatggtgaaggggaaattgtcaagaattttttacttcacacattgcaattaccgagttgggagaagactgttgactgctacagtccagggcaagggttgatgccagcaagcttcaaggttagaactgtgcctcttgacggtagc

SEQ ID NO: 151198 - DNA, 253 bp, Glycine max
ggtcgatggaacaatgtaggcaagggaagtcggcaaaatggatccgtaacctcgggaaaaggattggctctgagggctgggcacgggggtcccagtcccgaacccgtcggctgtcggtggactgctcgagctgcttccgcggcgagagcgggtcgtcgcgtgccggtcgggggacggattgggaacgggcccttcggggcctcttccccgggcgtcgaacagtcaactcagaactggtacggacaaggggaat

SEQ ID NO: 151199 - DNA, 226 bp, Glycine max
cggctcgagagaaattagagtgctcaaagcaagcctacgctctgtatacattagcatgggataacaccacaggattctgatcctattgtgttggccttcgggatcggagtaatgattaacagggacagtcgggggcattcgtatttcatagtcagaggtgaaattcttggatttatgaaagacgaacaactgcgaaagcatttgccaaggatgttttcattaatcc

SEQ ID NO: 151200 - DNA, 256 bp, Glycine max
ctgaaaggtgttgcagctaaggctgatgttttccatttgttgtctggtatgtggaaaacacctgctgagaggtgttttttgtggcttggtggttttcggtcatctgaactcctcaagctgctggttagtcaattggagcctctcgcagagcagcagctgatgggtattaccaacttgcagcaatcctcccaacaagcagaagatgcattatctcagggcatggaagcattgcaacagtcccttgcagagacattgt

SEQ ID NO: 151201 - DNA, 258 bp, Glycine max; identical to SEQ ID NO: 125851

SEQ ID NO: 151202 - DNA, 258 bp, Glycine max
ttggtgtgcctgagcctttgtctgtgtttgttgacacctatggcactgggaagatccatgataaggagattctcaacattgtgaaggaaaactttgatttcaggcctggtatgatctccatcaaccttgatctcaagaggggtggaaataacaggtttttgaagactgctgcctatggacactttggaagagaagaccctgacttcacatgggaagtggtcaaacccctcaagtgggagaaggcctaagtaattcatt

SEQ ID NO: 151203 - DNA, 245 bp, Glycine max
aaaggcttgcattacttatttattttttgtagttagttcttttatatgtagtggaattcccacatcagaaggatgtcagttaagagtagtgtaggagctttataaataagcatcctcttttatgtatgtagtcaattcagtttcagattgctgaatagttttgttctgattcacaaaaaaaaaaaaaaaaaaaaataaaaaaaaaaaaaaaaaaaaaaaaaaagaaaaaagagagagagtaaaaa

SEQ ID NO: 151204 - DNA, 261 bp, Glycine max
gattatgtggaccccctggaatgacgatggactggcaaagtgctcctgcaagtcctagttcgttcactgttaagagaatcttgcgcttggaaattccagtagatacatatcccaatttcaattttgttggaagacttctgggcgctagaggcaattctttgaaacgggtagaagctacaactggttgtcgtgtgtatattagaggaaaaggatcgataaaggatccagacaaggaagagaagttacgaggaagaccaggtt

SEQ ID NO: 151205 - DNA, 249 bp, Glycine max
gttcgtaaaaatggttgcttcagggacaaatcggcttcggcccactctgtcactcgcggagtaaccgttgaagctttttcggcacaaattaatggcgccaccgcctttgaagtttcaggaactcctgtggattgtgtttcactagcgttatctggggccttgttttcatggtcaaaacctatgctggttattagtggaattaaccggggatcaagctgtggtcatcacatgttctactcaggtgtggtt

SEQ ID NO: 151206 - DNA, 249 bp, Glycine max
ggaagagttaccgaagcgaggtagagatgagggagaggtacgagatattctcgcaaaacctcaggttcatccgctcccacaacaagaaccgcttgccctacactctctctgttaatcattttgctgattggacttgggaggagttcaaaagacacagactaggcgctgcccaaaattgctctgccactcttaacggcaaccacaagctcactgatgctgttcttctcgcacgaaagactggaggaaaga

SEQ ID NO: 151207 - DNA, 237 bp, Glycine max
gaacaatttcaaagacttcgtgatttgaaacaacttggcctaagttatatggtttaccctggagccgtccattctcgctttgagcattcactgggtgtttattggctggctggaaaagctattgatgccattaaaaaataccaaggccaagagcttggtattgaacatactgatgtattgacagtaaaacttgcaggattgctacatgatgttggtcatggtccattcagccacact

SEQ ID NO: 151208 - DNA, 253 bp, Glycine max
ctcaagtctctcgaagcctctttctctctcttctagaagctatctgtgtttggtgttactaagtctccaacaagcaaagtacatggttgatttggaaatccaggtccccaccccattcgacccgtttgccgaggcgagagaatcggatgcccccggagcaaaggagtatgtgcatattcgaattcagcagaggaatgggaagaagagtctgaccacagtgcaagggctgaagaaggagttcagctacgagaag

SEQ ID NO: 151209 - DNA, 255 bp, Glycine max
ctcaaatttagatacgctggctacgaaatcaattattcaggaacacttactaagctttccaatgaattaggatatgctacttgggtaaagtatccttttgagtgtttgccaccaagttttgagccggacaaacttgttgagttgattctacctaaaagcaacatcaaacaactttgggaagatagaaagcctctacccaatttgaggcatttggatctctctggctccaaaaatctaataaaaatgccatatatt

SEQ ID NO: 151210 - DNA, 260 bp, Glycine max
tttggaaagtgttgtttttctttttttcatttgcattgcaaagcaaaaaccttgcaaattgcaatggcttccaacaaggttattgccaccatcttggttctttctctccttgcctactcaacatcattcaccaatgcatgtggcacatgccacccaaaacctactccttctccccctcctccatcagggaagtgccccaaggacacattgaagctaggggtgtgtgctgatgttctaggacttgttaatgttgttgttgg

SEQ ID NO: 151211 - DNA, 254 bp, Glycine max
gagtaaagtctatgattggttcgaagaacgtcttgaaattcaggcgattgccgatgatataaccagtaaatatgttccgcctcatgtgaatatgttgtattgtgtaggaggaattacacttacttgtgttgtagtccaagtagcaacgggatttgctatgactttgtattatcgtccgaccgttactgaagcctttgcttctgttcagtatataatgactgaagctaactttggttggttaatccgatccgttc

SEQ ID NO: 151212 - DNA, 254 bp, Glycine max
attttccttgcgtttccctttcattttccctcactttctcgctcgccaaacgcccctctctctcctccaatggccgaccagctcaccgacgaccagatcgccgagttcaaggaggccttcagcctcttcgacaaggacggcgatggttgtattactactaaggaacttgggactgtgatgcggtcactagggcaaaacccaactgaggcagaactgcaggatatgattaatgaggttgatgctgatggcaatgg

SEQ ID NO: 151213 - DNA, 259 bp, Glycine max
gttttgagggagacaacatgattgagaggtccacaaaccttgactggtacaagggtcctactctgctagatgcacttgaccagatctctgagcccaagaggccttctgacaagcccctcaggctaccccttcaggatgtgtacaagattggaggaattggaactgtgcctgtgggacgggttgagactggtgtcttgaagcctggaatggtggtgacttttgcaccaactggactgacaaccgaagttaagtctgtgga

SEQ ID NO: 151214 - DNA, 255 bp, Glycine max
gaagctgcaagggcttatgacaaagccgccataaaatgcaatggcaaagaggctgtaacgaattttgatcccagcatctacaacaatgagctcaataccgaatccacaggtaacgctccagatcacaatctggatttaagtttgggcaatgcaacttcaaagcctggcaataatcaagcgttggggaatcacgccacaaatgctgtaacccatgatcagcacctgccatctgagtctaattggcgtaatggggga

SEQ ID NO: 151215 - DNA, 261 bp, Glycine max
ttctttctctcaaccgatttatctgagtgaggggtttggccaatgacgagtggttttggtgaatcaacgagagcgtctgcaccgagcccatcatgctcggggaacagttcaaacgatgccggtgattttgaatgcaacatatgcttcgatttggcgcaagaccctgtgatcacactctgtggtcacctattctgttggccatgcctttataggtggctccaccatcactcccattctcaggaatgccctgtttgcaaggcc

SEQ ID NO: 151216 - DNA, 254 bp, Glycine max
ctcgagccggcctccggtgtgcaccggtcggctcgtcccttctgccggcgatgcgctcctgaccttaactggccgggtcgtgcctccggtgctgttactatgaagaaattagagtgctcaaagcaagcctacgctctgtatacattagcatgggataacaccacaggattctgatcctattgtgttggccttcgggatcggagtaatgattaacagggacagtcgggggcattcgtatttcatagtcagaggtg

SEQ ID NO: 151217 - DNA, 200 bp, Glycine max
ctcgagccgtgagcgggtcgtatttaaataagaatttcttttccttttttcgtagtttctatcgaaaaaaaaaagattcgatagaaactaagaaaataaacaaattgattcgccgagaaagaggagagagagggattcgaaccctcgatagttctttgttccgaactataccggttttcaagaccggggctatcaaccac

SEQ ID NO: 151218 - DNA, 255 bp, Glycine max
acgggcttggcggaatcagcggggaaagaagaccctgttgagcttgactctagtccgactttgtgaaatgacttgagaggtgtaggataagtgggagctggaaacagcgaaagtgaaataccactacttttaacgttattttacttattccgtgaatcggaagcggggcactgcccctctttttggacccaaggtcggcttcggccggtcgatccgggcggaagacattgtcaggtggggagtttggctggggcg

SEQ ID NO: 151219 - DNA, 255 bp, Glycine max
atgcattagaacgatatcaggaactggatccaacattttcaggaacacgtgaatatagattgttggcggacattgctgctgcaattgatgaagaagatgttgcaaagtttactgatgttgtcaaggaatttgatagtatgacccctctggattcttggaagaccacacttctcttaagggtgaaggaaaagctgaaagccaaagaacttgaggaggatgatcttacttgaattgtacctttaatattcctggtgg

SEQ ID NO: 151220 - DNA, 256 bp, Glycine max
gtcaagagcgacatcgttggttcccaccctcttcaatcttcactccaatctacaaggagaatggatgaagcgatgaagaagcaatgcaaagttaacctgtacggaactgcttttcccctgaaggaggagcttgacaggcaaatcctgtctaggttccagcggcctcctggaccaattccatcttcaatgctgggtttggagactgttacaggaagtgttgatcactttggttttgaggattgtctaaatgaccccc

SEQ ID NO: 151221 - DNA, 256 bp, Glycine max
cttctgaatctattgaatcaacaatcatgtcggacgaagagcaccatttcgagtccaaggccgacgccggagcctccaaaacctaccctcagcaagccggtaccatccgcaagaacggctacatcgtcatcaaaggccgcccctgcaaggttgtgcaagtttcgacttccaaaactggaaagcacggtcacgctaagtgtcactttgttggaattgatattttcactgccaagaaacttgaggatattgtgccctc

SEQ ID NO: 151222 - DNA, 256 bp, Glycine max
gaaagaaggtttttttagtatagttaacagcatggagagggaggaagatgttaaggttggagcacagaaattctcggagaggcaagcactgggtacaggagctaagagtgacaaggactacaaggaggcaccaccagcacccttgtttgagccaggggagttaaagtcatggtctttttacagagctgggatcgcagagtttgtggccacattcttgttcctctacatcactgtcttgactgtcatgggtgtcaac

SEQ ID NO: 151223 - DNA, 263 bp, Glycine max
tggaagcatagccaacttcagtgaaactcagctgagagaaatagcgagggggcttgaggattcggggcaacaattcatatgggttgtgaggagaagcgacaaagacgacaaggggtgacttccagaggggtttgagacaagaacgacaagtgaagggagaggagtgattatatggggttgggcaccccaagtgctaattctggaccatcaagctgtgggagcctttgtcacacactgtggatggaattccacgctcgaagcag

SEQ ID NO: 151224 - DNA, 256 bp, Glycine max
ctttgttgggattgatattttcactgccaagaagcttgaagatattcgtgccctcttctcacaactgtgatgttccccatgtgaatcgtactgattaccagttgattgacattgctgaggatggatttcttagcttgcttactgaaaatgggaacaccaaggatgacctgaagcttcctactgatgagagtttgcttactcagataaaggatgggtttgctgagggtaaggaccttgttgtgtcagttatgtctgc

SEQ ID NO: 151225 - DNA, 225 bp, Glycine max
agcattttgggtccctatggttcaagaaattgcagggttggagttattcacaagtgagaaatttcctaagctccacaattggagccaagaatttttgaaccatccaattgtcaaagaaagtctgccccctagagatcctgttttctcctttttcaagggtctctatgaaagcctttttggttcaaaatagatttgatgatgtggtgtgagacttagtatttctaa

SEQ ID NO: 151226 - DNA, 243 bp, Glycine max
ctaaaatgataattaaattaacttaaaagataacttcaggctcatcaaccatccaaccactggatctactgggccggccctctcatcggaggtggaattgctgggcttatctacgaggttgtcttcatcagccacacccacgagcagcttcccagcactgactactagaggggaaaaatgaaataataaaaaaaaaaaatgtgtattattgaatttctccggaatcttcttcggggaaaggtt

SEQ ID NO: 151227 - DNA, 255 bp, Glycine max
atccaattcctcagtaacatctgcaggaagtcttctccttcaccatgccaccacagcctttagactatgggtcaataaatgaaaacgtgaagaagagtcaatatgctgtcagaggtgaattataccttcgagcttctgagcttcagaaagagggcaaaaagattatatttactaatgttggcaacccacatgcattgggacagaaaccactgagcttccctcgtcaggttgttgctttgtgccaagctccattcc

SEQ ID NO: 151228 - DNA, 255 bp, Glycine max
caatggcaaaacctttaatcaggttgaaatcaaacctgagatgattgggcattatcttgctgagttttctatttcatacaaacccgttaagcacgggagacctggtattggtgctactcactcatccaggtttattcctcttaagtgaagactgttattgggaaagctacttcttagtttgtagtggttctgaggaaaaccttcgactcctatcagagattttgtttgttgttgcgcattttatcgagttgtcta

SEQ ID NO: 151229 - DNA, 256 bp, Glycine max
gttcaatccacgtgtgtcgagcagccgccgcaagagccgaaaggctcatttcacggcgccgtcgagcgtgcggcgggtgcttatgagcgcccctctgtcggcggagctgcggtccaagtacaacgtgaggtcgatcccagtacggaaggaggacgaggtgcaggtggtgcgaggaacatacaagggtcgcgaggggaaggtgactcaggtctaccgtcgaaagtgggtgattcacattgagcgcataacccgcgag

SEQ ID NO: 151230 - DNA, 255 bp, Glycine max
gaaataatgactgaggtccttaaagctctacaagaattaaatgtttgttggaagaagattggacactataacatgaagtgcagatgggttgctggcactgctggtcatcatgaaggaatgattaacaattctctgcatagtaatcattactttggaaatgattccggcattattgaaaatgaagctgtttctaagtcaaatgtggtcaagtttgaagtgcagctttacaaaactcgtgaggagaaatatctgctt

SEQ ID NO: 151231 - DNA, 259 bp, Glycine max
gcaaaggattctacccgccgctcgatgggaattgcgcttcaaggcgtctcgtagggctaatccgcctcacgagggtcaccaacggcacgtgcctttggggggccgaggccccctactgctggtcggcaaacggacggcgggcgcacgcgtcgcttctagcccggattctgacttagaggcgttcagtcataatccaacgcacggtagcttcgcgccactggcttttcaaccgagcgcgatgaccaattgtgcgaatcaa

SEQ ID NO: 151232 - DNA, 253 bp, Glycine max
cgccatgctcgtgagtttctctctaaactaggtaacctcaaacagacccagatatttgcaaagattgaaaacatagaggggttgacacattttgatgagatattgcgagaagcggatggtatcatcctctcacgtggaaatttggggatagatcttccacccgagaaggtgtttttatttcaaaaagcagctatttacaaatgtaacatggctgggaaacctgctgttgtcacacgtgttgtggatactatga

SEQ ID NO: 151233 - DNA, 254 bp, Glycine max
gcaagagggccatggatgagtacacttctgagatattcatgggtggaaagaacacaattgtgttgcacaacacatgtgaggattcactgttagctgctcctattatcttggacttggtccttcttgctgagctcagcactcgaatcgagtttaaagctgaaaatgagggaaaattccactcattccacccagttgcgaccatccttagttacctgaccaaggcccctctggttccaccgggtacaccagtggtg

SEQ ID NO: 151234 - DNA, 238 bp, Glycine max
ggctcgaggtccctttggatcaggtggaagtactcgaggtaggaggcagaggcgcggagaagatgtggaccaccctctcaaggtctctctggaggacctttatctcgggacttctaagaagctctccctctccagaaatgtcatatgctccaagtgcactggtaagggttctaagtctggtgcttcgatgaagtgtgctggttgtcaaggaactggtatgaaggtttctataagacat

SEQ ID NO: 151235 - DNA, 252 bp, Glycine max
gcaagattgtgatgaatcgcgccaaacgcggtctcttcgccgggaaacacattcagtttgggaatcgtgtcagtgaagatggcggtaacaagtcaaggagaacttggaaacctaatgtccaggaaaagcggctctttagttatatcctagatcgtcacgttcgtgttaaagtcaccacccatgccctacgatgcatagacaaggcaggtgggattgatgagtacttgctgaaaactccttatcacaagatgg

SEQ ID NO: 151236 - DNA, 254 bp, Glycine max
caagtctctatagaggaaggagaagcaaaagcacgtgagctcaatgtcatgtttattgaaactagtgctaaggctgggtttaatataaaggccctatttcgaaaaattgctgcagcattacctggaatggaaacactatcttctgcaaaacaagaagacatggttgatgtaaacttaaagtctacaactggcagtgcgcagtctcaacctcagccaagtggatgtgcttgttaaatatactttatcatgtgcgg

SEQ ID NO: 151237 - DNA, 255 bp, Glycine max
ctcgagccgattcggctcgagaaggattctacccgccgctcgatgacaattgcgcttcaaggacgtctcgtagggctaatccacctcacgagggtcaccaacggcacgtgcctttggggggccgaggccccctactgctggtcggcaaacggacggcgggcgcacgcgtcgcttctagcccggattctgacttagaggcgttcagtcataatccaacgcacggtagcttcgcgccactggcttttcaaccaagcg

SEQ ID NO: 151238 - DNA, 254 bp, Glycine max
tgggaacgggcccttcggggcctcttccccgggcgtcgaacagtcaactcagaactggtacggacaaggggaatccgactgtttaattaaaacaaagcattgcgatggtccctgcggatgttgacgcaatgtgatttctgcccagtgctctgaatgtcaaagtgaagaaattcaaccaagcgcgggtaaacggcgggagtaactatgactctcttaaggtagccaaatgcctcgtcatctaattagtgacgcgc

SEQ ID NO: 151239 - DNA, 256 bp, Glycine max
ggcagttagagacagagagagagagaaacaaaaccctaattggtgagtggcgaaaatggcgcagccggcggcggcagcagcagcaacaggagcagcagtaatcgagcaagtgcagtgcttcgggcggaagaagacagcggtggcagtgacctactgcaagcgtggtcgaggcctcatcaagatcaatggctgcccgatcgagctggtggagccggagatcctccgtttcaaggccttcgagccaatcctcctcctc

SEQ ID NO: 151240 - DNA, 255 bp, Glycine max
cagcaaaggcccttggtgcagttggatttgttctttgtgttgaaaacatttccctaggaacaaaatttaatccagttcctgttggccttcctgggattctcatcatagatgtcagcaattcaaaggaactgatagattattataatcatcactacaccaagagactggactgggcgtgtaaagagtttcgaaggtaaaggtaaaatcggtgatggtttgatgcctattctgcataaatctgcaccacaggtagca

SEQ ID NO: 151241 - DNA, 258 bp, Glycine max
agtagttgagaactaagaaggagaagcaaatggcttcctcaatgatctcttccccagctgttaccactgtcaaccgtgccggtgccggcatggttgctccattcactggcctcaagtccatggctggcttccccaccagaaagaccaacaatgacattacctccattgctagcaacggtggaagagtgcaatgcatgcaggtgtggccaccagttggcacgaagaagtttgagactctttcctacctgccagaccttg

SEQ ID NO: 151242 - DNA, 212 bp, Glycine max
ctcggattctatccgctgctcggtctcaattgcgcttgaagaggtctcgtagggctaatccgcctcacgagggtcaccaacggcacgtgactttggggggccgaggccccctactgctggtcggcaaacggacggcgggcgcacgcgtcgcttctagcccggattctgacttagaggcgttcagtcataatccaacgcacggtagcttcgcg

SEQ ID NO: 151243 - DNA, 255 bp, Glycine max
ggaaaatgctgatttaagttttgataatccatcatctgatatactacctcctaccagacctagaactaattcagaggatcaatccggaaaaggatcactgcatttggaagatgatcccaagaattttatcgaatctccagctcgtcatgacaatgtaagcagtaggagtggcagtagaagccatggagtaggttctgctgataaccgtagaagacattcaacgcaaagtactgggtctgagtacagcattgaacg

SEQ ID NO: 151244 - DNA, 257 bp, Glycine max
aacttgtccctactcaacaagcaatatggattgtcaaagagtactgatgaggccatgtttgttattgaagcttacaagacactccgtgaccggggtccataccctgcagatcaagttgtcaaggagcttgatggcagttttgcctttgttgtctatgacagcaaggttggcagtgtctttgcagcactgggtcttaatgaaggaatgaagctgtattggggtattgcagctgatggatctgtggtgatctctgatga

SEQ ID NO: 151245 - DNA, 243 bp, Glycine max
cacacactctcatagctgtagcggcgacactaagatcggagaaagaatggcgaaaacgacgtcgttgctgctctttacactgctcctcttcggaaccctagctctcatccaggcgaagaaatcgaaggaggatttgaaggaggtgacccacaaggtttactttgatgttgagattaatggaaaagaagcaggtcgtattgtaatgggtctttatgggaaggctgttccaaaaactgcagaaac

SEQ ID NO: 151246 - DNA, 255 bp, Glycine max
ctgaagatcgaaaatcacctactttagttgaagccttgaaagatagacatgtgaaatatattgcatgtggttcaaactactcttctgccatatgccttcataagtgggtatctggtgctgagcagtctcagtgctctgcttgtagacaggcatttgggttcactagaaagaggcacaactgttataattgtggacttgtgcactgccattcatgtagttctaggaaagcattaagagctgccctggctcctaatc

SEQ ID NO: 151247 - DNA, 255 bp, Glycine max
ttattagataaaaggtcaacacaggctctgcctgttgctttgatgattcatgataactcgtcggatcgcacggcctttgtgccggcgacgcatcattcaaatttctgccctatcaactttcgatggtaggatagtggcctaccatggtggtgacgggtgacggagaattagggttcgattccggagagggagcctgagaaacggctaccacatccaaggaaggcagcaggcgcgcaaattacccaatcctgacac

SEQ ID NO: 151248 - DNA, 253 bp, Glycine max
agatggtcttcctgaataagccttttatttggtaggtaatatcgatgaagctactgcgaaagctacgaacttagaaatggagagcaatttgaagaaatgactttaaatctttgtgtactgacccccaatcgaattgtttgggattcggaagtgaaggaaatcattttatctactaatagcggacaaattggagtattaccaaatcatgcgcctattgccacagccgtagatataggtattttgagaatacgtc

SEQ ID NO: 151249 - DNA, 255 bp, Glycine max
ctcatcacttttgtctgcattacacctgagcctcagatctcatctcttatccacaaaaccatggctataaaggtgaccatcatgaaactcaaggttgatcttgagtgtgagaaatgctacaagaaggttaagaaacttctcggcaagtaccctcaaattcgggaccagaagttcgatgagaaggaaaacattgtgttcatcacagtggtgtgttgcagcccagagaagataagagacaagctttgctacaaaggt

SEQ ID NO: 151250 - DNA, 258 bp, Glycine max
gtctcattcatttgcaacaacacaacctggggtgttaaatagaaaagaggagtttgagaatggcaacgatcagcgcggttcaggtggagttcctggagtttccagcggtggttacttcaccagcctccggcaagacctatttcctcggcggcgcaggggagagaggattgacgattgaggggaagttcataaagttcacaggcataggagtatacttggaggataaggcggtgccatcactcgccgctaagtggaagg

SEQ ID NO: 151251 - DNA, 250 bp, Glycine max
ctttttgtttctcctttccagatctgcatcttccattttttaggattaagcggtgagattcgtgaatctgagaaatgtcggattcttctcgggaggagaatgtttacatggcgaaattggcggacaggccgagcgttacgaggagatggttgagttcatggagaaggtagcaaagactgtggaggttgaggagttgacggtggaggagagaaatcttctctctgtggcttacaagaacgtgattggtgcg

SEQ ID NO: 151252 - DNA, 253 bp, Glycine max
agaaggttcatccaatctccgaatcctgtaatcgcattgcaccatgtcgaggagaaaggtcagagagccaaaggagggaaacgtgactcttggcccagctgttagagatggcgaacatgtctttggcgtcgctcgcatatttgcctcctttaatgataccttcattcatgtcactgatctgtctgggagggaaacgcttgtccgcatcactggtggaatgaaggttaaggctgacagagatgcgtcatctcct

SEQ ID NO: 151253 - DNA, 250 bp, Glycine max
aacactcattaattgcaagaatggcacttcgttgcttggtgatgtccctttctgttctcttcactcttggtcttgcgagagaaagccatgccagagacgaagatttttggcatgctgtttggccaaacactcccattccaagttcattgcgagatcttctaaagcctggccctgcaagtgttgaaatcgatgatcaccctatgcaaattgaagaaacacagtacccgaaaaccttcttctataaagaaga

SEQ ID NO: 151254 - DNA, 254 bp, Glycine max
gccaggctgcacgccaagctcgacccctccgccgtccacgggtcaccaaattctccgatctaactccggccgagttccgccgccagttcctcggcctcaagccgctccgcttcccggcgcacgcccagaaggcgcccatcctccccaccaaggatctccccaaggatttcgattggcgagacaaaggagccgtcactaacgtcaaggaccaaggggcgtgtggttcgtgttggtctttcagtacgacgggagcg

SEQ ID NO: 151255 - DNA, 256 bp, Glycine max
caccaattaagctttcaagagacaaactgctttgaaaaatgggatccaaggttgttgcatccgttgcccttctcctctccatcaacattcttttctattccatggttagctccagcagccactacgatccacagccccaaccttctcacgtcactgctcttattacacgacctagttgtccggatctgagtatttgcctcaatattttaggcgggtctctaggaaccgtggatgattgttgtgccctcatcggtgg

SEQ ID NO: 151256 - DNA, 256 bp, Glycine max
  unsure (1)..(256): unsure at all n locations
ctctcctcttgcttttgatagagaagaaagaagcgagaagatgtcagangcgttctgcagcgactgcaagaggcagacggaggtggtgtttgaccactctgccggcgacacggtgtgctcggagtgcggcctcgtactggagtcccactctatcgacgagacctctgagtggcgtaccttcgccaacgagtccggtgacaacgatcccaatcgtgtcggcgggccctccaaccccctcctcaccgacggcggcctc

SEQ ID NO: 151257 - DNA, 251 bp, Glycine max
atatagcccaagccctatacaaccaaaccctaacacacaccatttgattcagtttccatggctagcctcaaggttgcatttttggctgcagtgctctgcatggttgtggtgagtgcacccatggcacatgcagctatcacgtgcgggcaggtgacgaatagcctgatcaattgcatcggttacctccagaacggaggaacgccgccgtcgggatgctgcaacggagtgaagagcctcaatgccgccgccaa

SEQ ID NO: 151258 - DNA, 251 bp, Glycine max
gaaacggctaccacatccaaggaaggcagcaggcgcgcatattacccaatcctgacacggggaggtagtgacaataaataacaataccgggctcattgagtctggtaattggaatgagtacaatctaaatcccttaacgaggatccattggagggcaagtctggtgccagcagccgcggtaattccagctccaatagcgtatatttaagttgttgcagttaaaaagctcgtagttggaccttgggttgggt

SEQ ID NO: 151259 - DNA, 254 bp, Glycine max
gcggcggcaacagggagagaagatgaagttcaatccacgtgtgtcgagcagccgccgcaagagccgaaaggctcatttcacggcgccatcgagcgtgcggcgggtgcttatgagcgcccctctgtcggcggactgcggtctaagtacaacgtgaggtcgatcccagtacggaaggaggacgaggtgcaggtgatgcgaggaacatacaagggtcgcgaggggaaggtgactcaggtctaccgtcgaaagtgggt

SEQ ID NO: 151260 - DNA, 247 bp, Glycine max
gaaaaaagagaaacaaatggcagcactgggtggctttaccgacatcaccggagcacagaacagcatcgatatcgaaaatctcgctcgctttgctgttgatgaacacaacaaaaaagagaatgcagttctggagtttgtgagggtgattagtgcaaagaaacaagtggtttctggcaccttgtactatatcactttggaggcaaatgatggtgtgacgaaaaaggtttatgaaactaaggtgttggag

SEQ ID NO: 151261 - DNA, 253 bp, Glycine max
attttcatttgcacaaggaagcgtcgcagaaggggtattctgttaaggatgccagtgggaatgactttgatggctggtgctggccaggttcttcgtcgtatccggatactttgaacccagaaattatgtcctggtgggctgataagtctgcttaccagaattatgagggttcaacgccttcgctttacatatggaatgacatgaatgaaccttccgtcttcaatgggccagaggtgacaatgcctagagatgt

SEQ ID NO: 151262 - DNA, 254 bp, Glycine max
gcctgtggtcatcgtggcatttgtgatgagtgtgttttggatatctactacagccggagagctggtgaactgcctagaagctataggtgtgcttcttgaactgccgccagcactcctgggtctcacagtgctggcgtggggaaattcagtgggagatcttgttgcagatgttgcagttgctaaagccggtcatccagctatggcaatggcgggatgctttgcaggaccaatgtttaacatgcttgttggccttg

SEQ ID NO: 151263 - DNA, 256 bp, Glycine max
gagagagagcgagcagtttcagacacagagagaggggtttcggattggagggattgacgctgcgtctcttcctcttctctttcgatccatccctcattcctcatcctccaatccaaccacctcagcctcacactcacatatacacatatctgaacgcgtatcgtccctcctatggcttcaaagcgcatcctcaaggagctcaaggacttgcagaaagacccaccaacttcttgcagcgctggtccagtagctgagg

SEQ ID NO: 151264 - DNA, 255 bp, Glycine max
gcgcgactcgtcgtcaactacacctccaactcggcccaagccgactcagtcgcggcgcagatcaacgccggttccgccaccacgacaccgcgcgccgtcgtggtccaagccgacgtgtccgatccggctcaggtgaagtcgctcttcgactcggccgagcgcgccttcgactcgccgatccacatccttgtcaactcggcgggcgtgatcgacggcacgtatccctccgtcgccgacaccaccgtggagtcttcg

SEQ ID NO: 151265 - DNA, 252 bp, Glycine max
cgatgggaatcgatcttaaggctgggggtaagagcaaaaagaccaaaagaacagcaccaaaatccaatgacatctacctcaaattacttgtcaagctttatcggttccttgttcgaaggactggcagcaatttcaatgctgttatactcaagcgcttgttcatgagcaaggttaacaagcctccaatttctttgtcaaggttaattaagtatacaaaggggaaggaggataaaattgctgtaatagtgggga

SEQ ID NO: 151266 - DNA, 254 bp, Glycine max
ccacaccactctctctgctcttcttctacctttcaagtctttaaagtattaagatggcagagacattcctatttacctcagagtcagtgaacgagggacaccctgacaagctctgcgaccaaatctccgatgctgtcctcgacgcttgccttgaacaggacccagacagcaaggttgcctgcgaaacatgcaccaagaccaacttggtcatggtcttcggagagatcaccaccaaggccaacgttgactacgag

SEQ ID NO: 151267 - DNA, 254 bp, Glycine max
ctcgagccgaatcggctcgagcccagacagaatgatgctcacttactctgttttcccatctaccaaaagtttctgatacagacgtggagccatacaatgccactttgtctgtacaccaactggttgaaaatgcagatgagtgcatggttcttgacaatgaagcactttatgacatttgctttaggacattgaaactcagcacccctagctttggtgatctcaaccatctgatttctgcaaccatgagtggggtt

SEQ ID NO: 151268 - DNA, 252 bp, Glycine max
gggagggccccaattggtagaaaaaaacccgcaactccttggggttttcctgcacttggaagaagaagtagaaaaaggaagaaatatagtgataatttgattcttcgtcgtcgtactaaatagtagagaaaatagaaattgtttcttcgtctttacaagaaaaaggagtaattaactgtgacacgttcactaaaaaaaaatccttttgtagcgaatcatttattaagaaaaataaataaacttaacacaaaa

SEQ ID NO: 151269 - DNA, 254 bp, Glycine max
ctttcaaggtcattcctggtgctgctgacaagccaatgatcgtggttaactacaagggtgaagagaagcaattttgcgcagaagaaatctcttccatggtgctcatcaagatgcgtgagattgctgaggcttacctaggctccacagtgaagaatgctgttgtcaccgtccctgcttacttcaatgattctcagcgtcaagctaccaaagacgctggtgtcattgctggtctaaatgtgatgcgaattatcaat

SEQ ID NO: 151270 - DNA, 255 bp, Glycine max
gaacaagtagttgagaactaagaaggagaagcaaatggcttcctcaatgatctcttccccagctgttaccactgtcaaccgtgccggtgccggcatggttgctccattcactggcctcaagtccatggctggcttccccaccaggaagaccaacaatgacattacctccattgctagcaacggtggaagagtgcaatgcatgcaggtgtggccaccagttggcaagaagaagtttgagactctttcctacctgcc

SEQ ID NO: 151271 - DNA, 250 bp, Glycine max
agctaatacgtgcaacaaaccccgacttctggaagggatcatttattagataaaaggtcaacacaggctctgcctgttgctttgatgattcatgataactcgtcggatcgcacggcctttgtgccggcgacgcatcattcaaatttctgccctatcaactttcgatggtaggatagtggcctaccatggtggtgacgggtgacggagaattagggttcgattccggagagggagcctgagaaacggctac

SEQ ID NO: 151272 - DNA, 102 bp, Glycine max
cgatcctggctcaggatgaacgctggcggcatgccttacacatgcaagtcggacgggaagtggtgtttccagtggcggacgggtgagtaacgcgtaagaacc

SEQ ID NO: 151273 - DNA, 135 bp, Glycine max
gaaaaatgtctctggtggcgaacgaggatttccagcacattctgcgtgtgctgaacaccaacgtggatgggaagcagaagataatgttcgctatgacctccatcaagggtattggaaggagattcgccaacatcg

SEQ ID NO: 151274 - DNA, 252 bp, Glycine max
cggattctgacttagaggcgttcagtcataatccaacgcacggtagcttcgcgccactggcttttcaaccaagcgcgatgaccaattgtgcgaatcaacggttcctctcgtactaggttgaattactattgcgacactgtcatcagtagggtaaaactaacctgtctcacgacggtctaaccccagctcacgttccctattggtgggtgaacaatccaacacttggtgaattctgcttcacaatgataggaa

SEQ ID NO: 151275 - DNA, 252 bp, Glycine max
cttgagaggtgtaggataagtggtagctggaaacagcaaagtgaaataccactacttttaacgttattttacttattccgtgaatcggaagcggggcactgcccctctttttggacccaaggtcggcttcggccggtcgatccgggcggaagacattgtcaggtggggagtttggctggggcggcacatctgttaaaagataacgcaggtgtcctaagatgagctcaacgagaacagaaatctcgtgtggaa

SEQ ID NO: 151276 - DNA, 250 bp, Glycine max
gtacgatatcacgtcgctgcattcggtgctctccggtggggctccgttgagcaaggaggtcatagagggctttgtggccaagtatcccaacgtcaccatccttcagggttatggtttgacggaatccaccggcgttggggcctccaccgactccttggaggagagtcgaaggtacggcacggcggggctcttgtctccggccacccaggctatgatcgtcgatcctgaatccggccaatcgcttccggtt

SEQ ID NO: 151277 - DNA, 251 bp, Glycine max
tgtggctttagagagtggtaacattcaaattgcagttgcttcagcaacagcaattgatgagaaagatcactggtaccgattaggggttgaggctcttcgccaaggcgatgctggtattgtagattatgcataccagagaacaaaaaattttgagagattgtctttcctttatcttgtcactggtaacatggagaaactgtccaagatgttgaaaattgctgaagtcaagaatgatgtgatgggccagtttc

SEQ ID NO: 151278 - DNA, 250 bp, Glycine max
cagggcacctatgataagctcctttctgaagctcccaaattcaagctcatcactccttccattctttctgatcgtttgaggattaatggatcacttgcaaggaaggctataagagaattgatggctaggggttcaatcaggatggtgtctgcccatgcaagccagcaaatttacaccagggcaacaaacacctaggtgtggaactgatcttagcttacggagtattggtaggaatagtaatgaagtattg

SEQ ID NO: 151279 - DNA, 250 bp, Glycine max
ctggattgcttggtggtgccttgggtggcatgttgattggagatatggtatctgatgctgctgattatgatgcgggctacgatgctggctttgatgatgctggtggatttgatttttaattttcagtttttcaattaaccatgttcttttttttttttttaatttctggattccattttgctttttttttccgggggttgcgaaatgatgtcctatgagattgtttataagtattggtttcatatccccc

SEQ ID NO: 151280 - DNA, 252 bp, Glycine max
catggcctcgagagcagtgctattgttggctatgtgtgtgcttccggccatggttgtggccattcgaccagcaaagaaccctttttgcgtgaagggtcgcgtctactgtgacccttgccgtgctggttttgagacctcagcaaccacctacattgccggtgctgagattatgttgcaatgcaagagcagggttagcaacgaggttgtgtacaccaagaaggggtacactgactcaactggagcatacacaat

SEQ ID NO: 151281 - DNA, 256 bp, Glycine max
ctcgagccgctcgagccgcaaaaacttaagttcattccttgtgttttgctttcttcctcaaacaccaaacatcgtcgaacacatgcgaccactgcgactgcgctgacaagactagctgcaccaagggaaacagctatggtgttattgtagagactgagaagagttacatcgagactgttgtcatggatgttccagcagctgagcatgatgggaagtgcaagtgtggcactaactgcacttgcacggactgcacctg

SEQ ID NO: 151282 - DNA, 254 bp, Glycine max
gttcggttcagcaacaacgtgatcggactcctgaacttcctgaccttcctcctctccatcccgatcctggtggccggagtgtggctgagcaagcagggcgccaccgagtgcgagcggtggctggagaagccggtgatcgcactcggcgtcttcctcatgctcgtctcactcgccggcctcgtcggcgcgtgctgtcgcgtgtcgtggctcctctggctctacctcctcgtcatgttcgtcctcatcgttcttct

SEQ ID NO: 151283 - DNA, 240 bp, Glycine max
cgatcaggtgataagtcgatgattaagaagctatacatgtacttaaacgaagagatcctgaaggagaatcccagtgtttgtgcatatatggcaccttcgttggatgcaaggcaagacatggtggttgtggaggtaccaaagttgggaaaagaggctgcaactaaggcaatcaaggaatggggtcaacccaagtccaagattacccatctcatcttttgcaccactagtggtgtcgacatg

SEQ ID NO: 151284 - DNA, 241 bp, Glycine max
gtaagtatgaactaattcagactgtgaaactgcgaatggctcattaaatcagttatagtttgtttgatggtatctactactcggataaccgtagtaattctagagctaatacgtgcaacaaaccccgacttctggaagggatgcatttattagataaaaggtcaacacaggctctgcctgttgctttgatgattcatgataactcgtcggatcgcacggcctttgtgccggcgacgcatca

SEQ ID NO: 151285 - DNA, 233 bp, Glycine max
ctcgagccgaatcggctcgaggtcatcgttgggatctccatacaccggatctgctaaaatccgcttgatccatatgggactcctcgaccacttgtgggacgacaccgtcgccggcccaaggccggaaaacggtctcggcaagctccgaaaacaccacaccttcactttccgacctagctccggcaaggaaacggagggcgggagcgtgagatcgtacggagacgaatcgtcgg

SEQ ID NO: 151286 - DNA, 230 bp, Glycine max
caaaccctaacaccaaaaccagaagcgaaatcgcaatcgcaatccagcgaatatgaaggtcgtcgctgcatacttgctcgcagtgttgggagggaatccttccccttctgccgatgacatcaaacacatcctcggcgcagttggagctgaggctgagaatgagttgattgatttgctcttgactgaagtcaagggaaaagacttcaatgagctaattgctagtggaagtg

SEQ ID NO: 151287 - DNA, 224 bp, Glycine max
acagagtttgagcgtgttcttaagtattttgatgaggatggggatggtaagatttccccatctgagctcaggaaccggctaggcatgatgggtggtgtgttattgttcaaagacgctgaaaagttgattgaggaattggattctgacggtgatgggtttttgagtttggaagattttgtgaagataatggaggcagcaggggaagaagagaagttgaaggattt

SEQ ID NO: 151288 - DNA, 226 bp, Glycine max
acaggctctgcctgttcgctttgatgattcatgatatatcgtcggatcgcacagcctttgtgccggcgacgcatcattcaaatttctgccctatcaactttcgatggtaggatagtggcctaccatggtggtgacgggtgacggagaattagggttcgattccggcgagggagcctgtgaaacggctaccacatccaaggcaggcagcaggcgtgctaattatcca

SEQ ID NO: 151289 - DNA, 239 bp, Glycine max
ctcgagccgctcgagccgcgaggaagttgtcgttgcccagggcgattttctacattgtaaagcaatgcttacggtgctatttgtggcgctggcgtggtgaagggtttcgaggggaaaacaaaatacggtacgttgaatggtggtgccaactttgttgcccctggttacaccaagggtgatggtcttggtgctgagattgttggcactttcgtccttgtttacaccgttttctccgccac

SEQ ID NO: 151290 - DNA, 238 bp, Glycine max
caggaatcaaaagatgcaaaacaattggaactgaaggagaagattgtgacagaaatacttccagcaaagaggttttacaaagcagaggaataccatcaacaatatctggagaagggtggaggtcaaggcaacaaacaatccgcagaaaaaggctgcactgatcccatcaggtgctatggctgatgaatgatgatcactttcttgctgcacacttcaccatgtctggcttctatcagcc

SEQ ID NO: 151291 - DNA, 234 bp, Glycine max; identical to SEQ ID NO: 148551

SEQ ID NO: 151292 - DNA, 231 bp, Glycine max
aaggcggttggggcggcggaatcggttcggagatatcacgtgaacttgtctattttcacgtccgttccagacgcgtggggcattgaccaggtgtttcccattatccccattcaccggttggaagaaaagccttcggtgaggggtattctctcggacttgacttgtgacagcgacggtaagattgacaagttcatcaacggagagtccagcttggcgcttcatgaaatggaa

SEQ ID NO: 151293 - DNA, 225 bp, Glycine max
ggctcgtttctggtccaaattcattgatgacaagattgtggatgttgcacgggaatctgttttcacggttgatgagaaagagcgtgagaagaatgttacagaaacgtatgagggtctgcagtttcttgagaatgagctaaaggacaagaagttctttggaggagaagaggttgggttggtagatatagctggtgtctacatagcattttgggtccctttcattca

SEQ ID NO: 151294 - DNA, 227 bp, Glycine max
gaagcaatcaagaaaatccaagggatccttgaatttctcctacaaattcggcgaacatgttcccgccccggccgccaagacacccaaagcggccaaggcgggacaagagccggtgatggcttatcctcctgctggggcgggatccagttcgatgccctatggtacgccacaccctcccccgccgcagcaatatgcggcgacgggatatgggtatccacctcagcagg

SEQ ID NO: 151295 - DNA, 231 bp, Glycine max
tggatgaagaagtgcgcaagatcttcagcaagttcgacaagaacggcgacggcaagatctcgtgcgccgagctgaaggagatgatggtggcgctgggatccaaaacgacgtcggaggaggtgaagcgcatgatggcggacttgatcggaacggcgacggctacattgacctgaaggagttcggcgagttccattgcggcggcggcgacgggagggagctccgggaggcgtt

SEQ ID NO: 151296 - DNA, 238 bp, Glycine max
ttacaacgaaaccctcttcatcttgttctatctgtgacgagcatcatggcctcaagagcagtgttattgttggctatgtgtgtgcttccggcgatggttgtggccattcgcccagcaaagaaccctttttgcgtgaagggtcgtgtctactgtgacccttgccgtgctggttttgagacctcagctaccacctacattgctggtgctgagattatgttgcaatgcaagagcagggtta

SEQ ID NO: 151297 - DNA, 241 bp, Glycine max
caggcgactacggctgggacactgctgggctttccgcagacccagaaaccttcgccaagaaccgtgaactcgaagtgatccactccaggtgggccatgctcggaggcttgggctgcgtcttcccggagttgctgtcccgcaacggggtgaagttcggagaagccgtgtggttcaaggccgggtcccagatcttcagcgagggtgggctcgactacttgggcaatccaagcctgatccacgc

SEQ ID NO: 151298 - DNA, 232 bp, Glycine max
gaaccttctgaagctggcccccggtgggcacctcgggaggtttgtaatttggaccaagagcgctttcgagaagttggattcaatttacgggtcttttgataagccctctgagaagaagaagggatacctgcttcccaggtccaagatggtgaattcggacctctccaggattattaattctgatgaggtgcaatctgttgtgaggcccattaagaaggatgtgaagagggcc

SEQ ID NO: 151299 - DNA, 225 bp, Glycine max
atatagcccaagccctatacaaccaaaccctaacacacacccatttgattcagtttccatggctagcctcaaggttgcatttttggctgcagtgctctgcatggttgtggtgagtgcacccatggcacatgcagctatcacgtgcgggcaggtgacgaatagcctgatcaattgcatcggttacctccagaacggaggaacgccgccgtcgggatgctgcaacgg

SEQ ID NO: 151300 - DNA, 210 bp, Glycine max
gtgggatccccctgtgggttgcaccgccgaccgaccctgatcttctgtgaagggttcgagtgagagcatacctgtcgggacccgaaagatggtgaactatgcctgagcggggcgaagccagaggaaactctggtggaggcccgcagcgatactgacgtgcaaatcgttcgtctgacttgggtataggggcgaaagactaatcgaaccgtc

SEQ ID NO: 151301 - DNA, 213 bp, Glycine max
cgtcatcgttgggatctccatacgccggatctgctaaaatacgcttgatccatatgggcctcctcgaccacttgtgggacgacaccgtcgccggcccaaggcggaaaacggtctcggcaagctccgaaaacaccacaccttcactttccgacctagctccggcaaggaaacggagggcgggagcgtgagatcgtccggagacgaatcgtcgga

SEQ ID NO: 151302 - DNA, 230 bp, Glycine max
cttattacaaccagcagcaaccgccggtcggagttccgccgccgcaaggttatccgccggaggggtacggaaaggagggatatccaccgccgggatacccgccagcgggatacccgccagccggatacccaccgccgggatatccgccacaagaaggctatcctccgccgccctacccggcgcagggatatcctccgccctatgctcctcaatacgctcagcctccgccc

SEQ ID NO: 151303 - DNA, 232 bp, Glycine max
tgggatttccgatctcaggtaagatcggttcaggatcatgggatccttttctatcagataggaagggctgtttcacaaaatgtacttctaagtaattgctccatagatcctatatctatctatatgaagaagaaatcatgtgacgggggggattcttatttgtacaaatggtacttcgaacttggaacgagtatgaagaaattaacgatacttctttaccttttgagttgtt

SEQ ID NO: 151304 - DNA, 239 bp, Glycine max
gacaggcctgtctttgctgcccctgcccccatcatcaccccaactgtgagagaggatatggcaaaggaatacgagcaagctattgaagaactccagaaattgttgagggagaagagtgaactcaaagccacagctgctgagaaagtggagcagataacagcttctctgggaacatcatcatctgatggcatcccatcatcagaagcctcagacaggatcaaagctggtttcattcactt

SEQ ID NO: 151305 - DNA, 243 bp, Glycine max
tcgtcatccactacctttgtcgcaaatgcgcttcgcaacatatcgcggttcagagaatcgccgaaattgatctgtacaagtacgaccctggggaccttccaggaatggctttgtacggagagaaagagtggtagtttttcacgccgagggaccgcaagtacccgaacggttcgcggccgaaccggtccgcgggaaccgggtactggaaggcaaccggagcggataaaccagttggtaaaccga

SEQ ID NO: 151306 - DNA, 239 bp, Glycine max
ctcgagccgttctgggaaggcatgatgcacccgttcgttgcattgagtattcatatgctgcagggcaattgatcactggtagttgggacaaaaccctaaaatgttgggaccctagaggtgcaagtggccaagagcgcacacttgttgggacatatccacaacctgagcgtgtctactctctctcactggttggacatcgcctggttgtagcaacagctggaagacatgttaatatctat

SEQ ID NO: 151307 - DNA, 238 bp, Glycine max
ctcgtgtggaacaaaagggtaaaagctcgtttgattctgatttccagtacgaatacgaaccgtgaaagcgtggcctatcgatcctttagtccttcggaatttgaagctagaggtgtcagaaaagttaccacagggataactggcttgtggcaagccaagggtcatagcgacgttgccttttgatccttcgaaggcggctcttcctaaccttgggaaagcagattccaccaagtgtggg

SEQ ID NO: 151308 - DNA, 227 bp, Glycine max
agaagcctcatcgttatcgccctggaactgttgctcttcgtgagattaggaaataccagaagagcactgagctcctaatcaggaagcttcctttccagaggttggttcgtgaaattgcccaggatttcaagactgatctgcgtttccagagccatgctgtgcttgcattgcaagaggctgctgaggcataccttgttgggctctttgaggacactaacttgtgtgcc

SEQ ID NO: 151309 - DNA, 227 bp, Glycine max
ctttctgtttgttcttcttccttattttcttccctagtcaaggagattcatctctgcaggttgttttagaaaagaaaaaatggtgaagatttgctgcattggtgctggatatgtggggggtccaacaatggcagtcattgctctgaagtgcccctccattgaagtggctgttgttgacatctccaaatcccggattgcagcatggaacagtgaccagcttcctatct

SEQ ID NO: 151310 - DNA, 218 bp, Glycine max
cctggctcttggatcagtttccaaaatggtctcccattaatcgtgagacttatcttgaacgacttgctttaaggtatgatcgtgtaggagaactatcacagttagatcctgttgatgtgtttgttagtacagtggatcccctcaaagagccgcctcttggaactgcaaacactgttttgtctatactttctgtttattaccctgtcgacaaagtttcc

SEQ ID NO: 151311 - DNA, 223 bp, Glycine max
cgagttccttatccatttcaatggggagcacctacatttgatgcaggtgaagcctttgccatgatgatggcatcctttgttgctcttgtagagtccagtggagcttttattgctgtctatcggtatgcaagtgcaacaccattaccaccatctattcttagtcgcggcatcggttggcagggagttggcattctgttatcaggattgtttggaactggcaatg

SEQ ID NO: 151312 - DNA, 225 bp, Glycine max
cttgagaggtgtaggataagtgggagctggaaacagcgaaagtgcaataccactacttttaacgttattttacttattccgtgaatcggaagcggggcactgcccctctttttggatcccaaggtcggcttcggccggtcgatccgggcggaagacattgtcaggtggggagtttggctggggcggcacatctgttaaaagataacgcaggtgtcctaagatgag

SEQ ID NO: 151313 - DNA, 226 bp, Glycine max
tatagcccaagccctatacaaccaaaccctaacacacacccatttgattcagtttccatggctagcctcaaggttgcatttttggctgcagtgctctgcatggttgtggtgagtgcacccatggcacatgcagctatcacgtgcgggcaggtgacgaatagcctgatcaattgcatcggttacctccagaacggaggaacgccgccgtcgggatgctgcaacggag

SEQ ID NO: 151314 - DNA, 229 bp, Glycine max
cttctgaatcacttagttgaattgaattatcttcaaaatgagagaaatccttcatgttcaagctggtcaatgtggcaaccaaattggaggcaagttttgggaggtgatgtgtgatgaacatgggattgatgccactggaaattacgtaggcaattcccatcttcaacttgagagggttaacgtactacaatgaagcaagtggaggacgctatgttcctcgagctgtgct

SEQ ID NO: 151315 - DNA, 231 bp, Glycine max
cggctcgagattaattgcaagtcgtgctatgacaacagccacattttcttgtatataacagtcagctgcacttggttgtttccctcgtcttaaaataattcatacctctcggaaattcatgggccagatctatattcctgtcataaactggtttctcttggctgtttctttggtgcttgtctgttctatatccagcattgatgagattggaaatgcatatggcattgctga

SEQ ID NO: 151316 - DNA, 234 bp, Glycine max
cttaatagcatggcgatacatttatacaaaacttctaccccaagcacacgcaatggagccgtagacagtcaagtaaaatccaatccacgaaatcatttgatctatggacagcatcgttgtggtaaaggccgtaatgccagaggaatcattacggcaggcatagagggggaggtcataagcgtctataccgtaaaattgattttcgacggaatgaaaaaaacatatatggtagaa

SEQ ID NO: 151317 - DNA, 241 bp, Glycine max
cgctctctaataacatttctaatctcattctccttctgttcaaacactctctctcatggcatcagataagaagattaggatcggcatcaacgggtttggaaggattggccgtttggtggccagggttgcccttcaaaggaatgatgttgaacttgttgctgtcaacgatcctttcatcaccactgattacatgacatacatgttcaagtacgacaccgttcatggccagtggaagcatttt

SEQ ID NO: 151318 - DNA, 242 bp, Glycine max
ccgcacgaatatcttgttgtttggagcgatccgagaaaaactctgtaaacatgttggtttaccaggacctccttacaggtgatgagcttctctctgactccttccgttacaaggaaattgagaatggaatgctgtgggaagttgaggggaagtgggttgttaaaggagcagttgatgtagacattggtgcaaacccttctgctgagggtggaggagaagatgagggagttgatgatgcagct

SEQ ID NO: 151319 - DNA, 246 bp, Glycine max
ggaacttcttataatcaagactaggcaatcccttctggaggcactgacagagcatgtcaaggctaatcatgaatatgatgtgccagaggtgatctccttacccatcaccgggggcaatcttaaatatttagagtggattaaagagagcacaagggactgactatcaagtttatagcctgaggtgtggtttccagagttattctgctggtgtgttaaataaagtcagtttgtcatctatgtaaggca

SEQ ID NO: 151320 - DNA, 238 bp, Glycine max
gtgcaacctagcagcctccaaatccaatggcttcagagaagaaactttcgaacccaatgagggagataaaagtgcagaagctcgtcctcaatatctctgttggcgagagtggagatcgtctcaccagagccgccaaggtgttggaacaacttagtggccaaaccccagtgttttccaaagcaaggtacactgttcgttcctttgggattagaagaaatgagaagattgcatgctatgt

SEQ ID NO: 151321 - DNA, 231 bp, Glycine max
acagcacaaagcgggttactgtctgttcaagctaccatctctctctctctttcttagtgcctccttgccagaagttaaaatggcccaagacacttgcctattcacatctgaatcagtgaacgaggggcaccctgacaagctctgtgaccagatctccgatgctgtgctcgatgcatgcttggagcaggaccctgacagcaaggttgcctgtgaaagctgcaccaagagcaa

SEQ ID NO: 151322 - DNA, 228 bp, Glycine max
cttccgttcctttcttcgttccttccccaacccaatcttcgccttcgcccacaacaactcctccttcaggatcgctgccaacgttactttccatttttacccttcatcctcgagaaaaaaaatggcgaacgcagcatctggtatggccgtccatgatgagtgcaagctaaagtttctggagctcaaggcgaagaggacgtaccggtatatcgtttttaagattgagga

SEQ ID NO: 151323 - DNA, 226 bp, Glycine max
gaacgccgtctgaaggatttgataaagaagcattctgaattcattagctatccaatttctctctggattgagaagactactgaaaaggagatttctgatgatgaggatgaggaagagaagaaggatgaggagggtaaagttgaagatgtggatgaagataaggagaaggaggagaagaaaaagaagaccattaaggaggtatctcacgagtggtcattggtgaaca

SEQ ID NO: 151324 - DNA, 220 bp, Glycine max
gacagtgtcgcaatagtaattcaacctagtacgagaggaaccgttgattcgcacaattggtcatcgcgcttggttgaaaagccagtggcgcgaagctaccgtgcgttggattatgactgaacgcctctaagtcagaatccgggctagaagcgacgcgcgcgcccgccgtccgtgtgccgaccagcagtagggtggctcggcccctcaaaggcacatgccg

SEQ ID NO: 151325 - DNA, 220 bp, Glycine max
cctaaaccctactcattctccatacctcaacgaagaggttaaagagacggcaacactttgctgtccgccttgaccgagcagagcttcgtcttggccctcgattttgccctaaagtactctcagtcacaccagacaccgtcgtcgtcgtcgtcgtcatcaatggcaccgaagcagaccaaggctgagaagaagatcgcttacgatgcgaactgtgcgacct

SEQ ID NO: 151326 - DNA, 222 bp, Glycine max
gcggatcatgttgccaagaatttggataaggatgggtatcgcgtgactactttgcacggagggaagtcgcaggagcagagggagatcagtcttgaagggtttaggtccaagagatataatgttcttgttgctactgatgttgctggacgtgggattgacatacctgatgtggctcatgtcatcaactatgatatgcctgggaatatcgaaatgtacactcac

SEQ ID NO: 151327 - DNA, 227 bp, Glycine max
ccgatccactcttctctctatctgcagatggcaagtgggtttggggaatcaacagggagatcacccccaagcccttcctacttcaacaacaataataacaatgatgctgccaattttgaatgcaacatttgctttgaattagcgcaagacccgataattactttgtgtggtcatcttttctgctggccctgtctttacaaatggcttcactttcactcacaatcacg

SEQ ID NO: 151328 - DNA, 230 bp, Glycine max
cgacaaacccactaagatggcttcctttgtatccttcctagtgctgcttcatgcagcccttatcctcatgcctacaagggcttgctacatactacaaaccaattaagacgccaccagtgtacaagcctccagtgtacaagccaccagtgtacaacccaccggtatatatgccacaaccaccggtttacaagccgaaaccaatgatttacacgccaccatctaagaagcca

SEQ ID NO: 151329 - DNA, 236 bp, Glycine max
ggacaagtgttcgtgaggatcagcgcattctccaagctggtgtccatactgttgttggcactcctgggcgagtgtttgacatgctgcggaggcagtctcttcgcccagattgcataaagatgtttgttttggatgaggctgatgaaatgctttcacgtggtttcaaggatcagatctatgacatcttccagctgctgccatccaaaattcaggttggagtgttctctgctacaatg

SEQ ID NO: 151330 - DNA, 227 bp, Glycine max
ctattatctgtcttcaaaaggatcaacatgggatgagattgacttcgagttcttggggaatctgagtggcgatccatacattctacacaccaatgtgttcagccaaggcaagggcaacagagagcaacaattctatctctggtttgacccaactgcagatttccacacttattcaattctttggaatccccaacgcattgttttttctgtggatggcacccccatca

SEQ ID NO: 151331 - DNA, 222 bp, Glycine max
cccagctgttaccactgtcaaccgtgccggtgccggcatggttgctccattcactggcctcaagtccatggctggcttccccaccaggaagaccaacaatgacattacctccattgctagcaacggtggaagagtgcaatgcatgcaggtgtggccaccagttggcaagaagaagtttgagactctttcctacctgccagaccttgatgatgcacaattggc

SEQ ID NO: 151332 - DNA, 222 bp, Glycine max
ccaacgttgacgctctcaacctcatccaggtcggcctcaccctcaccgacgccgccggcaacctccccgacctcgccggaaaccgctccatctgggaattcaacttccgtgacttcgactccgcgcgtgacgcctacgctcccgactccatcgatcttctccgtcgtcagggcatcgatttcgcgcgtaacaccgccgacggcgtggattccacgtgcttcg

SEQ ID NO: 151333 - DNA, 240 bp, Glycine max
ccagcgggttaagaacgttgcaggttttggatctgtcttcaaacctcttgaacggttctcttcccaaggatttcggcggtgataatatgcgttacttgaacatctcctacaacagattctccggcgaaatcccgacggagttcgcggcggagattccggggaacgccaccgttgatctctccttcaacaacttaaccggcgaggttccagactccactgtgttcacgaatcagaattcga

SEQ ID NO: 151334 - DNA, 240 bp, Glycine max
tgggaagaaagaaggggtatgttgagttcgaggagtcgccgccggacgattttgatccggcgaatccgtacaaggacccggtggcgatgctggagatgagggagcacatcgtgagagagaagtggatccaaatcgagaaggccaagatcattagggcgaagctccgctggtgctaccgcatcgaaggcgtcaaccacctccagaagtgccgccacctcgtcaaccagtatctcgagtcca

SEQ ID NO: 151335 - DNA, 244 bp, Glycine max
ctcacttgttcttgacaagtctgagtgggtgaagggacaaacccttcgccaaccttctgcatcagttgtgagatgcaaccccaccaccccatcaggcctcaccatcagagctggttcctatgctgatgagctcgtgcagaccgcgaaaacagtggcttcaccagggaggggtattttggccatggatgagtccaatgctacctgtgggaagcgtttggcttcaattgggctagagaacactgaa

SEQ ID NO: 151336 - DNA, 267 bp, Glycine max
ttggagaatcccgaggatgcttttgagtgtgcggatgtgctctccaagcagatgcttgactgtactgctgctgatttggcgattgaggacacgctttacgcgttggataaggcacttcaggttggaggtgtgccatttgatcagtacttgaggagcgtgagggccctgtccagggagcagttctttcaccgcgccactgccgccaaagttagggctgctcagctgcaggctcaggttgccaatatggctgctcggagtcagcattat

SEQ ID NO: 151337 - DNA, 270 bp, Glycine max
ccaatttcccactttctccgccgttctaccaccccgatccgttttccgatcaccggtactttgacggcgctggcgccggcgaagatttccaggatcaccggcgacccacctccagtggtatgagcagcaccgtagaatccttcagcggcccacgcgccgccgtgccggcgaaggcgccggtgattgtcaaccggagatatccccggacgccgcccgtcgttcccgaggactgccgcagcgactgcgactcgtcgtcatccgttgtggacg

SEQ ID NO: 151338 - DNA, 256 bp, Glycine max
ctcgagccgtgcgattttggatcggaacctcttctgcggcgtacaatgggacactccaacgtttggaattctcacccaaaaaactacggtcctggttctcgcacttgccgagtgtgtgggaatccacatggattgatcaggaagtatggccttatgtgctgcaggcagtgcttccgtagcaatgccaaggaaattggcttcatcaagtatcgctaaaagagctgttgtcacctacggaccaatattatgttctggc

SEQ ID NO: 151339 - DNA, 258 bp, Glycine max
gtgataacagaaaggctacactaaaaagtagcataaagaagccacaaaatagaaaatccgttcctgttgaggttgctaatgaacatgaagcatcaagtggacaggggatttgtactcctggaggtcaacccgaaagaaggaaagtgcagtggacagataattgtggtagtgagcttgtggaaattcgagaatttgagcccagtgaagtggatggatcagatgatgaatttgatagtggaaatgacagaacttgttcct

SEQ ID NO: 151340 - DNA, 256 bp, Glycine max
ctgcaaaggattctacccgccgctcgatgggaattgcgcttcaaggcgtctcgtagggctaatccgcctcacgagggtcaccaacggcacgtgcctttggggggccgaggccccctactgctggtcggcaaacggacggcgggcgcacgcgtcgcttctagcccggattctgacttagaggcgttcagtcataatccaacgcacggtagcttcgcgccactggcttttcaaccaagcgcgatgaccaattgtgcga

SEQ ID NO: 151341 - DNA, 266 bp, Glycine max
caggaatggaggtcgcaacaaacacggccgtggccacgtcaagttcattcgatgctccaactgcggcaaatgctgtcctaaggacaaggctatcaagaggtttctggtgaggaacattgttgaacaggctgcagtcagagatgttcaggaggcttgtgtctatgaacaatacacgcttccgaagctttatgtgaagatgcagtattgtgtttcctgtgctatccactctcatgttgtgagggttcgatcccgcactgataggagaa

SEQ ID NO: 151342 - DNA, 268 bp, Glycine max
gatccagacgcgttggcaaaggcattcgtggagcactactacagcaccttcgacaccaaccggaacggtttagcgaatctgtatcaggagggttccatgctgaccttcgaagggcagaagatccagggcgcttccagcatcgtcgctaagctcacttccctccctttccagcagtgccaccactccatctccaccgtcgactgccagccctccggtgtcaacgctggcatgcttgtctttgtcagcggcaacctccagctcgctggcg

SEQ ID NO: 151343 - DNA, 269 bp, Glycine max
cttgttcaccaattaagctttcaagagacaaactgctttgaaaaatgggatccaaggttgttgcatccgttgcccttctcctctccatcaacattcttttcatttccatggttagctccagcagccactacgatccacagccccaaccttctcacgtcactgctcttattacacgacctagttgtccggatctgagtatttgcctcaatattttaggcgggtctctaggaaccgtggatgattgttgtgccctcatcggtggtcttggt

SEQ ID NO: 151344 - DNA, 260 bp, Glycine max
ggctgaagctgataagaatgacaagtctgttaaggaccttgtgttgcttctctttgagactgcccttttgacttcaggtttcagccttgatgatcccaacacatttgcttcgaggatacacaggatgttgaagctgggacttagcatcgatgaggatgacaatggcggagatgatgttgatatgcccccgttggaagaggacggtgctgaggagagcaagatggaggaagtggactaaatgccaaaggtgttgtgttaat

SEQ ID NO: 151345 - DNA, 257 bp, Glycine max
gggcacctgacaagctctgtgaccagatctccgatgctgtgctcgatgcatgcttggagcaggaccctgacagcaaggttgcctgtgaaacctgcaccaagaccaacatggtgatggttttcggagagatcacaaccaaggccaacgtggactatgagcaagcttgtgcgtgacacatgcaggaacattggttttgtctctgatgatgttggtcttgatgccgacaactgcaaggtcctcgtcaacattgagcaaca

SEQ ID NO: 151346 - DNA, 260 bp, Glycine max
ctcgagccgctcttgcacacaaggggctcccgagtgaggtttatgacattgattgggacgtagatcatggtggatgcacccaccggctacttcgatgaggcgccagggaggatgagtgcaatctacactgctggcttgattgcccggaacaaggaacgcggccaaaccgatgtttttgtgcatgatgtggataggaaagtggaggacatgttctctaaggcttttctctgtgaagggtatttcaaggagcaagaagggag

SEQ ID NO: 151347 - DNA, 255 bp, Glycine max
aaaggattctacccgccgctcgatgggaattgcgcttcaaggcgtctcgtagggctaatccgcctcacgagggtcaccaacggcacgtgcctttggggggccgaggccccctactgctggtcggcaaacggacggcgggcgcacgcgtcgcttctagcccggattctgacttagaggcgttcagtcataatccaacgcacggtagcttcgcgccactggcttttcaaccaagcgcgatgaccaattgtgcgaatc

SEQ ID NO: 151348 - DNA, 257 bp, Glycine max
gttcgcacgccatgtgcgattatgtgctaattcagtgctgaatcgaatcgaatcgattctccgtccatggcggcgagcgatcgcacagtgttgcaattctcttcatcatcttcttcttgttcgcagatcttgtccgcgcaggtccaccctctggtcatcttcaacatctgcgattgctatgttcgacgccctgagcaagccgaccgcgtcatcggaaccctactcggctgcgtggttcccgacggaaccgtcgatat

SEQ ID NO: 151349 - DNA, 265 bp, Glycine max
gggaagaggaaccctagctagggtttggaagaagctgatccgagaagatggtgcagcgtctcacctaccgcaaacgccacagctatgctaccagatccaaccagcacagagtcgtcaagactcccggtggcaagcttgtttatcagaccacgaagaagagggccagcggacccaagtgccctgtcactggaaagaggattcaagggattccacatttaaggccagcagagtataatagatcaaggttacacagaaaccgaagact

SEQ ID NO: 151350 - DNA, 266 bp, Glycine max
gcctcaagggcttgctacttactacaaaccaattaagaagccaccagtgtacaagcctccagtgtacaagccaccagtgtacaaaccaccggtttataagccaaaaccaccggtttacaagccgaaaccaccggtttacaagccaccatataagaagccaccatacaagaaaccaccttatggaaagtaccctccagtagaggacaacacccatgcctaaagcaagcaatgaggtctattatctacttaataaataagaggaactg

SEQ ID NO: 151351 - DNA, 265 bp, Glycine max
cgggttaaaattcctgaaccgggacgtggcggctgacggcaacgttagggagtccggagacgtcggcgggggccccggaaagagttatcttttctgtttaacagcctgcccaccctggaaacggctcagccggaggtagggtccagcggctggaagagcaccgcacgtcgcgtggtgtccggtgcgcccccggcggcccttgaaaatccggaggaccgagtgcctcccacgcccggtcgtactcataaccgcatcaggtctccaa

SEQ ID NO: 151352 - DNA, 209 bp, Glycine max
ttcagggtcatggacaaggacggcgacggcaagctcagccaccgcgacctgaagacttacatggcctgggctggcttttcggccaccgacgacgacatcaacgccatgatccggttcggcggcggcgaccaaaacggcggcgttacgttcgatggtttgcttcgtatattggcgcttgaatgttccgccgctaattaaattaattaacc

SEQ ID NO: 151353 - DNA, 264 bp, Glycine max
gcttcctgcacgctactgaaaaagaaagaaaatccgtttggatgaatgcgcgaggggaagagagactctctctcctcttccttctacacgtttagagagataaaggtttaattcgccactcatcgaatggaacctcgggttgcgaacaagttccgtcttggccgcaagattggtagcggatccttcggcgagatctatctcggtacgaatactcagacaaatgaagaggttgcagttaagctcgaaaatgtcaaaactaagcat

SEQ ID NO: 151354 - DNA, 276 bp, Glycine max
tcattccgatcgctcttgtccttaactggccgggtcgtgcctccggtgctgttactttgaagaaattagagtgctcaaagcaagcctacgctctgtatacattagcatgggataacaccacaggattctgatcctattgtgttggccttcgggatcggagtaatgattaacagggacagtcgggggcattcgtatttcatagtcagaggtgaaattcttggatttatgaaagacgaacaactgcgaaagcatttgccaaggatgttttcattaatc

SEQ ID NO: 151355 - DNA, 263 bp, Glycine max
gttcctctgagtagtgatggctagcctcaagtttgcatgcgtagttgcggtgatatgcatggttgtggtgatcactgcacccatgacaaatgccatcacgtgcggggaagtagccagatccctatctccatgcatcaattaccttcggagccgccgcggcggatcaccggaggcggaatgctgcagaggagtcacgagcctcaaccgcgccgccagtaacaccgccgaccgacgcaccgcgtgcaattgcctgaaatccgttg

SEQ ID NO: 151356 - DNA, 258 bp, Glycine max
caaagctgaagtgtctgcttcttccgattccggcacgcccccatcaccatggtgaacgttccgaaaacaaagaagacatactgcaagagtaaggagtgcaggaagcacaccctgcacaaggttacccaatacaagaagggtacagatagcattgctgcccaaggaaaacgccgttacgatcgcaaacaatctggttatggcggacaaactacagccgtcttccacaagacggctaagaccaccaagaagattgttctg

SEQ ID NO: 151357 - DNA, 263 bp, Glycine max
ctttaagaaggatagagatggctactggaaatggtttgctggcaacttggcctctggtggtgctgctggtgcatcatcccttttgtttgtttactctcttgactatgcccgtacccgtcttgccaatgatgcaaaggctgcaaaaaagggtggagagagacaattcaatggtctcgttgatgtctacaggaagacattggcatctgatggtgttgccgggctctaccgtggtttcaacatctcatgtgttggaatcatcgtgt

SEQ ID NO: 151358 - DNA, 266 bp, Glycine max
gtagaggaagaaatcaagatgctttattggctgcttgtctctacatcgcttgccgacaagaagacaaacctcgtactgtaaaggaaatttgctctgttgccaatggggccacaaagaaggaaattggccgagctaaagaatacatagtaaaacaactgggtttggagaacggtaatgctgtggagatgggtacaatacatgcaggggacttcatgaggcgattctgttctaatctttgtatgaataatcaagctgttaaagctgct

SEQ ID NO: 151359 - DNA, 263 bp, Glycine max
tcttgatccttctttttctccttgaactcaaacatggcagatgaggtggttctgctagatttctggccaagtccatttgggatgagggtcaggattgcacttgctgaaaagggtatcaaatatgagtacaaagaagaggacttgaggaacaagagtcctcttctcctccaaatgaacccggttcacaagaagattccggttctcatccacaatggcaaacccatttgtgaatccctcattgctgttcagtacattgaggaggt

SEQ ID NO: 151360 - DNA, 263 bp, Glycine max
aaaaagtggaactgctggtaggtgttttggatgcaaaggcactggtatgaaaattacaagaaggcacattggactaggcatgattcaacaaatgcaacatgtctgtcctgactgcagaggatctggtgaggtcattaacgagagagataaatgtcctctgtgcaaaggaaacaaggtttcccaggaaaagaaggtgctggaagtgcatgttgagaagggcatgcagcagggtcagaagattgtttttgaaggacaagctgatg

SEQ ID NO: 151361 - DNA, 263 bp, Glycine max
cacgaagattacaagttcaatggtttggcatggctcttcttgggtgtccctacaagcagctcattgctttacaaggaggagtttgagaagatgcaagagaaaagtcctgaaaacttcaggcttgacttcgctgtgagtcgagagcaaacaaacgagaaaggggagaagatgtacatccaaacccgaatggctcaatacgcagaagagctttgggaattactgaagaaggataacacttttgtgtacatgtgtggactaaaagg

SEQ ID NO: 151362 - DNA, 259 bp, Glycine max
cctcgagccgattcggctcgaggtgcggcttaacgctagtaacttaaatgtattttcaagagattttggtcaacctgcgaggaaagaggaggaggatgatgtagaggaagtggaaattgatcaaaaatgtctcccagctgattttgatcctgctacatttgatcccaatgatcatcgaggccctccatcagagagagttttcaggcttattgatgagattgcttctcttacggtagctgaagctggagaattgggtctc

SEQ ID NO: 151363 - DNA, 262 bp, Glycine max
aaaggattctacccgccgctcgatgggaattgcgcttcaaggcgtctcgtagggctaatccgcctcacgagggtcaccaacggcacgtgcctttggggggccgaggccccctactgctggtcggcaaacggacggcgggcgcacgcgtcgcttctagcccggattctgacttagaggcgttcagtcataatccaacgcacggtagcttcgcgccactggcttctcaaccaagcgcgatgaccaattgtgcgaatcaacggtt

SEQ ID NO: 151364 - DNA, 263 bp, Glycine max
gttcaccaattaagctttcaagagacaaactgctttgaaaaatgggatccaaggttgttgcatccgttgcccttctcctctccatcaacattcttttcatttccatggttagctccagcagccactacgatccacagccccaaccttctcacgtcactgctcttattacacgacctagttgtccggatctgagtatttgcctcaatattttaggcgggtctctaggaaccgtggatgattgttgtgccctcatcggtggtctt

SEQ ID NO: 151365 - DNA, 265 bp, Glycine max
aagtcaccttcctataacccaccaggttacaaagcaccatcttataatccaccagcttacgagtctgcttcctataatccaccaggttacaaagcaccatcttataatccaccaggttacaaagcaccatcttataatccaccagtttataagccaccttcctataattcacctgattacaagccaccttcctacaatccaccagtttacaagtcaccttcttataattcaccagattacaagacacctgattacaagcccactt

SEQ ID NO: 151366 - DNA, 263 bp, Glycine max
tagtataatctcttcgtctaagcatatcaataagcggaggaaaagaaactaacaaggattcccttactaacggcgagcgaaccgggaaaagcccaccatgaaaatcggtcgccctcggcgtccgaattgtagtctggagaagcgtcctcagtggcggaccgggcccaagtcccctggaagggggcgccagagagggtgagagccccgtcgtgcccggaccctgtcgcaccacgaggcgctgtcggcgagtcgggttgtttggg

SEQ ID NO: 151367 - DNA, 253 bp, Glycine max
ccgtgatgagagctgcgttggaatgctgccacaagggctgggggacgtcagttattgtaggtgttgcagcatcagggcaggaaatatcaacccgtcctttccagttggtgagtggacgagtctggaaaggaacagcttttggtggcttcaagagcaggtcacaggtgccttggcttgtagacaagtacttgaagaaggaaatcaaggttgatgagtacattacccatactttgacactttcggagatcaacaa

SEQ ID NO: 151368 - DNA, 262 bp, Glycine max
gtttctcggggctgacaaggtgcttgggactgaacttgaggccaccaaatcggggacgttcactgggtttgttaagaagcctggtgtgcttgttggggagcataagaaagtggctctggtgaaggagtttcagggtaatttacctgacttgggtctaggtgatagtaaaagtgattatgacttcatgtcaatttgcaaggaagggtacatggtgccaagaactaagtgtgaaccactaccaagaaacaagcttttaagtcca

SEQ ID NO: 151369 - DNA, 265 bp, Glycine max
tatcgatactccaatatagactacaacataactggcggtagaaggtatcccatacctgacaaatcagcacctatttacataacaatcggagatggaggaaatctagaaggtcttgcctcaagttatttggatccacagccagaatattctgcattcagagaagcgagctatggacacgccacactggagataaaaaacaggacccatgctatctaccactggtatcgcaatgatgacggaaagaaagtcccagctgactctctcg

SEQ ID NO: 151370 - DNA, 262 bp, Glycine max
aaaatgatgaatcatggcatccgttgcctgaaaaattgttcagaagcttggacactgtaactcgtatgttaagattcacagcaccttttccacttcttgcatttcctgtgtacctttttagtaggagtcctgggaagactggttctcactttgaccccagcagtgacttgttcgttcccaatgaaagaaaagatgttattacttccacagcttgttgggctgctatgttgggattgcttgttggattggggtttgtaatggg

SEQ ID NO: 151371 - DNA, 262 bp, Glycine max
tagatgttgctgggctttattttgccttgacccagttgactcacaggaacatctctcagaatcataaatttcaagcagttggacttggctgggcatttgctgactctgtgctgcatcggttggctccactttgggttggtgccagaggattagaatttacttgggattacattcttcagggccttgaggctaatgcaaatttggtgttgagcatatcccttgctgcacttggatctttgatgtggcttcgaaaaaataaacc

SEQ ID NO: 151372 - DNA, 261 bp, Glycine max
cgcaacaaaaagaaagaatcccaggcgaggagaaagatggaggggaaggagcaggatgtgtcgttgggagcgaacaagttccccgagagacagccgattgggacggcggcgcagagccaagacgacggcaaggactaccaggagccggcgccggcgccgctggttgacccgacggagtttacgtcatggtcgttttacagagcagggatagcagagtttgtggccacttttctgtttctctacatcaccgtcttaaccgtt

SEQ ID NO: 151373 - DNA, 258 bp, Glycine max
ctcgagccgcgccgctcgatgggaattgcgcttcaaggcgtctagtagggctaatccgcctcacgagggtcaccaacggcacgtgcctttggggggccgaggccccctactgctggtcggcaaacggacggcgggcgcacgcgtcgcttctagcccggattctgacttagaggcgttcagtcataatccaacgcacggtagcttcgcgccactagcttttcaaccaagcgcgatgaccaattgtgcgaatcaacggtt

SEQ ID NO: 151374 - DNA, 259 bp, Glycine max
gccagttggcaggttgtgtgcaacataacaacagccaagagaacatcaagtaaatgctgtgtctcgttttcatcttattacaatgattcagttattccatgcaaaacatgtgcttgtggatgccccaagaacacagagagaacatgtagtactagtgctccagctatgtggcttccaccagaggcacttcttgttccctttgtgaaccgaactgccaaggctgttgcttgggcaagtctgaaacatctccgggtgccaa

SEQ ID NO: 151375 - DNA, 261 bp, Glycine max
agcaacacaagaacactctcttgaacattcatggatccagtgagcgtgtggggtaacacgcccttggcgacggtggatcccgagatccatgacctcatcgagaaggagaagcaccgccaatgccgcggcatcgagctcatcgcctccgagaacttcacctccttcgcagtcatcgaggccctcggcagcgccctcaccaacaaatactccgagggcatgcccggcaaccgctactacggcggcaacgaattcatcgaccag

SEQ ID NO: 151376 - DNA, 262 bp, Glycine max
gttggagcttgcaaccagacaagaggcctgagttctggcaggttgttaagatattagagcaatttgaatcttcacttgccagtgatggaaccctgagcctggtgccaaatccttgttgggatcataagaaagggcttcttcattggattcaaaagcttggtcccttgcaccaaaatagtggccccgtgcctaaacccaaattcacatgaatctttcaagtgtcctggcttttattgtaacaccaggtccattgtaattaaaa

SEQ ID NO: 151377 - DNA, 263 bp, Glycine max
aaagaaagaatcccaggcgaggagaaagatggaggggaaggagcaggatgtgtcgttgggagcgaacaagttccccgagagacagccgattgggacggcggcgcagagccaagacgacggcaaggactaccaggagccggcgccggcgccgctggttgacccgacggagtttacgtcatggtcgttttacagagcagggatagcagagtttgtggccacttttctgtttctctacatcaccgtcttaaccgttatgggagtcg

SEQ ID NO: 151378 - DNA, 263 bp, Glycine max
atggccacctctgctattcagcaatcagcattcgcaggtcaaactgctctgaagcagctcaatgagttggtccgcaagaccggtggcgccggcaaaggtcgcaccaacatgcgccgtaccgtcaagagtgctcctcagagcatttggtatggccctgatcgtcccaagtacctgggtccattctcagagcagattccgtcatacctgaccggagaattccccggtgactacggatgggacactgctggactatcagctgaccc

SEQ ID NO: 151379 - DNA, 261 bp, Glycine max
gctattagttcgattttgtagtaagtgaggtgccaatatggtgaagatagctcttggtactttggatgactcttttagcgctgcctctcttaaggcttatttcgcagagttccacgcaactctgattttcgtgttcgctggtgttggatcagccatcgcttacaacgagcttacaaaagatgcagccttggatccaacggggctggtggcagtagctgtggcacatgcatttgcactgtttgtaggtgtctccgtcgccgc

SEQ ID NO: 151380 - DNA, 263 bp, Glycine max
  unsure (1)..(263): unsure at all n locations
ggctcgngcttggnactccagaggaagatatgaagttaattgcttatgtgcactaggtatggctgctgganttggcgccaactccccaagtttggcaggtctgcacgatgtggganaagttgtagattgagatggatganttatctaaggcctgatatcaaaanagggaacttcactcaacaggaagaagaatgcatcctcagaatgcccaaaaaattggnaacagatggtctggctattgcggttgagttacccaggangaa

SEQ ID NO: 151381 - DNA, 260 bp, Glycine max
gttgaggatccctctgccccacatggtcttcgccttgtgatagaggactacccttatgctgttgatggacttgaaatatgggatgctattaagacatgggtccatgagtatgtctctgtgtattacccaacaaatgcagcaattcaacaagacactgaacttcaagcatggtggaaggaagttgtggagaagggtcatggtgacttaaaagataagccttggtggcctaaactgcagactgtggaggatctcattcaatc

SEQ ID NO: 151382 - DNA, 271 bp, Glycine max
gaaaagctttctagctggtcataatatcaccattactgatggtattgacaaaactagtgcgactttgcaatttagaaagttagcagattgtgattttctcaagagaaattttaagcagatgtctaatgttttgtgggtggctcctgaggacaaggcgagtttatggtcacaacttcattatgtttcgtgtaataatctggaaatgcaagaagcttatcttgtcaatctcgtaaatgtgttacgagaattgtatttgcacagtccagaggaa

SEQ ID NO: 151383 - DNA, 271 bp, Glycine max
ctcatcttttgtgttcttctttgtttctcacctttctgaggatttttccatcttagttcctggaggcaccaggaacctgtccaaataaataaaccttttttttcttctaatttttctgaagtttcattttttagtccaatggcaacttggatattatcagaatgtggcttgaagcctcttgctccagtaattcctagacctagaactggggctgctttgtccagcacctcaagggttgaatttttggacacaaacaaggtagtggcaggtc

SEQ ID NO: 151384 - DNA, 269 bp, Glycine max
ctcgagccgaatcggctcgaggtcatcgttgggatctccatacgccggatctgctaaaatacgcttgatccatatgggcatcctcgaccacttgtgggacgacaccgtcgccggcccaaggccggaaaacggtctcggcaagctccgaaaacaccacaccttcactttccgacctagctccggcaaggaaacggagggcgggagcgtgagatcgtccggagacgaatcgtcggatgaagcgacgacgatgacgcgtagtatcatgatcg

SEQ ID NO: 151385 - DNA, 273 bp, Glycine max
gaaagatattccaacaccatggtaagagctccttactttgataaaaatggaataaaaaaaggtgcatggagcgaggaagaggataagaggctcatggcttatgttgagagacatgggcatcccaattggcgtcaactaccaaagtttgcaggattgcaaagatgtggaaagagttgcagacttcgttggatgaattaccttaggccaaatctaaaacgagggaactatacccagaaagaagagcaaataatcaaggatttgcataaaaagcac

SEQ ID NO: 151386 - DNA, 274 bp, Glycine max
gaacaatatgattgattttgctttcccatacctcttacagtttattcgagagtatactggtaaagttgatgagcttatcaaggacaaaattgaagcacagaaagaggagaaagctaaagagaaggaagagaaggatgttattgctcagcagaatatgtatgcccagttactaccacttgctttgcctgcaccaccaatgccaggtatgggtggaggaggctatgctccactgacaacaccccctatgggtggtatggggatgcctccgatgcca

SEQ ID NO: 151387 - DNA, 269 bp, Glycine max
tgaatatgtggctattggtgtttactctgtattggctctctctgtgttctttctttatgttcgatgcactgccattgatcccgccgaccagggagtcatggttgattgtgacaagacatcaaagaatagatcaaaacttgatgaagagttggcagaacccagcaagatgggactaaagggtgaaggaatgtctgatcgtcacaattcaagttggtgctctaaagttgggtgtttcttctgtagtttccttgttagagaagattgccgca

SEQ ID NO: 151388 - DNA, 266 bp, Glycine max
ctaaccctaacaccataaccagaagcgtaatcgcaatcgcaatccagcgtatatgaaggtcgtcgctgcatacttgctcgcagtgttgggagggaatccttgccccttctgccgatgacatcaaacacatcctcggcgcagttggagctgtggctgagactgagttgattgatttgctcttgactgtagtcaagggaatagacttcaatgagctaattgctagtggaagtggaacgatgtctgcagtgtctggtggcggtgcagcg

SEQ ID NO: 151389 - DNA, 256 bp, Glycine max
ggcaaatggaatgataccagtgaagatggatcaaaggaattccgttccaagtcctctgtaagactctcatcagcaaaacttacaactggagctggggttgtctattcatcctcagaagaggaggatgtctgtccaacttgtcttgaagaatacactgaagagaatccgaagatagtgacaaaatgctctcatcattttcatcttggttgcatttatgagtggatggaaagaagtgacagctgtcctgtttgtggga

SEQ ID NO: 151390 - DNA, 268 bp, Glycine max
gtggagtgcaggtgtgatcatatacattctcttatgcggaacacctccattttggggtgaatcggagcaagagatatttgaagaagttttgcatggtgatcttgatttctcttcagatccttggcttaatatctctgaaagtgctaaagacttggttaggaaaatgcttgttagagatcctagaaaacggatgacagcacatgaagttcttcgtcacccttggattcaggttgatggagttgctccagacaagcctcttgattctgca

SEQ ID NO: 151391 - DNA, 269 bp, Glycine max
aagtgattgactttttttcttcttctattctcacacatacccatctactccttccctcatggctgaacaatcttccaactccatttacgatttcactgtcaaggacatcagtggaaatgatgtgagtctgaatgattacagcgggaaggttctactgattgtgaatgtcgcctctcaatgtggtttgacacagacaaattacaaagaattgaatgtattgtacgagaagtacaagaatcaaggatttgaaatcttggcatttccgtgca

SEQ ID NO: 151392 - DNA, 228 bp, Glycine max
cggttcttggagaaagatgcttatcctttcttgtcaatgttgtaatagcagaatgcttgctagaagtattctcttcttttgtgtaacttgggtttgtatgattgcttaaattagctaatacttttagctataattggaactcttggacccaaaaaaaaaaaaaaaaaaaaaaaaaaattaaaaaaaaaaaaaaaaaaaaaaaaaaaaaaaatgaaaaaagatatcaaa

SEQ ID NO: 151393 - DNA, 272 bp, Glycine max
atagtgggcaagctttagaattcaaggaactaaacatccatgcttgggaagcctttgacaagggacaagatgttcacatgcaagcagctccatcccaagctgaattactctataagaatttcaaggtcatgaaggagaagttaaagtatcaaacaaaggaaaccattattgagaagtatggcaatgcagccgatgaggacaaacttccaagagaacttctgctgggccaaagtgaaaggcaagttgagtatgatcgtgcaggtagaattatt

SEQ ID NO: 151394 - DNA, 273 bp, Glycine max
gcactcatcattcttcgtttgtctaagatccgccttctctgaattgtaaaaatgtcgctcggagaaactgcttgttcatacgcagctctcatccttcatgaagatggaatcagtgtaactgccgacaagatcagcaccttgttggaaactgcaaaggttcaagtagatacctattggccaaccttatttgctaaacttgctgagaagaaaaatcttggcgatttgatagccaatgcagcaggcggtggtgcaccagttgctgttgcagctgcc

SEQ ID NO: 151395 - DNA, 253 bp, Glycine max
aaaggattctacccgccgctcgatgggaattgcgcttcaaggcgtctcgtagggctaatccgcctcacgagggtcaccaacggcacgtgcctttggggggccgaggccccctactgctggtcggcaaacggacggcgggcgcacgcgtcgcttctagcccggattctgacttagaggcgttcagtcataatccaacgcacggtagcttcgcgccactggctttactacaagcgcgatgacaattgtgcgaatc

SEQ ID NO: 151396 - DNA, 265 bp, Glycine max
ctctgtctaaggggtgccctgagatcacattgaacaatggtgaaggctgtggccgttcttggcagcagtgagggtgtcactggaactattcacttcgttcaggagggaagtggtccaaccaccgtaactggatctcttgctggtcttaagcctggtctccatggtttccatgtccatgccttgggggacactaccaatggttgcctctcaactggatcacatttcaatcctaataacaaggagcatggtgcccctgaggatgaga

SEQ ID NO: 151397 - DNA, 261 bp, Glycine max
gatcacgatcagcaacaagcatgggaggttgagtcctgaagagatgaggagaatggtgagagatgcagtgaggtataaggcagaggatgaggaggtgaggaacaaggtgaggataaaaaacttgcttgagaattatgcttttgaaatgagggacagagtgaagaaccttgagaaggttgtggaggagaccatagaatggcttgacagaaaccaattggctgaaactgatgagtttgagtacaagaggcaggagttggaaga

SEQ ID NO: 151398 - DNA, 266 bp, Glycine max
caacattcttttcatttccatggttagctccagcagccactacgatccacagccccaaccttctcacgtcactgctcttattacacgacctagttgtccggatctgagtatttgcctcaatattttaggcgggtctctaggaaccgtggatgattgttgtgccctcatcggtggtcttggtgacattgaagccattgtgtgcctttgcatccaactcagggccctcggaatattaaaccttaaccgtaatttgcagttaatattaa

SEQ ID NO: 151399 - DNA, 264 bp, Glycine max
  unsure (1)..(264): unsure at all n locations
tttatgtccctttatttttttgagggttaaaaactgctgtgaaatatttttctaggattttggctaatcgtctatcagctgctcgctcaaaagagaggaagatgcggtacatttctgaattagagctcaaagtacaaacacttcagacagagacaaccacattgtctactcagtttaccaattacaggtgtgaacggtctgagttgagccatantccntttcntccgtttnncataatnttnngggggaaaanngtnccccccc

SEQ ID NO: 151400 - DNA, 268 bp, Glycine max
aaggattctacccgccgctcgatgggaattgcgcttcaaggcgtctcgtagggctaatccgcctcacgagggtcaccaacggcacgtgcctttgcggggccgaggccccctactgctggtcggcaaacggacggcgggcgcacgcgtcgcttctagcccggattctgacttagaggcgttcagtcataatccaacgcacggtagcttcgcgcaactggctttacactcaaacgcgatgaccaattgtgcgaatccacggttcctctcg

SEQ ID NO: 151401 - DNA, 267 bp, Glycine max
tctcgagccgaatcggctcgaggccaactttgttgcccctggttaaaccaagggtgatggtcatggtgctgagattgttggcactttcatccttgtttacaccgttttctccgccaccgatgccaaacgtagcgccagagactcccacgtccccattttggcacccttgccaattgggttcgctgtgttcttggttcacttggcaaccatccccatcaccggaactggtatcaaccctgctcgtagtcttggtgctgctatcatctt

SEQ ID NO: 151402 - DNA, 264 bp, Glycine max
tctcgagccgattcggctcgagcgactgtctcaatctgttcgacgacaccgtttcggagctcgaaaccaccatcgcggatcactcacagagcacaataggaccgaagcgttaccacgacgcacagactttgttgagtggcgcaatgaccaacttgtacacgtgtcttgatggctttgcgtacagtaaagggcacgtgagggacaggtttgaggaggggctgttggagatttcgcatcacgttagtaactcgctcgccatgctga

SEQ ID NO: 151403 - DNA, 265 bp, Glycine max
caattcctttatttgtgggatttatttctcacacgataattcattaaattatagaatggatttttacctatgcctagatctcggataaatgaaaattttattgataaaaccttttcaattgtagccaatatcttattacgaataattccgacaacttcgggagaaaaaagggcattcacttattacagagatggtgcgatttgattctatttttttaccgaaatcggtaaaaagtggaaaaaacccacgcttgctgaaggtgaaa

SEQ ID NO: 151404 - DNA, 263 bp, Glycine max
atttgttcttagttgcagcctcaacatgaaaggtttcttttagaacattgtagatgtaatgcaccatgaattgagagtagatttctacttgttttgcatgaaaaaaaaaaaaaaaaaaaaaaaaaaaaaaggaaaaaaaaaaaaaaaaaaaaaaaaaaaaaaaaaaaaaaaaaaaaaaaaaaaaaaaaaaaaaaaagggggggggggcccaaatagtgggcgccccgggcggggttttttttggggggggctactgggggggg

SEQ ID NO: 151405 - DNA, 266 bp, Glycine max
gccgaaaatgcctttcaagaggtacgttgagatcgggatggttgctcaaatcaactacggcaaggaatatggcaggctcgtcgtcatcgtcgacgtcattgaccagaacagagcacttgtcgatgcacctgatatggtgaggtcccaagtcaatttcaaaaggctttcccttaccgacatcaagattgacatcaagagggtccctaagaagatagatcttgtcaaagccatggaggatgctgatgttaagaacaagtgggagaaga

SEQ ID NO: 151406 - DNA, 265 bp, Glycine max
atattttaggcgggtctctaggaaccgtggatgattgttgtgccctcatcggtggtcttggtgacattgaagccattgtgtgcctttgcatccaactcagggccctcggaatattaaaccttaaccgtaatttgcagttaatattaaactcctgtggacgaagctacccgtcaaacgccacttgcccccgaacctaagaacagaatatgtatggcactaattaccatattacttcgtatcatggtgtttgctttgtttgtctgtg

SEQ ID NO: 151407 - DNA, 269 bp, Glycine max
atcgaaaccgctctttcaggatcttcctccgccaccgtcaccgcaaccgccgtcgttgcctcctccgtggaatccccttcggcgccggttgaatccctccctcaaccaccggtgctgatttcgccggatatagccgcaccggttcaggcgaaccggtgcggcgcgtgtaggaagcgcgtggggttgacagggttcaagtgcaggtgcggaacaacgttttgtgggagccacaggtaccccgagaaacacgcgtgtggcttcgatttcaa

SEQ ID NO: 151408 - DNA, 267 bp, Glycine max
ggataaggctgccgcacatttgaagggtggtgcaaagaaggttattatttctgcccccagtaaggatgcccccatgtttgttgttggtgttaacgagcacgagtacaagccagagcttgacattatttccaatgctagctgcacaaccaactgccttgccccgctcgccaaggttatcaatgacaggtttggcattgttgagggtttgatgaccactgttcattccatcactgctacccagaagactgttgatgggccatcagccaa

SEQ ID NO: 151409 - DNA, 265 bp, Glycine max
tctcgagccgattcggctcgagaaaatagagggtgatcatcatcaacacaaggatgaggacacaagtgtccctgttgagaaagttgaggttgttgaaacagcacatgctgaggaaaagaaggggttcctcgacaagattaaggagaagctaccagggcacaagaagacagaggaggccacagctactactcctcctccaccaccacctgttgcatcattggagcatggtgaaggtgctcatcatgaaggagaggccaaggagaag

SEQ ID NO: 151410 - DNA, 262 bp, Glycine max
gggattcagatgctcaaggatgttggagtagaaattgaaccttatggtgacttgaatactgaagcggaaaggaaattgggtcagctagtcttggagaaatatggcacggagttctatatccttcatcggtaccctttggctataaggccattttatacaatgccttgctatgacaatccagcatacagcaactcgtttgatgtctttattcgaggtgaggagatcatttcaggagctcagcgtgttcatgtgccagaatttt

SEQ ID NO: 151411 - DNA, 264 bp, Glycine max
caaggacggcgatggttgcatcacaaccaaggagcttggaactgttatgcgttcattggggcaaaacccaactgaggcagagctccaggacatgatcaatgaagtggatgctgatgggaatggtaccattgacttccctgagttcctaaatctcatggccaggaagatgaaggacactgattctgaggaggagctgaaagaggcattccgggttttcgacaaggaccagaatgggttcatctctgctgctgagctccgccatgt

SEQ ID NO: 151412 - DNA, 266 bp, Glycine max
atttgccatagcaaccaataggcatctcagtgtgctccaccctatttataaacttctttatcctcactaccgcgacactataaatatcaatggacttgctaggcagtccctgattaatgcagatggcattatagagaaatcatttttgcccggaaagtactccattgagatgtcttcatccgtctacaagaattgggttttcactgaccaagcattaccagctgatctcgtcaagagaggattggcaattgaagatccctctgcac

SEQ ID NO: 151413 - DNA, 264 bp, Glycine max
tgaaggatgcagagaggtacaaggcagaggatgaagaggtgaagaaaaaagtggaggctaaaaattcgcttgagaattacgcgtataacatgaggaacacgataaaggatgagaagataggagggaagctgagcccggatgagaagcagaagattgagaaggctgtggaggatgcgatacagtggttggagggaaaccagatggcggaagtggacgagtttgaggacaagcagaaggagttggaagggatctgcaaccccatca

SEQ ID NO: 151414 - DNA, 266 bp, Glycine max
ctttctctctctctctctctctctctctgaagatggcttcacgcaggctcgtatcttctctgattcgatcctcccttcgtagatctcaatcgaagccctcaatttccgcatcgacatcgacacccacgtcatccaaccgtgcctcaccgcacggatacttgctgaaccgcgtcgccgagtacgccaccgccgcggctgctgctaccactcctccctctcctcctcctccggggaagaaggagctcggcggcggcgggaagatcacc

SEQ ID NO: 151415 - DNA, 265 bp, Glycine max
tgactcttcttcgtctcaaatctcttcgttccttcgattcgttccatttcttccaaaatggccaaagacccagttcgcgttctcgtcactggagctgcagggcaaattgggtatgctcttgtccctatgattgctaggggagtgatgttgggtcctgaccagcccgtgatcctccacatgcttgacattcctccggcagcagagtcattggaatggggttaaaatggaattggtggatgctgcattccctcttcttaaaggtgtt

SEQ ID NO: 151416 - DNA, 267 bp, Glycine max
ctgcaaaggattctacccgccgctcgatgggaattgcgcttcaaggcgtctcgtagggctaatccgcctcacgagggtcaccaacggcacgtgcctttggggggccgaggccccctactgctggtcggcaaacggacggcgggcgcacgcgtcgcttctagcccggattctgacttagaggcgttcagtcataatccaacgcacggtagcttcgcgccactggcttttcaaccaagcgcgatgaccaattgtgcgaatcaacggttc

SEQ ID NO: 151417 - DNA, 269 bp, Glycine max
cctaacgcgtgcagagcagagagagacgcagccatggggcgaagacccgcgaggtgttataggcaaattaagaacaaaccataccccaagtcacggttttgccgtggtgttcctgatcccaagatcaggatttacgatgttggtatgaagaagaagggtgttgatgagtttcctttctgtgtccatctggttagttgggagaaggaaaacgtttctagtgaggccctggaagctgctcgtattgcttgcaacaagtacatggccaaatt

SEQ ID NO: 151418 - DNA, 262 bp, Glycine max
ctcgcaccggtagctgctgcagccccttgtgagtgagtgttctgaaagatgagaccaattttgatggaaggtcatgagaggccattgacgttcctgaaatacaacagggacggcgatctcctcttctcctgcgccaaggaccacaacccaaccgtctggtttgccgacaatggcgaacgcttgggcacttatcgcggccacaacggcgccgtttggacctgcgacgtctcaagagattcggttcgtctgatcacgggtagtg

SEQ ID NO: 151419 - DNA, 260 bp, Glycine max
tctcgagccgattcggctcgagcgcgattgtccatactttctgaaaactcaaagatgcaagtttggttcaaagtgcaaatttaatcatcccaaggtttcctctgaaaatgctgatgtttcttctggcttacctgagaggccatctgagcccccttgcgcgttctacatgaaaactggaaaatgtagatatggcactgcttgtaaattccatcaccccaaggatatccagattcagttgtctgacgacttgagtcaaaatg

SEQ ID NO: 151420 - DNA, 261 bp, Glycine max
caccaaattcttattagaacgaaaaaagaaaagaaaagaaaaaagagcgatttttccctcaccaaagaagaaccaaaacaatggcggatcaactcaccgatgaacagatctccgagttcaaggaagccttcagcttgttcgataaggacggcgatggttcgttctctctctctctctctctctctctctcatgttttgcgtatttgatttaatctgattttcgtgtttgtggttttcgtagatcggtgtttcttttcgtga

SEQ ID NO: 151421 - DNA, 264 bp, Glycine max
ctctggtcgatggaacaatgtaggcaagggaagtcggcaaaatggatccgtaacctcgggaaaaggattggctctgagggctgggcacgggggtcccagtcccgaacccgtcggctgtcggtggactgctcgagctgcttccgcggcgagagcgggtcgtcgcgtgccggtcgggggacggattgggaacgggcccttcggggcctcttccccgggcgtcgaacagtcaactcagaactggtacggacaaggggaatccgactg

SEQ ID NO: 151422 - DNA, 252 bp, Glycine max
gtacttataagtacgcctatttttactggtgatggggaaggtggaagtggttttgctgctgctgccgccaccgctgcagctggtggtgtatccggatttgagtttggcgtggatccaaacttggatccagaattggctcttgctctaagagtttcaatggaagacgagagagccaggcaggaagcagctgcaaaaaaggctgcagaggctgctgccaacctagagacaggagatgagcagcaagcaagctcc

SEQ ID NO: 151423 - DNA, 255 bp, Glycine max
gcgcgagcccgggcggagcggtcgtcggtgcagatcttggtggtagtcgcaaatattcgaatgagaactttgaaggccgaagaggggaaaggttccatgtgaacggcaattacacatgggttagtcgatcctaagggacgcgggaagccgtctgatagcgctctatgcgcgtactccgaacaggaatcgcgttaaaattgctgaaccgggacgtggcagctgacggcaacgtacgggagtacggagacgtcggcg

SEQ ID NO: 151424 - DNA, 253 bp, Glycine max
gctaatccgcctcacgagggtcaccaacggcacgtgcctttggggggccgaggccccctactgctggtcggcaaacggacggcgggcgcacgcgtcgcttctagcccggattctgacttagaggcactcagtcatgatccaacgcacggtagcttcgcgccactggcttttcaaccaagcgcgatgaccaattgtgcgaatcaaggttcctctcgtactaggttgaattactattgcgacactggtcatcagt

SEQ ID NO: 151425 - DNA, 256 bp, Glycine max; identical to SEQ ID NO: 151389

SEQ ID NO: 151426 - DNA, 258 bp, Glycine max
gaacaagtagttgagaactaagaaggagaagcaaatggcttcctcaatgatctcttccccagctgttaccactgtcaaccgtgccggtgccggcatggttgctccattcactggcctcaagtccatggctggcttccccaccagaaagaccaacaatgacattacctccattgctagcaacggtggaagagtgcaatgcatgcaggtgtggccaccagttggcaagaagaagtttgagactctttcctacctgccaga

SEQ ID NO: 151427 - DNA, 279 bp, Glycine max
aagctcggcattcaactcgagtaagctttcaagaggcaaactgctttgaaaaatgggatccaaggttgttgcatccgttgcccttctcctctccatcaacattcttttcatttccatggttagctccagcagccactacgatccacagccccaaccttctcacgtcactggtcttattacacgacctagttgtccggatctgagtatttgcctcaatatgttaggcgggtctctaggaaccgtggatgattgctgtgcccccatcggtggtcttggtga

SEQ ID NO: 151428 - DNA, 255 bp, Glycine max
tgagaacaccatgtcagttaccaaattcaacgccatgatctcgggcttattccagcttggtagtgcatacgagtgggtggtcaccaagaaatctggtcgttcctcggagggcgatttggtttcattgattgagaaaggaccaaagcatcaaagagggtcctcagcacctgatctagaggaaatgaaagaggaacttcgaaagcaggagcagcaaaaggcctctaagaagaagaaaaaacataacagaatatatat

SEQ ID NO: 151429 - DNA, 253 bp, Glycine max
ggccaatcccataaatgataatggggtttcatacacaaatgtttttgatgcaaattttgataccttggtctctgccctcgaaaaagtaggatatgggaacatgccaattttggtaggagaggtggggtggcccacagatggtgacaaaaatgctaatgtaggcaatgcatttaggttctataatgggcttttaccgaggcttgcaataaacaaagggaccccacttaggcctggatttattgaagtttaccta

SEQ ID NO: 151430 - DNA, 244 bp, Glycine max
gaagattagttaaaattacagcaggtgcgctttcttttctcatttttcccttgacctgtccttgtggtgtaatccatttgtagagctagttcaggttttttctcgttcatttcaggtgattgcttcatttgtatccgtagttgtattcactatttatttatgcacaataaaattagtgatatttattataaaaaaaaaaaaaaaaaaaaaaaaaaaaaaaaaaaaaaaaaaaaaaaaggggggg

SEQ ID NO: 151431 - DNA, 248 bp, Glycine max
cggctcgaggcggaataaagatgaggctagaggattttaagccttcggagacttatttctatgattttattgatctttcggggaatgaaatttcagggagtgcaattgggttggtgaatagtactgagtatttggtggggttttgggcttcggggaacaagttgaagtttgatttggggaagttaaggtttggggagaggtttaagtttttggatttgtctcgtaattgggtgtttgggaaggttcca

SEQ ID NO: 151432 - DNA, 255 bp, Glycine max
cctcactcagattgctggtggaatatgggctgacactgtgggaggaaaacaggtattgggatttggcgtggtttggtggtctgttgcgacggccctcactcctatagctgccaaacttggattgcctttcctactagttgctcgtgcattcatggggattggtgagggtgttgctatgccagccatgaataatattctgtcaaaatgggttcctgtgtcagagagaagtagatcactagcgctggtctacagtgg

SEQ ID NO: 151433 - DNA, 248 bp, Glycine max
cagcaatgttgctgtcatggtcactgcaactgacaagaagtccatcactgactatggttcacctgaggagttcctatctcaggtggattacttgcttggaaaacaagccttctttggccaaactgatgctgagggtggttttgattccaatgctgtggcaactgcaaacatcttggagagttcaacgcctgtcattgacgggaaacagtactacagtttgactgtgttgacaaggacagctgatggag

SEQ ID NO: 151434 - DNA, 250 bp, Glycine max
tgaacattcaggtttctgatgtaaagaatgtcattatctggggcaatcactcatcaacccaatatcctgatgttaaccatgcaactgttggggagaagcccgtccgcgagcttatagctgatgatgcctggttgaatggtgaattcattactactgttcaacaacgtggtgctgcaattatcaaagctagaaagctttcaagtgcactatcagctgctagtgctgcttgtgcccatattagagattgggt

SEQ ID NO: 151435 - DNA, 249 bp, Glycine max
atgactctgaaaaggatggttttttgaagaggcttttaagagatagcaaaggtgatgatgagttcggtcagaagattcgtgatgcttttctcttccgtaagtcatctgagaaatatgacgaagattctgaaaaggacaatatcttaaaaaggctcttgagggatggtagaggggatgatctagaatctgaaaaggatggtttctttaggaggctcttgagagacagtaaagctgaggatgaggatttgg

SEQ ID NO: 151436 - DNA, 248 bp, Glycine max
cgcaggtgtcctaagatgagctcaacgagaacagaaatctcgtgtggaacaaaagggtaaaagctcgtttgattctgatttccagtacgaatacgaaccgtgaaagcgtggcctatcgatcctttagtccttcggaatttgaagctagaggtgtcagaaaagttaccacagggataactggcttgtggcagccaagcgttcatagcgacgttgctttttgatccttcgatgtcggctcttcctatcat

SEQ ID NO: 151437 - DNA, 247 bp, Glycine max
ctctagtccgactttgtgaaatgacttgagaggtgtaggataagtgggagctggaaacagcgaaagtgaaataccactacttttaacgttattttacttattccgtgaatcggaagcggggcactgcccctctttttggacccaaggtcggcttcggccggtcgatccgggcggaagacattgtcaggtggggagtttggctggggcggcacatctgttaaaagataacgcaggtgtcctaagatga

SEQ ID NO: 151438 - DNA, 261 bp, Glycine max
taagctttcaagagacaaactgctttgaaaaatgggatccaaggttgttgcatccgttgcccttctcctctccatcaacattcttttcatttccatggttagctccagcagccactacgatccacagccccaaccttctcacgtcactgctcttattacacgacctagttgtccggatctgagtatttgcctcaatattttaggcgggtctctaggaaccgtggatgattgttgtgccctcatcggtggtcttggtgacat

SEQ ID NO: 151439 - DNA, 253 bp, Glycine max
gtggaagttcatgaaggtgagtgggataaatctggcaatatcaaggtgcttacattcgctgatggggacactgttgagaccttaaaggagagagttgattttgatgatgaaaacaagaagataacctacaccatattggagggtgtcatgttgaagtactataagagctacaaggttatcgttcatgttttaccaaaaggtgatgagcacagccttgtgaagtggactttcttgtatgagaaggtggatcaca

SEQ ID NO: 151440 - DNA, 251 bp, Glycine max
gcgaatggctcccaagggtttaacctttctggctgtgttaatatgcgcttcagcactgtcactgagtccttctgttgcgggggaagggcaaaataatggccttgttatgaacttctacaaggaatcatgccctcaggctgaagacatcatcacagaacaagtcaagcttctctacaagcgccacaagaacactgctccctcctggctcaggaacatcttccatgactgtgctgttcagagttgtgatgctt

SEQ ID NO: 151441 - DNA, 251 bp, Glycine max
ccggaaccatggtgagcacctccttcatgaggaagcaacctatgacgaccaagagcctaaagacattccccaacgctctttttggtctgaaaggtggacgaggtggtcgtgtaacttgcatggcctcgtacaaggtgaagctcataaccccagaaggagaagtggagtttgaatgcccagatgatgttttcattgttgacaaggctgaggaagaaggcattgaacttccctactcgtgcagggctggttct

SEQ ID NO: 151442 - DNA, 250 bp, Glycine max
ctcactcttgttgccttcatggccaagccagtgtccattgaggtatggaacccaagtggcaaatacagagttgtcagcaccaaaccaatgcctggaactcgttggatcaatcttctcattcaaaatgatgttcgccttgacatatgtaccgagaagaaaacgattttgtcagttgaagacatcattgctttgattggtgataagtgcgatggagttattggacagttgactgaagactggggagaagagt

SEQ ID NO: 151443 - DNA, 250 bp, Glycine max
taagctttcaagagacaaactgctttgaaaaatgggatccaaggttgttgcatccgttgcccttctcctctccatcaacattcttttcatttccatggttagctccagcagccactacgatccacagccccaaccttctcacgtcactgctcttattacacgacctagttgtccggatctgagtatttgcctcaatattttaggcgggtctctaggaaccgtggatgattgttgtgccctcatcggtggt

SEQ ID NO: 151444 - DNA, 248 bp, Glycine max
gttcactcttcttctcttgcggctagggtattagcgcagcttcttctagatttaaggacgatgggtaaggatcagggtcacatcagtattgtggacattggccatgtcgtctctgggatatccactaccactggtcacctgatttacaagcttggtggcattgacaagcgtgttattgtgactcttgagaaggacgctgctgtgatgaacaagatgtctttcaagtatgcctgggtgctggacaaact

SEQ ID NO: 151445 - DNA, 248 bp, Glycine max
tttctgattaactctttcttctcataactctgccgccgcaacagccccaaatccaatggcttcagagaagaaactttcgaacccaatgagggagataaaggtgcagaagctcgtcctcaatatctccgttggcgagagtggagatcgtctcaccagagccgctaaggttttggaacagcttagtggccaaacccctgtgttttccaaagcaaggtacacggttcgttcctttgggattagaagaaatg

SEQ ID NO: 151446 - DNA, 245 bp, Glycine max
caaccatgaaagatttcccccaggtgacccaagcaagagggcatttgcctacttcgtccttacaggtggtaggtttgcttatgcctctttggtccgtctccttgtcctcaagtttgtgcttagcatgtctgccagtaaggatgttcttgctctggcttcacttgaggttgatctctccagcattgagcctggcactacagtgaccgttaagtggcgtggaaagccagtgttcatcaggcgccgaa

SEQ ID NO: 151447 - DNA, 248 bp, Glycine max
gaaaatgaaggtccttgttttcttcgttgctacaattttggtagcatggcaatgccatgcgtacgatatgttccctctccgaatgaacactggctatggtgcccgtactccggaggtgaaatgcgcaagttgacaggcttgctgtggaagcacacaacatctttggctttgagaccattcctgaagagtgcgttgaagcaacaaaggaatacatccatggcgaacaatatagatcagactccaaaaca

SEQ ID NO: 151448 - DNA, 247 bp, Glycine max
ggaagatctgcccgtcctgctcctcgtgcagcacctcgtcctgctccagttcaccatgctcctcctccagcccctgctcagagcggtggcggatctatgcttggtggcattggttcaaccatagctcaaggtatggcttttggcactggaagtgcagtggcacacagggctgtggatgctgtcatgggtcctcgtaccattcaacatgaagcagtagtcacggaggctgctgctgctgcccctgcac

SEQ ID NO: 151449 - DNA, 259 bp, Glycine max
gttcaggcttagcaccatttgactgttggctttgtttgcgaggaatcaagacaatggccctgcgaattgaaaaacaacaggataatgcacagaagattgctgagttccttgcctcccatcctcgagtgaagaaagtgaattatgctggcttgcctggtcatcctggtcgtgatttacactattctcaggcaaagggtgcaggatctgtgcttagcttcttgactggttcattggaactttcaaagcatattgttgaaac

SEQ ID NO: 151450 - DNA, 270 bp, Glycine max
gctcaatacggcgctcggtggaagttcatgaaggtgagtgggataaatctggcaatatcaaggtgcttacattcgctgatggggacactgttgagaacttaaaggagagagttgattttgatgatgaaaacaagaagataacctacaccatattggagggtgtcaagttgaagtactataagagctacaaggttatcgttcatgttttaccacaaggtgatgagcacagccttgtgaagtggactttcttgtatgagaaggtagatcaca

SEQ ID NO: 151451 - DNA, 251 bp, Glycine max
ggatccactagcactggtaaacgtgtacttgaactgtctgcacacagcaacctgaagccagtaactctggagctgggtggaaaatctccattcattgtgtgcaaggatgctgatgttgatgcagccgttgaggcttcacattttgctttattttttaatcaggggcaatgttgctgtgctggttctcgcacatttgtccatgaaagcatatatggtgaatttgttgaaaaggctaaagcccgtgctcttaa

SEQ ID NO: 151452 - DNA, 248 bp, Glycine max
cgatcttcgatcttcgtcgctgaaaatgagagagtgcatttcaatccacatcggccaggccgggattcaggttggaaacgcctgctgggagctttactgcctcgaacacggcattcagcctgatgggcagatgccaagtgacaagaccgttggtggaggtgatgatgctttcaacaccttcttcagtgaaactggggcaggacagcacgtgccccgtgcgatttttgtagatcttgagcccactgtga

SEQ ID NO: 151453 - DNA, 250 bp, Glycine max
gcaaatatgtattctgagctgcgggaggaggctcgtgatcatgcacgtttgcgtaatgcatattttgagcaggcacggtcagcctaccttgttggcaacaaggcccttgcaaaggagctaagtgttaaggcgcaactgcaccgcgtgcatatcgaaagcagcacatggaaaagctcaagactctatttatcgccagaggaatcctgttgctccagagaatggaagagggccccaaagaatgatagaccta

SEQ ID NO: 151454 - DNA, 250 bp, Glycine max
aaaacaaaagagtagtggcctttaggtggtgaagaacaagagctcaaatcaaatcggatcgtaaaaagatagaaagatcatattcatggcgatggcaagcctggctcgacggaagggttacgccgtcgttttgtcgtcgaggtcgtcgttttgtctgacaagctggaggggattcgcgtccggatctgacgataacgacgtcgtcgtcatcggcggcggtcccggcggctacgtggccgccatcaaagcc

SEQ ID NO: 151455 - DNA, 247 bp, Glycine max
gagagaaagaaaggtgaattggattgcatctctctctgtgtgttggaagaggggaatcgtagatctgatttctttctttctttttaataattttgtgatcagaattattgagctgaacaaaagacaatgggattgtgggaagcttttctcaattggcttcgcagcctttttttcaagcaggaaatggagttatctctaataggacttcagaatgctgggaagacttcccttgtaaatgtagttgcta

SEQ ID NO: 151456 - DNA, 244 bp, Glycine max
gcgggatctcgccggatattcccctccagtcggcgattgtgatgctggagagacgcgccacttgcagatcgccggcgagatgtagccggtcatgtagccggtgcggtgggcgcgctcgaagatcggctcctccgactcgccgcggaggttgatgtcggcgacgcggcgggtctcctggtcgcagctcacgccgtaccacttatggcagcagtcggcgccggtccaggagttgaagattccgaga

SEQ ID NO: 151457 - DNA, 246 bp, Glycine max
ggattctacccgccgctcgatgggaattgcgcttcaaggcgtctcgtagggctaatccgcctcacgagggtcaccaacggcacgtgcctttggggggccgaggccccctactgctggtcggcaaacggacggcgggcgcacgcgtcgcttctagcccggattctgacttagaggcgttcagtcataatccaacgcacggtagcttcgcgccactggctttctaaccaagcgcgatgaccaattgtg

SEQ ID NO: 151458 - DNA, 247 bp, Glycine max
cggctcgaggcagcaacagaggagggacgaacaaggccattcaaaagggtctatgcctttggagactctttcacagacactggcaacacccaaaatgcagaaggtccaagtggctttggccatgtttcaaactctccctatggaaccactttctttaaccactccaccaataggtactcagatggtaggcttgtgattgattttgtggctgaagcactttcactgccttacttgcccccctaccgtc

SEQ ID NO: 151459 - DNA, 252 bp, Glycine max
aaggattctacccgccgctcgatgggaattgcgcttcaaggcgtctcgtagggctaatccgcctcacgagggtcaccaacggcacgtgcctttggggggccgaggccccctactgctggtcggcaaacggacggcgggcgcacgcgtcgcttctagcccggattctgacttagaggcgttcagtcataatccaacgcacggtagcttcgcgccactggctttatctccaagcgcgatgaccaattgtgcgaa

SEQ ID NO: 151460 - DNA, 247 bp, Glycine max
agagacgcttcgcaaatctcaatcgaatctcagaaaaatgagagaaatcatcagcattcacataggtcaggccgggatccaggtcggaaactcctgctgggaactctactgcctcgaacatggcatccagcccgacggcatgatgccttctgactccaccttcggtgtagcccacgacgccttcaacaccttcttcagcgaaaccggatctggcaagcacgtcccccgtgctgtcttcgtcgacctc

SEQ ID NO: 151461 - DNA, 247 bp, Glycine max
atctttcttctcactaactattaattcatcatgtcgagcacagctggccaagtcatcaaatgcaaagctgcggtttcatgggaggcagggaagccacttgtgattgaagaagtagaggttgcgccaccacaagctggtgaagtgcgtttgaagatcctctacacctctctttgctacactgatgtttacttctgggcagctaagggccatactcccatgtttcctcgtatattggggcatgatgctg

SEQ ID NO: 151462 - DNA, 248 bp, Glycine max
gtcaaaggaggcatcaagttgccaattgggttcaggttttgtcccaccgatgaagagcttctccttcactacctcaagaagaaggcgtttgctcaacaattacccgcttcagtcatttcagagtttgacgtgtttcagactgagccatggaaacttccaggttggtccgaattctttttttctttcctacagctgcttcatttgttttttcttggttgttacttagtttggatttcagccattgaaaa

SEQ ID NO: 151463 - DNA, 245 bp, Glycine max
gctggggaagtggttctcctgagaagatcaaggagttgagaacaaaggagatcaagaatgggaggttggccatgttggctgtgatgggggcatggttccagcacatttacactggcactggtcctattgacaacctctttgctcaccttgcagatcctggccatgctactatttttgcccctttcactcccaagtgagaagtgttggaacaactctatgattgcaagccttggagaaacattggc

SEQ ID NO: 151464 - DNA, 246 bp, Glycine max
aaagaatctctgtgttgtcatcacacttcgctagatccagccccatcatggcttcagagaagcaagcggctcttgccgtcactccctctgatgctgatgctcctaccatatttgacaagatcatcaataaggagattccttctactgtggtttatgaggatgacaaggtgcttgccttcagggacataactcctcaagctcctacacatattcttatcattcctaaattcaaagacgggttaagtg

SEQ ID NO: 151465 - DNA, 243 bp, Glycine max
tgttctagatccgagcggccgctcgcgatctagaacccaatatagcctaagccctatacaaccaaaccctaacacacacccatttgattcagtttccacggctagcctcaaggttgcatttttggctgcagtgctctgcatggttgtggtgagtgcacccatggcacatgcagctatcacgtgcgggcaggtgacgaatagcctgatcaattgcatcggttacctccagaacggaggaacgcc

SEQ ID NO: 151466 - DNA, 246 bp, Glycine max
cacagggagatcgaactaaaaaggtgggagttgttgacagcgaatatgtttttcaccagggaatacaaactctgggggggagtggtcacagaatgacaaagaaacaaggtggagtaggaattgatgtgcgaactgagataagaaggcaatcaacatgggaatttgaaatcttcaaagagcggtggaatgaagccattgctgcagacaaaaactgggttgatccctttaagagtgaccaaagacgca

SEQ ID NO: 151467 - DNA, 247 bp, Glycine max
caggcaagccccactcaaccaccacacctctcctcgttcacgctacccctttctgctcttcttctacctttcaagttttaaaagtataaagatggcagagacattcctatttacctcagagtcggtgaacgagggacaccctgacaagctctgcgaccaaatctccgatgctgtcctcgacgcttgcctcgagcaggacccagacagcaaagttgcctgcgaaacatgcagcaaaaccaacttggtc

SEQ ID NO: 151468 - DNA, 225 bp, Glycine max
aaagatttcatcatgtggaaattccaggctcaaaggaacctcaattgtggaatgatgtctggaagttctttgagaaagcatctgttcttgaatttgatgatagtaaaatgcagaagacttatgagacaatttcattcaaggaagttcatgatgaaattgttgagctcaagggattgtgtgatctactcaaatctcctgtaatttttgctcacacccatttgcttt

SEQ ID NO: 151469 - DNA, 197 bp, Glycine max
ggatgacaggttatttcagtaacgaagaagcaaccacatcaacccttgattcaaaaggatggttaagaacaggggatatttgttacattgacaatgatggattcatatttattgtggatcggttaaaggagctcatcaaatacaagggatatcaggtaattactaaattacgaattctagccagttacttaatccat

SEQ ID NO: 151470 - DNA, 224 bp, Glycine max
attctctgtaagagctgcggaactaacaactctattagaaagtagaattaccaacttttacactaattttcaagtggatgagatcggtcgagtggtctccgttggagatgggattgcacgtgtttatggattgaacgagattcaagctggggaaatggttgaatttgccagcggtgtgaaaggactagcgttgaatcttgagaatgagaatgtcggccgagttt

SEQ ID NO: 151471 - DNA, 223 bp, Glycine max
tgggtgagcgagcagttcacggccatgtttaggaggaaggctttcttgcattggtacactggtgaaggcatggacgagatggagttcacggaggcagagagcaacatgaatgaccttgtgtctgagtaccagcagtaccaggacgccactgctgaggacgaaggggagtacgaggatgaggaggaagaggatggtgaagcagacgaccatatgtgaagagact

SEQ ID NO: 151472 - DNA, 224 bp, Glycine max
cgaggttgataggcatggtgcttacattgtgagacaggctgctaagagcattgtggcaagtggacttgccagaaggtgcattgtgcaagtgtcttatgccattggtgtgcctgagcctttgtctgtgtttgttgacacctatggcactgggaagatccatgataaggagattctcaacattgtgaaggaaaactttgatttcaggcctggtatgatctccatca

SEQ ID NO: 151473 - DNA, 227 bp, Glycine max
cattatatgagtataaaggattgggtgaaaaatcagcgaatcctaaacaccgttgcttcacttggggttctagatactctgagaaatacatagcagacttctatgtatcagacttccagtccggtttaagagcattagtgaaagcaggttatggtgccaaggttgctccttttgtggaaccaactactgtagttgatataacaaaggataacagagagttatctcca

SEQ ID NO: 151474 - DNA, 230 bp, Glycine max
ctaggctgttctgcacatccactctgtggttgaggaatgcgagattgttgaactcttgcagcaaatcgatacaaagacaaagaagcctatgaaaaagaaagttttgtttgtgaagaatggagctgttgtagtgtgccgtgttcaggttaataactctatttgcatcgagaagttctctgattttccccagcttgggaggttcactcttcgcactgaaggaaaaactgttg

SEQ ID NO: 151475 - DNA, 230 bp, Glycine max
ccctctcttcacttttgactattgacttcctcaaccgatccactcttctctctatctgcagatggcaagtgggtttggggaatcaacagggagatcacccccaagcccttcctacttcaacaacaataataacaatgatgctgccaattttgaatgcaacatttgctttgaattagcgcaagacccgataattactttgtgtggtcatcttttctgctggccctgtcttt

SEQ ID NO: 151476 - DNA, 231 bp, Glycine max
ctaatccctctttcttcctcttcctcagtagtgcgattttcgattctcttctctgcaactatgcctaaccctaaggtcttcttcgacatgaccatcggcggtcaacctgccggccgcatcgtgatggagctctacgccgacgtgactccgagcaccgccgagaacttccgcgcgctctgcaccggcgagaagggcgccgggcggagcggcaagcccctccactacaaaggc

SEQ ID NO: 151477 - DNA, 221 bp, Glycine max
ctcgagccgagaaaaaatggcccgatcatttatcaaaggccaatcttcggtagaagagaagactcctttggaacacttatttctatttcagtataccgggtctctttctttcatttcaaaaaatttatagaatttcgattttgaaatgaaagaaaagtgtggggataaatataaatgacaaaaagatattggaacataatcttggaagagatgatggaagc

SEQ ID NO: 151478 - DNA, 224 bp, Glycine max
gtcatataattttttttatttgaaataatgtccgggatcatccacaagattgaggagaccctccatgtgggagggcacaagaaagaggagcacaaaggagaacaccatggtgagcacaaaggtgaacacaaaggagaacaccatggtgagcacaaaggtgaacacacaggagaacaacaccatggggcgcacacggcgggacttgtggataagatcaaggacaa

SEQ ID NO: 151479 - DNA, 222 bp, Glycine max
ataatcctcaattttctgagcagccaaacactctctctctgtctctcgaaaattctcagtttgcagagaaaatctgactcatgtcgtggcaagcgtatgtcgacgatcaccttctgtgtgacatcgaaggtaaccacctcactcacgctgctatcatcggccaagacggcagcgtttgggctcagagtaccgacttccctcagttcaaacctgaggagataa

SEQ ID NO: 151480 - DNA, 228 bp, Glycine max
tttgaagaagaaagcgaaacttggatgcctgaagagttcaagagcaatattgtgagagagagggaaggaaaaaagccccttcttacaggagatgtaattttatatcttaaagatgggattggtatggtgagtgaaatttcatatacagataattcaagctggacaaggagccgtaggttcaggcttggggcaagagttgtggacaactttgatggtgttagaataaga

SEQ ID NO: 151481 - DNA, 229 bp, Glycine max
cttcagagatattcatgggtggaaagagcaccattgttttgcacagcacatgcgagggttccctcttagctgctcctattatcttggacttggtccttcttgctgagctcagcactagaatcgagtttaaagctgaaaatgagggaaaattccactcattccacccagttgctaccatcctcagctacctcaccaaggctcctctggttccaccgggtacaccagtggt

SEQ ID NO: 151482 - DNA, 230 bp, Glycine max
cgaggttgtgtacaccaagaaggggtacactgactcaactggagcatacacaatgtacgtggacgaggatcacgcagatcaaatatgcagtgccaaacttgtaagcagccctcaccctcaatgcaaggcagtcaccccgggccgcgacgaagccgtcgttattctcacccgctacaacggcattgcatccgatgataggttcgccaatgccatgggcttcatgtctcagg

SEQ ID NO: 151483 - DNA, 226 bp, Glycine max
cggtgctccgtcttcgtggtggcatgcaaatctttgtcaagaccctcactggaaagaccatcacccttgacgtggagagctctgacactatcgacaatgtcaaagctaagattcaagacacagcccgtatcccaccagaccaacagcggctcactcttgctagaaaacagcttgcagatggccgaaccttggcagattacaacatccagaaagcctcgaccctcca

SEQ ID NO: 151484 - DNA, 225 bp, Glycine max
caaggattctacccgccgctcgatgggaattgcgcttcaaggcgtctcgtagggctaatccgcctcacgagggtcaccaacggcacgtgcctttggggggccgaggccccctactgctggtcggcaaacggacggcgggcgcacgcgtcgcttctaacccggattctgacttagacgcattcaatcataatccaacgcacggtagcttcgcgccactggcttttc

SEQ ID NO: 151485 - DNA, 228 bp, Glycine max
aagaaattagagtgctcaaagcaagcctacgctctgtatacattagcatgggataacaccacaggattctgatcctattgtgttggccttcgggatcggagtaatgattaacagggacagtcgggggcattcgtatttcatagtcagaggtgaaattcttggatttatgaaagacgaacaactgcgaaagcatttcgcgaaggatgttttcattaatcaagaacgaaa

SEQ ID NO: 151486 - DNA, 222 bp, Glycine max
cacagaattagggttttccaattcacagagcaacacaacgaaccaacaatggcgcagctcagccgcagtcgcagccgcagcacgggcaagcagcgctggagcaggtgcagtgcttcggtcgcaagaagaccgccgtggccgtgacctactgcaagcgcgggcgcggtctcatcaagatcaacggctgccccattgagctcgtggacccggagatcctccgct

SEQ ID NO: 151487 - DNA, 222 bp, Glycine max
gttagctttggctgagaagttggcttctgaatctgggttcttggaacgcaagcttcctaataacaaattggaagtaggagacttcaggatcccaagattcaaaatttcttttgggtttgaagcctctaatgtgctaaaggagctgggagtggttttgcctttctccgttggaggtttgacagatatggtggactctgctgtaggtcaatacctgaatggttc

SEQ ID NO: 151488 - DNA, 219 bp, Glycine max
ctaaagagcgtcgtagtcgcaaccctaatcagaagaagcgcagttgcaagcgagtgacagccaccagccatgggtcgtatacaccaccgcggtaagggtatatcctcttctactttaccctacaaacggacaccgcctagctggctcaagatctcttcgcaagatgtcggagaccatatctgacaatttgcgaagacaggttctaaccccgtcgcagat

SEQ ID NO: 151489 - DNA, 223 bp, Glycine max
gtccggtatgatctccatcaaccttgatctcaagaggggtgggaataacaggttcttgaagactgctgcatatggacacttcggcagagaggaccctgacttcacatgggaagtggtcaagcccctcaagtgggagatggcctaaggccattcattccactgcaatgtgctgggagttttttagcgttgcccttataatgtctattatccataactttccacg

SEQ ID NO: 151490 - DNA, 226 bp, Glycine max
accagtttgagaacctcttcgcgaagccaattcgccggtggcacatgcagtcggattctgggactaccgttctttcatcactgctgcagcactgtatcagcctcttggctttggcaccactggaggaaagaccagtggccagaaggagcttgctgctttctttggccatgttggcagcaagacctcttatggttatggggtggctacacggggacccttagcctgg

SEQ ID NO: 151491 - DNA, 229 bp, Glycine max
taagctttcaagagacaaactgctttgaaaaatgggatccaaggttgttgcatccgttgcccttctcctctccatcaacattcttttcctttccatggttagctccagcagccactacgatccacagccccaaccttctcacgtcactgctcttattacacgacctagttgtccggatctgagtatttgcctcaatattttaggcgggtctctaggaaccgtggatgat

SEQ ID NO: 151492 - DNA, 227 bp, Glycine max
ggcacgaatatcttgttgtttggagcgatccgagaaaaactctgtaaacatgttggtttaccaggacctccttacaggtgatgagcttctctctgactccttccgttacaaggaaattgagaatggaatgctgtgggaagttgaggggaagtgggttgttaaaggcgcagttaatgtagacattggtgcaaacccttctgctgagggtggtggagaagatgagggag

SEQ ID NO: 151493 - DNA, 239 bp, Glycine max
gctcaaaattcggctcgacttccgaaggtttaggtgttctgaaatctgaccatggtttgtagcgtgaccccactacgagaccctttgtggagacttttgcgaaggatcaaaatagattctttcaggtttttgctagggccatgcagaagttgagtctcttgaatgtgcagactgggaggaagggagagatcaggcgcaggtgtgatcagattaattgattttatccattgatttttagt

SEQ ID NO: 151494 - DNA, 228 bp, Glycine max
tgcatatggagtgctgattgaggtttcatgcactagatcctcagaagagctattgggagctaggaaggcataccattccctctttgaccactccattgaagaagatgttgcctctcacatccatggcattgaaagaaagctattggttgccctactaagtgcctatagatacgaaggaacaaaggttaaagatgacactgcaaaatcagaagccaaaatccgttccaa

SEQ ID NO: 151495 - DNA, 225 bp, Glycine max
tgctttgcgaagaaggacttcaatttggcgaagaccctgagattgacgtgccggatctgcaggtgattaagctgatgcagagtttcaagtctcgcgagtatgtgagggagacttttgcttggatgcactattactggttcctcaccaacgatggaatcgagtttctcagaacttaccttaaccttccttccgaaattgtccctgctacttcaaagaaacaggcca

SEQ ID NO: 151496 - DNA, 225 bp, Glycine max
ctctttctagaaacatattatgcccaaaatgtaaagggaaaggttcaaaaagtggaactgctggtaggtgttttggatgcaaaggcactggtatgaaaattacaagaaggcagattggactaggcatgattcaacaaatgcaacatgtctgtcctgactgcagaggatctggtgaggtcattaacgagagagataaatgtcctttgtgcaaaggaaacaaggttt

SEQ ID NO: 151497 - DNA, 222 bp, Glycine max
gagtcctcctaaggttggagatgagtcctatgagtcattcaatgctgagaaggagaatattttggagtcccttgctaggcgtgccaagacactagaagatgcattcaacaaattagagggtgtaacatgcaacaaagcagaaggggcaatgtatctgttcccccaaattcgcctgtcccaaaaggctatcaaagctgcaggagatgcaaatacagcacctga

SEQ ID NO: 151498 - DNA, 221 bp, Glycine max
tggggcggcacatctgttaaaagataacgcaggtgtcctaagatgagctcaacgagaacagaaatctcgtgtggaacaaaagggtaaaagctcgtttgattctgatttccagtacgaatacgaaccgtgaaagcgtggcctatcgatcctttagtccttcggaatttgaagctagaggtgtcagaaaagttaccacagggataactggcttgtggcagcca

SEQ ID NO: 151499 - DNA, 218 bp, Glycine max
accagctttaaaagctctaaaggataggctcatgatcaagaatgtggctgtggagatagctgagaaactctgtgaatcagtggcagcaaatcttgaaggaaaaaagctggcctcatttacaaggatagcttccacagtgcatgcggctatagcagaagctcttattcgaattgtaacgcctagacgctcgattgatatactgagagatgtgcatgctg

SEQ ID NO: 151500 - DNA, 225 bp, Glycine max
gtactaccagcctccttctgttgttcctggtggtgaccttgccaaggtgcagcgggctgtatgcatgatcagcaacaacactgcagttgctgaggtgttctctcgcattgaccacaaatttgatctgatgtatgccaagagggcctttgttcactggtatgttggtgagggtatggaagaaggagagttctctgaagctcgtgaggatcttgctgctcttgagaa

SEQ ID NO: 151501 - DNA, 233 bp, Glycine max
gcagcaaaaccaagccacccactaacttgtttggtccaagacatggctctgatcctgcatgctaccaaaacaaacaagaatgccttcaagactctgattgcggcagagtacagtggcgtccaagtggaattggcccctaaatttcgagatgggtgtctctaacaaaactcctgaatttctcaagatgaatcctattggaaaggttcctgttttggaaacgcccgatggtccag

SEQ ID NO: 151502 - DNA, 255 bp, Glycine max
ctcgtcattcgtcggctcgatttagctttcaagagacaaactgctttgaaaaatgggatccaaggttgttgcatccgttgcccttctcctctccatcaacattcttttcatttccatggttagctccagcagccactacgatccacagccccaaccttctcacttcactgctcttattacacgacctagttgtccggatctgagtatttgcctcaatattttaggcgggtctctaggaaccgtggatgattgttg

SEQ ID NO: 151503 - DNA, 228 bp, Glycine max
gcgctaacaacggtcttgacatcgctgttaggcttttggagccactcaaagcggagtttcctattttgagctacgccgatttctaccagttggctggcgttgttgccgttgaggtcaccggtggacctgaagttcccttccatcctggaagagaggacaaacctgagccaccaccagagggtcgcttgcccgatgccactaagggttctgaccatctgagagatgtgt

SEQ ID NO: 151504 - DNA, 226 bp, Glycine max
cgcacgaatatcttgttgtttggagcgatccgagaaaaactctgtaaacatgttggtttaccaggacctccttacaggtgatgagcttctctctgactccttccgttacaaggaaattgataatggaatgctgtgggaagttgaggggaagtgggttgttaacggagcagttgatgtagacattggtgcaaacccttctgctgagggtggaggagaagatgaggga

SEQ ID NO: 151505 - DNA, 225 bp, Glycine max
cttgagaagcaaggtgtgatcagttcttccaaacaagaaacagggtatcttcaagatctggtgtacaagctaagcacggttggtcaagcacttgaaaagaatgatctatctgctgctggctctgtccttggaggaaacgcggacgcagattgggtccaaagggctaatatagccttcaataaactgagctccagtcctgaagagaagactgaggtagactcattc

SEQ ID NO: 151506 - DNA, 226 bp, Glycine max
ttggatgcggggcagtgcccgcttccgattcacggaataagtaaaataacgttaaaagtagtggtatttcactttcgctgtttccagcagccacttatcctacacctctcaagtcatttcacaaagtcggactagagtcaagctcaacagggtcttctttccccgctgattccgccaagcccgttcccttggctgtggtttcgctggatagtaaatccgttccaat

SEQ ID NO: 151507 - DNA, 226 bp, Glycine max
tgccagtagtcatatgcttgtctcaaagattaagccatgcatgtgtaagtatgaactaattcagactgtgaaactgcgaatggctcattaaatcagttatagtttgtttgatggtatctactactcggataaccgtagtaattctagagctaatacgtgcaacaaaccccgacttctggaagggatgcatttattagataaaaggtcaacacaggctctgcctgtt

SEQ ID NO: 151508 - DNA, 224 bp, Glycine max
ggaatcagccaaggaaattgttggcgttaagaagttgattgaaaagaaggcttggccatatgttcagaatgatctgcgtctcagggccgagtatctgcgctttgatctcaacactgtcattgctgcaaagcctaaggatgagaagaaatcactcaaggaactcactggcaagctcttccaggatatcagctatctggatcatgcagcaaaaattaagagcagcc

SEQ ID NO: 151509 - DNA, 221 bp, Glycine max
acagtagctaatgctagtcaccgaacttagtcaatgagctagaatgggttataaagatatctatagatatatatagatatatttatctatagatatctttagaaaaaaaaaaagaaaataaacaaataagacgtatcattttatgtatagtagtggggaattatgggccaaaaaataaatccgcttggtttcagacttggtacaactcaaagtcatgattc

SEQ ID NO: 151510 - DNA, 264 bp, Glycine max
tatagcccaagccctatacaaccaaaccctaacacacacccatttgattcagtttccatggctagcctcaaggttgcatttttggctgcagtgctctgcatggttgtggtgagtgcacccatggcacatgcagctatcacgtgcgggcaggtgacgaatagcctgatcaattgcatcggttacctccagaacggaggaacgccgccgtcgggatgctgcaacgggagtgaagagactcaatgccgccgccaagaccaccgccga

SEQ ID NO: 151511 - DNA, 88 bp, Glycine max
cacaaggcagaaagcaagctcatcctagagttttaaaaatggcagcagcctcctccatggctctctcttccccatccttggctggcaa

SEQ ID NO: 151512 - DNA, 250 bp, Glycine max
caccaattaagctttcaagagacaaactgctttgaaaaatgggatccaaggttgttgcatccgttgcccttctcctctccatcaacattcttttcatttccatggttagctccagcagccactacgatccacagccccaaccttctcacgtcactgctcttattacacgacctagttgtccggatctgagtatttgcctcaatattttaggcgggtctctaggaaccgtggatgattgttgtgccctcat

SEQ ID NO: 151513 - DNA, 273 bp, Glycine max
cacagacaaagcaatggcaaagaccgaggttgcttggcataatttatatacattagaggtgactgttgagagcaagaacaaagacctcaagcacctggggtttgtgaggattgctgctattcaaacatttgtgattgtgtcaaatctgtatgagtacgcaaagcagaattctgggcctttgagatccgtcgtaggaacggttgagaacactgtaaccaccattctcggtcctgtctgcaacaaattcaaggacgtccctgatgatgtccttgt

SEQ ID NO: 151514 - DNA, 272 bp, Glycine max
aagctttcaagagacaaactgctttgaaaaatgggatccaaggttgttgcatccgttgcccttctcctctccatcaacattcttttcttttccatggttagctccagcagccactacgatccacagccccaaccttctcacgtcactgctcttattacacgacctagttgtccggatctgagtatttgcctcaatattttaggcgggtctctaggaaccgtggatgattgttgtgccctcatcggtggtcttggtgacattgaagccattgt

SEQ ID NO: 151515 - DNA, 266 bp, Glycine max
attctgtgactctgtgcttagttaacgttaacagtgacttaagatggcggattctgcagatgtcacccacgatgttgtgtccctcctctcttctcctcaaagggactttcttcttcgaaacaacggcgatctgcttaaaattgacagcttgaagggtaagaaacttggtttgtatttttcggcatcctggtgtggtccatgtcaaacatttacgccaactttggtggatgtgtacaatgaggttgcaaaacaaggtgacttccaga

SEQ ID NO: 151516 - DNA, 270 bp, Glycine max
cggtgacgtgacgacgtcgtctaagggccagacgtggtgcgtggcgaatggcggttcttcggagaagaaactgcagaacgctcttaactacgcttgcggagagggtggggctgattgcactcccattcagccaggtgccacgtgttacgatcctaacactttggaggcacatgacttcctacgctttcaacagttactatcagaagatggcacgtgcatccggcacgtgctattttggtggcactgcttatgtcgtcactcagcctccca

SEQ ID NO: 151517 - DNA, 267 bp, Glycine max
ctcgagccgattttatgacttcgtaggggcaggactaactagtgtgaagatcaagggaatgaacaatgggacaatagacttgtcttcttatgcctggacttacaagattggagtccaaggagaatatctaaggttataccagggaaatgggttgaataatgtgaactggacatctacttcagaaccaccaaaaatgcagccattgacatggtacaaggctattgtagatgctccacctggggatgagccagttggattggatatgtt

SEQ ID NO: 151518 - DNA, 269 bp, Glycine max
caaggcagaaagcaagctcatcctagagttttaaaaatggcagcagcctcctccatggctctctcttccccatccttggctggcaaggccgtgaagctgggcccatcagcccccgaagtcgggagggtcagcatgaggaagaccgtcaccaagcaggcctcctccggaagcccatggtacggcccagaccgcgtcaagtacttgggcccattctctggcgagcccccgtcctacctcactggcgagttcccaggtgactacggctggga

SEQ ID NO: 151519 - DNA, 272 bp, Glycine max
cgcaaattacccaatcctgacacggggaggtagtgacaataaataacaataccgggctcattgagtctggtaattggaatgagtacaatctaaatcccttaacgaggatccattggagggcaagtctggtgccagcagccgcggtaattccagctccaatagcgtatatttaagttgttgcagttaaaaagctcgtagttggaccttgggttgggtcgatcggtccgcctccggtgtgcaccggtcggctcgtcccttctgccggcgatgcg

SEQ ID NO: 151520 - DNA, 111 bp, Glycine max
attacacccaaaaaaaccaaactctgctttacgtaaagttgccagagtacgcttaacctctggatttgaaattactgcttatatacccggtattggccataatttacaaga

SEQ ID NO: 151521 - DNA, 272 bp, Glycine max
  unsure (1)..(272): unsure at all n locations
gcaaaggattctacccgccgctcgatgggaattgcgcttcaaggcgtctcgtagggctaatccgcctcacgagggtcaccaacggcacgtgcctttggggggccgaggccccctactgctggtcggcaaacggacggcgggcgcacgcgtcgcttctagcccggattctgacttagaggcgttcagtcataatccaacgcacggtagcttcgcgccactggctttgcaancaagcgcgatgaccaattgtgcgaatcaacggttcctctcgt

SEQ ID NO: 151522 - DNA, 271 bp, Glycine max
gggttttccaattcgcagagcaactcaacacaacgaaccaaatcaacaatgtcgcagccgcagcctcagtcgcagccgcaacacgggcaagcggcgctggagcaggtgcagtgcttcggtcgcaagaagacggcggtggccgtgacctactgcaagcgcgggcgcggcctcatcaagatcaacggctgccccatcgagctcgtcgagccggagatcctccgctttaaggccttcgagcccatcctcctgttgggaaagagccgcttcgccg

SEQ ID NO: 151523 - DNA, 269 bp, Glycine max
caagcttggacttcattcactccgtcaacgccactggtatatccaaagcacttgtgcaacttctggagagggtctctatgagggtttggactggctttctaacaacattgccagcaaggcatgagacatttgaaaatttttggtcttgtctggtgatttcctgctgagtatggcggttcttggagaaagatgcttatcctttcttgtcaatgttgtaatagcagaatgcttgctagaagtattctcttcttttgtgtaacttgggtttg

SEQ ID NO: 151524 - DNA, 267 bp, Glycine max
aatggattagagtctatttcccgagggggtgctgtaatatattatgcttccgtcttcctttatttttgggtcttctcgacccctgttgtttccttggtgtttgggagctacttatacatttgcatcaactggcttcacttacactttgatgaagccttttcgtctcttcgaatagctaattacaaatcattcacacggtttcacatcaattcggatggtgatcttgaagtttatactttggctgttgataaggttccaaagtaatgg

SEQ ID NO: 151525 - DNA, 266 bp, Glycine max
caaagaaggcgtcttcataaacgcctttcttctccgtttccgtttcctcgttcgaattcgctttttgatctgcgaaaatgagagagtgcatctcgatccacattggtcaggctggtatccaggtcggaaatgcttgctgggagctctactgcctcgagcacggcatcgggcccgatgggcaaatgccaagtgacaagacagttggcggtggtgatgatgctttcaatactttcttcagcgagactggtgctggaaagcacgtgcca

SEQ ID NO: 151526 - DNA, 266 bp, Glycine max
gttttcacaagctttaacagaaccaaaggtggcttgattcaattaaaccatggtaggcctcagcctctccaatatgtggtcaatgcggcctttttggctgccctatatagtgattatcttgatgctgctgatacacctggatggtattgtggacctaatttcttttcaaccgacgtgctccgtagctttgccaagtcccagattgattacatccttggaaataacccaaggaaaatgagttatgtcgtaggttttggtaatcatta

SEQ ID NO: 151527 - DNA, 264 bp, Glycine max
gccagagccctccaaaacactgccttgaagacatggggaggccgcccagagaatgtgaaggcggcacaagatgcacttcttttccgtgccaagtccaactcgctcgcccagcttgggaagtacaccggtgagggtgaatctgaggaagccaagaaggagttgttcgtcaaaggctactcctactaagatgtttgtagtgaatatgatacatgttaggcagcagcaacaccagcagttgtagtaggtgttgacggaggatgaagt

SEQ ID NO: 151528 - DNA, 267 bp, Glycine max
gccaccagcatttccgctgatagagtccctgacatgggcaaaagacagctcatgaatcttcttcttcttggtgccatttcactccccactgctggaatgcttattccctacacctacttctttgtccctccaggttcaggttcttcagctggcggtactgttgccaaggatgccgttggaaatgatgtaattgccgagaattggctcaaggcacatggacctggtgaccgaacccttacacaaggattgaagggagatcctacctat

SEQ ID NO: 151529 - DNA, 189 bp, Glycine max
gtggtgttagatctgtacccgcctagccattgatttggaaaagtccaagcttcaaagatgagtaagcttcagagtgatgctcttagagaagctatctcaggaatcatgactgattccaaggaaaagaacaggaaatttgtggagaccattgaactccaaattgggctgaaaaactatgatccccagaag

SEQ ID NO: 151530 - DNA, 267 bp, Glycine max
atcttcttggatttcttctgggacttttcttaatggtcactcatcgtcaaggggtatggttttggaggttggaccaatgcacatgccaccttctatggaggtggtgatgcttctgggacaatgggtggggcttgtggttatggaaatctgtatagccaaggttatggaactgatacaacagcactgagcactgctctgttcaacaatggcttgagctgtggtgcatgctatcaaattagatgtgtgaatgatccacagtggtgcctt

SEQ ID NO: 151531 - DNA, 264 bp, Glycine max
ccaagctagtgatctgggtctgcttgttgaaaacacctcagtggagcagcttggtttggctaggaaaattaccatctccaaggattctaccactgtcattgctgatgctgcgacaaaggatgagttgcaagccagggttgctcagttaaagaaggagctgtctcagacagactcagtatatgatactgagaaactggctgagaggatagctaaactgtctggtggagttgcagtcatcaaggttggtgctgctacagagactga

SEQ ID NO: 151532 - DNA, 262 bp, Glycine max
agatcaacgagctggctctcgggttggaaaaaagtgagcaacggtttctgtgggtggtgaagagcccaaacgaagaaatagccaacgcgacgtacttcagcgccgagagccaagcggatcccttgcagttcttaccggaagggttcgtggagagaacaaaaggaagagggtttttggttcagtcttgggctccgcagcctcaggtattgggccatccatccacgggtgggttcttgacccactgcggctggaactctattct

SEQ ID NO: 151533 - DNA, 264 bp, Glycine max
ggagatgactttaagagtggtcagaccaaaatgaaatctgtgttggtggatttccttgtgggggccggcatcaagccaacatctatagtgagttacaaccatctgggcaacaatgatggcatgaatctctcagcccctcaaaccttccgctctaaggaaatctccaagagcaatgttgttgacgatatggtcaacagcaacgccatcctctatgagcccggtgaacatccagaccatgtggttgtcattaagtacgtgccttat

SEQ ID NO: 151534 - DNA, 265 bp, Glycine max
cgcctccattttcaagctctcaacgccatctccagctgcttccttatcagaagcgcttcgccccagagattctcgcttcctctccttcaatccttcttccaacgctattaattacaaaattaacctctccgcttccctccgatccattcactccctccctcttaaaacctccttgcggatcaaatgctcccaaacagatgggaatggaagtcctgcaaagaggacagtgcttcatgatctttatgagaaagaagggcagagtcca

SEQ ID NO: 151535 - DNA, 265 bp, Glycine max
cttcactggtaaccaggggaaaacctatatgtttaggatctcaagtgtaggcttgtcaacctcaattaacttcagaattcagggtcataccctaaaattagttgaggttgaaggatcacacactgttcagaacctatacgattcacttgatgtgcatgttgggcaatcagttgcagtgttagtaaccttgaatcagcctccaaaggactgctacattgttgccgcaacaagatttaccgagacacctctcactacaactgcagta

SEQ ID NO: 151536 - DNA, 261 bp, Glycine max
atcagaacaagaattggtggattgtgatactggatataaccaaggatgcaatggaggacttatggactatgcatttgagttcataatcaacaatggcggcattgattctgatgaggattacccataccgtggtgttgatggtagatgcgacacatataggaaaaatgctaaagtcgtttctattgatgactacgaagatgttcctgcctatgatgagttagccttgaaaaaggccgttgcaaatcagcccgtgagcgttgc

SEQ ID NO: 151537 - DNA, 260 bp, Glycine max
aattcacaaccgaaacagtttccatctctctcacaaaatgacaacaatatcaaattgctcccttctcttcctcttcctcttcctctccaccctccacatagcttccaccctctcaacccccaccaacttcatcaagtcctcctgcagcaccacccagtacccagccctctgcatccagtccctctccgtctacgcctccaccatccagcaagacccccacgagctcgtccagacagccctctccctctccctcaaccaca

SEQ ID NO: 151538 - DNA, 261 bp, Glycine max
gttttctgtaaaatcgcaaagaaacacacagttagcaccgtcaacctctgcaaccaccgattccaaccatgcttcccctttcccttctcaagactgcccaaggccaccccatgctggtggaactgaaaaatggggagacttataacgggcacttggttaattgtgatacatggatgaacatccatctccgagaagtcatttgtacctctaaagatggagatagattttggcgtatgcctgagtgctacattcgtggcaata

SEQ ID NO: 151539 - DNA, 261 bp, Glycine max
ctttctcttatctctaagtcaacatggctcaccttgaagattcaagtgcatggaattcgagtatacctcaccctaagctcaatgaaagaattctgtcttctctgtcacggagaactgttgctgctcacccctggcacgatttagagattgggccaggagctccagctgttttcaactgtgtggttgaaattggcaaaggcagtaaggttaagtatgagctggacaagacaagtggacttataaaggttgatcgtattcttt

SEQ ID NO: 151540 - DNA, 262 bp, Glycine max
ccgcaacctcgttcacattgtttatagtctttcaaaggatatggggttccctggcttcagagttggcatcatatactcttacaatgatgctgtggtccattgtgcacgcaaaatgtcaagctttggattggtgtcaacacagactcagtatcttttagcatcaatgctaaatgatgatgagtttgtggaaagttttctggtagagagtgcaaaaaggctggcacaaaggcatagagttttcactggggggttggccaaagtt

SEQ ID NO: 151541 - DNA, 166 bp, Glycine max
ctagactcttccttttctcttctctgtctaaggggtgccctgagatcacattgaacaatggtgaaggctgtggccgttcttggcagcagtgagggtgtcactggaactattcacttcgttcaggagggaagtggtccaaccaccgtaactggatctcttgctggtc

SEQ ID NO: 151542 - DNA, 102 bp, Glycine max
ggagcaatggaaatcttaagacttccttttgcgctgatcaatcaaggtcttctcaggcaaatgatgttcgcaagcaaatcgttggcagcgctgttccagtac

SEQ ID NO: 151543 - DNA, 260 bp, Glycine max
tggttgtggaaatcctgaaactgagatcataattactaagaatcaaatgatccagctgaaatgcgcacttgtggttttgtgtctgatgttgatatgagagacaagctgactaccttcatcattaagaaccctccagaagttaagaaaggatccaaagacaagaaggccatgaggagagctgagaaggagagactgaaggaaggtgaattagctgatgaggaacagaagaaagtgaagacagaggttaagaagaaaggctc

SEQ ID NO: 151544 - DNA, 259 bp, Glycine max
aaagaagtgggatgagttgaagaattatgatcagctaagcaaagaattgcgtatggggcatgtatttgatggatggaaagaggggttgataaacttcccacccacttacaagtatgaaattaactctgatagatatgttggtgagaggccaaaagaaggggaaaaaagaagatctccagcctggtgtgatcgtatattgtggctaggcaaaggaataaaacaactacaatatggacgtgcagaaattaagctctcggat

SEQ ID NO: 151545 - DNA, 257 bp, Glycine max
tgttgtgactcgttcttcttcgtcgttatcttcttcttttgttgtttgtgtgtttgttttttctctcacctgaaaatgtcttgctgcggtggtaactgtggttgcggaagcgcctgcaagtgcggcaacggctgcggaggctgcaagatgtacccagacttgagctacaccgagtcaaccaccaccgagaccttggtcatgggagtggcaccagttaaggctcaattcgagagtgctgaaatgggtgttcccgctga

SEQ ID NO: 151546 - DNA, 190 bp, Glycine max
cgccgccggagaatgcagatcctcgagtcgcgacggcgacgttgacgtcattattgtcggagctggtgtcgccggctccgctcacgctcacactctcggcaaggatgggcgtcgggtacttgtcattgaaagagatttgagtgaacaagaccgaattgttggggagttactacaacctggaggctatctc

SEQ ID NO: 151547 - DNA, 259 bp, Glycine max
cggctcgagccgacttcttaaagctagaattgatggtttgccagtcaaagaggtggttaaggataccgaagtggttggaggaagagttcactgaaaaggttcaaaagagaggtggtgcacttattcaaaaatggggaagatcatcagctgcatcaacttctgtgtcaattgttgatgccataagatcttcagtaactcctactcccgagggtgattggttttcttctggtgtatatagcgatggaaatccttatggaat

SEQ ID NO: 151548 - DNA, 260 bp, Glycine max
caacggtcttgacatcgctgttaggcttttggagccactcaaggcggagttccctattttgagctacgccgatttctaccagttggctggcgttgttgccgttgaggtcacgggtggacctgaagttccattccaccctggaagagaggacaagcctgagccaccaccagagggtcgcttgcccgatgccactaagggttctgagtggttgagagatgtgtttggcaaagctatggggcttactgaccaagatatcgttg

SEQ ID NO: 151549 - DNA, 272 bp, Glycine max
cgcataacctaggcttttcccaattccgaattccgattactcggatcgatctccgattgttgctagggttagggttgttgttgttaacgatgtcgctgaggccgaatgctagaaccgaggttcgccgcaaccgctacaaggtggcggtggacgccgacgagggtcgccggaggagggaggacaacatggtggagatccgcaagagcaagcgcgaagagagcctccagaagaagcgccgcgaaagcctgccagctcagcagcagttccccact

SEQ ID NO: 151550 - DNA, 259 bp, Glycine max
aaagaagcaatatggttggttttgggtctgcccaatggtggtaagaattgccattatagacatgctcttccacctggttatgttttgaaatctcaaatgaaggctttgttagaggaagaaagtgaaaaaatatcaattgaagaggagattgaaaatcagcgtgccaaagtggcaactacaactcctatgactcctgagttattctttgagtggaagaagaagaagatagaagagagagatgccaatatagctgcacaac

SEQ ID NO: 151551 - DNA, 259 bp, Glycine max
gcagcaccttaggatggcatagccttaaagttaagggcgaggttcaaacgaagaaaggcttatggtggatacctaggcacccagagacgaggaagggcgtagtaagcgacgaaatgcttcggggagttgaaaataagcgtagatccggggattcccgatataggtcaacctttcgaactgctgctgaatccacgggcaggcaagagacaacctggtgaactgaaacatcttagtagccagaggaaaagaaagcaaaagc

SEQ ID NO: 151552 - DNA, 255 bp, Glycine max
gggcgccagagagggtgagagccccgtcgtgcccggaccctgtcgcaccacgaggcgctgtcggcgagtcgggttgtttgggaatgcagccccaatcgggcggtagattccgtccaaggctcgatactggcgagagaccgatagcgaacaagtaccgcgagggaaagatgaaaaggactttgaaaagagagtcaaagagtgcttgaaattgtcgggagggaagcggatgggggccagcgatgtgtcccggtcgga

SEQ ID NO: 151553 - DNA, 256 bp, Glycine max
ttataaccaaacactcttcttcatattcttcttcttcttcttgttcttgttctatctgtgacgagcatcatggcctcgagagcagtgctattgttggctatgtgtgtgcttccggccatggttgtggccattcgcccagcaaagaaccctttttgcgtgaagggtcgcgtctactgtgacccttgccgtgctggttttgagacctcagcaaccacctacattgccggtgctgagattatgttgcaatgcaagagca

SEQ ID NO: 151554 - DNA, 256 bp, Glycine max
aggttggatctcagtaagaggcttggcttggagaataagcaagtcaagttctggtttcagaatcgacgaacccaaatgaagacccaactggaacgccatgagaacataatgcttaggcaggagaatgataagctcagagctgagaacagtttgatcaaggaagccatgtcaaatccagtgtgtaacaactgcggtggccctgcaattcctggccaaatttcatttgaggagcaccagattagaattgagaatgcca

SEQ ID NO: 151555 - DNA, 259 bp, Glycine max
cagcagatatgttccagttaagttggcaccatcaggatttgtgcttctcaaagacttgcgtcctactgagccagaagtgcttgctctcactgacacaccttcatctaccacttcggctgctggtgggtcagcaacaggattgcagagttcttcatcagccatggctgtggatgaggaacctcagcctcctcaaccatttgaatacacctcatgagtttggtcctgattcattaagttcaaatattcatcatggtgctta

SEQ ID NO: 151556 - DNA, 228 bp, Glycine max
ggccaaatcaatcaaattctttgagttgaacacaggggccaagattccttctcttgggttagggacttggcaagctgaacctggtgttgtagctgaagctctcaccacagccattcaggttggatacaggcatattgacgtgctagtgcgtataagaatcaagcagagattggttctgctcttaagaagctttttgatgatggtgtggtgaagcgtgaggacttatgg

SEQ ID NO: 151557 - DNA, 177 bp, Glycine max
ctcgagccgtttttggtgacaacacctggagatatcagaagtgagaatgctgacatgagtaacgataaatcctgtgaaaaacacgatcgcctgccagtggaaggctttctgcgttcagtcaatctacgcagagtgaatcgtccctaaggaagccccgaccccgaaagggctgccgtc

SEQ ID NO: 151558 - DNA, 237 bp, Glycine max
gtctcagttcgtttgagagagaaaaaatggcagagggtctcgttctccgcggaaccatgcgcgcccacaccgacgtcgtgacggcgattgccactcccatcgacaactccgacatgatcgtgacggcgtcgcgcgacaaatcatcattctctggcacctcaccaaggaggacaagacctacggtgtcccccgccgccgcctcaccggacattctcacttcgtccaggacgtcgtaat

SEQ ID NO: 151559 - DNA, 267 bp, Glycine max
gcttcttactcctctcataacttttctgctccccgttgagaaagatttgaatccaaaggaaaaataacgctaatggctccaagagacagccgagccaccgcgctcattgggcccggcccaagcctatcaccggcccacaaaagatccgctacagaggcgtcaggaaacgcccctggggccgctacgccgccgagatccgcgatcccggcaagaaaacccgcgtctggctcggcaatttcgacaccgccgaggaaagccgccgcgcct

SEQ ID NO: 151560 - DNA, 219 bp, Glycine max
ggcaagaccatcacccttgaggtggaaagctctgacaccatcgacaacgtcaaggccaagatccaggacaaggaaggaatccccccggaccagcaacgtctcattttcgccggaaagcaacttgaggacggccgtacccttgtgactacaacattcagaaggagagtactcttcacctcgtcctccgtctccgtggtggcatgcagatcttcgttaaga

SEQ ID NO: 151561 - DNA, 239 bp, Glycine max
ttgagaggtgtaggataagtgggagctggaaacagcgaaagtgaaataccactacttttaacgttattttacttattccgtgaatcggaagcggggcactgcccctctttttttggacccaaggtcggcttcggccggtgatccgggcggaagacattgtcaggtggggagtttggctggggcggcacatctgttaaaagataacgcaggtgtcctaagatgagctcaacgttcaactt

SEQ ID NO: 151562 - DNA, 209 bp, Glycine max
ctcagcggcctggtcaaagaggttagaagactagatgacaagcttctacttgtagacatagacttgcttgaaagcaagctacacttctccttaagaaaccttccaaaggcaaaagctgctctcacagctgcaagaacagcgcaaatgctatttatgttcctccagctcaacaaggtgccatagatctacagagtgggattcttcacgca

SEQ ID NO: 151563 - DNA, 199 bp, Glycine max
cgaaaagctagtgagattgataaaagcaagattgaaaagaacagaggtgataaaggaggatttggtccattacagtcaatgggctctggaagaattgaaaatagctttagtgatttgagcatatctagcagtggaactggtttggaagtggctctggttttggattgacttctgatgttgattcctttgcaaccaagtc

SEQ ID NO: 151564 - DNA, 262 bp, Glycine max
gcaaaacccctttacctgaggtaaccagcaaaactgaagttgctggaggggagttacagaagtttccagctaggctttttgcagtccctcctcgaatagcccagggcattattccaggggttacggctgaatcttatcaagggacaacaaattatggaaaaagcatgttaacgcttacaaaagaatgaataaattgattggcactaccagatatcggaatgtgatggacatgcaaaccttcaccgtaaagaaactgtcgtgt

SEQ ID NO: 151565 - DNA, 228 bp, Glycine max
gaggagttgtaaattaagagcatggctgcacaagctcttgtatcatcatcttctcttaccttctcagcggaggctgcaagacaaagtcttggaccaagatcactccaatctccatttggcttctccagaaaagcctccttcttgttaaggcagctgctaccccccctgtcaagcaaggatcagacagacctttgtggtttgcatcaaagcaaagtctttcttacttgg

SEQ ID NO: 151566 - DNA, 130 bp, Glycine max
tgtcatcatcagtgtgtagtttaagctagctttgctatggttacgttctttgagatgagagtcttgatgaacagtaccattctgatgtattgctttccttgaaagttaatgcatgcttcttatcttctgt

SEQ ID NO: 151567 - DNA, 243 bp, Glycine max
ctcctctccaagtgtactctgactacatgagaagctttcgtgacagattcagagattacttgggcagtgttatcgtggaaatacaagtggggatgggtccttgtggagagctgagatatccttcttatccggaaacaatggaacttggaggtttcccggaattggagaattccaatgttatgacaagtatatgaaagcatccttggcagcagcagccgaagacattggtgttgtagttctcgt

SEQ ID NO: 151568 - DNA, 229 bp, Glycine max
gcagcagccacacttcttcgccgtttcagctgaagagccatccgcaggtaagcaatggttaagcataataatgttatccccaatgggcacttccggaaacactggcaaaactatgtgaagacttggtttaatcaaccacccgaaagaccagaagacggttggctcggcagaagaaggctgtcaagattttccccaggcctactgctggatctctccaggctattgttca

SEQ ID NO: 151569 - DNA, 236 bp, Glycine max
ggttaaaattcctgaaccgggacgtggcggctgacggcaacgttagggagtccggagacgtcggcgggggccccggaaagagttatcttttctgtttaacagcctgcccaccctggaaacggctcagccggaggtaggtccagcggctggaagagcaccgcacgtcgcgtggtgtccggtgcgcccccgggggcccttgaaaatccggaggaccgagtgcctcccacgtatggtcg

SEQ ID NO: 151570 - DNA, 226 bp, Glycine max
caaccaccacacaattcctacacttttctactctttagtttctccaattttctttctcaattctcaacaatggccactacaacacaacttcacttaccccctggattcagattccatccaacagatgaagaactcgtcaccactacctttgtcgcaaatgcgcttcgcaacatatcgcggttcccataatcgccgaaattgatctgtacaagtacgacccttggga

SEQ ID NO: 151571 - DNA, 261 bp, Glycine max
  unsure (1)..(261): unsure at all n locations
caaaaatatgtggtacaagggaatacaagtgtgactgtggtaccatcttttccagaagagacagcttcattacgcacagagctttctgtgacgcactagctgaggagaacaacaaagccaacgaaggacaattgccaagataggtccaaacttgcaatgtcaacaaatcccaaacctcgtttcatcattaccaatcaacaccaacagcattgttcccaaccctgcaacaangtgcggaancngttcagattccagcnnnca

SEQ ID NO: 151572 - DNA, 231 bp, Glycine max
accagcatgggttgggtggcgataacgtgaaggggagttgccgggacctgcacgctgggcctgtgagtcttttgcattggtccggtagtggcaagccctggactcgattggactccaaacagccctgtccgcttgatcactttgggctccttatgatttgtacggtcacgctcactgatttgggttgctggtcgccggtaaattccccccttcactgtttttgtcacttct

SEQ ID NO: 151573 - DNA, 231 bp, Glycine max
gcatctctcaaagaaatatggtcctttattttcccttcaatttggattaaggccagccatagttgtttcctctccaaaattggccaaagaggtaatgaaagacaatgaccttgagtgctgtggacgacctaaattactaggccaacagaaactaacctataatgggttagacatgggattttcctcatacgatagttattggagagaaatcagaaaaatttgtgttgtcca

SEQ ID NO: 151574 - DNA, 196 bp, Glycine max
cttgagaaatggcacaagaaacctttctattcacatctgaatctgtaaacgagggtcaccccgacaagctgtgcgaccagatctctgatgcagtgctcgatgcgtgccttgaacaggaccctgacagcaaggttgcctggagacatgcaccaagaccaacatggtcatggtctttggagagatcacaaccaaggcc

SEQ ID NO: 151575 - DNA, 258 bp, Glycine max
gaaaaggactttgaaaagagagtcaaagagtgcttgaaattgtcgggagggaagcggatgggggccggcgatgtgtcccggtcggatgtggaacggtgagagccggtccgccgatcgactcgggacattgaccgagcggattgcgatggtggcccaagcccgggctgttgatatgctcgtggagacgtcatcatcgcgattgtggatggcagcgggcgcccttggcgtgcctcggcacctgcgcgctcctggcgtcgg

SEQ ID NO: 151576 - DNA, 233 bp, Glycine max
gaaagataaaagaagatggcgactcttgattccgacgtgcctatggttcccgccggcgagccctcgagcagcgccggtccttcttccaagaagcccaagcgcttcgagatcaagaagtggaacgccgtcgctctctggcttgggacatcgttgtcgataactgtgctatctgccggaaccacatcatggatctctgcatcgagtgccaagccaaccaggctagcgctactagc

SEQ ID NO: 151577 - DNA, 226 bp, Glycine max
tctcgagccgattcggctcgaggttgatgcatctggcaggaaaggtaagggaaagggcgtttaccagtttgtagacaaatacggtgctaatgtcgatggttacagtcctatctacgacaccaaggactggtctccaacggtgatgtctacgctggcggtacgactggcttggctatctgggctgtgactctacttggtcttcttgctggtggtgcacttcttgtct

SEQ ID NO: 151578 - DNA, 255 bp, Glycine max
caccagtctaggttctagaaccattggcgcccccgagtactgccacgccaacttcaccaagtacttcaccgcagggttctggtcggacatgcgcttcgccagcgcgttcgcggggcggaggccgtgctatttcaacagggcgtgatggtcatagatctggtgcggtggcggaaaatcgggtacagcaagaggatagagaggtggatggagattcagaagaacgatcggatctacgagctgggttcttgccgccgt

SEQ ID NO: 151579 - DNA, 250 bp, Glycine max
tgaagctagaggtgtcagaaaagttaccacagggataactggcttgtggcagccaagcgttcatagcgacgttgctttttgatccttcgatgtcggctcttcctatcattgtgaagcagaattcaccaagtgttggttgttcacccaccaatagggaacgtgagctgggtttagaccgtcgtgagacaggttagttttaccctactgatgacagtgtcgcaatagtaattcaacctagtacgagaggaac

SEQ ID NO: 151580 - DNA, 259 bp, Glycine max
agctgatgaagagaccttgagagaagctatggcagtgctcagggatatgtttggacccaacatccccaatgccattgatatacttgttcctcgctggtggaataacagatttcagcgtggcagctacagcaactacccattatttccaatcataaactttttcataatattaaggcccctgtaggtcgcatttttttcactggagagcacactagtgaaagatttaatggctacgtacacggtggatacctggcaggta

SEQ ID NO: 151581 - DNA, 257 bp, Glycine max
cttccaaatacattttcatgtgcctcctagtaattctagggatggtactttttgcaaccacttccctagctgatcatcatttactttcaacagcagaatctcctatgtcagaagttgtccatcgttatagttacgtgatcatgattataattccaatcactattatgatcattatcataaccacaatcatcatcaccatcatcatcacaatcatcatcatgattttgatgatcacgatcataattgtggtgatgaca

SEQ ID NO: 151582 - DNA, 242 bp, Glycine max
gccttcacagcattcgttgcggcattttaatcgatttatccaagcaggactgaatgaactaatggagtctaaaggtgggaaaaagaagtctagtagtagtagtagtaaatcattgttctacgaagctcccctcggtacagcattgaagacgttagaccaaacggtggaatcaagaaattcagatctgctgcttactccaactgcgctcgcaaaccttcctgatatccatccagattgatagt

SEQ ID NO: 151583 - DNA, 214 bp, Glycine max
ggagagcgcgccgaggctgtttcccctcggaaacttcgacggcgcgatgatcaccatgggcagctctccacgttttcccatgtacgacaacgacttcggttggggtagacctgttgcgattcggagtgggaaaggaacaagttcgacggaaagatttccgcgtttccagggagagagggaaacggcagcgtcgatttggaggtcgttttggccc

SEQ ID NO: 151584 - DNA, 242 bp, Glycine max
gaagaatttgtggtggactatgactacctaatcatagccgtgggagcaaatgtcaacacatttaatactcccggagtgatggagaattgccatttcttgaaggaagttgaagatgcacaaaagattagaagaaccttattgactgctttgagagagcaagtttgcctagtgtaagtgaagaagaaaagaagagaattcttcattttgctattattggaggtggtccatctagtgaggacttt

SEQ ID NO: 151585 - DNA, 252 bp, Glycine max
atttcactctcactctcgcatctgctgcctcactctctcactctctcaggagtatataatctgagcgatgtcagatctcgaggctcccttgcgccctaagaggaagaaggtttgggtggactattttgttcagttcgatggatccttgttatttttgtggtccttcccatctccttcaccatttatctccttacataccttggggatgtaagatccgagtggaagtcctataacacgcgtcagaaggaacat

SEQ ID NO: 151586 - DNA, 243 bp, Glycine max
gtcaggacaagatccgtccactgtggaggcattatttccagaacactcagggtctcatttttgtggttgatagcaatgatagagatcgagtggttgaggcaagggatgagctgcacagaatgttgaatgaggagaacttagagatgctgttttgcttgtttttgccaacaagcaagatcttcctaatgcaatgaatgctgcagaaataactgacaagcttggacttcattcactccgtcaacg

SEQ ID NO: 151587 - DNA, 240 bp, Glycine max
gccattttgagaggaccctcgagagtggaccctacacgttaaaataccgtggtagcatgtggggttacaagcggttttttaagagaacagcactagagacatcagattaccttaaagatgattgccttagtgtaattgtagtgttggtgttgtgaagtcacacacagaaggccctagaatatataaaatcccaattccgccttccaacatgggtcagcaatttggggaggctactaggaa

SEQ ID NO: 151588 - DNA, 254 bp, Glycine max
caaagcattgaattcaaaaacttaagttcattccttgtgttttgctttcttcctcaaaaccaaacatgtcgaacacatgcggcaactgcgactgcgctgacaagactagctgcaccaagggaaacagctatgggttattgtagagactgagaagagttacatcgagactgttgtcatggatgttccagcagctgagcatgatgggaagtgcaagtgtggcactaactgcacttgcacggactgcacctgtggcc

SEQ ID NO: 151589 - DNA, 235 bp, Glycine max
ctgctggaccttacatgtcaaactgtagccgacatgatcaaggggaagactccagaggaaattcgcaagacctttaacattaagaatgacttcacccctgaggaggaagaggaagttcgtcgggaaaaccaatggcatttgaatgattttgttaatctcaaaaaatctgaatcaaagatctgccatgtggatttatgctatgcttgtttgtttatcaaagatctctcttgtagat

SEQ ID NO: 151590 - DNA, 239 bp, Glycine max
catcgtgcattcaatggccaccacagcagctctatccggaaccatggtgagcacctccttcatgaggaggcaacctatgaccaccacaagcctaaagacattccccaacgttggtgaagctctttttggtctgagagtggacgaggtagtcgtgtcacttgcatggcctcgtacaacgtgaagctcataaccccagaaggacaagtggagtttgaatgcacagatgacgcttccattgc

SEQ ID NO: 151591 - DNA, 190 bp, Glycine max
aaggattctacccgccgctcgatgggaattgcgcttcaaggcgtctcgtagggctaatccgcctcacgagggtcaccaacggcacgtgcctttggggggccgaggccccctactgctggtcggcaaacggacgcgggcgcacgcgtcgcttctagcccggattctgaattagaggcgttcagtcataatc

SEQ ID NO: 151592 - DNA, 223 bp, Glycine max
ctcgagccgctcgagccgctcgagccgattcggctcgaggggagctaaaggtgcagaagctcgtgctcactatctccgatggagagagtggagatcgtctcaccagagccgctacaggttttggaacagcttatggccaaacccctgtgttttccaaagcaaggtacacggttcgttcctttgggattagaagaaatgagaagattgcatgctatgtcactgt

SEQ ID NO: 151593 - DNA, 248 bp, Glycine max
cttgttcaccaattaagctttcaagagacaaactgctttgaaaactgggatccaaggttgttgcatccgttgcccttctcctctccatcaacattcttttcatttccatggttagctccagcagccactacgaccacagccccaaccttctcacgtcactgctcttattacacgacctagttgtccggatctgagtatttgcctcaatattttaggcgggtctctaggaaccgtggatgattgttgtg

SEQ ID NO: 151594 - DNA, 239 bp, Glycine max
aaaggattctacccgccgctcgatgggaattgcgcttcaaggcgtctcgtagggctaatccgcctcacgagggtcaccaacggcacgtgcctttggggggccgaggccccctactgctggtcggcaaacgacggcgggcgcacgcgtcgcttctagcccggattctgacttagaggcgttcagtcataatccaacgcacggtagcttcgcgccactggctcaacatccaagcatgcact

SEQ ID NO: 151595 - DNA, 217 bp, Glycine max
gaaaatgtcttgctgcggtggtaactgtggttgcggaagcgcctgcaagtgcggcaacggctgcggaggctgcaagatgtacccagacttgagctacaccgagtcaaccaccaccgagaccttggtcatggagtggcaccagttaaggctcaattcgagagtgctgaaatgggtgttcccgctgagaacgatggctgcaaatgtggagctaactgca

SEQ ID NO: 151596 - DNA, 234 bp, Glycine max
cacaagggaattccatttcctaaggaccaacccatgggtgtgtacagttcattatggaatgctgatgattgggccacgcagggtggtcgtgtgaaaacagattggagccacgcacccttcattgccacataaagaacttcgagataaatgcgtgtgagtgtcccgtgtcagtggctgcaatggataatgctaagaagtgcaccagcagtgaggggaataagtattggtgggatg

SEQ ID NO: 151597 - DNA, 236 bp, Glycine max
gaaatggcggattcttctcgggaggagaacgtttacatggcgaaattggcggagcaggccgagcgttacgaggagatggttgagttcatggagaaggttgcaaagactgtggaggttgaggagttgacggtgaggagaggaatctcctctctgtggcttacaagaacgtgattggtgcgaggagggcttcgtggaggatcatatcctccattgagcagaaggcagaagacaggggc

SEQ ID NO: 151598 - DNA, 236 bp, Glycine max
ctctaggaaccgtggatgattgttgtgccctcatcggtggtcttggtgacattgaagccattgtgtgcctttgcatccaactcagggccctcggaatattaaaccttaaccgtaatttgcagttaatattaactcctgtggacgaagctacccgtcaaacgccacttgcccccgaacctaagaacagaatatgtatggcactaattaccatattacttcgtatcatggtgtttgtt

SEQ ID NO: 151599 - DNA, 219 bp, Glycine max
cgcaacaaaaagaaagaatcccaggcgaggagaaagatggaggggaaggagcaggatgtgtcgttgggagcgaacaagttccccgagagacagccgattgggacggcggcgcagagccaagacgacggcaggactaccaggagccggcgccggcgccgctggttgacccgacggagtttacgtcatggtcgttttacagagcagggatagcagagtttg

SEQ ID NO: 151600 - DNA, 222 bp, Glycine max
ggcaaacatggcaactcaaatgagcaagaagagaaagtttgtggcggatggagtgttcttcgccgaactgaacgaggttctgacacgtgagttggcggaggacggttactccggcgtggaggttagggttcgccgatgcgcaccgagattatcatcagagccaccagaacccaagccgttctcggtgagaagggaaggagaattagggaacttacctcagtg

SEQ ID NO: 151601 - DNA, 222 bp, Glycine max
caggcacaaagatgcgcacactggcaaggaacaaagaaagccctcctgatggatttatgtgccctggtggttggaaggtactggttgaatactatgatagcttagtactctcaagcaatggcaaagtgccgaagctgttccagcttaatcttgtattataatgtatatctcatgattgggagaaaccttaagctttatgtattctcctgctaagatacatca

SEQ ID NO: 151602 - DNA, 223 bp, Glycine max
gcccaagccctatacaaccaaaccctaacacacacccatttgattcagtttccatggctagcctcaaggttgcatttttggctgcagtgctctgcatggttgtggtgagtgcacccatggcacatgcagcttcacgtgcgggcaggtgacgaatagcctgatcaattgcatcggttacctccagaacggaggaacgccgccgtcgggatgctgcaacggagtg

SEQ ID NO: 151603 - DNA, 255 bp, Glycine max
ggcttccttaagctccttagtgctgctccttgcagctctaattctatcccctcaagttcttgcaaactatgagaattgcccagtgtacaagcctcccactgagaaaccaccagtttataagcccccagtgagaagcctcctgtttacaagcctccagttgagaagcctccaatttataagcctccagtagagaagccaccagtgtacaagccctcagttggtcctattaagacgcgtcagaaggaccatgatgag

SEQ ID NO: 151604 - DNA, 231 bp, Glycine max
gttatcgtattgctggtgggcccctcggtgaggtcactgacccaatctaccctggtggcagctttgacccattgggccttgctgatgacccagaggcttttgctgagcttaaggtgaaggaactcaaaacgggagattggccatgttctctatgtttgggttctttgttcaggccattgtcaccggtaagggtccattggagaaccttgctgatcacctgcgggaccagtc

SEQ ID NO: 151605 - DNA, 219 bp, Glycine max
ctctctttctccggcgacgatctcagattccggtcactcctctcgccggcgatcccttattcctccgtcctccgtcgagtcctttccgattcgaatcgttcccagccttgtgccaccatgaatcccgatacgattatttgttcaagcttttgctgattggagattctggtgtaggcaagtcatgtcttctcctgaggtttgctgatgattcataccttg

SEQ ID NO: 151606 - DNA, 244 bp, Glycine max
cgcccagagaacgtgaaggcagcacaagatgcactcgcattccgtgccaagtccaactcactcgctcagcttgggaagtacactggtgagggtgaatccgaggaagccaagaaggagttgttcgtcaaagctactcctactaagatgtttgcagtgaatatgatacttgttaggcagcaacaccagcagttacagtaggtgttgacggacgatgaagtgctggacttgcacggactgacatctg

SEQ ID NO: 151607 - DNA, 209 bp, Glycine max
tttcaatttcaatcaacggttatacccttttctatttgagcatcatcatgtccaccgcagcgcacccaaggccaagaaaacggcgtcgtccaagaagcccctctcccatcctaccttcgccgcgatgaagcggaggcgatagcgagtctgaaggagagaaccggttcgagccaatacgcgataaccaaattcatcgaaggcaagcacaa

SEQ ID NO: 151608 - DNA, 221 bp, Glycine max
gactcgttcttcttcgtcgttatcttcttcttttgttgtttgtgtgtttgtattttctctcacctgaaaatgtcttgctgcggtggtaactgtggttgcggaagcgcctgcaagtgcggcaacggctgcgaggctgcaagatgtacccagacttgagctacaccgagtcaaccaccaccgagaccttggtcatgggagtggcaccagttaaggctcaattc

SEQ ID NO: 151609 - DNA, 236 bp, Glycine max
ctgaccgggaaaagaaaaaccagctttcttcaagcacctagatttcctctctctctaaatggcgttctcttcttttctcggcagagtcctcttcgcctccgttttcatcctctccgcttaccaagaattaattcttatggagttgatgggggacccgcagcaaaagcactcagaccgaagtttgatgcctttgcacatcaagtacattctaaagttggctttcaacttccagatat

SEQ ID NO: 151610 - DNA, 233 bp, Glycine max
ctcgagccgctcgagccgattcggctcgagccagcactacagttaccgcagttgctgagcagtataggcacctgtggttcccaggcagcacccctccaccatggctagatggcagtttgccaggagatttggctttgatcctctaggtcttgcatctgatcctgagagcctgagatggaatgtccaagcagagcttgtgcactgcagatgggccatgttgggagctcctggca

SEQ ID NO: 151611 - DNA, 255 bp, Glycine max
ccacaattcacaaccgaaacagtttccatctctctcacaaaatgacaacaatatcaaattgctcccttctcttcctcttcctcttcctctccaccctccacatagcttccaccctctcaacccccaccaacttcatcaagtcctcctgcagcaccacccagtacccagccctctgcatccagtccctctccgtctacgcctccaccatccagcaagacccccacgagctcgtccagacagccctctccctctccc

SEQ ID NO: 151612 - DNA, 250 bp, Glycine max
gcagaattggagttgtggtgctgccaagcaaaggaggagtatgcaggttcatcttgggatgagcttaagcatataagacaagctgttggattcttggttattcatcagaagtataggatttcctatgatgaaatcattaatgatttatgcccaatcatgagtgtccagcagctatacagaatatgtacactttactgggatgctaactacaatactcgaagtgtatctccagatgtcctttcaagcatga

SEQ ID NO: 151613 - DNA, 249 bp, Glycine max
cgctggccgacaccaacaaggacgggttcgtggagtacgaggagttcgagcgcgtggtcgcggcggagagaaaacccgtggggtgtggggccatggaggacgtgttcagggtcatggacaaggacggcgacggcaagctcagccaccgcgacctgaagacttacatggcctgggctggcttttcggccaccgacgacgacatcaacgccatgatccggttcggcggcggcgaccaaaacggcggcgtta

SEQ ID NO: 151614 - DNA, 246 bp, Glycine max
cctgaattacgcaaataatgacgagtctgggagaggtgatatgttaagtatcttaaagcaaattgaaatggacttgtcaaacaccaacattagcttttggagtcaggcttcagatcctgtactcctccatgaccctttctcaacattgatgtgggttcttttttgtctaccacacccatttttgtcatgtgaagaatccttgttatccctagtgcatgttttctatatagtagccgtaacccaggc

SEQ ID NO: 151615 - DNA, 246 bp, Glycine max
tgaaaggttccgttgtagcagcgaagaagaaggttcaggagaaggtgacgaatcctttgttcgagaagcgtccgaagcagttcgggatcggaggcgcgctgccgccgaagcgggacctgacgcggttcgtgaagtggccgaagaacgtccaaatccaacgcaagaagcgcatcctcaagcagaggctcaaggtccctcctgcactcaaccagttcaccaaaaccctagacaagaatctcgccacga

SEQ ID NO: 151616 - DNA, 246 bp, Glycine max
ggtattgtggttgcaggccctaaagctattgaggcctcaaaacatgctaaatcacttagagttttctttgactggaaagactacctcaaattctaccagctaggaacctattggccatacactccttccatacatttgctgtatggtctgagagctgctcttgatctgatttttgaggaaggctctgaaaatgtgatcgcaaggcacagtcgtttaggcaaagcaaccagacttgctgtagaggca

SEQ ID NO: 151617 - DNA, 257 bp, Glycine max
tgttgttctaaagcactcatccacacattctccgtcgccacgacaacaatggctccaaagaaaggtgcgaaaggtggagttgtagcagcaaagaagaaggttcaggagaaggtaacgaaccctttgttcgagaagcgtccgaagcagttcgggatcggaggcgcgctgccgtcgaagcgggacctgacgcgcttcgtgaagtggccgaagaacgtccaaatccaacgcaagaagcgcatcctcaagcagaggctcaa

SEQ ID NO: 151618 - DNA, 252 bp, Glycine max
ggaagatctgatgggccatcaattgattggaatacaagaatgaaaattgctatatgtgctgcacaaggtctaactttcttgcatgaagaagggccttttcaggcaatgtataatgagttctcaacagccaacatacagattgacaaagatttcagtgcaaagctttcaggatatggttgtgttggacatattcccgaggaagagatttcaagcagttcatctgctgttggaaacctatcaatggaaacactg

SEQ ID NO: 151619 - DNA, 248 bp, Glycine max
  unsure (1)..(248): unsure at all n locations
gacggttcaaaaggaagatttgggcttgagtctaagtttgagcttccctctcctctcctcttctccttccagccacaaccctnaacgannctcttggaacgaccctattttcacttcttcaggtgaagctggatcattcctccgcggaatcgatgtgaaccgtttaccttctgtggttgattgcgaagaggaagcaggtgtttcatctccaaacagcacggttttnagcgtcatggaaagcgcagnng

SEQ ID NO: 151620 - DNA, 244 bp, Glycine max
ataatggcatcattcaccatgacagcttccatccttggcagcccagccgtcaccaaccggtcggcagtagcaacgcagaggagatcactcgtagtgaatgctgccaaagctgttgaagcagaaaaggtcagttatgacaatgacatggatggtagcaatggaaggaggaacttgatgttcgccgcggcggcggctgctgtttgctctgttgctgggatggcagtggcagatgagcctaaaccag

SEQ ID NO: 151621 - DNA, 241 bp, Glycine max
attctggtgctggatttggatctaagagcaaatatatgtttgggaaagtgaccatccagctcaagcttgtggagggtgactctgctggaactgtcactgctttctatatgtcatcagacggcccaactcacaacgaatttgatttcgagtttttgggcaacaccactggtgaaccttactcagtccaaaccaacgtgtatgtgaatggcgttggcaacagggagcaaagactcaacctctg

SEQ ID NO: 151622 - DNA, 245 bp, Glycine max
ctctccctgagattaccaagctctgcaactttgcttctcaacatggagtatcgtctcctacccatttttactttactcaatcttgcactggtggcaatccatgctgctttacctcctgaagtttactggaagtcggtgcttcctactacgccaatgccaaaagccatcactgatatcctttaccccgattgggtggaagagaaaagtacctcagtgaatgttggaggcaagggcgtaaacgtgca

SEQ ID NO: 151623 - DNA, 253 bp, Glycine max
gttaagctagcttccattcggtttgatcgttctctctgaacaaccccagccatgggaggaggaaatggacagaaggccaagatggctcgtgagagaaacatggagaaaaataaacctgccaaaggtagccagttagaggccaacaagaaggccatgaacatccagtgcaaggtgtgcatgcagacattcatatgtaccacatcggaagttaagtgtcgagaacatgctgaagccaagcatcccaaggctcatc

SEQ ID NO: 151624 - DNA, 259 bp, Glycine max
tcaaaacactcataacacaaagcacaaagcaaagctcatccttgagttaaaaaatggcagcagcttcttccatggctctctcatccccatccttggctggcaaggccgtgaagctgggcccatcagccccagaagtgggaagggtgagcatgaggaagaccgtcaccaagcaggtctcctcaggaagcccatggtacggcccagaccgagtcaagtacttgggcccattctctggcgagcccccgtcctacctaaccgg

SEQ ID NO: 151625 - DNA, 263 bp, Glycine max
cttaaaattccatttagggacttcccaaacacgtcactaatcgtatcaacaattcaccatgcgcttgagctgcaatggatgccgcgttctccgcagagggtgcaccactgagtgccccattcgcatctccctccaatggatcaattcccctaactcccaatccaacgcaaccctcttccttgcaaagttctatggccgccaaggtctcctcaccctcctcaccaacgctccctcacaactacaacaagccgttttaaaatctt

SEQ ID NO: 151626 - DNA, 255 bp, Glycine max
ccgtcaccaagcaggcctcctccggaagcccatggtacggcccagaccgcgtcaagtacttgggcccattctctggcgagcccccgtcctacctcactggcgagttcccaggtgactacggctgggacactgctgggctttcggccgacccagaaaccttcgccagaaaccgtgagctcgaagtgatccactccaggtgggccatgctcggggccttgggctgcgtcttccccgaactgttgtcccgcaacgggg

SEQ ID NO: 151627 - DNA, 232 bp, Glycine max
gaaactttaagattgtaccctccagctcctctctcaagacctcgtgagtttgaagaggattgcactataggtggctacactgtcaaaaagggaactcgtctaattacaaatctttccaagatccacacagatcataacgtttggtcaaatccattagagtttaaaccagaaaggttccttacgactgataaagatatagccatgaagggtcaacattttcagctattaccat

SEQ ID NO: 151628 - DNA, 250 bp, Glycine max
tagctgtagttcactgcttgaaaaattgatgagacacaagcatggttgggtgtttaattctcctgttgatgttgagactcttggtttgcatgattattttactatcatcactcatccaatggacttgggaactgtgaagacaaggctgaacaagaattggtacaaatcaccaaaggagtttgcggaggatgtgagactcacttttcgtaatgccatgacatataatccacagggacaagatgttcatatt

SEQ ID NO: 151629 - DNA, 249 bp, Glycine max
ccaagccccactcaaccaccacactactctctctgctcttcttctacctttcaagtttttaaagtattaagatggcagagacattcctatttacctcagagtcagtgaacgagggacaccctgacaagctctgcgaccaaatctccgatgctgtcctcgacgcttgccttgaacaggacccagacagcaaggttgcctgcgaaacatgcaccaagaccaacttggtcatggtcttcggagagatcacca

SEQ ID NO: 151630 - DNA, 248 bp, Glycine max
accgaatgagagcattaacctcttcttcttccactttcattccaaagcgttattccttcttcttcttcctctccattctcttcgctcttcgatcctcgtccgggggctgctccgaataccaccaccaccacgcgccgatggccacgataggaggcttacgcgactcccaaggctctcagaacagcgtccaaaccgaggccctcgctcggttcgccgtcgatgaacacaacaagaagcagaattcactt

SEQ ID NO: 151631 - DNA, 247 bp, Glycine max
gaagaaaggtgagaatgatttaccaggattgactgatgttgagaagccaaggatgagaggcccaaagagagcatccaaaatccgtaaactgttcaacctgtctaaggaggatgatgttaggaagtatgtcaacacctaccgtcgtacatttacgacaaaagctgggaaaaaggtgagcaaagctcccaagatacaaagactggtcactcctcttacgctccaaagaaagcgggcaagaattgctgat

SEQ ID NO: 151632 - DNA, 243 bp, Glycine max
attacaacacctgggcctctgggaaaactttcacagttggtgacactttggtgttcaagtatgactccactcatcaagttgatgaggttgatgagagtggatacaacagctgcagctcaagcaacagcatcaagaactaccaagatggaaactccaagattgaattgacttcaccaggcaaaaggtacttcttgtgccccatttcaggccactgtgctggaggcatgaagctgcaaattaatg

SEQ ID NO: 151633 - DNA, 243 bp, Glycine max
ataggattctacccgccgctcgatgggaattgcgcttcaaggcgtctcgtagggctaatccgcctcacgagggtcaccaacggcacgcgcctttggggggccgaggccccctactgctggtcggcaaacggacggcgggcgcacgcgtcgcttctagcccggattctgacttagaggcgttcagtcataatccaacgcacggtagcttcgcgccactggcttttcaaccaagcgcgatgacca

SEQ ID NO: 151634 - DNA, 244 bp, Glycine max
tctcgagcgaatcggctcgaggcagtcgcagaggaaaaccctagctagtagtctcagttacgtttgagagagaaaaaatggcagagggtctcgttctccgcggaaccatgcgcgcccacaccgacgtcgtgacggcgattgccactcccatcgacaactccgacatgatcgtgacggcgtcgcgcgacaaatccatcattctctggcacctcaccaaggaggacaagacctacggtgtcccccg

SEQ ID NO: 151635 - DNA, 235 bp, Glycine max
atgagtaaccaacgcaccacaactctttctctctctatctatcaccattttctccctaatgaagaagctctaccataaagggacggttcacccgtcgccaccactcatctccgaccaactctccttactcccggcggccatcctcacctctcgcggcggcgctctcaccggaggacagagaagtcctctcctacctcatctcctgctcctcctccaccttctccggctactcgcg

SEQ ID NO: 151636 - DNA, 252 bp, Glycine max
tcatctacaaatccttgaattgtgaacaaccaacaagcaaagaactaatgagttacatgcacattttgtaccagatttgcccgtactggaagtttgcatacatatctgcaaatgctgtcattgaagaagcaatggcaaatgagtccaggattcacataattgatttccaaattgcgcagggcacgcagtggcatttacttatccaggctcttgcacataggcctgggggacccccctcccttcgtgtgacag

SEQ ID NO: 151637 - DNA, 256 bp, Glycine max
caaggattctacccgccgctcgatgggaattgcgcttcaaggcgtctcgtagggctaatccgcctcacgagggtcaccaacggcacgtgcctttggggggccgaggccccctactgctggtcggcaaacggacggcgggcgcacgcgtcgcttctagcccggattctgacttagaggcgttcagtcataatccaacgcacggtagcttcgcgccactggcttctcaaccaagcgcgatgaccaattgtgcgaatca

SEQ ID NO: 151638 - DNA, 254 bp, Glycine max
ctagacttgggatcccagttgctggttatcaactgttacccaccatgtcctaaccctgagcttgttatgggccttcctgcacacacagaccatgggcttctgaccctcctaatgcaaaacgagcttggagggcttcaaattcaacacaatggcaagtggattcctgtccaccccttacccaactcctttctcatcaacactggggatcacatggagatactgaccaatgggaaatacaagagtgttgttcatcg

SEQ ID NO: 151639 - DNA, 247 bp, Glycine max
cttgttcaccaattaagctttcaagagacaaactgctttgaaaaatgggatccaaggttgttgcatccgttgcccttctcctctccatcaacattcttttcatttccatggttagctccagcagccactacgatccacagccccaaccttctcacgtcactgctcttattacacgacctagttgtccggatctgagtatttgcctcaatattttaggcgggtctctaggaaccgtggatgattgttg

SEQ ID NO: 151640 - DNA, 252 bp, Glycine max
caaactttaaataggtaggacggtgcggctgctctgttgagccgcgccatggaatcgagagctccaagtgggccatttttggtaagcagaactggcgatgcgggatgaaccggaagctgggttacggtgcccaactgcgcgctaacctagaccccacaaagggtgttggtcgattaagacagcaggacggtggtcatggaagtcgaaatccgctaaggagtgtgtaacaactcacctgccgaatcaactagc

SEQ ID NO: 151641 - DNA, 247 bp, Glycine max
taaaaatcactctgaggagaaacactataatcaatcatggaggggtctcacatggggttgttgctcttcttttcttccatgctttttgctgccttcccttctgcctcctccagaaacttgcccgtcataccctttgatgaaggctacgcgcccttgtttggggacagcaacttggtcatccatagggatggcaaatcggtccatctttcactcgatgagagaacaggttcaggatttgtgtcgcatg

SEQ ID NO: 151642 - DNA, 246 bp, Glycine max
ctcgagccgcgagtttcacagcgaagtcgtaggagggtttcaaaagatggagaacatgcagagcttctggcaattgggcgatgaactccgtggacactcaaaagcatcggaggatcacaaatggttaatggttgcttcgaaattggcggaacagacaagattgaagggggagcgtgtgaacaaccttgatctttcaaagggccccattgaaacaaggtcaagggataaatttgggttccaggaaga

SEQ ID NO: 151643 - DNA, 239 bp, Glycine max
gcaaaggattctacccgccgctcgatgggaattgcgcttcaaggcgtctcgtagggctaatccgcctcacgagggtcaccaacggcacgtgcctttggggggccgaggccccctactgctggtcggcaaacggacggcgggcgcacgcgtcgcttctagcccggattctgacttagaggcgttcagtcataatccaacgcacggtagcttcgcgccactggcctttcaaccaagcgcga

SEQ ID NO: 151644 - DNA, 239 bp, Glycine max
tctcgctccgatgagaagctcctgtcagtcttccgtgaaggtgtgaagtatggtgctggaattggccctggtgtctatgacatccactccccaagaataccaccaactgaagaaatcgctgacagaatcaatacgatgcttgcagtgctcgagaagaacatcttgtgggtcaaccctgactgtggtctcaagacccgcaagtacactgaagtgaagccagccctcacaaacatggttgc

SEQ ID NO: 151645 - DNA, 234 bp, Glycine max
  unsure (1)..(234): unsure at all n locations
gtctcgtagggctaatccgcctcacgagggtcaccaacggcacgtgctnttggggggccgaggcccctactgctggtcggcaaacggacggcgggcgcacgcgtcgcttctagcccggattctgacttagaggcgttcactcataatccaacgcacggtagcttcgcgccactggcttttcaaccaagcgcgatgaccaattgtgcgaatcaacggttcctctcgtactaggtt

SEQ ID NO: 151646 - DNA, 243 bp, Glycine max
  unsure (1)..(243): unsure at all n locations
gtttgggttttgtagatggcaagtgggtttggggaatcaacagggagatcacccccaagcccttcctacttcaacaacaataataacaatgatgctgccaattttgaatgcaacatttgctttgaattagcgcaagacccgataattactttgtgtggtcatcttttctgctggccctgtctttacaaatggctcactttcactcacaatcacgagaatgcccggnnccgcnggncctcgtgg

SEQ ID NO: 151647 - DNA, 251 bp, Glycine max
tctcgagccgaatcggctcgagggcaagtctggtgccagcagccgctgtaattccagctccactagcgtatatttaagttgttgcagttaaaaagctcgtagttggaccttgggttgggtcgatcggtccgcctccggtgtgcaccggtcggctcgtcccttctgccggcgatgcgctcctgtccttaactggccgggtcgtgcctccggtgctgttactttgaagaaattagagtgctcaaagcaagcct

SEQ ID NO: 151648 - DNA, 248 bp, Glycine max
tagacattggtgcaaacccttctgctgagggtggaggagaagatgagggagttgatgatgcagctgttaaggttgttgacattgttgacacattcagacttcaggagcaacccgcattcgataagaagcagtttgttaccttcatgaagaggtttatcaagaatttgactcccaagctcgatgcagagcaacaggagttgtttaagaagcacatcgagggagcaactaaatacctgctctctaagatt

SEQ ID NO: 151649 - DNA, 246 bp, Glycine max
ctattttgttgttcgtatactcacaatgttgctccaaagggaaaatttattgcatttgtatcaactgaggcagagacagatcagccggcaattgaactgaaacctggaattgaccttctaggacctgttgatgagatattttttgatatctatgacagatatgaaccagtcaacgaacccactttggacaactgctttatatcaacaagttatgatgctactactcactttgagtcgactgtggat

SEQ ID NO: 151650 - DNA, 243 bp, Glycine max
ctcaccatctctaaggtactgctttctatctgctcattgctgactgatccaaatcctgatgatccacttgttccggaaatcgctcacatgtacaaaactgaccgggccaagtatgaggccactgcacgcagctggacccagaagtatgccatgggctgatttgtgtttggataatgtatattgaaatggattgcatctatgaaaacttttgtgggtttgcttttcacttcctgttttctgggc

SEQ ID NO: 151651 - DNA, 242 bp, Glycine max
ccataaccatgtcagacgaggagcaccacttcgagtcaaaggctgatgctggagcatcaaagacatttccccagcaagctggaaccatccgcaaaaacggttacattgtcatcaagaacaggccatgcaaggttgtggaggtttcaacttccaaaactggcaagcatggacacgcaaagtgtcactttgttgcaattgacatcttcactgggaaaaagcttgaggatattgtcccatcttcc

SEQ ID NO: 151652 - DNA, 165 bp, Glycine max
gtgagtatgaaaagtcacgggatctgcgtgttgcgaagaaagtgtttgatgcttgagaaatgatgactataatctctatctttgtacttttttagtggggtacctgtatacattacactggttttaaatttttaatgctatggtataatggttggcatatttatc

SEQ ID NO: 151653 - DNA, 233 bp, Glycine max
gttctaagtcatggggctttgcttcctttgttggcacaattaaatgaacatgcgaactttctatgcttagaaatgctacctggacactttcaaacttctgcaggggcaagccacagcctccttttgatcaggttaaacctgcacttcctgctcttgcccgtcttatccattcgaacgatgaagaagttttgactgatgcatgttgggcactgtcatatctttctgatggtaca

SEQ ID NO: 151654 - DNA, 246 bp, Glycine max
gtcggaatgggaagggtgattcgcgcacagcgtaacgggtgcggggtcggtgttcaagtcccacacccaccaccgcaagggtccggcgaggctccgcagcctcgacttcggcgagcgcaacggctacctcaaaggggtcgtcaccgatatcatccacgaccctggtcgcggtgctcctctagccaaggtggcgttccgccaccccttccgctacaagaagcagatggagctcttcgtcgccgccga

SEQ ID NO: 151655 - DNA, 251 bp, Glycine max
atggtggtgacttttgcaccaactggactgacaaccgaagttaagtctgtggaaatgcaccatgaagctctcacagaggctcttcccggtgataatgttggattcaatgttaagaatgttgctgttaaggatctcaagcgtggttatgttgcctcgaactcaaaggatgatcctgccaaggaggctgctaacttcactgtccaggttatcatcatgaaccatcctggtcagattggaaatggctatgcccc

SEQ ID NO: 151656 - DNA, 247 bp, Glycine max
gaaagttgtggttattggtgggggtgacacgggcacagattgcatagggacatccattcggcatgggtgtagtagcattgtaaatctggaacttctccctcagccaccacaaactagggccccaggcaacccttggccacagtggcctcgcatataccgagtagattatgggcaccaagaaggtgcggcgaaatttggtaaagatccaagatcttatgaggtattgactaagcggtttgtgggagat

SEQ ID NO: 151657 - DNA, 244 bp, Glycine max
gtcggatattctccagctaaaagtcaaaatatggttcttatgggcggtttaacaaaacatgtaccaattacaaaaacttcttttttagtgggtacgctttctctttgcggtattccaccttttgcctgtttttggtctaaggatgagattcttaatgatagttggttgtattcacccatttttgcaataatagcttgttgtacagcaggattaactgcattttatatgtttcggatctatttac

SEQ ID NO: 151658 - DNA, 240 bp, Glycine max
gtggttcatcccctgaaggtctctccggaggatctttacctcggaacatctaagaaactctctctttcacgaaacgtgctgtgttcaaaatgcaatgggaagggctcaaagtctggggcttcaatgacctgtgctggttgccagggtactggcatgaaggtgtctattaggcaccttggtccttctatgattcagcagatgcagcatccttgcaatgagtgtaagggtactggagagaca

SEQ ID NO: 151659 - DNA, 236 bp, Glycine max
ctcccttatgagcaagcacttactagggaggattctactactgggcttcattatgattgctcagctcacatgctatgggttggggaacgtacccgccaacttgatggtgctcatgttgaattcttgagaggagttgctaatccacttggcatcaaggtgagtgataagatggttcccgatgaacttgttaagctgatagatattctgaaccctaaaaacaagcctggaagaattac

SEQ ID NO: 151660 - DNA, 238 bp, Glycine max
cagttattgatgcgcctggacatagggatttcattaagaatatgattactgggacatcccaagctgactgtgctgttcttatcattgattcgaccactggtggttttgaagctggtatttccaaggatggacagactcgtgaacatgctctgctttcattcacccttggtgtgaaacagatgatttgctgctgtaacaaaatggatgctactacacccaagtattccaaggccaggta

SEQ ID NO: 151661 - DNA, 243 bp, Glycine max
attgggagaaggttctgatacccttaaaatggagtgcagctgcaaaggtgaacttgcactggcacaccaagaatgtgcagttaaatggtttagcattaaaggcaacagaacatgcgatgtgtgcaagcaggaagttcagaacctacccgtcactcttctacgagttctaaatggccagacactttacttgacaaggagtagaagccaacaatacagggtttggcaaaatgtccccattcttgt

SEQ ID NO: 151662 - DNA, 247 bp, Glycine max
gcttagaggggttcagaagactgacattcagaggggaatggtgttggctaaaccaggcacgattacgccgcacaccaagttctcagcgattgtttatgttttgaagaaagaagaaggtggtaggcattcacctttctttgcagggtataggcctcagttttacatgaggaccaccgatgtgactgggaaggttacgtctatcatgaatgataaggatgaggagtccacgatggtgctgcccggtgac

SEQ ID NO: 151663 - DNA, 251 bp, Glycine max
gccatctagactgcaatcatggctgatggaccacagcatccatcagttgttcagaagctagctggacagtcttacctggtgtccaggctaagccccaactttaactctgggaattattcctcgactggctcttacttcaatggaggactgcactcttctgggttggctgttgtgtcgcctggatctccagttactgtgcatgctccagcagagaaaggagtgagtggatttctagtggattttctgatggg

SEQ ID NO: 151664 - DNA, 230 bp, Glycine max
aatcggctcgagtggaggcacaaacatgaatgctatttataataggtagggttcctaattctaagaggctgaatttagaaactgtaggtgttgagcttgacaacactggagcaataaaggtggatgagtattcccgcacaagcatacctagcatatgggctgtgggtgatgtcacaaaccgaatgaatctaactccggtggccttgatggaagcatcgtactttgctaaa

SEQ ID NO: 151665 - DNA, 238 bp, Glycine max
gatgggcaacatcgtgaaatcgctggagtcatcgctggccacggggaacctccagaagatgtcggagaccatggactcgttcgagaagcagttcgtgaacatggaggtccaggccgagttcatggagagcgccatggccggatccacctccctctccactcccgaaggagaggtcaacagcctcatgcagcaggttgccgacgactactgcctcgaggtctccgtcggcctcccgcag

SEQ ID NO: 151666 - DNA, 235 bp, Glycine max
acacagagagaagcgtcttaataaacgctcttctctgaaaaacctgatttcttctcttcttctcttctctttcgtttcgatcttcgatctctgaaaatgagagagtgcatttcaatccacatcggtcaggccggtattcaggtcggaaacgcctgctgggagctctactgcctcgaacacggcattcagcctgatgggcagatgccaagtgataagactgtttggtggaggtgat

SEQ ID NO: 151667 - DNA, 240 bp, Glycine max
atctacaccgattcggctcgaggtcttgcaattgaagttgaagtattgcccttctctcttcaactccaaacacaagacagcttcatccatggctgcctccgtctccactgtcggagctgtcaacagagctcttttgaacctgaatgggtctggacctggggtttcagctcccagttcatccttctttgggagcagcttgaagaaggttattggctcaagggtccccaacacaaagatttc

SEQ ID NO: 151668 - DNA, 241 bp, Glycine max
tctgatattggtccttggtcactcgtggactcatcagctcaaagagatgttatcatgagaatgatggcaagaaactcaatgtcagaaaagcttgctgaagacattgatgctgctgtcaagagactctcagatgaagcatatgaaattgcgttgagccaaataaggagcaaccgcgaggcgattgacaagattgtggaagttctattggagactgagacaatgtctggagatgaattccgag

SEQ ID NO: 151669 - DNA, 234 bp, Glycine max
gcactcttcgttcttcgactgtctacgatctgctttctctgaattgtgaaaatgtcgctcggagaaactgcttgttcatacgcagctctcatccttcatgaagatggaattagtgtaactgctgacaagatcagcaccttgttgaaaactgcaaaggttccagtagactcttattggccaaccttgtttgctaaacttgctgagaagaaaaatcttggcgatttgatagcaaat

SEQ ID NO: 151670 - DNA, 236 bp, Glycine max
ggagtacagtaagctcccatacaaaacgttagctttcttcaaagctgcttatgcactttttgatgctgaattttatgtcaaagctgatgacgacatatatttaaggccagatcgtctatcattactactggccaaagagcgatctcatcctcagacatatataggatgtatgaaaaagggacctgttttcactgatccaaaactcaaatggtatgagccattgtcacatttgcttg

SEQ ID NO: 151671 - DNA, 185 bp, Glycine max
gtactactacaagggaagaaaaacttagctactaaggaaggatcaaagagaatggctcaagcaatggcatcaatggctggcttgcgtggttcctctcaggctgtgttggaaggtagccttcaggtgagtggctccacacgcttgaatgtggggagtggaagcatggtggcctcagtcccacgtgc

SEQ ID NO: 151672 - DNA, 238 bp, Glycine max
atttcctctcagaaccctcgatcactcccacgcgctcctatatcctctccttcaccgtcgctctctccaacgatcacaacaacatcgtcatcccatggcaaacgccgcatctggtatggcagtccatgatgactgcaagttaaggtttttggagctgaagacaaagaggacacaccgtttcatagtttttaagattgaggagcagcagaagcaggtcattgtggagaagcttggtgag

SEQ ID NO: 151673 - DNA, 240 bp, Glycine max
ggcagatcttacggatgcaaattctgcaacacccctcttgccctcgctgatcacattctctctcggaacttcaactgcagtcaagggagagcataccttttcagcaaagttattttgttatggatgattttggtggtcctccccaccttcagggtccttcccccaccctcagggtgaacgtaacgcttgggcctcaggtggacagaatgatgatatctggactgcacaccgttgaagaca

SEQ ID NO: 151674 - DNA, 231 bp, Glycine max
gttgcacaggatgttgaatgaggatgaactgagagatgcagtattgctcgtatttgctaacaaacaagatcttcccaatgcaatgaatgctgctgaaattaccgacaagctgggtctccactctctcagacagcgccactggtacatccagagcacctgcgcaacctctggggagggtctttatgacggtttcgactggctttccaacaacatagccaacaaggcttgatg

SEQ ID NO: 151675 - DNA, 230 bp, Glycine max
ctcaggtggttgccgagcacactgtcagagcccttcagagaaccgtgcctgctgcagttcctgctgtcgttttcttgtctggtggccagagtgaggaggaggcatccgtcaacctcaacgccattaaccaggtcaatgggaagaagccatggtcactctctttctcctttggaagggcacttcaacagagcacccttaaggcatggggcggaaaagaagagaatgtgaag

SEQ ID NO: 151676 - DNA, 231 bp, Glycine max
tgccagtagtcatatgcttgtctcaaagattaagccatgcatgtgtaagtatgaactaattcagactgtgaaactgcgaatggctcattaaatcagttatagtttgtttgatggtatctactactcggataaccgtagtaattctagagctaatacgtgcaacaaaccccgacttctggaagggatgcatttattagataaaaggtcaacacaggctctgcctgtatgctt

SEQ ID NO: 151677 - DNA, 230 bp, Glycine max
gaaataactgacaagcttggacttcattcactccgtcaacgccactggtatatccagagcacttgtgcaacttctggagagggtctctatgagggtttggactggctttctaacaacattgccagcaaagcatgagacatttgaaaaattttggtcttgtctggtgatttcatgcgagtctggcggttcttggagtaaggtgcttatcctttctagcgtatgttgtaata

SEQ ID NO: 151678 - DNA, 228 bp, Glycine max
ctcgagccgttttgttgttctgtgtttgtgtttgttttttctctcacctgaaaatgtcttagctgccttggtaactgtggttgcggaagctcctgcaagtgcggtcacggctgcggaggctgcaagatgtacccagacttgagctacactgagtcaaccaccaccgagaccttggtcatgggagtggcacctgttaaggctcaatttgagggtgctgaaatgggtgtg

SEQ ID NO: 151679 - DNA, 229 bp, Glycine max
aaaaaagagaaacaaatggcagcactgggtggctttaccgacatcaccggagcacagaacagcatcgatatcgaaaatctcgctcgctttgctgttgatgaacacaacaaaaaagagaatgcagttctggagtttgtgagggtgattagtgcaaagaaacaagtggtttctggcaccttgtactatatcactttggaggcaaatgatggtgtgacgaaaaaggtttatg

SEQ ID NO: 151680 - DNA, 229 bp, Glycine max
tctgagaggaggcgtcgcgatcggattaatgaaaagatgaaagctctgcaagaacttatacctcgttgcaataagtcggacaaagcttcaatgctggatgaagcaatttcgtacttgaagtcattgcagttacaagtgcagatgatgtccatgggatgtggaatggtacctgtgatgtttcctggaatccagcagtacatgccagcaatgggaatgggggttggaatgg

SEQ ID NO: 151681 - DNA, 227 bp, Glycine max
atacatcaagcgtggaatagaagctgatggtattgaggcactgtacaagaaggttcatgctgccatccgtgctgatccttctctcaagaaatctgagaagcagcccccgaaggaacacaagaggtacaatctgaagaaactcacttatgaggagaggaaggctaagttgattgctcgtgtggcggctatcaactctgctgctgataatgatgaagatgatgagtgaa

SEQ ID NO: 151682 - DNA, 221 bp, Glycine max
aaggattctacccgccgctcgatgggaattgcgcttcaaggcgtctcgtagggctaatccgcctcacgagggtcaccaacggcacgtgcctttggggggccgaggccccctactgctggtcggcaaacggacggcgggcgcacgcgtcgcttctagcccggattctgacttagaggcgttcagtcataatccaacgcacggtagcttcgcgccactggctt

SEQ ID NO: 151683 - DNA, 228 bp, Glycine max
ctcgagccgttttgttgttctgtgtttgtgtttgttttttctctcacctgaaaatgtcttgttgcggtggtaactgtggttgcggaagctcctgcaagtgcggcaacggctgcggaggctgcaagatgtacccagacttgagctacactgagtcaaccaccaccgagaccttggtcatgggagtggcacctgttaaggctcaatttgagggtgctgaaatgggtgtgc

SEQ ID NO: 151684 - DNA, 189 bp, Glycine max
ggaagaagccttttgctggttcatcccatgcaaagggtattgttcttgaaaagataggtattgaggctaagcagcccaactctgccattcgaaaatgtgccagggatcaactcatcaaaaatgggaagaagattgatgcattcgtgccaaatgatggttgcttaaattacattgaagagaatgatgaag

SEQ ID NO: 151685 - DNA, 225 bp, Glycine max
gttactctcacacatgtctcgctccgtgcctttggtttcaaccatttttgtgctgcttctgcttctggtggccactgagatgatggggccaacaatggtggcagaagcaagaacttgtgagtctcagagccaccgtttcaaggggccatgtttgagtgacaccaactgtggctctgtttgccgaaccgaacgtttcactggaggacactgccgtggcttccgtcg

SEQ ID NO: 151686 - DNA, 229 bp, Glycine max
gatcatacacttagttgcttccaattaagatggttctgctagagaagctctgggatgatgttgtggctggccctcaacctgagcgtggccttggcaagctcagaaaactcaccaccctcaagactattgatgaaggagaaagtagcaagctgcagaagacgttgtcgatgccgtcgacacagacaaccccgatgactccgacgactccaacgacaccgggatcggcccg

SEQ ID NO: 151687 - DNA, 226 bp, Glycine max
gttcaaaatgatgttcgccttgaaatatgtaccgagaagaaaacgattctgtcagttgaagacatcattgctttgattggtgataagtgtgatggagttattggacagctgactgaagactggggagaacagttgttctctactttgagcaaagccggaggcaaagctttcagtaacatggctgttggttataacaacgtggatgttgatgctgcaaacaagtatg

SEQ ID NO: 151688 - DNA, 230 bp, Glycine max
tgccttaactggcggtgccgcaacggcggcgacgtcttcgccggagagttctgcttctagggtccagtctttccactcttcggcgcgctggcagctccacttcaacgagctcaaagaaaccaataagctcgttgtgatagatttctcggcgtcgtggtgcggcccttgcaaattcatagagccagcgattcacgccatgtccgaaaagttcaccgacgttgacttcgtca

SEQ ID NO: 151689 - DNA, 228 bp, Glycine max
cgaggtcggattcgtttgaggagaagaacggcgtgaagcttccgagttacagatgggacaacattaacggagactcgtttgacgataagtcgaggattccggatccgcagaggatgattagggcttattgccaagccgcggcgacgctgaatcttctcagagctttcgccaccggtggttatgctgctatgcacacggttactcagtggaatttggacttcacggatc

SEQ ID NO: 151690 - DNA, 179 bp, Glycine max
gtttttgtgtgtcgcttcttcgtaggtgcagctgcaatggtgaagggacgccaaggagaacgtgtcagactctacgtgaggggtacaatccttggatacaaaaggtccaagtcaaaccagtatccaaatacatccctgatccaaattgagggtgtgaatgccaaaggagatgtatcatt

SEQ ID NO: 151691 - DNA, 229 bp, Glycine max
caacgtttcactgctgccactctagaacatggcatgcaccccccgatttctccaaaaccagaattgcgtgctttgatggatcagatggctgtcattgctactgaggaataccgttccattgtattcaaggaaccacgctttgttgagtatttccgcctggctacaccggagttggagtatggaaggatgaacattggaagtcgaccagcaaagagaaagcctagtggag

SEQ ID NO: 151692 - DNA, 228 bp, Glycine max
ccgaaggagatggcagcgacgatccggctcacggtgccggccggaggagctcggcaggcgccaccggttggaccggcgctgggtcagtaccggctgaacctgatggcgttctgcaaggacttcaacgcccgcacccagaagtacaaggcccagacacccatggccgttacgataacggcgtacaaggacaacaccttcgagttcaccgttaagtcgccgccggtgtcg

SEQ ID NO: 151693 - DNA, 226 bp, Glycine max
ggtgaactcaaggacgagcttttctgcatccgttttccttctattgaaaattgcaaaagcttcatggaaacattccaagaagttgctgaatcccagaaggcagaggatgagaaggaatcagctgatgcagctggtcttattgagaaattaagtgttgaagaaaaggctgatgcagagaagaaggatgaagagaagtctgaggacataactgtggagatagaatctg

SEQ ID NO: 151694 - DNA, 215 bp, Glycine max
aaaggattctacccgccgctcgatgggaattgcgcttcaaggcgtctcgtagggctaatccgcctcacgagggtcaccaacggcacgtgcctttggggggccgaggcccctactgctggtcggcaaacggacggcgggcgcacgcgtcgcttctagcccggattctgacttagaggcgttcagtcataatccaacgcacggtagcttcgcgccaa

SEQ ID NO: 151695 - DNA, 223 bp, Glycine max
aaaggattctacccgccgctcgatgggaattgcgcttcaaggcgtctcgtagggctaatccgcctcacgagggtcaccaacggcacgtgcctttggggggccgaggccccctactgctggtcggcaaacggacggcgggcgcacgcgtcgcttctagcccggattctgacttagaggcgttcagtcataatccaacgcacggtagcttcgcgccactggcttt

SEQ ID NO: 151696 - DNA, 229 bp, Glycine max
atcttttatacccagccctcccttttcttttggtaagcaaactgattcccatttcatccatgctatcttcctttgatccgaacctcctccccataggaaccttcgctgaattttgatcagtttcgccgctgtttcgctaggtaacctgaaaaaagaaagaaaatagattgggatagatgatagggtggactgtataagggtcactctccccccaaaggatagacatctt

SEQ ID NO: 151697 - DNA, 229 bp, Glycine max
aacgaatcgcaaaaagacagatcatggcgatggcaaacttggctcgacggaagggttacgccgtcgttttgtcgtcgacgtcgtcgctttgtctgacaaggtggagggggttcgcgtccggatctgacgaaaacgacgtcgtggtcatcggcggcggtcccggcggctacgtagcggccattaaagcggcgcactgaggtctgaaaaccacttgcatcgaaaaacgtgg

SEQ ID NO: 151698 - DNA, 232 bp, Glycine max
gtttcactttctttgcatagtgctacctcctttctctgtgactctgaggtccattggatatgtctccgtcgttggatcttcctcccaagggtggcttctgttttgatctatgccgaagaaacgcaatgcttcaaaacaagggcctcaaagccccaacctttctcaaaactggcaccactattgtcggtttagttttccaggatggtgtcattcttggtgctgatactagggc

SEQ ID NO: 151699 - DNA, 281 bp, Glycine max
attccttttgataccccacatggggacattgttgtttttattggagattggtacacccgcaatcatacggatttgaggaaggcccttgatgatggaaaagatcttggcatgccggatggtgttctcatcaacgggaaaggcccttaccgatataacaacacacttgttcctgatggcattgattatgaaaccattgaagttcatcctggaaaaacttaccgacttcgtgtacataatgttggagtatcaacaagtctgaatttcaggatccagagtcataa

SEQ ID NO: 151700 - DNA, 276 bp, Glycine max
ctgtccgaagccacttgagagaaaatggcggtgcctctgctctcaaagaagatcgtgaagaagagggtaaagaagttcaagaggcctcagagtgacaggaaaatttccgtcaagactaactggcgcagaccaaagggtatcgattctcgtgttaggagaaagttcaagggatgcactttgatgccaaacattggttatggttcagacaagaagacccgccactatctccctaatggtttcaagaaatttgttgttcacaatgtgaaggatttggaa

SEQ ID NO: 151701 - DNA, 277 bp, Glycine max
tactcgagcgaatcggctcgagtgcagatgtctgtccaagaattacagcgcaaactcaacagcattggatttgttgaaaagatctgggagagcaagctctaggttgacaacatataggttcccattgaaggaagagttgaggccaaggctgaatcacaaacctgttagtgaccccaatagcaagttgaagatgggagatgtgattgaacttacgccagccatacctgacaagtctcttacagaatacagggaagaaatccagcgtatgtacgatcgt

SEQ ID NO: 151702 - DNA, 280 bp, Glycine max
tctcgagccgctcgagccgctaggaagaggctgatgagagacttcaagaggctgcaacaaaacccgcctgacagggatcagtggtgccccccaggataacaacataatgctgtggaatgctgtcatatttggtcctgatgatactccatgggatggaggcacgttcaagttgacactccaatttactgaggactatccaaataaaccaccgactgtacgatttgtgtctcgcatgtttcatccaaatatttatgctgatggaagtatttgtttggatata

SEQ ID NO: 151703 - DNA, 280 bp, Glycine max
aacaaacacaaaccgaaaaggcgaaaggggttttccgagtgagatctagggtttccatcgattcggagagaggatattgatcgaacgacctcagcgagcaaggacaggagtggagtactagatcatggattcggtgccttcgaattcgcatggaaacctcgatgagcagatttctcagctcatgcagtgcaaacccttgtccgagcaagaggtaagggtcttgtgtgataaggcaaaagagattttgatggaagagagcaatgtacagcctgtgaaaagt

SEQ ID NO: 151704 - DNA, 273 bp, Glycine max
agcgtctgtcatcgttattgaatgaggatcctgcaattatggaacgacgtagtgcgctcgcaaagagactagagttataccggagtgcacaagctgaaatagatgcagttgcttggtctaagtagatatatgtatgtcagatcacgtttatacgagagccagcagtgtcattattcattgtttccctatttccagttcattattcatactcattttttgttgtcatcttatccacttgtattgtcatcttaaatagatgagacgattctgaaa

SEQ ID NO: 151705 - DNA, 277 bp, Glycine max
gttatcgttggctatgtgtgtgcttccggcgatggttgtggccattcgcccagcaaagaaccctttttgcgtgaagggtcgtgtctactgtgacccttgccgtgctggttttgagacctcagctaccacctacattgctggtgctgagattatgttgcaatgcaagagcagggttagcaacgaggttgtgtacacgaagaaggggtacaccgactcaaccggagcatacacaatgtacgtggatgaggatcacgcagatcagatctgcagtgccaag

SEQ ID NO: 151706 - DNA, 273 bp, Glycine max
gttgcttttggtcgattttcttcaagtgtgaaaggctttcggaatatagacttgtttgtccagcacaacgatgggaaaaagatcatagatcctgaaagccagaaaaccttgtgttcatgcttaaaagaagagatgcttcatccgttgcgggtgacgatagtgaaccggggtccagacacagaacttctggttgctaatcctgtggagctgagtggaaaggggagaccccgtgtattctatgatgttacgttgactttaaaagcgttgggagta

SEQ ID NO: 151707 - DNA, 273 bp, Glycine max
ctcgagccgaatcggctcgagcggctcgagcattctcatatccacaatcaccccccctcgacactcgctcttcccttcctacggtggcgacaatgtcgactcctgctaggaagaggctgatgagagacttcaagatgctgctacatgatccgcctgcagggatcagttgtgccccccaggataacaacatgatgctgtggaatgctgtcatatttggtcctgatgatactccatggcatggaggcacgttcaagttgacactccaatttactg

SEQ ID NO: 151708 - DNA, 264 bp, Glycine max
ctgttggattacagaatgttggtcggcattatgaaacatgggaggcagggatcactggtccagttttgctccatggtcttgaccaaggacagaaagatttgacgtggaacaagtggtcatataaggttggcctaagaggagaggctatgaatttggtatctcccaatggagtctcgtctgttgactgggtccaagagtcacaagctactcaaagccggtcacaattaaaatggtacaaggcatattttgatgcacccgggggaa

SEQ ID NO: 151709 - DNA, 275 bp, Glycine max
tggggttggaggccgcagtggaggcagcggcggaattccttaacaaggcagtgaaaccagtgctggtaggtggtcctaaactgagggtggcaacagcatctgatgcctttgtcgaactggctgatgcgtgtggttatgcgcttgctgtgatgccgtcggctaaagggcaggttccagagcaccatccccattttatcggaacttattggggtgctgtgagcactgccttctgtgctgagattgtggagtctgcggatgcatacttgtttgctggt

SEQ ID NO: 151710 - DNA, 281 bp, Glycine max
tctcgagccgaatcggctcgagcgcttagttgtgagcaccaaaccataccacattgtttgcaaggcacaaaagcaggttgtaccaagagggtgaggacactactaacattgtctctcgcaggttggccctcactgttctcattggtgctgctgctgttggctctaaggttgcacctgctgatgctgcctatggagaagctgccaatgtgtttggaaagccaaagacaaacactgacttccttccatacaatggggatggattcaaactctcaattccctca

SEQ ID NO: 151711 - DNA, 277 bp, Glycine max
attctacccgccgctcgatgggaattgcgcttcaaggcgtctcgtagggctaatccgcctcacgagggtcaccaacggcacgtgcctttggggggccgaggccccctactgctggtcggcaaacggacggcgggcgcacgcgtcgcttctagcccggattctgacttagaggcgttcagtcataatccaacgcacggtagcttcgcgccactggcttttcaaccaagcgcgatgaccaattgtgcgaatcaacggttcctctcgtactaggttgaat

SEQ ID NO: 151712 - DNA, 278 bp, Glycine max
ctcgagccgctcgagccgatcaggtctccaaggtgaacagcctctggtcgatggaacaatctaggcaagcgaagtcggcaaaatggatccgtaacctcgggaaaaggattggctctgagggctgggcacgggggtcccagtcccgaacccgtcggctgtcggtggactgctcgagctgcttccgcggcgagagcgggtcgtcgcgtgccggtcgggggacggattgggaacgggcccttctgcgtctcttccccgggcgtcgaacagtcaactcagaa

SEQ ID NO: 151713 - DNA, 280 bp, Glycine max
ctcgtgcctctagggttatcatatctccatttccatttcctctctctcagtttccaagaatcttaagctatgggaaagtcttacccaaccgtgagcgctgattaccagaaggccgttgagaaggcgaagaagaagctcagaggcttcatcgctgagaagagatgcgctcctctaatgctccgtttggcatggcactctgctggaacttacgacgtgagctcgaagaccggtggtcccttcggaaccataaagcacccctccgaactcgctcacggcgcta

SEQ ID NO: 151714 - DNA, 279 bp, Glycine max
cgtagggctaatccgcctcacgagggtcaccaacggcacgtgcctttggggggccgaggccccctactgctggtcggcaaacggacggcgggcgcacgcgtcgcttctagcccggattctgacttagaggcgttacgtcataatccaacgcacggtagcttcgcgccactggcttttcaaccaagcgcgatgaccaattgtgcgaatcaacggttcctctcgtactaggttgaattactattgcgacactgtcatcagtagggtaaaactaacctgtct

SEQ ID NO: 151715 - DNA, 219 bp, Glycine max
accaatagggaattgcgcttcaaggcgtctcgtagggctaatccgcctcacgagggtcaccaacggcacgtgcctttggggggccgaggccccctactgctggtcggcaaacggacggcgggcgcacgcgtcgcttctagcccggattctgacttagaggcgttcagtcataatccaacgcacggtagcttcgggcaactggcttttcaaccaagcgcg

SEQ ID NO: 151716 - DNA, 277 bp, Glycine max
acaaatcaaagccatggccacctccaacttctctattgttctctccgtctccctagccttctttttggtgctacttaccaaggcacactcgaccgataccgtttctttcaccttcaacaagttcaacccagtccaaccaaacattatgctccaaaaaagatgctagtatttcatcctctggggtgttacaaatcaacaaaatttggaagcaacggcgtgcccacctcgggatctctcggtcgtgccctttacgctgccccaatccagatttgggaca

SEQ ID NO: 151717 - DNA, 182 bp, Glycine max
agtgtgaatgtgacgctgatattctctcttgcaagatatgaagctgtaatttttgcgatactggatggtcttgaggcatctgagttaaatgacctctctagagttacaagtgttgcctctttcttcgtcagtagagtggacaccctcattgacaaggcccttgagaaaattggcaccccagt

SEQ ID NO: 151718 - DNA, 272 bp, Glycine max
cgctcttgcaattattcctcttctcgcaatccgcactaaaattctagggttccgaaatggacgctgacggaaagatcaagaagggcgccggcggaagaaagggcggcggcccaaagaagaagccggtttcaaggtccgtcaaagccggtctccaattccccgtcggaagaattggccgttatttgaagaaaggaaggtacgctcagcgtgtcggtaccggtgctcccgtatacttggctgcagttctcgaatacctagctgccgaggtgctt

SEQ ID NO: 151719 - DNA, 273 bp, Glycine max
ctaaccccaaacaaaaccctagcacacttttatcgcttagtggcagcagcagtggcggcaagcaactccatccgcaatgggaatcgatttgaaggcaggaggtaagtccaagaagaccaagcgaaccgcccccaaatccgatgatatctacctcaagcttctcgtcaagctgtaccgttttcttgttcggaggactgggagtaacttcaatgctgttgtcctcaagcgccttttcatgagcaaggtcaacaagcccccgctatccctctctag

SEQ ID NO: 151720 - DNA, 271 bp, Glycine max
gtgactgccctggatttggcgatgctaaccttgctttacttggaaagctgtgtcctcggattcagcatgttgaattgagtggacttcagggagtaacagatgcagggtttcttccactgctggagagctctgaggctggtctggttaaagttaatctaagtggttgtgtaaatctgacggacagagtagttttgtccatggttaactcacatggatggactctcgaggtgctaagccttgatggttgtaaaagagtcagtgatgctagctt

SEQ ID NO: 151721 - DNA, 278 bp, Glycine max
ccttcctataatccaccaggttacaaagcaccatcttataatccaccagcttacaagtcaccttcctataacccaccaggttacaaagcaccatcttataatccaccaggttaccagccaccttcatacaatccaccaggttacaaagcaccaacttataatccaccagcttacaagtcaccttcctataatccaccaatttacaagccaccttcctacaatccaccaggttacaaagcaccatcttataatccaccatcttacaagtcaccttccta

SEQ ID NO: 151722 - DNA, 273 bp, Glycine max
tcttgcattgtttgtactccccccggaacccaaagactttgatttctcataaggtgccagcggagtcctaaaagcaacatccgctgatccctggtcggcatcgtttatggttgagactaggacggtatctgatcgtcttcgagcccccaactttcgttcttgattaatgaaaacatccttggcaaatgctttcgcagttgttcgtctttcataaatccaagaatttcacctctgactatgaaatacgaatgcgcccgactgttcctgttaatc

SEQ ID NO: 151723 - DNA, 281 bp, Glycine max
cctttactgatattgtgatgtgggttttttgccccttcaatggacctgccacccttaaagtggcattgatgaacattgagatgaacaagataggagaacacataggtgactgggagcacttcacccttaggataagcaacttcactggagagctatggtctgtttacttctctcagcatagtggaggtggatgggtaaatgcatttgatctggagtttattaaggggaataagccaattgtttattcatcaaaagatggccatgctagcttccctcatcct

SEQ ID NO: 151724 - DNA, 280 bp, Glycine max
ctgcgactgcgcttcagcacaatgggtgcctacaagtatgtttcggagctatggcgcaagaagcagtctgatgttatgagattcttgcagcgggtgaggtgctgggagtatcgccagcaaccttctattgtccgtttgacaaggtctactcgcccagataaggctcgtcgcttgggtttcaaggctaagcagggttacgtgatttaccgtgttcgcgtacgaaggggtggccgtaagagaccagttccaaagggtattgtttatggtaagcccaccaacc

SEQ ID NO: 151725 - DNA, 274 bp, Glycine max
gtgctacgtgatagacctcctggtcatgattgggaacttgaacctggtgtccacatgcggtgactacttgtttggtatgctacagggaacaagatcagctctgtatgccaataaccgagagtccatcacagttactgtacaagaagtgacacctagaacagttggtgctcttattgcactctatgaacgagcagtaggaatttatgcctcccttgtcaacataaatgcttatcatcaaccaggtgtggaagctggtaaaaaagcagcaggtgaa

SEQ ID NO: 151726 - DNA, 270 bp, Glycine max
tatcaacctaaatatgttaagacacacacaagctatgatggccataggatacttcataactctgatttcgtatttgtgaggaacagtggcttctgccagagaaatactcttggacagtactttggccttggatccgagacacgaggcacagctacggatgttccagatccttttgggatagctgtaggggatcctgcagaaattcctgaagggtatgaggagaagtggatgttcaatatccatgccattgatacacgcggtgtagtggat

SEQ ID NO: 151727 - DNA, 271 bp, Glycine max
caaacccaccaccaccatcgccgccactctcacaccacccacaacaacctccaccgccgccgccacccaccctcgccgccgcgaattcttgtccatcatcaccgccaccacatggctggtccctctgagcccggcactggcttcctcggacgaggaatacatgaaggagaccgaggaagtgatcaacaaagtgaggacaacaatcgtgatggacaagaatgaccccaacgtggcaaccgcggtggcggagttccagagaaacctcgaactc

SEQ ID NO: 151728 - DNA, 198 bp, Glycine max
cggccccccaaaggcacgtgccgttggtgaccctcgtgaggcggattagccctacgagacgccttgaagcgcaattcccatcgagcggcgggtagaatcctttgcagacgacttaaatacgcgacggggtattgtaagtggcagagtggccttgctgccacgatccactgagattcagcccttgtcgctttgattcgt

SEQ ID NO: 151729 - DNA, 269 bp, Glycine max
ctgagctcaaagtcaaggagatcaagaatggaaggctggccatgttctctatgtttggattctttgttcaagctattgtcactggaaaaggcccattggagaacctcttggaccaccttgacaaccctgtggctaacaatgcttgggtctatgccactaagtttgccccaggatcttaaatgtatatgacttcttcttccctaatccctatgatcatatcccttgtgtttgcctttgtgatttatgtgtagattatatgatcataataa

SEQ ID NO: 151730 - DNA, 275 bp, Glycine max
aagtaccgcaaattggctgagtctgtgccccttgctattgaagagtaaaatcatgtttgaagagaacatgaatggagaaaccggcttttggtcgtttggagtcttatggagctttcataaataaagccattgaattttgattgtgatctgtttttggatttaaagagtctaaaaaaaaaagtgtcgttgatttttgatattttgcgtaggttttgtgtaaaacaaaaaacaaaaaaatagttttttttttattcttttcttttttgttgttgcaa

SEQ ID NO: 151731 - DNA, 274 bp, Glycine max
gcgtcgtgtcgtgcgctgttcctctgtctgtcgtttttgttttcagaccaaaccctagctccgcatcgcaaccatgtcgaccaagcaaggtggaaaagctaagcctttgaagaaacccaagtctgataagaaggattacgacgaggttgacatggctaacattcagaagaaaaaggaagaggagaaggcgctaaaggagttgaaagccaaggcgcaacagaagggaagctttggaggttctgggctcaagaaaagtggaaagaaataagggctc

SEQ ID NO: 151732 - DNA, 274 bp, Glycine max
  unsure (1)..(274): unsure at all n locations
acaatctcatctccgatctcaaaatgcccgcatgtttatggagctcgcttgaccaccttcgaagactccgagaaggagagtgaatacggttacgttcgcaaggtttcaggacccgtcgtcgttgcggatggcatggctggtgctgctatgtatgaactcgtgcgtgttggtcatgataatctcattggtgaaattattcgtctcgaaggggattctgctaccatccaagttaaaaaaanttttnnnagcactgatggttaatgatccggtctta

SEQ ID NO: 151733 - DNA, 265 bp, Glycine max
aaggagtctgacatgtgtgcgagtcaacgggcgagtaaacccgtaaggcgcaaggaagctgattggtgggatccccctgtgggttgcaccgccgaccgaccctgatcttctgtgaagggttcgagtgagagcatacctgtcgggacccgaaagatggtgaactatgcctgagcggggcgaacaggaggaaactctggtggatgcccgcagcgatactgacgtgcaaatcgttcgtctgacttgggtataagggcgatagactaat

SEQ ID NO: 151734 - DNA, 275 bp, Glycine max
cttagtcttcttaatttcctcactcgcaagtcacaccaatggcaaagctattcaatttcctccctctcctcttcctcaacatcttcattcaaacaatttcagcccaagtagcaccagcaccagcgggccccaccaacatcacccaagttcttgagaaagcaggccaattcacaaccttcatcaaacttctcaaggcctcacaaatagctgatagaatcaattcgcagctcaacaactcaaaccaaggcctaaccgtatttgcacccactgataat

SEQ ID NO: 151735 - DNA, 267 bp, Glycine max
gtttcattgccgccggtttcgcaggaatcattctggaagaccagattgctccgaaagcgtgtgggcacacgctcgggaggaaagtgataccgagagaggagggcgttatgaagattagagccgccgtggatgcgagaagagagagtgggtctgacattgtgattgtggcgcgcacggatgctcgacaagctgtgtccttggaggaagcgttgacgacgtgcaaggcttatggggatgctggggccgatgttcttttcatagacgcac

SEQ ID NO: 151736 - DNA, 271 bp, Glycine max
  unsure (1)..(271): unsure at all n locations
tcgccggtaaggttccgccggcgcctcccgtnccgcccagaccggcggctcccggttggaacaccggtggttccttcacttccacatcaccggcgtcctcgtcggaaccggaagtcgccggcgcttcggtcggcttttcaggaaacgagcatttcgccggcgaatttcgtgtatccgcttttcattcacgaaggtgaagaggatactccaattggggctatgcctggatgctacaggcttgggtggaggcatggacttgtagaagaggttg

SEQ ID NO: 151737 - DNA, 269 bp, Glycine max
ctcgagccgcaatcggccagcaccaacagcatcggcggcgacagtcactctccgacaacaacacttccgcggcgaaaaatgtctctggtggcgaacgaggatttccagcacattctgcgtgtgctgaacaccaacgtggatgggaagcagaagataatgttcgctatgacctccatcaagggtattggaaggagattcgccaacatcgcttgcaagaaggccgatgttgacatgaacaaaagggctggtgagttgagtgctgcagagtt

SEQ ID NO: 151738 - DNA, 274 bp, Glycine max
cacatcgcagagaagaacagagagagatccatccatcaattccaatggccgatcagctcaccgacgaacagatctccgagttcaaggaagccttcagcctcttcgacaaggacggggatggttgtattaccaccaaggaacttgggaccgtgatgcggtcacttggccagaacccaactgaggcagagctgcaggacatgataaatgaggttgatgctgatgggaatggtaccattgatttcccagaattcctgaatctcatggctcgcaagat

SEQ ID NO: 151739 - DNA, 276 bp, Glycine max
gctttatttaggtgacaaaactactcacagagaaagacactcggagaccttgcaagacttcatcaatggctgtcaaagtttatattgtgtactactccatgtatgggcatgttgagaaactagcagaagaaataaagaaaggggcttcctctgtggaaggtgttgaggccaaattatggcaggtacctgagacgctgcaggatgaggtgctcggtaagatgagtgcaccacccaagagcgatgtaccagtcattaccccgaatgaactatccgagg

SEQ ID NO: 151740 - DNA, 273 bp, Glycine max
ctcgagccgtatagcccaagccctatacaaccaaaccctaacacacacccatttgattcagtttccatggctagcctcaaggttgcatttttggctgcagtgctctgcatggttgtggtgagtgcacccatggcacatgcagctatcacgtgcgggcaggtgacgaatagcctgatcaattgcatcggttacctccagaacggaggaacgccgccgtcgggatgctgcaacggagtgaagagcctcaatgccgccgccaagaccaccgccgac

SEQ ID NO: 151741 - DNA, 266 bp, Glycine max
gcgttgcttgctgatggtgtgggagaggctgcgcagatctactgcgagttggttcggctcggggcgaacatgcgagtcatcgatattggaggtggactgggcatagattacgacggttccaaatcgtgtgactctgatatttccgttgagtacagtctcgaggattatgcagtcgcggttgttcacgcggttcagtgtgtgtgcgaccgaagtctcgtgaaacacccagttatcttgcacgagagtgggagagccatcgtgtctca

SEQ ID NO: 151742 - DNA, 279 bp, Glycine max
gatcgagataactagaaacagtgtgatgaaaatgaaggtccttgttttcttcgttgctacaattttggtagcatggcaatgccatgcgtacgatatgttccctctccgaatgaacactggctatggtgcccgtactccggaggtgaaatgcgcaagttggaggcttgctgtggaagcacacaacatctttggctttgagaccattcctgaagagtgcgttgaagcaacaaaggaatacatccatggcgaacaatatagatcagactccaaaacagttaa

SEQ ID NO: 151743 - DNA, 269 bp, Glycine max
aattcattctcccgcaacaagcaacgtagtaacagggatcacaggaaggttgtctgcgcctgcatcgcacctccgcagaacttcaagagtcaggactcttccgccattaatttcaatggttcgtccaaatcagaacaactgagcacggcgtgggatcatgaggatgattctgatgttcttattgagtgtagagatgtgtataagtcttttggggaaaagaaaatcttaaatggtgtcagcttcaagattagacatggtgaagctgttgg

SEQ ID NO: 151744 - DNA, 268 bp, Glycine max
gttacttattcagtagttcttctctctcgaattttcactcactttctgtgcatcaatggcggcgataagtctccggaaggggaacacgcggcttccgccggaggtgaaccgcgtgctgtacgttcggaaccttcccttcaacatcaccagcgaggagatgtacgacatctttggcaaatacggcgccattcgccagatccgcatcggcaccaacaaggacactcgcggaaccgctttcgtcgtctacgaggacatctacgacgccaaa

SEQ ID NO: 151745 - DNA, 267 bp, Glycine max
aaggattgacagactgagagctctttcttgattctatgggtggtggtgcatggccgttcttagttggtggagcgatttgtctggttaattccgttaacgaacgagacctcagcctgctaaatagctatgtggaggtaaccctccacggccagcttcttagagggactatggccgcttaggccacggaagtttgaggcaataacaggtctgtgatgcccttagatgttctgggccgcacgcgcgctacactgatgtattcaacgagtc

SEQ ID NO: 151746 - DNA, 268 bp, Glycine max
gagaggaatggagctaccttaggggtggccttacaactattgatcgtgactacggatggatcaataacatccaccacgacattggaacccatgtcattcatcacctctttcctcaaataccacactatcacttaatagaagcaactgaagcagctaagccagttcttggtcaatactaccgtgaaccaaagaagtctagtcctcttccaatttacctcattggagaattgttaagaagcatgaagaaagaccattttgtcagtgacag

SEQ ID NO: 151747 - DNA, 270 bp, Glycine max
gtgactgtgctctgctctcatctcattcatattcatttcaatggcaactcaaggtcaagtcattacctgcaaagctgcggtggcctgggaacccaacaagcccttaaccgtccaagacgttcaggttgctccgcctcaggccggcgaggtccgtgtccaaatcctcttcaccgctctctgccacaccgatgcttacacttggggcggcaaggatcccgaaggtctcttcccctgtattctcggccacgaagctgcagggattgtggagag

SEQ ID NO: 151748 - DNA, 271 bp, Glycine max
atggagactactaagagtagttctgcagtggaaaagagctatgaattgcctgatggacaggtcattacaataggttctgagagattccgttgcccagaagtactgttccagccttctctgattggtatggaagctactggaattcatgaaacgacatacaattccatcatgaaatgtgatgttgatattaggaaggatctgtatggaaacatcgtgcttagtggagggtctactatgtttccgggaattgctgatcgcatgagcaaggaaa

SEQ ID NO: 151749 - DNA, 270 bp, Glycine max
ctcgagccgctcttttccggcgccggtcgcccttactggcgtacctccggccacgacagacgccagcaacaacaaccgttggtcgccgtccctctccgctgcgctctacaacgtcgacggctggggcggcccctactttgccgtcaacaccgccgggaacatctccgtgcgcccacacggttccgacacgctgtcgcaccaggagatcgatttgctgaagattgtgaagaaggcctccgatcccaaatctcttgggggtctcagcctcca

SEQ ID NO: 151750 - DNA, 273 bp, Glycine max
tttacgttttagctgtgtacctctgctctcacttccttccttccttccttcaattgttctaactcttagcagccatggcgagcaccaaagttcagagggttatgactcagcccattaacttgattttcaggtttcttcagagcaaagcacgcattcagatttggctatttgagcaaaaggatttgaggattgaaggcagaatcctccgttttgatgaatacatgaatttggttcttgatgatgctgaagaagtgagcatcaagaagaagagca

SEQ ID NO: 151751 - DNA, 274 bp, Glycine max
gtgggatgtgcttctttttgaaggaaaccgagtcatgctctttagaactgcagttgctttaatggagctatatggtcctgcgttggtaacaacaaaggatgctggagatgcagttactttacttcagtcgttggctggctccacatttgatagcagtcagcttgtactgacagcttgcatgggttaccaaaatataaatgaaactcgtttgcagcagttgaggattaaacatcggccagctgtaatagcttccattgaagaaagatcaaaaggg

SEQ ID NO: 151752 - DNA, 215 bp, Glycine max
ccgactcggagtttgagccaggttctgaacatgatggaccaggtcatggacaatccgttcctctccgcgtcgcgcgggatcggagctggcgctggagtgcgtcgcggatgggacgcgagggagacagaggatgctctgcatctgcgcgtggacatgcctgggctcggcaaggaagacgtgaagatctccgtggagcaggacactcccaataacca

SEQ ID NO: 151753 - DNA, 269 bp, Glycine max
gttcaccaattaagctttcaagagacaaactgctttgaaaaatgggatccaaggttgttgcatccgttgcccttctcctctccatcaacattcttttcatttccatggttagctccagcagccactacgatccacagccccaaccttctcacgtcactgctcttattacacgacctagttgtccggatctgagtatttgcctcaatattttaggcgggtctctaggaaccgtggatgattgttgtgccctcatcggtggtcttggtgac

SEQ ID NO: 151754 - DNA, 278 bp, Glycine max
ttccatcaggatttggcgcggaagaagattcagtaaaacctcttcctccattccaagctgttcttgataagaaaagaaaaattagaagggaaattgaagcagctgggatcccttacacttctatatctgcaaattgttttggtgcatactttgtcaattatttacttcacccatatgaaaatgtgaaggatattactgtctatggcaacggggaagcaaaagctgtgctaaattacgaagaagacattgctatgtatactgttaaagcggcaaatgat

SEQ ID NO: 151755 - DNA, 275 bp, Glycine max
gcttgcttgaatttacttggtgtgaagggtgctagcaaggagtcaccaggatcaaactcaagactcttggccaccattgttgctggatctgttttagcaggagagctgtctctgatgtctgccattgcagcagggcagctagtgaacagccacatgaaatacaacagatcaagcaaagatgtaaccaaaatatcatcatcttgaggtcagggacgtggttgcagtcattaattctggactctagaataaaaaaattgagggtaagcggatttagg

SEQ ID NO: 151756 - DNA, 274 bp, Glycine max
tgttattatagtttccaaaggcacgcagcgagtttaggcgcggcgggatcatcacgagattgcaaaatgaagttcaacattgcaaatcccaccactgggtgccagaagaagctggaaatcgatgacgacctgaagcttcgggcattttgggacaagaggatctcccaggaggtccttggtgacgccctgggtgaggagtttaaaggatatgttttcaaaatcactggtgggtgtgacaaacaaggattcccaatgaagcagggagtgttgaccc

SEQ ID NO: 151757 - DNA, 272 bp, Glycine max
gacaaactgctttgaaaaatgggatccaaggttgttgcatccgttgcccttctcctctccatcaacattcttttcatttccatggttagctccagcagccactacgatccacagccccaaccttctcacgtcactgctcttattacacgacctagttgtccggatctgagtatttgcctcaatattttaggcgggtctctaggaaccgtggatgattgttgtgccctcatcggtggtcttggtgacattgaagccattgtgtgcctttgcat

SEQ ID NO: 151758 - DNA, 273 bp, Glycine max
ctcgagccgcacaaacacaaacacatggcttcctccttcttctttctaacattgcttctcctctccattatctccgccgccaccccctgcccgccgtcagaacgggcagcactactggccttcaaagctgccctgaccgaaccctacttgggcatcttcaacacatggtcgggcaacgactgttgccggagctggtacggcgttgcctgcgaccccaccaccggccacgtcaccgacgtcaacctccgcggcgagtcccaagacccaatgttc

SEQ ID NO: 151759 - DNA, 276 bp, Glycine max
gcaaaggattctacccgccgctcgatgggaattgcgcttcaaggcgtctcgtagggctaatccgcctcacgagggtcaccaacggcacgtgcctttggggggccgaggccccctactgctcgtcggcaaacggacggcgggcgcacgcgtcgcttgtagtccggattctgacttagaggcgttcagtcatcatgcaacgcacggtagcttcgcgccactggcacttcaaccaagcgcgatgaccaattgtgcgaatcaacggttcctctcgtacta

SEQ ID NO: 151760 - DNA, 275 bp, Glycine max
cttcgtctcaaatctcttcgttccttcgattcgttccatttcatccaaaatggccaaagacccagttcgcgttctcgtcactggagctgcagggcaaattgggtatgctcttgtccctatgattgctaggggagtgatgttgggtcctgaccagcccgtgatcctccacatgcttgacattcctccggcagcagagtcattgaatggggttaaaatggaattggtggatgctgcattccctcttcttaaaggtgttgttgccacaactgatgtgg

SEQ ID NO: 151761 - DNA, 275 bp, Glycine max
ggttgattcggatctagagtcttcagtttctcctcgttgttcttcgctttcctgttttcaatttcgattctttcgttaatttaataagatgtttgggagggcaccgaagaagagcgataatacgaggtactacgaaatcctcggcgtctccaagaacgcttcgcaggatgatctgaagaaggcttacaagaaagccgccattaagaatcaccccgacaagggcggtgatcccgagaagtttaaagagctggcgcaacttatgaggttctgagtga

SEQ ID NO: 151762 - DNA, 276 bp, Glycine max
cttcggtcattttattttgtataataaaagaaagataataaagagaataatcatattaaatattaaatagaaaaaatggcccgatcatttatcaaaggccaatcttcggtagaagagaaggttcctttggaacacttatttctatttcagtataccgggtctctttctttcatttcaaaaaatttatagaatttcgattttgaaatgaaagaaaagtgtggggataaatataaatgacaaaaagatattggaacataatcttggaagagatgatgg

SEQ ID NO: 151763 - DNA, 274 bp, Glycine max
gcacaaagcgggttactgtctgttcaagctaccatctctctctctctttcttagtgcctccttgccagaagttaaaatggcccaagaaactttcctattcacatctgaatcagtgaacgaggggcaccctgacaagctctgtgaccagatctccgatgctgtgctcgatgcatgcttggagcaggaccctgacagcaaggttgcctgtgaaacctgcaccaagaccaacatggtgatggttttcggagagatcacaaccaaggccaacgtggac

SEQ ID NO: 151764 - DNA, 272 bp, Glycine max
gttggaagctcagcacacgaacctgcggagagtgacttaccttgtcttagatgaagctgatcgaatgctagacatgggttttgaacctcagatacggaaaattgtagcccagattcgaccagataggcaaacattattatggagtgctacatggccaagggatgttgaaactctggcaaggcagtttctgcacaacccatacaagatgtgaaagacataaaatgtgtgatcaattatgattttccaacaagcctggaagattatgtccacag

SEQ ID NO: 151765 - DNA, 272 bp, Glycine max
gcggatgttgacgcaatgtgatttctgcccagtgctctgaatgtcaaagtgaagaaattcaaccaagcgcgggtaaacggcgggagtaactatgactctcttaaggtagccaaatgcctcgtcatctaattagtgacgcgcatgaatggattaacgagattcccactgtccctgtctactatccagcgaaaccacagccaagggaacgggcttggcggaatcagcggggaaagaagaccctgttgagcttgactctagtccgactttgtgaa

SEQ ID NO: 151766 - DNA, 268 bp, Glycine max
gttcgaggtgtcaatggctggttctgctttctgttcctccaagtgctcgaagaggtgttctagagctgggatgaaggacaggtgcatgaagttctgcgggatttgctgcagcaagtgcaactgtgtgccatctgggacttatgggaacaagcatgagtgcccttgctacagagacatgaagaactccaagggcaaggccaaatgcccttgattattttttttttttcaccatccacacatcaacttcaagcctttgattcagtcacta

SEQ ID NO: 151767 - DNA, 271 bp, Glycine max
ctgcaaaggattctacccgccgctcgatgggaattgcgcttcaaggcgtctcgtagggctaatccgcctcacgagggtcaccaacggcacgtgcctttggggggccgaggccccctactgctggtcggcaaacggacggcgggcgcacgcgtcgcttctagcccggattctgacttagaggcgttcagtcataatccaacgcacggtagcttcgcgccactggctttacaaccaagcgcgatgaccaattgtgcgaatcaacggttcctct

SEQ ID NO: 151768 - DNA, 232 bp, Glycine max
ggcggcggcggtggcggtgcctgaacacgatgggaacaactccaactcgtcgggaatgacgatgaagggcgttcgaatctccggaagacccctttacctggacgtgcaggcaacatctccggtggacccgcgcgtgctcgacgcgatgctccctttctacctctctcgctacggaaaccctcactcccgcacccacttctacggctgggaatccgacgaggccgtggaacac

SEQ ID NO: 151769 - DNA, 273 bp, Glycine max
aaagaaggcgtcttcataaacgcctttcttctccgtttccgtttcctcgttcgaattcgctttttgatctgcgaaaatgagagagtgcatctcgatccacattggtcaggctggtatccaggtcggaaatgcttgctgggagctctactgcctcgagcacggcatcgggcccgatgggcaaatgccaagtgacaagacagttggcggtggtgatgatgctttcaatactttcttcagcgagactggtgctggaaagcacgtgccacgtgcagt

SEQ ID NO: 151770 - DNA, 276 bp, Glycine max
ggcttcaagaagagaatctcaatggaggcccaggagctgaagcgcgtgttccagatgttcgaccgcaacggcgacgggagaataacgaagaaggagctgaacgactcgctggagaacctgggcatcttcatctctgacaaggacctgagccaaatgatccagaggatcgacgtcaacggcgacggttgcgtggacatggacgagtttggggagctgtatcagaccataatggacgagcgcgacaatgaggaggacatgaaggaggccttcaacgtc

SEQ ID NO: 151771 - DNA, 274 bp, Glycine max
gcccggcgatgttgccaagacggaggagtgctggaccgacgttgaatattgcaagcaaaaggggttgtggtatccattgtcgaagactttagctgagaaagctgcttgggattttgctaaagagaatgatttggatgttgtggtggtgaatcctggcactgtgatgggtcctgttattccaccaaggcttaatgcgagcatggtcatgctcgtgcgccttctacaaggctgtgccgaaacatatgaggacttttttatgggatcggtccacttt

SEQ ID NO: 151772 - DNA, 272 bp, Glycine max
gctaacgatgctagagaatcttccttttttgatcttgtagcttcccaactcactcccaagaccaatggatcatcaactcctgtgaggggagagacagtggccaagttgaaggtggcaatcaatggtttcggacgcattggtagaaacttccttcgctgctggcacggccgaaaagactcaccccttgaggtcgttgttgtcaacgacagtggtggtgtcaagaatgcttcgcacctgcttaaatatgattccatgctgggaacttttaaagc

SEQ ID NO: 151773 - DNA, 273 bp, Glycine max
ccattgctacgaagggctatatagcataaacatttgagtcttcattgcacaatgtcgacctcttccattaacgggtggtgcctctcttccatctccccagccaaaacctctctcaagaaggccacattaggcccttctgtcttcgcaaccgttagcactccttcttctccttcttcttcttcttcttcttccttcccttctctcattcaagacaggcctgtctttgctgcccctgcccccatcatcaccccaactgtgagagaggatatggca

SEQ ID NO: 151774 - DNA, 270 bp, Glycine max
accaattaagctttcaagagacaaactgctttgaaaaatgggatccaaggttgttgcatccgttgcccttctcctctccatcaacattcttttcatttccatggttagctccagcagccactacgatccacagccccaaccttctcacgtcactgctcttattacacgacctagttgtccggatctgagtatttgcctcaatattttaggcgggtctctaggaaccgtggatgattgttgtgccctcatcggtggtcttggtgacattga

SEQ ID NO: 151775 - DNA, 269 bp, Glycine max
agcaaatattcaaatgagaactttgaaggccgaagaggggaaaggttccatgtgaacggcacttgcacatgggttagtcgatcctaagggacgggggaagcccgtctgatagcgctctgtgcgcgtactccgaaagggaatcgggttaaaattcctgaaccgggacgtggcggctgacggcaacgttagggagtccggagacgtcggcgggggccccggaaagagttatcttttctgtttaacagcctgcccaccctggaaacggctca

SEQ ID NO: 151776 - DNA, 270 bp, Glycine max
ggttgatgacaccaagagacagcacaaagacccttcgtttcaatcccacaacacactcattcctcattcttccactcccgcacaaaaatggcgtctttgcagcaccccacagcttccctccaatccaaacacgtcctaatcccccgaaacactcttacccagaaacccatcctcaacctctcctccctcccgggcaccaccttcacccccctcaagctcaaattcttcagcggcggcgccgtccgccgctccaccggcgcctcgggagcc

SEQ ID NO: 151777 - DNA, 268 bp, Glycine max
atcggtgggcaaggcatgtcgtggtcctctggttcagaatcagaagagtcagcgagccccaacaacctaatcccgtccctcccagacgacctcgcattgaactgcctaggacgcatccctcggtcccagcacccaaccctctccctggtctccaaacccatccgcaccctcctctcttccccaatcctcttcaccacgcgaaccctcctccaatgcacccaacccctcctctacctcactctccgctcacgccactcctctctcctcc

SEQ ID NO: 151778 - DNA, 269 bp, Glycine max
ctcgagcgcattcctgagaagtaccttgatgagaagaccatcttccaccttaacccttcagcgccgttttgtcattggtggccctcatggtgatgctggtctcactggaagaaagatcatcattgatacctatggtggctggggtgctcatggtggaggtgccttttcagggaaggaccctaccaaggttgacagaagtggtgcctatattgtaaggcaggctgcaaagagtgtcgtggcaaatggccttgctagaaggtgcattgtgc

SEQ ID NO: 151779 - DNA, 270 bp, Glycine max
agctcaacgagaacagaaatctcgtgtggaacaaaagggtaaaagctcgtttgattctgatttccagtacgaatacgaaccgtgaaagcgtggcctatcgatcctttagtccttcggaatttgaagctagaggtgtcagaaaagttaccacagggataactggcttgtggcagccaagcgttcatagcgacgttgctttttgatccttcgatgtcggctcttcctatcattgtgaagcagaattcaccaagtgttggattgttcacccac

SEQ ID NO: 151780 - DNA, 271 bp, Glycine max
atccccttctccttctctctctctttttcgcctcattccattttcatctatcaatggctccagtagcagcagcatcttcagattcaatcaagccaagagatgtttgcatcgttggtgttgcacgtacaccaatgggtggatttcttggtactctgtcatctctatctgccaccaagctaggctctatagctattgaagctgctcttaaaagggccaatgttgatccatcccttgtggaagaagtattttttgggaatgttcttagtgctaa

SEQ ID NO: 151781 - DNA, 267 bp, Glycine max
gccaagtgaaagtgagaaaaaataaaaatcaaagagcataatgtcagggatcattcacaagattggggagacccttcatgtgggagggcacaagaaggaggaggagcataagggtgagcaccatgctggagaatacaaaggggagcaccatggtgaacacagtagtgagtacaaaggagagcatcatggtgaacacaaagctggagagtaccatggtgagcacaagccagagcacaaagaggggttcctagacaaagtcaaggacaa

SEQ ID NO: 151782 - DNA, 267 bp, Glycine max
ctccgatgctgtgctcgatgcatgcttggagcaggaccctgacagcaaggttgcttgtgaaacctgcaccaagaccaacatggtgatggttttcggagagatcacaaccaaggccaacgtggactatgagaagattgtgcgtgacacatgcaggaacattggttttgacctctgatgatgttggtcttgatgctgacaactgcaaggtcctcgtcaacattgagcaacagagtcctgatattgctcaaggtgtgcacggccacctca

SEQ ID NO: 151783 - DNA, 264 bp, Glycine max
aaaatatttgggggcccgattgtcttgacttcaggcccgaaaggtggctgcgtgatggggtgttcgtgccagagtgtccctttaagtaccctgtttttcaggctggtgtaagggtgtgtttggggaaggacttggctttgatggagatgaagtccgttgtggttgcgttggttcgcaggtttgatattcgggtcgcccaaccggatcaggagccccggttcgcgcccggtctaaccgctactttgagaggggggtttccggttc

SEQ ID NO: 151784 - DNA, 182 bp, Glycine max
ttctgatcctattgtgttggccttcgggatcggagtaatgattaacagggacagtcgggggcattcgtatttcatagtcagaggtgaaattcttggatttatgaaagacgaacaactgcgaaagcatttgccaaggatgttttcattaatcaaaaaaaaaaaaaaaagggcggccgccgatt

SEQ ID NO: 151785 - DNA, 271 bp, Glycine max
ttacgatgtgatcactcacatgaactccttccggcagtacaagaagagcagcagccccatgagcgctgttttcacggggcagcaagtgctgatgctcaacaatgaacaagtctcagagttgaaccaagacaagaatgctggggtttatgacatctatgtgaagctctacttcaggattaggttcaggcttggggacgtcatatccaatgactacaagcccaaggtcaaatgtcacctcaaggtcccttttagtaaaaatggcacctttact

SEQ ID NO: 151786 - DNA, 270 bp, Glycine max
gccagtagtcatatgcttgtctcaaagattaagccatgcatgtgtaagtatgaactaattcagactgtgaaactgcgaatggctcattaaatcagttatagtttgtttgatggtatctgctactcggataaccgtagtaattctagagctaatacgtgcaacaaaccccgacttctggaagggatgcatttattagataaaaggtcaacacaggctctgcctgttgctttgatgattcatgataactcgtcggatcgcacggcctttgtg

SEQ ID NO: 151787 - DNA, 266 bp, Glycine max
aaatatttttgcacggacgttgtccagtcaaagtttacttgggcttgataaggagaaagtgcttgctctagacaaaatctcatctattggtctatttgtgattggtataatggctttggctgaggcttgtggtgtggccgtgcaatctgttgtgaccgttggtggtataggaggtgtggctactgcttttgctgccaaggacattcttggcaatgtgtccagtggtttatctatgcagttttcaaagcccttttcaattggagata

SEQ ID NO: 151788 - DNA, 267 bp, Glycine max
gaagagagcaaggcaggaagtcagtgtttataaaacgacagtaggagcctggtctggtcggtgtggcactcaaacattgtttgttgtaggaagaggaatcttgagaaatggcaggggacagcaagagcaagattctgttcatcggagggactggttacatcggaaaattcatcgtggaagccagcgccaaagctggccacccaactttccttttggtgagggagtccactctctccaaccccgcaaaatcacccctcatcgacaatt

SEQ ID NO: 151789 - DNA, 265 bp, Glycine max
gttgagaactaagaaggagaagcaaatggcttcctcaatgatctcttccccagctgttaccactgtcaaccgtgccggtgccggcatggttgctccattcactggcctcaagtccatggctggcttccccaccagaaagaccaacaatgacattacctccattgctagcaacggtggaagagtgcaatgcatgcaggtgtggccaccagttggcatgaagagtttgagactctttcctacctgccagacttgatgatgcacattg

SEQ ID NO: 151790 - DNA, 150 bp, Glycine max
gctttacattcacttcactgtggagttcccagattccctaaaccctgaccaggttaaggccttggaagctgttctgccaccaaagccttcttcacaattgacagacatggagctggatgaatgtagaggaaacatacgactccgatgatg

SEQ ID NO: 151791 - DNA, 263 bp, Glycine max
cggcgtccgaattgtagtctggagaagcgtcctcagtggcggaccgggcccaagtcccctgacagggggcgccagagagggtgagagccccgtcgtgcccggaccctgtcgcaccacgaggcgctgtcgacgagctcgagaagaagattgagaaacatcgatcgtgatcttagctctagtaatcctattcattcagctatatatctttctttccaaggtgaaaagaatattaaaacagagtttaaatttgttatatttggctg

SEQ ID NO: 151792 - DNA, 261 bp, Glycine max
gctttcaagagacaaactgctttgaaaaatgggatccaaggttgttgcatccgttgcccttctcctctccatcaacattcttttcatttccatggttagctccagcagccactacgatccacagccccaaccttctcacgtcactgctcttattacacgacctagttgtccggatctgagtatttgcctcaatattttaggcgggtctctaggaaccgtggatgattgttgtgccctcatcggtggtcttggtgacattga

SEQ ID NO: 151793 - DNA, 263 bp, Glycine max
ggcattatatctcttgatatcctttattctaaggacttaattgcaactggaggtattgatacaaatgctgttatttttgaccgcccatcaggacagatattatctacactcagtggtcactctaaaaaggtgaccagtgtaaagtttgtagctcagggtgaatcattcctaactgcttcagcagataagacagttcgtctatggcaagggtcagatgatggtaactataactgcaggcacatcttaaaggatcattcagctga

SEQ ID NO: 151794 - DNA, 267 bp, Glycine max
cgttcacaagggaatgccccacaaattctaccatggccgcaccggacgcgtctggaatgtcaccaaacgtgctgttggcgtcgaagtcaacaagcaggttggcaacagaattataaggaagaggattcatgtgcgggtagagcatgttatgccttcaaggtgcactgaggagttccgcctcaggaagattaagaatgatcagctaaaggccgaagcccaagtcaagggtgagaagatcagcacaaagagacagcctcagggtcccaa

SEQ ID NO: 151795 - DNA, 237 bp, Glycine max
attgggttggtagatattgctgctgtctacatagcattttgggtccctatggttcaagaaattgcagggttggagttattcacaagtgagaaatttcctaagctccacaattggagccaagaatttttgaaccatccaattgtcaaagaaagtctgccccctagagatcctgttttctcctttttcaagggtctctatgaaagcctttttggttcaaaatagatttgatgatgtggt

SEQ ID NO: 151796 - DNA, 266 bp, Glycine max
gaagaagatgccgatcagaaacatcgacgtcggaaggcctgaagaggcgactcaccccgacacgttgaaggcggctttggctgagttcatctcaaccttcatcttcgtgttcgccggctcaggctccggcatcgcctacaacaagctcaccgacaacggcgctgccacccctgccggcctcatctccgcctccatcgcccatgcattcgccctcttcgtcgccgtctccgtcggcgccaacatctccggcggccacgtcaaccccg

SEQ ID NO: 151797 - DNA, 266 bp, Glycine max
ggatgatacaacttgcctcgttgtagatattattccttcagatcatcccgtgttgccaacaattccaagaaagaaacgtaacgtgctaacttcccttctctttggaaagaaatctcaaaactctacaaacaaaggcaccaataagctttcttctgttggtgttgtggaggaattatttgaagagggttctgcaatgcttacagagaggttaggcaaggattttccatctaatacgaatcctgagattttccgctgtgcggtttgcc

SEQ ID NO: 151798 - DNA, 266 bp, Glycine max
ccagtattataaaggagaagttgaaagattttccggattacaagcccaaggacattgtcaatgacatcaaacaggaatatggaattcaacttaactattttcaggcatggcgtgggaaagagattgctaaggagcagcttcagggttcttataaagaggcatatagtcagttacctttcttctgtgaaaaattaatggaggctaatcctggaagtcttgcgatgtgcactacaaaggaagactcaagctttgaccgtctctttata

SEQ ID NO: 151799 - DNA, 262 bp, Glycine max
cttatggtggatacctaggcacccagagacgaggaagggcgtagtaagcgacgaaatgcttcggggagttgaaaataagcgtagatccggggattcccgatataggtcaacctttcgaactgctgctgaatccacgggcaggcaagagacaacctggtgaactgaaacatcttagtagccagaggaaaagaaagcaaaagcgattcccgtagtagcggcgagcgaaatgggagcagcctaaaccgtgaaaacggggttgtgg

SEQ ID NO: 151800 - DNA, 263 bp, Glycine max
ctccccggaactggaagatcatttcgagatcttcgaacatattcgagggttcaatgtgactattgtcacttcggccaacacacaagatgagactttaccaccgtggagcggctttttgcaaaaagatgagggagaaactcagtaagaaagagatgtcggatcagcgaaatatacgagatcacaaacgcagattgctcgcggctaaatatgaattgagacgaaagctttataaagccttttgtaaagattccgatcttcctagt

SEQ ID NO: 151801 - DNA, 262 bp, Glycine max
tggatgaattggagactgtttccaaggagtggggaattgaggctatgccaaccttcctgttcttgaaagaaggcaagctggtggacaaggttgtgggtgccaagaaagaggagctgcaattgacaatagccaaacatgccgcaattgctgctgcttgaagtgccatatgaatatgttaagaataatagactattgtcttcgagtcagtttgcttttattactattaatctgttattgggtctgtttgcatgatttcagaacg

SEQ ID NO: 151802 - DNA, 130 bp, Glycine max
gaacagcctctggtcgatggaacaatgtaggcaagggaagtcggcaaaatggatccgtaacctcgggaaaaggattggctctgagggctgggcacgggggtcccagtcccgaacccgtcggctgtcggtg

SEQ ID NO: 151803 - DNA, 265 bp, Glycine max
gggcacaaagaaagaacaagttcaacaaatcatcaaagacattaaggagtttaaggaaagcactaaggttgacaaggtggttgtcctgtggacagccaacacagagaggtacagcaacctagttgtgggactaaacgacaccatggaaaacctctttgcttccttggacaggaacgaggctgagatttccccttccaccttgtatgccattgcttgtgttatggaaaatgttcctttcatcaatggaagccctcagaacaccttt

SEQ ID NO: 151804 - DNA, 263 bp, Glycine max
gtcttgcaattgaagttgaagtcttgcccttctctcttcaactccaaacacaagacatcatcatccatggctgcctccgtctccactgtcggagctgtcaacagagctcttttgaacctgaatgggtctggacctggggtttcagctcccagttcatccttctttgggagcagcttgaagaaggttattggctcaagggtccccaacacaaagatttcctctggaagcttcaagattgttgctgtagaagagaagaaagagat

SEQ ID NO: 151805 - DNA, 235 bp, Glycine max
aaggattctacccgccgctcgatgggaattgcgcttcaaggcgtctcgtagggctaatccgcctcacgagggtcaccaacggcacgtgcctttggggggccgaggcccctactgctggtcggcaaacggacggcgggcgcacgcgtcgcttctagcccggattctgacttagaggcgttcagtcataatccaacgcacggtagcttcgcgccgctggcttttcaaccaagcgcga

SEQ ID NO: 151806 - DNA, 257 bp, Glycine max
ccaatatagcccaagccctatacaaccaaaccctaacacacacccatttgattcagtttccatggctagcctcaaggttgcatttttggctgcagtgctctgcatggttgtggtgagtgcacccatggcacatgcagctatcacgtgcgggcaggtgacgaatagcctgatcaattgcatcggttacctccagaacggaggaacgccgccgtcgggatgctgcaacggagtgaagagcctcaatgccgccgccaaga

SEQ ID NO: 151807 - DNA, 263 bp, Glycine max
gaacagaaatctcgtgtggaacaaaagggtaaaagctcgtttgattctgatttccagtacgaatacgaaccgtgaaagcgtggcctatcgatcctttagtccttcggaatttgaagctagaggtgtcagaaaagttaccacagggataactggcttgtggcagccaagcgttcatagcgacgttgctttttgatccttcgatgtcggctcttcctatcattgtgaagcagaattcaccaagtgttggattgttcacccaccaa

SEQ ID NO: 151808 - DNA, 266 bp, Glycine max
atcgagataactagaaacagtgtgatgaaaatgaaggtccttgttttcttcgttgctacaattttggtagcatggcaatgccatgcgtacgatatgttccctctccgaatgaacactggctatggtgcccgtactccggaggtgaaatgcgcaagttggaggcttgctgtggaaacacacaacatctttggctttgagaccattcctgaagagtgcgttgaagcaacaaaggaatacatccatggcgaacaatatagatcagactc

SEQ ID NO: 151809 - DNA, 267 bp, Glycine max
cttcttcttcttcttcttgcacgtattgttctaatccacaaaaataatggccttaaattacaacattgccctcgccttctctacggttctcacgctgcttctccttcccttaccaacccttggggaactcgtgcaggagcagccactagtcctcaagtaccacaacggccaactcctgaaggggcgcatcaccgtcaatctcatctggtacggcaccttcaccccgatccaacggtccataatcgtggacttcataaactcactaag

SEQ ID NO: 151810 - DNA, 160 bp, Glycine max
cacagccaagggaacgggcttggcggaatcagcggggaaagaagaccctgttgagcttgactctagtccgactttgtgaaatgacttgagaggtgtaggataagtgggagctggaaacagcgaaagtgaaataccactacttttaacgttattttactta

SEQ ID NO: 151811 - DNA, 267 bp, Glycine max
cagcagaggcttatttttgcagggaagcagctggaagatgggcgtaccctggctgattataatatccagaaggaatccactctgcatttggtgttgaggcttcgtggtggtatgcaaatatttgtgaagactctgacagggaagaccgtaaccttggaggtggaaagctctgataccattgataatgtgaaagcaaagattcaggacaaggagggtattccaccagatcagcagaggcttatttttgctgggaagcaattggaagat

SEQ ID NO: 151812 - DNA, 237 bp, Glycine max
agaggcctcgcagctagtcttattggagttgtcccatatgctgctaccaattactatgcctacgacactttaaggaaagcataccagaaattttctaaacaaaagaaggtcggcaacattgaaacccttttgattggttcagcagctggtgctttttcaagtagtgcaacttttccacttgaggtggctcgcaagcagatgcaacttggagctctcagtggaaggcaggtttacaag

SEQ ID NO: 151813 - DNA, 262 bp, Glycine max
gttcaacttcgccaccggccaacacaacgtggccaaggtaacgaaatcggctttcgacgcgtgcacggcgggagcgccgttttcaccctgacctccggtccagcgaccgtgaccctgaacgaaacaggggagcaatactacatttgctccgttggatcacactgttccgctggccagaaactggcaattaacgttaacagagcttcttctaccggtccttcccctgcacctcaacccagaggaagtggttctccaccaaggg

SEQ ID NO: 151814 - DNA, 266 bp, Glycine max
atcttagtcttcttaatttcctcactcgcaagtcacaccaatggcaaagctattcaatttcctccctctcctcttcctcaacatcttcattcaaacaatttcagcccaagtagcaccagcaccagcgggccccaccaacatcacccaagttcttgagaaagcaggccaattcacaaccttcatcaaacttctcaaggcctcacaaatagctgatagaatcaattcgcagctcaacaactcaaaccaaggcctaaccgtatttgcac

SEQ ID NO: 151815 - DNA, 221 bp, Glycine max
aacgcatcgagcgtggagaaagagaaggatgatgaggttaaggtggagtgtactcgtaatggtcacgttcgctgtttctctgttttggcttggacccctgcaagtcaaagcctctaattctgtttccgccttcgttcaaaacgccatctactccaacagaatcgccgttttctccaaatcctattgcccctactgtttgcgcgccaaacgcttgcttgctg

SEQ ID NO: 151816 - DNA, 244 bp, Glycine max
gtttcgaaagcatggcttccctggcggcttccaccgcggctatgtcagaaatccttggaaaccccgttaacctcagatgcgcaaccaggtctgctccatcaccaactacacctgccaccttcaagaccgtcgcacttttctccaagaagaagccagctccacctccaaagaaaaagcctgccgctgtatcccccgccaatgaggaactcgccaagtggtatggtcctgacagaaggatcctctt

SEQ ID NO: 151817 - DNA, 258 bp, Glycine max
  unsure (1)..(258): unsure at all n locations
gtttagtcgtgactcttccaatgacgagaactcattccctaccagcggagtcccttataatcaggtttcttttgaaggagatgctgggaagtcttctgaaagacgcggttatggtggaccacgaggtccttaccnnnnnnnnnnnnnnnnnnnnnnnnnnttcagcaatggtgaaactggtgaagctgaagaaggacgacctcgaagagcatttgatcgtcgcagtgggactggacgaggaaatgaattcaaacgtga

SEQ ID NO: 151818 - DNA, 258 bp, Glycine max
caaacccatggttgttgaaactttctccgagtatcctccacttggtaggtttgctgttagggacatgcgtcaaactgttgctgtgggagtcatcaagaacgttgagaagaaggatcctaccggagccaaggtcaccaaggctgcccagaagaagaagtgaatcgtgcgggctggttcatcaggggatgttggttacaataaatgttggtttcttttctgtactcttgtgtcttcttttctaggtagcttgtttttcgg

SEQ ID NO: 151819 - DNA, 262 bp, Glycine max
ccaccccacttacatacacactctcccactcctccgagccggtcgagttgagtcggtgagtcagtggccgagttgaagcatgtcggacgaagagcaccatttcgaatcgcaaggccgatgcgggagcctccaagacctatcgctcagcaggccggaaccatccgcaagaacggctacatcgtcatcaagggtcgtccctgcaaggttgttgaagtttctgattccaagactggtaagcacggccatgctaagtgtcactttg

SEQ ID NO: 151820 - DNA, 260 bp, Glycine max
gttgctgggctgggtaaaattcggcttgaacttgaggagattgtcaagttctttactcacggagagatgtaccgaaggaggggagtgaaaataccaggtggcatacttctttgtggccctcctggagtgggaacgacattgctggcaaaggcagtggctggtgaggcaggggttaatttcttctctatttccgcttcacagtttgtggaaatatatgtcggtgtaggggcttctcgtgtccgagcactttaccaagaagc

SEQ ID NO: 151821 - DNA, 260 bp, Glycine max
aggaactgcacccctcacagctgttcaactcttgtgggtgaacatgataatggacacactgggagcacttgctcttgctactgaacctccaaatgatgatttaatgaaacgttcacctgttggaaggaagggaaatttcatcagcaatgtcatgtggaggaacatcttaggtcaatccttgtatcagtttatggtgatatggtttcttcagtcaagaggaaaatcaatctttttacttgagggccccaattcagatctag

SEQ ID NO: 151822 - DNA, 260 bp, Glycine max
gctgagttggccacccttgctttctatttctttactggctacaagttcaagccagaggctcacaatccgtattttgtcatcgatgacgaagaggaagaggctgccgcagaggccttgaagcttgaagatgaatttgaattgtaatttctttcaaaatacaaaattagttgttgaacaagttggtaccatgctcagcaatgctctcaggtttcatctcaacagccagtagaaatttgcatgttacattttatgggtatagt

SEQ ID NO: 151823 - DNA, 257 bp, Glycine max
ctcgagcgctcgagccggctcgagtgggttacaaatgtcagagctgatgacattcatgctggagatgcccttgccgtttcagaaattcgaggtcggtggggtgcttttgagactctagagaagtgggttagtggagcttatgctggccacactgctgtttgtctaagggactccagtgggaagctttgggttggagagtcaggacatgaaaatgaaaagggagaagatataattgctgtgataccatgggaagagtg

SEQ ID NO: 151824 - DNA, 257 bp, Glycine max
gagaagttttgtgcaaaatccttgggaacagtaattggttttgccatttcaaagctgggaaagaacattcaagtactttcaagttcctttgtcaataagcaagaccaatacactgtggaaggagtgcagaatcttggagacaaagcagtgatgtgtcataggctaaatttcagaactgcagtattttactgccatgaagtccgtgaaacaacagctttcatggttccattggtggctggtgatggaaccaaaactca

SEQ ID NO: 151825 - DNA, 110 bp, Glycine max
ctaggcacccagagacgaggaagggcgtagtaagcgacgaaatgcttcggggagttgaaaataagcgtagatccggggattcccgatataggtcaacctttcgaactgct

SEQ ID NO: 151826 - DNA, 265 bp, Glycine max
ataacacctcaaattctgtgattcgggtaatggccaccagtggaggcgatgaggggcagaacaaccctgccctcgacccggatttggatgctccggatgacccggatcacgagttcgctgagttcgggtcgggttgcttctggggtgctgagttggcctttcagcgagttgtgggtgtggtgaagactgaggttggttacactcagggtcacactccggatccgaattacaaactggtttgcaccggaaccactaaccacgttga

SEQ ID NO: 151827 - DNA, 264 bp, Glycine max
acactggctatggtgcccgtactccggaggtgaaatgcgcaagttggaggcttgctgtggaagcacacaacatctttggctttgagaccattcctgaagagtgcgttgaagcaacaaaggaatacatccatggcgaacaatatagatcagactccaaaacagttaaccaacaagcttacttttatgccagagacctcgaagtccatcccaaggacacatttgtgttcagtatagatggcaccgtactctctaatattccatact

SEQ ID NO: 151828 - DNA, 258 bp, Glycine max
  unsure (1)..(258): unsure at all n locations
ttccnctatggctcgtcactccttgctcttagccctcctcctcttcgccgccgtggccaccgccgcgatggcggtggcgcgtccgacgccgacgacatcctgatccgtcaggtggtgccagatgttggcgaagcgaagaggaggacaacctgctgaacgccgagcaccacttcgcgagcttcgaggccaagttcgccaagacctacgccaccaaggaggagcacgatcatcgcttcggcgtcttcgagtccaacctcc

SEQ ID NO: 151829 - DNA, 257 bp, Glycine max
ggagtttctaagacgatgtccaggtgttacagactcaaactacagggccataatggatggctgtaagagcttggcagaacttgcacttcttcctgtagagaagttagcggaattaatgggtggtcataaagctgctaggactcttagagattttctagatgctaaatacccaactttgttgtgagactatttgaataatttatttgtacaaaaaggtgctatccatttattcaagtcttctgttgtttcgattctac

SEQ ID NO: 151830 - DNA, 257 bp, Glycine max
ggttgatcggcgatgcggcgaagaaccaggtcgctatgaacccaaccaacaccgtttttgatgctaagcgtttgattggaaggcgtttttccgatgcatcagtacaaggtgacatgaaattgtggccgttcaaggtgattcctggccctgctgagaaacctatgattgtggtgaactacaagggggaggagaaacagttttccgcggaagagatatcctccatggttcttatgaagatgaaggagattgcggaggcg

SEQ ID NO: 151831 - DNA, 229 bp, Glycine max
atgtgttttattctctttatctctctctctgccctctcatcttcgagctccgatggcgagcctgtggcgcgcggcgaccggcatgacggaaaacgccaccgattacgacggcgtcgagttctggtccaaccccgagcgcaccggctggctcaccaagcagggcgagtacatcaagacctggcgccgccgctggttcgtcctcaagcaaggcaagctcttctggttcaag

SEQ ID NO: 151832 - DNA, 263 bp, Glycine max
ctcgagccgattcggctcgaggattatcctaagtctttgggaaaggtgctgcaatggctacaagtcaggaggaggtgaaccttttgggagctactggaagcccatttgtgtgcagggttcatattgccctcaagttgaagggagttcaatacaaatatgtcgaagaaaatttgaggaacaagagtgaactgcttctcaaatccaacccagttcacaagaaggttccagtgtttattcacaatgagaagcccatagcagagtct

SEQ ID NO: 151833 - DNA, 172 bp, Glycine max
gtgtacggtacgatgagagtgaggagccagaatccctcttcctgctttatgatataatacaaataaaatagcgattccggaaatcatgtctgtagctgctctttttatttatgtgataaatgtaaaacgctttggtttggcttggccgttgtgcattaggttgaaaaaataa

SEQ ID NO: 151834 - DNA, 143 bp, Glycine max
cttttctggctcatagtccgtcccaacgtggtgagattccacgtcaccgaggccaccctgacgcagttcaactacgcccccaacaacacgctccactacgacctcgccctcaacatcagagagcgaaaccccaacaagaggct

SEQ ID NO: 151835 - DNA, 255 bp, Glycine max
cgggacgttctgtcaatcggggaaggtttttggtgacaacacctggagatatcagaagtgagaatgctgacatgagtaacgataaatcctgtgaaaaacacgatcgcctgccagtggaaggctttctgcgttcagtcaatctacgcagagtgaatcggtccctaaggaagccccgaccccgaaagggctgccgtccgatgggtacacgaaagtgacgaagttgctttgactacagaaccatgcctgtctgttgga

SEQ ID NO: 151836 - DNA, 255 bp, Glycine max
gccgctgttatcccgtatccagataaggaagctgggcagcatccaatggcatacgtggtgaggaaggctggaagtagcttatcagaaactcaagttatggattttgttgcaggacaggtggctccgtacaagcggattcgaaaagtggcatttatttcctccatacccaaaaatccatctggcaaaattcttcggaaggatctcatcaaactcgcaacgtctaaactctgaatagatgagctttttcgtaatata

SEQ ID NO: 151837 - DNA, 255 bp, Glycine max
gggtgacggagaattagggttcgattccggagagggagcctgagaaacggctaccacatccaaggaaggcagcaggcgcgcaaattacccaatcctgacacggggaggtagtgacaataaataacaataccgggctcattgagtctggtaattggaatgagtacaatctaaatcccttaacgaggatccattggagggcaagtctggtgccagcagccgcggtaattccagctccaatagcgtatatttaagttg

SEQ ID NO: 151838 - DNA, 255 bp, Glycine max
  unsure (1)..(255): unsure at all n locations
aatttactgctgatctttttgcaatgaaccacacagactttatcatcaccagcaccttccaagagattgctggangcaaggacactgttggacagtatgagagtcacactgccttcacccttccaggactttaccgtgttgttcacggtattgatccatttgatccaaagttcaacattgtctctcccggtgcagacatgggtatatacttcccatacactgaaactgagcgtaggttaacagaattccactctg

SEQ ID NO: 151839 - DNA, 256 bp, Glycine max
tcaagattcagcaagtgcgttttggaagcagagaccgaaatacttcgagatggcccgtacaaagcaaactgctcgtaagtcaactggaggaaaagctcccaggaagcagcttgcaaccaaggctgcacgtaagtctgcaccaacaactggtggtgtgaagaagcctcatcgttatcgccctggaactgttgctcttcgtgagattaggaaataccagaagagcactgagctcctaatcaggaaacttcctttccag

SEQ ID NO: 151840 - DNA, 257 bp, Glycine max
gcaaaggattctacccgccgctcgatgggaattgcgcttcaaggcgtctcgtagggctaatccgcctcacgagggtcaccaacggcacgtgcctttggggggccgaggccccctactgctggtcggcaaacggacggcgggcgcacgcgtcgcttctagcccggattctgacttagaggcgttcagtcataatccaacgcacggtagcttcgcgccactggctacgtcaccaagcgcgatgaccaattgtgcgaatc

SEQ ID NO: 151841 - DNA, 87 bp, Glycine max
gacggattgggaacgggcccttcggggcctcttccccgggcgtcgaacagtcaactcagaactggtacggacaaggggaatccgact

SEQ ID NO: 151842 - DNA, 250 bp, Glycine max
ggaatcagccaaggaaattgttggcgttaagaagttgattgaaaagaaggcttggccatatgttcagaatgatctgcgtctcagggccgagtatctgcgctttgatctcaacactgtcattgctgcaaagcctaaggatgagaagaaatcactcaaggaactcactggcaagctcttccaggatatcagcaatctggatcatgcagcaaaaattaagagcagcccggaagcagagaagtactatgctgct

SEQ ID NO: 151843 - DNA, 251 bp, Glycine max
cagaatcacaggttctcctatggtgagcctatgactgttgagtccaccacccaagctctttgtgatctagccttgcgttttggtgaaggtgatgaagagtccatgtcccgaccatttggagtatctctcctcattgctggtcatgatgagaatggacctagcttatactacactgatccatctggcacattttggcaatgcaatggcaaagctattggttcagggtcagaaggtgcagacagttctctaca

SEQ ID NO: 151844 - DNA, 252 bp, Glycine max
tgacacttgcccaaccgctgttcacgattttgaaggggatcaaacttacagtgagaaaccaggacatacttttgctttaacagctacctttgatgatgtggatccctcaggttatgacgctcttgtcatccctggaggtcgagcacctgagtatttggcattgaacgagtcagtcattgccttggtgaagtatttctttgaaaacaagaagccagtggcatctatctgtcatggccaacagattttatctgc

SEQ ID NO: 151845 - DNA, 253 bp, Glycine max
ctcgagccgattcggctacgagggtgaggagcaagatgatttatgagtgctccaaagacagattcaagagggagctggatagaattcaagtagagttgcaagcaactgatcctactgagatgggtcttgatgtgttcaaaagccgtgccaactaaaatgattatataaaatagtaggctttctggtgggagcagcacccctgaagccttagttactcatatggaaaatatcctagtttgtgggatggtcaact

SEQ ID NO: 151846 - DNA, 252 bp, Glycine max
ctcgagccgtgagaacatagctaccgggttctggagttaggaatctttgttactggtgttggcacctgatgtttttagctcggctttgcatcggttttgccaccatgtgtgtcttagttttctaagtttttacagctacctgtaccactgtatcagtctttgtttaccaaatgtgtcatgtggttgaactatgttcttcacatgatgtttgggtatcagttttactcgaagggcaggttagaagtttcagtg

SEQ ID NO: 151847 - DNA, 187 bp, Glycine max
cgagaatggggatcgaagccggggagcggaggtgcggcgtcggcgcagaacgaagccatagaccggcgagagcgtctccggcgattggctctggagaccatagacctggcgaaggatccctatttcatgcgcaaccacctcggaagctacgaatgcaaactctgtctcactctccacaacaacgagg

SEQ ID NO: 151848 - DNA, 105 bp, Glycine max
ctccgtccatttaccctaaaaggagtgcaagaacttcttggtaagactgggaatgtcagcagcttctggatggaccaaataaagacccattgctatgttacttac

SEQ ID NO: 151849 - DNA, 258 bp, Glycine max
cggaacagcaacgttgtagagggagacttttgggggagagtgagtgagagtaaaaagatgtttctgcgtgcggtggcgcggccgttgatggcgaaggtgaaggcttcgacggggatcgtggggctggacgtggtgccgaacgcgagggaggtgctgattgggctgtacagcaagacgctgaaagagatccagaaggttcccgaagatgaagggtaccgcaaggccgtggagagcttcaccaagcacaggctcggcgtg

SEQ ID NO: 151850 - DNA, 215 bp, Glycine max
atatagcccaagccctatacaaccaaaccctaacacacacccatttgattcagtttccatggctagcctcaaggttgcatttttggctgcagtgctctgcatggttgtggtgagtgcacccatggcacatgcagctatcacgtgcgggcaggtgacgaatagcctgatcaattgcatcggttacctccagaacggaggaacgccgccgtcgggat

SEQ ID NO: 151851 - DNA, 132 bp, Glycine max
cattgtgcctgtggcttgcgaacagggaatgaggtttgctattagggaaggtggcaagaccgttggtgcaggtgttatccaatccatcattgagtgaaaattgcctcacttcatttttaattaattaatttt

SEQ ID NO: 151852 - DNA, 263 bp, Glycine max
gatcgaccattaccgtggtctttggcgcactgcacaaatctggaagttttggacctggcagacaacgacatggaggatacatttccccattggctagaacgcctccaggagttacaggtactcagtttgcgatcaaataagtctcatggtgtcatcacttgtttcggtgccagacatccatttctcaggctgagagtttttgattgcctcaataacaattttagtgggtccttgccagcatcatacatcaagaactttcgagg

SEQ ID NO: 151853 - DNA, 269 bp, Glycine max
gttgataagagagatgatgatcaacgtgaaggaatcgaccatggtgcggccggcggaggaggtggcgcggcgggtggtgtggaactccaacgtggacctggtggtccccaatttccacacgcccagcgtctatttctataggtccaatggcgcccccaactttttcgacggcaaggttatgaaggaggcactgaccaaggtgctggtgcccttctacccaatggctgggcggctcctgcgagatgacgacggtcgcgtcgagattgact

SEQ ID NO: 151854 - DNA, 265 bp, Glycine max
gcggagatcgccaactacgcgctgagcgagtacgacaagcgttctggggccaagctcacccttgtcaaggtcgtcaagggcgagactcaggtcgtttccggcaccaactaccgtctcgtcctcaaagccaaggatggatccgccacggccagttacgaagccatcgtctgggagaagccttggctccatttcatgaatctcacttccttcaaaccccttcattaatcttagacccatacttttcttcactttctctcttatcata

SEQ ID NO: 151855 - DNA, 267 bp, Glycine max
gctcttcctctcccagacaaacacatggctttgcccaatcagcaaaccgtcgattaccccagcttcaagctcgtcatcgtcggtgacggtggcacaggaaagacaaccttcgtgaaaaggcatctcactggtgaattcgagaagaaatatgaaccgaccattggtgtggaggttcatccgttggattttttcactaactgcggaaagattcgattctattgttgggatactgctgggcaagagaagtttggcggcctcagagatgga

SEQ ID NO: 151856 - DNA, 265 bp, Glycine max
taattttttcttcttcaccgcgcaccacactgagaggaagagggagtgagagagagtgttcttcgtttgctaccttctcccagaaatggttacgttcaggtttcaccagtaccaggtggtcgggagggctctcccaacggaagcagatcagcatccgaagatctaccgaatgaagctctgggccaccaacgaggttcgcgccaagtctaagttctggtattttttgaggaagctgaagaaggtgaagaagagcaatggtcaagtt

SEQ ID NO: 151857 - DNA, 264 bp, Glycine max
gcacttggaatccaaaaatgagagaaatcatcagcattcacataggtcagtccgggatccaggttggcaactcctgctgggaactctactgcctggaacatggcatccagcccgatggcatgatgccaagtgactcctccttcggtgtagcccacgacgccttcaacaccttcttcagcgaaaccggatccggcaagcacgtccctcgcgccgtcttcgtcgatctcgagcccaccgtcatcgacgaatccgttgtggcattac

SEQ ID NO: 151858 - DNA, 271 bp, Glycine max
ctcgagccgggattctacccgccgctcgatgggaattgcgcttcaaggcgtctcgtagggctaatccgcctcacgagggtcaccaacggcacgtgcctttggggggccgaggccccctactgctggtcggcaaacggacggcgggcgcacgcgtcgcttctagcccggattctgacttagaggcgttcagtcataatccaacgcacggtagcttcgcgccactggctttactaccaagcgcgatgaccaattgtgcgaatcaacggttcct

SEQ ID NO: 151859 - DNA, 264 bp, Glycine max
ggggagtttaagtttggggtcaagcatggacttggatgttaccatttcagaaacggagataggtatgctggagagtactttggagataaaatacatggctttggtgtctaccactttgccaatggccactattacgaaggttcatggcacgaaggtcgtaggcaaggttatggcatgtatatgtttcgaaatcgtgatggaagatgtggtgaatgggatgctggcaacctcaaactctctctaccaccacaaaatgatgctatc

SEQ ID NO: 151860 - DNA, 266 bp, Glycine max
cactcgttttcgttctcgttctggtttatagatctttgcgaaggaggtttacagcgctcaaccaaagatgcagaacgaggaaggacagatcactgagctttacattcctaggaagtgctccgccacaaacagattgattaccgctaaggaccatgcttcggttcagatcaacattgggcatgtggatgagaatggcgtctacaatggccatttctccacttttgccctctgcggattcatccgtgctcagggtgatgctgacagtg

SEQ ID NO: 151861 - DNA, 189 bp, Glycine max
gtcgtttggcacctcgatgtcgactcatcacatcctggggttgaagaatgtcccaagggttcggttgttcgccgattcaagtggatagtgagttgggtttagaacgtcgtgagacagttcggttcctatctaccgttggtgttaaagggagaactgcgaggagccaaccctagtacgagaggactgggt

SEQ ID NO: 151862 - DNA, 262 bp, Glycine max
ctcgcggtacttgttcgctatcggtctctcgccagtatttagccttggacggaatttaccgcccgattggggctgcattcccaaacaacccgactcgccgacagcgcctcgtgatgtgaaggagcttcatttggtgaatttcaaaatggagctcttaccagtagcacaaaaaacttataacaataagtggggttaaattctctaatccatgctaatccatttcatttacatgagatgactttaaatgtttggctggttttgt

SEQ ID NO: 151863 - DNA, 235 bp, Glycine max
caaaggattctacccgccgctcgatgggaattgcgcttcaaggcgtctcgtagggctaatccgcctcacgagggtcaccaacggcacgtgcctttggtgggccgaggccccctactgctggtcggcaaacggacggcgggcgcacgcgtcgcttctagcccggattctgacttagaggcgttcagtcataatccaacgcacggtagcttcgcgccactggagcttcaaccaagcg

SEQ ID NO: 151864 - DNA, 262 bp, Glycine max
gtcgtttggcacctcgatgtcgactcatcacatcctggggttgaagaaggtcccaagggttcggttgttcgccgattcaagtggtacgtgagttgggtttagaacgtcgtgagacagttcggttcctatctaccgttggtgttaaagggagaactgcgaggagccaaccctagtacgagaggactgggttgggccaacctatggtgtaccggttgttatgccaatagcagcgccgggctgctaagttggtatggaagaactg

SEQ ID NO: 151865 - DNA, 264 bp, Glycine max
attggatcgtaaggaattcatggggtcctagctggggagaagatggctacatcaggttagaaagaaatcttgctaacagcagatcaggcaagtgtggaattgcaattgagccatcttatccccttaagaatggtccaaatccacctaatcctggatcatcacccccttcacctgtgaagccaccaaatgtctgtgacaactactacagctgtgctgatagtgctacttgttgctgtattttcgagttcggaaatgcttgctttg

SEQ ID NO: 151866 - DNA, 265 bp, Glycine max
gactatttggatctctaccttatccattggccagtcagtgcgaaaaacgggaagcttaccaaacctgacatacctagcacatggagagcaatggaggcactctacaattctggcaaggctcaagctataggggtcagcaatttctctgtaaagaagcttcaggatttgttggatgtggcaagtgtgcctccagctgttaaccaagtggaattgcacccttcattacagcagccagaattgcatgctttctgtaaatccaagggag

SEQ ID NO: 151867 - DNA, 261 bp, Glycine max
cgcacccttgatggactccaaggaccagtctatgtgggaactgggtgccttttcagacgggttgcactttatggttttgacccaccacgttctaaagagcaccacacaggttgctgtaattgttgctttggtcgtcagaagaagcatgcatcactggcaagcaccccagaagagaaccgttcactgaggatgggtgattctgatgatgaggaaatgaatctatcgttgtttcctaagaagtttggaaactctactttcctc

SEQ ID NO: 151868 - DNA, 267 bp, Glycine max
ggcttatggtggatacctaggcacccagagacgaggaagggcgtattaagcgacgaaatgcttcggggagttgaaaataagcgtagatccggggattcccgatataggtcaacctttcgaactgctgctgaatccacgggcaggcaagagacaacctggtgaactgaaacatcttagtagccagaggaaaagaaagcaaaagcgattcccgtagtagcggcgcacgaaatgggagcagcctaaaccgtgaaaacggggttgtgggag

SEQ ID NO: 151869 - DNA, 177 bp, Glycine max
caacagcacaaagcgggttactgtctgttcaagctaccatctctctctctctttcttagtgcctccttgccagaagttaaaatggcccaagaaactttcctattcacatctgaatcagtgaacgaggggcaccctgacaagctctgtgaccagatctccgatgctgtgctcgatgca

SEQ ID NO: 151870 - DNA, 260 bp, Glycine max; identical to SEQ ID NO: 149521

SEQ ID NO: 151871 - DNA, 261 bp, Glycine max
aatccaccaggttacaaagcaccatcttataatccaccagcttacaagtcaccttcctataacccaccaggttacaaagcaccatcttataatccaccaggttaccagccaccttcatacaatccaccaggttacaaagcaccaacttataatccaccagcttacaagtccccttcctataatccaccaatttacaagccaccttcctacaatccaccaggttacaaagcaccatcttataatccaccatcttacaagtca

SEQ ID NO: 151872 - DNA, 260 bp, Glycine max
ctacttgagaggaggacttggtgttggtgcctttcagaggatttatggtgggagcaagaggaatggtagtcgccctcctcatttttgcaagagcagtggtgccattgctcgtcacattcttcaacagttgcagaacatgaacatcattgaactggacaccaagggtggcaggaaaatcacttccagtggccgacgggatcttgaccaagtggctggacgcattgtggttgcaccatgattcatgatttgaaaatgccata

SEQ ID NO: 151873 - DNA, 260 bp, Glycine max
cgcttctcctctttgtgttctggctatgcttcttggcaagagttagatcggacgaggattgcgtgtacacggtgtacgttcggacgggttcgatcatcaagggaggcaccgattcagtaattggtctgaagctatacgacaagtccggctacggcatatacatcaccaacctcgaggcatggggcgggttaatggatccgggtcacaactactacgagcggggcaacctcgacatattcagtggtagaggcccttgcttg

SEQ ID NO: 151874 - DNA, 261 bp, Glycine max
gtcccaccacttggttttcataacccattctccatctcagaatggagaatgcgagaataagccagtggttgatccttctggtgtgtgcgctgctgttgctgatatcagaagcttcttatgtgccaatcactactgttcagaacgcggtagcaaaaggagctgtttgtttggatgggagtccaccagcttatcattttgataggggatttggatcagggattaacaattggttggttgcatttgagggaggaggatggtgca

SEQ ID NO: 151875 - DNA, 293 bp, Glycine max
tcttactctatctccgaattcagctctagttaggattctacccgccgctcgatgggaattgcgcttcaaggcgtctcgtagggctaatccgactcacgagggtcaccaacggcacgtgcctttggggggccgacgccccctactgctggtcggcaaacggacggcgggcgcacgcgtcgcttctagcccggattctgacttagaggcgttcagtcataatccaacgcacggtagcttcttctgccatggcttttcaaccaagcgcgatgaccaattgtgcttctcttcggttc

SEQ ID NO: 151876 - DNA, 258 bp, Glycine max
agttttcattcaatcatcactgatctaagatatgtctacatctgataagtcagaagtggtggaaaggggtgctaaggatgatgataagccatatgaagaacatgagaagggtggatttcttgatacagtgacaggatttcattcaagacattggtgagaagattgatggagcagttgggtttgggaagccaactgcagatgtcactgggatacatattccatcaattaatcttgagaaggcagagctagttgttgatg

SEQ ID NO: 151877 - DNA, 264 bp, Glycine max
atatgcttgtctcaaagattaagccatgcatgtgtaagtatgaactatttcatactgtgatactgcgaatggctcattaaatcagttatagtttgtttgatggtatctactactcggtataaccgtagtaattctagagctaatacgtgctacaaaccccgacttctggaagggatgcatttatttgataaaatgtcaacacaggctctgcctgttgtcttgatgattcatgataactcgtcggatcgctaggcctttgtgccg

SEQ ID NO: 151878 - DNA, 258 bp, Glycine max
ctcaactcgatgctgaagctgaatccttatgccaagactgctaagaggatggcccttctcgctgaggcacagcgggttaaggtcaagaaggagaagctcgacaagaagaggaagactgtctctaaggaggaagcgtctgccatcaaggctgctgggaaagcatggtatcacactatggtgtcagattctgattatacagaattcgacaacttttctaagtggttgggtgtttcacagtaaacttcatgattaattttt

SEQ ID NO: 151879 - DNA, 261 bp, Glycine max; identical to SEQ ID NO: 151438

SEQ ID NO: 151880 - DNA, 257 bp, Glycine max
gagagagcgagcagtttcagacacagagagaggggtttgggattggagggattgacgctgcgtctcttcctcttctctttcgatccatccctcattcctaatcctccaatccaaccacctcagcctcacactcacatatacacatatctgaacgcgtatcgtccctcctatggcttcaaagcgcatcctcaaggagctcaaggacttgcagaaagacccaccaacttcttgcagcgctggtccagtagctgaggaca

SEQ ID NO: 151881 - DNA, 258 bp, Glycine max
gaatccgaggcgaagagaagagaaaaattaagatggaggggaaggagcaggatgtgtcgctgggagcgaacaagttcccggagagacagccgattgggacggcggcgcagagccaagacgacggcaaggactaccaggagccggcgccggcgccactggttgacccgacggagtttacgtcatggtccttttacagagcagggatagcagagtttgtggccacttttctgtttctatacatcactgtcttaaccgtca

SEQ ID NO: 151882 - DNA, 256 bp, Glycine max
aaaggattctacccgccgctcgatgggaattgcgcttcaaggcgtctcgtagggctaatccgcctcacgagggtcaccaacggcacgtgcctttggggggccgaggcccctactgctggtcggcaaacggacggcgggcgcacgcgtcgcttctagcccggattctgacttagaggcgttcagtcataatccaacgcacggtagcttcgcgccactggcttaccaaccaagcgcgatgaccaattgtgcgaatcaa

SEQ ID NO: 151883 - DNA, 258 bp, Glycine max
attctacccgccgctcgatgggaattgcgcttcaaggcgtctcgtagggctaatccgcctcacgagggtcaccaacggcacgtgcctttggggggccgaggccccctactgctggtcggcaaacggacggcgggcgcacgcgtcgcttctagcccggattctgacttagaggcgttcagtcataatccaacgcacggtagcttcgcgccactggcttttcaaccaagcgcgatgaccaattgtgcgaatcaacggttc

SEQ ID NO: 151884 - DNA, 255 bp, Glycine max
ctgaggacactcatcgcccagtggactgtggcactgtggcaaagtggattttgaagaacagtgctgagtctgaaaacatgaattggatacttgctaactcaaagccatgtcccaagtgtaagcgaccaattgaaaaaaatcaagggtgcatgcacatgacatgcactccgccctgtaaatttgaattttgctggctatgtgttggtgcatggtcagaccatggtgaaaggactggtggtttttatgcttgcaatc

SEQ ID NO: 151885 - DNA, 259 bp, Glycine max
gcggcatggccggtctcggcagaactagaattgctctcccctcgcagctcgcttccgctttcagcttccgtagaaaattcgccgtctgcctctcatcttcaaacggcgtcgctttcttcggtgacggaccctacgttcttctccccaacgtcgacgcttctcagctactcaccttcacgccgttattaattaaccccgttagcaccgcctctgctttctcccagggagagccttccgccgagtatttcatcggcgtgaa

SEQ ID NO: 151886 - DNA, 261 bp, Glycine max
gtcatcgttgggatctccatacgccggatctgctaaaatacgcttgatccatatgggcctcctcgaccacttgtgggacgacaccgtcgccggcccaaggccggaaaacggtctcggcaagctccgacaacaccacaccttcactttccgacctagctccggcaaggaaacggagggcgggagcgtgagatcgtacggagacgaatcgtcgtacgaagcgacgagagtgacgcgtagtatcatgatcgtgaaaccgcccgg

SEQ ID NO: 151887 - DNA, 259 bp, Glycine max
aagggtgaaaagaacccccatcggggagtgatatagaacatgaaaccgtaagctcccaagcagtggtgaggaggctcgggactctgaccgcgtgcctgttgaagaatgagccggcgactcataggcagtggcttggttaagggaaaccaccggagccgtagcgaaagcgagtcttcacagggcaattgtcactgcttatggacccgaacctgggtgatctatccatgaccaggatgaagcttgggtgaaactaagtgga

SEQ ID NO: 151888 - DNA, 257 bp, Glycine max
tgctttgaaaaatgggatccaaggttgttgcatccgttgcccttctcctctccatcaacattcttttcatttccatggttagctccagcagccactacgatccacagccccaaccttctcacgtcactgctcttattacacgacctagttgtccggatctgagtatttgcctcaatattttaggcgggtctctaggaaccgtggatgattgttgtgccctcatcggtggtcttggtgacattgaagccattgtgtgc

SEQ ID NO: 151889 - DNA, 251 bp, Glycine max
gacaagcagctctagaaaaatctgcaaagaataaaacaagaggaggaaatgcaacttacttgttgatataaacttcacagagagaaagttgttgtaaagccttgttgctgccatggccacccacgcggctcttgcttctacaaggatcccttcaaacacaaggttcccatccaaggcctctcactctttcccaacccaatgcgccttaaagagacttgaggtgacagaattctctgggcttagatccactt

SEQ ID NO: 151890 - DNA, 226 bp, Glycine max
  unsure (1)..(226): unsure at all n locations
tggaaaagccgcgaggnaggtttcgtttcgttancgttcagttcacacattcacttctcncatcgattcctcttccctttttctcaatccactacaccacagttatgaggagccaacttgtgtgtaatgggtgtaggagcatcttggtttaccctagaggagcaaccaatttttgctgtgcgttgtgcaacaccatacctctgttcctcctcctggaatggacagt

SEQ ID NO: 151891 - DNA, 255 bp, Glycine max
cttgttcaccaattaagctttcaagagacaaactgctttgaaaaatgggatccaaggttgttgcatccgttgcccttctcctctccatcaacattcttttcttttccatggttagctccagcagccactacgatccacagccccaaccttctcacgtcactgctcttattacacgacctagttgtccggatctgagtatttgcctcaatattttaggcgggtctctaggaaccgtggatgattgttgtgccctca

SEQ ID NO: 151892 - DNA, 255 bp, Glycine max
tccgaccgcaccctcggcgacaccgttatcggcaccgtccatgttcctctcagggaactcatggacaatcccggcgacgacggttccttccgccaagtcagttaccaggtgatgaaacagtcagggaaatccaagggatccttgaatttctcctacaaagtaggcgaacatgttcccgccccggcccctaaagcacccaagacgggacaagagcctgtgatggcttatcctccgaccggggcgggatccagttcg

SEQ ID NO: 151893 - DNA, 253 bp, Glycine max
atggtgcagcagtgcaggctgccattctcagtggcgagggtaatgagaaagtgcaggatcttctgttgttggatgttactcctctctcccttgggttggagaccgcgggaggagtcatgactgtgttgattcccagaaacacaaccattcccaccaagaaggagcaggtattttcgacctattccgacaaccagcctggtgtgttgattcaggtctatgaaggtgaacgtacgaggactcgtgataacaattt

SEQ ID NO: 151894 - DNA, 256 bp, Glycine max
gagtttcgttcgtcaccatgacttttaagcgcaggaatggaggtcgcaacaaacacggccgtggccacgtcaagttcattcgatgctccaactgcggcaaatgctgtcctaaggacaaggctatcaagaggtttctggtgaggaacattgttgaacaggctgcagtcagagatgttcaggaggcttgtgtctatgaacaatacacgcttccgaagctttatgtgaagatgcagtattgtgtttcctgtgctatcca

SEQ ID NO: 151895 - DNA, 257 bp, Glycine max
ctttctatatgtcatcggacggtccaaaccacaacgagtttgattttgagtttctaggcaacaccacgggggaaccatactctgtccaaaccaatgtgtatgtaaacggagtgggcaacagggagcaaaggctcaacctttggttcgaccccaccaaggattttcactcatactctatcttctggaatcaacgtcaagttgtatttttggtggatgaaacgccaataagggtgcacacgaacatggagcacaaggga

SEQ ID NO: 151896 - DNA, 253 bp, Glycine max
cgaaatttcttagacaaaaaacaaggatcagaaccgttgaatcaagttgaggaagatggcactagtctctggaggaagatcaacactgaaccctaacgcccctctttacattcctgccgcgtttcgccaagtggaggatttctctccggaatggtggcagctggtgacgacgctgacatggtaccatgactactggctaagccagcagcacgatgagggagccttctacggcgaggacgacgggtttgatggc

SEQ ID NO: 151897 - DNA, 256 bp, Glycine max
ggagtttctgctggcattgacatgttcatggttccaaagcattacacagaattcatagatgttctaaccatgttggtgaaaaataagcacattcccatgagtcgaattgatgatgcagtgggaagaattttgtgggttaagttgatgatgggtatttttgagaacccttttgctgactacagtttggtcaaatatttaggaatccaggaacacagaaatttggctagggaagcagtaaggaaatcaatggtccttc

SEQ ID NO: 151898 - DNA, 253 bp, Glycine max
acaggctctgcctgttgctttgatgattcatgataactcgtcggatcgcacggcctttgtgccggcgacgcatcattcaaatttctgccctatcaactttcgatggtaggatagtggcctaccatggtggtgacgggtgacggagaattagggttcgattccggagagggagcctgagaaacggctaccacatccaaggaaggcagcaggcgcgcaaattacccaatcctgacacggggaggtagtgacaata

SEQ ID NO: 151899 - DNA, 251 bp, Glycine max
aaggactttgaaaagagagtcaaagagtgcttgaaattgtcgggagggaagcggatgggggccggcgatgtgtcccggtcggatgtggaacggtgagagccggtccgccgatcgactcgggacattgaccgacgcggattgcgatggtggcccaagcccgggctgttgatatgctcgtggagacgtcatcatcgcgattgtggatggcagcgcgcgcccttggcgtgcctcggcacctgcgcgctcctggc

SEQ ID NO: 151900 - DNA, 252 bp, Glycine max
gagcatcaatcctgatgaagctgttgcatatggtgctgctgttcaggctgcaattttaagtggtgagggcaatgagaaggttcaggatcttctcctccttgatgtcacccctctatctcttggtttggagactgctggcggtgtgatgactgtcttgatccctaggaacactacaattccaaccaagaaggaacaggttttctcaacatactctgacaaccagcctggtgtgttgatccaggtctttgaagg

SEQ ID NO: 151901 - DNA, 254 bp, Glycine max
ctcgagccgttggtttgccctgatggaaagactattgaagcagaagcagcccacggcacagttacccgccattttagggttcatcagaagggaggcgaaaccagcacaaatagcatagcatccatctttgcctggacaagagggctagcccacagggcaaaactggatgacaatgctaaactcttggatttcactgaaaagctagaggcagcttgcattggagtagtagaggctgggaagatgaccaaggattt

SEQ ID NO: 151902 - DNA, 253 bp, Glycine max
gaggaaaccaccactggagttaagaggctctatcagatgcaggcgaatgggactcttctcttccctgctattaatgtcaatgactctgtcaccaagagcaagtttgacaacttgtatgggtgccgtcactctctccctgatggtctcatgagggctaccgatgttatgattgctggaaaggtggctgttgtggctggatatggtgatgttggcaagggttgtgctgctgcaatgaagcaggctggtgctcgtg

SEQ ID NO: 151903 - DNA, 258 bp, Glycine max
gactcttaagaattacaacaagctggtgtctcttggcttcaagattatattcttgtcaggaagaacactggacaaacaggccgtaacagaagcaaacttaaagaaggctggctaccacacatgggaaaaattaattctcaaggatccacaagatccttccactccaaatgcagtttcatacaaaacagcagcgagagagaaactgataaggcagggatacaacattgttgggatcattggagaccatggagcgatctc

SEQ ID NO: 151904 - DNA, 256 bp, Glycine max
tttcaccacgcacgcagatcctttattcctataatccttccttcgctctctccaaatttcgactctttcgatcagatccgcgacacccaccccaccaaaaccttgcgcaacccatccatgacgcttggctcaggaggatccagtgtcgttgttcctaggaacttcagattgctggaggagcttgaacgtggtgaaaaaggaattggagatggcacagttagctatggaatggatgatggtgatgcatttacatgcg

SEQ ID NO: 151905 - DNA, 148 bp, Glycine max
ctgcggtctaagtacaacgtgaggtcgatcccagtacggaaggaggacgaggtgcaggtgatgcgaggaacatacaagggtcgcgaggggaaggtgactcaggtctaccgtcgaaagtgggtgattcacattgagcgcataacccgcg

SEQ ID NO: 151906 - DNA, 257 bp, Glycine max
aaaggattctacccgccgctcgatgggaattgcgcttcaaggcgtctcgtagggctaatccgcctcacgagggtcaccaacggcacgtgcctttggggggccgaggccccctactgctggtcggcaaacggacggcgggcgcacgcgtcgcttctagcccggattctgacttagaggcgttcagtcataatccaacgcacggtagcttcgcgccactggactttcaaccaagcgcgatgaccattgtgcgaatcaac

SEQ ID NO: 151907 - DNA, 260 bp, Glycine max
ggccattcttcgagggataccatttgataatagtgcaggacggtgatccttcgaaagttatcaaggttcctgaagggtttgattatgaactctataaccgcaacgacatcaaccgcgttcttggccccaaggcacactgcatctccttcaaagactctgcttgtcgctgtttcggattcttgttgtctaagaagaagtacatcttcaccattgatgatgactgcttcgttgcaaaagatccttctggcaaagaaattaat

SEQ ID NO: 151908 - DNA, 258 bp, Glycine max
ggcttgtggcagccaagcgttcatagcgacgttgctttttgatccttcgatgtcggctcttcctatcattgtgaagcagaattcaccaagtgttggattgttcacccaccaatagggaacgtgagctgggtttagaccgtcgtgagacaggttagttttaccctactgatgacagtgtcgcaatagtaattcaacctagtacgagaggaaccgttgattcgcacaattggtcatcgcgcttggttgaaaagccagtgg

SEQ ID NO: 151909 - DNA, 256 bp, Glycine max
gatggcccaaatttccaacgaagcacaacatcaggatggcaatgtattggcttgcacaaggatgtcaacctggagactccctggtttttcattattctggtcatgtatcacagcaaaggaactatagtggtgatgaagctgatggatatgatgaaactctatgtccccttgattttgaaacacagggtatgattgtagatgatgagatcaatgccgcacttgttagacctattcctcatggactaagctacatgca

SEQ ID NO: 151910 - DNA, 256 bp, Glycine max
  unsure (1)..(256): unsure at all n locations
ctccatccaacatcgaaaataagtcgttttgtgttccgccgaaagacncggaggttagtagcaagctagcagcgctggatttggcatccaatctcggtggtaagattgacaaagccgaagttctctctgccgttcagaagtatgagtagtatcatgtttgctatggaggtcaagaggaagagatgaaagctaattataccgatatggttaataaatactacgatcttgttaccagcttatatagtttggctggggg

SEQ ID NO: 151911 - DNA, 198 bp, Glycine max
aaaggcacaggccttgaagactgctaaggcagttaagtctggtgctacctttaagaagaaggcaaagaagatccgaacttctgtcactttccacagaccgaggacattgaagaaggataggaaccccaagtaccctcgcattagcgcgcctccaagaaataagcttgatcattatcagatcctgaaataccctctgac

SEQ ID NO: 151912 - DNA, 257 bp, Glycine max
aaaggattctacccgccgctcgatgggaattgcgcttcaaggcgtctcgtagggctaatccgcctcacgagggtcaccaacggcacgtgcctttggggggccgaggcccctactgctggtcggcaaacggacggcgggcgcacgcgtcgcttctagcccggattctgacttagaggcgttcagtcataatccaacgcacggtagcttcgcgccactggcacttcaaccaagcgcgatgaccaatgtgcgaatcaacg

SEQ ID NO: 151913 - DNA, 252 bp, Glycine max
ctcgagccgattcggctcagacgtcatcgcccagctcctcggacccatcgtggcctccgtcctcctcgccttcgtcaatgcctcccctgttccagcattcgggctttccgctggagtcggagttggcaacgctttggtgttggagatcgtgatgaccttcggtttggtgtacacagtctacgccactgccgttgaccccaagaagggcaatttgggaattattgctcccatcgccattggttcattgttggc

SEQ ID NO: 151914 - DNA, 255 bp, Glycine max
attttctgaagctgcagttagaaattggtgttttcaagtttttcaaggtcttgcttacatgcaccagcgtggatacttccatcgtgacctgaagcctgaaaacttgctggttaccaaggatttcatcaaaatcgctgattttggactagcccgagaaatcagttcacaaccaccctacactgagtatgtctccacacgatggtatcgatctcctgaagtgctgcttcagtcttatatgtaacctctaaagttgat

SEQ ID NO: 151915 - DNA, 265 bp, Glycine max
tcggctcgagacaaagcaaagctcatccttgagttaaaaaatggcagcagcttcttccatggctctctcatccccagccttggctggcaaggccgtgaagctgggcccatcagccccagaagtgggaagggtgagcatgaggaagaccgtcaccaagcaggtctcctcaggaagcccatggtacggcccagaccgagtcaagtacttgggcccattctctggcgagcccccgtcctacctaaccggtgagttccaggcgactacg

SEQ ID NO: 151916 - DNA, 256 bp, Glycine max
ctcgagccgattcggctcgagccaatatagcccaagccctatacaaccaaaccctaacacacacccatttgattcagttgccatggctagcctcaaggttgcatttttggctgcagtgctctgcatggttgtggtgagtgcacccatggcacatgcagctatcacgtgcgggcaggtgacgaatagcctgatcaattgcatcggttacctccagaacggaggaacgccgccgtcgggatgctcaacggagtgaaga

SEQ ID NO: 151917 - DNA, 252 bp, Glycine max
taaggaccagactcctctgtttcctcgtatcttaggccacgaagcttcagggattgtggagagcgtgggcgagggtgtgacacatctgaaaccaggtgaccatgcactcccaatattcactggggagtgtggtgaatgcacttattgtaagtctgaagagagcaacctgtgtgagctactcaggatcaacactgacaggggtgttatgctgagtgatggaaaaacaaggttctccaaaaaggccaacccatt

SEQ ID NO: 151918 - DNA, 253 bp, Glycine max
gctgaagtctcctagcccactcctgttacctgcgcaggatgctgttactccattgtctgaagcagaagcagttgatctggtcaaaactgtttttgcatctgcaactgagagagatatatacactggagataaggttgaaatcgtcgtcctaaatgccagtggtattcgtcgtgaatacatggacctaaggaaagattaatgctttacagaaatttactgttggagataccagacttggatgagaatgtttgaa

SEQ ID NO: 151919 - DNA, 254 bp, Glycine max
gttaatctaaatggctgtgtaaatctttcagacagagtagttttgtccatggtcaactcacatggatggactctcgaggtgctaagccttgatggttgtaaaagagttggtgatgctagcttgatggcaattgcaggcagttgcccattgcttgctgatctcgatgtttccaggtgtgcaatcactgatacaggtatcgcagcccttgcacgcggaaagcagattaaccttgaggtacttctttggcaggttgt

SEQ ID NO: 151920 - DNA, 250 bp, Glycine max
attcgagcgaatcggctcaagatggaaccaaaactcaggcacgtgctatttgccactcaaatacttctggaatgaatcatcaaatgcttcatcaacttatgggagttgatcctggaactaaccctgtttgccatttccttggaagcaaggccattttatgggtacccaatttatctgtggacactgcctatcagaccaacattgttgcttaattacgccatgcatcttgagcaccatggaatgagattgt

SEQ ID NO: 151921 - DNA, 209 bp, Glycine max
cggcgaaggactcgtgggagacgctcatcttctcccagcttgtgctgttggtgccaacgaaggagacgtaatcaagaaatacatttcctcttcaacaaaccccacagccactcttgatttcaaaggtactatcttaggaatcaaaccggcaccggttatagcttctttctcagcgagaggacccaacggtttaaaccctcagatactta

SEQ ID NO: 151922 - DNA, 257 bp, Glycine max
gacagagaaaagaccagtctcctggtactaggtctgaaatccctattgtccaggttgatcctgtttttagagggactggatggtggaattggcagcctggtgaagtggaacccggttgcaaatgttaatggtctagacatatggaacttccttaggaccatgaatgttcctgtaaattcattgcattcccaagggtatgtttcgattggctgtgagccatgcacaaggccggttttacccggacaacatgaaagaga

SEQ ID NO: 151923 - DNA, 254 bp, Glycine max
cttaccaggaccagcaacgtctcatcttcgccggaaagcagctcgaggacggccgcaccctcgccgactacaacatccagaaggaatcaacccttcacctcgtcctccgtctccgtggtggcatgcagatcttcgttaagaccctcaccggcaagactattaccctagaagtcgaaagctccgacaccatcgacaacgtcaaggctaagattcaggacaaggagggaatccccccagaccacagaggctgatct

SEQ ID NO: 151924 - DNA, 251 bp, Glycine max
caactttgactggtcaccaaggacctgtatggcaagtggtgtgggctcaccctaagtttggttctcttcttgcgtcgtgttcctttgacggccgtgtcattgtttggaaggagggtaaccaaaatgaatggactcaagctcatgtgtttgatgaccacaagtcatctgtgaattcggttgcttgggcgcctcacgagttgggtctctgcttggcttgtggctcatctgatgggaataatctgtgttcactg

SEQ ID NO: 151925 - DNA, 252 bp, Glycine max
caaggctgttgggaaagtcctccctgctttgaatggaaaattgactggtatggcattccgtgttcccaccgtggatgtctctgttgttgacctcacagtgaggctggagaaagaagcttcctacgatgaaattaaaaatgctatcaaggaggaatcagagggaagttgaagggaattcttggttacactgaagatgatgtggtctccactgactttatcggcgatagcagatcaagtattttgatgcaaagg

SEQ ID NO: 151926 - DNA, 250 bp, Glycine max
actcgagccgattcggctcgagctcaccgcctttgttcactctgcttctcttgcggctagggttttagcgcagttctactagatttaaggaagatgggtaaggaaaaggttcacatcagtattgtggtcattggccatgtcgactctgggaaatccactaccactggtcacctgatttacaagcttggaggcattgacaagcgtgttattgagaggtttgagaaggaagctgctgagatgaacaagaggt

SEQ ID NO: 151927 - DNA, 253 bp, Glycine max
ggtagccaaatgcctcgtcatctaattagtgacgcgcatgaatggattaacgagattcccactgtccctgtctactatccagcgaaaccacagccaagggaacgggcttggcggaatcagcggggaaagaagaccctgttgagcttgactctagtccgactttgtgaaatgacttgagaggtgtaggataagtgggagctggaaacagcgaaagtgaaataccactacttttaacgttatttacttattccgg

SEQ ID NO: 151928 - DNA, 252 bp, Glycine max
aacctctccggcccataccaagctcgcttggtaaactgcctaaactcgcgtatctagatttgagccgcaacaagctcacgggctcaattccggcctcatttggatccttccaaaagcccgggccggctattatgctctctaaaaaccagctttcagggcgccttcctgcttctttggccaacttagactcggacaggatagacttgtcaaggaacaagctcgaaggcgatgcctccatcttttcgggagcaa

SEQ ID NO: 151929 - DNA, 248 bp, Glycine max
gtgaggtagaaccgaccactgtggtgactctgcgatgggtgcctacaagtatgtttcagagctatggcgcaagaagcagtctgatgtcatgcgcttcttgcagcgggtgaggtgctgggagtataggcagcaaccttccattgttcgtttgacaaggtctacccgccctgacaaggctcgtcgcttgggcttcaaggctaagcagggctatgtgatttaccgtgttcgtgttaggagggtggccgaaa

SEQ ID NO: 151930 - DNA, 249 bp, Glycine max
cttggctgcagatgttactgattatcttcttcaggagacattcagggctcgttacaactcggtgaagggtgcaaaagttgtcattgataggctaactggccgtaccaaggggtatggctttgtaaggttttcagaagagagtgagcaaatgagagctatgactgagatgcaaggggttctttgctcaacaagacccatgaggattggaccagcctctaataaaacccctgccactcagcccagccaaaa

SEQ ID NO: 151931 - DNA, 251 bp, Glycine max
tcaaattgcaagagacagaaaagaatcgtaagctgaatgatcttcttgatgctctggatttcaaccaagtagttatttttgtcaaaagtgtcagcagagctgccgagttgaacaagttgcttgtggagtgtaacttcccatctatctgcatacattctgcaatgtcacaggaagagagattgaaacggtacaagggcttcaaagaagggaagcaaaggattctcgtggcaacagattagttggaaggggga

SEQ ID NO: 151932 - DNA, 246 bp, Glycine max
gggtttgccaacaatatgcatgttcaaggggctggccaatcatttcgtgatcaattttctatgcctggaatgtcccaggacttcttgggcgatgacttcaaaagccagggatctcatgttccgtataatgtcactgatttctctacgcaggcttctcaaagtggatatgctgttgattatgctacacaaggagcacaaggtgggttcccagggaattttcttaaccagaattctcagctggatatt

SEQ ID NO: 151933 - DNA, 238 bp, Glycine max
aaagattaagccatgcatgtgtaagtatgaactaattcagactgtgaaactgcgaatggctcattaaatcagttatagtttgtttgatggtatcttctactcggataaccgtagtaattctagagctaatacgtgcaacaaaccccgacttctggaagggatgcatttattagataaaaggtcaacacaggctctgcctgttgctttgatgattcatgataactcgtcggatcgccgg

SEQ ID NO: 151934 - DNA, 250 bp, Glycine max
aggaaaacaattcagcgtataatggctgttcaatacaaaatccctgattatgttcacatatctcaagactgcagacacctcctttctcgtatatttgtagcaaatccattaaggaggatctctcttaaggaaattaagagccacccatggtttttaaagaatcttccaagagagctgactgaatcagctcaagctgtctattaccagagaggcaatccaagcttttcaattcaaagtgtggaggagatca

SEQ ID NO: 151935 - DNA, 252 bp, Glycine max
gaattgcgcttcaaggcgtctcgtagggctaatccgcctcacgagggtcaccaacggcacgtgcctttggggggccgaggccccctactgctggtcggcaaacggacggcgggcgcacgcgtcgcttctagcccggattctgacttagaggcgttcagtcataatccaacgcacagtagcttcgcgccactggcttttcaaccaagcgcgatgaccaattgtgcgaatcaacggttccctcgtactaggttg

SEQ ID NO: 151936 - DNA, 252 bp, Glycine max
tgagtttccacactgcataccttaggtcttccgaattcgaagttaatttgcaagatggctaaggaaaaggctcagatcaacattgtggtggttggtcatgtggaccctgaggaggcaaccaccattaacgagctgaagaagcctgttgtggagaaagaagctccagggcatgccatatgagggcatgcacgtacggcctcggaggggaaccagaaaattatgttaacaaaataatctggaaccctaatgtat

SEQ ID NO: 151937 - DNA, 248 bp, Glycine max
gttcaaggagcttcttaaggctgggatggttgcacaagatgaagataattataaagaagctattgattcagcattcaaagtatttgctccccgaggaataagtttggagtcgcaacagatactaaatgatagttctgctgaagtggactctaattcttcagatttttgggtgttggtgacagctcttaaggatttcattgcaaatgaaggtggtggggatgcaccccttgaaggactataccagacat

SEQ ID NO: 151938 - DNA, 247 bp, Glycine max
gcaaaggattctacccgccgctcgatgggaattgcgcttcaaggcgtctcgtagggctaatccgcctcacgagggtcaccaacggcacgtgcctttggggggccgaggccccctactgctggtcggcaaacggacggcgggcgcacgcgtcgcttctagcccggattctgacttagaggcgttcagtcataatccaacgcacggtagcttcgcgccactggcttttcaaccaagcgcgatgaccaat

SEQ ID NO: 151939 - DNA, 247 bp, Glycine max
gtcgagtacaagaaggaacagtgcagaaagcgatagaaaatggcttcccttttccccttttgtgctcgcaattgaccgtcgaatccaatcctgaaatcccccaataaatagagaagcgaagaaaccaaaccaaaccatcgagtgcgttgcgcccccaccgtaagtagagctatgtcgttgcgcaggcgaaccttgctcaaggtcattgttctcggcgacacggggttgggaagcctcgttgatgaat

SEQ ID NO: 151940 - DNA, 248 bp, Glycine max
gaagaaatggcgggtggtggaaaggtttcgttcaaagtcacactcacctccgatccaaagttacccttcaaagtgtttagcgttccagaggcggcaccttttactgccgttctcaaattcgccgccgaagaattcaaagtcccgccccagaccagcgctatcatcaccaacgatggtgttggcataaatccccagcagagcgcaggcaatgtcttccttaagcatggttcagaatgcgcctgattccg

SEQ ID NO: 151941 - DNA, 249 bp, Glycine max
tcattttaaggataatgatgatttggggcttgttcaagcgagatggtcatttgtaaacagggatgagaacctgctaacgaggttgcagaacattaacctgtcttttcattttgaggtggagcagcaagtcaatgggattttcattaactttttcggattcaatggaaccgccggtgtgtggaggattaagactttggaggatgctcctttttggttggaaaggactactgttgaggacatggacattgc

SEQ ID NO: 151942 - DNA, 249 bp, Glycine max
gtgttcttgccactttgtacaaggatgagcggtgttcaaagttgaagatctatccaatattgcagaaggtgtatttggagagaattctcagaaaaccagaaattgatgcttttgcagaagaattgaaaccacatcagcaagctcttcttccagacaatttcactgtgctggaccgtgctatgattgagcataatcttttgagtgctagcaaactctatactaatatcagctttaatgagctaggcacac

SEQ ID NO: 151943 - DNA, 248 bp, Glycine max
gtctcgtagggctaatccgcctcacgagggtcaccaacggcacgtgcctttggggggccgaggccccctactgctggtcggcaaacggacggcgggcgcacgcgtcgcttctagcccggattctgacttagaggcgttcagtcataatccaacgcacggtagcttcgcgccactggcttttcaaccaagcgcgatgaccaattgtgcgaatcaacggttcctctcgtactaggttgattactattgcg

SEQ ID NO: 151944 - DNA, 248 bp, Glycine max
ggaaagcaagtgtatctgttaccacagtgttatgcagagaaacaagctcttggagaagtgaatgctgagcttcttgacacccaagtgaatcctgctgtgtgggaaattagtggacacatggttttaaagaggaggaaggattatgatgaggcgtctgaaggcaatgcttggaggcttcttgctgaggtgtccctttctcaagagaggtttcaagaagtcaatgatcttgtttttgaagccattggctg

SEQ ID NO: 151945 - DNA, 244 bp, Glycine max
aaagtgaagaaattcaaccaagcgcgggtaaacggcgggagtaactatgactctcttaaggtagccaaatgcctcttcatctaattagtgacgcgcatgaatggattaacgagattcccactgtccctgtctactatccagcgaaaccacagccaagggaacgggcttggcggaatcagcggggaaagaagaccctgttgagcttgactctagtccgactttgtgaaatgacttgagaggtgta

SEQ ID NO: 151946 - DNA, 247 bp, Glycine max
cctagacctagaactggggctgctttgtccagcacctcaagggttgaatttttggacacaaacaaggtagtggcaggtcctaagtttcaacctttgaggtgcaacctcagggagaggaattgggggctgaaagtgagtgcccctttgagggttgcttccattgaagaggagcaaaagagtgttgatttaaccaatgggactaatggggttgagcatgagaagcttccagaattgaccctggtgctcc

SEQ ID NO: 151947 - DNA, 245 bp, Glycine max
gctgaatttcaagggttttttggcatgtcaggctcataggattgctcacaaattgtggcttcaagggaggaaggtcttggcgctgttgattcagaatagggtgtctgaggtttttgctgtggatattcaccctggtgccaaaattggacgtgggattttgctggatcatgcaacaggacttgttgtgggggagactgcagttattgggaataatgtgtcaattttgcataagtgacattgggagg

SEQ ID NO: 151948 - DNA, 244 bp, Glycine max
aaaggattctacccgccgctcgatgggaattgcgcttcaaggcgtctcgtagggctaatccgcctcacgagggtcaccaacggcacgtgcctttggggggccgaggccccctactgctggtcggcaaacggacggcgggcgcacgcgtcgcttctagcccggattctgacttagaggcgttcagtcataatccaacgcacggtagcttcgcgccactggcttttcaaccaacgcgatgaccaat

SEQ ID NO: 151949 - DNA, 248 bp, Glycine max
agacctcgaagtccatcccaaggacacatttgtgttcagtatagatggcaccgtactctctaatattccatactacaaaaaacatggatatggggtggagaaatttaactcgaccttgtatgatgaatgggttaacaagggcaatgcaccggcactgcccgagactcttaagaattacaacaagctggtgtctcttggcttcaagattatattcttgtcaggaagaacactggacaaacaggccgtaa

SEQ ID NO: 151950 - DNA, 247 bp, Glycine max
tctcggccgattcggctcgaggcatcgccatgttcctgaaattgaccagggacttgctgatgcttcaggttcaaaagtaaatgttagttttacaccacacctaattccaatgagccgtggtatgcaatcaactatttatgtggaaatggctccaggagtgagaattgaggacctgtaccagcaactgaagctctcatatgaggacgaagaatttgttgttgtgttgggaaatgagccattcctcgaa

SEQ ID NO: 151951 - DNA, 245 bp, Glycine max
ccaagcccactcaaccaccacaccactctctctgctcttcttctacctttcaagtgggtaaagtattaagatggcagagacattcctatttacctcagagtcagtgaacgagggacaccctgacaagctctgcgaccaaatctccgatgctgtcctcgacgcttgccttgaacaggacccagacagcaaggttgcctgcgaaacatgcaccaagaccaacttggtcatggtcttggagagatcac

SEQ ID NO: 151952 - DNA, 243 bp, Glycine max
ggattatgcagtcgcggttgttcacgcggttcagtgtgtgtgcgaccgaaggccgtgaaacacccagttatctgcagcgagagtgggagagccatcgtgtctcatcattcggtcttgattttcgaggcggttggcaccagcagcaccaccgggggaggagcttcccctgcattgtccgctcaatatctggcggaggagctgtcggaggattaccgcaatctgtcggagctggcttttagaggg

SEQ ID NO: 151953 - DNA, 246 bp, Glycine max
ggttctggataacgtcagatttgcatcactcactgttgcccttattggtgttatcttcctgggagcaaatttcatacctagcatttgggatgccttccagtttactggagcaactgccgcagtctgtataggattcatttttccagctgccatcactcttaaggaccgctacaacattgctactaaatcagacaagattttgtctgtcattatgatagtccttgcagtcttctcaaacgttgtggc

SEQ ID NO: 151954 - DNA, 241 bp, Glycine max
gtcgtcattgacaagagatactttcgcccctctgaagtcgataacctcaaaggggacgcttccaaggccaagaaggtgcttggttggaaacctaaagtggggtttgagcagcttgtgaagatgatggttgaccgggacattgagatggctaagaaagagaaggttcttgttgatgctggctacattgatgctcagcaacaaccttgaatctcatctgcaacttgaggaagaggggttttgc

SEQ ID NO: 151955 - DNA, 246 bp, Glycine max
caagaacactgctttctcctggctcaggaacatcttccatgactgtgctgttcagagttgtgatgcttcactgttgctggactccacaagaaggagcttgtctgagaaggaaacagatagaagctttgggttgagaaatttcaggtacattgagaccatcaaagaagctttggaaagagaatgccctggagttgtttcatgtgctgatatcctcgttctcaccgctagagatggattgtttcgcta

SEQ ID NO: 151956 - DNA, 271 bp, Glycine max
caaagtatagagtgaaagaatgggtgagaaaagcaagattttgatcataggaggcaccggctacatcggcaaacatatagtggaagcaagcgcaaaggctggaaatcccacttttgctttggtgagggaatccacactctctgacccctccaaggcacaactcatccacaattttgaggctttgggcgttaatttggtccgcggggatctgtacgatcatgagaagttggtgaaagctatcaagcaagtagatgtcgtcatatccacgctg

SEQ ID NO: 151957 - DNA, 146 bp, Glycine max
gcaaaaggcctttttattccaaagcaaggaaggaagaaataaaccgaatgagagcattaacctcttcttcttccactttcattccaaagcgttattccttcttcttcttcctctccattctcttcgctcttcgatcctcgtccggg

SEQ ID NO: 151958 - DNA, 102 bp, Glycine max
tttggcaatggtacagagtccaattgcaccctaccccacacagcaaccagagcagctatgctagtgagaatcaacacactcctccaaggctactcaggaatt

SEQ ID NO: 151959 - DNA, 144 bp, Glycine max
gccactttctgagtacaatacaacactgccatggctgcctcagtctccactattggagctgtcaacagagctccactgagcttgaacagctctgaagctggagattcggttcccagttcagccttctttggcacaagcttgaag

SEQ ID NO: 151960 - DNA, 264 bp, Glycine max
attttgtttgaataagatataaggcaatagtaatattagtattgttgataataattaggtagaaaaaatattatggggaggggaagagtggaactgaaaaggatagagaacaagataaacaggcaggtaacgtttgcaaagaggagaaatgggcttctcaagaaagcctatgagctttctgttctctgtgatgctgaggttgccctcatcatcttctccacccgtggcaagctttatgaattctgcagcaccaacagcatgctc

SEQ ID NO: 151961 - DNA, 154 bp, Glycine max
gcaaaggattctacccgccgctcgatgggaattgcgcttcaaggcgtctcgtagggctaatccgcctcacgagggtcaccaacggcacgtgcctttggggggccgaggccccctactgctggtcggcaaacggacggcgggcgcacgcgtcgct

SEQ ID NO: 151962 - DNA, 241 bp, Glycine max
gttctgtgtttgtgtttgttttttctctcacctgaaaatgtcttgctgcggtggtaactgtggttgcggaagctcctgcaagtgcggcaacggctgcggaggctgcaagatgtacccagacttgagctacactgagtcaaccaccaccgagaccttggtcatgggagtggcacctgttaaggctcaatttgagggtgctgaaatgggtgtgcccgctgagaacgatggctgcaaatgtgga

SEQ ID NO: 151963 - DNA, 266 bp, Glycine max
tggaaacttgtctaaaactacctacaggcggtaggggtagagttattgatgtgagatggatccaaaaaaaggggggttccagttataatccagaaacgattcgtatatatattttacagaaacgtgaaattaaagtaggagataaagtggctgggagacatggaaataaaggtatcgtttcaaaaattttgtctagacaggatatgcctgatttgcaagatggaagaccgttgatatggtcttcaatccactaggtgtactttcac

SEQ ID NO: 151964 - DNA, 265 bp, Glycine max
gtgtgcaaaagagcgtcgtagtcgcaaccctaatcagaagaagcgcacttcaagcgagtgacagccaccagccatgggtcgtatgcacagccgcggtaagggtatatcctcttctgctttgccctacaaaaggacacctcctagctggctcaagatctcttcgcaagatgtcgaagaaaatatctgcaagtttgcgaagaaaggtttgaccccgtctcagattggtgtcattctcagagattctcacggtattgctcaggtcaat

SEQ ID NO: 151965 - DNA, 264 bp, Glycine max
gttggatctcatgtatcttacctggactgaagcctcagcgcatccagatgccccaatggactggaatgctgtttttgtgtcggataaaagcctgatttttggggtggagatgttcaaaataattggtcgggtattgggttttttcaccgtctgtgatgtgtctgatatggcaaactggaaccatatttcaagggatcatgttactcatgagctggacgtttcttcttgcttgaccaaatctgtggcagtgctacacctttgaaa

SEQ ID NO: 151966 - DNA, 250 bp, Glycine max
atccttctcttcagatgatgaaggattctatgcatttgaatcagaggatgacatagatccttcgattagatatgttggaaccaattaccctcatgttaagcggcgtaagaaattgccagaccctgtagaaaaagagaaaggtgtcagtctttggtcaatgattaaggataatatagggaaggatctaacaaaaggttgccttcctgtttattttaatgagcctctttcctccctgcaagatgttttgaag

SEQ ID NO: 151967 - DNA, 263 bp, Glycine max
gcgtggttatgttgcctcaaactcaaaggatgaccctgcaaaggaggctgctaacttcacagcccaagtcatcatcatgaaccaccctggtcagattggaaatggctatgcccctgtcctcgactgccacacttctcacattgctgtcaagtttgctgaactcatgaccaagattgacaggcgatccggcaaagagcttgagaaggagcccaagtttttgaagaacggtgatgctggttttgttaagatgattccaaccaaac

SEQ ID NO: 151968 - DNA, 260 bp, Glycine max
gcatcattcaaatttctgccctatcaactttcgatggtaggatagtggcctaccatggtggtgacgggtgacggagaattagggttcgattccggagagggagcctgagaaacggctaccacatccaaggaaggcagcaggcgcgcaaattacccaatcctgacacggggaggtagtgacaataaataacaataccgggctcattgagtctggtaattggaatgagtacaatctaaatcccttaacgaggatccattgga

SEQ ID NO: 151969 - DNA, 261 bp, Glycine max
gcaggagcagcagctggcagatctgtctcggcagattctgcgggggctggcgtacctacaccggcggcacatcgtgcacagggacatcaagccctcgaatctgctgataaactcgcggaagcaggtgaagatcgctgacttcggggtgggtcggattctgaatcagacgatggatccgtgcaattcatcggtggggacgatcgcctacatgagtccggagaggatcaatacggacataaacgacgggcaatacgacgctta

SEQ ID NO: 151970 - DNA, 100 bp, Glycine max
tgcgcttgcccacgcgcttatagctacgcgtacgacgacaagaccagcaccttcacttgcgcttccgcggattataccataaccttttgcccttccccta

SEQ ID NO: 151971 - DNA, 177 bp, Glycine max
atagttctagatcgcgatggggtcacagaatcaagaatttgatcatacgaggcaccggctacatcggcaaacatatagtggaagcaagcgcaaaggctggaaatcccacttttgctttggtgagggaatccacactctctgacccctccaaggcacaactcatccacaattttgagg

SEQ ID NO: 151972 - DNA, 258 bp, Glycine max
gcggcggcaacagggcgagaagatgaagttcaatccacgtgtgtcgagcagccgccgcaagagccgaaaggctcattgtcacggcgccgtcgagcgtgcggcgggtgcttatgagcgcccctctgtcggcggagctgcggtccaagtacaacgtgaggtcgatcccagtacggaaggaggacgaggtgcaggtggtgcgaggaacatacaagggtcgcgaggggaaggtgactcaggtctaccgtcgaaagtgggtga

SEQ ID NO: 151973 - DNA, 251 bp, Glycine max
ctgctttgaaaaatgggatccaaggttgttgcatccgttgccctactcctctccatcaacattcttttcatttccatggttagctccagcagccactacgatccacagccccaaccttctcacgtcactgctcttattacacgacctagttgtccggatctgagtatttgcctccatattttaggcgggtctctaggaaccgtggatgattgtcgtgcctcatcggtggtcttggggacatttgagccatt

SEQ ID NO: 151974 - DNA, 259 bp, Glycine max
gtttgaatcagatctctacttttatacaaagagaaggggtttactatggtcaatgcagtgagatttgtggaactaaccatgcctttatgcctattgtcatagaagcagtttctactaaagattatggttcttgggtttccagtcaagtcaactaatccctgctggctgtgtggtggcagtagtggcaagtaaggtgagataaacataggtgtttcttacttttgaatatttggtttgtgttgttccataatcattcttg

SEQ ID NO: 151975 - DNA, 261 bp, Glycine max
tgttgatcgagataactagaaacagtgtgatgaaaatgaaggtccttgttttcttcgttgctacaattttggtagcatggcaatgccatgcgtacgatatgttccctctccgaatgaacactggctatggtgcccgtactccggaggtgaaatgcgcaagttggaggcttgctgtggaagcacacaacatctttggctttgagaccattcctgaagagtgcgttgaagcaacaaaggaatacatccatggcgaacaatata

SEQ ID NO: 151976 - DNA, 130 bp, Glycine max
gccagtagtcatatgcttgtctcaaagattaagccatgcatgtgtaagtatgaactaattcagactgtgaaactgcgaatggctcattaaatcagttatagtttgtgtgatggtatcttctactcggata

SEQ ID NO: 151977 - DNA, 255 bp, Glycine max
gcaagagaaagagagcgagattccgatggcgactctggattccgacgtgcctatggttcccgccggcgagccctcgagcagcgccggtccttcttccaagaagcccaagcgcttcgagatcaagaagtggaacgccgtgcgctctctgggcttgggacatcgttgtcgataactgtgctatctgccggaaccacatcatggagctctgcatcgagtggcaagccaaccaggctagcgccactagcgaggaatgca

SEQ ID NO: 151978 - DNA, 262 bp, Glycine max
ccgttgattcgcacaattggtcatcgcgcttggttgaaaagccagtggcgcgaactaccgtgcgttggattatgactgaacgcctcaaagtcagaatccgggctagaagcgacgcgtgcgcccgccgtccgtttgccgaacagcagtagggggcctcggcacctcaaaggcacgtgccgttggtgaccctcgtgaggcggattagccctacgagacgccttgaagcgcaattcccatcgagcggcgggtagaatcctttgca

SEQ ID NO: 151979 - DNA, 183 bp, Glycine max
gcttgctactgagtttccacactgcataccttaggtcttccgaattcgaagttaatttgcaagatggctaaggaaaaggctcagatcaacattgtggtggttggtcatgtggaccctgaggaggcaaccaccattaacgagctgaagaagcctgttgtggagaaagaagctccagggcatgcc

SEQ ID NO: 151980 - DNA, 255 bp, Glycine max
ggccatggttgtggccattcgcccagcaaagaaccctttttgcgtgaagggtcgcgtctactgtgacccttgccgtgctggttttgagacctcagcaaccacctacattgccggtgctgagattatgttgcaatgcaagagcagggttagcaacgaggttgtgtacaccaagaaggggtacactgactcaactggagcatacacaatgtacgtggacgaggatcacgcagatcaaatatgcagtgccaagcttgt

SEQ ID NO: 151981 - DNA, 255 bp, Glycine max
gcaccacattcacctgaggcttccaaagcaatggcttcccttgcagcatccactgctgctgcttcccttggcatgtcagaaatgcttggaaaccccatcaacttcagtggtgccacaaggccagctccatctgcttctagtcctgcctccttcaagactgtggctcttttctccaaaaagaaggctacaccaacacctccaaaaaaagctgctgctgctgctcctgccaatgatgaggctgccaagtggtatggt

SEQ ID NO: 151982 - DNA, 262 bp, Glycine max
gtcatggtcgagttggagggggaaactgacccactcgagattgctatgaaggagcttcgagagcggaaaataccctttacaattcggcgctacttgcctgatggaagctatgaagattggggagttgatgaactgattgtggaagactcctggaagaggcaagtgggtggtgattgatgattgaactgacaggtgtggggaggagtaacaggccctaaatttttgtctcctcgtaacatttatctttgaattgtttgaggtt

SEQ ID NO: 151983 - DNA, 258 bp, Glycine max
caccaattaagctttcaagagacaaactgctttgaaaaatgggatccaaggttgttgcatccgttgcccttctcctctccatcaacattcttttcatttccatggttagctccagcagccactacgatccacagccccaaccttctcacgtcactgctcttattacacgacctagttgtccggatctgagtatttgcctcaatattttaggcgggtctctaggaaccgtggatgattgttgtgccctcatcggtggtc

SEQ ID NO: 151984 - DNA, 253 bp, Glycine max
agcagttgatgttgacattggtgcaaacccttctgctgagggtggagaagatgagggagtcgatgacgcagctgttaaggttgttgacattgttgatacattcagacttcaggagcaacccgcttttgataagaaacagtttgttaccttcatgaagaggtttatcaagaatttgactcccaagctcgatgcagagaaacaagagttgtttaagaagcacattgagggagcaactaaatacctgctctctaag

SEQ ID NO: 151985 - DNA, 137 bp, Glycine max
gctcgtgcctctagggttatcatatctccatttccatttcctctctctcagtttccaagaatcttaagctatgggaaagtcttacccaaccgtgagcgctgattaccagaaggccgttgagaaggcgaagaagaagc

SEQ ID NO: 151986 - DNA, 129 bp, Glycine max
cggctcgagctcgagccgagactctcgactaccagaggatatttgacaacatgcagaaaccagcaattgtgagtgatggcagaaacattgtggatgctgataagttgcgtgcgagtggcttcatagttt

SEQ ID NO: 151987 - DNA, 254 bp, Glycine max
gggatttccatggaagtctcaaaagaagaagctcgagtggcacccgcaccggccctagtggcggtgctgccatcccctggcatgggccacctaatcccaatgatcgagttcggaaagcgagtggtgtgctaccataacctggcggtgagcttcgtgatccccactgacggcccaccttcaaaagcccaaaaggcagttctggaggcccttccggactcaatttcccaaaccttcctccctccggtcaatctctc

SEQ ID NO: 151988 - DNA, 257 bp, Glycine max
aaagccgagcagcgagagagagaaaccctagcaaaaatgccggctggtcacggtttgagatcccgcaccagagattccttctctcgtcccttcaggaagaagggtaccatcgccctcaccacatacctcagaacctaccacgtcggcgattatgtcgacgtcaaggttaacggcgccgtccacaagggaatgcctcacaagttctaccatggccgcaccggtcgcgtctggaatgtcaccaaacgtgctgttggggt

SEQ ID NO: 151989 - DNA, 252 bp, Glycine max
agaacatcacagcgcggtcttctacttctcaaccgacgaaccgataacctccggttcgctcctctcccggttcatcgagggcgacgacgcgttccgaaaccagcggttcaagctcgtgaaccggatcgtgaagggtccatggatcgtgaaaaaggctgtggggaattacagcgcttgcttattgggaaaggcgctgacgtgcaactatcacagaggaccaaactacttcgagattgacgtggacattgggag

SEQ ID NO: 151990 - DNA, 257 bp, Glycine max
ctcagaactggtacggacaaggggaatccgactgtttaattaaaacaaagcattgcgatggtccctgcggatgttgacgcaatgtgatttctgcccagtgctctgaatgtcaaagtgaagaaattcaaccaagcgcgggtaaacggcgggagtaactatgactctcttaaggtagccaaatgcctcgtcatctaattagtgacgcgcatgaatggattaacgagattcccactgtccctgtctactattcagcgaaa

SEQ ID NO: 151991 - DNA, 120 bp, Glycine max
ggcaggaaagatttagaagtcttattccaagctacatcagggactcatctgtagctgttattgtatatgatgttgcaagccggcagactttcttaaatactgctaagtggattgaagagg

SEQ ID NO: 151992 - DNA, 246 bp, Glycine max
atttaagattgagacaaggcttttttgttggttggagatgcatgattgtggtgtgctttgttttcatttcatcatatgacagccttgtgggtttctttggtgtttcttgatgcatacttaatttactttattattgtgtatttatctcttccatttacaaaaaaaaaagtttgtgtaggtttccttctttgaagtaaaaagaaattaaatatgtactgaaaatggaataatagtgtgttttatttg

SEQ ID NO: 151993 - DNA, 258 bp, Glycine max
gttgtgactcgttcttcttcgtcgttatcttcttcttttgttgtttgtgtgtttgttttttctctcacctgaaaatgtcttgctgcggtggtaactgtggttgcggaagcgcctgcaagtgcggcaacggctgcggaggctgcaagatgtacccagacttgagctacaccgagtcaaccaccaccgagaccttggtcatgggagtggcaccagttaaggctcaattcgagagtgctgaaatgggtgttcccgctgaga

SEQ ID NO: 151994 - DNA, 255 bp, Glycine max
tgaggactcagattggttatcacaacaagcaagaatggtacagaaggttgttagcacgatgccagcgcactttcaagtcagttacaaagaaacaagcgacaacgataaaaacctcctaatatgcagttctgaggtgttctatgttcctcagcgccttatcagtgattttgttgagcttgttaaccttgtgggcgacctagaaatccatcagaaggttgcaattcctatgttctttgtctccctagattctcctca

SEQ ID NO: 151995 - DNA, 223 bp, Glycine max
tgctcgagccgaatacgagcaacaaaccccgacttctggaagggatgcatttattagataaaaggtcaacacaggctctgcctgttgctttgatgattcatgataactcgtcggatcgcacggcctttgtgccggcgacgcatcattcaaatttctgccctatcaactttcgatggtaggatagtggcctaccatggtggtgacgggtgacggagaattaggg

SEQ ID NO: 151996 - DNA, 263 bp, Glycine max
gagggagtcagagaaaccctaggtaagaagaaaagatgccggctggtcatggtttgagatcccgcaccagagattccttctctcgtcctttcaggaagaagggaaccatcgccctcaccacatacctgagaacctaccacgtcggcgactatgttgacgtcaaggttaacggtgccgttcacaagggaatgccccacaaattctaccatggccgcaccggacgcgtctggaatgtcaccaaacgtgctgttggcgtcgaagtc

SEQ ID NO: 151997 - DNA, 256 bp, Glycine max
  unsure (1)..(256): unsure at all n locations
cacccatggcacatgcagctatcacgtgcgggcaggtgacgaatagcctgatcaattgcatcggttacctccagaacggaggaacgccgccgtcgggatgctgcaacggagtgaagagcctcaatgccgccgccaagaccaccgccgaccgccagacggcgtgcaactgcctcaagtacancgccagccaaatctccggcttcaaagccaacaacgccgcctcgctccccggcaaatgcggagtctccatccccta

SEQ ID NO: 151998 - DNA, 253 bp, Glycine max
ctcgttcttcttcttttgttgttctgtgtttgtgtttgttttttctctcacctgaaaatgtcttgctgcggtggtaactgtggttgcggaagctcctgcaagtgcggcaacggctgcggaggctgcaagatgtacccagacttgagctacactgagtcaaccaccaccgagaccttggtcatgggagtggcacctgttaaggctcaatttgagggtgctgaaatgggtgtgcccgctgagaacgatggctgca

SEQ ID NO: 151999 - DNA, 253 bp, Glycine max
gatcttcacattttacaaggcacaaggtctttcagtgggttcatcccttgtagaagaagataagttggatcttgctacatcactacttgcaaaagccaaggaaaagggggtgtctctcttgttaccaagtgatgtggtgattgcagacaaatctgcccccgatgcaaacagcaaggtcgtgccagcatctgccatccctgatggctggatgggattggatattggtccagattctgttaaatcattcagtgaa

SEQ ID NO: 152000 - DNA, 253 bp, Glycine max
atgagctcagagactaggcttcttattgagaaagaggtgaagcaattcctggagagggcctacaacaatgcaaaaactattctgaccactcacaacaaggagcttcatgcacttgcgaatgcccttctggagcatgaaaccctttcaggaactcagataaaggcattgcttgcccaagttagatctcagatgcagcagcagcagccccaaacacttgaagctcagaacagttcacaatccaacacagtgcctc

SEQ ID NO: 152001 - DNA, 252 bp, Glycine max
gacgcatcattcaaatttctgccctatcaactttcgatggtaggatagtggcctaccatggtggtgacgggtgacggagaattagggttcgattccggagagggagcctgagaaacggctaccacatccaaggaaggcagcaggcgcgcaaattacccaatcctgacacggggaggtagtgacaataaataacaataccgggctcattgagtctggtaattggaatgagtacaatctaaatcccttaacgag

SEQ ID NO: 152002 - DNA, 246 bp, Glycine max
tttacattggttgctagcaagtggtatggggaggcaaccctgctgtgacaaacttggggtgaagaaaggtccatggactgctgaggaagacaaaaaactcataaacttcattctctccaatggccagtgctgttggcgagctgttcccaagcttgctgggcttcggcgttgtggtaagagttgtcgtcttcgttggactaattatctaaggcctgacttgaagagagggctcctcacacaggctga

SEQ ID NO: 152003 - DNA, 121 bp, Glycine max
ggcaggaaagatttagaagtcttattccaagctacatcagggactcatctgtagctgttattgtatatgatgttgcaagccggcagactttcttaaatactgctaagtggattgaagaggt

SEQ ID NO: 152004 - DNA, 253 bp, Glycine max
ggctctgcgagtgattgctgaaagtctatctgaagaggagattgctggtttgagagaaatgtttcaggctatggatactgataacagtggtgcaatcactttcgatgaactcaaagctggtctaagaagatatgggtctacccttaaggatatagaaatacgtgatcttatggaagcggctgatgtggacaaaagtggaaccatagattatggggagtttattgctgctacatttcatctcaacaaactagag

SEQ ID NO: 152005 - DNA, 249 bp, Glycine max
ctcgagccgctctttctgtagccctcaatcaccggagagagagtgagtgcaaagccatcgacttcttctcagacaagtagtttggtaaaagatggctgatgctgaggatattcaaccccttgtctgtgacaatggaactggaatggtgaaggcaggatttgctggtgatgatgctcctagggctgtgtttcccagtattgttggccgacctcgtcatactggtgttatggttgggatgggtcaaaagga

SEQ ID NO: 152006 - DNA, 245 bp, Glycine max
ggatttcgattggcgagacaaaggagccgtcactaacgtcaaggaccaaggggcgtgtggttcgtgttggtctttcagtacgacgggagcgttggaaggagctcattatctggccactggtgagctcgtgagccttagcgagcaacagcttgtggattgcgatcacgtgtgtgatccagaagaatatggagcgtgtgactcaggctgtaatggtgggttgatgaacaacgcatttgagtacatac

SEQ ID NO: 152007 - DNA, 246 bp, Glycine max
tatagcccaagccctatacaaccaaaccctaacacacacccatttgattcagtttccatggctagcctcaaggttgcatttttggctgcagtgctctgcatggttgtggtgagtgcacccatggcacatgcagctatcacgtgcgggcaggtgacgaatagcctgatcaattgcatcggttacctccagaacggaggaacgccgccgtcgggatgctgcaacggagtgaagagcctcaatgccgcc

SEQ ID NO: 152008 - DNA, 250 bp, Glycine max
accggaactcgtttctttcaaaacacttcaaacatctcgaacgctctctttccggcaactaggttaaagttcatcaatggcaggtcgcggcaaaaccctaggatctagcgccgccaagaaggctacctcaaggagcagcaaagccggcctccaattccccgtcggccgtatcgcccgtttcctcaaggccggaaaatacgctgagcgtgtcggcgccggcgcccctgtctacctcgccgccgtactcgaa

SEQ ID NO: 152009 - DNA, 260 bp, Glycine max
gaaagccaaggtgaatttcccggatgagccttcaggcgctgctgcttcctcaaaacgcctcaaggtgaatccagaggctcagccaatgaaggaaaatctgaacaccgtgaagccgaaaatgaaccagatgttcaattttggtcacaatctggagggctactacagcccaatagatcaggtggaacagaaaccactggttaaccagtatgttaaccctgccccgttccctggaaacggagttcaagtctcacctgttactc

SEQ ID NO: 152010 - DNA, 259 bp, Glycine max
gcggggctacccgctgagtttaagcatatcaataagcggaggaaaagaaactaacaaggattcccttagtaacggcgagcgaaccgggaaaagcccaccatgaaaatcggtcgccctcggcgtccgaattgtagtctggagaagcgtcctcagtggcggaccgggcccaagtcccctggaagggggcgccagagagggtgagagccccgtcgtgcccggaccctgtcgcaccacgaggcgctgtcggcgagtcgggttg

SEQ ID NO: 152011 - DNA, 260 bp, Glycine max
aaaatgaatggactcaagctcatgtgtttgacgaccacaagtcatctgtgaattcggttgcttgggcgcctcatgagttgggtctctgcttggcttgtggctcgtctgatgggaatatatctgttttgactgcaagagcagatggtggctgggacactgcgagaattgatcaggctcatccagttggtgtcacttcggtgtcatgggcaccatcgatggcacccggagcccttgtcggtgcagggctgcttgatcctgta

SEQ ID NO: 152012 - DNA, 230 bp, Glycine max
ctggttttgagggagacaacatgattgagaggtccacaaaccttgactggcacaagggtcctactctgctagatgcacttgaccagatctctgagcccaagaggccttctgacaagcccctcaggctaccccttcaggatgtgtacaagattggaggaattggaactgtgcctgtgggacgggttgagactggtgtcttgaagcctggaatggtggtgacttttgcacca

SEQ ID NO: 152013 - DNA, 242 bp, Glycine max
gttagctttggctgagaagttggcttctgaatctgggttcttggaacgcaagcttcctaataacaaattggaagtaggagacttcaggatcccaagattcaaaatttcttttgggtttgaagtctctaatgtgctgaaggagctgggagtggttttgcctttctccgttggaggtttgacagaaatggtggactctgctgtgggtcaaaacttgtttgtttccgatatatttcataagtctt

SEQ ID NO: 152014 - DNA, 249 bp, Glycine max
gccggaggtagggtccagcggctggaagagcaccgcacgtcgcgtggtgtccggtgcgcccccggcggcccttgaaaatccggaggaccgagtgcctcccacgcccggtcgtactcataaccgcatcaggtctccaaggtgaacagcctctggtcgatggaacaatgtaggtagagtatcctagaaatgtaaaattttttagcccttgtattttagggcgtctagattagtttttgtattaagggtaat

SEQ ID NO: 152015 - DNA, 255 bp, Glycine max
accccaccgacgaggagcttctcgttcagtatctgtgccgcaaggtcgctggccaccatttctctcttccaatcattgccgaaattgacttgtacaagttcgacccatgggttcttccaagtaaagcgattttcggtgaaaaagagtggtactttttcagccccagagacaggaaatacccgaacgggtctcgacccaacagagtagctgggtcgggttattggaaagccaccggaaccgacaagatcatcacca

SEQ ID NO: 152016 - DNA, 254 bp, Glycine max
tgagtgcgaccatgggacccttgttttgggggttgaataaattgaaattgttgaggatttcttccgaggatgagcttgcggggatggatcttacccgtcatggaggatttgcttatgcttatgaggatgatgagtcgcacaagcatgggattcagctgaggaaggttgggcccaacgcgtcgtccacacccaccactgatgaatgattacgatcacgattaattcggccccgacagtattatcttcaattgaaa

SEQ ID NO: 152017 - DNA, 251 bp, Glycine max
cagagattgcagagagattggggaagacaccagcacaagttgcccttcgatggggcttgcaagcaggtcatagtgtgcttcctaagagcactaatgagtccagaatcaagggaaattttgatatctttgactggtctattcctcaagatttgatgaccaagatctctgaaattaagcaggaaaggctagttaaggccagtttttttgttcacgagacctatggtgcctataggagcattgaagacttctgg

SEQ ID NO: 152018 - DNA, 247 bp, Glycine max
gtaagttgatgatgtaaatagtacatgatggagctcgagtttattcatttatcaggggcaagtatctaaggttagtaaaaattaataagttagaaaaacttcgtaagtttatttttgatagaaaaatagaaaggatccaatttgagcaaggttcaaaaaaaatggttggaattagtaaaactgttttgatcaaaagtgtagccgcaggaattaaccttctatttgtatgattctttcatagaaagaa

SEQ ID NO: 152019 - DNA, 245 bp, Glycine max
cttcgtctcaaatctcttcgttccttcgattcgttccatttcttccaaaatggccaaagacccagttcgcgttctcgtcactggagctgcagggcaaattgggtatgctcttgtccctatgattgctaggggagtgatgttgggtcctgaccagcccgtgatcctccacatgcttgacattcctccggcagcagagtcattgaatggggttaaaatggaattggtggatgctgcattccctcttc

SEQ ID NO: 152020 - DNA, 244 bp, Glycine max
gtccggagacgtcggcgggggccccggaaagagttatcttttctgtttaacagcctgcccaccctggaaacggctcagccggaggtagggtccagcggctggaagagcaccgcacgtcgcgtggtgtccggtgcgcccccggcggcccttgaaaatccggaggaccgagtgcctcccacgcccggtcgtactcataaccgcatcaggtctccaaggtgaacagcctctggtcgatggaacaatg

SEQ ID NO: 152021 - DNA, 243 bp, Glycine max
catgaatggggaattggaactggagaaattcatcactcacacagttccattctctgagattaacaaggcttttgattacatgctgaaaggggagtccatcagatgcatcattcgtatgggggagtaaatctatcaaaccaatgatgacatggtccctgtgagggactgagttctctttctagttgtgaaagtgaaaagaagaaaataaatttcatatatatgatatatccctttagaattatt

SEQ ID NO: 152022 - DNA, 242 bp, Glycine max
gactctgctaagtggtaacacgatgtatagagtctgacacctgcccggtgctggaaggtcggaaggagaagtgttataagctttgaatggaagccccggtaaacggcggcagtaactctaactgtcctaaggtagcgaaattccttgtcgcataagtagcgacctgcacgaatggtgtaacgactgccccgctgtctccgacatggacccggtgaaattgaattctccgtgaagatgcggag

SEQ ID NO: 152023 - DNA, 243 bp, Glycine max
cggcagttagagacagagagagagagaaacaaaaccctaattggtgagtggcgaaaatggcgcagcggcggcggcagcagcagcaacaggagcagcagtaatcgagcaagtgcagtgcttcgggcggaagaagacagcggtggcagtgacctactgcaagcgtggtcgaggcctcatcaagatcaatggctgcccgatcgagctggtggagccggagatcctccgtttcaaggccttcgagcc

SEQ ID NO: 152024 - DNA, 266 bp, Glycine max
aattcggctcgagggcaggaaagatttagaagtcttattccaagctacatcagggactcatctgtagctgttattgtatatgatgttgcaagccggcagactttcttaaatactgctaagtggattgaagaggtgcgaacagaaagaggcagtgatgtcattattgttcttgttgggaacaaaactgatcttgttgagaaaagacaagtctctatagaggaaggagaagcaaaagcacgtgagctcaatgtcatgtttattgaaac

SEQ ID NO: 152025 - DNA, 256 bp, Glycine max
gtttgtgtttgttttttctctcacctgaaaatgtcttgctgcggtggtaactgtggttgcggaagctcctgcaagtgcggcaacggctgcggaggctgcaagatgtacccagacttgagctacactgagtcaaccaccaccgagaccttggtcatgggagtggcacctgttaaggctcaatttgagggtgctgaaatgggtgtgcccgctgagaacgatggctgcaaatgtggaccaaactgctcctgcaacccct

SEQ ID NO: 152026 - DNA, 248 bp, Glycine max
cttgaactcacttcggttgttcatgatgatttgctttcgctctcgtgggttgggaagctccttcattgcttcctgtgttgccaagaggaattcaaggccattctccacagccacagggctcaggtgttgagacccccattggatcgcatggtgtctgaatactttgagcgcagtgtgaaggctttagatgtttgcaatgccattcgtgacggtattgagcagattcgccaatggcagaagctgttgga

SEQ ID NO: 152027 - DNA, 244 bp, Glycine max
caatttgggcagcctgagacaacagtatggactggccaagtcagccaatgaagtggttttggtgattgaggcttacaaagctttacgtgatcgagcaccataccctgccaatcgtgttgtatgccatctcagtgggagctttgctttcatagtttttgacaagtccacttctaccctttttgtggcttctgatcaagctggtaaggttcctctttattggggaatcacagctgatggatatgta

SEQ ID NO: 152028 - DNA, 244 bp, Glycine max
gtcgagttcaaggcagtcctgtttgtaccacctaaggcacctcaagatttatacgagagctattataacgcaaacaaatccaacctgaagttgtatgttagacgtgtgttcatttcagatgaatttaatgaactgttgcctaagtacctaaactttttgctgggtcttgttgattctgacacattgccacttaatgtatcgcgagaactgcttcagcaacatagtagtctaaagacaatcaaga

SEQ ID NO: 152029 - DNA, 238 bp, Glycine max
acgctttctcgtttgagatccctcaagggatccactaactgaaggagcaatggggttgacatttaccaagctttttagccggcttttcgccaagaaggaaatgcgaattctaatggttggtcttgatgccgctggtaagaccaccatcctgtacaagctcaaacttggagagatcgttaccacaattcccaccattgggttcaacgtggagactgtggaatacaagaacattagtttc

SEQ ID NO: 152030 - DNA, 244 bp, Glycine max
cttgttcaccaattaagctttcaagagacaaactgctttgaaaaatgggatccaaggttgttgcatccgttgcccttctcctctccatcaacattcttttcatttccatggttagctccagcagccactacgatccacagccccaaccttctcacgtcactgctcttattacacgacctagttgtccggatctgagtatttgcctcaatattttaggcgggtctctaggaaccgtggatgattg

SEQ ID NO: 152031 - DNA, 248 bp, Glycine max
ccctataacaaccaaaccctaacacacacccatttgattcagtttccatggctagcctcaaggttgcatttttggctgcagtgctctgcatggttgtggtgagtgcacccatggcacatgcagctatcacgtgcgggcaggtgacgcatagcctgatcaattgcatcggttacctccagaacggaggaacgccgccgtcgggatgctgcaacggcgaatgaagctcaatgccgccgccaagaccaccg

SEQ ID NO: 152032 - DNA, 256 bp, Glycine max
aagaaaggctccggtgtatagaaaggacctgcccgtttctaaaaaaaatcatagaaacgatggaacccacccattttttatatatgtcctaatttatttactattacttactatgttttttgatatctagtatcaatacaatttattattttgaggttgaatatttagaaaaaaaaatatatatatacaatcgtggttggggaggttatagtagcaagagccattggaatttttttttttatacattggaagaatc

SEQ ID NO: 152033 - DNA, 259 bp, Glycine max
ctcatggccaggaagatgaaggacactgattctgaggaggagctgaaagaggcattccgggttttcgacaaggaccagactgggttcatctctgctgctgagctccgccagaggatgaccaacctcggggagaagctcaccgatgaagaggttgatgagatgattcgcgaggccgatgttgatggcgatggccaaataaactacgaggagttcgttaaggtgatgatggccaagtgatcatcacattatggccacaaaa

SEQ ID NO: 152034 - DNA, 196 bp, Glycine max
gaaaaaaaaaaaaaaaaaaaaaaaaaaaaaaaaaaaaaaaaaaaaaaaaaagaaaaaaaaaaaaaagaaaaaaaaaaaaaaaaagaaaagagggaggagaaagagggtcccacaatagcagggggtgtacaagaacggcggaggcaaaggcgaaaccagggaccgcgaggaaagaggggggggcgaaaaagccaaa

SEQ ID NO: 152035 - DNA, 263 bp, Glycine max
aaacggtggaaggtacagaggcagctccagcaacaaaggcaagcggtgagtgatgctgaacctcaggtggatgatgagattgaagatgttccagatggacaattatgtgtgatatgtctgatgaggagaaggcgttctgtcttcattccctgtgggcatcttgtgtgttgccaagggtgtgccatatcagttgaacgtgaagttgcacccaaatgtcctgtttgtcgtcaggagattcgagattcagtgcggacttatgaatc

SEQ ID NO: 152036 - DNA, 269 bp, Glycine max
aagaaatttaagtgaggagctagagaatgatgatgaagtctgctatgtgtgcagtggtggttgtagcacttcttcttctggcggcggtggggcccatggctgaggctgtgacatgcaccccaacagagttgagtccgtgtcttccagcaatcacttccggtgctaaaccttccaatgcttgttgcccgaagctgaagcagcaaaaaccatgcttatgtggctacctcaaaaacgctagcttgaagcagtatgttaactctcctaatgcc

SEQ ID NO: 152037 - DNA, 274 bp, Glycine max
atatagcccaagccctatacaaccaaaccctaacacacacccatttgattcagtttccatggctagcctcaaggttgcatttttggctgcagtgctctgcatggttgtggtgagtgcacccatggcacatgcagctatcacgtgcgggcaggtgacgaatagcctgatcaattgcatcggttacctccagaacggaggaacgccgccgtcgggatgctgcaacggagtgaagagcctcaatgccgccgccaagaccaccgccgaccgccagacg

SEQ ID NO: 152038 - DNA, 273 bp, Glycine max
gctggttccctccgaagtttccctcaggatagctggagcccgcgggcgagttctatcgggtaaagccaatgattagaggcatcgggggcgcaacgccctcgacctattctcaaactttaaataggtaggacggtgcggctgctctgttgagccgcgccatggaatcgagagctccaagtgggccatttttggtaagcagaactggcgatgcgggatgaaccggaagctgggttacggtgcccaactgcgcgctaacctagaccccacaaaggg

SEQ ID NO: 152039 - DNA, 259 bp, Glycine max
cggagatctagtccgccaccaacaacttcgacgacgtcttcatcgtcggcgtcggcggattcggccacgtgtacaaaggctacatcgacaacggctccacccccgtcgccatcaagcgcctcaagccgggttcacagcaaggcgcgcacgagttcatgaacgagatcgagatgctatcgcagctccgccacctccacctcgtatctctcataggttattgcaacgagaacaacgagatgatcctcgtctacgacttcat

SEQ ID NO: 152040 - DNA, 258 bp, Glycine max
ctcgagccgattcggctcgaggttctagttgatacagctggccgagatgcaggataatgaaccattgatgagagcactgtcaaagctcgtctacctcaacaatcctgaccttatcttatttgttggagaagcactggttggtaatgatgcagttgatcagctttcgaaattcaaccagaaattagccgacctctcaacatctcccacacccagattgatcgatgggatcttgctcacgaagtttgacactatcgatga

SEQ ID NO: 152041 - DNA, 166 bp, Glycine max
  unsure (1)..(166): unsure at all n locations
agaatngnaactatgactggtgtgagcctttcatgccccagggttttcttcaacgcatcagcctcacngcaaaacgcgcatnctgtaaanttctcacttccacacaacatannanantnanannttantatanagttnggtcatgtnatgangattcgaacctttc

SEQ ID NO: 152042 - DNA, 253 bp, Glycine max
cgctcgagccgattcggctcgagcaagaaattgcagggttggagttagtcacaagtgagaaatttcctaagctccacaattagagccaagaatttttgaaccatccaattgtcaaagaaagtctgccccctagagatcctgttttctcctttttcaagggtctctatgaaagcctttttggttcaaaatagatttgatgatgtggtgtgagacttagtatttctaagaattatgtgtttgttaaaggcttcta

SEQ ID NO: 152043 - DNA, 261 bp, Glycine max
cggatcccccttcgaagtgaattatattgcagcgaatcacacacactctgaacaacgcccagcatgcaggaccagtgataggtttaacatcaattcccagcttgagcatctccaagccacatatgttggaactggccatgccgatttgaacagatttgagtgggcagtgaacattcaacgagatagcgatgcatcatatattggacactaccctttactgggattctttgctattgctgaaaatgaatctattggaagaga

SEQ ID NO: 152044 - DNA, 257 bp, Glycine max
aatctctcaatcgttttctacataatacaaacctctctaatttttgaagcttattatacccaatctcgatatgcagatcttcgtgaaaaccctaactggcaagacgatcaccttggaggtggagtcctctgacaccatcgacaacgtgaaggccaaaatccaagacaaggagggcattcctccggatcaacagcgtttaatcttcgccggaaaacagctcgaagacggcagaaccctcgccgactacaacatccaaa

SEQ ID NO: 152045 - DNA, 257 bp, Glycine max
cggctcgagcggctcgagaaaaccacccattgtgaaaccaccaattgtttatccaccagttgtgccaaaaccaccaattgttacaccaccttatgtgccaaaaccacccattgtgaaaccaccaattgtttatccaccagttgtgccaacaccacctattgtgtatccacctgttgtaccaactccaccggtggttactccacccgtggttacaccaccaagtcctccaagtgaaacaccatgtccaccaccaccac

SEQ ID NO: 152046 - DNA, 145 bp, Glycine max
  unsure (1)..(145): unsure at all n locations
ctcatggccaggaagatgaaggacactgattctgaggagaagctgaaagaagtatgccaggtttacgaaaaggacatagttggttcatttcgactgtaagattcggaatgaataacnaacctgggggagaagctcaccgatgaag

SEQ ID NO: 152047 - DNA, 256 bp, Glycine max
atccttttgaccaggatgactgggagcactatgctaagcttactgctgaggttggaaccaatgtacaaattgttggtgatgatctcttggttaccaaccccaagagggttcagaaggcaattgatacaaaagcatgcaatgctcttctccttaaggtcaaccaaattggttctgtgactgagagtattgaagctgtcaggatgtccaaaaaagctggatggggtgtcatggcgagtcacagaagtggagagactga

SEQ ID NO: 152048 - DNA, 259 bp, Glycine max
tgagaacgaaaaaagaaaaaaaaaaccctaacgcactcgagaccctgagatttttcatcttcgtttctcattctctttttgatcatggacgtcgaggtgcggcagatcttcaacaagttcgacaagaacggcgacggaaaaatctcggtaacggagctgaaggacatgctcgcggccctcggatccaaaacgacggacgaggagttgaaacgcatgatggaggagctcgaccagaacggcgacggtttcatcgacctca

SEQ ID NO: 152049 - DNA, 261 bp, Glycine max
tgacgagcatcatggcctcaagagcagtgttattgttggctatgtgtgtgcttccggcgatggttgtggccattcgcccagcaaagaaccctttttgcgtgacgggtcgtgtctactgtgacccttgccgtgctggttttgagacctcagctaccacctacattgctggtgctgcgattatgttgcaatgcaagagcagggttagcaacgaggttgtgtacacgaagcaggggtacaccgactcaaccggagcatacacaa

SEQ ID NO: 152050 - DNA, 263 bp, Glycine max
ctagttgatttggttcatgacaaagaaaaaggaaggattttgaaattggacagcattagttctggggaccagtggaaaaatgtggatgttttgattttcaacacctaccattggtggactcacactggacagtctcaagggtgggattactttcaagtggggcatgaattaataaagaacatggatcacatggaagctttcaagattgggctgactacttgggctaaatgggttgattctaacattgatccttcaaagactaa

SEQ ID NO: 152051 - DNA, 295 bp, Glycine max
gtacgtagcactcggttcggctcgtagtgaaaatggcgcagtgtgtgaccaacacattcgtgcaaggaaaaccctttcttccagttgcagcagctcccactaaaaatgttcggagagcggttcagtgcggtgtgtggtgcaagaagaaggagatacacccgcaattctacgaggaatcgaaggtgtactgcaacggggacctggtgctgacgaacggtgggacccagcaggaatacgtggtgaacgtgtggtcggggaaccaccccttctacctcggaagccggtcggcgtctat

SEQ ID NO: 152052 - DNA, 266 bp, Glycine max
cgatcatgtctcacttcaagggcaagtaccatgatgagcttattgccaatgctgcttacattggcactcctggaaagggtattcttgctgctgatgagtcaacagggacaattggcaagcgtttggccagcatcagtgtagagaatgttgaatccaacaggcgtgctcttagggagctgcttttcaccgctcccggtgctcttaaatatctcagtggtgtcatcctctttgaggaaactctctaccagagcacagctgcaggcaag

SEQ ID NO: 152053 - DNA, 261 bp, Glycine max
cttgttcaccaattaagctttcaagagacaaactgctttgaaaaatgggatccaaggttgttgcatccgttgcccttctcctctccatcaacattcttttcttttccatggttagctccagcagccactacgatccacagccccaaccttctcacgtcactgctcttattacacgacctagttgtccggatctgagtatttgcctcaatattttaggcgggtctctaggaaccgtggatgattgttgtgccctcatcggtg

SEQ ID NO: 152054 - DNA, 257 bp, Glycine max
gtacccagagattgatccagctctgaaccctgaccacgtccctcacattctgaagaagtgccctgatgccattccagaccctaaggccgtgcagtacgtgagacacgaccgtggcacccccatgattctagacaacaattactacagaaatatattggacaacaagggcttgttgatagtggatcaccaactagccaatgacaagaggaccacgccttatgtgaagaaaatggccaagagccaggactatttcttca

SEQ ID NO: 152055 - DNA, 253 bp, Glycine max
ctcagccacccaaagccttattcattttgtccgacaagaaatggatggttatcgcctttacacagtggttccttaccttctgaagtttcttgataaccttacaaatatttatgtaaggttcaatcgtaagagacttaaaggtcgttctggggaagaagactgcaggatagcactatcaactctttaccatgtgcttttgttatcctgtaaagtgatggctccttttacacctttcttcactgaggtgctctat

SEQ ID NO: 152056 - DNA, 246 bp, Glycine max
gaagaagatcacactgaagagttcggacggcgaggctttcgaggtggacgaggcggtggcgctggagtctcagacgataaagcacatgatcgaggacgactgcgccgacagcggcatccctctgccgaacgtgacgagcaagatcctggcgaaggtgatcgagtactgcaagaagcacgtcgaggccgcgaatcccgaagacaaaccctccgaggacgatctcaaagcctgggacgccgatttcgt

SEQ ID NO: 152057 - DNA, 255 bp, Glycine max
  unsure (1)..(255): unsure at all n locations
ggtccccggtggtttctcggagcagcattgacgatggaatgctttccttcacttccctgccggctgcaaatataaaatcagttnacggtgcntgtgtcggtgccggtgattcncgatcactcgganctggaagctgaaccaaagattctatgctctacgagctgtagttccaaatgtanccaagatggacaaggcatcgctgttgggggacgccatantgtacatnaacgagttgaaatcgaagctcaacgtgct

SEQ ID NO: 152058 - DNA, 247 bp, Glycine max
cgtgcctctagggttatcatttctccatttccattttctctctcacttttcaagaatcgtaagctatgggaaagtcttacccaactgtgagtgctgattaccagaaggccgttgagaaggcgaagaagaagctcagaggcttcatcgctgagaagagatgcgctcctctaatgctccgtttagcatggcactctgctggaacctttgacaagggcacgaagaccggtggacccttcggaaccatcaa

SEQ ID NO: 152059 - DNA, 258 bp, Glycine max
cggctcgagcggctcgagtctctctgactccttccgttacaaggaaattgagaatggaatgctatgggaagtagaggggaagtgggttgttaaaggagcagttgatgtagacattggtgcaaacccttctgctgagggtggaggagaagatgagggagttgatgatgcagctgttaaggttgttgacattgttgacacattcagacttcaggagcaacccgcattcgataagaagcagtttgttaccttcatgaagag

SEQ ID NO: 152060 - DNA, 252 bp, Glycine max
cgagataactagaaacagtgtgatgaaaatgaaggtccttgttttcttcgttgctacaattttggtagcatggcaatgcatgcgtacgatatgttccctctccgaatgaacactggctatggtgcccgtactccggaggtgaaatgcgcagtgtggaggcttgctgtggaagcacacaacatggttagctttgagaccattcctgaagagtgcgttgaagcacacaaggaatacaccctggcgaacatatag

SEQ ID NO: 152061 - DNA, 261 bp, Glycine max
cttgggtgaaactaagtggaggccgaaccgactgatgttgaagaatcagcggatgagttgtggttaggggtgaaatgccactcgaacccagagctagctggttctccccgaaatgcgttgaggcgcacagttgactagacatctaggggtaaagcactgtttcggtgcgggccgcgagaagcgtaccaaatcgaggcaaactctgaatactagatatgacctcaaaataacaagggtcaaggtcggccagtgagacgatgg

SEQ ID NO: 152062 - DNA, 255 bp, Glycine max
agttggttcatctcttgtggaggaagacaagcttagccttgcaactacacttctcgaaaaggccaaggctaaaggggtttctttgttgcttccaactgatgtggtcatagcagacaagtttgctgctgatgctaacagcaagactgtgccagcatcaagcatcccagacgggtggatgggattagatattggtcccgattccatcaagacatttggtgaagcattggataagacccagaccgtcatttggaatgg

SEQ ID NO: 152063 - DNA, 249 bp, Glycine max
cggctcgagctcgagccgacttcggctcgagggcaaagagattgggtggatttacggctcggtcggagaagatattttgactggattcaagatgcactgcagagggtggaaatcagtatattgcatgccaaagcgaccagcattcaagggatctgccccaataaatctatcagatagattgcaccaagttctgaggtgggctcttggctctgttgaaatttttcttagtcgtcattgcccgttgtggta

SEQ ID NO: 152064 - DNA, 252 bp, Glycine max
aatttttgtctgctcactcgctcttctccgccacttctgaatctattgaatcaacaatcatgtcggacgaagagcaccatttcgagtccaaggccgacgccggagcctccaaaacctaccctcagcaagccggtaccatccgcaagaacggctacatcgtcatcaaaggccgcccctgcaaggttgtggaagtttcgacttccaaaactggaaagcacggtcacgctaagtgtcactttgttggaattgata

SEQ ID NO: 152065 - DNA, 250 bp, Glycine max
cttgatgtgcatgttgggcaatcagttgcagtgttagtaaccttgcatcagcctccaaaggactgctacattgttgcctcaacaagatttaccgagacacctctcactacaactgcagtactacactatgcaaactctttttcctctgcattaggacccgtgcctgctccccccgttgataaatatgactttgattggtccatgaagcaagctagaacctacagatggcatctgacagcaaatgctgcta

SEQ ID NO: 152066 - DNA, 250 bp, Glycine max
cactcatcagatcccagtcatcaattgcgttaacaactcgtaaggcaaccatgaggggcatgctttctgtaaggacagccttagttcaacatcgtagtgagcaattgggccttggtttcaggctatttagcactcagggtgcttccactgctagtaccccacagccgccgccaccacctccaccaccagagacaacccattttggtggccttacggatgaggacaggatatttactaccttatatgggct

SEQ ID NO: 152067 - DNA, 257 bp, Glycine max
  unsure (1)..(257): unsure at all n locations
ggttaacagagtnccaccccgacattgaaggggcttctttacagctcactggagaatgaagaacacatatgtgtattgaaggaccgcaacaagccgatcatcttcaccatggcaagacttgaccgtgtgaagaacatcacgggacttgtggagtggtatggcaagaatgcgcgcctccgcgagttggtaaacctcgtngtggtggccggagacaggaggnaggagtccanggacttggaagagaaggccgagatgaa

SEQ ID NO: 152068 - DNA, 258 bp, Glycine max
aagaaacaaaacaaaaaagagcagagagagagaggaaccatcaccaaccctaatttcttagctaaaccctattcgtttagcatttcctctcttttctcccactcgtaaatcctctcccaaacttttcagatccaaataaatcatggttttctgggtttttggctacggttcactggtgtggaaccctggattcgattacaatgagaagattataggtttcattaaggactacagacgcgtgtttgatttagcgtgcat

SEQ ID NO: 152069 - DNA, 259 bp, Glycine max
ctcgagccgaaaatataatggttttaatagggaaggataaaaatgcttggtggtttgcatagcagattgtatctgatctggctttattttactctgaattatgctttgacgacgcaggattgttgtctccgaatagtactgtgtcgccgacattgtactattcggagacaacaatcctgtcgtcgtcaaagcctaagtttgggacatactggattaaagatgggaaagttgttggggtctttctggaaggtggaactcc

SEQ ID NO: 152070 - DNA, 254 bp, Glycine max
atagcccaagccctatacaaccaaaccctaacacacacccatttgattcagtttccatggctagcctcaaggttgcatttttggctgcagtgctctgcatggttgtggtgagtgcacccatggcacatgcagctatcacgtgcgggcaggtgacgaatagcctgatcaattgcatcggttacctccagaacggaggaacgccgccgtcgggatgctgcaacggagtgaagagcctcaatgccgccgccaagacc

SEQ ID NO: 152071 - DNA, 248 bp, Glycine max
cttctcttcactctgcccgctgcatcaatggcttcagagaagaaactttcgaacccaatgagggagataaaagtgcagaagctcgtcctcaatatccctgttggcgagagtggcgatcgtctcaccagagcctccaaggtgttggaacaacttagtggccaaaccccagtgttttccaaagcaaggtacactgttcgttcctttaggattagaagacatgagcagattgcatgctatgtcactgtcag

SEQ ID NO: 152072 - DNA, 253 bp, Glycine max
aagtctatacaaaacaaaccctaacacacacacctttgattcagtttccatggctaacctcaaggttgcatttttggctgcagtgctctgcatggttgtggtgagtgcacccatggcacatgcagctatcacgtgcgggcaggtgacgaatagcctgatcaattgcatcggttacctccagaacggcgggacgccgccgtcgggatgctgcaacggccaggccctcctcaatgccgccgccaagaccaccgcc

SEQ ID NO: 152073 - DNA, 249 bp, Glycine max
gagaacagaaatctcgtgtggaacaaaagggtaaaagctcgtttgattctgatttccagtacgaatacgaaccgtgaaagcgtggcctatcgatcctttagtccttcggaatttgaagctagaggtgtcagcaaagttaccacagggataactggcttgtggcagccacgcgttcatagcgacgttgctttttgatccttcgatgtcggctcttcctatcattgtgaagcagaattcaccaagtgttgg

SEQ ID NO: 152074 - DNA, 250 bp, Glycine max
ggcttatggtggatacctaggcacccagagacgaggaagggcgtagtaagcgacgaaatgcttcggggagttgaaaataagcgtagatccggggattcccgatatagagccacctttcgaactgctgctgaatccacgggcaggcaagagacaacctggtgaactgaaacatcttagtagccagaggaaaagacagcaaaagcgattcccgtagtagcggcgagcgaaatgggagcagcctaaaccgtga

SEQ ID NO: 152075 - DNA, 249 bp, Glycine max
ttgaagggtaagaaacagcatcgtattcatgatgttgcccctcatcatatccataaggtggaagttcatgaaggtgagtgggataaatctggcaatatcaaggtgcttacattcgctgatggggacactgttgagaccttaaaggagagagttgattttgatgatgaaaacaagaagataacctacaccatattggagggtgtcatgttgaagtactataagagctacaaggttatcgttcatgtttta

SEQ ID NO: 152076 - DNA, 252 bp, Glycine max
caccggtaacaaggacatcatcatggttgaccacatgaggaaaatgaagaacaatgccattgtttgcaacattggtcactttgacaatgagatcgacatgcttgggctggagaactaccccggcgtgaagcgcatcaccatcaagccccaaactgacagatgggtcttccctgagaccaacaccggtatcattgtcttggctgagggtcgattgatgaacgtgggatgcgccactggacaccccagttttgt

SEQ ID NO: 152077 - DNA, 265 bp, Glycine max
tctcgagccgctcgagccgctcgagcggctcgagtgctaaacaaggtgaccccattaaaagaggcacaatagttagattgcagcacatgagaagcaggaagaggctgcacagccatttgcatgcatccccgatatcaggcaatcttgaggtcagttgttttggaggagaatccgaatctgacaccggggactattggaagcttataatagaaggaagtggaaagacttggaagcaggatcagaggattcgccttcagcatattga

SEQ ID NO: 152078 - DNA, 260 bp, Glycine max
ctttgagtcttcttgatccttctttttctccttgaactcaaacatcgcagatgaggtggttctgctagatttctggccaagtccatttgggatgagggtcaggattgcacttgctgaaaagggtatcaaatatgagtacaaagaagaggacttgaggaacaagagtcctcttctcctccaaatgaacccggttcacaagaagattccggttctcatccacaatggcaaacccatttgtgaatccctcattgctgttcagt

SEQ ID NO: 152079 - DNA, 235 bp, Glycine max
gtcattctcctgaccatcccggggctggacgctctccgaaagggtctggtcgctgtgacccggaacctgctgaagccgttcctctcggttgttcccttctgtctgttccttctcatggacatatattggaagtacgagactcgtccaagttgtgaggcagattcctgcaccccgtcggagcaccttcgccaccagaaatccatcatgaagagccagcgcaacgccctcctcatcg

SEQ ID NO: 152080 - DNA, 259 bp, Glycine max
gagactttgggtggtatctttaccaggttgattaaccgcaacaccacaattcctactaaaaagagtcaggtgttttcaacagcagctgacaatcagactcaggttggtatcaaggtgctacaaggtgagagggagatggctgtagacaacaaatcgcttggagaatttgagcttgttggcattcctcctgccccaagaggcatgcctcagattgaagtcacatttgatatagatgccaatgggattgttactgtctctg

SEQ ID NO: 152081 - DNA, 260 bp, Glycine max
tgcgcacgtaagggagcaggctcggtcttcaagtcccacacgcaccaccgcaagggccctgcccgcttccggagcctggatttcggagagcgcaacggctacctgaagggtgtcgtcactgacgtcatccacgatcctggccgtggcgcgcctctcgctaaggtcgccttccgccacccgttccgctacaagaagcagaacgagctcttcatcgccgccgagggtctctacaccggccagttcatctactgcggcaagaa

SEQ ID NO: 152082 - DNA, 259 bp, Glycine max
gcctctggtcgatggaacaatgtaggcaagggaagtcggcaaaatggatccgtaacctcgggaaaaggattggctctgagggctgggcacgggggtcccagtcccgaacccgtcggctgtcggtggactgctcgagctgcttccgcggcgagagcgggtcgtcgcgtgccggtcgggggacggattgggaacgggcccttcggggcctcttccccgggcgtcgaacagtcaactcagaactggtacggacaaggggaat

SEQ ID NO: 152083 - DNA, 263 bp, Glycine max
ctgattcagaggaggagctgaaggaggctttccgcgtgtttgacaaggatcagaatggcttcatctctgcagcggagctccgccatgtgatgaccaatctcggtgagaagctgaccgacgaggaagtcgatgagatgattcgcgaggctgacgttgatggtgatggtcagatcaactatgaggagtttgtcaaagtcatgatggccaagtgaggaccaatcaaccataacaaaaaaaaattgaaaaacacctgaacagaaaaa

SEQ ID NO: 152084 - DNA, 236 bp, Glycine max
  unsure (1)..(236): unsure at all n locations
cttcggtcgttgtctatcagtaactgttctggatttggcaacgcctccctgtctgtattgggaaagctgtgccctcagcttcagcatgttgaattgagtggacttgagggagtgacagatgcagggcttcttccactccttgagagttttgangctggtttggttaaagtgaaccttagtggttgcacaaacattaccgactaagtagtttcatccttggccaatctgcatggttg

SEQ ID NO: 152085 - DNA, 250 bp, Glycine max
agtggacactctcattgacaaggcccttgagaaaattggcaccccagatgctcttaatctacgtgggaaggtaactgtttattgttttccaaactaatttctattcttggctttggatttattacactttcaaatgtcaaatatgctcttcggattgcatattgaattttacaggcagcagtagcccaagcagcattggcttaccagctctaccaaaggaaattttctggtcaaagtgggaactctaagt

SEQ ID NO: 152086 - DNA, 258 bp, Glycine max
ctcgagccgctttcatccagaaagttggaatcccatgtggtctgtatcaagcatattaacagggcttctttcattcatgatggacaacagtccaaccactggcagtgtaaacaccaccactgctgagaagcagcgtctagcaaaatcttccctttctttcaactgtaagaatgctacattcaggaagatgttccctgagtatgttgagaagtacaaccagcaacagctttctgagcaggctgctccagagagggtctc

SEQ ID NO: 152087 - DNA, 256 bp, Glycine max
cgcgtcgctccgcaccagtttcaccgcacgaatatcttgctgtttggagcgatccgagaaaaactctgtaaacatgttggtttaccaggacctccttacaggtgatgagcttctctctgacaccttccgttacaaggaaattgagaatggaatgctgtgggaagttgatgggaagtgggttgttaaaggagcagttgatgtagacattggtgcaaacccttctgctgagggtggaggagaagatgagggagttgat

SEQ ID NO: 152088 - DNA, 257 bp, Glycine max
caagggtactgttgaaatcattacccctgtggagctcattaagaagggagacaaggttggatcttctgaagctgcattgcttgccaagctagggataaggcccttctcgtatgggcttgtggttctttctgtttatgataatggttcagtgttcagtcctgaggttcttgatcttactgaggatgaccttattgagaagtttgctgctggtgtctcaatggttacttcactttcattagctatctcatacccaacac

SEQ ID NO: 152089 - DNA, 257 bp, Glycine max
ggtcaatggatttttggtgttgattacatttttgcagcacactcaccctgcattgccacactacacttcctctgagtgggactggttgagaggagctttagcaacagtggatagagattatggaatcctgaacaaggtcttccataatattacagacactcatgtagctcatcacttgttctccacaatgccacattatcatgcaatggaggcgacaaaggcaataaagcccatcttgggagagtattatcggtttg

SEQ ID NO: 152090 - DNA, 263 bp, Glycine max
tgaacaaaatattgcagaatcaaaagtagctctagtatatggtcaaatgaatgaaccgcccggagctcgtatgagagttggtttaactgccctgactatggcggaatattttcgagatgtcaatgaacaagatgtacttctatttatcgacaatatctttcgcttcgtccaagcaggatctgaagtatctgccttattgggtcgaatgccttctgctgtgggttatcaacccactcttagtactgaaatgggttctttacaag

SEQ ID NO: 152091 - DNA, 256 bp, Glycine max
tcattgcactgatagcagcgatggggatcgatcttaaggctgggggtaagagcaaaaagaccaaaagaacagcaccaaagtccaatgacatctacctcaaattacttgtcaagctttatcgattccttgttcgaaggacagacagcaatttcaatgctgtgatactcaagcgcttgttcatgagcaaggttaacaagcctccaatttctttgtcaaggttaattaagtatacgaaggggaaggaggataaaattgc

SEQ ID NO: 152092 - DNA, 255 bp, Glycine max
ctttcgatggtaggatagtggcctaccatggtggtgacgggtgacgcagaattagggttcgattccggagagggagcctgagaaacggctaccacatccaaggaaggcagcaggcgcgcaaattacccaatcctgacacggggaggtagtgacaataaataacaataccgggctcattgagtctggtaattggaatgagtacaatctaaatcccttaacgaggatccattggagggcaagtctggtgccagcagc

SEQ ID NO: 152093 - DNA, 254 bp, Glycine max
cgaacgtgttgaagtggatcggacgcgccggggtgaagctccacgcgcggctggcggaggagattcgctccgccgtgagaagcggcggcggggagatcagcatggcggcgatggagaagatgccgctgatgaaatccgtggtgtacgaggcgttccgaatcgacccgccggtggcgctgcagttcgggagggcgaagagagacttgatcattgagagccacgaccacgcgtttcaggtgaaggaaggggagatg

SEQ ID NO: 152094 - DNA, 256 bp, Glycine max
ctcgagccgctcgagccgattcggctcgaggttccagagttgctgatgcccttcgacaagagggcttgaaatttgggtcctttgagatattgactgatgaggaagtgagacagggattgaaggtatactcaaattggccaacctatcctcaactctactacaaaagtgagctgattggtggtcatgatattgtgatggagctgcgaaataatggggagctgaagtcgactttatctgagtaggattattattattc

SEQ ID NO: 152095 - DNA, 260 bp, Glycine max
cccgccgctcgatgggaattgcgcttcaaggcgtctcgtagggctaatccgcctcacgagggtcaccaacggcacgtgcctttggggggccgaggccccctactgctggtcggcaaacggacggcgggcgcacgcgtcgcttctagcccggattctgacttagaggcgttcagtcataatccaacgcacggtagcttcgcgccaacggcttttcaaccaagcgcgatgaccaattgtgcgaatcaacggttcctctcgta

SEQ ID NO: 152096 - DNA, 262 bp, Glycine max
tatgcttgtctcaaagattaagccatgcatgtgtaagtatgaactaattcagactgtgaaactgcgaatggctcattaaatcagttatagtttgtttgatggtatctactactcggataaccgtagtaattctagagctaatacgtccaacaaaccccgacttctggaagggatgcatttattagataaaaggtcaacacaggctctgcctgttgctttggatgattcatgataactcgtcggatcgcacggcctttgtgcc

SEQ ID NO: 152097 - DNA, 256 bp, Glycine max
gttgaaccgagctacgagtcatggctattggtaggcaacgggaaaggatcggatgattaagtctggctccaccttgattggtatgaagaagactcttgttttctataccggtcgtgctcccaaggggaagaggaccaattgggttatgcatgagtacaggcctacgctgaaggagcttgatggtaccagtcctggacagactccatatgtccttggtcgattatttaagaagcaaggtgagagtcttgaagcttca

SEQ ID NO: 152098 - DNA, 255 bp, Glycine max
gaagcagccacccttgaaagagtgcgtaatagctcactgatcgagcgctcttgcgccgaagatgaacggggctaagcgatctgccgaagctgtgggatgtaaaaaagaatcggtaggggagcgttccgccttagagggaaggacccgcgcgagcagtgctggacgaagcggaagcgagaatgtcggcttgagtaacgcaaacgttggtgagaatccaatgcctcgaaaacccaagggttcctccgcaaggttcgt

SEQ ID NO: 152099 - DNA, 255 bp, Glycine max
gttttagagaactgtgaacttccatgtgcaaatcatggccacgtcatactgggagacccttcgccaatcttattctaccctataagcagtacagagattcgctgtctggtcgatgtacctggacagaaggttccttctatttcaaacggtgaaatgggaaagtacttgaagacaacggtggctccacagattcccccccagctttatgatgccttcattgctgctggttgacaaaggcaacataaggacaatgcc

SEQ ID NO: 152100 - DNA, 254 bp, Glycine max
aacgattctcttcacaggtacaaagtctttataaatcccagcattagcgatgtgctatgcacagctacagctgaggcacttgccatgggcaaatttgtagtttgtgctgatcatccatcaaatgagttcttcaggtcatttcccaactgtttgacttacaggacatccgaagactttgtgacaaaagtaaaagaagctttagaaaatgagccttatcctctaacacctgagcaaagatatcaactttcttggga

SEQ ID NO: 152101 - DNA, 254 bp, Glycine max
ttgctactgagtttccacactgcataccttaggtcttccgaattcgaagttaatttgcaagatggctaaggaaaaggctcagatcaacattgtggtggttggtcatgtggaccctgaggaggcaaccaccattaacgagctgaagaagcctgttgtggagaaagaagctccagggcatgccatatgagggcatgcacgtacggcctcggaggggaaccagaaaattatgttaacaaaataatctggaaccctaa

SEQ ID NO: 152102 - DNA, 253 bp, Glycine max
ctttgttggaaagtacgcagatgagcttatcaagaatgccaagtacatagccacacctgggaagggcatcttggcagcagatgagagcactggcaccattgggaagcgcctatcgagcattaacgttgagaacattgaggccaaccgccaagctcttcgcgagcttctcttcaccgctccagatgccctccaatacctctctggtgtcatcctctttgaggaaactctttaccagaaaacctccgatgggaag

SEQ ID NO: 152103 - DNA, 255 bp, Glycine max
gacattttgcgggtatttgtgagtgtgtgagagagagagcgagcagtttcagacacagagagaggggtttgggattggagggattgacgctgcgtctcttcctcttctctttcgatccatccctcattcctaatcctccaatccaaccacctcagcctcacactcacatatacacatatctgaacgcgtatcgtccctcctatggcttcaaagcgcatcctcaaggagctcaaggacttgcagaaagacccacca

SEQ ID NO: 152104 - DNA, 258 bp, Glycine max
ccgctcgagcggctcgagctgatttccagtacgaatacgaaccgtgaaagcgtggcctatcgatcctttagtccttcggaatttgaagctagaggtgtcagaaaagttaccacagggataactggcttatggcagccaagcgttcatagcgacgttgctttttgatccttcgatgtcggctcttcctatcattgtgaagcagaattcaccaagtgttggattgttcacccaccaatagggaacgtgagctgggattag

SEQ ID NO: 152105 - DNA, 260 bp, Glycine max
caccgtgttgaccattattggctacaagagacagagtgacaccaaaatccccggtaacaccgaatgtgacggcgttggcattttgggcatcgcttgggccttcggtggcatgatcttcatccttgtttactgcactgccggaatctctgggggacacatcaaccctgcggtgacattcgggttgttccttggacgcaaggtgtctttggtgagggcgttgttgtacatgatagcacagtgtgccggtgcaatctgcggtg

SEQ ID NO: 152106 - DNA, 210 bp, Glycine max
taaatgacttgagaggtgtaggataagtgggagctggaaacagcgaaagtgaaataccactacttttaacgttattttacttattccgtgaatcggaagctgggcactgcccctctttttggacccaaggtcggcttcggccggtcgatccgggcggaagacattgtcaggtggggagtttggctgggggggcacatctgtttaaagata

SEQ ID NO: 152107 - DNA, 253 bp, Glycine max
agtgacgttctcaaagagaaggtctggtttgctgaagaaagcgcgcgagatctctgtgctgtgcgatgctgatgtggctctcatcgtcttctccaccaaaggcaagcttttggactactccaaccaaccttgtacggaaagaattcttgaacggtatgagaggtattcgtatgcggagaggcaacttgttggagatgatcaaccaccaaatgaaaactgggttatagaacatgaaaagctcaaggctagggtg

SEQ ID NO: 152108 - DNA, 248 bp, Glycine max
gttgtcttgcggaggataatggacttgttatgaacttctacaaggaatcatgccctcaggctgaagacatcattaaagaacaagtcaagcttctctacaagcgccacaagaacactgctttctcctggctcagaaacatcttccatgactgtgctgttcagagttgtgatgcttcactgttgctggactccacaagaaggagcttgtctgagaaggaaacagatagaagctttgggttgagagatttc

SEQ ID NO: 152109 - DNA, 254 bp, Glycine max
  unsure (1)..(254): unsure at all n locations
gagaatggcaantatgactggtgtgagcctttcatgccccagggttttcttcaacgcatcagcctcacngnaaaacgcgcatgcngtaaagtncncactnccacncagccnangagagcnaccgggtagtatcaanttgggtcgngtgatgatgatccgacccgttggcgntgcgcctgancgcanatcggagaaggtggangagannataacngaacgcgcnggaggcgtacgccgacgatccgangagnang

SEQ ID NO: 152110 - DNA, 252 bp, Glycine max
tggttagctccagcagccactacgatccacagccccaaccttctcacgtcactgctcttattacacgacctagttgtccggatctgagtatttgcctcaatattttaggcgggtctctaggaaccgtggatgattgttgtgccctcatcggtggtcttggtgacattgaagccattgtgtgcctttgcatccaactcagggccctcggaatattaaaccttaaccgtaatttgcagttaatattaaactcct

SEQ ID NO: 152111 - DNA, 254 bp, Glycine max; identical to SEQ ID NO: 132941

SEQ ID NO: 152112 - DNA, 256 bp, Glycine max
cagagatggatactatatccatggacaatgtgctattatcatgtttgatgttactgcccggctaacatacaaaaatgttcccacctggcaccgtgatctttgcagggtctgtgagaacatcccaattgttctttgcggtaacaaggttgatgtcaagaacaggcaagttaaggcaaagcaggttacattccacaggaagaagaatttgcagtactatgagatttcagctaagagcaactacaactttgaaaagcca

SEQ ID NO: 152113 - DNA, 260 bp, Glycine max
atcttgctcatgttcctggtgttgtggaactggtgaccaagtttgtcagtttgggaaaacaaattgctagcatttgtcatggacagttgattctggctgctgctggagtggttaaaggccgcacgtgcacggcttttcctcctgttaaacccgtgctagttgctgctggtgctcattgggttgaacctgacactgaggcagcaacagtggtagatggtgatctcattactgcagctacttatgaggggcacccggagctc

SEQ ID NO: 152114 - DNA, 260 bp, Glycine max
ccctcgagccgctcgagccgctcgagccgctcgagccgcaaaaactaatctaccttaagatccaccctttatccactaatagatggagacgtcactcgagctagatctagagggaaattatgagcattacgttcatgcattacttccataccaaggttagctcggttaataatatcagcccaggtattaattacacgaccttgactatcaactacggattggttgaaattgaaaccatttaagttgaaagccatagtgct

SEQ ID NO: 152115 - DNA, 253 bp, Glycine max
gtgccttttcagggaaggaccctaccaaggttgacagaagtggtgcctatatcgtgaggcaggctgcaaagagtgttgtggcaaatggccttgccagaaggtgcattgtccaagtttcctatgccattggtgtccctgagcccttgtcagtgtttgtggacacttatggaactgggaagattcctgacaaggagattcttcaaattgtgaaggagaatttcgacttcagacctggaatgatcaccattaactt

SEQ ID NO: 152116 - DNA, 250 bp, Glycine max
ctggttttgagggagacaacatgattgagaggtccacaaaccttgactggtacaagggtccaactctgcttgatgcacttgaccagattagtgagcccaagaggccctctgacaagcccctcaggcttccccttcaggatgtgtacaagattggaggtattggaactgtgccagtgggacgtgttgagaccggtgtcttgaagcctggaatggtggtgacttttgcaccaactggactgacaactgaagt

SEQ ID NO: 152117 - DNA, 246 bp, Glycine max
aaaggattctacccgccgctcgatgggaattgcgcttcaaggcgtctcgtagggctaatccgcctcacgaggttcaccaacggcacgttcctgtggggggccgatgacccctactgctggtcggcaaacggacggcgggcgcactcgtcgcttctagtccggattctgacttagaggcgttcagtcataatccatcgcacggtagcttcgcgccactggcttttcaaccaagcgcgatgaccaatt

SEQ ID NO: 152118 - DNA, 252 bp, Glycine max
aaaaaattgttttcgtgtggaaacaaaaaaacaattcaaaaacaaacatatgatggtgaagccgagtagcgaaaagccagaggagcatagggattccaagtactacaaaggggtccgaaagagaaaatggggcaaatgggtatccgaaataagactacccaacagccgtcagaggatttggttgggatccttcgacacccccgagaaggccgcgcgtgccttcgacgccgcaatgttctgcttacgtggccg

SEQ ID NO: 152119 - DNA, 251 bp, Glycine max
atattctcgcaaaacctcaggttcatccgctcccacaacaagaaccgcttgccctacactctctctgttaatcattttgctgattggacttgggaggagttcaaaagacacagactaggcgctgcccaaaattgctctgccactcttaacggcaaccacaagctcactgatgctgttcttcctcccacgaaagactggaggaaagaaggaatagtgagtgatgttaaagatcaaggcagctgcggatcatg

SEQ ID NO: 152120 - DNA, 250 bp, Glycine max
ctttcgagttcgaactaaagaaaaaacagtaaagaaagaagaagaaaaaaaaaagatggtttcgtcagtttcgtgggtgagaggcaagtgcgtcggtaagggcgcgtttggggttgtcaacgtggcggtttcgaaaagagataatcgcgttttcgcggtgaagtccgtggattgcggaagggggctttctggtcaggtggaggcgttggagaacgagattgggattctgaaacgagttacctcgccgcac

SEQ ID NO: 152121 - DNA, 252 bp, Glycine max
ctcgagccgctcgagccgctctaaaagagatctttttctgctctttgaagaaagaagggtctatgcttgattactggagatgtctctgctctcagatctcatcaaccttaacctctccgataccaccgagaaggtgatcgcagagtacatatggatcggtggatcaggaatggacctgaggagcaaagcaaggactctcccaggaccagttagcgacccttcagagcttcccaagtggaactatgatggttc

SEQ ID NO: 152122 - DNA, 255 bp, Glycine max
cacagcgctcttcctatggctgagtctccgcgttgacgaaccaaaatgctacctcgactacatttacgttcctgccctcaacaaaaccctaaattccaattccactcacaacaaaaacaccacaatactcttcgctctcaagctcaccaacgggaacaaggacaaaggcatccaatacgacgacgttctcctctccttcagagtcttcgagagcgtcaacctcacgcgcccactcggcaacgccaccgtgcaaag

SEQ ID NO: 152123 - DNA, 257 bp, Glycine max
catcgattaaagacttgcttccaagatggttctgctagagaagctctgggatgacgttgttgctggccctcaacctgagcgtggccttggcaagctcagaaaactcaccaccctcaaaactattgatgaaggagacagtagcaagctgcagaagacgttgtcgatgccgtcgacaccgacaaccccgatgactcccacgactccaacgacaccgggatccgcgcgtaaagctgacaacgtttggaggagcgtcttcc

SEQ ID NO: 152124 - DNA, 266 bp, Glycine max
catggttgtggtgagtgcacccatggcacatgcagctatcacgtgcgggcaggtgacgaatagcctgatcaattgcatcggttacctccagaacggaggaacgccgccgtcgggatgctgcaacggagtgaagagcctcaatgccgccgccaagaccaccgccgaccgccagacggcgtgcaactgcctcaagtcggccgccagccaaatctccggcttcaaagccaacaacgccgcctcgctccccggcaaatgcggagtctcca

SEQ ID NO: 152125 - DNA, 257 bp, Glycine max
gtgagcgtgaaagatgccttgggcgaggctttcagggtctccaaggctcgacgttgctattgacatgggcaatccatttctcaatctcactgttgatggtttccttaagatcggagctgtcgcagccacgcgatcagctgctgaagatacttatcatattatccaaaaggggaatatctcaagtcatgatttcgagaaaacgttgaagaagatgtgcaaagaaggtgtatattggggaactatagctggcgtttatg

SEQ ID NO: 152126 - DNA, 253 bp, Glycine max
tcggttgggaggctgaggcaggtggtggatgctatggccgttgagatgcacgctgggttggcatcagaaggtggttccaagctcaaaatgcttctcacatatgttcataatctccctaatgggactgagaaaggaacatattatgcactagatcttgggggtactaattttcgggttttgcgggttcattgcatggtcaacaatcttctgttttggaacatgaagtagagcgacacccattcctcaaaatcta

SEQ ID NO: 152127 - DNA, 257 bp, Glycine max
attggtttctctctctagcttggacgagtgaattagattcatcatcaagatgtcgtctctgatagcagaagatgtgaagagcagatcagaggtgtaccacggggacgaaatgtgccaagtgaagtccaaggagcttctcaaggaaatcgccctccccaacggccttcttcccctcaaggacatggaggagtgcggctacgacagacaaaccggcttcgtctggctcaaacaaaagaagagttacacccacaagttcg

SEQ ID NO: 152128 - DNA, 271 bp, Glycine max
cctaaaccctactcattctccatacctcaacgaagaggttaaagagacggcaacactttgctgtccgccttgaccgagcagagcttcgtcttggccctcgattttgccctaaagtactctcagtcacaacagacaccgtcgtcgtcgtcgtcgtcatcaatggcaccgaagcagaccaaggctgagaagaagatcgcttacgatgcgaactgtgcgacctaatggaggagtacggccagatcctcgttgtgaactccgataacgtgggatc

SEQ ID NO: 152129 - DNA, 257 bp, Glycine max
ccttagtcatcttcttctttcatctttctccctaacggtatcgagggaaaaatatggcggaagaacacagatgccaggcaccgcgcttctgcgccaacaattgcggtttctttggcagccctgccacgcagaatatgtgctccaagtgctaccgcgatttccagctcaaggagcagcaatcttccaacgccaagatggttctcaatcagtcgctggttccttcaccgccaccggcggtgatttctcagccgtcgtct

SEQ ID NO: 152130 - DNA, 260 bp, Glycine max
ctcgagccgattcggctcgaggccccactcaaccagcacacctctacctcgttcacgctaccacctttctgctcttcttctaactttcaagttttaaaagtataaagatggcagagacattcctatttacctcagagtcggtgaacgagggacaccctgacaagctctgcgaccaaatctccgatgctgtcctcgacgcttgcctcgagcaggacccagacagcaaagttgcctgcgaaacatgcaccaaaaccaacttg

SEQ ID NO: 152131 - DNA, 253 bp, Glycine max
gcgtcttatcttcgctgggaagcagctcgaagacggacgcactctcgccgattacaatattcagaaggaatccacgcttcaccttgttcttaggctccgtggtggcgatttctagtttcagttgaatcttgctattgagattttctcttccttgaatgtgtatgatataacaaaatttctatgtctatgttgtccttaggctccgtggtggccttctctagtttggttgaatcttattaatcatgtgcacttc

SEQ ID NO: 152132 - DNA, 258 bp, Glycine max
gcgatctgccgaagctgtgggatgtaaaaaagaatcggtaggggagcgttccgccttagagggaaggacccgcgcgagcagtgctggacgaagcggaagcgagaatgtcggcttgagtaacgcaaacgttggtgagaatccaatgcctcgaaaacccaagggttcctccgcaaggttcgtccacggagggtgagtcagggcctaagatcaggccgaaggcgtagtcgatggacaacaggtgaatattcctgtactacc

SEQ ID NO: 152133 - DNA, 259 bp, Glycine max
gtttttgcattttgctgggtctatattgtaagaattatggcatcagaggagacaacaatttggaaggcaatgataaaaactccagcctccatagtgttgataatttacaccttcatatcaatgtggtttgtaggtggtctcactgccttccatttgtatttgataagtaccaatcagactacatatgataacttcagataccgatatgatcggcgagccaatccatataataaaggagtgttggatgatttcaaagaga

SEQ ID NO: 152134 - DNA, 261 bp, Glycine max
cagctatcaggaggccctactttcatgtacggcccctcaatgttggagagcttgagaattggcataactatttggactttatagaaagggaaggggacttgagcaagattgtcaagttgtatgagagatgtgtcattgcatgcgccaattatccggagtattggatacgctatgttttgtgtatggaagccagcggaagcatggatcttgcaaataatgttcttgctcgagcaacccaagtctttgttaagagacaaccag

SEQ ID NO: 152135 - DNA, 260 bp, Glycine max
ggcttcatatggatacctaggcagccagacacgacgcagggcgtagtaagcgacaacatgcttcggggagttgaaaataagcgtagatccggggattcccgatataggtcaacctttcgaactgctgctgaatccacgggcaggcaagagacaacctggtgaactgaaacatcttagtagccagaggaaaagaaagcaaaagcgattcccgtagtagcggcgagcgaaatgggagcagcctaaaccgtgaaaacggggtt

SEQ ID NO: 152136 - DNA, 268 bp, Glycine max
cgcccactcctttctctgtctccatcgtttcgcattgcacaagcactctctctttccctgacccattttcaggtcgtcaacgggcggcatcgtcagctcgttccgccgatgacttgagggacatccttggctccgttggagctgacgcgaacgatgacaacatcagcaacttcttgtctgaagttaatgcgaaagacattgtggagcttatcgcctccggtaaggaaaagctggcctccgtgccttctggcggtggcgccgccgttgc

SEQ ID NO: 152137 - DNA, 267 bp, Glycine max
gcatttgcaaacacacaaccctctcctctcctaatccataaaaactatctttcatttggcctcgagtagaagagaaagatgagtgtagaaattttggatggtgccaccattgtcaacttccttcaggatgaagaagcattcagtgcctcagttcttaaccggttcgcctaccttgacacagacaatgatggccttctctcgtatgcggagatgttgaaggagctccaaagcttgagggtgttggaaacgcactttggtattgatgtg

SEQ ID NO: 152138 - DNA, 284 bp, Glycine max
tcggcactcggctcgggtctagtatatggtaagtgcaccgatggcacatgcagctatcacgtgcgggcaggtgacgaatagcctgatcaattgcatcggttacctccagaacggaggaacgccgccgtcgggatgctgcaacggagtgaagagcctcaatgccgccgccaagaccaccgccgaccgccagacggcgtgcaactgcctcaagtcggccgccagccaaatctccggcttcaaagccaacaacgccgcctcgctccccggcaaatgcggagtctcca

SEQ ID NO: 152139 - DNA, 266 bp, Glycine max
ccgtctacaagaattgggttttcactgaccaagcattaccagctgatctcgtcaagagaggattggcaattgaagatccctctgcaccccatggccttcgccttgtgatagaggactacccttatgctgttgatggacttgaaatatgggatgctattaagacatgggttcatgaatatgtctccttgtattacccaacagatgcagcagttcaacaagatactgaactacaagcatggtggaaggaagctgtggagaagggtcat

SEQ ID NO: 152140 - DNA, 114 bp, Glycine max
cccagctcacgttccctattggtggggttagaccgtcgtgagacaggttagttttaccctactgatgacagtgtcgcaatagtaattcaacctagtacgagaggaaccgttgat

SEQ ID NO: 152141 - DNA, 271 bp, Glycine max
cctaaaccctacccattctccatacctcaacgaagaggttaaagagacggcaaaactttgctgtccgccttgaccgagcagagcttcgtcttggccctcgattttgccctaaagtactctcagtcacaacagacaccgtcgtcgtcgtcgtcgtcatcaatggcaccgaagcagaccaaggctgagaagaagatcgcttacgatgcgaactgtgcgacctaatggaggactacggccagatcctcgttgtgaactccgataacgtgggatc

SEQ ID NO: 152142 - DNA, 256 bp, Glycine max
ggaagcagagaccgaaatacttcgagatggcccgtacaaagcaaactgctcgtaagtcaactggaggaaaagctcccaggaagcagcttgcaaccaaggctgcacgtaagtctgcaccaacaactggtggtgtgaagaagcctcatcgttatcgccctggaactgttgctcttcgtgagattaggaaataccagaagagcactgagctcctaatcaggaagcttcctttccagaggttcgttcgtgaaattgccca

SEQ ID NO: 152143 - DNA, 267 bp, Glycine max
ccgccatcgatctcgccatcgacggcgccgacgaggtcgaccccttcctcaacctcgtcaagggccgtggcggctccctcctccgagaaaaaatggtcgaaggcgcatgcaagaagttcatcgtcatcgttgatgagtccaagctcgtaaactatttggggggtagtgggttggccatgcccgttgaggttattaagttctgttggaggttcaccgcggcgaggttgcagaagcttcttgaggaggctgggtgcgttgccaggctca

SEQ ID NO: 152144 - DNA, 232 bp, Glycine max
attgaaaacaagattttcagtgttcatggcggtctttctcctgccatttcaacactggatcagatacgaaccattgatcggcagcaagaagtacctcatgatggtgccatgtgtgacctcctatggtcagatcctgaagatattgtggatagctggggtcttagtccccgtggtgctggttacttatttggtggcagtgatgttacgtccaatatccagtcgaagaactttc

SEQ ID NO: 152145 - DNA, 262 bp, Glycine max
tgaatacataatcgttggatctgccaacataaaccagagatcaatggatggtgccagagattctgagattgccatgggtgcttatcaaccatttcatttggctgccaggcagcctgccaggggacagatccatggtttccgcatgtcgttgtggtatgagcaccttggcttgcttcatgactctttcctccgacctgacctcgaagaatgtattaagaaggtgaaccaaattgctgacaagtattgggatatctattcaagt

SEQ ID NO: 152146 - DNA, 259 bp, Glycine max
ctcgagccgattcggctcgaggccccactcaaccaccacacctctacctcgttcacgctacacctttctgctcttcttctaactttcaagttttaaaagtataaagatggcagagacattcctatttacctcagagtcggtgaacgagggacaccctgacaagctctgcgaccaaatctccgatgctgtcctcgacgcttgcctcgagcaggacccagacagcaaagttgcctgcgaaacatgcaccaaaaccaacttg

SEQ ID NO: 152147 - DNA, 255 bp, Glycine max
ctccttcctcgtaacaatgtccgccacggaaaccacgcccgaacaaccctccactccgccgcaaacggaggctccgccgcagcccgacccctccgccgccgtctccttcagcatatggccccccactcagcgcacccgcgacgccgtcgtcaaacgcttgatcgagaccctctccgccccctccgtcctctccaagcgctacggcactctctcctccgacgaagcctccgccgccgcccgacagatcgaggacga

SEQ ID NO: 152148 - DNA, 119 bp, Glycine max
  unsure (1)..(119): unsure at all n locations
aagctatgggttgtaaaaaagattcggtaggggagcgttccgccttagagggaaggacccgcgcgagcagtgctggacgaagcggaagcgngaatgtcggcttgagtaacgcaaacgtt

SEQ ID NO: 152149 - DNA, 242 bp, Glycine max
gtgtattcacggggagatgtggcacagcactagatcatggtgtcgtggctgttgggtatggaacagctaaaggtcatgattattggatcgtaaggaattcatggggttctagctggggagaggatggctacatcagattagaaagaaatcttgctaacagcagatcaggcaagtgtggaattgcaattgagccatcttatccccttaagaatggtccaaatccccctaatcctggaccatca

SEQ ID NO: 152150 - DNA, 262 bp, Glycine max
tgtgtctcaacaacaaatcgaaatttccctggtcggatggggcacatggaaggccagatatatcttgcttccccctatactgctgcagcatctgcactaactggtttcgtaactgatcccagggagttcttgtagatcagctaaaatgggtagaaagcagtttctacctaattggaaaaataataaaataaaaaaaagctcaaagaacttttatgccggaaccagaattatgtattttaaagtcaagtagttagcttgtaag

SEQ ID NO: 152151 - DNA, 262 bp, Glycine max
gtgattgttgtgactcgttcttcttcgtcgttatcttcttcttttgttgtttgtgtgtttgtattttctctcacctgaaaatgtcttgctgcggtggtaactgtggttgcggaagcgcctgcaagtgcggcaacggctgcggaggctgcaagatgtacccagacttgagctacaccgagtcaaccaccaccgagaccttggtcatgggagtggcaccagttaaggctcaattcgagagtgctgaaatgggtgttcccgctga

SEQ ID NO: 152152 - DNA, 257 bp, Glycine max; identical to SEQ ID NO: 152127

SEQ ID NO: 152153 - DNA, 225 bp, Glycine max
tgtgactctgatatttccgttgagtacagtctcgaggattatgcagtcgcggttgttcacgcggttcagtgtgtgtgcgaccgaagtccgtgaaacacccagttatctgcagcgagagtgggagagccatcgtgtctcatcattcggtcttgattttcgaggcggttggcaccagcagcaccaccgggggaggagcttcccctgcattgtccgctcaatatctgg

SEQ ID NO: 152154 - DNA, 270 bp, Glycine max
  unsure (1)..(270): unsure at all n locations
cggattcccaaatacaggttgaagacgggccctgccggaagaagataaataccgtctttcattttccggcgatctcttttttcttccatcaccgttttccggctatccctaatccttaacagaaatgacgacatcaaggcgccttgcggacaggaaggtggagaagtttgagaaaaacatcaccaaaagaggatttgtgccagacacaaccactanaaaggggaaagactaccctgttggcccagtgctgctcggtttcttcgtctttgt

SEQ ID NO: 152155 - DNA, 93 bp, Glycine max
cggctcgaggtcaggacaagatccgtccactgtggaggcattatttccagaactctcagggtctcatgtgtgtggttgatagcaatgacagag

SEQ ID NO: 152156 - DNA, 161 bp, Glycine max
gcccaattggcaaaggaagtcgaataccttctaaggaaaggatggattccttgcttggaattcgagttggagcacggtttcgtgtaccgtgagcacaacaggtcacctggatactatgatggacgctactggaccatgtggaagctgcctatgtttggctc

SEQ ID NO: 152157 - DNA, 252 bp, Glycine max
cttaggaccttttggtcttttggttttggcagatgaggggctatctgagtatactcctcagtatttttatgtcattaaagggagcaatggaaatcttaagacttccttttgtgctgatcaatcaaggtcttctcaggcaaatgatgtccgcaagcaaatcgttggcagcgctgttccagttcttaaaggcgaaaagttttccttgcggatactggtggaccattctattgttgaaagctttgctcaaggtgg

SEQ ID NO: 152158 - DNA, 250 bp, Glycine max
ggggttgccccgctataacgtttgccacaattatagttgaggggatattagcaaaccttgttcaccaatttgattggtcattgcctggtggtgctgcaggagaggacttggacatgtctgaaactcctggccttgctgctaatagaaaatatcctctttatgcagtagcaactgcatatgagagaaattagtatatcatgatcagaaaaagaagttatgagcaataagtttgtgtttcataatattgtag

SEQ ID NO: 152159 - DNA, 215 bp, Glycine max
ggccaaccaagatcggatatagctggttttccgcgaaatctatttcactagagcgtatgctgtcgatggcccgaggtagagcactcactgggctagggtggccccatttcgccttaccaaccccagggaaactccgaatacaggcctagatcgtttgtacagacagacttttagggtgctaagatccaaagtcgagagggaaacagcccagatcg

SEQ ID NO: 152160 - DNA, 257 bp, Glycine max
gtacttcttgagaggaagtcttccttggcagggtcttaaagcgggaacaaagaaacagaagtatgagaaaatcagtgaaaaaaaggtttctacctcgattgaagccttgtgtcgaggttatccaacagaatttgcatcttacttccattactgccgatcattgaggtttgatgataagccagattatgcgtacctcaaaaggatatttcgtgacctgtttattcgtgaaggattccagtttgattatgtctttgact

SEQ ID NO: 152161 - DNA, 125 bp, Glycine max
ccgcctccggtgtgcaccggtcggctcgtcccttctgccggcgatgcgctcctgtccttaactggccgggtcgtgcctccggacctgttactttgaagaaattagagtgctcaaagcaagcctac

SEQ ID NO: 152162 - DNA, 255 bp, Glycine max
gaatggctgaagtggaagagggacaggtcatcggcgtccacaccgttgatgagtggaagctgcaactccagaatgcaaaagactccaaaaaactgattgtggtggattttactgcttcctggtgtggtccatgccgttttatggccccagttcttgcagagattgcaaagaaaactcctgaattgatcttcctcaaagtggatgtggatgaagtgaggcctgttgctgaggaatattccattgaggccatgccaa

SEQ ID NO: 152163 - DNA, 253 bp, Glycine max
ctcgttttttctcagaaccttctgaggttaaagcaaaaaacaaagagagagagagagagaaaatgatgaagccatcgatgctcagatctctccactccgccgccacccgcggcgcctctcatctcttccgccgtgggtacgcctccgagccggtgccggagcgcaaggtagccgttctcggcgccgccggcgggatcgggcagcctctctcccttctcatgaagctcaatcccctcgtttcgagcctctccct

SEQ ID NO: 152164 - DNA, 248 bp, Glycine max
cggctcgagtgcatgtgctgcagtttgccagtcttggaggaatatgtgcaaggacatcgttacgagcccagagttttgtggcaaacttacattccctgtgtccttgaagcagcctgggccacgggatggaatcattcaatgttttatcaaaagagataaatctaatttaacataccacctattcctttgtctcagccctgctttgttagttgaaaatggaaaattcctcctttctgctaagaggacaa

SEQ ID NO: 152165 - DNA, 243 bp, Glycine max
tgcaatcttaagtggtgagggcaatgagaaggttcaggatcttctcctcctggatgtcacccctctgtctcttggtttggagactgccggtggtgtgatgactgtcctgatccctaggaacactacaattccaacaaagaaggaacaagttttctcaacatactctgacaaccagcctggtgtgcttatccaggtctttgagggtgaaagagcaaggaccagagctcacaatttgttgggcaa

SEQ ID NO: 152166 - DNA, 248 bp, Glycine max
ctcgagcattcagaaccttaaacctttctttcttgtaaactttattgattgattctgagaatagaactaagagggtatagacatggctagcgcaattgcagcttcttttttggttctgcttctggctttccccactgtatttggagctgaccatgaagttggtgacactagtggatgggccctcggagttaattacaacacctgggcctctgggaaaactttcacagttggtgacactttggtgttca

SEQ ID NO: 152167 - DNA, 227 bp, Glycine max
attggctcagaagaaaaaaaagcatccaaaaatggttctcacatccactgccactcacccagatgaaaaagaccagagcctaaactctacttttgcttccagatatgtgcgtgatcctattccaaaattcaagatgccagagaaatcaataccaaaggatgcagcttttcagataataaacgatgagttgatgttggatggtgcaccaaggctcaacttggcttcgt

SEQ ID NO: 152168 - DNA, 253 bp, Glycine max
attttacattcaggtcagggttaggacatttacctgtttttactggcacagtagagttagctggaatcatgtttactggtgaacctgccaagaataagaaacaagcggagaaaaatgcagctatggcagcttggtcttctctaaagcaattggcaaaagaaactgcaaggtcttcaactgaacccgagaacaatgacgaactagaacagatcactatagcacgggccttgctgaactacagactgaaggaaaa

SEQ ID NO: 152169 - DNA, 252 bp, Glycine max
ggggagtttcggtaagagaaggaacaagacccacaccctctgtgtgaggtgtggccgccgcagtttccacctccagaagagtcgttgcgccgcgtgcgctttccccgctgcgcgcaccaggaaatataactggagcgtgaaggccattaggagaaagaccaccggaactggaaggatgaggtacttgcgtaacgtgccccgtagatttaagagtggcttcagagacggtaccgaagctgcacccaggaagaa

SEQ ID NO: 152170 - DNA, 248 bp, Glycine max
ctccccatggagttcggcttttgattgaggactatccttatgcttctgatgggctagagatatgggatgccatcaagtcctgggtgcaagaatatgtgtcattctactacaagtcagatgcagcaattcaacaagaccccgaactccaagcttggtggaaagaacttgtccaagtgggtcatggtgatttgaaagataagccatggtggcaaaagatgcaaacttgtgaagagttgattgaagcctcg

SEQ ID NO: 152171 - DNA, 240 bp, Glycine max
gatggagtggtgttaccatcgaagctctatggcgtaacgagcaattctgggtcattggaggtgtttctgctcacctttttgctgtattccaaggcctcctcaaagttcttggtggagtagacaccaacttcactgtcacagcaaaagcagcagaggacactgaatttggagagctctatctcttcaagtggaccactcttctcatccctccaaccactctcataatcttgaacatcgttg

SEQ ID NO: 152172 - DNA, 243 bp, Glycine max
gcaaaaagaaagaatcccaggcgaggagaaagatggaggggaaggagcaggatgtgtcgttgggagcgaacaagttccccgagagacagccgattgggacggcggcgcagagccaagacgacggcaaggactaccaggagccggcgccggcgccgctggttgacccgacggagtttacgtcatggtcgttttacagagcagggatagcagagtttgtggccacatttctgtttctctacatca

SEQ ID NO: 152173 - DNA, 249 bp, Glycine max
cgttgtcttctcacttcgtcaaaaccaaccaaacccctccccaattctcaagccaaccatgtcttccttcaagagcaagtaccaagatgaactcattgccaatgctgcttacattggcaccccagggaagggtatccttgctgctgatgagtcaactggtacaattggcaagcgattggccagcattaatgtcgagaatgttgaagcaaataggcgtgctcttcgtgaactcctattcaccacacctgg

SEQ ID NO: 152174 - DNA, 177 bp, Glycine max
ggggaatccgattgattgggtgagcacacataggtaccatcaccagttttgtgattctgagagagaccctcatagcccaactgaaggattctggttcagtcatatgagttggctatttgataccaattctgtcctagaaaggtgtggagaggcaaacaatgttggtgatttggagaa

SEQ ID NO: 152175 - DNA, 170 bp, Glycine max
taaacatggtgtcgtcacatctccatgatatcttttatcgaatgggcttgactgaccgagatattgttgcactatctggaggacatacactggggagagcacatccagagagctcagggtttgatggcccttggacagaggaccctctgaagttggataactcatccttt

SEQ ID NO: 152176 - DNA, 247 bp, Glycine max
acacaaggattcccaatgaagcagggagtgttgacccctggtcgtgttcgactcttgctccatagaggaactccttgtttccgtggatatggaaggcgcaatggagagcgtagaaggaaatctgttcgtgggtgcattgtcagcccagacctctctgttttgaacttggtaattgtgaaaaagggtgagagtgacttgcccggtctcactgatgttgagaagccaaggatgaggggtccaaagagag

SEQ ID NO: 152177 - DNA, 246 bp, Glycine max
ggagtacagtaagctcccatacaaaacgtgagctttcttcaaagctgcttatgcactttttgatgctgaattttatgtcaaagctgatgacgacatatatttaaggccagatcgtctatcattactactggccacagagcgatctcatcctcagacatatataggatgcatgaaagagggacctgattacactgatacacaactcatatggtatgagccattgtcacatttgcttggaaaggagta

SEQ ID NO: 152178 - DNA, 232 bp, Glycine max
agaagctccagggcatgccatatgagggcatgcacgtacggcctcggaggggaaccagaaaattatgttaacaaaataatctggaaccctaatgtatcagtgtcatcatcagtgtgtagtttaagctagctttgctatggttacgttctttgagatgagagtcttgatgaacagtaccattctgatgtattgctttccttgaaagttaatgcatgcttcttatcttctgtct

SEQ ID NO: 152179 - DNA, 248 bp, Glycine max
cgcgtcggtcaggacgagtttcacggcttgaatatcttacctgtatggagcgatccgagaaaaactctgtcacaacatgttggtttagcaggagctccttacaggtgctgagcttctctctgactccttccgttacacggaccattgagaatggaatgctgtgggacgttgaggggacgtgggttgtcaaaggagcagttgatgtagacattggtagcagacccttctgctgagggtggacgacaaga

SEQ ID NO: 152180 - DNA, 211 bp, Glycine max
  unsure (1)..(211): unsure at all n locations
caaaatagnaaatgatgacaaaaataaacagtcttaagaaagaatatcgtgcaaagaacatcgttaacgagcccagagttttagtggcaaacttaacattccctgatgtccttgaagcagccctgggccacgggatggaatcattcaatgttttatcaaaagagataaatctactttaacataccacctattcctttgtctcagccctgct

SEQ ID NO: 152181 - DNA, 242 bp, Glycine max
ctcgtcccttctgccggcgatgcgctccaatagcgtatatttaagttgttgcagttaaaaagctcgtagttggaccttgggttgggtcgatcggtccgcctccggtgtgcaccggtcggctcgtcccttctgccggcgatgcgctcctgtccttcactggccgggtcgtgcctccggtgctgttactttgaagaaattagagtgctcaaagcaagcctacgctctgtatacattagcatggg

SEQ ID NO: 152182 - DNA, 240 bp, Glycine max
agaacaacaagaggagagagagaagacgaagagcgattgcagctaagatctacactggccttcgagcccaggggaactacaagcttccaaagcactgcgacaacaacgaggtcctgaaagctctctgcgccgaagctggctggatcgtggaagaagatggcacaacttatcgaaagggatgtaagagacccacgagtgagattggaggaacaccactgaacttaagcgcgtgttcttcca

SEQ ID NO: 152183 - DNA, 201 bp, Glycine max
gcgtacgtgagctcgtggttacgcagatacgttgctggccttgttcaccacgccggacacggtcgtgtaggaggcactagcttactctccgacatctcatctcgtaacgggcttcgcagtcaccatgctgctttcagtcgctgccgatgcgtgatcactggagtgtgcgccagctgcaatcgattttcgcttgggagagcc

SEQ ID NO: 152184 - DNA, 241 bp, Glycine max
cattcatccccaggttacagattcccttcttcaagagcttttttcaactgcaggcgcccttgaaggatgtaaacttattaggaaagagaagtcatcctatggctttgtggactactttgatcgcagttctgctgcatttgccattgtaactctcaatgggaggaatatttttgggcagcctattaaggttaactgggcttatgctagcagccagagagaggatacctcaggtcactttaat

SEQ ID NO: 152185 - DNA, 244 bp, Glycine max
agctttcaagagacaaactgctttgaaaaatgggatccaaggttgttgcatccgttgcccttctcctctccatcaacattcttttcatttccatggttagctccagcagccactacgatccacagccccaaccttctcacgtcactgctcttattacacgacctagttgtccggatctgagtatttgcctcaatattttaggcgggtctctaggaaccgtggatgattgttgtgccctcatcgg

SEQ ID NO: 152186 - DNA, 230 bp, Glycine max
atttgcttcaggggtgtagatcttctcctgtttttggagactcgagtgtttgagctagttgaagttgtacaattatttttctattaatggattctgtttttaacgcaaaaaaaaaaaaaaaaaaaaaaaaaaaaaaaaaaaaaaaaaaaaaaaaaaaaaaaaaaaaaaaagagaaaagaaaaaaaaaaaagtaccaacaaggggaagaattttccccgaagggaatggga

SEQ ID NO: 152187 - DNA, 247 bp, Glycine max
ataagcttggtcttcattccctccggcagcgtcactggtatatccagagcacatgtgccacatctggtgaagggctctatgaaggacttgactggctctcaaacaacattgcaaacaaggcatagagatttgttagttaaatgcaaggaagttgagcttacttcggccattatgatctccagtttctaattttcttgccctacttagattttcattacttgagcatgtatttttcttgaaaaagaac

SEQ ID NO: 152188 - DNA, 214 bp, Glycine max
aaaggattctacccgccgctcgatgggaattgcgcttcaaggcgtctcgtagggctaatccgcctcacgagggtcaccaacggcacgtgcctttggggggccgaggccccctactgctggtcggcaaacggacggcgggcgcacgcgtcgcttctagcccggattctgacttagaggcgttcagtcataatccaacgcacggtagtttcgcgcc

SEQ ID NO: 152189 - DNA, 250 bp, Glycine max
cgctcgagccgctcgagccgctcgagccgctttgtcgcaaagagaagagatctgcctcctttgcatcaaatctatctcttcttcaagaatagttgaaaatggggctgtctttcaccaagttgttcagccgactgtttgccaagaaagagatgcgtatactgatggtgggtctcgatgctgcgggtaagaccaccattctgtacaagctcaagcttggagattttgtcaccactattcccaccatggggtt

SEQ ID NO: 152190 - DNA, 250 bp, Glycine max
tctggacctgtcctttctagaaaggatgtcaaataccatgaacctgagttttggaagtttggagaagaggggaacaaatacttccgacatgcaaatgggcagatatatgcaatctcaaaggatttggccacttacatttccatcaacaagccgattttgcataaatatgctaatgaagatgtctcgcttggtgcatggttcattggtcttgaagttgagcatattgatgaccgcaatatgtgttgtggaa

SEQ ID NO: 152191 - DNA, 232 bp, Glycine max
ctgaaactgctaaaaaagcaaacaacattattgtaaacaagatttttctggatcatgcaagattatccattcacttcctttaaatacctcacgactctcccttagagcatcatcaaacaacaaaaagactttctctttacaaattttgtaactttcaagactcagctaataaacatcaaaagatgtctctgattccaagtatttttggtggccgaaggagcaacgtgttcga

SEQ ID NO: 152192 - DNA, 238 bp, Glycine max
caaaggagttaccatcgaagctctatggcgtaacgagcaattctgggtcattggaggtgtttctgctcacctttttgctgtattccaaggcctcctcaaagttcttggtggagtagacaccaacttcactgtcacagcaaaagcagcagaggacactgaatttggagagctctatctcttcaagtggaccactcttctcatccctccaaccactctcataaatcgccaacatcgttga

SEQ ID NO: 152193 - DNA, 239 bp, Glycine max
agggaatcgggttaaaattcctgaaccgggacgtggcggctgacggcaacgttagggagtccggagacgtcggcgggggccccggaaagagttatcttttctgtttaacagcctgcccaccctggaaacggctcagccggaggtagggtccagcggctggaagagcaccgcacgtcgcgtggtgtccggtgcgcccccggcggcccttgaaaatccggaggaccgagtgcctcccacgc

SEQ ID NO: 152194 - DNA, 242 bp, Glycine max
agcaccctgagattgacgtgccgaatctgcaggtgattaagctgatgcagagtttcaagtctcgcgagtatgtgagggagacttttgcttggatgcactattactggttcctcaccaacgatggaatcgagtttctcagaacttaccttaaccttccttccgaaattgtccctgctactttgaagaaacaggccaagccacctggcaggccctttggcggcccatccggtgatcgccctagg

SEQ ID NO: 152195 - DNA, 244 bp, Glycine max
gaccacctcagttttgcttgtttggacaatgattttgttgagtatgtaccctgattggcaaacacgcgcaagggaggaagtcttacaagtttttggcaaccgaaaaccaaattttgaaggactgaatcaccttaagattgttaccatgattttgaatgaggttcttcggttatacccaccagtagttggtcttgctcgaaaagttaacgaagatgtgaaacttggaaacctatcattacctgct

SEQ ID NO: 152196 - DNA, 245 bp, Glycine max
tggttatttgattggtgtgcatccatgttaagctagtggcgatcggatccagctacagcctacaacctacagatcaaggaaggaagatgttgggtgttataaggcacaagagtattcgccccgccttctccgcaatcagacacttctcttctgcagctaaagagattactgtcagggatgctctcaactccgcactcgatgaggaaatgtcagctgatcctaaagtcttcttgatgggtgaagag

SEQ ID NO: 152197 - DNA, 243 bp, Glycine max
gacaaactgctttgaaaaatgggatccaaggttgttgcatccgttgcccttctcctctccatcaacattcttttcatttccatggttagctccagcagccactacgatccacagccccaaccttctcacgtcactgctcttattacacgacctagttgtccggatctgagtatttgcctcaatattttaggcgggtctctaggaaccgtggatgattgttgtgccctcatcggtggtcttggt

SEQ ID NO: 152198 - DNA, 247 bp, Glycine max
ggcttatacaaccttagaactcagcatcatatccgcataggtcatcaagcacgttctactcatctcccagatggatgtatacgccgtcgcttcactctccggtaacccttgtgaatctcacttcgttaatatggtttgttaggaagatcatgtaattgttcgctgatgtggagacttctgagttgtgatagggtttatatcttgtgtcctgtggatttctctcatgcactagcgtgatattttgtca

SEQ ID NO: 152199 - DNA, 244 bp, Glycine max
ctcgagccgattcggctcgagaaaggattctacccgccgctcgacgggaattgcgcttcaaggcgtctcgtagggctaataccgcctcacgagggtcaccaacggcacgtgcctttggggggccgaggccccctactgctggtcggcaaacggacggcgggcgcacgcgtcgcttctagcccggattctgacttagaggcgttcagtcatactccatcgcacggtagcttcgcgccactggctt

SEQ ID NO: 152200 - DNA, 242 bp, Glycine max
agccaccttcctataattcacctgattacaagccaccttcctacaatccaccagtttacaagtcaccttcttataattcaccagattacaaaacacctgattacaagccaccttcctacaatccaccatatgggaagtcaccttacccaaagtaccctccaggatccaattgaagacacctagtaagttaaggggtgtaccgcgcatatgctaaatccgcggtgtatcaacaacgatcgcca

SEQ ID NO: 152201 - DNA, 235 bp, Glycine max
tggacccattgcagcaatactctgacattgaagtgtgggaggctctagataaatgtcagctaggtcacctagtaagggccaaggaagagaagttggaattcccagtggttgaaaatggtgataactggagtgtgggccaaaggcaattattttgccttggaagagccctgctgaagagaagcagcatattagtactagatgaagcaacagcctcagtggattctgcaactgatgg

SEQ ID NO: 152202 - DNA, 240 bp, Glycine max
atagcccaagccctatacaaccaaaccctaacacacacccatttgattcagtttccatggctagcctcaaggttgcatttttggctgcagtgctctgcatggttgtggtgagtgcacccatggcacatgcagctatcacgtgcgggcaggtgacgaatagcctgatcaattgcatcggttacctccagaacggaggaacgccgccgtcgggatgctgcaacggagtgaagagcctcaatg

SEQ ID NO: 152203 - DNA, 250 bp, Glycine max
aaccaatatagcccaagccctatacaaccaaaccctaacacacacccatttgattcagtttccatggctagcctcaaggttgcatttttggctgcagtgctctgcatggttgtggtgagtgcacccatggcacatgcagctatcacgtgcgggcaggtgacgaatagcctgatcaattgcatcggttacctccagaacggaggaacgccgccgtcgggatgctgcaacggagtgaagagcctcaatgccg

SEQ ID NO: 152204 - DNA, 277 bp, Glycine max
gcagattgtgattttctcaagagaaattttaagcagatgtctaatgttttgtgggtggctcctgaggacaaggcgagtttatggtcacaacttcattatgtttcgtgtaataatctggaaatgcaagaagcttatcttgtcaatctcgtaaatgtgttacgagaattgtatttgcacagtccagaggaagctcgccaattgagaaggaaagctctctctcgtattgaatggctgcaaaaagctgatgtgcctaccatagcacagattgaagagttca

SEQ ID NO: 152205 - DNA, 270 bp, Glycine max
tttgaattcttgggcaatttgagcggcgacccatacatccttcacaccaacgtgtttagccaaggcaagggaaatagggagcaacaattctacctctggtttgacccaactgcagattttcacacctattccatcctatggaaccctcaacgtattgtcttctcagtggatggaagtccaattagggagttcaagaacatggagtcaaagggtgttccattccccaagaaccaagcaatgaggatatactcaagcctgtggaatgcagat

SEQ ID NO: 152206 - DNA, 273 bp, Glycine max
gcatcatcaacagcaacgtttccgttggatcttgtgaggcggaggaagcaacttgagggggctggtgggcgagcccgtgtgtatacaacaggcctctatggtgtgtttaggcacataattcagacagaaggggttcgtggtctctacagaggaattctgcccgaatattacaaggtggtgcccggtgtaggtatttgttttatgacttatgagacgttgaagatgcttttagcagatattggtactgcataactacacccatcacccttggag

SEQ ID NO: 152207 - DNA, 269 bp, Glycine max
gcttggtgatgttagcattggaggagcagaacttgccaaatctgcaaagctcgtgaaaagtgggattagtgacattgatgttccaattaccttcaggcctaaggattttggctctgctctttgggacatgattagaggaagggggacaggctacacttttaaaggacatattgatgttgacactccctttggagcaatgaaactgcccatcacgaaagaaggtggtactacccgtctcaagaagaatgaagacagtggaatgacgagga

SEQ ID NO: 152208 - DNA, 266 bp, Glycine max
aatgggcttttgccattgaaggacattgaggaatgtgggtatgagagggatagtgggtttgtgtggctgaagcagaagaagagcacaaaccacaagtttgagaagattgggaagctggtttcctatgctcctgagatcactgcctttgtgtaggttggtaagatcaaaaagctcactggtgtgaaaaccaaggagctcttggtttggatcacactcagtgagatctttgttgatgatctcccactggcaagatcactttcaagact

SEQ ID NO: 152209 - DNA, 269 bp, Glycine max
cacaattcacaaccgaaacagtttccatctctctcacaaaatgacaacaatatcaaattgctcccttctcttcctcttcctcttcctctccaccctccacatagcttccaccctctcaaccccaacaacttcatcaagtcctcctgcagcaccacccagtacccagccctctgcatccagtccctctccgtctacgcctccaccatccagcaagacccccacgagctcgtgcagacagccctctccctctccctcaaccacaccgaggc

SEQ ID NO: 152210 - DNA, 146 bp, Glycine max
aacagcagggatggtaagagttatagcaccaatcttgcttacacacctcctgaatatttaagaaatggaagggtcacgcctgaaagtgtcatttacagctttggaaccgttcttcttgacctcctcagtggcaagcacatccctcc

SEQ ID NO: 152211 - DNA, 267 bp, Glycine max
gcaaaggattctacccgccgctcgatgggaattgcgcttcacggcgtctcgtagggctaatccgcctcacgagggtcaccaacggcacgtcctttggggggccgaggcccctactgctggtcggcaaacggacggcgggcgcacgcgtcgcttctagcccggattctgacttagaggcgttcagtcataatccaacgcacggtaacttcgcgccactggcttttcaaccaagcgcgatgaccaattgtgcgaatcaacggttcctct

SEQ ID NO: 152212 - DNA, 271 bp, Glycine max
tacaaatcctgggtctaactccagtagttcaactattcctcagaggaacccagttctatcaagggttgcttctaatgcatcagggaaatcaaaacaacaggacaatgatttggaaatagatccttggacactcttagaagatggtactggatcttactcttcggcaggtaatactgctagcataggaagtggtgaccatgctaatattcgagccaccagctggcttaaaggggctgtaagggtgagacggacggacctcacatatgttggt

SEQ ID NO: 152213 - DNA, 199 bp, Glycine max
ctcaacacctcttccccacactctcacctttcactacccctcaacaagtctttcacttgtagaagccaggctgaaccatcttctgactcagccaaagtccaagaactgagtgtgtatgagatcaatgagagagatcgtggaagccctgcttatcttagatgaagcagaaaactgtcaattcccttggtgacctagtccc

SEQ ID NO: 152214 - DNA, 267 bp, Glycine max
gagaaagtctatcttttcaaagacgtctcaaaagaaattcttttgtccctggttgcaaaaatgaaggcagaatacataccaccaagagaggatgttatcatgcaaaatgaagcaccagatgatatttccattatagtctctggcgaagtggagatcatccatactgaaatggagccagaaagaattttggggactctacatactggggactgtttggagaggttggtgcacttattagtagacctcagagctttacctacagaacca

SEQ ID NO: 152215 - DNA, 266 bp, Glycine max
gtttcattgccgccggtttcgcaggaatcattctggaagaccagattgcgccgaaagcgtgtgggcacacgcgcgggaggaaagtgataccgagagaggagggcgttatgaagattagagccgccgtggatgcgagaagagagagtgggtctgacattgtgattgtggcgcgcacggatgctcggcaagctgtgtccttggaggaagcgttgacgaggtgcaaggcttatggggatgctggggccgatgttcttttcatagacgca

SEQ ID NO: 152216 - DNA, 268 bp, Glycine max
ggatgacagaggcagggccagtgctatcaatgtgcttagcgtttgcgaaggagccaatgcaggtgaaatcaggtgcctgcgggactgtcgtaagaaatgcggagatgaagatcgttgaccctcgaactggtgcttcgcttcatagaaatcaagctggtgagatttgcatcagaggcaaccagatcatgaaaggttacctaaatgatcaagaggccacacaaagaactatagacaaggaaggatggttgcataccggcgatattggata

SEQ ID NO: 152217 - DNA, 267 bp, Glycine max
gattatgccaagtcctaattggccagctgataagattaagggagaagagtgttggacggaccttgaatactgcaagcaaaaggggttgtattatcccattgcaaagactctagcagagaaagcgggttgggactttgcgaaggagacaggttttgatgttgtcatgataaaccctggtacagcattgggccctctgcttcctccaagaatcaattcaagcatggctgtgcttgttagtgttctcaaagggggcaaagagacctagag

SEQ ID NO: 152218 - DNA, 267 bp, Glycine max
ctcgagccgctcgagccgattcggctcgaggtggcagccaaatcttgtaagttatgagaagcaagcttagggcaaagtcagaagtcctgtgagaccaaaagcacatttgtcatgtggacctggacaaaaaatatcatcaatcaagtttgctagctttggcactccagtagggtcttgtggaagctaccgcgaaggaagttgtcatgctcacaagtcatatgatgctttcctaaagaattgtgttggccagagctggtgcacagtgac

SEQ ID NO: 152219 - DNA, 270 bp, Glycine max
gacgtcttcgtccgcgttaccggcggcgaagtcggcgcggcgagttccctggccccgaagatcggtcccctcggtctctcccccaagaagatcggcgaagacatcgccaaagaaaccgccaaggactggaagggcctccgcgtcaccgtcaagctcaccgttcagaatcgtcaggcgaaggtcacggtggtcccctccgccgccgccctcgttatcaaggccctcaaggagcccgagcgcgacggcaagaagaccaagaacatcaagcac

SEQ ID NO: 152220 - DNA, 253 bp, Glycine max
ggccaggcaagccccactcaaccaccacacctctcctcgttcacgctacccctttctgctcttcttctacctttcaagttttaaaagtataaagatggcagagacattcctatttacctcagagtcggtgaacgagggcccccgagcaagctctgcgaccaaatctccgatgctgtcctcgacgcttgcctcgagcaggacccagacagcaaagttgcctgcgaaacatgcaccaaaaccaacttggtcatgg

SEQ ID NO: 152221 - DNA, 263 bp, Glycine max
acagcctctggtcgatggaacaatgtaggcaagggaagtcggcaaaatggatccgtaacctcgggaaaaggattggctctgagggctgggcacgggggtcccagtcccgaacccgtcggctgtcgttgactgctcgagctgcttccgcggcgagagcgggtcgtcgcgtgcccggtcgggggaccgattgggaacgggcccttcggggcctcttccccgggcgtcgaacagtcaactcagaactggtacggacaaggggaatc

SEQ ID NO: 152222 - DNA, 267 bp, Glycine max
cgaagctagacacccacgccgtggcttccgatctgatcgacttcctcaacgcttctccaacggctttccacgccgtcgacgaggcaaagaggcgtttgcgtacgcggggtaccaccaactctctgagagggaagtgtgggaactgcaaccgggcaacaagtacttcttcaccagaaatcactccaccatcgtcgccttcgccatcggcaaaaagtacgttgctggaaatggattctacataattggggctcacacggatagtccttg

SEQ ID NO: 152223 - DNA, 265 bp, Glycine max
caaggaggccacttgtatgacaacaagagcaaatatggaagtggaagtgtcaagagttaccaatgcccatcacaatgctcgaggagatgtagccagacccaataccacaagccctgcatgtttttctgtcagaagtgctgcaggacatgcctgtgtgtgcccccggggtattatggtaataaagctgtgtgcccttgctacaacaactggaagaccaaggaaggaggacccaagtgcccttgagcttcaacttgttcaacttcaa

SEQ ID NO: 152224 - DNA, 168 bp, Glycine max
gaagttaatttgcaagatggctaaggaaaaggctcagatcaacattacggtggttggtcatgtggaccctgaggaggcaaccaccattaacgagctgaagaagcctgttgtggagaaagaagctccagggcatgccatatggaggcatgcacgtacggcctcggaggg

SEQ ID NO: 152225 - DNA, 264 bp, Glycine max
attccagtgggtaaagggtgtggatttgttcaatttgcagacagaaagaatgctgaggaagcaattcacgcattgaatgggacagtaattgggaagcagacagtgcgactttcttggggtcgcagtcaaggaattagccatggagatctgaatcccattgaagctaatttggtggtcagaattattgaggccatggatttgctgtgagacagaatcaggatatagccatgcaacctgcaactgcaattcaaggggcttcctaac

SEQ ID NO: 152226 - DNA, 264 bp, Glycine max
gttcgccgaagagaatggcctcaagggagaccccagactccaagccatttcccaagccatcagagtcgtccctcacttccccaaacatggaataatgttccaagacataacgacattgctgttggatcacaaggcgtttaaagacaccgtcgacatttttgtcgatcgttacagagacatgcacatttccgtagttgctggaattgaggcaagggggttcatgtttggtccctcaattgcgttgggcattggtgcaaagtttgt

SEQ ID NO: 152227 - DNA, 204 bp, Glycine max
catgtggtagccaaatgggttttcaattctcttaaggggcacttgcaatgcaaagcagttttctccccttttaaaataaataaatgcagttcattttgtaacattttacatgccactctggggtgcaattctgtataatgggtttacatactttcaagtaatacgcatgctaaataatgcaacccgtatggcggttggtatgtc

SEQ ID NO: 152228 - DNA, 266 bp, Glycine max
aagcgcttctcctctttgtgttctggctatgcttcttggcaagagttagatcggacgaggattgcgtgtacacggtgtacgttcggacgggttcgatcatcaagggaggcaccgattcagtaattggtctgaagctatacgacaagtccggctacggcatatacatcaccaacctcgaggcatggggcgggttaatggatccgggtcacaactactacgagcggggcaacctcgacatattcagtggtagaggccttgcttggaag

SEQ ID NO: 152229 - DNA, 260 bp, Glycine max
aaaggattctacccgccgctcgatgggaattgcgcttcaaggcgtctcgtagggctaatccgcctcacgagggtcaccaacggcacgtgcctttggggggccgaggcccctactgctggtcggcaaacggacggcgggcgcacgcgtcgcttctagcccggattctgacttagaggcgttcagtcataatccaacgcacggtagcttcgcgccactggcttttcaaccaagcgcgatgaccaattgtgcgaatcaacggt

SEQ ID NO: 152230 - DNA, 264 bp, Glycine max
catggttgatctagattggcaaacaaagatggttcactccaacatgcctccaaagtcccccaaactctctctcccggataataacattccaatcccccttcgccagaacgacatcaccgcagcgtcgtctccaatctgcgctgcctacgacaactacctccgcctccctgagctcagagccctctgggcctccaacgacttccctaattgggccaacgagcccatcttaaagcccaccttacacgccctcgaaatcaccttccg

SEQ ID NO: 152231 - DNA, 261 bp, Glycine max
ggttgcctcaatccaatatcgagcattggcagaaaaggcatcagatgcttactacaaactcaccaataccaaagcacagatacaatcctatgtctttgatgttatcagagctactgttccaaagatggaacttgatgctgtttttgagcagaagaacacaattgcaaaagcagtggacgaagaacttgggaaggtatttcctttcattttatttttaaattaagaatggagaactatgtaatctgtttggttttactttct

SEQ ID NO: 152232 - DNA, 261 bp, Glycine max
attgtttgttgttgtaactcgttcttcttcttttgttgttctgtgtttgtgtttgttttttctctcacctgaaaatgtcttgctgcggtggtaactgtggttgcggaagctcctgaaatgcggcaacggctgcggaagctgcaagatgtacccagacttgagctacactgagtcaaccaccaccgagaccttggtcatgggagtggcacctgttaaggctcaatttgagggtgctgaaatgggtgtgcccgctgagaacga

SEQ ID NO: 152233 - DNA, 254 bp, Glycine max
ctggcagagaagttagcaaggtcaggagtgaaggttgcaaaattcagagccgatggagagcagaaggaatatgcaccgagtgaactgcagttgggaagcttccccacaatacttctcttccaaacactacttctcaaccaattaagtacccttcagaaaagagagatgttgattcattgacggcattcgtgaatgccttacggtgatggtcaattgagtatcttgctcatggtccgtcgtaccaaccggcataa

SEQ ID NO: 152234 - DNA, 261 bp, Glycine max
accatttgctcccagcactgagcttaaccgagcttcacaaagatgaatcgggaaaaattgatgaagatggccggttcggttagaactgggggaaagggcaccgtgagaagaaagaagaaggctgtccacaagacaacaaccacagatgacaaaaggcttcagagcaccctgaagagaataggggtgaatgccatcccggctattgaggaggtcaatatctttaaggatgacgtattatccagtttctaaatcccaaagttc

SEQ ID NO: 152235 - DNA, 258 bp, Glycine max
ggtggactgggcatagattacgacggttccaaatcgtgtgactctgatatttcagttgagtacagtcttcgaggattatggaatcgcggttgttcacgcggttcagtgtgtgtgcgaccgaaagtcgtgaaacacccagttatctgcagcgagagtgggagagccatcgtgtctcatcattcggtcttgattttcgaggcggttggcaccagcagcaccaccgggggaggagcttcccctgcattgtccgctcaatat

SEQ ID NO: 152236 - DNA, 263 bp, Glycine max
ctcgagccgattcggctcgagggagggtatccccccggaccagcaacgtctcatcttcgcaggaaagcagctcgaggacggccgcaccctcgccgactacaacatccagaaggaatcaacccttcacctcgtcctccgtctccgtggtggcatgcagatcttcgttaagaccctcaccggcaagactattaccctagaagtcgaaagctccgacaccatcgacaacgtcaaggctaagattcaggacaaggagggaatccccc

SEQ ID NO: 152237 - DNA, 259 bp, Glycine max
cagagagtgatttcagtgagtgatcggtgttcacttgatctcatcataatcgtcagcgtcaattgaagaagatgccgatcagaaacatcgccgtcggaaggcctgaagaggcgactcaccccgacacgttgaaggcggctttggctgagttcatctcaaccttcatcttcgtgttcgccggctcaggctccggcatcgcctacaacaagctcaccgacaacggcgctgccacccctgccggcctcatctccgcctccat

SEQ ID NO: 152238 - DNA, 170 bp, Glycine max
atttctgccacaggtgcaaagttggcatttaagtccaatgaagagatagcttttcaagtaaggactgttcctcttgatgaagtgattccgaaatcagagcgtgtgcttctgcttaaactagatgttcagggctgggaatatcacggtcttaaaaggagcatcaaagttgc

SEQ ID NO: 152239 - DNA, 260 bp, Glycine max
gttcacctgatcctgttcatggctagcgaaactacacctattccgatgttgtcagatccgtcttaggagggaggaaatttcagctgtgtggattagctcagtacataaatcttgtcggtgtaactatcggttacacgtatacggcttcaattagtatggtggcggtgaagaggtcgacttgttttcacaaacatggtcatcatgctaagtgctatacgtcaaacaacctcttcatgatcctctttgcctgcattcaaatc

SEQ ID NO: 152240 - DNA, 253 bp, Glycine max
gtagcaggcatgctacttcactgcaaatccctaagaagatttgagcacagtggtggttggatcaaagcactgctggaagaagcagagaacgagcgtatgcacctaatgaccttcatggaattgcaaagccaaagtggtatgagcgtgcactagtgataactgtgcaaggtgttttcttcaatgcatacttcttggggtatttgttgtcacctaaattcgcacaccgcatggttggttacctggaggaggaagc

SEQ ID NO: 152241 - DNA, 111 bp, Glycine max
cttcaagctggttctcatcggcgattccggtgtcggcaagtccaacctgctttcgcgcttcacgaggaacgagttcaatttggagtccaagtccaccataggggttgagtt

SEQ ID NO: 152242 - DNA, 258 bp, Glycine max
gatggcaaagagtcgcagcttctacgttatcgtgttgttgccatggtattagaacttggaattattgttcattcagtggtgataggacttggcatgggagcctcaaataacacgtgcacaataagaggtcttatagccgccatgtgcttccatcaaatgtttgaaggaatgggtcttggtgggtgcattctacaggctgagtacaagtttttaaagaaggccatcatggtggtctttttctccatcacaaccccattt

SEQ ID NO: 152243 - DNA, 259 bp, Glycine max
caatctgtttcactcagcaacagcagttacagcactcaaaaacctagagcgaagagcgtgaaggcaccggccgccggccatgacattcaagcgcaggaacggaggtcgcaacaaacacggccgtggccatgtcaaattcatccgatgctccaactgcggcaaatgctgccccaaggacaaggccatcaagaggtttcttgtgaggaacattgttgaacaggctgcagtcagagatgtgcaggaagcctgtgtctatgaa

SEQ ID NO: 152244 - DNA, 258 bp, Glycine max
cggctcgagcggctcgagcggctcgaccggttcgagatgggagttgatcctggaactaaccctgattgccattacccttggaagcaaggccattttatgggtacccaatttatctgtggacactgcctatcagaccaacattgttgcttaattagtccatgcatcttgagcaccatgagaatgagattgtgtataaaataaattatcatgtgctgtgtgttgtgcaagtactaccttctctagctagattgctagagc

SEQ ID NO: 152245 - DNA, 257 bp, Glycine max
atgagagtgagtttcacatggggagggtttttgttcttgaattggatggcagatcttacggatgcaaattctgcaacacccctcttgccctcgctgatcacattctctctcggaatttcaactgcagtcaagggagagcctaccttttcagcaaagtggtgaacgtaatacttgggcctcaggtggagagaatgatgatatctggactgcacactgttgaagacatttttgttgcaactgtggaaaccttcttggat

SEQ ID NO: 152246 - DNA, 192 bp, Glycine max
cttaccgatccaagaacagatcaccagcctattaaggaagctgctcttgggaatattcccaccattgctttctgtgacaccgattcacctatgaggtacgtggacattggaattcctgccaacaacaagggcaaacacagcattggttgtctcttctggctccttgcaaggatggtgttccagataaggggt

SEQ ID NO: 152247 - DNA, 252 bp, Glycine max
gagactgatggaattaccacccctgtggttaacacttctgcctacttttttaagaaaaccgctgatctcattgatttcaaggagaatcgtcaagtgagttatgaatacgggcgctatggaaacccaacgacggtggttctggaggagaagataagtgcattggagggggccgaatcaactgtgataatggcgtctgggatgtgtgctagcgtagtcctgtttatggcactggttccagctggtggacatctt

SEQ ID NO: 152248 - DNA, 248 bp, Glycine max
gtcgacaagggtttggtaccccttgctggttccaacgatgagtcatggtgccaaggtcttgatggtcttgcctctcgctcggctgcatactaccagcaaggtgcccgtttcgccaaatggcgtactgttgtgagcatccccaacggtccctctgctctggcagttaaggaagcagcctggggtgacactcgctatgccgcaattgctcaggacaatggattggtcccaattgtggagccagagatctt

SEQ ID NO: 152249 - DNA, 250 bp, Glycine max
caaactccaaggctgttggaccctctggtgaaattctgaatgccaaagaagcctttgaattggccaacattagtgctgagttctttgagttgcaacctaagaaaggccttgcccttgtgaatggcactgctgttggttctggcttggcttcaattgttctttttgaagccaacatcattgctgtcttgtctgaggttatttcagcaatttttgctgaagtgatgcaagggaagccagagttcactgacca

SEQ ID NO: 152250 - DNA, 247 bp, Glycine max
ggtaaaactgtcattagtcaggctctttctaagtattccaattctgatgccgttgtttatgtcggctgtggggaacgtggaaatgaaatggcagaggttctaatggactttccccaacttacaatgacattacctgatggtcgtgaagaatctgtcatgaagcgtacaacactagtggctaacacttcaaacatgccagtggctgctcgtgaagcttcaatttatacaggaatcacattagctgagt

SEQ ID NO: 152251 - DNA, 248 bp, Glycine max
aggactttgagcagattggtgagttccttcaccgtgctgtgactctcacactggagatccagaaggagcatggcaaacttctcaaggatttcaacaagggcctcgtcaacaacaaggccattgaagatctcaaagctgatgttgagaagttctctgccacatttgacatgcctggcttcctggtatctgaaatgaagtacaaggattaggttcaatcataacgctctctacttaattgtgtcactcaa

SEQ ID NO: 152252 - DNA, 248 bp, Glycine max
aaggattctacccgccgctcgatgggaattgcgcttcaaggcgtctcgtagggctaatccgcctcacgagggtcaccaacggcacgtccctttggggggccgaggccccctactgctggtcggcaaacggacggcgggcgcacgcgtcgcttctagcccggattctgacttagaggcgttcagtcataatccaacgcacggtagcttcgcgccactggctttacaaccaagcgcgatgaccaattgtg

SEQ ID NO: 152253 - DNA, 246 bp, Glycine max
gagaggaggaatgggcgttggccaagaagcaagacctcgaggctgcgaagaagaagagagccgagagccgcaaactcatctacaacagagctaagcagtacgctaaggagtacgatcaccaggagaaggaattgattcggttgaaacgcgaggccaagctgaaaggtggattctatgtcgatccagaggctaagctcttgtttattgttcgcattcgtggtattaatgccatggatcccaaatcaa

SEQ ID NO: 152254 - DNA, 244 bp, Glycine max
tggaatttcccaggaattggtggtttccaatgctatgacaagtatatgttgagtagcttaaaagctgctgctgaagctgagggtaagcctgaatggggaagcacaggccctactgatgctggacactataacaactggccagaagacactcaatttttccgcaaagaaggtggaggctgggatggtccatatggtgagtttttcctcacctggtactctcagatgctgttggaccacggtgaca

SEQ ID NO: 152255 - DNA, 250 bp, Glycine max
aaaggattctacccgccgctcgatgggaattgcgcttcaaggcgtctcgtagggctaatccgcctcacgagggtcaccaacggcacgtgcctttggggggccgaggccccctactgctggtcggcaaacggacggcgggcgcacgcgtcgcttctagcccggattctgacttagaggcgttcagtcataatccaacgcacggtagcttcgcgccactggcttttcaaccaagcgcgatgaccaattgtgc

SEQ ID NO: 152256 - DNA, 252 bp, Glycine max
cgtcgctccgcaccagtttcaccgcacgaatatcttgttgtttggagcgatccgagaaaaactctgtaaacatgttggtttaccaggacctccttacaggtgatgagcttctctctgactccttccgttacaaggaaattgagaatggaatgctgtgggaagttgaggggaagtgggttgttaaaggagcagttgatgtagacattggtgcaaacccttctgctgagggtggaggagaagatgagggagttg

SEQ ID NO: 152257 - DNA, 251 bp, Glycine max
cttctggaaccgttcacaaaggagcagctccactctctcgtcacgcaggccgtggatatgtttcccgaattcgtcgatagcgtgcgccggcttgctgacgtggaccctgcgcacaggaaaatcttcgtccatggccttggctgggacgccactgccgatactctaaccgccgtgttcgggaaatacggcgagatcgaggattgcaaggccgtcaccgacaaggtctccgggaaatcaaagggttacgcctt

SEQ ID NO: 152258 - DNA, 249 bp, Glycine max
gtaaaggcgaaagactttaggtttggaattgggaattagggttgttcgcgtcacgaagatgatcgaggtggtgttgaacgatcgattggggaagaaggtgcgcgtgaagtgcaacgacgatgacaccatcggcgacctgaagaagctggtggcggctcagacgggcacaagagccgacaagatccgcatccagaagtggtacaccatatacaaggatcacatcactctcaaggattacgagatccacga

SEQ ID NO: 152259 - DNA, 248 bp, Glycine max
cggagcgtcaactgttatgatgggaagcttcttagctggtagtcttgaggctcctggggcttatgtgtatcagaatggtcaacgtgtgaaaaagtacagaggaatgggttccctagaagccatgactaaagggagcgatgcaaggtacttgggtgatacagcaaagctaaaaattgctcagggggttgttggagctgttaaagataagggctctgtcttgaatttcataccatacaccttgcaagcag

SEQ ID NO: 152260 - DNA, 250 bp, Glycine max
aactgctttgaaaaatgggatccaaggttgttgcatccgttgcccttctcctctccatcaacattcttttcatttccatggttagctccagcagccactacgatccacagccccaaccttctcacgtcactgctcttattacacgacctagttgtccggatctgagtatttgcctcaatattttaggcgggtctctaggaaccgtggatgattgttgtgccctcatcggtggtcttggtgacattgaagc

SEQ ID NO: 152261 - DNA, 249 bp, Glycine max
gtcgctttgttccaaatattacaattggacctcttgtggttgatgcattgcgccctgtgacagatcttcctttggatgtacacctgatgattgtagagcctgaacaaagggtaccagattttattaaggcaggagctgatatagtcagtgttcattgtgaacaatcttccaccatccatttgcatcgtacagttaatcaagtgaaaagtctgggagctaaagctggagttgtcttaaaccccggtaccc

SEQ ID NO: 152262 - DNA, 247 bp, Glycine max
aaaggacagaaccttccagtgaagagtgataacaaagaagttcctccagttcctgacaaggaacagtacaatgggaaagattttgctgagaattattctgatgcaaagttttttgtcatcaaatcctatagtgaggatgatattcataaaagcataaaatatagcgcatgggcaagcacccctaacggcaataaaaagctggatgcagcatatcaggaagccaaggagaagcccggtggctgtccca

SEQ ID NO: 152263 - DNA, 245 bp, Glycine max
ttctcattctcatctttgctgaggcgttggcattgtatggactcattgttggcatcatcctctcttcccgtgctggccaatccagagctgattagtataaaatttcctgttgcttgtagcgcactgaaccacggattggatggtgaatgtcgccggggaccaggtcctgttaagagtttagctttgtgatgctctgcattcgtcttatgataaaattgaggttgtcctgaaataaagcgtctcaa

SEQ ID NO: 152264 - DNA, 245 bp, Glycine max
atgctgtcctcgacgcttgcctcgagcaggacccagacagcaaagttgcctgcgaaacatgcaccaaaaccaacttggtcatggtcttcggagaaatcacgaccaaggccaacgttgactacgagaagatagtgcgtgacacctgcaggaacatcggcttcgtctcaaatgatgtgggactggatgccgacaactgcaaggtcctcgtcaacattgagcagcagagccctgatattgctcagggt

SEQ ID NO: 152265 - DNA, 246 bp, Glycine max
actccttctctcgttgattcggatctagagtcttttttcactcttcagttctcgttgttgttcttcgctttcctgaaactagggttttcaatttcgattcattcgttaataattaaagatgtttgggagggcaccgaagaagagcgataatacgaggtactacgaaatcctcggcgtctcgaagaacgcttcgcaggatgatctgaagaaggcttacaagaaagccgccatcaagaatcaccctga

SEQ ID NO: 152266 - DNA, 249 bp, Glycine max
acctctggatgtggcgggcacagaattgatgagaagcatttttcaccttggaattcatcaatgtcttcgaaagtaggttgtctgtagcaaaggagtgattgtgaatgcttattttattttctatgtatcctttttcagagttcacattttttttggccttcggaacattaatgtgaatgtctatagctacatgtatcgagaattttatataagattgtcagttcgcactcaaattatcaaattttagtt

SEQ ID NO: 152267 - DNA, 246 bp, Glycine max
ctgcgtcaaaagcgtgcaggttttttgtgttcttatttgttagtccttcctgagagctgaatttcccggcaaacaaaaacaggtttttgtggtgttgaagatgttcaagaacacattccaatctggatttctttccattttatacagccttgggagtaaacctttgcagatatgggacaaagaagttgttgatggccacattaaacgactacaggatgaagacatacagtccaatgtactagaaat

SEQ ID NO: 152268 - DNA, 248 bp, Glycine max
aagaggatgggcaagcttgtaccctgagggtgatgcatccaggaaattggttgaagaggttgggggcagctacttcttggtgagtttggtcgacaatgattacatcaatggtgatcttttcaccgtctttgcagatttctgacatgagcttattatttattagttctttagttatgtcacttctgttcgttgtcatgttcctttcctttcttttgttttcttctcagtaggatggttcatattacacg

SEQ ID NO: 152269 - DNA, 248 bp, Glycine max
aaaggattctacccgccgctcgatgggaattgcgcttcaaggcgtctcgtagggctaatccgcctcacgagggtcaccaacggcacgtgcctttggggggccgaggccccctactgctggtcggcaaacggacggcgggcgcacgcgtcgcttctagcccggattctgacttagaggcgttcagtcataatccaacgcacggtagcttcgcgccactggcttttcaaccaagcgcgatgaccaattgt

SEQ ID NO: 152270 - DNA, 246 bp, Glycine max
ctcgagccgatggcacccggtaagactcgctccatagtttgcagtgctcgaaacttcttccacgttctcagtgccagggccagcctggtggcaagtcgttcctagatggtatgagcattggacttcaaacaaggtatatgatggagacatgattgttcttcaaggccaagagaaaatcttcctttcagaaaccaaggaaggtggagacattaacaaacagtatacaaacatcaccttcacaccaac

SEQ ID NO: 152271 - DNA, 245 bp, Glycine max
cttcaagattcaggtactgcgtttcggaagcagacacagatggctcgtacgaagcaaaccgctcgtaagtccacaggaggaaaggctcctaggaagcagcttgcaaccaaggctgcacgtaagtctgcaccaactactggtggtgtgaagaagccccaccgttatcgtcctggtaccgttgctcttcgtgagattaggaaataccagaagagtaccgagcttttgatccggaagctccccttcca

SEQ ID NO: 152272 - DNA, 251 bp, Glycine max
gcaaacccttctgctgagggtggaggagaagatgagggagttgatgatgcagctgttaaggttgttgacattgttgacacattcagacttcaggagcaacccgcattcgataagaagcagtttgttatcttcatgaagaggtttatcaagaatttgactcccaagctcgatgcagagcaacaggagttgtttaagaagcacatcgagggagcaactaaatacctgctctctaagattaaagatttccaatt

SEQ ID NO: 152273 - DNA, 249 bp, Glycine max
ggttttcactttggccgaggtctctcagcacaacaatgccaaagactgttggcttgtcattcatggcaaggtttataatgtaacaaagtttttggaagatcaccctggtggggatgaggtcctgttgtcttccacagggaaagatgcaaccaatgattttgaggatattggtcacagaacaatggcggaaccaatgatggttaagtccaaggttggagccattgttacttcaacaatccccagcaaggt

SEQ ID NO: 152274 - DNA, 250 bp, Glycine max
cagaattctctaaaagagatctttttctgctctttgaagaaagaagggtctttgcttgattttggagatgtctctgctctcagatctcatcaaccttaacctatccgataccaccgagaaggtgatcgcagagtacatatggatcggtggatcaggaatggacctgaggagcaaagtcaaggactcttacaggaccagttagcgacccttcagagcttcccaagtggaactatgatggctccagcacagg

SEQ ID NO: 152275 - DNA, 250 bp, Glycine max
ctcagtgaaagagaatccgaggcgaagagaagagaaaaatacagatggaggggaaggagcaggatgtgtcgctgggagcgaacaagttcccggagagacagccgattgggacggcggcgcagagccaagacgacggcaaggactaccaggagccggcgccggcgccactggttgacccgacggagtttacgtcatggtccttttacagagcagggatagcagagtttgtggccacttttctgtttctata

SEQ ID NO: 152276 - DNA, 245 bp, Glycine max
ctttgaagaagaacccttctctttgcgcgtgtcccgttctcttctccaatcctcctccatccccactgtgtgatctgatcctaaaccctatagccatgactaccatggaggttaagctatggaatgacaagcgcgagagagaaatgtatgacaactttggggagctttatgccattatcaaagccgctgagaggcttgagaaggcctatgttagagatataatcccaccccaggaatatgagtta

SEQ ID NO: 152277 - DNA, 243 bp, Glycine max
gtgtgttttccttgtttcccctattattatctcgctctcacaaaatcatggcattctctagtgctttgattctgtggtcgttgctagcaatcaacatggccctgccaaccctcgcaaccgtctacaccgtgggagatacttcaggttgggcaattggtactgattatagcacttggactggcgacaagatcttttcagtgggtgatagtctcgcgttcaactatggagctgggcacacagtgg

SEQ ID NO: 152278 - DNA, 242 bp, Glycine max
accaattaagctttcaagagacaaactgctttgaaaaatgggatccaaggttgttgcatccgttgcccttctcctctccatcaacattcttttcatttccatggttagctccagcagccactacgatccacagccccaaccttctcacgtcactgctcttattacacgacctagttgtccggatctgagtatttgcctcaatattttaggcgggtctctaggaaccgtggatgattgttgtg

SEQ ID NO: 152279 - DNA, 245 bp, Glycine max
agcatcgctattctcttcattccatggctttgcccaaccagcaaaccgtggattaccctagtttcaaactcgttatcgtcggcgatggtggcacaggaaagacaacctttgtgaaaaggcatctcaccggagaattcgagaagaaatatgagccaaccatcggtgtggaggttcacccattggatcttttcacaaactgtggaaagattcgattttactgctgggatactgctggacaggagaaa

SEQ ID NO: 152280 - DNA, 248 bp, Glycine max
ttgagaactaagaaggagaagcaaatggcttcctcaatgatctcttccccagctgttaccactgtcaaccgtgccggtgccggcatggttgctccattcactggcctcaagtccatggctggcttccccaccaggaagaccaacaatgacattacctccattgctagcaacggtggaagagtgcaatgcatgcaggtgtggccaccagttggcaagaagaagtttgagactctttcctacctgccaga

SEQ ID NO: 152281 - DNA, 249 bp, Glycine max
gagcgagcagtttcagacacagagagaggggtttgggattggagggattgacgctgcgtctcttcctcttctctttcgatccatccctcattcctaatcctccaatccaaccacctcagcctcacactcacatatacacatatctgaacgcgtatcgtccctcctatggcttcaaagcgcatactgcaaggagctcaaggacttgcagaaagacccaccaacttcttgcagcgctggtccagtagctga

SEQ ID NO: 152282 - DNA, 246 bp, Glycine max
ggtggccataggttcctcaagacagctgcttatggacactttggaagggatgaccctgacttcacctgggaagttgtgaagccactcaagtctgagaagcctcaagcttaagattgttgtgaagttaatcactcccttcaatggatgtcttgctaggtgtggatgaataatttgcgtgttccatgactactactacttcattcataggtctaatgtcatctcatcaatacttaaactgtttttttt

SEQ ID NO: 152283 - DNA, 246 bp, Glycine max
gtgaggtagaacccttccactgtggtgactctgcgatgggtgcctacaagtatgtttcagagctatggcgcaagaagcagtctgatgtcatgcgcttcttgcagcgggtgaggtgctgggagtataggcagcaaccttccattgttcgtttgacaaggtctacccgccctgacaaggctcgtcgcttgggcttcaaggctaagcagggctatgtgatttaccgtgttcgtgttaggaggggtggcc

SEQ ID NO: 152284 - DNA, 244 bp, Glycine max
accaatatagcccaagccctatacaaccaaaccctaacacacacccatttgattcagtttccatggctagcctcaaggttgcatttttggctgcagtgctctgcatggttgtggtgagtgcacccatggcacatgcagctatcacgtgcgggcaggtgacgaatagcctgatcaattgcatcggttacctccagaacggaggaacgccgccgtcgggatgctgcaacggagtgaagagcctcaa

SEQ ID NO: 152285 - DNA, 241 bp, Glycine max
ttggaatatggctctttgggtcagcggcatgggtgttcagcatggtggtgctcgggggtttaacaagactcacccgatctggtctttcaatgactgattggaaattcaccggtactctccctcctttctcggatgaagaatggttgcaagagtttgacaaatataagcagtcacctgagttcaagcgtgttaacagaggcatgaagattgaagaattcaaattcatatattggatggaata

SEQ ID NO: 152286 - DNA, 240 bp, Glycine max
ctggaaacggctgctaataccccgtaggctgaggagcaaaaggaggaatccgcccgaggaggggctcgcgtctgattagctagttggtgaggcaatagcttaccaaggcgatgatcagtagctggtccgagaggatgatcagccacactgggactgagacacggcccagactcctacgggaggcagcagtggggaattttccgcaatgggcgaaagctgacggagcaatgccgcgtgaag

SEQ ID NO: 152287 - DNA, 240 bp, Glycine max
gttgttggtgttaacgagcacgagtacaagccagagcttgacattatttccaatgctagctgcacaaccaactgccttgccccgctcgccaaggttatcaatgacaggtttggcattgttgagggtttgatgaccactgttcattccatcactgctacccagaagactgttgatgggccatcagccaaagactggagaggtggaagagctgcttcatttaacatcattcctagcagcact

SEQ ID NO: 152288 - DNA, 242 bp, Glycine max
taaaggtgggaaaaagaagtctagtagtagtagtagtaaatcaattttttacgaagctcccctcggatacagcattgaagacgttagaccaaacggtggaatcaagaaattcagatctgctgcttactctaactgttctcgcaaaccatcctgatacacatccggattgatagttcgttgcatgcaaccatagttttattaggattttttcatctttgttttcaattaggtttttttgttgc

SEQ ID NO: 152289 - DNA, 244 bp, Glycine max
ggcgggcttcgttggctcccactgctccctctccctgaagaagcgcggcgacggcgtcctcgggctcgacaacttcaactcctactacgaccactccctaaaacgcgcacgccagcacctcctcgccaaacaccaaatcctcatcatcgaagccgacctaaacgacgccccgttgctcgccaagatcttcgacgtcgtttcgttctcccacgtcctccacctcgcagcacaagcgggcgtccgc

SEQ ID NO: 152290 - DNA, 248 bp, Glycine max
gacagactcgtgaacatgctctgctttcattcacccttggtgtgaaacagatgatttgttgctgtaacaagatggatgctactacaccaaagtactccaaggccaggcatgatgaaaatgtgaaggaagtttcttcctatttgaagaaagtaggatacaaccctgacaagattccttttgttcctatatctggttttgagggagacaacatgattgagaggtccacaaaccttgactggtacaagggt

SEQ ID NO: 152291 - DNA, 247 bp, Glycine max
ctcgagccgatattagtgaggtttcttcactcttctctaatgccataagcgctttgggagtgcctattgttccaatgttggcagtgttgttctttcatgacaaaatggatggcattaagggtatctctatggtgttagctatttggggcattgtatcatatgtgtatcaacagtactttgatgattccaagtccggaaacaggaacactactagtcatgttccaaaagcttcttcacctatagaaga

SEQ ID NO: 152292 - DNA, 248 bp, Glycine max
ctaacccatccgtcacagtttccacatttctcctacgtccacgaccttacattccgaaaagtcaaaactacccatccacccaggctacgatggacgtaggaaccgccgacgatcattccccggaagccgccatatcgcggtggaaattcgcggtgtcgcggcagtaccagcacatgctggacaaaacgacgccgcacgtgctccgacggtggatcgggtgcctggtggttgccgccgtgtacgtgctc

SEQ ID NO: 152293 - DNA, 243 bp, Glycine max
atctataaccctgcctctcacatacactgcctctctgtctattctccttcacgtccccatcaactacttccttgtctctgtgcttaagcttggaatcaaaggcattgccttaggcgctgtttggacgaatttcaacctcgtcttttcgttgattctctacatctgggtctccggcgtatacaagaaaacatggcccggtgtttcgttgaagggcgtcttcagcggttggaaatcgcttttgaa

SEQ ID NO: 152294 - DNA, 242 bp, Glycine max
tgggggagttcaccgggagtggtgagtatgtgactatcggcgaatttccttcctccaggacaaatcactcaaggaaagtttcagttcttcctcttgtgtttctcatcttctatgaggtttcaggggggccttttggggtggaggatactgtgcacgcagcgggtccttttttagccctccttggattcttgcttttccctttgatatggagtgttcctgaagctttgatcactgctgagatg

SEQ ID NO: 152295 - DNA, 242 bp, Glycine max
ctgttgtgagtgtgaacattgagcctgagccaaaggtcgtgcagcaggatatagtagacatgtacatgaaaagcatgcagcaattcactgagtcgctagcaaaaatgaagcttccgatggacttggaaagtgaaccaaccagttcaggaaattcaaccactgagcagaaactacagccatcaaagagcaataattcccgcgtgttttatggcagcagagctttcttctgatcttttgcttcc

SEQ ID NO: 152296 - DNA, 240 bp, Glycine max
gtgctgtgactctcacactggagatccagaaggagcatggcaaacttctcaaggatttcaacaagggtctcgtcaacaacaaggctattgaagatctcaaagctgatgttgagaagttctctgccttgtttgacatgcctggcttcctggtatctgaaatgaagtacaaggattaggttcaaccataccactttctactaaattgtgtcactcaagttcgacacaaagtgcagaaatgga

SEQ ID NO: 152297 - DNA, 242 bp, Glycine max
aaagcagctgaattggcttctaagtactataaagaaggatttaagactttaaagctgaaagtgggcaagaatctgaatgcagatatagaagtgcttcaagctatacgtgttgcacaccctgagtgtcagtttattcttgatgctaatgaggggtataactctgaggaagcagttgaagttcttgagaaactacatgatatgaggttgactcctgttctatttgagcaaccagttcatagaga

SEQ ID NO: 152298 - DNA, 243 bp, Glycine max
aaaggattctacccgccgctcgatgggaattgcgcttcaaggcgtctcgtagggctaatccgcctcacgagggtcaccaacggcacgtgcctttggggggccgaggccccctactgctggtcggcaaacggacggcgggcgcacgcgtcgcttctagcccggattctgacttagaggcgttcagtcataatccaacgcacggtagcttcgcgccactggcttttcaaccaagcgcgatgacca

SEQ ID NO: 152299 - DNA, 128 bp, Glycine max
tcttcctcgtagaccatgattggggggctgtcataggttggtacctctgcttgtttcgccccgacagaatcaaggcctatgtttgtctcagtgtccctttcatgcctagaaaccctaaagtcaagccc

SEQ ID NO: 152300 - DNA, 262 bp, Glycine max
tgaggctcaaagcggaaaacccttccggcatcgacattttgggccacatcgacggctggccacctcacaaacagcgcaaggcattcgacgccattgctgaggtcgagcgtcagggtctcgagcgccttcaaatcatgcctggttgtgctgagctttgtgcgatgctcgattctaagaaaataaggaggggtttgatcactcggaacacgaagtcagcagttgatttgttccatgaaaggtttgggattaattttctccagca

SEQ ID NO: 152301 - DNA, 257 bp, Glycine max
cttgctggtagttcctcatcaaataatgtaattgtgggatttgtcgggtatcctaatgttggcaaaagttcaactattaatgctctggttggtaaaaaaaggacaggtgtcacctctactccagggaagacaaagcatttccaaacgttaattatttccaacaaactgaccgtttgtgactgtcctggattagtttttccatctttctcaagctcaaggtataggatgattgcttgtggagtgttcctatagatagg

SEQ ID NO: 152302 - DNA, 259 bp, Glycine max
tacattgtagcaatcgacaaaacacaacacggagtaatggggaggttgtttgtggtgaatctggaaggaaagatctatagctgcaaacactgccatacccatcttgcgctttacgatgacatctactccaggacattccattgcagacatgggaaagcttatctcttcaataatgttgtgaatgtttctgttggcgaaatggaggacagaccgatgatgactgggttacatacggtggctgacatttctgtgtgggttg

SEQ ID NO: 152303 - DNA, 255 bp, Glycine max
tttcactgagagaggtggaggaatattcaattaaggatgaagtgactacagaattggatatatcccaacacatggtgaaggagcatctgtttcacaagcagtttaaagagaagctgtactcatggcttcttcacaaagtaactgagagtggtaaagggccaaatgtattagatgaggatgggcaaggtgtgctacatttagcagcttttcttggctatgattgggccataaatccaattatatcgctggagttaa

SEQ ID NO: 152304 - DNA, 256 bp, Glycine max
tccaacctcactggggttcaaggagctgtcaatgttcagggggaagaccagaaaaagcttgatgttgtttcaaatgaggttttctcaaactgcttgaggtcaagtgggaggacagggataatagcatcagaggaggaagatgtgccagtggcagtagaagagagttattctggaaactacattgtggtgtttgacccacttgatgggtcatccaatattgatgctgcagtgtcaactgggtcatttttgggatata

SEQ ID NO: 152305 - DNA, 253 bp, Glycine max
agctaacacacttaaaacgaccaataatggcgtttgctcacgacttggagttggaatcctcttcttcccctctggtgttctcagtacggaggagtgaaccggagctggtggctccggccaagcccactccccgcgaaattaagatcctatctgagatagaatctcaggcgggtcttcgtacccagattccaatcatacagttctaccgtaacgacccatcattggcaggcaaggacgcagttcaagccattcg

SEQ ID NO: 152306 - DNA, 256 bp, Glycine max
cgtcgctccgcaccagtttcaccgcacgaatatcttgttgtttggagcgatccgagaaaaactctgtaaacatgttggtttaccaggacctccttacaggtgatgagcttctctctgactccttccgttacaaggaaattgagaatggaatgctgtgggaagttgaggggaagtgggttgttaaaggagcagttgatgtagacattggtgcaaacccttctgctgagggtggaggagaagatggggagttgatgat

SEQ ID NO: 152307 - DNA, 253 bp, Glycine max
gattgtttgttgttgtaactcgttcttcttcttttgttgttctgtgtttgtgtttgttttttctctcacctgaaaatgtcttgctgcggtggtaactgtggttgcggaagctcctgcaagtgcggcaacggctgcggaggctgcaagatgtacccagacttgagctacactgagtcaaccaccaccgagaccttggtcatgggattggcacctgttaaggctcaatttgagggtgctgaaagggtgtgcccgc

SEQ ID NO: 152308 - DNA, 255 bp, Glycine max
gtacatcctatacatgtatcataaatttttactgaatgtgacattggatcgtaatccttgaacatcaaaaattcaacattttcaatctagtaaacttgtaaacgaatttatatatattagataccagatgaatcaatgatttataaaaattttgataatcaaaatatacttatagattaattaataataagagaatagaaccaagatactttgatttcttatctttgttttcgcaaacatgttctaatttatata

SEQ ID NO: 152309 - DNA, 253 bp, Glycine max
ctcgatctgaatcgtagttcagattcaagtcggttcagtgagggcgaccgcgaaagtcaccgaatgggtcagtcttttccttcagtttgtcctatatatgttgaataaaaaagcttgggaggacgttgcagatgtccgggacggacacgacttcttctaacgctagaagaccactggaagacacccgggaccagagcatgtcgtgaaagaagcacactgggcgtgcttcgaccgtgtctcggggcacagttga

SEQ ID NO: 152310 - DNA, 250 bp, Glycine max
ctagttctagatcgcttagctgccaaaaacgtcaaggtgctgagcatagtgaactcgcaagacgtgattactagggttccagggatcttcgtgagcgaagagcttgaacagaaaatacggaacgttggtgggggtgtgttggaggagaacacgcccttagcatactcgcacgtgggaacagagctgcgtgtgcacaccaagatgtcgccatatcttaagcccgatgctgacatggcgtttgtcatgactt

SEQ ID NO: 152311 - DNA, 248 bp, Glycine max
atttccatggttagctccagcagccactacgatccacagccccaaccttctcacgtcactgctcttattacacgacctagttgtccggatctgagtatttgcctcaatattttaggcgggtctctaggaaccgtggatgattgttgtgccctcatcggtggtcttggtgacattgaagccattgtgtgcctttgcatccaactcagggccctcggaatattaaaccttaaccgtaattgcagttaata

SEQ ID NO: 152312 - DNA, 252 bp, Glycine max
gtgatgcggtcactagggcaaaacccaactgaggcagaactgcaggatatgattaatgaggttgatgctgatggcaatggaaccatcgacttcccagagttcctcaacctgatggctcgcaagatgaaagacaccgactccgaggaggagcttaaggaggctttccgtgtgttcgacaaggatcagaatggtttcatctctgcagctgagctccgccatgtcatgacaaatcttggggagaagctgaccgat

SEQ ID NO: 152313 - DNA, 255 bp, Glycine max
cacgaatgggaagaagagacattgtgatctctctcaggggaacttccacgtgtctagaatgggcagaaaatctcagggctcatatgattgacatgcccgacaacgatagctcagaagaagcccaaggaaagcccaaagtggagtgtgggttcatgagcttgtacaaaacaaaaggagcacaagtgccaagtctagcagaatccgttgtagaagaagtgaggagactgatcgatctatacaaaggtgaagagttga

SEQ ID NO: 152314 - DNA, 254 bp, Glycine max
ctcgagccgtttaggactaaagttttccacccaaatatcaacagcaatggtagtatttgtcttgatatcttaaaggagcagtggagccccgccttgacaatatctaaggttttgctctccatttgctccctattgacggatccaaacccagatgatcccttggtgcctgaaattgctcatatgtacaagacagacaggtccaagtatgagacaactgctaggagctggactcagaagtatcaatgggctagcaa

SEQ ID NO: 152315 - DNA, 156 bp, Glycine max
tctcgagccgaatcggctcgaggttgccgttaaggatccatctgcaccccatggagttcggactttgattgaggactatccactatgcgtctgatgggctagagatatgggatgccatcaagtcctgggtgcaagaatatgtgtcattctactaca

SEQ ID NO: 152316 - DNA, 252 bp, Glycine max
gtcttctggttctttgaacaagaacccttctctttgcgcgtgtcccgttctcttctccaatcctcctccatccccactgtgtgatctgatcctaaaccctatagccatgactaccatggaggttaagctatggaatgacaagcgcgagagagaaatgtatgacaactttggggagctttatgccattatcaaagccgctgagaggcttgagaaggcctatgttagagatataatctcacccaggaatatgag

SEQ ID NO: 152317 - DNA, 250 bp, Glycine max
ggaaagggaaaatgggtaaggatctaatggccaaacacattaaacccgaacccttcgatcgccaactccgcgacgccttcaaggtcctcgacaaggactccaccggcttcgtcgccgtctccgagctccgccacatcctcaccaacatcggcgagaagctcgagccctccgagttcgacgagtggatccgtgaagtcgacgtcggatccgacggcaagatccgctacgaggatttctcgccagaatggtc

SEQ ID NO: 152318 - DNA, 249 bp, Glycine max
actcgagccgattcggctcgagattttccatttcttcaagcgggacaaagaccgattggactacccttatgtgtgccatacgcttcagcgacccaccgagcctccccgagaccgcatcgccggagtttcacgattttgtcgagtgctgactcaagaaggagtccggggagaggtggacggcggctcagctcttgacccacccgtttgtgtgcaaagacccggaaacctgttaagtggttgacccgtttt

SEQ ID NO: 152319 - DNA, 247 bp, Glycine max
ctcgagccgccttgactggggtgtgctatttggtttcggccctggactcaccgttgagaatgttgtgctccgcagtgtcactgtctaatccatatatcttgtgcaagaccaagtccttttctttcttattcattctttcatgttgagtttgaaaaatgtattctttctcttcctttttttccctgcttccctcacatgcttctttttttatatcagtaaataagaacatgttatatactattaatgc

SEQ ID NO: 152320 - DNA, 246 bp, Glycine max
aaaggattctacccgccgctcgatgggaattgcgcttcaaggcgtctcgtagggctaatccgcctcacgagggtcaccaacggcacgtgcctttggggggccgaggcccctactgctggtcggcaaacggacggcgggcgcacgcgtcgcttctagcccggattctgacttagaggcgttcagtcataatccaacgcacggtagcttcgcgccactggcttcccaaccaagcgcgtgaccaattgt

SEQ ID NO: 152321 - DNA, 250 bp, Glycine max
gcagagagatggcttgcagacagttgtgggcttcaagagctgcttcctacctcaggatctccgtgtttcacagaagcttctctaacgttttgaatgatctgaagtatgctgattctcatgagtgggtgaaggttgatggaaattctgcaactgttggcataactgatcatgcccaagatcatttgggtgaggttgtgtatgttgaattgcctgaagtgggagccaccgtgacacaaggagaagttttggt

SEQ ID NO: 152322 - DNA, 252 bp, Glycine max
gtgtggttcgtgttggtctttcagtacgacgggagcgttggaaggagctcattatctggccactggtgagctcgtgagccttagcgagcaacagcttgtggattgcgatcacgtgtgtgatccagaagaatatggagcgtgtgactcaggctgtaatggtgggttgatgaacaacgcatttgagtacatacttcagtctgggggagtacagaaagaaaaggactatccatacaccggtagagatggcacctg

SEQ ID NO: 152323 - DNA, 252 bp, Glycine max
gtgacattgaagccattgtgtgcctttgcatccaactcagggccctcggaatattaaaccttaaccgtaatttgcagttaatattaaactcctgtggacgaagctacccgtcaaacgccacttgcccccgaacctaagaacagaatatgtatggcactaattaccatattacttcgtatcatggtgtttatgtgtatgtctgtgtataaagttaaggatgttatacccttcgtgcctgtacagatatatagt

SEQ ID NO: 152324 - DNA, 253 bp, Glycine max
cttccctcattctcttcaaatgtacggacaaagttgctacgagtccgatttggcccttttggactccattcgccgccacttactcggcgactccgaggaacacagattcggagccccgaatgttaattcgggtagcactccattgtactctcggagctccagtttcggcaggttgtacccttgcctgagtaacgattggggcgaacttcctctacatggaagacgattcagaagacatgctctttatggtgtt

SEQ ID NO: 152325 - DNA, 251 bp, Glycine max
tgcaaatgctcgtataggagctggtacaaggctcaaacattgtatcatccttgatgacgttgaaatcaaggaaaatgctcttgttggtcatgcaattgttggatggaaatcatctattggtcgatgggcatgtgttgaggctagtggagattacaatgcaaagctcggggtaacaatacttggtgaatctgtgaccgttgaggatgaggtagtggttttgaatagcattgttctgcccataagaccctaaa

SEQ ID NO: 152326 - DNA, 249 bp, Glycine max
tttgttacttctcttcgccttttgctttgcaattgtcaccaaacaattcttgcttagctctcacaagcaagcattatcaacaatgaagaaaattgtgttaaaggtggacttacatgatgacaggatcaagcgaaaagctatgaagacagcatctggcctttcgggggttcaatcagtttctgttgacattaatgacaagaaaatgaccttattgggggatgttgatccagtgagtgcgtgtcaaagcta

SEQ ID NO: 152327 - DNA, 249 bp, Glycine max
ctcgagccgcctgagaccaacaccggtatcattgtcttggctgagggtcgattgatgaacttgggatgcgccactggacaccccagttttgtgatgtcctgctccttcaccaaccaggtcattgctcagcttgagttgtggaaggagaagagtaccggcaagtacgagaagaaggtttacgttttgcccaagcaccttgatgagaaggtggctgcacttcacctgggcaaacttggagctaagctgacc

SEQ ID NO: 152328 - DNA, 246 bp, Glycine max
ccaagccccactcaaccaccacaccactctctctgctcttcttctacctttcaagtttttaaagtattaagatggcagagacattcctatttacctcagagtcagtgaacgagggacaccctgacaagctctgcgaccaaatctccgatgctgtcctcgacgcttgccttgaacaggacccagacagcaaggttgcctgcgaaacatgcaccaagaccaacttggtcatggtctcggagagatcac

SEQ ID NO: 152329 - DNA, 246 bp, Glycine max
atagcccaagccctatacaaccaaaccctaacacacacccatttgattcagtttccatggctagcctcaaggttgcattttttggctgcagtgctctgcatggttgtggtgagtgcacccatggcacatgcagctatcacgtgcgggcaggtgacgaatagcctgatcaattgcatcggttacctccagaacggaggaacgccgccgtcgggatgctgcaacggagtgaagagctcaatgccgccg

SEQ ID NO: 152330 - DNA, 239 bp, Glycine max
aatgattagaggcatcgggggcgcactacctcgacctatacacaaactttaaataggtaggacggtgcggctgctctgttgagccgcgccatggaatcgagagctccaagtgggccatttttggtaagcagaactggcgatgcgggatgaaccggaatatgggttacggtgcccaactgcgcgctaacctagaccccacaaagggtgttggtcgcataagacagcaggacggtgtcatg

SEQ ID NO: 152331 - DNA, 251 bp, Glycine max
ctctctctctcaacccacaagaatccctccctttctggctttctctctctaaaactatcatgtcctccaccgcggctcccgtccttcccatatccaacccccaaaccaccgccgcaggcttggcgccatcgaggctccggcgaacaacccggccttccgcgccttcatcaacaacctctccgcgtccctccgacacggcctcgaccagcgccgcccgtggtcggagctcggggaccgtccgcgttctcgaa

SEQ ID NO: 152332 - DNA, 249 bp, Glycine max
gttaagggaaaccaccggagccgtagcgaaagcgagtcttcacagggcaattgtcactgcttatggacccgaacctgggtgatctatccatgaccaggatgaagcttgggtgaaactaagtggaggtccgaaccgactgatgttgaagaatcagcggatgagttgtggttaggggtgaaatgccactcgaacccagagctagctggttctccccgaaatgcgttgaggcgcacagttgactagacatct

SEQ ID NO: 152333 - DNA, 248 bp, Glycine max
cacagccccaaccttctcacgtcactgctcttattacacgacctagttgtccggatctgagtatttgcctcaatattttaggcgggtctctaggaaccgtggatgattgttgtgccctcatcggtggtcttggtgacattgaagccattgtgtgcctttgcatccaactcagggccctcggaatattaaaccttaaccgtaatttgcagttaatattaaactcctgtggacgaactacccgtcaaacg

SEQ ID NO: 152334 - DNA, 248 bp, Glycine max
cttaggtcttccgaattcgaagttaatttgcaagatggctaaggaaaaggctcagatcaacattgtggtggttggtcatgtggaccctgaggaggcaaccaccattaacgagctgaagaagcctgttgtggagaaagaagctccagggcatgccatatgagggcatgcacgtacggcctcggaggggaaccagaaaattatgttaacaaaataatctggaaccctaatgtatcagttcatcatcagtg

SEQ ID NO: 152335 - DNA, 246 bp, Glycine max
ttgggactggaggtacagtaacaggtgctggaaaatatctgaaagagcagaatcctgatataaaggttaggcatttaattttctcatggtgtgttaatctttctaatgttcccgctgtattctttatgattttttctttttttcttttaacttagctatatggcattgaaccagtagaaagtccaatactgtctggaggaaaacccggtgagtattgattttttatgtgtttcagggcaactttct

SEQ ID NO: 152336 - DNA, 244 bp, Glycine max
atgccactaagggttctgaccatttgagagatgtgtttggcaaagctatggggcttactgaccaagatatcgttgctctatctgggggtcacactattggagctgcacacaaggagcgttctggatttgagggtccctggacctctaatcctcttattttcgacaactcatacttcacggagttgttgagtggtgagaaggaaggtctccttcagctaccttctgacaaggccttttgtctgac

SEQ ID NO: 152337 - DNA, 243 bp, Glycine max
gaaaagatgttattacttccacagcttgttgggctgctatgttgggattgcttgttggattggggtttgtaatgggtccaattcaacttcttaagctttatggtgttccctatgttatattcgttatgtggttggatttggtgacttatttgcaccatcatggccatgaagacaaattaccttggtaccgtggaaaggaatggagctacctcaggggtggtctaactaccttgatcgtgatta

SEQ ID NO: 152338 - DNA, 240 bp, Glycine max
attcggctcgattgctttcaaccactttggtgaaggccttgttcaaaggatgccaaggtgtaggcttgggtatttccatgtggtgaacaatgattatactcactgggaaatgtatgccattggtggaagtgctaatccaaccatcaactgccaaggcaataggtttgttgcacccgatgacagattcagcaaagaggtgacaaaacgtgaagatgcgacagagagtgagtggcagattgg

SEQ ID NO: 152339 - DNA, 248 bp, Glycine max
attggtcttcagctcctggctctgttcgtgctcgctatcttcgagccatcgcttcaaagataacagagaaaaaggatgaactaggaaagcttgaagcaattgattgtggaaaaccactagatgaagcactggcagacctggatgatgttattggttgttttaactactatgccgagcttgcagaaggattggacgcaaagcaaaatgctcctgtatcccttcctatggaaacctcaagagttatgttc

SEQ ID NO: 152340 - DNA, 246 bp, Glycine max
cggctcgagcgttgcttaaccgcacatgacaagctagaaatgtcattacacgatctttcaaggacaggagacattcaagcctgtaaagcaactcgaaaatcagtcgatagcttactgaaagagctctctaaagagttgaagcaaccattggcaattttgcaatcttctccgcaagctgctcaaatattaccgaagtggaggaacttgttaccaaggagagagagttgcaggataacttctagtaaa

SEQ ID NO: 152341 - DNA, 248 bp, Glycine max
ttctgaagaaggagatttgaattcagaattgagtgagaagaagagaatagaaatgggctccgaattgattttcagaggccacgaggctcagcccgtggacgactcgtactcgccgaagccccacaagccctggttcaccgtgactcgcccgattcactacatgctccgcgagcagcgactcgtcttcgtcctcgtcggcgtcatcatagcaaccctcttcttcacactcgtccctcctcatcctcttc

SEQ ID NO: 152342 - DNA, 246 bp, Glycine max
gggtggagcccggggaggcgccgccgtacgccggcgcgttggattgtgctctgaagacggtgcgcgcggagggtcccatggcgctttataagggttttattcctacgatctcaaggcagggaccgttcactgttgtgctgttcgtgactctggaacaggttcgcaagttgcttaaggatttctgatgatgacgaagatgtatgctactttcattttcaataagatgcgttttgtgtttgtcttgtg

SEQ ID NO: 152343 - DNA, 248 bp, Glycine max
ctaaacctatctttcttctctctctgtgtgtgcgcttcaacggcaaccagaagcagccatggccactgcaaggactgtgaaggatgtttcacctcatgagttcgttaaggcgtactcctctcacctcaagcgatccggcaagatggagctgccagagtggactgatattgtgaaaactgcaagatttaaggagttggctccttatgatcctgactggtactatgtcagagctgctccatggcaagaaa

SEQ ID NO: 152344 - DNA, 247 bp, Glycine max
tgttttttctctcacctgaaaatgtcttgctgcggtggtaactgtggttgcggaagctcctgcaagtgcggcaacggctgcggaggctgcaagatgtacccagacttgagctacactgagtcaaccaccaccgagaccttggtcatgggagtggcacctgttaaggctcaatttgagggtgctgaaatgggtgtgcccgctgagaacgatggctgcaaatgtggaccaaactgtcctgcaacccctg

SEQ ID NO: 152345 - DNA, 249 bp, Glycine max
gcagcggcggcaacagggagagaagatgaagttcaatccacgtgtgtcgagcagccgccgcaagagccgaaaggctcatttcacggcgccatcgagcgtgcggcgggtgcttatgagcgcccctctgtcggcggagctgcggtctaagtacaacgtgaggtcgatcccagtacggaaggaggacgaggtgcaggtgatgcgaggaacatacaagggtcgcgaggggaaggtgactcaggtctaccgtcg

SEQ ID NO: 152346 - DNA, 245 bp, Glycine max
actctcttaaggtagccaaatgcctcgtcatctaattagtgacgcgcatgaatggattaacgagattcccactgtccctgtctactatccagcgaaaccacagccaagggaacgggcttggcggaatcagcggggaaagaagaccctgttgagcttgactctagtccgactttgtgaaatgacttgagaggtgtaggataagtgggagctggaaacagccccgcgctcttccacgtcatcaagcg

SEQ ID NO: 152347 - DNA, 247 bp, Glycine max
actcgagccgaatcggctcgagaaggattctacccgccgctcgatggcaattgcgcttcaaggcgtctcgtagggctaatccgcctcacgagggtcaccaacggcacgtgcctttggggggccgaggccccctactgctggtcggcaaacggacggcgggcgcacgcgtcgcttctagcccggattctgacttagaggcgttcagtcataatccaacgcacggtagcttcgcgccactggcttttca

SEQ ID NO: 152348 - DNA, 238 bp, Glycine max
caagtctggtgccagcagccgcggtaattccagctccaatagcgtatatttaagttgttgcagttaaaaagctcgtagttggaccttgggttgggtcgatcggtccgcctccggtgtgcaccggtcggctcgtcccttctgccggcgatgcgctcctgtccttaactggccgggtcgtgcctccggtgctgttactttgaagaaattagagtgctcaaagcaagcctagctctgtata

SEQ ID NO: 152349 - DNA, 279 bp, Glycine max
gaaaagtatctgcttgatcttcaaagggtgcagggtccacagtttcttttcttggatctatgtgctgctttccttgcacagcttcgtgtcctctagagcgaagagcttaggctcaccagagacataaatatgccttgtgtttcatgtgaataagcttacattgtacatacaagtatcttttcggtccaagcttatcctctgttttctacccgtttatctgtgggtaaacattataatgagccaatcccaagtatgggatttgcttcgttaacaatggtg

SEQ ID NO: 152350 - DNA, 279 bp, Glycine max
ggagtacatggacggcggcaccctcgagaccgccctcgccgccagcggcacgttctcggaagagcgactcgccaaggtggcgctgtgacgtcctcgaggggctcgcgtacctccacgcgcgcaacatcgctcaccgcgacataaagcccgcgaacatcctagtaaactccgaaggggatgttaagattgcagacttcggagtcagcaaactcatgtgccgctcgctcgaagcgtgtaactcttatgtcggcacgtgcgcgtacatgagtcccgaccggt

SEQ ID NO: 152351 - DNA, 270 bp, Glycine max
ctcactcactcactcactcactcactcgcaagcaaaaagaatgaatcccaggcgaggagaaagatggaggggaaggagcaggatgtgtcgttgggagcgaacaagttccccgagagacagccgattgggacggcggcgcagagccaagacgacggcaaggactaccaggagccggcgccggcgccgctggttgacccgacggagtttacgtcatggtcgttttacagagcagggatagcagagtttgtggccacttttctgtttctctac

SEQ ID NO: 152352 - DNA, 269 bp, Glycine max
ttgtgaaggtgcttgagttggctgggaatgcagcacgtgacaacaagaagaacaggattattccaagacacgtgcttttggcagtgaggaacgatgaggagttggggaaattgcttgctggagtgacaattgcacatggtggcgtgcttccaaacattaaccctgttttgttgcctaagaagtctgagagggcttccaaggaacctaaatctccatccaaggctactaaatctcctaagaaggcttaattgacttattagtttattgtt

SEQ ID NO: 152353 - DNA, 268 bp, Glycine max
cttaaccgaaaatgttcatacaattgctgtcactaaaatgggaagccgcagagcaattcaattgggtgcatgctttctgattgtgttgtctctcgtgggtaaggttggagggttcattgcttcaattcccgaagtaatggttgctggtctcctatgctttatgtgggcaatgcttgcagcattgggcttgtctaatctacgttatagtgaggccggaagctctcgcaacatcatcataattgggttatcattgtttttctctctttcc

SEQ ID NO: 152354 - DNA, 270 bp, Glycine max
tctcgagccgaatcggctcgagtgcaggaaccacatactatgtggttaaccctgacaacgatgagaatctcagaatgataacactcgccatacccgttaacaaacccggtagatttgagagtttcttcctatctagcactcaagctcaacagtcctacttgcaagggttcagcaagaatattctagaggcctcatacgacaccaaattcgaggagataaacaaggttctgtttggtagagaggaggggcagcaacaaggggaggagaggc

SEQ ID NO: 152355 - DNA, 270 bp, Glycine max
aagaaactcattttaactcagactttgcatttcaccttatctatctatcttttctaacatggctgctgggactggactctttgcagagattttggatggagatgtgtacaagtactatgctgatggagaatggaagaaatctgcttctgggaaaagtgttgccatcatcaaccccactaccagaaagactcaatacaaagttcaagcttgttcacaagaggaggttaacaaggtcatggacttggcaaaatctgcccaaaagttatgggc

SEQ ID NO: 152356 - DNA, 270 bp, Glycine max
ctcgagccgaatcggctcgagtgcaaagggcttctccagcctagtttgttctcagatctacttcttccatggaccagtacgagtaggtggagaagataggcgagggaacatacggcgtcgtttacaaggctcgcgaccgcgccaccaatgagacaatcgctctgaagaagattcgcctcgagcaggaggacgaaggcgttcccagcaccgccattcgcgagatttctcttctcaaagagatgcagcataggaacattgttaggttgcagg

SEQ ID NO: 152357 - DNA, 269 bp, Glycine max
gtatctttgaggtgaaagccacagctggtgacacccatcttggaggtgaggattttgataacagaatggtgaaccactttgttcaagagtttaagagaaagaacaagaaggacataagtgggaaccccagagcacttagaaggttgaggactgcttgtgagagggccaagagaacattgtcatccactgcccagaccaccattgaaattgattctctctatgagggaattgatttctactccactgttactcgtgccagattcgaggaa

SEQ ID NO: 152358 - DNA, 266 bp, Glycine max
gcaagcaaaaagaaagaatcccaggcgaggagaaagatggaggggaaggagcaggatgtgtcgttgggagcgaacaagttccccgagagacagccgattgggacggcggcgcagagccaagacgacggcaaggactaccaggagccggcgccggcgccgctggttgacccgacggagtttacgtcatggtcgttttacagagcagggatagcagagtttgtggccacttttctgtttctctacatcaccgtcttaaccgttatggg

SEQ ID NO: 152359 - DNA, 266 bp, Glycine max
ggatgagaagattgcatcaaagctttctgatgacgacaagaagaaaatcgaagatgccatcgagagtgctattcagtggttggatggaaaccagctagcggaggctgacgagttcgaagacaagatgaaggagcttgagagcatttgcaacccaatcattgccaaaatgtaccagggtgcaggtgctcccgacatggctggaggcatggatgaagatgttcctccatctggatccggtggtgctggccccaagatcgaggaagttg

SEQ ID NO: 152360 - DNA, 272 bp, Glycine max
  unsure (1)..(272): unsure at all n locations
ccggcattcgnggcatatacaaaaacattctaggagagggctcgtaatgatcttctcaaagatcacaaggtgctgaagtggcaggcaggataggggggaggacccgtaggtttttgtgaaagggatgctcttatcatgttattgctgaaaagaaaaacctaatgcctctatttattttgatgtcgattcatccatacttccattctttgtagagggaggctaactgcttgccggctgggagctgtatgaacggtaacgtccacgtacggctc

SEQ ID NO: 152361 - DNA, 273 bp, Glycine max
caaagttttcgtaataatctgactcaaactgcaagaggagttcgcagtaactactctcaaagatccactccaacttttaggtcttcttcaagcttgcatttgggacgtgtgataccttctgatgatggattgcatatggtggctgaaagttactcttctagacatccaaggccattgaccactgttggctggcagagcaatgatagacatggaaggtcaagaatacctagtgatagatatcgatcattggctgatgaggttggtctcaatgaa

SEQ ID NO: 152362 - DNA, 271 bp, Glycine max
agccacttgtgtccgttgacttcaggtgcactgatgtgtcctcaaccgttgactcctcgttgaccatggtcatgggagatgacatggtgaaggtcattgcttggtatgacaatgaatggggctactcccaaagggttgtggatttggctgacattgttgccaacaaatggaagtgagagccaaacaaattctcattggtaattaaattattatgtatgtaccatgccattgtaattttgtatgcttactactactactaaccactacacac

SEQ ID NO: 152363 - DNA, 269 bp, Glycine max
gagggcataaccgacattaaggtaaccactgctcactctctggcgataatgcggtcatcgataccaccaagtatgggcaggttcaggcccgggtacgcaaagcacgtgttgggcccaatgctgaagtttctgagggagacgagaacacccttgatggtgaacccgtacccgtacttcggttacaacgggaaaaacgtgaactttcttctgttcaggcccaaccgaggcttgtacgacaggtacacgaagaggagttacacgaaccagtt

SEQ ID NO: 152364 - DNA, 266 bp, Glycine max
cctgccagtagtcatatgcttgtctcaaagattaagccatgcatgtgtaagtatgaactaattcagactgtgaaactgcgaatggctcattaaatcagttatagtttgtttgatggtatctactactcggataaccgtagtaattctagagctaatacgtgcaacaaaccccgacttctggaagggatgcatttattagataaaaggtcaacacaggctctgcctgttgctttgatgattcatgataactcgtcggatcgcacggc

SEQ ID NO: 152365 - DNA, 266 bp, Glycine max
tgacaatgagacatcagtgcctccttctggtctccctggtgttggtctcctacgctgcccggtcggaatcagcgctgggcggctggagccccatcaaggacgtaaacgacagccacgtggcggagatcgccaactacgcgctgagcgagtacgacaagcgttctggggccaagctcacccttgtcaaggtcgtcaagggcgagactcaggtcgtttccggcaccaactaccgtctcgtcctcaaagccaaggatggatccgccacg

SEQ ID NO: 152366 - DNA, 266 bp, Glycine max
ctgccttcctacgtggtgttaattttattcagattcctacaactgtgatggcacaggtcgattcttcagttggtggaaaaactgggataaatcaccgccttgggaagaacatgatcggtaccttttaccaacctcagtgtgtgcttatagacacagacacattaaatacgctaccggatagggaactggcatcagggctagcagaggttataaagtatgggctcattagggatgcagagttttttgagtggcaagagaaaaatatg

SEQ ID NO: 152367 - DNA, 269 bp, Glycine max
ctcagtgaaagagaatccgaggcgaagagaagagaaaaattaagatggaggggaaggagcaggatgtgtcgctgggagcgaacaagttcccggagagacagccgattgggacggcggcgcagagccaagacgacggcaaggactaccaggagccggcgccggcgccactggttgacccgacggagtttacgtcatggtccttttacagagcagggatagcagagtttgtggccacttttctgtttctatacatcactgtcttaaccgtc

SEQ ID NO: 152368 - DNA, 270 bp, Glycine max
  unsure (1)..(270): unsure at all n locations
caaaaacccaaatcccaaatgatagtagtaacatgagatgacagacgaccgcgtgcatccaatcccaaacctagctatgtctccggccaccgcccactggacctctgacgccatccacggcggacccctccgtcgtgtcgacctcgactccggcaccaacggctgggcctcccctcccggtgacctcttcctcctccgctcccccaattatttcaccanacgccagaaatcacccgccggcgactacctcctctccccctccggtatgga

SEQ ID NO: 152369 - DNA, 269 bp, Glycine max
accaatatagcccaagccctatacaaccaaaccctaacacacacccatttgattcagtttccatggctagcctcaaggttgcatttttggctgcagtgctctgcatggttgtggtgagtgcacccatggcacatgcagctatcacgtgcgggcaggtgacgaatagcctgatcaattgcatcggttacctccagaacggaggaacgccgccgtcgggatgctgcaacggagtgaagagcctcaatgccgccgccaagaccaccgccgac

SEQ ID NO: 152370 - DNA, 269 bp, Glycine max
gaaggaagaaataaaccgaatgagagcattaacctcttcttcttccactttcattccaaagcgttattccttcttcttcttcctctccattctcttcgctcttcgatcctcgtccgggggctgctccgaataccaccaccaccacgcgccgatggccacgataggaggcttacgcgactcccaaggctctcagaacagcgtccaaaccgaggccctcgctcggttcgccgtcgatgaacacaacaagaagcagaattcacttctggagt

SEQ ID NO: 152371 - DNA, 267 bp, Glycine max
caacaacatcgtcatcccatggcaaacgccgcatctggtatggcagtccatgatgactgcaagttaaggtttttggagctgaagacaaagaggacacaccgtttcatagtttttaagattgaggagcagcagaagcaggtcattgtggagaagcttggtgagccagcccaaggctatgaagatttcactgccagccttcctgctgatgagtgccgttatgctgtttatgattttgagtatctgactgaagggaatgtccctaaaagc

SEQ ID NO: 152372 - DNA, 266 bp, Glycine max; identical to SEQ ID NO: 104364

SEQ ID NO: 152373 - DNA, 263 bp, Glycine max
tttttatttctctcttctctctgcatcgcttcaggttcttctgaaaagatgtctcgcgtgtatgttggtaacttggattcacgagtcaccgagagagatctcgaagacgaattccgtgttttcggagttattcggagtgtttgggttgcacgtagaccacctggttatgcttttattgactttgatgaccgcagagatgcacaggatgctatccgtgaattggatggcaagaatggttggagggttgagctttctcacaactc

SEQ ID NO: 152374 - DNA, 264 bp, Glycine max
gcgatgatgcaaggtgtgcagaagaacacgctatacgtgggaggcttagcggaagaagtgaacgagttgatcctccacgcggcgttcattcccttcggcgacatcaaggacgtgaagacgccgctggaccaggcctcgcagaagcaccgctccttcggcttcgtcaccttcctcgaacgggaagatgcctccgccgccatgcacaacatggacggcgccgagctctacggccgcgtcctcaccgtcaactacgccctccccgaa

SEQ ID NO: 152375 - DNA, 268 bp, Glycine max
  unsure (1)..(268): unsure at all n locations
tttgactctcacaaaccttgcatccatccacacatggctggcatgaactctagcgtattggcctgtagctatgccatatctggtgcagcatgctccgagctcaatgggaaggtcacttccgtggcctctgttgcatcctctggctacaagttgccattgatcacatgtgaggccagagttcccanagccaaagaatctgaaggaaggagaggtgcccttgttctcttggcagctacccctttcatctctgcagcctcgaattcttctg

SEQ ID NO: 152376 - DNA, 265 bp, Glycine max
ctccacccaacatgatgagtctgtgaccaacgacgaaattgcagctgacctcaaggagcatgtgatcaagccggtgatcccggagaagtaccttgatgagaagaccattttccacttgaacccctctggccgttttgtcattggaggtcctcacggtgatgctggtctcaccggccgcaagatcatcatcgatacttacggaggatggggtgctcatggtggtggtgccttctccgggaaggatcccaccaaggttgataggagt

SEQ ID NO: 152377 - DNA, 247 bp, Glycine max
  unsure (1)..(247): unsure at all n locations
tctctgccctagccaacnacagcgtttctncttccaccgtcggcggcggaaggatgcacgagtgttccatctgtcacaagagtttccctaccggtcaggccctgggtggccacaagcgctgccactacgacggcgggaacaaccacagtaacagcaacgccaacggaaacaacagcagcggcgccactacctccgacggcggcgctgctcctcctcccacacgctccgtgggtttgacctgaacttc

SEQ ID NO: 152378 - DNA, 260 bp, Glycine max
gtaagggcaaagccagcaacgcaatgtcgtgagtgagttggttttttctttggttctcctgagctgtgtttattctctttctctgccctctcatcttcgagctccgatggcgagcctgtggcgcgcggcaaccggcatgacggacaacgccaccgattacgacggcgtcgagttctggtcgaaccccgagcggaccggctggctcaccaagcagggcgagtacatcaagacctggcgccgccgctggttcgtcctcaagc

SEQ ID NO: 152379 - DNA, 264 bp, Glycine max
gctaagaagtgcaccagcagtgaggggaataagtattggtgggatgagcctaatttggctgaactcaacttgcaccagagccaccagcttatgtgggttagggcaaggcacattttctatgactattgcactgacactgctaggttcccagtcacgcctgctgagtgtgtccatcaccgtcacacctgagcagacttagtgattagtctaaactttattttgttataacttatgggaagttatgaaaataggattggggcataa

SEQ ID NO: 152380 - DNA, 261 bp, Glycine max
cgtatttgagcttatgttctttacgtgatttttgggtcttaagttttagtcaaggggcatgttgaagttccagtttatgtggtgttgtcttggtttactttggcagttcttcagagttatgaagcctttgtcctcaggggcgttggtcatggcagcaagttatcctggtctgtcatcacaatcttttcccgttgggatgggttgttttttactaccaaagccctagctttttaagcttcatttttttttttttgaacttgt

SEQ ID NO: 152381 - DNA, 264 bp, Glycine max
tctctctctctcggatttcttgcgcggtttatcatgggggatagtcagtattcgttttctctcaccacatttagcccttctggaaagcttgttcagattgagcatgctttgacggctgtcgggtctggacaaacgtctttgggaattaaagctgcaaatggagttgtcattgctaccgagaagaaattgccatctatattggttgatgaagcatcagtccagaaaattcagttattaacaccaaatataggtgtcgtatatagt

SEQ ID NO: 152382 - DNA, 264 bp, Glycine max
cgacctcacccactcccgcctccaccgcctggtcgaatccgccgccgctcagttagtctccgccggcgtcaaacccggcgacgtcgtcgccctcaccttccccaacaccatcgagtttgtagtcatgttcctagccgtcattcgggctcgagccacagccgcgccgttaaactcggcttacacagcggaagagttcgagttttacttatccgactcggagtccaagctcctcctaacatcaccagaaggaaacaagcctgctca

SEQ ID NO: 152383 - DNA, 261 bp, Glycine max
cgacattcattcatctatggctacccttattgctcccagcaaccactctccccaagaagacgctgaggctctcagaaaggcttttgaaggatgggggactgatgagaaaactgtcatagtaatattgggtcatagaactgtttatcagaggcagcaaatcagaagagtctatgaggaaattttccaggaggatcttgtgaaacgcctagagtctgagatcaaaggagactttgagaaagccgtgtaccgatggatactaga

SEQ ID NO: 152384 - DNA, 262 bp, Glycine max
atcaagttgaggaagatggcactagtctctggaggaagatcaacactgaaccctaacgcccctctttacattcctgccgcgtttcgccaagtggaggatttctctccggaatggtggcagctggtgacgacgctgacatggtaccatgactactggctaagccagcagcacgatgagggagccttctacggcgaggacgacgggtttgatggcaatgatgtcgttgatttgcttcctgattcgtttgatcttgatgctggcg

SEQ ID NO: 152385 - DNA, 264 bp, Glycine max
caaacgattctacccgccgctcgatgggaattgcgcttcaaggcgtctcgtagggctaatccgcctcacgagggtcaccaacggcacgtgcctttggggggccgaggcccctactgctggtcggcaaacggacggcgggcgcacgcgtcgcttctagcccggattctgacttagaggcgttcagtcataatccaacgcacggtagcttcgcgccactggcttttcaatcaagcgcgatgaccaattgtgcgaatcaacggttct

SEQ ID NO: 152386 - DNA, 264 bp, Glycine max
tttccgctttcacttcttctctctcaccctccaactatgagttactacaaccagcagcagccacccgtcggtgttcctcctccccaaggttacccaccgccggaatcttacggaaaggacgcgtaccctccgccagggtaccctccacagggaggataccctccgcaggcgtatccagcacaggggtacctccaccctacgcgcctcctcagtacgctcagcctccgccgcaacaacaccagaattcatctggcccgggttgct

SEQ ID NO: 152387 - DNA, 264 bp, Glycine max
gcttcaagcgagtgacatccaccagccatgggtcgtatgcacagccgcggtaagggtatatcctcttctgctttgccctacaaaaggacaccccctagctggctcaagatctcttcgcaagatgtggaagaaaatatctgcaagtttgcgaagaagggtttgaccccgtctcagattggtgtcattcttcgagattctcacggtattgctcaggtcaacagcgtcactggcagcaaaatccttcgcatcctcaaagctcacggg

SEQ ID NO: 152388 - DNA, 263 bp, Glycine max
ggacggccgtacccttgctgactacaacattcagaaggagagtactcttcacctcgtcctccgtctccgtggtggcatgcagatcttcgttaagacactcaccggcaagaccataaccctagaggttgaaagctccgacaccatcgataacgtcaaggccaagatccaggacaaggagggtatccccccggaccagcaacgtctcatcttcgccggaaagcagctcgaggacggccgcaccctcgccgactacaacatccaga

SEQ ID NO: 152389 - DNA, 262 bp, Glycine max
gcccgaggccccggcccagaagccgcccaagttctaccccgcggacgatgttacgaagcccctcgtcaacaagcacaagcccaaacccgcgaaactcagggctagcattactccagggactgtgttgatcctgcttgctgggaggttcaagggaaagagggttgttttcctgaagcagctcccatctggattgcttcttgtaactggtccctttaagatcaatggggttcctctcagaagggtgaaccaatcgtatgtcatt

SEQ ID NO: 152390 - DNA, 256 bp, Glycine max
ggttttctggttttcaatgctgtgggtgggggcactggctctggtcttggttcccttttgctggaacgtctttcagtggactatggcaagaagtccaagcttggtttcactgtctatccttcaccccaagtttcaacctctgttgttgagccttacaacagtgtcctctccactcattcccttcttgagcacactgatgtggctgtcctgctcgacaacgaagccatttatgacatctgcagacgttcacttgaca

SEQ ID NO: 152391 - DNA, 260 bp, Glycine max
gtgattgttgtgactcgttcttcttcgtcgttatcttcttcttttgttgtttgtgtgtttgttttttctctcacctgaaaatgtcttgctgcggtggtaactgtggttgcggaagcgcctgcaagtgcggcaacggctgcggaggctgcaagatgtacccagacttgagctacaccgagtcaaccaccaccgagaccttggtcatgggagtggcaccagttaaggctcaattcgagagtgctgaaatgggtgttcccgct

SEQ ID NO: 152392 - DNA, 259 bp, Glycine max
aaaaaagatgagcgacggaggaaaacgacaaggtggaagagcgttgccgccgccgccaagaggccctccgcctcctcccccctctcgccctcgcctcgaacccgtcgatcgcgaaaagacatgtccgttactgctgcgagtgttcactaagattgggagtcaccattccatggaagactttgccgtcagaggcaaagagcccaaagacgaggttcagatttacacctggaaggacgctactctccgagaactcaccgat

SEQ ID NO: 152393 - DNA, 263 bp, Glycine max
tgttaatgcactttttaatgatacgtaagcaaggcatttctggtcctttatagtgaatatggatcatagatatttgtaatcacaatcattttttattttggggaggaatttatttcattgctacaaatatggattatttaaaagaataagacatgtatttggatatttcccttcaacttaacaaaaattgaatttttttccatacacgcacgaatagttgaagggaactctccgaagaaaaaatggattatgggagtaacaaa

SEQ ID NO: 152394 - DNA, 265 bp, Glycine max
cacggccagcttcttagagggactatggccgcttaggccacggaagtttgaggcaataacaggtctgtgatgcccttagatgttctgggccgcacgcgcgctacactgatgtattcaacgagtctatagccttggccgacaggtccgggtaatctttgaaatttcatcgtgatggggatagatcattgcaattgttggtcttcaacgaggaattcctagtaagcgcgagtcatcagctcgcgttgactacgtccctgccctttgt

SEQ ID NO: 152395 - DNA, 259 bp, Glycine max
ccctttttgattccacagcgctttgtatctccttatgggggaacaacggtgttcctaaccggttctttcaccagttggtcgaaccatatagctatgtctccgatggagggatgccctgctgtgtttcaagttgtttgcaacttaatgccggggtttcatcagtacaaatttaatgtagatggtgagtggcggcacgatgagcagcagccatttgtaaatgggagctgtggagtagtgaacactatttatatagtgagag

SEQ ID NO: 152396 - DNA, 260 bp, Glycine max
caagaaacctttctattcacatctgaatctgtaaacgagggtcaccccgacaagctgtgcgaccagatctctgatgcagtacttgatgcgtgccttgaacaggaccctgacagcaaggttgcctgtgagacatgcaccaagaccaacatggtcatggtcttcggagagatcacaaccaaggccaacgtagactatgaaaagattgtccgcgacacatgccgcgaaattggattcatctctgatgatgttggtcttgatgc

SEQ ID NO: 152397 - DNA, 259 bp, Glycine max
cttggagctgagtttcaagagaccatggattccggttttaatcaaatgcattccagtgaacttgcttcttcagttgttggaaaccgctttccaggctacatggaatatccaggagtaggatcgaggcaacagttccctgttgaaaggaaatgggcccttgggcttcagtctcgagcccatcctcgtgaaataatgactgaggttcttaaagctttgcaagaattaaatgtttgttggaagaagattggtcactacaaca

SEQ ID NO: 152398 - DNA, 259 bp, Glycine max
caatctgtttcactcagcaacagcagttacagcactcaaaaacctagagcgaagagcgtgaaggcaccggccgccggccatgacattcaagcgcaggaacggaggtcgcaacaaacacggccgtggccatgtcaaattcatccgatgctccaactgcggcaaatgctgccccaaggacaaggccatcaagaggtttcttgtgaggaacattgttgaacaggctgcagtcagagatgtgcaggacgcctgtgtctatgaa

SEQ ID NO: 152399 - DNA, 260 bp, Glycine max
atgtttcgtacgtttatcatgcgatgtttgcctacttcgatagggacaatgttgcgctcaagggtcttgccaagtttttcaaggagtcaagcgaggaggaaagggagcatgctgagaaattgatggaatatcagaacaagcgaggtggaaaggtgaagttacaatctatagtgatgcctcttactgagtttgaccatgaggaaaagggagatgcgctatatgcaatggaacttgccctgtcgttggagaagctgacaaat

SEQ ID NO: 152400 - DNA, 256 bp, Glycine max
taggagggcaattgtgcaagtttcctatgccattggtgtgcctgagcccttgtctgtgtttgttgacacttatggcactgggaagatccctgacaaggaaatcctcagcattgtgaaggagagttttgacttcaggcctggcatgatctccatcaaccttgatctcaagaggggtggaaatggcaggttcttgaagactgctgcatatggacactttggcagagatgaccctgacttcacattgggagtggtgaag

SEQ ID NO: 152401 - DNA, 249 bp, Glycine max
ctctctctcaccaaattcttattagaacgaaaaaagaaaagaaacgaaaaaagagcgatttttccctcaccaaagaagaaccaaaacaatggcggatcaactcaccgatgaacagatctccgagttcaaggaaccttcagcttgttcgataaggacggcgatggttcgttctctctctctctctctctctctctctcatgttttgcgtatttgatttaatctgattttcgtgtttgtggttttcgtaga

SEQ ID NO: 152402 - DNA, 257 bp, Glycine max
atggccacgctttgctaatgactgacacccgtaggcggcttcttgagatgggttataagaatcctgtcctcttgcttcatccactgggatgctacaccaaagctgatgatgtcccacttgattggcgaatggacaacatgagaaggtacgtgaggatggtgttcttgatccagagaccactgtggtatccatattcccttctcccatgcactatgctggacccacggaggtgcagtggcatgcaaaggctaggatca

SEQ ID NO: 152403 - DNA, 258 bp, Glycine max
tacaatttcaatctctctctctctctgtctctctctctctagacttagattttgtgaatggctgaagtggaagagggacaggtcatcggcgtccacaccgttgatgagtggaagctgcaactccagaatgcaaagactccaaaaaactgattgtggtggattttactgcttcctggtgtggtccatgccgttttatggccccagttcttgcagagattgcaaagaaaactcctgaattgatcttcctcaaagtggatg

SEQ ID NO: 152404 - DNA, 262 bp, Glycine max
  unsure (1)..(262): unsure at all n locations
aactctgggagccaaatgcaatacgcagatggtaattccccacctgacagaaaactatggtgcatcaagagatccacctgagagacaggcaccaatgtgcactgtacactcatttccgcgcgacatagtgttgtgaaagacatgggcgcgatctgagtttgagggtttgcttgagaaaactccagccgaagtaaatgcatattttactaaccccaagtgaataattaantntgcaaatgaaaaaatagctggtgatgctcaa

SEQ ID NO: 152405 - DNA, 258 bp, Glycine max
cggaatcctcaagggcgacgtcgtcatgatcctcctccagaactccgccgatttcgtcttctccttcctcgccatctccatgattggcgccgtcgccaccaccgccaacccgttctacaccgccccggagatcttcaagcagttcaccgtctccaaggcgaagttgatcataacacaggcaatgtacgtggacaagctccgcaaccacgacggcgcgaactcggcgaggacttcaaggtcgtaaccgtcgacgatccg

SEQ ID NO: 152406 - DNA, 251 bp, Glycine max
cacctcatcaggtcaatcccatgatctcaaaaaagaagattgcaaggaaacaagatcactggttgtttgctttggggaaatgttaatagactttgttccaacggtgggaggagtgtcactggctgaagcaccgctttcaagaaagctcctggtggtgcacctgccaatgtggctgttggtatctctagactgggaggttcatctgcttccataggcaaggttggagcagatgaatttgggtacatgttggg

SEQ ID NO: 152407 - DNA, 258 bp, Glycine max
acccaatccaatcctcgcacacatgcatgttgtctctgccaaagttggggccaagtcataactacatttccattgttacgattctttctttccatcccaaccacttaataagcgtctgatccaatttctttctctcaccatggatcatcgcaaaccattgttacccacttcctctgacgatgctccaaatccacgcactcggaaggaccttgttctaatgatttgcggtttgtttttgctctcttcccttgttgcctt

SEQ ID NO: 152408 - DNA, 255 bp, Glycine max
cgcaaacacgctgttcctacaatcattccaaatgtgcccttccggtcgcaccctcctcccttcctccgtctccgatttccgaccggcattcgacgtcctcgatgccgaccgcgacggcaaaatcagccgcacgacctccgcgccttctacgccggagtcggcggcggaggagatgacgtgatcggggcaatgatgacagtggctgacaccaataaggacgggttcgtggagtacgaggagttcgagcgcgtggtc

SEQ ID NO: 152409 - DNA, 257 bp, Glycine max
gaatttttggctctattgttcctgttctgactcttggctcattttctaagagatggatagttcctggatggaggcttggttggtttgttacaaatgatccatctggcacttttagaaatccaaaggtagatgagcgaattaaaaagtactttgatcttttgggaggtcctgccaccttcatccaggcagctctacctcagataattgcgcatactgaagaggttttcttcaagaaaaccattgataatttgaggcat

SEQ ID NO: 152410 - DNA, 255 bp, Glycine max
ctctggccctctttggtgcctttgtgagccgagctgctattacaactgttgatgtgttgactccaaaggttttcattggtttgattgtgggtgcaatgcttccttactggttttctgccatgactatgaagagtgtgggaagtgctgctctgaagatggttgaggaagtacgcaggcaattcaacaccattccaggattgatggagggaactgctaagcctgactacgccacttgtgttaagatctccactgatg

SEQ ID NO: 152411 - DNA, 256 bp, Glycine max
cctagttaggcaaacacaccaaacaccaaacaccaaactagttggctcaattctctttgaatggctttggaggctttgaattcaccaacagcagccaccactccgttccgtggctaccaagaagaggaggggacgaggaggctgaccttcacttacgtgagccttgggctaaaaggaaacgctccaaacgaccgcgttttgagacggaggaagagtacctcgctctttgcctcatcatgctcgcacaaagcggtaa

SEQ ID NO: 152412 - DNA, 180 bp, Glycine max
caggctctagctcaccgccctggagggcccccgaagatccgaatatccggtgttgatgactcctattcggcttatgccaggggaggagggcttgatattgttgggaaaaggttatctgcacatgcacagtcatgtcatgtgccttttgagttcaatgctgtaagagtacctgctcctcag

SEQ ID NO: 152413 - DNA, 256 bp, Glycine max
aaggattctacccgccgctcgatgggaattgcgcttcaaggcgtctcgtagggctaatccgcctcacgagggtcaccaacggcacgtgcctttggggggtcgaggcaccctactgctggtcggcaaacggacggcgggcgcacgcgtcgcttatagaccggattctgacttagaggcgttcagtcataatccaacgcacggtagcttcgcgccactggcttatcaaccaagcgcgatgaccaattgtgcgaatcaa

SEQ ID NO: 152414 - DNA, 257 bp, Glycine max
ctcattgttggtattatcctgtcttcacgtgctggtcagtctagagctgattaagaaagatgtggctgcaaaatattctttgatctaccatctgttttaaccttcttcttattgtgaaggcaaggggggtaaattgttagttgtgaggttaatgatgttgggataccacttgcaaggtttaacaaatgtgaaagcagttgctgcatcagtcatttttgtgtttgtataagtagtctttctttgcttaataaagcttt

SEQ ID NO: 152415 - DNA, 254 bp, Glycine max
caagttactatctataattaattaaattcctcgtggaatattgaggaagccatgtctacagctgggcaggtcatcaagtggagagctgcggtggcatgggaagcagggaagccactgtcaatagaaaccaagaagtggcaccaccccagaaaggtgaagtgcgtttgaggatcctcttcaactccctttgccgtagtgatgtttattggtgggatcctaaggaccagactcctctgtttcctcgtatcttaggc

SEQ ID NO: 152416 - DNA, 253 bp, Glycine max
gtttctctttcattttttttttgctaaggactcaaggaatacaacatcctgatatttggaggacagattaaagagaaacatcgtggaggaaacaatggcagcaaggtattggtgtcacatgtgctctcaatggtcaatcccatcatggatatggaaatcagatgcccgttttgccaaagtggatttgttgaagaaatgggtaacacccccagtagcagcagcattcccaatacatcagaatctgattttgaat

SEQ ID NO: 152417 - DNA, 256 bp, Glycine max
gctaatacgtgcaggtagcttgaccgccttacccgtcattgaaacacaagcgggagacgtatcggcctatattccaactaatgtgatctccattactgatggacaaatatgtttggaaacagagctcttttatcgcggaattagacctgctattaacgtcggcttatctgtcagtcgcgtcgggtctgccgctcagttgaaagctatgaaacaagtctgcggtagtttaaaacttgaattggcacaatatcgcgaa

SEQ ID NO: 152418 - DNA, 233 bp, Glycine max
gaggaaaccaccactggagttaagaggctctatcagatgcaggcgaatgggactcttctcttccctgctattaatgtcaatgactctgtcaccaagagcaagtttgacaacttgtatgggtgccgtcatctctccctgatggtctcatgagggctaccgatgttatgattgctggaaaggtggctgttgtggctggatatggtgatgttggcaagggttgtgctgctgcaatg

SEQ ID NO: 152419 - DNA, 253 bp, Glycine max
cttcaacaccctcgactatctccgattcgtcacaatcaccggcgtttccgtcaccgtcggctacctctccgggattaagcctggaattaggggtccttcgatggtgacagggggtttgatcggtgtgatgggtgggttcatgtatgcttaccagaactccgctgggagactcatgggtttcttccccaacgatgatgaggtagctcgctacaacaaaaaataattcctttttttgtgctcatcaaaaaacaaa

SEQ ID NO: 152420 - DNA, 82 bp, Glycine max
tgtaggataagtgggagctggaaacagcgaaagtgaaataccactacttttaacgttattttacttattccgtgaatcggaa

SEQ ID NO: 152421 - DNA, 256 bp, Glycine max
tgatggggttgagctaagagaacttccttgcggtcaccattttcactgtgtctgtgtggataaatggctgtatattaatgctacatgccccctctgcaagtataacatcttaaaaagtagcaacctcagtcaagaggaagtgtagaagatcgatgtcaggaaagtttttggcgcccatgttgaggaatctgcacactttcgattcacagccatgttaatatactttgatacaggcctatacagttgctcctgctgc

SEQ ID NO: 152422 - DNA, 254 bp, Glycine max
aaatttcattctgttgtacaatgtttgtcaacagttgcaactgtactgtctcgtgaggttattgagagagaggctgaatcaggaggagagcttggggaattggagtcatatgagattgaaggtggtgaacagaagctgaaattctgcagaatctggctgagatccagtctgcttgtgtcatgtacagtgctatgtcggagatttcttgtagttagcaaggagcactaatgtctgcaatggacagctcgagcagg

SEQ ID NO: 152423 - DNA, 254 bp, Glycine max
gataactagaaacagtgtgatgaaaatgaaggtccttgttttcttcgttgctacaattttggtagcatggcaatgccatgcgtacgatatgttccctctccgaatgaacactggctatggtgcccgtatccggaggtgaaatgcgcaagttggaggcttgctgtggaagcacacaacatctttggctttgagaccattcctgaagagtgcgttgaagcaacaaaggaatacatccatggcgaacaatatagatc

SEQ ID NO: 152424 - DNA, 254 bp, Glycine max
gccatgcatgtgtaagtatgaactaattcagactgtgaaactgcgaatggctcattaaatcagttatagtttgtttgatggtatctactactcggataaccgtagtaattctagagctaatacgtgcacaaaccccgacttctggaagggatgcatttattagataaaaggtcaacacaggctctgcctgttgctttgatgattcatgataactcgtcggatcgcacggcctttgtgccggcgacgcatcattc

SEQ ID NO: 152425 - DNA, 253 bp, Glycine max
gttgctgcatggctcccaggtagcgaaggccaaggtgtggctgatgttttatatggcggctatggtttcactggaaagcttccaaggacatggttcaaaactgttgatcaactgccaatgaatgttggagatcctcactatgatcccctcttcccatttgggtttggcctttctaccaaaccttctaaggccctttattcctcttgatgtatatttttttatgtaaaactataaacaataaaagagggtagga

SEQ ID NO: 152426 - DNA, 253 bp, Glycine max
gttcagaattcagatccattcttgtcctatctttttttttcttttagatttttctttaaaattctctatcgaccaaagatcttcaacaaaccggttaagtttgtgtagtttggtaagatgggtggtgatttagagtgcttcacttagttagaccatttctctcgtttcttcctgaagttcagactgctgacaggaaagtgccatttagagagaaggtcatatatactgtgatctctctgttcattttccttgt

SEQ ID NO: 152427 - DNA, 192 bp, Glycine max
tcgtgttgtagctagctcctcgaaaatgctggcacgcctcgccgcgagtcgcttcaacgagatccgtcagattttccgtcagccttctagggctttctcgaccgctctgaactaccaccttgacacacggacaacaaccctaaacttccatgggaattcaccgaggccaatcaagcaaaggttaaggagatt

SEQ ID NO: 152428 - DNA, 254 bp, Glycine max
cagagcaagttcgccgacgagaacttcgtgaagaagcacaccggtcccggcatcctctccatggctcacgccggtcccggaaccaacggatctgagaccttcatttgcacggagaagacagattagctcgaaggaaaacatgtcgtgttcggacaggtcatcgaagggattcaacgttgtcaaggacatcgagaaggtcggatccagctccggtaggacctccaggcccgttgtcatcgcaagtggggtaaatc

SEQ ID NO: 152429 - DNA, 255 bp, Glycine max
ctttcctctatttggccaggaaacttgcaggtgatcctaacttgcactttgtggaatctcctgcattggctccaccagaagttcaaattgatttagctgcacagcaacaacacgaagctgagcttcttgcagctgctagtcagccccttcctgacgatgatgatgaatcttttgagtaaaattgtgctttttctgagtcgtgttactgcgtatgctatgatatgtattttgggggggtgtattgttgacattttt

SEQ ID NO: 152430 - DNA, 184 bp, Glycine max
ctcgagccgaatcggctcgaggtgtggattcaaaagccgccaaccagcagcatcgtcgttttacatggggactcagagcagatgagaggcatgtggtggacttctacatttctgatttccaatctggattgagagcattggttaaaacaggctatggtgcaagggtgactccttatgtggataa

SEQ ID NO: 152431 - DNA, 253 bp, Glycine max
atggtgaccgtggttactctcgtggtggtgacggtggtgatggaggctggagaaactagggcttgatgtcgttgattagggtttatgattatgctcagtaattttagttgtgtttgagtttgagtatctttatggttttgtgtcgaccgtggttcttgtttttgaccagtatatctggttgtttgtagtcgatttagtggaatgataatcagaagtgggagtatcagtagtctttctttgcttaataaagctt

SEQ ID NO: 152432 - DNA, 254 bp, Glycine max
cgaagaaggagtagcgtagaggaagagtgcgaaagaaagatcgttctcgatgacagaggggaacggtgacaaaactctgcgaaagatcgcagacgcattcaatgaccttgcaaacgttttcaccgattctcagagcgcagaagcagaggtcaaggttgctcccttctctcatgcctgctctctcgtctcccctctcttcggttgcttgggcgtcgccttcaagttcgccgaaatggattacgtcgccaaggttc

SEQ ID NO: 152433 - DNA, 226 bp, Glycine max
gtaggatacaaccctgacaagattccttttgttcctatatctggttttgagggagacaacatgattgagaggtccacaaaccttgactggtacaagggtcctactctgctagatgcacttgaccagatctctgagcccaagaggccttctgacaagcccctcaggctaccccttcaggatgtgtacaagattggaggaattggaactgtgcctgtgggacgggttg

SEQ ID NO: 152434 - DNA, 253 bp, Glycine max
atatagcccaagccctatacaaccaaaccctaacacacacccatttgattcagtttccatggctagcctcaaggttgcatttttggctgcagtgctctgcatggttgtggtgagtgcacccatggcaatgcagctatcacgtgcgggcaggtgacgaatagcctgatcaattgcatcggttacctccagaacggaggaacgccgccgtcgggatgctgcaacggagtgaagagcctcaatgccgccgccaaga

SEQ ID NO: 152435 - DNA, 245 bp, Glycine max
tcaaaaaccaaaaccctaatggcagagcgcggaggtggcgaccgtggcagcgaccgtggcggtttcggacgcggctttggtgggcgagggcgcggaggtgacaggggccgaggccggcgccgaggtccccgccgcgaggaagaggagaaatgggtcccagtgacaaaactgggccgcctggtgaaggagggaagaatccgaagctttgaacagatctacctccactcgctccgtatcagggagca

SEQ ID NO: 152436 - DNA, 254 bp, Glycine max
tctcgagccgaatcggctcgagataccaccaactgaagaaattgccgacagaatcaacaagatgctggcagtgctcgagaagaacatcttgtgggtgaaccctgactgtgggctcaagacccgtaagtacactgaggtgaagccagccctcacaaacatggttgccgcagcaaaactcatccgcaacgaacttgccaagtgaatggtataagaaagtagaatcttccaagtcatttggttctgctttatattat

SEQ ID NO: 152437 - DNA, 251 bp, Glycine max
tggatccagacgcgttggcaaaggcattcgtggagcactactacagcaccttcgacaccaacaggaacggcttagcgaatctctaccaggagggttccatgctctttcgaagggcagaagatccaaggcgcttccaacatcgttgccaagctcacctccctcccttttcagcagtgccaccactcaatctccaccgtcgactgccagccctccggcgtcaacgccggcatgctcgtcttcgtcagcggaaa

SEQ ID NO: 152438 - DNA, 252 bp, Glycine max
attcggccctatttctagctccattcaagtaactgaattcacaattcgtgatgcatacatgcttaggatttttgaggataaccaaacacgtctaccaagatggtgcaacaatgagaacgatcggctccattctgccagattcttggtgaatataggatggaattgcctggctataacaccttggatccatatgccaatatgaacgagcactgtccttcccttcctccaacttatgataggccattgaaatgt

SEQ ID NO: 152439 - DNA, 253 bp, Glycine max
cttgttttgtgggatctgagacctcttggattgactgggaataaggtggttctccgttccgccagtgacaaggctgtaccctttccccatcaagtattttccaagcgcaacggagaaccatcttgtcttgtgggatctgagacctcttggattgactgggaataaggtggagaaactctgtgatctctgtaacattactgttaacaagaacgctgtttttggtgatagcagtgccttggcccctggtggagtg

SEQ ID NO: 152440 - DNA, 253 bp, Glycine max
ctaagccgacatcaccattcatccgatgagttcgagaggagcgaccgcggtgctatctcgtgccagcaggattcggtcgaagctgcaaacggagctggaagccaccgttttggaggtggacgacgttcgtaccagcacgcgggccacgccgccgtgaagggtagttccgacaaagaaacccacttcaacctcaacatcgtctcccccaagttcgagggccagagccttgtcaaacgacaccgtctcatctacg

SEQ ID NO: 152441 - DNA, 253 bp, Glycine max
caaaggaggctgctaacttcacagcccaagtcatcatcatgaaccaccctggtcagattggaaatggctatgcccctgtcctcgactgccacacttctcacattgctgtcaagtttgctgaactcatgaccaagattgacaggcgatccggcaaagagcttgagaaggagcccaagtttttgaagaacggtgatgctggttttgttaagatgattccaaccaaacccatggttgttgaaactttctccgagta

SEQ ID NO: 152442 - DNA, 216 bp, Glycine max
ctctctctcccttcacaaatggctaacaatcccttttctcattctcttcttattcttctttttttcttttattcttcactctcatgtcatcttcttccattccctcctcccctgatcacttccccacctcggcctcggctactccatcgccatagccctagccttcctcttcctcctctccaccctcctcctctcctcctacttctgctgcggcaa

SEQ ID NO: 152443 - DNA, 184 bp, Glycine max
ctcgagccgctcgagcggctcgacgggctcgagatctgggaacaacacacacaaaccattcacttttctcgctccggcaatgaccacccaagcactccaccttcgccgtcgccgttccctccgtcacaacccccttccgcagccaccggaatcccttcgttgttcgagcccaagctgaaccttc

SEQ ID NO: 152444 - DNA, 258 bp, Glycine max; identical to SEQ ID NO: 152403

SEQ ID NO: 152445 - DNA, 250 bp, Glycine max
ttaggccctgatatctctgctcccccacttgttgctgcagttgccaatgctggtgctcttggacttcttatggcccctgattgggaatcgccggattacttgagggaactcataaagacgactattaccttaactgataaacccttcggggttggcgtcgttctagcttttccttttgaggagaatttgaatgtcattttggaagaaaaagttgcagtcttgcaagtttattggggtgattgtacaaggg

SEQ ID NO: 152446 - DNA, 249 bp, Glycine max
gtcaaatttggagatggaagtcttctttcgtttctcgatggtgaagtaagactaaactcatgagcttattatcctaggtcggaacaagttgataggagctacttttttcacccccatccatgtcgcacacgggggcgacatggatgggggtgaaaaaaggatatagagggatggggttccacttgcttttggcatagcgggccccggcgggatgcacgcacgacgggctattagttcagtggtagagcg

SEQ ID NO: 152447 - DNA, 249 bp, Glycine max
cgagataactagaaacagtgtgatgaaaatgaaggtccttgttttcttcgttgctacaattttggtagcatggcaatgccatgcgtacgatatgttccctctccgaatgaacactggctatggtgcccgtactccggaggtgaaatgcgcaagttggaggcttgctgtggaagcacacaacatctttggctttgagaccattcctgaagagtgcgttgaagcaacaaaggaatacatccatggcgaaca

SEQ ID NO: 152448 - DNA, 250 bp, Glycine max
ggctcgagccgctcgagccgatcaagaacagagagaagcataagggacgctttgagactatccgtgttcaggttgccactggccacgagtttgcaactcgtatgggcaatgtgttcaccattggcagggaacaaaaccatggatatctcttcccaagggtaaaggtattaaactatcaatcattgaggaagctaaggaaaaggattgccgcccaacaagcaactgctgcttaagtctttaggaaatgaat

SEQ ID NO: 152449 - DNA, 246 bp, Glycine max
aatggcttctctggcaagcgtagctgttgttcaaccatgctactgtcaagggccttgctggaactaagctctctttcaagccctctcgccagagcttcagacgcaaggattttcaggagtgagtgcgttgtagcacagtacggtgaaaatagtgtgtactttgaattggtggatctaggcaacactactggtcagtgggacttgtacggctccgatgcaccgtcaccctacaaccctcttcagagc

SEQ ID NO: 152450 - DNA, 254 bp, Glycine max
atcaagcgcctggtattgaggttcttccagatgaatgcctctttgagatattcagacgccctcctagtggcaaagagcgaactcatagtgcctgtgtatctaaacgctggcttatgcttatgagcactatctgcaaagatgagattgagagggctacctctcttgatgaaactgtttcttctgatgagaatcaagacattgaagatgatggataccttacaaggtgtctggatgggaagccagccactgatgtg

SEQ ID NO: 152451 - DNA, 140 bp, Glycine max
acatggcttccttaagctccttagtgctgctccttgcagctctaattctatcccctcaagttcttgcaaactatgagagtgccccagtgtacaagcctcccactgagaaaccaccagtttatacgcccccagttgagaag

SEQ ID NO: 152452 - DNA, 258 bp, Glycine max
cgagaaagttgccacagcatttaaattggaggaagatgtagtaattgcaaatctggatgctgataaatataaggatctggctgaaaagtatgatgtgagtggatttcctaccttgaagttcttcccaaagggcaacaaagctggtgaagagtacggaggtggaagagacttggatgactttgtggcttttatcaatgagaaatctggaacaagtcgagatgtaaaaggacaacttacttcccaagctggtatagtaga

SEQ ID NO: 152453 - DNA, 260 bp, Glycine max
cttagctactaccgatcatttgatgaggttcgtcaacaaagatccagaaggttttgtgcctatatctgttgttgcatctttcaagaagattaaggccctcatagcgagtcattcccaacttgcaactgttttaaggaactcgtcaaagcttgtggttagtgaagatggaaagaaaatcaaacgccagtatcccctgactgagtctgatatagaagagatacaatctcgcattgttgtagctgaaaacctacctgaggatc

SEQ ID NO: 152454 - DNA, 262 bp, Glycine max
attctcccatttcctctcagaaccctcgatcactcccacgcgctcctatatcctctccttcaccgtcgctctctccaacgatcacaacaacatcgtcatcccatggcaaacgccgcatctggtatggcagtccatgatgactgcaagttaaggtttttggagctgaagacaaagaggacacaccgtttcatagtttttaagattgaggagcagcagaagcaggtcattgtggagcagcttggtgagccagcccaaggctatg

SEQ ID NO: 152455 - DNA, 261 bp, Glycine max
agtctccacattattatagagccacaacaataataataatatgggtaacagcttaaggtgttgtttggcttgcgttcttccgtgtggagccctagacttgatccgcatagtgcacttgaacgggtacgtggaagaaatcacgcgtccaatcacggcgggggaagttcttaaagcgaatccaaaccatgtcttgagcaaaccgacctcccaaggcgtggttcgccggattctgatcctctcaccagataccgaactcaagag

SEQ ID NO: 152456 - DNA, 261 bp, Glycine max
caaacaaccttctttctttttctgtgagcctttctttcaggttcttaacttgatcagtgtgcagtgtccaaatcataagggtagttgcaaattgccatggctaagcatgatgttgagggtggttccttctctgcaaaggactaccatgatcctcctccagcaccgttgattgatgctgaggaactcacacagtggtccttctacagggctttgattgctgagttcattgccacaatgctcttcctttacatcacagtgctc

SEQ ID NO: 152457 - DNA, 266 bp, Glycine max
ggcgctgtgcgtatcgacccgtgcaatgctgtagctaacgcgttaagtatcccgcctggggagtacgttcgcaagaatgaaactcaaaggaattgacgggggcccgcaccgtccgagaatgccgccgtctcgaatggattcgccgccgccggatctgtcgtagtcggtctcgtcgctgccgcctcattgatcatgtgaaccgccgcataggcttatatagaaaatttattatctcctaataaattattctccttatttttgagttt

SEQ ID NO: 152458 - DNA, 253 bp, Glycine max
aaaggattctacccgccgctcgatgggaattgcgcttcaaggcgtctcgtagggctaatccgcctcacgagggtcaccaacggcacgtgcctttggggggccgaggcccctactgctggtcggcaaacggacggcgggcgcacgcgtcgcttctagcccggattctgacttagaggcgttcagtcataatccaacgcacggtagcttcgcgccactggcttatcaaccaagcgcgatgaccaattgtgcgaat

SEQ ID NO: 152459 - DNA, 260 bp, Glycine max
gttaagggtcgagatactgttggtcaacaaattaatgtgacttgtgaagtacagcaattattaggaaataatcgaattagagctgtagctatgagtgcgacagaaggtctaatgagaggacatggcagtgattgacacaggagctgccctaagtgttccagtaggtggagcaactctaggacgaattttcaacgtgcttggagagctcattgataatttaggtcctgtagatactcgcacaacatctcccattcatagat

SEQ ID NO: 152460 - DNA, 261 bp, Glycine max
ggttgacggatgcctcctcctcaacgccattaaccaggtcaatgggaagaagccatggtcactctctttctcctttggaagggcacttcaacagagcacccttaaggcatggggcggaaaagaagagaatgtgaagaaggctcaggaagcccttttggtaagagccaaggctaactcagaggcaactctgggaacctacaagggtaactcacagcttgctgatggtgcctcagagagcctccatgtttcgaactacagcta

SEQ ID NO: 152461 - DNA, 259 bp, Glycine max
ccgcaccagtttcaccgcacgaatatcttgttgtttggagcgatccgagaaaaactctgtaaacatgttggtttaccaggacctccttacaggtgatgagcttctctctgactccttccgttacaaggaaattgagaatggaatgctgtgggaagttgaggggaagtgggttgttaaaggagcagttgatgtagacattggtgcaaacccttctgctgagggtggaggagaagatgagggagttgatgatgcagctgtt

SEQ ID NO: 152462 - DNA, 261 bp, Glycine max
gaaatggtacaagaaaacgacttggatgtatcttgcaattcctatgatactatacgcatgcgagcgattacttcgtgcttttaggtctggatacaaaagtgtcaagattttgaaggttgcagtgtaccctggaaatgtcttggccttgcacatgtctaaaccacaaggatttaagtactctagtggacagtatatttttgttaattgcccagatgtctctccttttcaatggcatcctttctctattacatcagccccagg

SEQ ID NO: 152463 - DNA, 265 bp, Glycine max
tgtcgctccgcaccagtttcaccgcacgaatatcttgttgtttggagcgatccgagaaaaactctgtaaacatgttggtttaccaggacctccttacaggtgatgagcttctctctgactccttccgttacaaggaaattgagaatggaatgctgtgggaagttgaggggaagtgggttgttaaaggagcagttgatgtcgacattggtgcaaacccttctgctgagggtggaggagaagatgagggagttgatgatgcagctgt

SEQ ID NO: 152464 - DNA, 255 bp, Glycine max
catatagcccaagccctatacaaccaaaccctaacacacacccatttgattcagtttccatggctagcctcaaggttgcatttttggctgcagtgctctgcatggttgtggtgagtgcacccatggcacatgcagctatcacgtgcgggcaggtgacgaatagcctgatcaattgcatcggttacctccagaacggaggaacgccgccgtcgggatgctgcaacggagtgaagagcctcaatgccgccgccaaga

SEQ ID NO: 152465 - DNA, 260 bp, Glycine max
tgataacccataaccgaccgcaccaccgttttcctttgctttgcgttctacaatgtcgaaaacctcagagattattacatgcaaagctgctatttgctggggaataggaaaacctgtgactgtggaagagatacaagtagaccctcccaaagccaccgaagttcgagttaagatgctttgtgccagtatatgctccacagacatctctagcacaaaaggattcccacataccaattttcctatagcacttggacacgaag

SEQ ID NO: 152466 - DNA, 259 bp, Glycine max
tcacgatctcaacggagcacctctcttcaggtcgccatctagactgcaatcatggctgatggaccacagcatccatcagttgttcagaagctagctggacagtcttacctggtgtccaggctaagccccaactttaactctgggaattattcctcgactggttcttacttcaatggaggactgcactctgctgggttggctgttgtgtcgcctagatctcccattactgtgcatgctccagcagagaccggagtgagtg

SEQ ID NO: 152467 - DNA, 260 bp, Glycine max
aagctttcaagagacaaactgctttgaaaaatgggatccaaggttgttgcatccgttgcccttctcctctccatcaacattcttttcctttccatggttagctccagcagccactacgatccacagccccaaccttctcacgtcactgctcttattacacgacctagttgtccggatctgagtatttgcctcaatattttaggcgggtctctaggaaccgtggatgattgttgtgccctcatcggtggtcttggtgacat

SEQ ID NO: 152468 - DNA, 255 bp, Glycine max
ctggtattgagacaggagatttagaaaaaagagatgatttgtttccacagattctaagagcggaggcagtggcaaggctttatgagcttgggaaggtgagtgatgctagcggttatttggagaggacattcttgagtcctgcatccatgagggcaatcaatcttattcgtaaatggatggaggatgctggtttgagaacttgggtggaccaaatgggaaaagtacatggtcgcgttgatggtgctaatgcaaatg

SEQ ID NO: 152469 - DNA, 260 bp, Glycine max
attcagtgaaacactagctagggtattgggagctctcgttgtttcggagttagggaccttacgcagccatggccactgctacgaatgccgccgccgccccaccacgccagctctcccagaaggaagctgacatccagatgatgttggccgccgacgtccacctcggcaccaagaactgcgacttccacctggaacgttacatcttcaagcgccgcaacgacgggatttacattattaaccttgggaagacgtgggagaag

SEQ ID NO: 152470 - DNA, 259 bp, Glycine max
ctcaacatttatgtcccacttgcccttcagctccttgtgacttgtggcaagtctcctcctcctggttacacgtgctccctctaaaccaggtggataggattgaggaatatatggtcaaaatcgacatgagaggatgtcgagccacactatctctcttctcttctgattggaactgctgttgtttgttttgctattatttgtaaaaccatttgtttttaattgagatcgttgcatgtatggtttaatataatcttaggca

SEQ ID NO: 152471 - DNA, 260 bp, Glycine max
atcattcttcgtttgtctaagatccgccttctctgaattgtaaaaatgtcgctcggagaaactgcttgttcatacgcagctctcatccttcatgaagatggaatcagtgtaactgccgacaagatcagcaccttgttggaaactgcaaaggttcaagtagatacctattggccaaccttatttgctaaacttgctgagaagaaaaatcttggcgatttgatagccaatgcagcaggcggtggtgcaccagttgctgttgc

SEQ ID NO: 152472 - DNA, 253 bp, Glycine max
atatagcccaagccctatacaaccaaaccctaacacacacccatttgattcagtttccatggctagcctcaaggttgcatttttggctgcagtgctctgcatggttgtggtgagtgcacccatggcacatgcagctatcacgtgcgggcaggtgacgaatagcctgatcaattgcatcggttacctccagaacggaggaacgccgccgtcgggatgctgcaacggagtgaagagcctcaatgccgccgccaag

SEQ ID NO: 152473 - DNA, 253 bp, Glycine max
gcattggttcaaccatagctcaaggtatggcttttggcaccggaagtgcagtggcacacagggctgtggatgcagtcatgggtcctcgtaccattcaacatgaaacagttgttacagaggctgctgctgctgcccactgcacccactgcaaatacttttggtggcgatgcatgcagcattcatacaaaggcattccaggattgcctgaacggctatgggaatgacattagcaagtgccagttttacctggcta

SEQ ID NO: 152474 - DNA, 254 bp, Glycine max
aaaaaaaatcaccgaacgaatatcttgttgtttggagcgatccgagaaaaactctgtaaacatgttggtttaccaggacctccttacaggtgatgagcttctctctgactccttccgttacaaggaaattgagaatggaatgctgtgggaagttgaggggaagtgggttgttaaaggagcagttgatgtagacattggtgcaaacccttctgctgagggtgctggagaagatgagggagttgatgatgcagctg

SEQ ID NO: 152475 - DNA, 253 bp, Glycine max
ggattctacccgccgctcgatgggaattgcgcttcaaggcgtctcgtagggctaatccgcctcacgaaggtcaccaacggcacgtgcctttggggggccgaggccccctactgctggtcggcaaacggacggcgggcgcacgcgtcgcttctagcccggattctgacttagaggcgttcagtcataatccaacgcacggtagcttcgcgccactggctcgtcaagcaggagctatgaccaattgtgcgaatca

SEQ ID NO: 152476 - DNA, 257 bp, Glycine max
gtcccagtcccgaacccgtcggctgtcggtggactgctcgagctgcttccgcggcgagagcgggtcgtcgcgtgccggtcgggggacggattgggaacgggcccttcggggcctcttccccgggcgtcgaacagtcaactcagaactggtacggacaaggggcatccgactgtttaattaaaacaaagcattgcgatggtccctgcggatgttgacgcaatgtgatttctgcccagtgctctgaatgtcaaagtgaa

SEQ ID NO: 152477 - DNA, 254 bp, Glycine max
aattactttagtgttttctcttgtcacataaaagtcatctaagaagaattacaagatcatcatcacaataacaagatgagttcaggaattagagcatggagtgtggcagcaagtgttggaattgtggaggccttgaaagaccaaggtatatgcaggtggaatcatgccttaagatcagctcaacaccatctcaaaaaccatgttggctcattctctcaggctaacaagctttcttcttctgctatgatctccac

SEQ ID NO: 152478 - DNA, 256 bp, Glycine max
cgagaaagttgccacagcatttcaattggaggcagatgtagtaattgcaaatctggatgctgataaatataaggatctggctgtcaagtatgatgtgagtggatttcctaccttgaagttcttcccaaagggcaacaaagctggtgacgagtacggaggtggaagagacttagatgactttgtggctgttatcaatgagacatctggaacacgtcgagatgtacaaggacaacttacttcccaagctggtatagta

SEQ ID NO: 152479 - DNA, 252 bp, Glycine max
ggaaccccgagtcctacctcggtcccgccgcgttgctccacgctaataggtggataagtgacagtcgtgatgagtacactaaggagagattggatgccattaatgatgaattcaagctctatcgctgccacaccatattgaactgtgctcgagcctgcccaaaggggttaaacccaggaaagcaaatctcacatatcaagtcacttcagcctaaagcatacactcctattgttagaggcatgatgatgtttg

SEQ ID NO: 152480 - DNA, 256 bp, Glycine max
ggccgatgttgatggcgatggccaaataaactacgaggagttcgttaaggtgatgatggccaagtgatcatcacattatggccacaaaaacctaaaagaagaaatgttgattaaaaggaaacgacaaaaaaaggggtaggaggaaggccaagggtttgggtggtataacagtgatgtagtagtcctgcacctttcttcttcctacatttttatttgatggtttttgaatccaaccttaaaatgtcaattagtggca

SEQ ID NO: 152481 - DNA, 258 bp, Glycine max
gaagctatgtgataacatgtgcagcaggtgactcacagacagtggtgattggtcttgctgcagactcagggtgtgggaagagcaccttcatgaggaggctgacaagtgtgtttggaggagcagcagagccaccgaagggtggcaaccctgactcaaacacactcatcagtgacaccaccactgtcatatgcttggatgattaccactctttggatagaactggcagaaaggagaagggtgtcactgcccttgacccta

SEQ ID NO: 152482 - DNA, 259 bp, Glycine max
attccaacaacaccacaatgggaagaagaccggcgaggtgttaccggcagataaagaacaaaccgtacccgaaatcccgtttctgccgcggcgtgccggagccgaagatccgaatctacgacgtgggaatgaagaagaaaggcgtggacgagttcccgttctgcgtgcacctggtctcgtgggagaaggagaacgtctccagcgaggctttggaggcggcgcgcatcgcatgcaacaagtacatggccaagttcgccgg

SEQ ID NO: 152483 - DNA, 256 bp, Glycine max
ccgattccgacgccggctccaaaaacaagcgccgcaaccccgccgccgacgcgtcatcctcctccctcatcaccgctgacgacaccgtcttccgctacctctgccccgtccgcaagatcggcagcgtcattggccgcggcggcgacatcgtcaagcagctccgcgccgacaccaaggccaagattcgcatcggtgacgcgctacccggctgcgacgagcgcgttgtcaccatccacagttcctccgaggagaccaa

SEQ ID NO: 152484 - DNA, 262 bp, Glycine max
  unsure (1)..(262): unsure at all n locations
gnaatatcaaaactttgaaacaaaaacctctcatgctaagaggtctcctgctcatgctcaagatcacatcatggctgagagaaagcgaagagagaaactcagccagagcntcattgctcttgcagcccttgttcctggcctaaagaagatggacaaggcttctgtgttaggggacgctatcgaatatgtgaaagagcttaaagagcggttgacagttcttgaagagcagagcaagaaaacaagggcagaatcgatagtggtt

SEQ ID NO: 152485 - DNA, 263 bp, Glycine max
cgcgactaaaatccgttaaagcagatttggcttttgctaaagcaaggtgtgctcaacttgaggaagagaacaaagtactccgggaccgagagggcagcgataagggacagaaccgtgaagatgatgatctgataaggcatcaattggagacacttctagctgagaaggctcgtctggcaagcgagaatgagaaatattctcgggaaaaccgtttcttgagggaaattgtggagtacaatcagctgactatgcaggatgtggtg

SEQ ID NO: 152486 - DNA, 280 bp, Glycine max
caaactcttcttcttcgatttccattgcgaacgttactttttcttcttctttctcttcattttcttcgctcttcgatcttcgtccggggactgctccgaataccaccaccaccactcgccgatggccacgatcggaggcttacacgactcccaaggctctcaaaacagcgtcgaaaccgaagccctcgctcgattcgccgtagacgaacacaacaagaagcagaattcgcttctggagtttgctagggtggttagggcacaggaacaggttgttgctggt

SEQ ID NO: 152487 - DNA, 278 bp, Glycine max
gtgtcagaaaagttaccacagggataactggcttgtggcagccaagcgttcatagcgacgttgctttttgatccttcgatgtcggctcttcctatcattgtgaagcagaattcaccaagtgttggattgttcacccaccaatagggaacgtgagctggggttagaccgtcgtgagacaggttagttttaccctactgatgacagtgtcgcaatagtaattcaacctagtacgagaggaaccgttgattcgcacaattggtcatcgcgcttggttgaaa

SEQ ID NO: 152488 - DNA, 274 bp, Glycine max
gcaagaatggcacttcgttgcttggtgatgtccctttctgttctcttcactcttggtcttgcgagagaaagccatgccagagacgaagatttttggcatgctgtttggccaaacactcccattccaagttcattgcgagatcttctaaagcctggccctgcaagtgttgaaatcgatgatcaccctatgcaaattgaagaaacacagtacccgaaaaccttcatctataaagaagaccttcatccaggcaaaacaatgaaagtacaattcagca

SEQ ID NO: 152489 - DNA, 251 bp, Glycine max
ggaggctttccgtgtgttcgacaaggatcagaatggtttcatctctgcagctgagctccgccatgtcatgacaaatcttggggagaagctgaccgatgaggaggttgatgagatgatccgcgaggccgacgtcgatggtgatggacagatcaactatgaggagttcgtcaaagtcatgatggccaagtgaggacaattcacccataacctatatttgaagagcatataaggagaagacggacagtgcagat

SEQ ID NO: 152490 - DNA, 275 bp, Glycine max
ggacatgatcaatgaagtggatgctgatgggaatggtaccattgacttccctgagttcctaaacctcatggctaggaagatgaaggacactgattctgaggaggagctgaaagaggcattccgggttttcgacaaggatcagaatgggttcatctctgctgctgagctccgtcatgtgatgaccaacctcggggagaaactcaccgatgaagaggtcgatgagatgattcgtgaggctgatgttgatggagatggccaaataaactacgaggagt

SEQ ID NO: 152491 - DNA, 277 bp, Glycine max
tctcgagccgaatcggctcgaggttttccttgtttcccctattaacatctcgctctcacaacatcatggcattctctagtgtctttgattctgtggtcgttgctagcaatcaacatggccctgccaaccctcgcaaccgtctacaccgtgggagatacttcaggttgggcaattggtactgattatagcacttggactggcgacaagatcttttcacgttcaactatggagctgggcacacagtggatgaagttaaagagagcgattacaagtcgtg

SEQ ID NO: 152492 - DNA, 271 bp, Glycine max
caaacacaaacacatggcttcctccttcttctttctaacattgcttctcctctccattatctccgccgccaccccctggccgccgtcagaacgggcagcactactggccttcaaagctgccctgaccgaaccctacttgggcatcttcaacacatggtcgggccccgactgttgccggagctggtacggcgttgcctgcgaccccaccaccggccacgtcaccgacgtcaacctccgcggcgagtcccaagacccaatgttccagaagctt

SEQ ID NO: 152493 - DNA, 277 bp, Glycine max
gtggtgccttacaccactctccaaacctcgatctatgcaaacttcgaaagcgcttatttgaaagccgcttcgtctatgagcatgaaaagggtcgatccagtttccccctttgggctctgcttcgaatccaacggcgttggaagctcccaagtggggcccaacgtgccggtcattgatctggtcctgcagagcgagatggtgaagtggagcatacacggaagaaactccatggtgcaggtgaacgacgatgttatgtgcttagggtttgttgatggag

SEQ ID NO: 152494 - DNA, 276 bp, Glycine max
ctaagtctttgggaatagtgctgcaatggcttcaagtcaggaggaggtgacccttttgggagctactggaagcccatttgtgtgcagggttcatattgccctcaagttgaagggagttcaatacaaatatgtcgaagaaaatttgaggaacaagagtgaactgcttctcaaatccaacccagttcacaagaaggttccagtgtttattcacaatgagaagcccatagcagagtctcttgtgattgttgaatacattgatgagacatggaagaacaa

SEQ ID NO: 152495 - DNA, 282 bp, Glycine max
gaaaagctacgaacctaatcaacagttgcggagatctctaaacttctcaggagagaagccatccacaccagtattggacaccattaactacccaatacacatgaaaaatctatccattcaggaacttgaggagctagctgatgaactccgtgaagagattgtttatacattgtcaaagactggggggcatttaagttcaagtttaggtgtggcagagttaactgtggcacttcaccatgtattcaacactcctcaagacaagatcgtttgggacgttggtca

SEQ ID NO: 152496 - DNA, 249 bp, Glycine max
gtcttgctgcggtggtaactgtggttgcggaagctcctgcaagtgcggcaacggctgcggaggctgcaagatgtacccagacttgagctacactgagtcaaccaccaccgagaccttggtcatgggagtggcacctgttaaggctcaatttgagggtgctgaaatgggtgtgcccgctgagaacgatggctgcaaatgtggaccaaactgctcctgcaacccctgaacttgccagtgaggtgttgggag

SEQ ID NO: 152497 - DNA, 276 bp, Glycine max
ggagagggcaatgacctctaccctgggggccagtactttgacccactgggccttgctgatgacccagtcacttttgctgagctcaaagtcaaggagatcaagaatggaaggctggccatgttctctatgtttggattctttgttcaagctattgtcactggaaaaggcccattggagaacctcttggaccaccttgacaaccctgtggctaacaatgcttgggtctatgccactaagtttgccccaggatcttaaatgtatatgacttcttcttcc

SEQ ID NO: 152498 - DNA, 272 bp, Glycine max
gcattattcaatggccaccacagcagctctatccggaaccatggtgagcacctccttcatgaggaagcaacctatgacgaccaagagcctaaagacattccccaacgctctttttggtctgaaaggtggacgaggtggtcgtgtaacttgcatggcctcgtacaaggtgaagctcataaccccagaaggagaagtggagtttgaatgcccagatgatgttttcattgttgacaaggctgaggaagaaggcattgaacttccctactcgtgca

SEQ ID NO: 152499 - DNA, 260 bp, Glycine max
attgctttccttgaaagttaatgcatgcttcttatcttctgtctagctaaaactacaccctaatgtatcagtgtcatcatcagtgtgtagtttaagctagctttgctatggttacgttctttgagatgagagtcttgatgaacagtaccattctgatgtattgctttccttgaaagttaatgcatgcttcttatcttctgtctagctccaaaaaaaataaaaaagggcggcgtattcccgcaacctcgtcgacccgggaa

SEQ ID NO: 152500 - DNA, 272 bp, Glycine max
gtgtcagaaaagttaccacagggataactggcttgtggcagccaagcgttcatagcgacgttgctttttgatccttcgatgtcggctcttcctatcattgtgaagcagaattcaccaagtgttggattgttcacccaccaatagggaacgtgagctggggttagaccgtcgtgagacaggttagttttaccctactgatgacagtgtcgcaatagtaattcaacctagtacgagaggaaccgttgattcgcacaattggtcatcgcgcttgg

SEQ ID NO: 152501 - DNA, 271 bp, Glycine max
ggcgcgcaaattacccaatcctgacacggggaggtagtgacaataaataacaataccgggctcattgagtctggtaattggaatgagtacaatctaaatcccttaacgaggatccattggagggcaagtctggtgccagcagccgcggtaattccagctccaatagcgtatatttaagttgttgcagttaaaaagctcgtagttggaccttgggttgggtcgatcggtccgcctccggtgtgcaccggtcggctcgtcccttctgccggcg

SEQ ID NO: 152502 - DNA, 277 bp, Glycine max
ctcgagccgataactcgtcggatcgcacggcctttgtgccggcgacgcatcattcaaattactgccctatcaactttcgatggtaggatagtggcctaccatggtggtgacgggtgacggagaattagggttcgattccggagagggagcctgagaaacggctaccacatccaaggaaggcagcaggcgcgcaaattacccaatcctgacacggggaggtagtgacaataaataacaataccgggctcattgagtctggtaattggaatgagtacaa

SEQ ID NO: 152503 - DNA, 275 bp, Glycine max
gttgtgactcgttcttcttcgtcgttatcttcttcttttgttgtttgtgtgtttgttttttctctcacctgaaaatgtcttgctgcggtggtaactgtggttgcggaagcgcctgcaagtgcggcaacggctgcggaggctgcaagatgtacccagacttgagctacaccgagtcaaccaccaccgagaccttggtcatgggagtggcaccagttaaggctcaattcgagagtgctgaaatgggtgttcccgctgagaacgatggctgcaaatgt

SEQ ID NO: 152504 - DNA, 280 bp, Glycine max
  unsure (1)..(280): unsure at all n locations
aaagagtaatatggctatagctttgacagatttgggaacaaaggttaaattggagggtgacattgaccatggtgtggctttttataagaaagctttgtattataattggcattatgctgatgctatgtataatcttggggttgcttatggtgagatgcttaagtttgatatggctattgtgttctatcaacttgccttccacttcaatccgcattatacgnaagcttgtaagaatctaggtgttatatataaagatcgtgacaaccttgacaaagcagtg

SEQ ID NO: 152505 - DNA, 274 bp, Glycine max
ctcaagtctctcgaagcctctttctctctcttctagaagctatctgtgtttggtgttactaagtctccaacaagcaaagtacatggttgatttggaaatccaggtccccaccccattcgacccgtttgccgaggcgagagaatcggatgcccccggagcaaaggagtatgtgcatattcgaattcagcagaggaatgggaagaagagtctgaccacagtgcaagggctgaagaaggagttcagctacgagaagatcctcaaggacctcaagaag

SEQ ID NO: 152506 - DNA, 272 bp, Glycine max
ggtgactttgccattgacattggaaggaatgttatccatggaagtgatgcagttgaaagtgctaacaaggaaattgcattgtggttccctgagggccctgctaactggcaaagctcccaacactcttggatctatgagtaaatcatatgcctcaagttgatcttgaaattgccttaggttgatccagattatctacatgttttctgtttctgtccgttgttggacttttttgtttaagagtttggtaccttggcttgcatttcaggctctat

SEQ ID NO: 152507 - DNA, 271 bp, Glycine max
  unsure (1)..(271): unsure at all n locations
gttaaagaagcttgtggagaagaaggaagaaatcgactcgttggcgcacaagcaggtgcgtcacatcctgtggtctggactaggattcggtgtgatcactgttggactattcttcaggctaacattctgggaattctcatgggatgtaatggaacctatcacatattttaccacttccactggcctagtggtaggctatgcctacttcttgttcacttcaagagacnccacttaccaagacttcatgaagaggtctttttctccaggcaga

SEQ ID NO: 152508 - DNA, 248 bp, Glycine max
caagaatggcacttcgttgcttggtgatgtccctttctgttctcttcactcttggtcttgcgagagaaagccatgccagagacgaagatttttggcatgctgtttggccaaacactcccattccaagttcattgcgagatcttctaaagcctggccctgcaagtgttgaaatcgatgatcaccctatgcaaattgaagaaacacagtacccgaaaaccttcttctataaagaagaccttcatccaggc

SEQ ID NO: 152509 - DNA, 271 bp, Glycine max
gcttcttcgcaatctcagaacagaacacaacagagcccttcaactctctctgtcgttgatggcgtcacaagcgagcctccttcttcagaagcagctcaaagatctttgcaaaaaccccgtcgatggcttttctgccggtttggtcgacgaaaccaacatttttgaatggagtgtaactataattggacctcccgatactctttatgaggggggatttttcaatgccattatgagctttccacccaactacccaaatcgtccgccatcagtg

SEQ ID NO: 152510 - DNA, 267 bp, Glycine max
cagtgttattgttggctatgtgtgtgcttccggcgatggttgtggccattcgcccagcaaagaaccctttttgcgtgaagggtcgtgtctactgtgacccttgccgtgctggttttgagacctcagctaccacctacattgctggtgctgagattatgttgcaatgcaagagcagggttagcaacgaggttgtgtacacgaagaaggggtacaccgactcaaccggagcatacacaatgtacgtggatgaggatcacgcagatcaga

SEQ ID NO: 152511 - DNA, 269 bp, Glycine max
cgccggcgccgctggttgacccgacggagtttacgtcatggtcgttttacagagcagggatagcagagtttgtggccacttttctgtttctctacatcaccgtcttaaccgttatgggagtcgccggggctaagtctaagtgtagtaccgttgggattcaaggaatcgcttgggccttcggtggcatgatcttcgccctcgtttactgcaccgctggcatctcagggggacacataaacccggcggtgacatttgggctgtttttggcg

SEQ ID NO: 152512 - DNA, 273 bp, Glycine max
ctccgacaccatcgacaacgtcaaggctaagattcaggacaaggagggaatccccccagaccagcagaggctgatcttcgccgggaagcagctcgaggacggacgcacccttgctgactacaacatccagaaggagtcaactctccacttggtgttgcgtcttcgtggtggtatgcagattttcgtgaagactcttacgggtaagactattaccctcgaggtggagagctctgacaccattgacaatgtgaaggccaagattcaggacaagga

SEQ ID NO: 152513 - DNA, 272 bp, Glycine max
tagcaggagattcatgcctgagaaagggtctgctgagtatgctgctttggctaagaaccctgagaaggagtttttgaaaactattactggcaagaaggagaccctcattgaccttacaattatagaaatcctgtcaaggcacgcatctgatgagttctaccttggggagagagatggtggtgacttctggacttctgatgctggtccactagaggccttcaagaggtttggaaagaagcttcaagagattgaacataagcttatacagaaga

SEQ ID NO: 152514 - DNA, 269 bp, Glycine max
ctgatggcaggaagattgttgacgtgctgcttgagcaaaacattgttcctggtattaaagtcgacaagggtttggtgccccttgcaggttccaacgacgagtcatggtgccaaggtttggatggtctagcctctcgctcagctgcatactacgagcaaggtgcccgtttcgccaaatggcgtactgttgtgagcatccccaacggtccctctgctctggcagttaaggaagcagcctggggtctggctcgctatgctgcaattgctcag

SEQ ID NO: 152515 - DNA, 266 bp, Glycine max
taacaacagcacaaagcgggttactgtctgttcaagctaccatctctctctctctttcttagtgcctccttgccagaagttaaaatggcccaagaaactttcctattcacatctgaatcagtgaacgaggggcaccctgacaagctctgtgaccagatctccgatgctgtgctcgatgcatgcttcgagcaggaccctgacagcaaggttgcctgtgaaacctgcaccaagaccaacatggtgatggttttcggagagatcacaac

SEQ ID NO: 152516 - DNA, 264 bp, Glycine max
ctgaaacaaagtgggtcatgaaggacaaaagatggtctctccatggaatgacagctctagtcacaggaggcacccgaggcatagggcatgccattgttgaagagttagctgagtttggagcaactgttcatatatgtgcacgtaatcaagatgatattgataaatgtttagaagagtggaaaaacaagggacttaatgtgactggttcagtatgtgatttactatgttctgaccaacgtagaagattaatggaaattgttggct

SEQ ID NO: 152517 - DNA, 271 bp, Glycine max
tagcaggagattcatgcctgagaaagggtctgctgagtatgctgctttggctaagaaccctgagaaggagtttttgaaaactattactggcaagaaggagaccctcattgaccttacaattatagaaatcctgtcaaggcacgcatctgatgagttctaccttggggagagagatggtggtgacttctggacttctgatgctggtccactagaggccttcaagaggtttggaaagaagcttcaagagattgaacataagcttatacagaag

SEQ ID NO: 152518 - DNA, 274 bp, Glycine max
gggagataaactcagtcaatgacaaccctttgattgatgtctcaaggaacaaggcccttcatggtggtaacttccaaggaacacctattggagtgtccatggataacacccgtttggctcttgcatcaattggcaagctcatgtttgctcaattctctgagcttgtcaatgactattacaacaatgggttgccctcaaatctcactgccagcagaaaccccagcttggattatggattcaagggagctgaaattgcaatggcctcttattgctc

SEQ ID NO: 152519 - DNA, 273 bp, Glycine max
gtcgttataatctgactcggaattcaactccgagtcaacccggtcgagaacgcaccgaggcgacgattcaacaagggcgtagtagggaagcaaatatggatgctgaagcaactgatcgcaactccaccgttcactcggttctcttctaagacacttctcgagaaaatccttccctagctccgacaactggattggaaattccggcaactcgtccgagtaaccgattcgactcagcgtgtcgacgccgcggtcctcccacgccggtttcccgat

SEQ ID NO: 152520 - DNA, 264 bp, Glycine max
ggtcaggcggggctacccgctgagtttaagcatatcaataagcggaggaacagaaactaacaaggattcccttagtaacggcgagcgaaccgggaaaagcccaccatgaaaatcggtcgccctcggcgtccgaattgtagtctggagaagcgtcctcagtggcggaccgggcccaagtcgcctggaagggggcgccagagagggtgagagccccgtcgtgcccggaccctgtcgcaccacgaggcgctgtcggcgagtcgggtt

SEQ ID NO: 152521 - DNA, 269 bp, Glycine max
gcttcttcgcaatctcagaacagaacacaacagagcccttcaactctctctgtcgttgatggcgtcacaagcgagcctccttcttcagaagcagctcaaagatctttgcaaaaaccccgtcgatggcttttctgccggtttggtcgacgaaaccaacatttttgaatggagtgtaactataattggacctcccgatactctttatgaggggggatttttcaatgccattatgagctttccacccaactacccaaatagtccgccatcag

SEQ ID NO: 152522 - DNA, 166 bp, Glycine max
actcgagccgctcgagccgctcgaccgctcgagatctgggaacaacacacacaaaccattcccttttctcactccggcaatgaccacccaagacttccaccttcgccgtcgccgttccctccgtcacaacccccttccgcagccaccggaatcccttcgttgttcg

SEQ ID NO: 152523 - DNA, 267 bp, Glycine max; identical to SEQ ID NO: 119672

SEQ ID NO: 152524 - DNA, 266 bp, Glycine max
ctcgagccgcaatgctacctgtgggaagcgtttggactcaattgggctagagaacactgaagctaaccgccaggcataccgtaccctccttgtgacagttccaggacttggtcagtacatctctggtgccattctctttgaggaaactctctaccaatccacaactgatggcaggaagattgtcgacgtgctcctcgagcaaaacattgttcccggtattaaagtcgacaagggtttggtacccttgctggttccacgacgagtca

SEQ ID NO: 152525 - DNA, 270 bp, Glycine max
tggtgacttaaaagataagccttggtggcctaaactgcagactgtggaggatctcattcaatcctgctctattatcatatggacagcttcggctctccatgcagctgttaattttgggcaatacccttatggaggttatatcgtgaaccgtccaactctagccagaaggtttatcccagaagaaggaaccaaagaatatgatgagatggtgaaggatcctcaaaaggcatatctgagaacaatcacacccaagttcgagacccttattga

SEQ ID NO: 152526 - DNA, 248 bp, Glycine max
caaaagatgaacatgaagctcagatacaatttgctttggaacgatgtattcctgcaactctttctgtcattggatcacagaaactgacttttcctgataatgggtctgatttgattcattgtgcacgatgcagggttcattgggatgcagatggtggtgagcccttatatgagctcagttaggattcttagcaccaggcggtttcttagcaaggtctcttacaccatttcccggtgatgatgaaagga

SEQ ID NO: 152527 - DNA, 269 bp, Glycine max
gatgagtttcctttctgtgtccatctggttagttgggagaaggaaaatgtttcaagtgaggccctggaagctgctcgcattgcttgcaacaagtacatggccaaatttgctggaaaggatgctttccacttgagagtcagggtgcacccattccatgttcttaggatcaacaagatgctttcgtgtgctggtgctgataggctccaaactggaatgagaggtgcttttggaaagccacagggtacttgtgctagagtggctattggaca

SEQ ID NO: 152528 - DNA, 268 bp, Glycine max
gggtttttgtgatctgcagctacgatgggtaagggaacggggagtttcggtaagaggaggaacaagacccacaccctctgtgtgaggtgtggccgccgcagcttccacctccagaagagtcgttgctctgcgtgcgcttaccccgctgcgcgcaccaggaaatataactggagcgtgaaggccattaggagaaagaccaccggatctgggacgctgccgtgcttacgtaacgtgcctcgcagattcaggagcggcttcagcagagggt

SEQ ID NO: 152529 - DNA, 268 bp, Glycine max
aacaagtagttgagaactaagaaggagaagcaaatggcttcctcaatgatctcttccccagctgttaccactgtcaaccgtgccggtgccggcatggttgctccattcactggcctcaagtccatggctggcttccccaccagaaagaccaacaatgacattacctccattgctagcaacggtggaagagtgcaatgcatgcaggtgtggccaccagttggcaagaagaagtttgagactctttcctacctgccagaccttgatgatg

SEQ ID NO: 152530 - DNA, 269 bp, Glycine max
actcgagccgaatcggctcgagagagatgctatttactttggacttgactcgtttatcactctaatggtgtagcaagagcatgactaacttggtcctatctcttgttccgaaattcgtaaaactgcaaactctaatcctccgtcaagacaagcctcaactagaggataatgctgtcgagactattgcaaaatgctgtcatgaactgcagattctggatctcagcacaagtttcaagctaactgatcattcactctatgaacttgccctt

SEQ ID NO: 152531 - DNA, 268 bp, Glycine max
ctgagctgggggattttgatgcccgttggtgccataatagcaaggtatttgaaggtgttcaaatctgcagaccctgcttggttttaccttcatgttacatgccaaacctctgcctacatagttggtgttgctgggtggggaactggtctcaaactcggaagtgactcggttggtattaagtataacacccatagagcactcgggatcaccctcttctgccttggaacccttcaggtttttgctctgctcttgaggcccaacaaagacc

SEQ ID NO: 152532 - DNA, 267 bp, Glycine max
tctcgagccgaatcggctcgaggcactcatcattcttcgtttgtctaagatccgccttctctgcattgtaaaaatgtcgctaggagaaactgcttgttcatacgcagctctcatccttcatgaagatggaatcagtgtaactgccgacaagatcagcaccttgttggaaactgcaaaggttcaagtagatacctattggccaaccttatttgctaaacttgctgagaagaaaaatcttggcgatttgatagccaatgcagcaggcgg

SEQ ID NO: 152533 - DNA, 272 bp, Glycine max
ctcgagccgatatagcccaagccctatacaaccaaaccctaacacacacccatttgattcagtttccatggctagcctcaaggttgcatttttggctgcagtgctctgcatggttgtggtgagtgcacccatggcacatgcagctatcacgtgcgggcaggtgacgaatagcctgatcaattgcatcggttacctccagaacggaggaacgccgccgtcgggatgctgcaacggagtgaagagcctcaatgccgccgccaagaccaccgccg

SEQ ID NO: 152534 - DNA, 272 bp, Glycine max
attattttaggatcaggtggtcatactgctgagatgcttaatctactggcagtgttacagaaaggtaggtttaatccaagattctacattgctgctgctactgataatatgagtcttcaaaaagctcagttgttggagaattccctggctgctgagatgctgatcagaaatagattttactgcagaatgcaacaagggtcactgatactgcacagttcatgaagatatatcggagtagagaagttggtcaatcatatataacctccgtttgg

SEQ ID NO: 152535 - DNA, 269 bp, Glycine max
ctctctctcaacccacaagaatccctccctttctggctttctctctctaaaactatcatgtcctccaccgcggctcccgtccttcccatatccaacccccaaaccaccgccgcaggtacggcgccatcgaggctccggcgaacaacccggccttccgcgccttcatcaacaacctctccgcgtccctccgacacggcctcgaccagcgccgcccgtggtcggagctcggggaccgctccgcgttctcgaagcccgagtccttctccgaa

SEQ ID NO: 152536 - DNA, 267 bp, Glycine max
gtatccagataaggaagctgggcagcatccaatggcatacgtggtgaggaaggctggaagtagcttatcagaaactcaagttatggattttgttgcaggacaggtggctccgtacaagcggattcgaaaagtggcatttatttcctccatacccaaaaatccatctggcaaaattcttcggaaggatctcatcaaactcgcaacgtctaaactctgaatagatgagctttttcgtaatatattttttctatcggagttggacaagtg

SEQ ID NO: 152537 - DNA, 263 bp, Glycine max
attccagagccaaggtaggttaaacactcttcttcatcgtcgtcgcaatgggacgtgtgatccgtgcgcacgtaagggagcaggctcggtcttcaagtcccacacgcaccaccgcaagggccctgcccgcttccggagcctggatttcggagagcgcaacggctacctgaagggtgtcgtcactgacgtcatccacgatcctggccgtggcgcgcctctcgctaaggtcgccttccgccacccgttccgctacaagaagcaga

SEQ ID NO: 152538 - DNA, 261 bp, Glycine max
aggcaagccccactcaaccaccacacctctcctcgttcacgctacccctttctgctcttcttctacctttcaagttttaaaagtataaagatggcagagacattcctatttacctcagagtcggtgaacgagggacaccctgacaagctctgcgaccaaatctccgatgctgtcctcgacgcttgcctcgagcaggacccagacagcaaagttgcctgcgaaacatgcaccaaaaccaacttggtcatggtcttcggagaa

SEQ ID NO: 152539 - DNA, 261 bp, Glycine max
gcagatcttcgtcaagactctcactggcaaaaccataaccctagaggtcgaaagctctgacaccattgacaacgtcaaggccaagatccaggacaaggagggaatccccccagaccagcaacgtctcatcttcgccggaaagcaacttgaggacgggcgcaccctcgccgactacaacatccagaaggaatcaacccttcacctcgtcctccgtctccgtggtggcatgcagatcttcgttaagaccctcaccggcaagac

SEQ ID NO: 152540 - DNA, 259 bp, Glycine max
atcgagcgaatcggctcgagcgaaaaaggttatggtgttggtactgttatctctctttagtggtttaaacgaagccttacccgttactgtactcaatttattgagatatgcatcatgctatgtgccgaccatggtccttgtgtctctggtgctcacaatactattgtgacagcaagggcagggaaagacctagtttccagtctcgtatcaggtttgctaacaattggtcctcgatttgggggtgccatcgatgatgctg

SEQ ID NO: 152541 - DNA, 262 bp, Glycine max
cgtgatttagcatttaccacaccaaaatcaatccgcggagtcagaaagccatggatccctacaagaatcggccatcaagcgccttcaattctcccttctggactacaaattccggtgctcccatctggaacaataactcatcgctgactgttggatctagaggtccaattctgctggaggattaccatctggtggagaagcttgcaaactttgacagggaacggatccccgaacgtgttgtccacgctcgtggagctagcgc

SEQ ID NO: 152542 - DNA, 260 bp, Glycine max
gccgccgcagcttccacctccagaagagtcgttgctctgcgtgcgcttaccccgctgcgcgcaccaggaaatataactggagcgtgaaggccattaggagaaagaccaccggaactggaaggatgaggtacttgcgtaacgtgcctcgcagattcaagagcggcttcagagagggtaccgaagctgcacccaggaagagaggagctgctgcctctgcctaagctttgaatgaatgacagcaatttttgctgggtcagtga

SEQ ID NO: 152543 - DNA, 268 bp, Glycine max
ctaaaatccaagacaaggaaggcattccaccggatcagcagcgtttgatcttcgccggtaaacaactcgaagacggcagaactctcgccgattacaatatccagaaagaatcgacgctccacctcgtcctccgccttcgcggtggcatgcaaatcttcgtcaaaaccctaaccggtaaaacgattacgctagaggtcgagtcctctgacaccatcgataacgtgaaagctaagatccaggacaaggaaggcattccaccagaccagca

SEQ ID NO: 152544 - DNA, 267 bp, Glycine max
ataagatataaggcaatagtaatattagtattgttgataataattaggtagaaaaaatattatggggaggggaagagtggaactgaaaaggatagagaacaagataaacaggcaggtaacgtttgcaaagaggagaaatgggcttctcaagaaagcctatgagctttctgttctctgtgatgctgaggttgccctcatcatcttctccacccgtggcaagctttatgaattctgcagcaccaacagcatgctcaaaacacttgaaag

SEQ ID NO: 152545 - DNA, 246 bp, Glycine max
  unsure (1)..(246): unsure at all n locations
ctctttgggaatcaaatccgaaacatgatgcattgtgcgagcattgtgctcggctccgtcatacgcgttcccttttctctctggctccgcttccacnaancnaactnnnaaactcgctcactaagngcagttggaagccacctcngagcatggcaaaaggnccagtcagagcnaccgtntctatagagaaaganaccccggangnnaatncatcccgaaacgtttctcagangatggangaggccc

SEQ ID NO: 152546 - DNA, 259 bp, Glycine max
cgaagataaacagcctacctattgcaaaagcttatgccacaaggacaatcctgttcttgaaagacgatggatctttaaagccacttgctatcgaattaagcaagcctgcaacagtgagtaaagtggtgttgcctgcaacagaaggtgttgagagtacaatttggttgttggccaaggctcatgtcattgtgaatgactctggttatcatcagctcataagccattggttaaatactcatgcagtgatggagccatttgc

SEQ ID NO: 152547 - DNA, 260 bp, Glycine max
ctctcactggcacaaagggtgaggtcagaaagcagtgcagtgttgccaacaagcaccatgatcaggacccttgaattttcctccccttgtctatgatcgaggaagaaaatctgtaatatattatgcaaaagataattaaggtcttttcctttaaatgggctggttcaatgaaccgagaccactgcaggttcatggggatgggaggattaagaggctatgttttttaatcttccgatgttactgttgtttttttttaattt

SEQ ID NO: 152548 - DNA, 159 bp, Glycine max
gtaaccccagagaaagtagttgagatagtagaaaagctgagaaagggtgagaagccaccgcacggcacccaaaatccccgccgaattaagagtggacctgaaggagggaacactactttgttaagtgagcccaagcctcctccctgccgtgacctggat

SEQ ID NO: 152549 - DNA, 260 bp, Glycine max
gattcatacatcaaataaataccgcttcattgaccaggggagcaatttgcagggcaaagagtataacctgactatgcattggcatgttatgccaaagagtggcaaaatgtttgctgataaaatagtcatgccaggttaccgattgcctgaggaatatagatgatgctcgtcatgttaagtttttttgctgtaactttaacctctcctataacggatatagaaggttagttcaaagaactagaaagaggaaggaaatttgt

SEQ ID NO: 152550 - DNA, 257 bp, Glycine max
cgcagagtactgcactgaacgaaccgtagccatggtggagaacaatctcttcgaggatatatttagggtcgaaaaattaaaccccgatgacaaaaaattattcgataaagtcactcgcattgaagcaagaagtgaaaagtttgacatgtttatgcacctggacattaattccgagatatatccgttaaaggttggtcagaagtttgctcttgtgcttgtttcaacacttaatcctgatggaactccagacactggat

SEQ ID NO: 152551 - DNA, 259 bp, Glycine max
ctaccttaagatccaaattttatccattaatagatggagcgtcgatcgcagctagatctagagggaaattatgagcattacgttcatgcattacttccataccaaggttagctcggttaataatatcagcccaggtattaattacacgaccttgactatcaactacggattggttgaaattgaaaccatttaagttgaaagccatagtgctgatacctaaagcggtaaaccaaatacctactacaggccaagcagctaa

SEQ ID NO: 152552 - DNA, 259 bp, Glycine max
tcgtgttgtagctagctcctcgaaaatgctggcacgcctcgccgcgagtcgcttcaacgagatccgtcagattttccgtcagccttctagggctttctcgaccgctctgaactaccaccttgacacaccggacaacaaccctaaacttccatgggaattcaccgaggccaatcaagcaaaggttaaggagattttgtctcactatccatccagctataagcaatctgctacaattcctcttttggatcttgcccagcag

SEQ ID NO: 152553 - DNA, 255 bp, Glycine max
ggctggagaagaagatgcaggatatttatggagcttctggttactttgtggagaaggattctgtgaaagaggagaaacatttgcaatctttgaaattgactgaggtgactgtaagtgaccagcgtgaaggttttcgagcatcagaagagcatttcaaaggattgagtttccccactatttcttcagctggctcaaatgcagctataattcactattttccaaaggcagaaacatgtgctgaacttgatccagaca

SEQ ID NO: 152554 - DNA, 261 bp, Glycine max; identical to SEQ ID NO: 152538

SEQ ID NO: 152555 - DNA, 268 bp, Glycine max
cgagattgaggcgggggttgatttggaagaaacccagctaaggtaattcctcgcaacccctaactaaaccttcaaaggatcatcatgggcagtcacaatgctttggctgccactttcggaatattaggtaacatcatttctgtgatggtgtacttggctccggtgcaaacgttttaccggatatacaaaaagatatgcagggaggtttcaccctcgctgccatacttgttgtcattaatgagttctatgctttggttatactacgcct

SEQ ID NO: 152556 - DNA, 268 bp, Glycine max
gtcccagtcccgaacccgtcggctgtcggtggactgctcgagctgcttccgcggcgagagcgggtcgtcgcgtgccggtcgggggacggattgggaacgggcccttcggggcctcttccccgggcgtcgaacagtcaactcagaactggtacggacaaggggaatccgactgtttaattaaaacaaagcattgcgatggtccctgcggatgttgacgcaatgtgatttctgcccagtgctctgaatgtcaaagtgaagaaattcaacc

SEQ ID NO: 152557 - DNA, 267 bp, Glycine max
cgtggatccccacaacgcccacaacgcccgcatgaagctccactacgccgatctctccgacgcctcctccctccgccgctggctcgacaccatcctccccgacgaggtctacaacctcgccgcccagtcccacgtcgccgtctcattcgagatccccgactacaccgccgacgtcgtcgccaccggcgccctccgcctcctcgaggccgtccgctcccacatctccgcctccggccgctcccacatccgctactaccaagccggctc

SEQ ID NO: 152558 - DNA, 261 bp, Glycine max
aagctttcaagatacaaactgctttggaaaatgggatccaaggttgttgcatccgttgcccttctcctctccatcaacattcttttcttgtccatggttagctccagcagccactacgatccacagcgccaaccttctcacgtcactgctcttattacacgacctagttgtccggatctgagtatttgcctcaatatgttaggcgggtctctaggagccgtggatgattgttgtgccctcatcggtggtcttggtgacatt

SEQ ID NO: 152559 - DNA, 256 bp, Glycine max
ctcgagccgcaagtaggctatactaaggtgaaaaaggagagatggcagctgcaacatctagtgctgtgttaaacgggtttggatctcacttcttgtgtggaggaaagaggagccatgcccttcttgctgctagcattggagggaaagttggtgcttctgttagtcctaaaagagttattgtggcagttgctgctgcaccaaagaagtcatggatccccgctgtaaaaggtggtgggagtttcatagacccagaatg

SEQ ID NO: 152560 - DNA, 257 bp, Glycine max
atgggaagccagcaagccgccgtgtcgttcctgacgaacctggcccgcgccgctttcgggctgggcgcctccgcgaccctattgagctcctccctctacaccgtcgatggcgggcagcgcgccgtcctcttcgaccgtttccggggcatcctcgacgagaccgtcggcgaggggacccacttcctcatcccgtgggtccagaaaccctacatcttcgacatccgcacccgcccccacaccttctcctccgtctccgg

SEQ ID NO: 152561 - DNA, 258 bp, Glycine max
  unsure (1)..(258): unsure at all n locations
aaatatcaaaactttgaaacaaaaacctctcatgctaagaggtctcctgctcatgctcaagatcacatcatggctgagagaaagcgaagagagaaactcagccagagcttcattgctcttgcagcccttgttcctggcctaaagaagatggacaaggcttctgtgttaggggacgctatcgaatatgtgaaagagcttaaagagcggttganagtnctgnagngcggagcangaaagccagggncnantccgttnnng

SEQ ID NO: 152562 - DNA, 259 bp, Glycine max
tgggaaggctactgccaatgttgttccactgcattggcaacccaacaatggtcttcttatgactaatgatatctcgggcgtcaaccttgaagaagcagtaccttgcattgccctctcaaaaaatgactcatacgttatgtctgcctgtggtggaaaggtttctctatttaacatgatgacattcaaggtaatgacaacattcatgccgccgcctcctgcttctaccttcctagctttccatccccaggataacaacatt

SEQ ID NO: 152563 - DNA, 270 bp, Glycine max
cctcgagccgattcggctcgaggccgcccaaaaccatttatagggtcttcttttctttgccaacaaaatgagagagtgcattacaatccacattggtcaggccggtatccaggtcggaaacgcctgctgggaactctattgccttgaacacggcattcagcccgatgggcagatgccgagtgacaagaccgttggaggaggagacgacgccttcaacacattcttcagcgagaccggcgccggaaagcacgtgcctcgcgccgtcttcgt

SEQ ID NO: 152564 - DNA, 265 bp, Glycine max
caccaaagctgatgatgtcccacttgattggcgaatgaagcaacatgagaaggtacttgaggatggtgttcttgatccagagacaactgtggtatccatattcccatctcccatgcactatgctggacccacggaggtgcagtggcatgcaaaggctaggatcaatgcaggggctaacttctatatcgttggtcgtgaccccgcaggcatgagccatccagttgagaaaagagatctgtatgatgctgaccatggaaagaaagta

SEQ ID NO: 152565 - DNA, 264 bp, Glycine max
gtatccagataaggaagctgggcagcatccaatggcatacgtggtgaggaaggctggaagtagcttatcagaaactcaagttatggattttgttgcaggacaggtggctccgtacaagcggattcgaaaagtggcatttatttcctccatacccaaaaatccatctggcaaaattcttcggaaggatctcatcaaactcgcaacgtctaaactctgaatagatgagctttttcgtaatatattttttctatcggagttggacaa

SEQ ID NO: 152566 - DNA, 260 bp, Glycine max
ctcgagccgattcggctcgaggcccaagccctatacaaccaaaccctaacacacacccattagattcagtttccatggctagcctcaagcttgcatttttggctgcagtgctctgcatggttgtggtgagtgcacccatggcacatgcagctatcacgtgcgggcaggtgacgaatagcctgatcaattgcatcggttacctccagaacggaggaacgccgccgtcgggatgctgcaacggagtgaagagcctcaatgcc

SEQ ID NO: 152567 - DNA, 262 bp, Glycine max
cacgagaatgatgttttacttgtgggagatgacccttgggaggagtttgttaactgtgtccgctgcattaaaatactttctcctcaagaagttcaacaaatgagcttggatggagattttggcaatggtggccttccatatccagcaggcagcagctctgatggtgggaatgcttaaatggcatccaggaatctgctaattattcttccatgttagtaacttacatcgtttttaggacatattcatcagtgttgtccaaaag

SEQ ID NO: 152568 - DNA, 259 bp, Glycine max
tccggcgctgccattctttctttctatcttcaatcaatttcaagatcgtaacactggtattatatggcctccttcagagcattctggaacagtccagttggtcccaaaacaactcacttttggggacctattgccaactggggatttgtggcagctggattggctgacttgaacaaacctccagaaatgatctctggcaacatgacaggagcaatgtgtgtctattcagcattgttcatgagatttgcatggatggtac

SEQ ID NO: 152569 - DNA, 256 bp, Glycine max
caagtagttgagaactaagaaggagaagcaaatggcttcctcaatgatctcttccccagctgttaccactgtcaaccgtgccggtgccggcatggttgctccattcactggcctcaagtccatggctggcttccccaccaggaagaccaacaatgacattacctccattgctagcaacggtggaagagtgcaatgcatgcaggtgtggccaccagttggcaagaagacgtttgagactctttcctacctgccagac

SEQ ID NO: 152570 - DNA, 253 bp, Glycine max
cagaagcacattgacttttcacttacaagtccccttggtggtggtcgccctggaagagtgaagagaagaaaccaaagggctgctgctaagaaggccgcaggtggagatggagatgaggaagacgaggattaaacttttaatcatgtctttttctagtgctattagaccttatgccaccttttactttgcgtacctagcttattgtttttttattgttatacattttcatccttccgttccttgtttgagataa

SEQ ID NO: 152571 - DNA, 243 bp, Glycine max
cgtgaatcatgtcggacgaagagcatcacttcgattctcaggcggatgcgggagcgtccaagacgtatcctcagcaggctggtaccattcgcaagaatggctacatcgtcatcaaatccaggccttgcaaggttgtagaggtctctacgtctgagacaggcaagcatggacatgcaaagtgtcactttgttgcaattgatattttaaatgggaaaaacttgaagatatggttccacatcccaa

SEQ ID NO: 152572 - DNA, 246 bp, Glycine max
gttttcattgttgacaaggcagaggacgaaggcattgaacttccctactcgtgcagggccggttcttgcgtttcctgtgttggcaaaattgtggaaggtaacgtggaccagtcagatggtagcttccttgatgatgagcaaatagatagtggctgggttctcacctgtgttgctcaacctaggtcagacgttgtcattgagacacacaaggagggagagatcgaatgtatcatatatatatatatg

SEQ ID NO: 152573 - DNA, 264 bp, Glycine max
cgaaccgactgatgttgaagaatcagcggatgagttgtggttaggggtgaaatgccactcgaacccagagctagctggttctccccgaaatgcgttgaggcgcacagttgactagacatctaggggtaaagcactgtttcggtgcgggccgcgagagcggtaccaaatcgaggcaaactctgaatactagatatgacctcaaaataacaagggtcaaggtcggccagtgagacgatgggggataagcttcatcgtcgagaggga

SEQ ID NO: 152574 - DNA, 260 bp, Glycine max
gggctgtccaaggttgcatccttactggagtttgggtcattgcccatgagtgtggccaccatgcattcagtgactaccagttgcttgatgatattgttggccttgtcctccactccggtctcctagtcccatacttttcatggaaatacagccatcgccgtcaccactccaacactggttctcttgagcgggatgaagtatttgtgccaaagcagaagtcctgtatcaagtggtactctaaataccttaacaatcctcca

SEQ ID NO: 152575 - DNA, 257 bp, Glycine max
tcttgcattgtttgtactccccccggaacccaaagactttgatttctcataaggtgccagcggagtcctaaaagcaacatccgctgatccctggtcggcatcgtttatggttgagactaggacggtatctgatcgtcttcgagcccccaactttcgttcttgattaatgaaaacatccttggcaaatgctttcgcagttgttcgtctttcataaatccaagaatttcacctctgactatgaaatacgaatgcgcccg

SEQ ID NO: 152576 - DNA, 258 bp, Glycine max
ctgaagcagaagctgagtttgagaggcttcttggtgtatcagaagcaaaatttgcaatgtcagagttatccaaggcagatagaggagacgatagtgatagtgtgaagctgtcggaattgcttcatggtcgtcattctaaagctatctggtataaatgctgtgttttatttctcttcaactgtttttaaaagtgctggagtgccatcagacattgcaaatgtctgcataggaattgccaatttggcaggatctatcgtt

SEQ ID NO: 152577 - DNA, 252 bp, Glycine max
ggagtttcaagggttaccggaaggttgcattgctagtatactctctcgcactacgccggcggacgtgtgtaggttttccgtcgtatcaaagattttccgttcggccgctgaatcggacgctgtgtggaaacgttttctcccttccgattaccattccatcatttcccagtctccttcgcctctcaactatccttccaagaaggagctctatctcgctctctcggatcgccctatcatcatcgatcagggtaa

SEQ ID NO: 152578 - DNA, 255 bp, Glycine max
ctcgagccgaatcggctcgagcggctcgagttttgattctttcgagcaaacccgcaacacccacctcaccaaaaccctacgacacccatccatgacgcttggcttaggaggatccagtgtcgtggttcctaggaacttcagattgctggaggagcttgaacgtggagaaaaaggaattggagatggcacagttagctatggaatggatgatggtgatgacatttacatgcgctcttggactggcaccattattgg

SEQ ID NO: 152579 - DNA, 255 bp, Glycine max
gggaaagaagagacccaatgagtctgcatcaaaaactccagtttcttccaagaaagccaaaaatgctactcctgaaaagactgatggtaagaaaggtggacatacagcaactcctcaccctgcaaagaaaggcggaaagactcccaacagcgaagcaaagccaagactcccaacagtgaagccaaagccaagactcctaagtctggtggactctcttgcaaaacctgcagcaagtctttcaccaatgaaagtggt

SEQ ID NO: 152580 - DNA, 245 bp, Glycine max
cgattatgggagcaattgaaagatcaaggctttcaattgtagtgttctctgaaaactatgggtattccacgtggtgtcttgatgaactttccaagatcattgagtgcgtgaaaaccaggaatcaaatggtttggccaatattttacaatgtggaaaagtccgatgtatgcaatgaaacaaaaagttatggtgatgccatgactgcccaggagaaaagatttggaaaggatctgggaaggtgcata

SEQ ID NO: 152581 - DNA, 252 bp, Glycine max
atgcagcaatcctacaatgagcctcgtcttctgattctaactgatccaagaacagatcatcagcctatcaaggaaggtgctcttggaaatattccaactattgctttttgtgacactgattctccaatgcggtatgttgatgtcgggatccctgccaataataaggggaagcatagcattggttgtctcttttggctattagcaaggatggtactgcagatgcggggcactattcgtccagggcacaagtgg

SEQ ID NO: 152582 - DNA, 114 bp, Glycine max
aaaggattctacccgccgctcgatgggaattgcgcttcaaggcgtctcgtagggctaatccgcctcacgagggtcaccaacggcacgtgcctttgaggggtgccgagtgccccc

SEQ ID NO: 152583 - DNA, 208 bp, Glycine max
  unsure (1)..(208): unsure at all n locations
aaagaaaatcctcacccattttcttcgtagccaaacactctgaaattctcagttatgtcgtggcaagcgtatgtggatgatcacctactgtgtgaaatcgaaggtagaccaccttacactcacgaccgacncagtcgatcgagccaagaacgaggtaagcgtntnntggggctcagagcaccaacttccctcagttcaaactgaggaa

SEQ ID NO: 152584 - DNA, 166 bp, Glycine max
ttcacccttggtgtgaaacagatgatttgctgctgtaacaaaatggatgctactacacccaagtattccaaggccaggtatgatgaaattgtgaaggaagtctcttcctacttgaagaaagtaggatacaaccctgacaagattccttttgttcctatcctggttt

SEQ ID NO: 152585 - DNA, 186 bp, Glycine max
aaggattctacccgccgctcgatgggaattgcgcttcaaggcgtctcgtagggctaatccgcctcacgagggtcaccaacggcacgtgcctttggggggccgaggccccctacgtgctgggtcggcaaacgagacggtcgggcgcacgcgttcgcttctagcccggattctgacttaagcgtcatc

SEQ ID NO: 152586 - DNA, 208 bp, Glycine max
gctgagatcattaaatctgaccctgttgtgtcattcagggagactgtcctggagagatcatgccgcactgtgatgagcaaatcacccaacaagcacaatcgtgctgtacatgaggaagcacagaccacttgggacggacaggtacatagccggagggcccattggcacgatggcacagattggaccaagggatgacccaagattcgct

SEQ ID NO: 152587 - DNA, 178 bp, Glycine max
  unsure (1)..(178): unsure at all n locations
gaaataagccccgctccctaagaaggggccctctctgataaggaaggaaacgaaagaatctccattttatgacaaatctggtccgatggctgttctccactaaccacaaggatatatgggactcctatatttcatcttacgggtgccatntgctggagtgatgggcacatgttctccg

SEQ ID NO: 152588 - DNA, 208 bp, Glycine max
caaaggattctacccgccgctcgatgggaattgcgcttcaaggcgtctcgtagggctaatccgcctcacgagggtcaccaacggcacgtgcctttgcggggagccgagagccccctaacctgctcggtacgagcataatcggtacggtcggtgacgctacgacgtacgacttactagcccggattctgacttagaggcgttcagtcat

SEQ ID NO: 152589 - DNA, 115 bp, Glycine max
tcttaagcttgctactgagtttccacactgcataccttaggtcttccgaattcgacgttcatttgcaagatggctaaggaaaaggctcagatcaacattgctggtggttcggtca

SEQ ID NO: 152590 - DNA, 175 bp, Glycine max
tttgtattccaacttcatttttttaatttttacattatgtaggaatggcgcaaatgtgaagggatattatgtatggtctttgttcgacaattttgaatggtcttcaggttatacatcacgttttgtggatgatcttcgtgtgattacaaaaatggtttgaagagatacaaagttc

SEQ ID NO: 152591 - DNA, 183 bp, Glycine max
ggcacatctgttaaaagataacgcaggtgtcctaagatgagctcaacgagaacagaaatctcgtgtggaacaaaagggtaaaagctcgtttgattctgatttccagtaacgaatgacgaaccgatgaaagcgtaggcctatacgatacctgttagtccttcggaatttgaagctagagtgtca

SEQ ID NO: 152592 - DNA, 184 bp, Glycine max
gccgttctgcggaatatatgactcatgctcctttaggttccttaaattccgtgggtggcgtactacagagattaatgcagtcaattatgtttctcctagaagttggttagctacttctcattttgttctaggattcttcctattgtgtaggccatttatggcaggggaagagtggcgtgccgca

SEQ ID NO: 152593 - DNA, 177 bp, Glycine max
ttaccatgggtcttggtggtgaagggtatttaaattttatggggaatgaatttggccatcctgagtggattgattttccaaggggtgatcaacatcttcctactggcgtaatagttccagggaataacaacagttttggataaatgcaggcgtagatttgacttggggatcggatac

SEQ ID NO: 152594 - DNA, 212 bp, Glycine max
  unsure (1)..(212): unsure at all n locations
caaagttcttggtggagtagacaccaacttcactgtgacagcaaaagcagcagaggacactgaattcggagagctctatctcttcaagtaggaccactacttactcataccctaccgaacttactactacgatanatactatcgaacaatacgtntnnggagtacgatggaccgagagtctactgatgccatcaacaatggatatggttcat

SEQ ID NO: 152595 - DNA, 194 bp, Glycine max
ttggtattggtgccggtttggaatctatgacaactaatccaatgggatgggatggatcagtgaatcctaaggtaaaaatgtttgaacaagcacaaaactgccttcttcctatcgggaattcacctaccgcaaaatgtatgcacagacgctattggggtttcaaggaaggaacaagaccagccgcattgagtctc

SEQ ID NO: 152596 - DNA, 106 bp, Glycine max
gcaccatgaggctctcacagaggctcttccatgtgacaatgttggctttaatgtgaagaatgttgcagtcaaggatctcaagcgtggttttgtgtgcatcccaact

SEQ ID NO: 152597 - DNA, 98 bp, Glycine max
cgagaacagacatctcgtgtggaacaaaagggtaaaagctcgtttgattctgatttccagtacgaatacgaaccgtgaaagcgtggcctatacgatcc

SEQ ID NO: 152598 - DNA, 195 bp, Glycine max
gttgctcttcgtgagattaggacataccagaagagcactgagctcctaatcaggaagcttcctttccagaggttggttcgtgaaattgcccaggatttcaacgactgatactgcgttgtccacgagccatggctcgtgctactgcagttagcaagtaggctgctgaggcataccttgttgggctctttgagaact

SEQ ID NO: 152599 - DNA, 176 bp, Glycine max
catcattcaaatttctgccctatcaactttcgatggtaggatagtggcctaccatggtggtgacgggtgacggagaattagggttcgattccggagagggagcctgagaaacggctaccacatccaaggaaggcagcaggcgcgcaaattacccaatcctgaacggagatgaaata

SEQ ID NO: 152600 - DNA, 159 bp, Glycine max
ttgaggagcagcagaagcaggtcattgtggagaagcttggtgagccagcccaaggctatgaagctttcactgccagcttcctgctgatgagtgccgttatgctgtatatgattttgagtatctgaactgaaggaatgtccctaaaagcagaattttttt

SEQ ID NO: 152601 - DNA, 183 bp, Glycine max
tctcgagccgattcggctcgaggtgaaagtttcttcaactttttcactcctcccgaggtccatgaggatgatgatgatattgctgaggatgctgttgaagaactccagaatttgatggaacgtgaattatgacatgtggtatctacaatccgggacaaaattattcctcatgctttcatggtc

SEQ ID NO: 152602 - DNA, 178 bp, Glycine max
tgccagtagtcatatgcttgtctcaaagattaagccatgcatgtgtaagtatgaactaattcagactgtgaaactgcgaatggctcattaaatcagttatagtttgtttgatggtatcttctactcggataaccgtagtaattctagagctaatactgcaacaaacccgattctggag

SEQ ID NO: 152603 - DNA, 198 bp, Glycine max
ctcgagccgcttccggagcctggacttcggggagcgcaacggctacctcaagggcgtggtcgccgacgtcatccatgaccctggccgcggcgcgctcgctcgctcaagggtcgccttaccgaccaaccctattccagatgacgaaggaacgcaggagacgagctcttcattgccgccgagggctctacacggtcagtt

SEQ ID NO: 152604 - DNA, 205 bp, Glycine max
cactcaaacattgtttgttgtaggaagaggaatcttgagaaatggcaggggacagcaagagcaagattctgttcatcggagggactggttacatcggaaaattcatcgtggaagccagcgccaaagcggccacccaactttccttttggtgagggagtccactctctccaaccccgcaaaatcacccctcatcgacaatttcaaa

SEQ ID NO: 152605 - DNA, 245 bp, Glycine max
gtcaggcggggctacccgctgagtttaagcatatcaataagcggaggaaaagaagatgatgggaaagatgaagggaataaggaaaagaaggacaaagaaaaaggagacggtgatggtgaagagaaaaggaaaagaaagataaagagaaggagaagaaaaaggaaaagaaggataaagatgaagaaacagacacattaaaggaaaagggaaaaaatgatgaaggtgaggatgatgaaggaaataag

SEQ ID NO: 152606 - DNA, 244 bp, Glycine max
tcttaagcttgctactgagtttccacactgcataccttaggtcttccgaattcgaagttaatttgcaagatggctaaggaaaaggctcagatcaacattgtggtggttggtcatgtggaccctgagaggcaaccaccattaacgagctgaagaagcctgttgtggagaaagaagctccagggcatgccatatgagggcatgcacgtacggcctcggaggggaaccagaaaattatgttaacaaa

SEQ ID NO: 152607 - DNA, 247 bp, Glycine max
ctaaaggatggcagggtcctggaagctgatattgttgtcgttggtgttggaggaaggcctcaaacagccttagtcaaagggcaggttgaagaggagaagggtggaatcaagaccgatgctttcttcaaactaatctttccgatgtatatgctgttggtgatgttgctactttccctttgaaattatacggtgaattgagaagagttgaacatgttgatcattctcgcaaatcagctgaacaggctgt

SEQ ID NO: 152608 - DNA, 248 bp, Glycine max
gtcctattgagtatgggcatgttttgctgattccgcgcatatttgagtgtttgcctcaaaggattgaccgtgagagcttcctccttgcacttcagatggcagtggaagccgataatccttattttcgatgggttacaacagcttgggtgcttttgcaactatcaaccatcttcacttccaggcttattatttggctctgcccttcccaattgagaaggcccccactaagagaattgcaagtgtaaatg

SEQ ID NO: 152609 - DNA, 248 bp, Glycine max
ccgccacttctgaatctattgaatcaacaatcatgtcggacgaagagcaccatttcgagtccaaggccgacgccggagcctccaaaacctaccctcagcaagccggtaccatccgcaagaacggctaatcgtcatcaaaggccgcccctgcaaggttgtggaagtttcgacttccaaaactggaaagcacggtcacgctaagtgtcactttgttggaattgatattttcactgccaagaaacttgagg

SEQ ID NO: 152610 - DNA, 245 bp, Glycine max
tgttgatcgagataactagaaacagtgtgatgaaaatgaaggtccttgttttcttcgttgctacaattttggtagcatggcaatgccatgcgtacgatatgttccctctccgaatgaacactggcatggtgcccgtactccggaggtgaaatgcgcaagttggaggcttgctgtggaagcacacaacatctttggctttgagaccattcctgaagagtgcgttgaagcaacaaaggaatacatcc

SEQ ID NO: 152611 - DNA, 244 bp, Glycine max
ccggaggaccgagtgcctcccacgcccggtcgtactcataaccgcatcaggtctccaaggtgaacagcctctggtcgatggaacaatgtaggcaagggaagtcggcaaaatggatccgtaacctcggaaaaggattggctctgagggctgggcacgggggtcccagtcccgaacccgtcggctgtcggtggactgctcgagctgcttccgcggcgagagcgggtcgtcgcgtgccggtcggggg

SEQ ID NO: 152612 - DNA, 247 bp, Glycine max
cgtcgctactaagagttgctgcttcttcagccactccgcacctcgcagcctctgtgccctcaacaaccatggctgaaatcgaaactaccgttccagatcccacccaaatcgacgtcaaactcttcaacgctggagcttcgaggatgttgaggttaatgatatgtctctggctgattacattggagtgtccccatcaaagcatgctacatatgttcctcacactgctggtaggtactcagtgaagagg

SEQ ID NO: 152613 - DNA, 244 bp, Glycine max
caaagttcttggtggagtagacaccaacttcactgtgacagcaaaagcagcagaggacactgaattcggagagctctatctcttcaagtggaccactcttctcatccctccaactactctcataacttgaacatcgttggagtcgtggccggagtctctgatgccatcaacaatggatatggttcatggggacctttgtttgggaagctgttctttgccttctgggtcattgttcacttgtacc

SEQ ID NO: 152614 - DNA, 240 bp, Glycine max
aaggattctacccgccgctcgatgggaattgcgcttcaaggcgtctcgtagggctaatccgcctcacgagggtcaccaacggcacgtgcctttggggggccgaggccccctactgctggtcggcaacggacggcgggcgcacgcgtcgcttctagcccggattctgacttagaggcgttcagtcataatccaacgcacggtagcttcgcgccactggcacttcaaccaagcgcgatgacc

SEQ ID NO: 152615 - DNA, 240 bp, Glycine max
ctcgagccgattcggctcgaggcggggctacccgctgagtttaagcatatcaataagcggaggaaaagaaactaacaagagttcccttagtaacggcgagcgcaccgggaaaagcccaccatgaaatcggtcgccctcggcgtccgaattgtagtctggagaagcgtcctcagtggcggaccgggcccaagtcccctggaagggggcgccagagagggtgagagccccgtcgtgcccgga

SEQ ID NO: 152616 - DNA, 244 bp, Glycine max
tcggcaggaccgccaagcctgtcgtcgtcgccgactgttgtcaactctcttagatagacgacgttgaccctaggcttttatctctgtgtcggtggctctgaatgtgtcgtttctttcggtgtcgttttgccttttttttctctttcccatgtcgtttaggggattgcggtgttatggatatcatttcgaaacccttcccctttgaatccttcctttcctttctaaaatatcagtatcatgtggt

SEQ ID NO: 152617 - DNA, 249 bp, Glycine max
gaaaagaaaatcctcaattttctgagcagccaaacactctctctctgtctctcgaaaattctcagtttgcagagaaaatctgaatcatgtcgtggcaagcgtatgtcgacgatcaccttctgtgtgactcgaaggtaaccacctcactcacgctgctatcatcggccaagacggcagcgtttgggctcagagtaccgacttccctcagttcaaacctgaggagataactgccatcatgaatgactttaa

SEQ ID NO: 152618 - DNA, 244 bp, Glycine max
cccgccgctcgatgggaattgcgcttcaaggcgtctcgtagggctaatccgcctcacgagggtcaccaacggcacgcgcctttggggggccgaggccccctactgctggtcggcaaacggacggcggcgcacgcgtcgcttctagcccggattctgacttagaggcgttcagtcataatccaacgcacggtagcttcgcaccactggcttttcaaccaagcgcgatgaccaattgtgcgaatca

SEQ ID NO: 152619 - DNA, 243 bp, Glycine max
aaggattctacccgccgctcgatgggaattgcgcttcaaggcgtctcgtagggctaatccgcctcacgagggtcaccaacggcacgtgcctttggggggccgaggccccctactgctggtcggcaacggacggcgggcgcacgcgtcgcttctagcccggattctgacttagaggcgttcagtcataatccaacgcacggtagcttcgcgccactggctcttcaaccaagcgcgatgaccaat

SEQ ID NO: 152620 - DNA, 245 bp, Glycine max
  unsure (1)..(245): unsure at all n locations
ctcgagccggtaaggattgacagactgagagctctttcttgattctatgggtggtggtgcatggccgttcttagttggtggagcgatttgtctggttaattccgttaacgaacgagacctcagcctctaaatagctatgtggaggtaaccctccacggccagcttcttagagggactatggccgcccagngcacggaagtttgaggcaataacaggtctgtgatgcccttagatgttctgggccg

SEQ ID NO: 152621 - DNA, 244 bp, Glycine max
tccaactgataaaaagaatattcagagaattccaaagacagagatgactgtcattaaggaagagcaacaaccaaaccaaatagctggccacaaagaacttggtcacaaaagtctccttcagagcgtgcactctatcagtatatacttgaaaccagtgtgtacccaagagagcatgagagcttgaaggagctacgagagttgacggaaaaacacccttggaacctgatggctacaccacctgacg

SEQ ID NO: 152622 - DNA, 242 bp, Glycine max
aacaacatcaagctttatgtcaggagggtgtttataatggacaattgtgaggagctcattcctgagtaccttggatttgtgaaaggtgttgttgactccgatgacttgccgctcaacatctctgtgagatgctgcaacaaaacaagatcctgaaggtgatcaggaagaatctcgtgaagaagtgcattgagatgttcaatgaaattgcggagaacaaggaagattacaacaagttctatgat

SEQ ID NO: 152623 - DNA, 241 bp, Glycine max
aaggattctacccgccgctcgatgggaattgcgcttcaaggcgtctcgtagggctaatccgcctcacgagggtcaccaacggcacgtgcctttggggggccgaggccccctactgctggtcggcaacggacggcgggcgcacgcgtcgcttctagcccggattctgacttagaggcgttcagtcataatccaacgcacggtagcttcgcgccactggctactcaaccaagcgcgatgacca

SEQ ID NO: 152624 - DNA, 244 bp, Glycine max
atgagtttgagggcatcagagatagcgaagaagttgaatctgcaacctcacccagaaggtgggttttacgtggagacattccgagaccattccgtccagctttcgacctctcagctcccccccgatacaaagtggatcgccctgtatcgacctccatctattttctcgttccttctgggagtgtgtctcgcctccatcgcataccctgcgccgaaacctggcatcattacatcggcgaccctct

SEQ ID NO: 152625 - DNA, 246 bp, Glycine max
agtttcgacctctgttgttgagccttacaacagtgtcctctccactcattctcttcttgagcacactgatgtggctgtcctgctcgacaatgaagccatttatgacatctgcaggcgttcactggaattgagaggccaacctacaccaaccttaatcgtttagtttctcaggtgatatcatcactgactgcttccctgaggtttgatggagccttgaatgttgatgtcaatgaattccagaccaac

SEQ ID NO: 152626 - DNA, 242 bp, Glycine max
gattcccactgtccctgtctactatccagcgaaaccacagccaagggaacgggcttggcggaatcagcggggaaagaagaccctgttgagcttgactctagtccgactttgtgaaatgacttgaaggtgtaggataagtgggagctggaaacagcgaaagtgaaataccactacttttaacgttattttacttattccgtgaatcggaagcggggcactgcccctctttttggacccaaggt

SEQ ID NO: 152627 - DNA, 242 bp, Glycine max
ctcctgtgaggggagagacagtggccaagttgaaggtggcaatcaatggtttcggacgcattggtagaaacttccttcgctgctggcacggccgaaaagactcaccccttgatgtcgttgttgcaacgacagtggtggtgtcaagaatgcttcgcacctgcttaaatatgattccatgctgggaacttttaaagcagatgtgaaaatactggacaatgaaaccatcactgttgatggtaagc

SEQ ID NO: 152628 - DNA, 244 bp, Glycine max
gcagaattcaccaagtgttggattgttcacccaccaatagggaacgtgagctgggtttagaccgtcgtgagacaggttagttttaccctactgatgacagtgtcgcaatagtaattcaacctagtcgagaggaaccgttgattcgcacaattggtcatcgcgcttggttgaaaagccagtggcgcgaagtaccgtgcgttggattatgactgaacgcctctaagtcagaatccgggctagaagc

SEQ ID NO: 152629 - DNA, 247 bp, Glycine max
ctcgagccgctcgagccgctcgcgggtggacaacgaaatttctcagccaaagaacaaggaacagaatcgagtaatcaagttgaggaagatggcactagtctccggaggaagatcaacactgaacccaacgcccctctttacattcccgccgcgttccgccaagtggaggatttttctccagaatggtggcagctggtgacgacactgacatggtaccatgactactggctaagccagcagcacgatg

SEQ ID NO: 152630 - DNA, 243 bp, Glycine max
atagcccaagccctatacaaccaaaccctaacacacacccatttgattcagtttccatggctagcctcaaggttgcatttttggctgcagtgctctgcatggttgtggtgagtgcacccatggccatgcagctatcacgtgcgggcaggtgacgaatagcctgatcaattgcatcggttacctccagaacggaggaacgccgccgtcgggatgctgcaacggagtgaagagcctcaatgccgc

SEQ ID NO: 152631 - DNA, 244 bp, Glycine max
tctcgagccgattcggctcgaggtttgttgggaaaaatttgcaaggtactttgaggtagagctcaaggaagtgaaactcaaagaaggatactatgtgatggaccctgcgaaagagttgaaatggtgatgagaacaccatctgtgttgcagccattttggggtcaactatgaccggagagtttgaggatgtgaagcttctcgatgaacttcttactaaaaagaacaatgagacaggttgggatac

SEQ ID NO: 152632 - DNA, 243 bp, Glycine max
ttctttttctccttgaactcaaacatggcagatgaggtggttctgctagatttctggccaagtccatttgggatgagggtcaggattgcacttgctgaaaagggtatcaaatatgagtacaaaaagaggacttgaggaacaagagtcctcttctcctccaaatgaacccggttcacaagaagattccggttctcatccacaatggcaaacccatttgtgaatccctcattgctgttcagtaca

SEQ ID NO: 152633 - DNA, 245 bp, Glycine max
ggaaaatgttcctttcattaatggaagccctcagaacacttttgtaccagggctgattgatcttgccatcgcgaggaacactttgattggtggagatgacttcaagagtggtcagaccaaaatgaatctgtgttggttgatttccttgtgggggctggtatcaagccaacatctatagtcagttacaaccatctgggaaacaatgatggtatgaatctttcggctccacaaactttccgttccaa

SEQ ID NO: 152634 - DNA, 236 bp, Glycine max
ttttgttgtttgtgtgtttgtattttctctcacctgaaaatgtcttgctgcggtggtaactgtggttgcggaagcgcctgcaagtgcggcaacggctgcggaggctgcaagatgtacccaacttgagctacaccgagtcaaccaccaccgagaccttggtcatgggagtggcaccagttaaggctcaattcgagagtgctgaaatgggtgttcccgctgagaacgatggctgcaaa

SEQ ID NO: 152635 - DNA, 239 bp, Glycine max
caaggttgttgcatccgttgcccttctcctctccatcaacattcttttcatttccatggttagctccagcagccactacgatccacagccccaaccttctcacgtcactgctcttattacagacctagttgtccggatctgagtatttgcctcaatattttaggcgggtctctaggaaccgtggatgattgttgtgccctcatcggtggtcttggtgacattgaagccattgtgtgcct

SEQ ID NO: 152636 - DNA, 199 bp, Glycine max
ggcgactcataggcagtggcttggttaagggaaaccaccggagccgtagcgaaagcgagtcttcacagggcaattgtcactgcttatggacccgaacctgggtgatctatccatgaccaggagaagcttgggtgaaactaagtggaggtccgaaccgactgatgttgaagaatcagcggatgagttgtggttaggggtg

SEQ ID NO: 152637 - DNA, 202 bp, Glycine max
ctaaaaaagacaaatggctatcttcttgttcatgcaaatggtggattgaattaaatgagaactgggatatgtgatatggttgcagtggcaaaaataatgaatgccacccttgtgcttccctctctttccatgattcattttggactgatccaagtgactttaaagatatctttgactggaggcacttcatgaaagttttgaa

SEQ ID NO: 152638 - DNA, 239 bp, Glycine max
ctcttcttctcttgcggctagggttttagcgcagttcttctagatttaaggaagatgggtaaggaaaaggttcacatcagtattgtggtcattggccatgtcgactctgggaaatccactacactggtcacctgatttacaagcttggaggcattgacaagcgtgttattgagaggtttgagaaggaagctgctgagatgaacaagaggtctttcaagtatgcctgggtgctggacaaa

SEQ ID NO: 152639 - DNA, 241 bp, Glycine max
cgaattcgaagttaatttgcaagatggctaaggaaaaggctcagatcaacattgaggtggttggtcatgtggaccctgaggaggcaaccaccattaacgagctgaagaagcctgttgtggaaaagaagctccagggcatgccatatgagggcatgcacgtacggcctcggaggggaaccagaaaattatgttaacaaaataatctggaaccctaatgtatcagtgtcatcatcagtgtgta

SEQ ID NO: 152640 - DNA, 243 bp, Glycine max
cactcactcactcactcactcgcaagcaaaaagaaagaatcccaggcgaggagaaagatggaggggaaggagcaggatgtgtcgttgggagcgaacaagttccccgagagacagccgattgggcggcggcgcagagccaagacgacggcaaggactaccaggagccggcgccggcgccgctggttgacccgacggagtttacgtcatggtcgttttacagagcagggatagcagagtttgtgg

SEQ ID NO: 152641 - DNA, 246 bp, Glycine max
tttaattagaaaaggcgcagaaacagaaacagaaagaatggctggtcccggcaaatgcttcctcgtgacgggtcctccgggtgtgggaaaaaccactcttattatgaaagtattcgagtccctcaagtcaatccatccctcaagcttcagggcttctacactcgggaaattaggcgcgccggccagagggttggttttgaagtggtcacactcgacggtcgcactgccccacttgcttccatcgac

SEQ ID NO: 152642 - DNA, 239 bp, Glycine max
gtttcattggcaagcgactataatgggtccccctgatagcccttatgctgggggtgtttttctagttactattcattttcctccggattatccattcaagccacccaaggttgcatttagactaaagttttccacccaaatatcaacagcaatggtagtatttgtcttgatatcttaaaggagcagtggagccccgccttgacaatatctaaggttttgctctccatttgctccctatt

SEQ ID NO: 152643 - DNA, 239 bp, Glycine max
gtgatgtatacagttttggcgttgttcttctggaacttctgactggaaggaaacctgttgatcatacactaccacgtggacagcagagtctggttacttgggctacaccaaaactcagtgagataaagtcaggcagtgtgttgatacaagactaggaggagaatacccacccaaagctgttgctaagatggctgctgttgctgcactgtgtgtgcaatatgaagctgatttcagaccaa

SEQ ID NO: 152644 - DNA, 245 bp, Glycine max
gtcagattggaaatggctatgcccctgtcctcgactgccacacttctcacattgctgtcaagtttgctgaactcatgaccaagattgacaggcgatccggcaaagagcttgagaaggagcccaagttttgaagaacggtgatgctggttttgttaagatgattccaaccaaacccatggttgttgaaactttctccgagtatcctccacttggtaggtttgctgttagggacatgcgtcaaactg

SEQ ID NO: 152645 - DNA, 242 bp, Glycine max
gaagaggaagctaggaggaaccagtccgtgagatctctcttggtctctccatctcgggacttcgtaatatcatctgatggaaagaaaacacttgtctctgagcttgagggcaagacagttggctgtatttctgcgtgaagtcattcggatcatgcagtgactttaccccaaagcttgtggaggtttatgagaagctgaaggcccagggggagaactttgaggttgtgctgatacccctagat

SEQ ID NO: 152646 - DNA, 240 bp, Glycine max
ctcgagccgattcggctcgaggccgggtctgtgagaacatcccaattgttctttgcggtaacaaggttgatgtgaagaacaggcaagtgaaggcaaagcaggttactttccacaggaagaagatttacagtactatgagatttcagctaaaagcaactacaattttgagaagcctttcctgtatttggccagaaaacttgcaggtgatcctaacttgcactttgtggagtctccagcatt

SEQ ID NO: 152647 - DNA, 239 bp, Glycine max
tccccttctctatgtggaagaaatctgtaagatattatgcaaaaaataattaaggtgtttttctttaaatgggttggttgattggttcaatgaaccgatcaagaccacagcaggttcatgggatgcgaggattaagacgctttgttttttaatcttccgatgtcactcttgtttgttagtttgtttttttattttttatttcaataagtactgtgcaagtaggttagagttgggtagaa

SEQ ID NO: 152648 - DNA, 243 bp, Glycine max
ctcactcactcacaccgttccatttctcaacaacttctgctacttcctactccaaccgcacttctgctccgcaattatcatgggcaaggtcaagatcggaatcaacggatttggaagaattggcgtttggtagccagagtggctctgcagagagacgatgttgaactcgttgccgttaacgaccctttcatcaccaccgattacatgacatacatgtttaaatacgacagtgttcatggacac

SEQ ID NO: 152649 - DNA, 243 bp, Glycine max
aaaagataacgcaggtgtcctaagatgagctcaacgagaacagaaatctcgtgtggaacaaaagggtaaaagctcgtttgattctgatttccagtacgaatacgaaccgtgaaagcgtggccttcgatcctttagtccttcggaatttgaagctagaggtgtcagaaaagttaccacagggataactggcttgtggcagccaagcgttcatagcgacgttgctttttgatccttcgatgtcgg

SEQ ID NO: 152650 - DNA, 247 bp, Glycine max
gaagaaacaatttgagaaggttcaattgtccgaaatgaatttctagtcccgcatatttatcaacatattaaactcataaaaataactcaatttttttgttgataatttatgtaattctattcagttaatatcagtataatagaataaaaaaattatgaaaagatctttggttctgtatagtctttttatactatatttaaaatattacttgtaacgtaatacaaataaactcgagtatggatattgt

SEQ ID NO: 152651 - DNA, 248 bp, Glycine max
atggctcccaagggtttaacctttctggctgtgttaatatgcgtttcagcactgtcactgagtccttctgttgcgggggaagggcaaaataatggccttgttatgaacttctacaaggaatcatgccctcaggctgaagacatcatcacagaacaagtcaagcttctctacaagcgccacaagaacactgctttctcctggctcaggaacatcttccatgactgtgctgttcagagttgtgatgcttc

SEQ ID NO: 152652 - DNA, 246 bp, Glycine max
ctcaaactcaacacctcttccccacatcctcacctttcactaccccacaagtctttcacttgtagaagccaggctgagccatcttctgattcagccaaagtccaagaactgagtgtgtatgagatcaatgagagagatcgtggaagccctgcttatcttagattgagccagaaaactgtcaattcccttggtgatctagtccccttcagcaacaagttgcattctggatgtttgcaaaagagggtg

SEQ ID NO: 152653 - DNA, 247 bp, Glycine max
ctcgagccgtcattctcatctttctctcttctctctccacccaaaccctaactaacgaccctgttcccctctcgtatccgtcatgaaaggaggaaagtccaagaccgaatctaagagagccgatcccaaacttgctgtgaataagaagggagccgccaccaaggctaggaaacccgccggcaaggggaaggcagcgaaagaccctaacaagccaaagaggcctccaagtgctttcttcgttttcatg

SEQ ID NO: 152654 - DNA, 245 bp, Glycine max
gctgttcctacaatcattccaaatgtgcccttccggtcgcaccctcctcccttcctccgtctccgatttccgaccggcattcgacgtcctcgatgccgaccgcgacggcaaaatcagccgcgacgacctccgcgccttctacgccggagtcggcggcggaggagatgacgtgatcggggcaatgatgacagtggctgacaccaataaggacgggttcgtggagtacgaggagttcgagcgcgtgg

SEQ ID NO: 152655 - DNA, 243 bp, Glycine max
gcaggggttcctggagcatatgttctgtggtatcgcccattatatcgtgcttttaggaatgaaagtgctttgaaatttggatggtttttcctgttttatctgcttcacataggattctgcatcttagctgcagttgctcctcctatagttttcaaaggcaaatccctgacgggcattctggctgccatagatgtgctgggcgaccatgctttgatcgggattttctacttcgttggatttgga

SEQ ID NO: 152656 - DNA, 243 bp, Glycine max
gcctcctcaaagttcttggtggagtagacaccaacttcactgtgacagcaaaagcagcagaggacactgaattcggagagctctatctcttcaagtggaccactcttctcatccctccaactactctcataatcttgaacatcgttggagtcgtggccggagtctctgatgccatcaacaatggatatggttcatggggacctttgtttgggaagctgttctttgccttctgggtcattgttc

SEQ ID NO: 152657 - DNA, 243 bp, Glycine max
tctttctccgagaacaaaaaaaaaaacgtgattcgctcttctcttcgaataaaccacaaaaccaacaaacgagaagaggagtgagagaagatggggttgtcgttcacgaagctgttcagcaggtttttgcgaagaaggaaatgaggattctgatggtaggtctcgatgctgctggtaagacaaccatcttgtacaagctcaagcttggagaaaatggtaaccaccatccccaccatcggattt

SEQ ID NO: 152658 - DNA, 246 bp, Glycine max
gcatggacggccgcctcctcaccgcccgccccgctcccaaggccgccgacctcggctacctcggcgaggtcgcacgcgtcgatcccgccgtcctccgctccctaatcgacaccagccacatccccgtcgtcacctccgtcgccgccgatgaatccggacagccctacaacatcaacgccgacaccgtcgccggagaattggcagcgtcgctcggcgcggagaagctgattctgctgaccgatgtgg

SEQ ID NO: 152659 - DNA, 245 bp, Glycine max
ccaaggtgaagcgggtctactatccaggcttgccgagtcaccctgaacatgagcttgccaagaggcagatgactggtttcggtggtgttgtcagttttgagattgatggagatctacataccacaataaaatttattgattcattgaaaatcccatatattgcggcctcgtttggtggctgtgagagcattgtggatcaacctgctattttgtcttactgggatcttcctcagtcagaaagggcc

SEQ ID NO: 152660 - DNA, 245 bp, Glycine max
gttgctctcaggaaaggaaggaatcatatctcaaatggttgagaccaaaccagacaagctctacagcttgaccttctcattgggtcatgctgatgacaagtgcaaggagcctcttgctgttatggcctttgctggtgaccaggctcagaacattcactacactcccaattccaattccaccttccaaactgctaacgtcaatttcactgccaaggctgagaggactagaattgcattctatagca

SEQ ID NO: 152661 - DNA, 244 bp, Glycine max
gggcgaacatactagttgatcctaatggtgaaatcaaactggcagactttggaatcgctaaacatataaattcttctgcctcaatgctttcattcaaaggaagtccatactggatggcacctgaggttgtaatgaatacaaatggctatagtcttccagttgatatatggatcttgggatgcacaattattgaaatggcaacatcaaaacctccatggaatcagtatgataggggtagctgcca

SEQ ID NO: 152662 - DNA, 242 bp, Glycine max
ttgaaggttgacctaaagactgaggctgatgccaccaccggtggtggtaaccccaacaagaagaaggttatctactgcacaagtttgaactggagttcggatggaagcactttgtttagtggctataccgatggcgtggtcagagtttggggtattggtcgttattaggttaagctgtttagtgctttcagatgcgaatctgttttgagttttgggacaagttagttactgctttactgtag

SEQ ID NO: 152663 - DNA, 243 bp, Glycine max
catcattcaaatttctgccctatcaactttcgatggtaggatagtggcctaccatggtggtgacgggtgacggagaattagggttcgattccggagagggagcctgagaaacggctaccacatccaaggaaggcagcaggcgcgcaaattacccaatcctgacacggggaggtagtgacaataaataacaataccgggctcattgagtctggtaattggaatgagtacaatctaaatccctta

SEQ ID NO: 152664 - DNA, 243 bp, Glycine max
gcttgttctgttgtgttgaaggaagtgccaccaaggactactgctgttgggaaccctgctaggttggttggagggaaggataaccctattaaattggataagatgcctagttttaccatggaccatacttcatggtctgattatgttatatagaagctaattaattgtctaacatgttttagagtttgtgtttaggtgggaattgttttggttgagggggcttggttgttgtgcaagagagaa

SEQ ID NO: 152665 - DNA, 247 bp, Glycine max
  unsure (1)..(247): unsure at all n locations
gaaccattaaaccatgttgaagcagagagacagaggagggcgaagctgcaccagagattctacgcgcttcgtgctgtggttcccaacgtgtcaaagatggacaccgcgtcgcttctgggcgacgcgatatcttacatcccgagctgnacccaacttcagagcccttcgaatctgataaagatgtattgcataagcagcttgacggagtgaagaaggaactcgagacaacaaccgataacgtttcttc

SEQ ID NO: 152666 - DNA, 243 bp, Glycine max
gtctgcccagaaaagttgccaaattatgagcagaaaatcaaaagcttctttgaagaacatcttcacactgatgaggagatccgcttttgtgctgctggaagtgggtattttgatgttagggattgcaatgatgcttggattcgagtgtgggtcaagaaaggaggaatgatcatcttacctgctggaatttatcatcgctttacactagatgagagcaactacattaaggctttgcgttttttt

SEQ ID NO: 152667 - DNA, 241 bp, Glycine max
ctcgagccgcgcactggacccagaagtatgccatgggctgatttgtgtttggataatgtatattgaaatggattgcatctatgaaaacttttgtgggtttgcttttcacttcctgttttctgggtaagattatgtttctgttatgaggggctagggaagggaggtgtcttaatttgataaaaaaaataactgtgttcaacaaccactgtgatgtttttatcatgatgcaaacgcatgaaca

SEQ ID NO: 152668 - DNA, 243 bp, Glycine max
gcgaaaccacagccaagggaacgggcttggcggaatcagcggggaaagaagaccctgttgagcttgactctagtccgactttgtgaaatgacttgagaggtgtaggataagtgggagctggaaacagcgaaagtgaaataccactacttttaacgttattttacttattccgtgaatcggaagcggggcactgcccctctttttggacccaaggtcggcttcggccggtcgatccgggcggaa

SEQ ID NO: 152669 - DNA, 241 bp, Glycine max
ctcgagccgttcttgtctaggcaaactgcgggacgggcgttctgttgcagtgaagaggttgtatgagaacaacttcaagagagttgcacagttcatgaatgacattaaaatcctagcaaagttagttcatccaaatcttgtgaagttatatggatgcacctctcgccacagacgcgaacttctgcttgtatacgagtacattcctaatggaaccgttgctgatcatcttcatggacaacga

SEQ ID NO: 152670 - DNA, 243 bp, Glycine max
ctcatcaagtccaagaaccaacctaccttttgcaatctcaattcaatggcgtcctctctcattgcgaacgcttcctctcctcttccctcctctccaggtccctccttcgccccgccgcttccgcttcccaccgctcgttcaacaccaacgccatgcgccagtatgacaaccgcgccgacgaccacagcaccgacatcgatcgtcactccgaacgctctttccctagcactgcgcgccgcgacg

SEQ ID NO: 152671 - DNA, 245 bp, Glycine max
gtcaccttcctataacccaccaggttacaaagcaccatcttataatccaccaggttaccagccaccttcatacaatccaccaggttacaaagcaccaacttataatccaccagcttacaagtccccttcctataatccaccaatttacaagccaccttcctacaatccaccaggttacaaagcaccatcttataatccaccatcttacaagtcaccttcctataatccaccagtttataaagcac

SEQ ID NO: 152672 - DNA, 242 bp, Glycine max
tgaagctgttgttaatgagataggggcggacagagttggaattaggctatcgccattcgcagaatattcagagtctggagactctaatccaaaagaattggggctttacatgatgaatgccctcaataagtatggtattctttactgtcacatggtggaaccaagaatgaagactgttggagaaaaaactgaatgccctcatagcctggtgcctatgagaaaggccttcaatggcactttta

SEQ ID NO: 152673 - DNA, 243 bp, Glycine max
aatggcttctctggcaagcttagctgttgttcaaccatctactgtcaagggccttgctggaactaagctctctttcaagccctctcgccagagcttcagacccaagaatttcaggagtggtgccgttgtagcaaagtacggtgacaagagtgtgtactttgatttggaggatctaggcaacactactggtcagtgggacttgtacggctccgatgcaccttcaccctacaaccctcttcagag

SEQ ID NO: 152674 - DNA, 239 bp, Glycine max
aaatggcaaccactgtgatgaccactctcccccaattcagtggtcttagaccccaattctcagctgcccctgtgaagaacttggttgctgtgcaacccatgagtcgcaaggggaagggtgcattgggagctcgatgtgactacattggttcatccactaatctgattatggtggcttctacaaccctgatgctgtttgctggaaggtttggattggctccatcagcaaacaggaaagcc

SEQ ID NO: 152675 - DNA, 242 bp, Glycine max
atgggaagccagcaagccgccgtgtcgttcctgacgaacctggcccgcgccgctttcgggctgggcgcctccgcgaccctattgagctcctccctctacaccgtcgatggcgggcagcgcgccgtcctcttcgacgtttccggggcatcctcgacgagaccgtcggcgaggggacccacttcctcatcccgtgggtccagaaaccctacatcttcgacatccgcacccgcccccacaccttc

SEQ ID NO: 152676 - DNA, 244 bp, Glycine max
gcaaaaatggcatcattcaccatgacagcttccatccttggcagcccagccgtcaccaaccggtcggcagtagcaacgcagaggagatcactcgtagtgaatgctgccaaagctgttgaagcagaaaaggtcagttatgacaatgacatggatggtagcaatggaaggaggaacttgatgttcgccgcggcggcggctgctgtttgctctgttgctgggatggcagtggcagatgagcctaaac

SEQ ID NO: 152677 - DNA, 242 bp, Glycine max
atcattcttcgtttgtctaagatccgccttctctgaattgtaaaaatgtcgctcggagaaactgcttgttcatacgcagctctcatccttcatgaagatggaatcagtgtaactgccgacaagatcagcaccttgttggaaactgcaaaggttcaagtagatacctattggccaaccttatttgctaaacttgctgagaagaaaaatcttggcgatttgatagccaatgcagcaggcggtgg

SEQ ID NO: 152678 - DNA, 241 bp, Glycine max
caacgttgtgttcgacgaggacgagattcctagcggcgtggatgcagggaaaatctccatgagcgaagaagaccttctcaatgcggctggtgagacttacagcgttactttggatgccaagggaacctacagtttctactgttcgcctcaccaaggagctggtatggtgggaaaagtcaccgttaattaattatatattgtctcctacgtctaagttctcatatgcttgttttcctagaag

SEQ ID NO: 152679 - DNA, 242 bp, Glycine max
gtttctctttcattttttttttgctaaggactcaaggaatacaacatcctgatatttggaggacagattaaagagaaacatcgtggaggaaacaatggcagcaaggtattggtgtcacatgtgctctcaaatggtcaatcccatcatggatatggaaatcagatgcccgttttgccaaagtggatttgttgaagaaatgggtaacacccccagtagcagcagcattcccaatacatcagaat

SEQ ID NO: 152680 - DNA, 242 bp, Glycine max
gttcgcctgaatatgtgcgctcatgctgcgaaactagcttgaaacgtcttgatgttgaatacattgatctctattatcagcatagggtggacacatctgtacctatagaggaaacagtgggtgaacttaagaaacggtggaggagggcaaagtgaggtatatagggttatctgaagccagctcagatacaataaggagagcgcacgcagttcatcccatcacagctgtgcaaatagagtggt

SEQ ID NO: 152681 - DNA, 238 bp, Glycine max
tcgttaagcgaaggaaaaatagggtgaagagcactgtgagagtgccggcgattagttcaaaagtcgccgatattccaccggacgagtactcgtggaggaagtacggtcagaaaccgatcaagggttccccatacccaggggttcctacaagtgcagcacgattagagcgtgcccagcgaggaagcacgtggagcgcgcaccagccgatcctgcaatgctgatcgtgacgtccgagggg

SEQ ID NO: 152682 - DNA, 240 bp, Glycine max
gcttggcggaatcagcggggaaagaagaccctgttgagcttgactctagtccgactttgtgaaatgacttgagaggtgtaggataagtgggagctggaaacagcgaaagtgaaataccactacttttaacgttattttacttattccgtgaatcggaagcggggcactgcccctctttttggacccaaggtcggcttcggccggtcgatccgggcggaagacattgtcaggtggggagtt

SEQ ID NO: 152683 - DNA, 238 bp, Glycine max
aagaccatcacccttgaggtggaatcctcggacaccattgataatgttaaggccaagatccaggacaaagagggcatccctccagatcagcagaggctgattttcgctggtaaacaacttgaggatggaagaacccttgctgattacaacattcagaaggaatccacccttcacttggtgcttcgtttgagaggtggcatgcagattttcgtcaagactttgacaggaaagaccatca

SEQ ID NO: 152684 - DNA, 240 bp, Glycine max
ctggctcatcggaagagggacaagtcattagctgccacaccgttgaagaatggaacgatcaactccagaagggcaacgaatccaagaaactcattgttgtggattttactgcttcttggtgtggaccatgccgtttcattgcaccattcttggctgagctggctaagaagttcacaagtgtcatattcctaaaggtggatgtggacgaattaaagagtgtttctcaagattgggctcatt

SEQ ID NO: 152685 - DNA, 234 bp, Glycine max
ctcgagccgcacgttttgtgggactcaccggtaccccgagaaacacgcgtgtggcttcgaattcaaggcggtggggagagaggagatagcacgggcgaatcccgtgatcaaaggcgagaagctacggaggatttaatctgcaccgttgatatgatgatcgaagcgattagggtgagttgatcaggaccgtccgtcgtgggccgttgatacgaacctatttcgagcgtgtgtaag

SEQ ID NO: 152686 - DNA, 241 bp, Glycine max
caccaattaagctttcaagagacaaactgctttgaaaaatgggatccaaggttgttgcatccgttgcccttctcctctccatcaacattcttttcatttccatggttagctccagcagccactacgatccacagccccaaccttctcacgtcactgctcttattacacgacctagttgtccggatctgagtatttgcctcaatattttaggcgggtctctaggaaccgtggatgattgttg

SEQ ID NO: 152687 - DNA, 239 bp, Glycine max
ctaccttaggggtggccttacaactattgatcgtgactatggatcgatcaacaacattcaccatgacattggaacccatgtcattcatcacctctttcctcaaataccacactatcacttaatagaagcaactgaggcagctaagccggttcttggcctatactaccgggagccaaagaagtctagtcctcttccaatttaccttattggagaattgttaagaagcatgaagaaagacc

SEQ ID NO: 152688 - DNA, 237 bp, Glycine max
aaaatgtcttgctgcggtggtaactgtggttgcggaagcgcctgcaagtgcggcaacggctgcggaggctgcaagatgtacccagacttgagctacaccgagtcaaccaccaccgagaccttggtcatgggagtggcaccagttaaggctcaattcgagagtgctgaaatgggtgttcccgctgagaacgatggctgcaaatgtggagctaactgcacctgcaacccctgcacttgc

SEQ ID NO: 152689 - DNA, 238 bp, Glycine max
ccggattcattccatactgtgcaactttctttgtcttcactgactatatgagagctgccataaggatttctgcactgtgtgaagctggagttatttatgtgatgactcatgattcgattggacttggagaggatggaccaactcatcagccaatagagcatttggcaagcttcagggcaatgccaaacactttgatgcttcgtccagctgatggtaatgaaactgctggatcatacaa

SEQ ID NO: 152690 - DNA, 125 bp, Glycine max
caatttcattctgttgtacaatttttgccaacagttgcaactgtactgtctcctgaggttattgagagagaggctgaatcaggaggaaagcttggggaattggattcatatgagattgaaggtgc

SEQ ID NO: 152691 - DNA, 220 bp, Glycine max
aaaggattctacccgccgctcgatgggaattgcgcttcaaggcgtctcgtagggctaatccgcctcacgagggtcaccaacggcacgtgcctttggggggccgatgcccctactgctggtcggcaaacggacggcgggcgcacgcgtcgcttctagcccggattctgacttagaggcgttcagtcataatccaacgcacggtagcttcgcgccactggct

SEQ ID NO: 152692 - DNA, 242 bp, Glycine max
gcagatcttcgtcaagactctcactggcaaaaccataaccctagaggtcgaaagctctgacaccattgacaacgtcaaggccaagatccaggacaaggagggaatccccccagaccagcaacgtctcatcttcgccggaaagcaacttgaggacgggcgcaccctcgccgactacaacatccagaaggaatcaacccttcacctcgtcctccgtctccgtggtggcatgcagatcttcgtta

SEQ ID NO: 152693 - DNA, 242 bp, Glycine max
accaccaccaccaccacctcgatttccgaaccttctagattcttcgatgcaaccacccccgccacttcatcgcgctccccaaagcgatccctccctctcgacgaggaatctcagacggaccaaacgacgtcttctgagcccaaacgcgccgtgaaccgctgctccggctgccggcggcgcgtgggactcacgggattccggtgccgctgcggggaccttttctgcgcagagcaccgctactc

SEQ ID NO: 152694 - DNA, 238 bp, Glycine max
gaggacacaagatggaggaacagaagttgtagaagctaaggctggaaagggttctgcaactttgtcaatggcctatgctggtgccctttttgctgatgcttgcctcaagggcctcaatggagtcccagatgttgtcgagtgctctttcgtgcaatccactgttactgaacttcccttctttgcttccaaggtgaggcttgggacggttggtgtggaggaagttctgggcttggggcac

SEQ ID NO: 152695 - DNA, 142 bp, Glycine max
cttctcttgcggctagggttttagcgcacttcttctagatttacggaagatgggtaaggaaaaggttcacatcagtattgtggtcattggccatgtcgactctgggaaatccattaccattggtcacctgattcacaagctt

SEQ ID NO: 152696 - DNA, 239 bp, Glycine max
ggaggaactgcagaagaggatgctgctgcactaattaaggatagtggaactgagaagcctgttgttgcttttattgctggtttaactgctccccctggccgtcgtatgggtcatgctggagctattgtgtcgggtggcaagggcactgcacaagaaattataaacccctcagggaagctggggtcatggttgtggagtcccctgccaaaattggagctgccatgctagatgttttcaag

SEQ ID NO: 152697 - DNA, 271 bp, Glycine max
caatcttctctccacgcccttcttgggtaaccgtctgaagtgcagcaatggcagatggattgcattcgcagcatccatcggtagttcagaagttatctggacagtcttatcttgtgtccaggcttgctcctaatcactccagaaactgttctaccactggtagttacttcaatggaggtttgcagtcttcaggtttggttccagtcacggcacacgcgccggctgagaaaggggtgtctggatttttgttggatttcctgatgggcggagt

SEQ ID NO: 152698 - DNA, 269 bp, Glycine max
ggaggctacaaaggcaataaaacccattttgggagagtattatgatagatttgcttgccactatgacccatatggtcccatttactctgatcgtgaacgacttcaaatatatatatcagatgcaggagtacttgcagtatgctatggccttttccgtcttgccatggcaaaaggacttgcctgggtggtgtgtgtttatggagttccattgctagtggtcaatggatttttggtgttgattacattcttgcagcatactcaccctgcat

SEQ ID NO: 152699 - DNA, 267 bp, Glycine max
agcaggtgggggctcaatggttggcgctatcagtggatctactcaacgtgaaccattagttgttggacaaccctcaacgtttatgatggattacttggcaaacaaatttggcatttcgaagtcacagatatgtatggttggggacagattagacactgatatcttgtttggacaaaatggtggttgcaaaactcttcttgtgctctcaggcgtcaccacactggccatgcttcagagccctaacaactccatacagccggacttcta

SEQ ID NO: 152700 - DNA, 268 bp, Glycine max
ctgaaaacgatagtaatggcgacgaatccaatcgaagcggggaacggcgacgccgctcctaaccctaacgcgactaccaaaccctccgtctacctccaagacacggaggagctgaagcgagtcttcagccgcttcgacgctaattgcgacggcaagatctccgtcaccgagttggacaacgtcctccgctccctcggatccggcgtcccgcggaggatatccagcgcgtcatggacgacctcgacaccgaccacgacggattcattaa

SEQ ID NO: 152701 - DNA, 271 bp, Glycine max
gcatggacggccgcctcctcaccgcccgccccgctcccaaggccgccgacctcggctacgtcggcgaggtcgcacgcgtcgatcccgccgtcctccgctccctaatcgacaccagccacatccccgtcgtcacctccgtcgccgccgatgaatccggacagccctacaacatcaacgccgacaccgtcgccggagaattggcagcgtcgctcggcgcggagaagctgattctgctgaccgatgtggcgggaattctggaagatcggaacga

SEQ ID NO: 152702 - DNA, 269 bp, Glycine max
actcgagccgattcggctcgagaggctctgagagacagcagcaacagtggctacatgtctagcaagaagacgatggagatcaaccctgacaatggtatcatggaggagttgaggaagagggctgaagctgataagaatgacaagtctgttaaggaccttgtgttgcttctctttgagactgcccttttgacttcaggtttcagccttgatgatcccaacacatttgcttcgaggatacacaggatgttgaagctgggacttagcatcga

SEQ ID NO: 152703 - DNA, 269 bp, Glycine max
ctctttcctctctctctctctacgctttctcgtttgaactccctcaagggatccactaactgaaggagcaatggggttgacatttaccaagctttttagccggcttttcgccaagaaggaaatgcgaattctaatggttggtcttgatgccgctggtaagaccaccatcctgtacaagctcaaacttggagagatcgttaccacaattcccaccattgggttcaacgtggagactgtggaatacaagaacattagtttcactgtctggg

SEQ ID NO: 152704 - DNA, 269 bp, Glycine max
ggcaggtgggggctcaatggttggcgctatcagtggatctactcaacgtgaaccattagttgttggaaaaccctcaacgtttatgatggattacttggcaaacaaatttggcatttcgaagtcacagatatgtatggttggggacagattagacactgatatcttgtttggacaaaatggtggttgcaaaactcttcttgtgctctcaggcgtcaccacactggccatgcttcagagccctaacaactccatacagccggacttctata

SEQ ID NO: 152705 - DNA, 270 bp, Glycine max
aaaggattctacccgccgctcgatgggaattgcgcttcaaggcgtctcgtagggctaatccgcctcacgagggtcaccaacggcacgtgcctttggggggccgaggccccctactgctggtcggcaaacggacggcgggcgcacgcgtcgcttctagcccggattctgacttagaggcgttcagtcataatccaacgcacggtagcttcgcgccactggctttctaaccaagcgcgatgaccaattgtgcgaatcaacggttcctctcgt

SEQ ID NO: 152706 - DNA, 273 bp, Glycine max
tcgacctcgagcgattcggctcgagggaagggtgaaaagaacccccatcggggagtgaaatagaatctgaaaccgtaagctcccaagcagtgggaggaggctcgggactctgaccgcgtgcctgttgaagaatgagccggcgactcataggcagtggcttggttaagggaaaccaccggagccgtagcgaaagcgagtcttcacagggcaattgtcactgcttatggacccgaacctgggtgatctatccatgaccaggatgaagcttgggtg

SEQ ID NO: 152707 - DNA, 268 bp, Glycine max
ggtcatcgttgggatctccatacgccggatctgctaaaatacgcttgatccatatgggcctcctcgaccacttgtgggacgacaccgtcgccggcccaaggccggaaaacggtctcggcaagctccgaaaacaccacaccttcactttccgagctagctccggcaaggaaacggagggcgggagcgtgagatcgtacggagacgaatcgtcggaggaagccacgagagtgacgcgtagtatcatgatcgtgaaaccgcccgggtacca

SEQ ID NO: 152708 - DNA, 269 bp, Glycine max
ttctccgatggctaatccctcactcttgttcttcagtctcctcctattatccgccaccgtagccgccgccgaacggatcgacgatgaagacgaccttctgatccgtcaagtggtgccggatgcggaggaccaccacctgctcaacgcggagcaccacttctccgccttcaagacaaagttcggcaagacctacgccacgcaggaggagcacgaccaccgcttccgtatcttcaagaacaacttgctccgcgccaagtcacaccagaaat

SEQ ID NO: 152709 - DNA, 266 bp, Glycine max
ctcgagccgttgctactgagtttccacactgcataccttaggtcttccgaattcgaagttactttgcaagatggctaaggaaaaggctcagatcaacattgtggtggttggtcatgtggaccctgaggaggcaaccaccattaacgagctgaagaagcctgttgtggagaaagaagctccagggcatgccatatgagggcatgcacgtacggcctcggaggggaaccagaaaattatgttaacaaaataatctggaaccctaatgt

SEQ ID NO: 152710 - DNA, 271 bp, Glycine max
tgcagatcttcgtcaaaaccctaaccggtaaaacgattacgctagaggtcgagtcctccgacacaatcgataacgtgaaagctaaaatccaagacaaggaaggcattccaccggatcagcagcgtttgatcttcgccggtaaacaactcgaagacggcagaactctcgccgattacaatatccagaaagaatcgacgctccacctcgtcctccgccttcgcggtggcatgcaaatcttcgtcaaaaccctaaccggtaaaacgattacgct

SEQ ID NO: 152711 - DNA, 260 bp, Glycine max
ctctcacctgaaaatgtcttgctgcggtggtaactgtggttgcggaagctcctgcaagtgcggcaacggctgcggaggctgcaagatgtacccagacttgagctacactgagtcaaccaccaccgagaccttggtcatgggagtggcacctgttaaggctcaatttgagggtgctgaaatgggtgtgcccgctgagaacgatggctgcaaatgtggaccaaactgctcctgcaacccctgcacttgcaagtgaggtgttg

SEQ ID NO: 152712 - DNA, 267 bp, Glycine max
ctcgagccgttgctactgagtttccacactgcataccttaagtcttccgaattcgaagttactttgcaagatggctaaggaaaaggctcagatcaacattgtggtggttggtcatgtggaccctgaggaggcaaccaccattaacgagctgaagaagcctgttgtggagaaagaagctccagggcatgccatatgagggcatgcacgtacggcctcggaggggaaccagaaaattatgttaacaaaataatctggaaccctaatgta

SEQ ID NO: 152713 - DNA, 267 bp, Glycine max
caaaaacctccaacaaatgactgctatatggaaagagaacctggtactcgccctcctctttgccagtctgacgatgactcagatgcagtatggggagtaaatatgaaagcatgcataacaccttacagtgatcatgacaacagagccaagggtagtggattagctccatggcctgcaagattgactagtcctcctcctagattagctgactttggctattcaaatgacatgtttgaaaaggacacggaactatggcaaaggagagtt

SEQ ID NO: 152714 - DNA, 266 bp, Glycine max
actcgagccgaatcggctcgagcagtatgatgggttgtggcggtacaatctcagtgtcactgctgctgctgcttctcgcttgttttacagaaatagccttggctggctgcgataaggctccagtgctgttcgtcttcggcgattccaactcggacacgggtggactcgcctccggactcggtttccctataaatcctcccaatggccgcaatttctttcacagatccactggccgcttgtccgatggtcgcctcctcatcgaccta

SEQ ID NO: 152715 - DNA, 267 bp, Glycine max
tgccgatatgctatctttgactttgattttgtgacatctgagaactgccaaaagagcaaaatctttttttattgcatggtctccttcggtagcccgcattcgccctaagatgctatatgcaacatccaaggacaggttcagaagggagctgcagggcatccattatgagattcaggcaacagacccaaccgagatggatcttgaagtcctcagagagcgtgcaaactgagcacctacacaagagggttgtgtctaggtgatgtagtt

SEQ ID NO: 152716 - DNA, 267 bp, Glycine max
ggcacaagaaacctttctattcacatctgaatctgtaaacgagggtcaccccgacaagctgtgcgaccagatctctgatgcagtacttgatgcgtgccttgaacaggaccctgacagcaaggttgcctgtgagacatgcaccaagaccaacatggtcatggtcttcggagagatcacaaccaaggccaacgtagactatgaaaagattgtccgcgacacatgccgcgaaattggattcatctctgatgatgttggtcttgatgctga

SEQ ID NO: 152717 - DNA, 265 bp, Glycine max
cttcatcttgttctatctgtgacgagcatcatggcctcaagatcagtgttattgttggctatgtgtgtgcttccggcgatggttgtggccattcgcccagcaaagaaccctttttgcgtgaagggtcgtgtctactgtgacccttgccgtgctggttttgagacctcagctaccacctacattgctggtgctgagattatgttgcaatgcaagagcagggttagcaacgaggttgtgtacacgaagaaggggtacaccgactcaa

SEQ ID NO: 152718 - DNA, 266 bp, Glycine max
gcaagccccactcaaccaccacacctctcctcgttcacgctacccctttctgctcttcttctacctttcaagttttaaaagtataaagatggcagagacattcctatttacctcagagtcggtgaacgagggacaccctgacaagctctgcgaccaaatctccgatgctgtcctcgacgcttgcctcgagcaggacccagacagcaaagttgcctgcgaaacatgcaccaaaaccaacttggtcatggtcttcggagaaatcacga

SEQ ID NO: 152719 - DNA, 265 bp, Glycine max
gtcgttataatctgactcggaattcaactccgagtcaacccggtcgagaacgcaccgaggcgacgattcaacaagggcgtagtagggaagcaaatatggatgctgaagcaactgatcgcaactccaccgttcactcggttctcttctaagacacttctcgagaaaatccttccctagctccgacaactggattggaaattccggcaactcgtccgagtaaccgattcgactcagcgtgtcgacgccgcggtcctcccacgccggt

SEQ ID NO: 152720 - DNA, 263 bp, Glycine max
aaaccggcaccggttatagcttctttctcagcgagaggacccaacggtttaaaccctcagatacttaaaccggatttcattgctcccggtgtcaacatcctcgccgcctggacccaagctgtcggcccgaccggtttggactccgataccaggagaaccgagttcaacatcttgtctggcacttccatggcttgccctcacgtcagtggcgccgcggctttgctcaaatcggctcaccctgattggagccccgccgccctaag

SEQ ID NO: 152721 - DNA, 264 bp, Glycine max
cccggcaattcattgctaccatcatatttcttaagggggttggagggattttgtttgtgtttggaagcacatttggatctttcctactgcttttgcatctggcgattactactccacttctgtacgatttctataaccatagccccggcaagcctaagtacaatcagctgctgaatgatttcttgctgaacacagcactttttggggcattgctattctttattggaatgaagaactcaattcccaggagtcagctcaggaaga

SEQ ID NO: 152722 - DNA, 263 bp, Glycine max
gtttaagcagatatgggaaccaggatggggttgataacttgcagatggcatcactgcttgcactctttgtatctgatcattttggtggcagtgatagaagtggtattgtagaaaggacacggaaatctgtgtccggttcaaactataataagccttttgtctgtacatgctcagctggaagcagcaccagtataagttctcccactgaaccagttgcaaacaccatagaagatatcactctttcgaagatgtcggaaaaatct

SEQ ID NO: 152723 - DNA, 264 bp, Glycine max
gccagagatgttcatcgaactcttcataccattgtccagcagcaggaaaatgtggactcgacaaaggctgaggctatagtgaaaaaacttcagatggatggacgttacctaagggatgtgtggtgatttttctgatcattcttctgcccagattgtggtatccttgctatttgatatgctaaattcaggattggctgaaggatattcttgagattagtcactgcctttccggaaatttaggacaccaacagtggaggttaaaca

SEQ ID NO: 152724 - DNA, 264 bp, Glycine max
acactcataacacaaagcacaaagcaaagctcatccttgagttaaaaaatggcagcagcttcttccatggctctctcatccccatccttggctggcaaggccgtgaagctgggcccatcagccccagaagtgggaagggtgagcatgaggaagaccgtcaccaagcaggtctcctcaggaagcccatggtacggcccagaccgagtcaagtacttgggcccattctctggcgagcccccgtcctacctaaccggtgagttccca

SEQ ID NO: 152725 - DNA, 264 bp, Glycine max
gcttggtttgctttacttcaatgtgtatgtcaatgggaatttggcttatgaagatttggatctctcttacgttttgaattcgctggcttcgccgttttacgcggactttgtggttgatggaggagatgatggggccttgagtgttggtgtaggtccttcgaagaggagcatgccgcatgtcatcgatgggatattgaacgcggttgaggttatgaagttgaacaattcgcgcagtagccttgatggagaggtttgtgctgattt

SEQ ID NO: 152726 - DNA, 265 bp, Glycine max
ctttctccgagaacaaaaaaaaaaacgtgattcgctcttctcttcgaataaaccacaaaaccaacaaacgagaagaggagtgacagaagatggggttgtcgttcacgaagctgttcagcaggttgtttgcgaagaaggaaatgaggattctgatggtaggtctcgatgctgctggtaagacaaccatcttgtacaagctcaagcttggagaaatcgtcaccaccatccccaccatcggatttaatgttgagactgtggagtacaa

SEQ ID NO: 152727 - DNA, 264 bp, Glycine max
gagttttctcacatctggctcatggagtagctcaagctgctcatggttaccctccaggggcataccctccacctcctggggcataccctccttaccaagggtacccacctgctcatggctaccctccacaaggtggctatcctccggctggttatccccctgctggctatcctcctgctgctggtggttacccccctgctggttaccctccacatggttatcctggatcatctgctccacatggatctcatgcgcctgggcacg

SEQ ID NO: 152728 - DNA, 263 bp, Glycine max
actccattgagatgtcttcatccgtctacaagaattgggttttcactgaccaagcattaccagctgatctcgtcaagagaggattggcaattgaagatccctctgcaccccatggccttcgccttgtgatagaggactacccttatgctgttgatggacttgaaatatgggatgctattaagacatgggttcatgaatatgtctccttgtattacccaacagatgcagcagttcaacaagatactgaactacaagcatggtgg

SEQ ID NO: 152729 - DNA, 262 bp, Glycine max
gtccggcaaggccaaggtcatgattgccggtggattcgacgacttctccgaagagggatcgttcgagttcgccaacatgaaggccacgagcaacaccgagaccgagttcgccacgggccgagagccgaatgaattctcgcgaccgatgacgagcacccgagctggtttcatggaggccatgggttgcggtgtacacattctcatgagcgccaagacggacatcgagctcggtgcgaccgttcgaggtatcgtcgctttcact

SEQ ID NO: 152730 - DNA, 214 bp, Glycine max
attcttttctcttgtattggctcttttcttttcttctcttttatctttattcggatttgcctattgttgtgattcattggtttaattacgatcttcaaccgtttatatttgattctttcttgtgatctaaaaaaaaaaaaaaaaaaaaaaaaaaaaaaaaaaaaaaaaaaaaaaaaaaaagaaagaaaaaaaatatggataggaaaaactagaa

SEQ ID NO: 152731 - DNA, 117 bp, Glycine max
ttgcgcttcaaggcgtctcgtagggctaatccgcctcacgagggtcaccaacggcacgtgcctttggggggccgaggccccctactgctcggtcggccaaacggaccggacgggcgc

SEQ ID NO: 152732 - DNA, 263 bp, Glycine max
ctcgagccgctcgagccgcgctgatcaaacttcaaaccctagctaggatttcaaggtacactataacgatgacttcaaaacgcattactaaggagttgaaggatctgcagcaggaccctcctgtttcctgcagtgctggccctgttggtgatgacatgtttcattggcaagctacaattatgggtccaactgacagtccttatgctggtggtgtattcctggtgaccattcacttcccaccagattatccatttaagccacca

SEQ ID NO: 152733 - DNA, 261 bp, Glycine max
gcagtgggaggaggctcgggactctgaccgcgtgcctgttgaagaatgagccggcgactcataggcagtggcttggttaagggaaaccaccggagccgtagcgaaagcgagtcttcacagggcaattgtcactgcttatggacccgaacctgggtgatctatccatgaccaggatgaagcttgggtgaaactaagtggaggtccgaaccgactgatgttgaagaatcagcggatgagttgtggttaggggtgaaatgccac

SEQ ID NO: 152734 - DNA, 218 bp, Glycine max
ctgggcaaaaccatatttgagcgataaacgaagactgttcaggattatggataccaagttggagggccagtacccacaaaagggggccttcacggctgccacacttgctctacaatgcctaaacagtgaggccaaggcaaggcctccaatgacagaggttttagcaactctggaacagatagaggcccccaagacagcaggcagaaactcccattcag

SEQ ID NO: 152735 - DNA, 259 bp, Glycine max
accaccaccaccaccacctcgatttccgaaccttctagattcttcgatgcaaccacccccgccacttcatcgcgctccccaaagcgatccctccctctcgacgaggaatctcagacggaccaaacgacgtcttctgagcccaaacgcgccgtgaaccgctgctccggctgccggcggcgcgtgggactcacgggattccggtgccgctgcggggaccttttctgcgcagagcaccgctactccgaccgccacgactgct

SEQ ID NO: 152736 - DNA, 262 bp, Glycine max
aaccctctctttctctctcttccaaaacctaattttcattttttctcttcagacaaattttcaaaatgcgtgagatccttcacatccagggtggccaatgcggcaaccagatcggcgccaagttctgggaggtggtttgcgcggagcacgggatcgaccccactggaaagtacggtggggactcagagcttcagctcgagaggatcaatgtctactacaacgaagccagctgcggccggttcgtgccgcgcgcggttctcat

SEQ ID NO: 152737 - DNA, 261 bp, Glycine max
atcagcacaagttgttgatgagcaggtttaccctcatgttgcaactgggttctctgatacatctgcttttctgagggaacttactctcaagtccatgctaattctggctccaaagctgtctcaaaggaccttttcaggatcattattaaagcatatgtcaaagttacaggttgatgaagaaccagctatacgaacaaatactaccatcttattgggaaatattgcaagccacttaaatgaagggacaagaaaaagagtgtt

SEQ ID NO: 152738 - DNA, 251 bp, Glycine max
aacacaaagcattgcgatggtccctgcggatgttgacgcaatgtgatttctgcccagtgctctgaatgtcaaagtgaagaaattcaaccaagcgcgggtaaacggcgggagtaactatgactctcttaaggtagccaaatgcctcgtcatctaattagtgacgcgcatgaatggattaacgagattcccactgtccctgtctactatccagcgaaaccacagccaagggaacgggcttggcggaatcagcg

SEQ ID NO: 152739 - DNA, 272 bp, Glycine max
cagcatgatgagactgtcacaaatgatgagattgcagctgatcttaaagaacacgtgattaagcctgtgattcctgagaagtaccttgatgagaagaccattttccatttgaacccttctggcaggtttgtcattggagggccgcatggcgatgctggtctcaccggccgcaagatcatcatcgacacctatggaggatggggtgcacatggtggtggtgccttctctgggaaggatcctaccaaggttgataggagggtgcctacattgtg

SEQ ID NO: 152740 - DNA, 271 bp, Glycine max
gtggacaggttgaagtgggggaatgatttcttgaagaagaggttggagcctggttcacactcccaggttagtcctcaggcactggagagcatcaaaagggttaagaagttgaccaagatgtctgagaaggttgccactggtgtcctctctggggttgtcaaggtgtctggattcttcacaagttctgtagtcaactccaaagctggaaagaagttctttagccttcttccaggggaaattgtccttgctaccatggaggattcaataaggt

SEQ ID NO: 152741 - DNA, 261 bp, Glycine max
tcttcatcttgttctatctgtgacgagcatcatggcctcaagagcagtgttattgttggctatgtgtgtgcttccggcgatggttgtggccattcgcccagcaaagaaccctttttgcgtgaagggtcgtgtctactgtgacccttgccgtgctggttttgagacctcagctaccacctacattgctggtgctgagattatgttgcaatgcaagagcagggttagcaacgaggttgtgtacacgaagaaggggtacccgac

SEQ ID NO: 152742 - DNA, 199 bp, Glycine max
cacctttgttcactcttcttctcttgcggctagggttttagcgcacatcttctagatttaaggaagatgggtaaggaaaaggttcacatcagtattgtggtcattggccatgtcgactctgggaaatccactaccactggtcacctgatttacaagcttggaggcattgacaagcttgtaattcaaaggtttgagaagg

SEQ ID NO: 152743 - DNA, 266 bp, Glycine max
gccgcatcaccgtcaatctcatctggtacggcaccttcaccccgatccaacggtccataatcgtggacttcataaactcgttaagcagcgcgccaaacgcgcctctcccctcgaccgccacgtggtggaaaaccacggagaagtacaaggtgggaggaggatcccctgcgctcgtcgtagggatgcagttcctacacccggcttacacgctagggaaaaatctcaaaggaagagatctcctcgcactcgcgtcaaagtcaacgaga

SEQ ID NO: 152744 - DNA, 264 bp, Glycine max
attgatgcgaattcaacggtttacatagatgctggacacaatgggggcgagttggtctaccgtgtagaaaagaatggaggggttgttaatcctacaactgggcagaagtccgatatcttgattcagatacctaatggacatgcacctaaaactgatgctgttcaagcagtcaagacgatgaagattgaggaaattgatgatgatgaaatggaagagtgaattttatgatacaatgtaattagtttgatggcgcagtcctcttga

SEQ ID NO: 152745 - DNA, 267 bp, Glycine max
agactgtgaaactgcgaatggctcattaaatcagttatagtttgtttgatggtatctactcggataaccgtagtaattctagagctaatacgtgcaacaaaccccgacttctggaagggatgcatttattagataaaaggtcaacacaggctctgcctgttgctttgatgattcatgataactcgtcggaccgcacggcctttgtgccggcgacgcatcattcaaatttctgccctatcaactttcgatggtaggatagtggcctac

SEQ ID NO: 152746 - DNA, 268 bp, Glycine max
gattcgcacgcattgcttcgcctcacaacagcagctgcagcagcaatggctcccaaacgaggtggaaaggctccggctcttgccgctaagaagaagcctgagaaggtcacgaatccgttgttcgagaagcgtccgaagcagttcggaatcggaggggcgttgcctccgaagagagacttgactaggttcgtgaagtggccaaagaatgttcaaattcagaggaagaagaggattctgaagcagaggttgaaggttccccagctttgaa

SEQ ID NO: 152747 - DNA, 271 bp, Glycine max
ctgactgccaagcctgttgtatacttggttaatatgacagaaaaagattaccaaagaaaaaagaacaagtttctgcccaaaattcatgcatgggtccaagagcacggtggtgagactattattcctttcagctgtgccttggaaaggaatcttgcagatatgccaccagatgaagctgctaagtattgtgaggagaacaaaacacaaagtgctcttaccaaaataataaagactggattttcagctattaatctcattactttttcactgc

SEQ ID NO: 152748 - DNA, 264 bp, Glycine max
acattgtggtggttggtcatgtggaccctgaggaggcaaccaccattaacgagctgaagaagcctgttgtggagaaagaagctccagggcatgccatatgagggcatgcacgtacggcctcggaggggaaccagaaaattatgttaacaaaataatctggaaccctaatgtatcagtgtcatcatcatgtgtagtttaagctagctttgctatggttacgttccttgagatgagagtcttgatgaacagtacattctgatgtat

SEQ ID NO: 152749 - DNA, 198 bp, Glycine max
cactggcctcaaggcaagcgcaggcaaagtgagtgccgccgcagttaaagtctcagctccccaagccacaaggttctgcggcatcaaggcttccctcaaagacgttggagtcgctgttgtggccactgctgcgagcgcagttctagctagcaacgccatggccattgaagtgttactgggcactgatgacgggtctgt

SEQ ID NO: 152750 - DNA, 267 bp, Glycine max
catcaactactttctcgtctctgtgcttaagcttggaatcaaaggcattgccttaggcgctgtttggacgaattttaacctcgttgtttcgttgattctctacatatgggtctccggcgtatacaaaaaaacatggccaggtgtttcgttgaagggcatcttgagcggttggaaatcgcttttgaatttggcaattccaagttgcatttccgtatgcctcgagtggtggtggtacgaaatcatgattttacttgcgggttattgatt

SEQ ID NO: 152751 - DNA, 269 bp, Glycine max
aaggcacgcagcgagtttaggcgcggcgggatcatcacgagattgcaaaatgaagttcaacattgcaaatcccaccactgggtgccagaagaagctggaaatcgatgacgacctgaagcttcgggcattttgggacaagaggatctcccaggaggtccttggtgacgccctgggtgaggagtttaaaggatatgttttcaaaatcactggtgggtgtgacaaacaaggattcccaatgaagcagggagtgttgaccctggtcgtgttcg

SEQ ID NO: 152752 - DNA, 249 bp, Glycine max
aattgctggaggctttgctggtgcgctttctaagactaccgttgcacccctcgaacgggttaagatactttggcagacaaggacaccaggatttcattctcttggggtgtaccaatctatgaataagttactaaagcatgaaggttttctaggattatataagggaaatggagctagtgttatccgcattgttccatatgcagccttgcattttatgactcatgacgctacaaaagttggatcttgaat

SEQ ID NO: 152753 - DNA, 267 bp, Glycine max
atagcccaagccctatacaaccaaaccctaacacacacccatttgattcagtttccatggctagcctcaaggttgcatttttggctgcagtgctctgcatggttgtggtgagtgcacccatggcacatgcagctatcacgtgcgggcaggtgacgaatagcctgatcaattgcatcggttacctccagaacggaggaacgccgccgtcgggatgctgcaacggagtgaagagcctcaatgccgccgccaagaccccgccgaccgcca

SEQ ID NO: 152754 - DNA, 266 bp, Glycine max
gttggcgctaacattttgttgggtggggccttctccggagcagccatgaaccctgctgtgacatttgggcctgctgtcgtgagctggacctggaccaaccactggatctactgggccggccctctcatcggaggtggaattgctgggcttatctacgaggttgtcttcatcagccacacccacgagcagcttcccagcactgactactagaggggaaaaatgaaataataaaaaaaaaaaaatgggtattatgaattcctccggaa

SEQ ID NO: 152755 - DNA, 269 bp, Glycine max
gaggaatcagagggcaaattgaagggtattttgggttacacagaagatgatgttgtgtctactgattttgttggtgataacaggtctagcatatttgacgccaaggccggaatttctttgaatgacaactttgtaaaacttgtttcctggtatgacaacgaatggggttacagttcccgtgtgattgatttgattgtccacattgcatccgtggcttaaagaattgagtctgagcttggatatcatcgctacaccttccaaatttttat

SEQ ID NO: 152756 - DNA, 269 bp, Glycine max
ggtggatacctaggcacccagagacgaggaagggcgtagtaagcgacgaaatgcttcggggagttgaaaataagcgtagatccggggattcccgatataggtcaacctttcgaactgctgctgaatccacgggcaggcaagagacaacctggtgaactgaaacatcttagtagccagaggaaaagaaagcaaaagcgattcccgtagtagcggcgagcgaaatgggagcagcctaaaccgtgaaaacggggttgtggagagctatacaa

SEQ ID NO: 152757 - DNA, 224 bp, Glycine max
gggatttccatggaagtctcaaaagaagaagctcgagtggcacccgcaccggccctagtggcgatgctgccatcccctggcatgggccacctaatcccaatgatcgagttcgcaaagcgagtggtgtgctaccataacctggcggtgagcttcgtgatccccactgacggcccaccttcaaaagcccaaaaggcagttctggaggcccttccggactcaatttc

SEQ ID NO: 152758 - DNA, 264 bp, Glycine max
agctcgactacttgggcaacccaagcctgatccaaggccagagcatcctcgccatctgggccacacaagttatcctaatgggtgccgttgaaggttaccgtattgctggtggccccctcggtgaagtcactgacccaatctacccaggtggcagcttcgacccattgggccttgctgatgacccagaggcttttgctgagcttaaggtgaaggaactcaagaacggccgattggccatgttcccaaggtttggctctttgttca

SEQ ID NO: 152759 - DNA, 264 bp, Glycine max
gtgttagtgagagaaagttctctctctttgactcacaaccctattgcgtgctttgcaatcgaccccgcttatggccaacagtaacctccctcgaagaatcatcaaggaaacgcagcgtttgctcagtgagccagcgcctggaattagtgcgtccccttcggaggacaatatgcggtatttcaatgtgatgatccttggcccgactcagtcgccatatgaagggggagttttcaagttggaattatctttgcagaagaatatcca

SEQ ID NO: 152760 - DNA, 265 bp, Glycine max
gctaagtgtgagagaaagaaaatgccaaagtctcaatttcgaaccccatttcttgtttctttttctcttttgttattcatcttcaacctcaccccttcatacgcactctatggagcatccacacccgtgcttcaactcactccctctaacttcaagtccaaggttctgaattcaaatggagttgttcttgttgaattctttgctccatggtgtggacactgtcaggctctgactcctatatgggagaaggcactactgtgttgaa

SEQ ID NO: 152761 - DNA, 227 bp, Glycine max
gaactcattggcaaggggaccttgaagcattttaagattgatgatgttagtgttatacatcttgatattggtgagacagttgagaatcttgagactgtggatatcagcaacttcccaattatatggccaaagttttaccagatgatttcaagatcgtcgaatttgaagaggcttcggctttgggatgtaatgtttgatgatgaggatgaggtggtggatttgggaac

SEQ ID NO: 152762 - DNA, 234 bp, Glycine max
atcacttttgtctgcattacacctgagcctcagatctcatctcttatccacaaaaccatggctctgaaggtgaccatcatgaaactcaaggttgatcttgagtgtgagaaatgctacaagaaggttaagaaacttctcggcaagtaccctcaaattcgggaccagaagttcgatgagaaggagaacattgtgttcatcacagtggggtgttgcagcccagaggagataagagac

SEQ ID NO: 152763 - DNA, 264 bp, Glycine max
gtttagtttgatcattctttgaaattcaacctagtactgattatgaaactatatgttaaaaaaatgatgaaattgcgttcagttcccagaagaatggatcactcttgggaagcacaaaagcttcttttcttagtgggaggaaactgaaggtgaacaactttacagcaccagttggagcacgatccagcactacagtttgcgcagttgctgagcctgataggcctctgtggttcccaggcagcacccctcctcatggctagatgg

SEQ ID NO: 152764 - DNA, 263 bp, Glycine max
tatggctattacctgtggtaatacctttgttctaaaaccatcagagaaagacccaggtgcttctgtaatgcttgcagaattggcattggaggctggtttgcctgagggtgtcttaaatatagttcatggaacccatgatattgtgaatgctatttgtgatgatgacgacatcaaagccatatcctttgttggttcaaatgttgccggaatgcacatatattcaagagcagcagctaaagggaaacgcgttcgtctaacatggg

SEQ ID NO: 152765 - DNA, 263 bp, Glycine max
ggagatgctcctttcctttgctactgaatgtgcaaattctgttattcctgcttatttacctatcatagagaaaaggaaggatttgcccttcaatgatcatcagaaagcatggcaacaattgcgaaggggacgatatgttgaattcaatttggtatatgataggggtacaacatttggactgaaaactggagggagaatagagagtatacttgtttctctcccactgactgctcggtgggaatacgatcaaaaccggaagaagg

SEQ ID NO: 152766 - DNA, 262 bp, Glycine max
cgcgtcgctccgcaccagtttcaccgcacgaatatcttgttgtttggagcgatccgagaaaaactctgtaaacatgttggtttaccaggacctccttacaggtgatgagcttctctctgactccttccgttacaaggaaattgagaatggaatgctgtgggaagttgaggggaagtgggttgttaaaggagcagttgatgtagacattggtgcaaacccttctgctgagggtggaggagaagatgaggagttgatgatgcag

SEQ ID NO: 152767 - DNA, 265 bp, Glycine max
tctccctctgcgcaggaattgggaacattcgacaggtagagtttcttcaatggctcctaaagttgataagaagaacgacccaaaggcacaggccttgaagactgctaaggcagttaagtctggtgctacctttaagaagaaggcaaagaagatccgaacttctgtcactttccacagaccgaggacatagaagaaggataggaaccccaactaccctcgcattagcgcgcctccaagaaataagcttgatcatatcagatctgaa

SEQ ID NO: 152768 - DNA, 240 bp, Glycine max
agagtgtgaactgcaaagggcttctccagcctagtttgttctcagatcttcttcttccatggaccagtacgagcaggtggagaagataggcgagggaacatacggcgtcgtttacaaggctcgcgaccgcgccaccaatgagacaatcgctctgaagaagattcgcctcgagcaggaggacgaaggcgttcccagcaccgccattcgcgagatttctcttctcaaagagatgcagcatag

SEQ ID NO: 152769 - DNA, 259 bp, Glycine max
ggagcagcagaagcaggtcattgtggagaagcttggtgagccagcccaaggctatgaagatttcactgccagccttcctgctgatgagtgccgttatgctgtttatgattttgagtatctgactgaagggaatgtccctaaaagcagatttttttccatggattgtccccttaaacatcaagggttaaggagcaagatgatctatgcaagctccaaagacagattcaagaggaacctggatggaatcaagtagagctgc

SEQ ID NO: 152770 - DNA, 262 bp, Glycine max
gggagtcagagaaaccctaggtaagaagaaaagatgccggctggtcatggtttgagatcccgcaccagagattccttctctcgtcctttcaggaagaagggaaccatcgccctcaccacatacctgagaacctaccacgtcggcgactatgttgacgtcaaggttaacggtgccgttcacaagggaatgccccacaaattctaccatggccgcaccggacgcgtctggaatgtcaccaaacgtgctgtggcgtcgaagtcaa

SEQ ID NO: 152771 - DNA, 275 bp, Glycine max
gtgagtgtttaccctcgagaagtacagcctgagaaccccaacagctatagagcaaggaagagagagtacttcacgggtgaggcgtgaacgcaaaaaagctagacaaggagcaatacttaaatcccaactcgtgctggcttccgctgatgatgcagcaatcactaatccaatgtgttgactcttattcaatcgcttaaatgtgtaaaataccccgctcccaattttttgcttttgtgtacctgtaaaacctttagcattgttttgagttttattga

SEQ ID NO: 152772 - DNA, 277 bp, Glycine max
gtcgtcgatgtcggcggcggcaccggtttcaccactcttggtattgtcaagcatgtggatgccaagaatgtcaccattcttgaccagtcaccccaccagcttgctaaggccaagcagaaggaaccactcaaggaatgcaaaataatcgaaggggatgccgaggatctcccctttcgaaccgattatgccgatagatatgtatccgcgggaagtattgaatactggccggatccacagcgtggcatcaaggaagcttacagggttttgaaacttggag

SEQ ID NO: 152773 - DNA, 263 bp, Glycine max
tattcaatggccaccacagcagctctatccggaaccatggtgagcacctccttcatgaggaagcaacctatgacgaccaagagcctaaagacattccccaacgctctttttggtctgaaaggtggacgaggtggtcgtgtaacttgcatggcctcgtacaaggtgaagctcataaccccagaaggagaagtggagtttgaatgcccagatgatgttttcattgttgacaaggctgaggaagaaggcattgaacttccctactc

SEQ ID NO: 152774 - DNA, 263 bp, Glycine max
aatgagggcaatgactgaaatgaatggtgtttattgttctagtaggcccatgcgaataggtgttgcaactcccaagaaaacttatggctaccaacaacaatattcttctcaagctgtgctattggccggtggacacgcagctaatggtgctgtggcccaaggttcccattctgaaggggatttaaacaacaccactatatttgttggagggcttgattctgacaccagtgatgaggatctcagacaaccatttttgcaatttg

SEQ ID NO: 152775 - DNA, 262 bp, Glycine max
ctcgagccgcgatccgggcggaagacattgtcaggtggggagtttggctggggcggcacatctgttaaaagataacgcaggtgtcctaagatgagctcaacgagaacagaaatctcgtgtggaacaaaagggtaaaagctcgtttgattctgatttccagtacgaatacgaaccgtgaaagcgtggcctatcgatcctttagtccttcggaatttgaagctagaggtgtcagaaaagttaccacagggataactggcttgtg

SEQ ID NO: 152776 - DNA, 261 bp, Glycine max
gtaagtatgaactaattcagactgtgaaactgcgaatggctcattaaatcagttatagtttgtttgatggtatctactactcggataaccgtagtaattctagagctaatacgtgcaacaaaccccgacttctggaagggatgcatttattagataaaaggtcaacacaggctctgcctgttgctttgatgattcatgataactcgtcggatcgcacggcctttgtgccggcgacgcatcattcaaatttctgccctatca

SEQ ID NO: 152777 - DNA, 267 bp, Glycine max
cggctcgagcggctcgagaggagcccttacaccttgcagaatcatctctacattcccaagggctcctactacgcaataactccaagcccgatctcaaattaatatttcatttactcatcttaatcaatattaaataagaaaagatgggagagatgtcaaacttccaattgggtgtgattggtgcactatttctctctgtggcttcttctgtctccattgtcatctgcaacaaagccttgatgagcaatcttggcttcccttttgcca

SEQ ID NO: 152778 - DNA, 267 bp, Glycine max
atggtactagggaagctaagtggacgccaagctttgaaaagtcgtctcaaagagcttggctatgaacttagggatgaagaagttgagagtgtgtttaggaacttcacagcaatagccgagaaaaaaaagagagttaccgatgttgacctcacaatatggtgtcaaatcaagtttctcatgatgaacctatttggaaacttgatggtttgcaggtgacttgtggaactatgggttcttcaacagcaactatcaaacttgtcactagtg

SEQ ID NO: 152779 - DNA, 263 bp, Glycine max
cttttgttactttgaagctggagaaaacaaacaagccctagttcaattggtaacatgtgagaggtgtgcattcaaactcaactacaagaggcaaaaagaaaaggagctgttagaaaaaagacaagaagaacaggatagacgaaagaggaatcgttcaaagagtgatgatcatctagatgacttccaagaaagcaaagagagaaggcggaaagggaaaaaggctttgacttcagccagtgatcataaaattgatgacgatgatg

SEQ ID NO: 152780 - DNA, 259 bp, Glycine max
tctattccctggttttgcttcagaaagcctttctgaagttttctttgccaatggatgcgatttacatctgacaattgagatgctcactcagttagagattcaagttgacagtagcttcaatcagaatccgagtccaaagactctgtcatctccgaatctgagtgcaatggactttccagctcttacttcatcaaatggccagaatgcttcaaaatatgctgcagataacgttcaacaaagtggcaatccttacttatca

SEQ ID NO: 152781 - DNA, 249 bp, Glycine max
attgtttcctctttgtttcctgttggattgcccaatacttcccgataggggaaagagatactccatttgtgctatatttatggtatgtttttatttgtgtggtgtctggaaatggcctatttcattcccaatccgtttcctccagtctctgggggatttgattgatgagaattgcttatggtgggtgtatttccttttccaatgaaatgctacaacatttactgcaaaaaaaaaaaaaaaaaggggggg

SEQ ID NO: 152782 - DNA, 261 bp, Glycine max
ctcgagccgcttaccaggtccagacatagtaaggattgacagactgagagctctttcttgattctatgggtggtggtgcatggccgttcttagttggtggagcgatttgtctggttaattccgttaacgaacgagacgtcagcctgctaaatagctatgtggaggtaaccctccacggccagcttcttagagggactatggccgcttaggccacggaagtttgaggcaataacaggtctgtgatgcccttagatgttctgg

SEQ ID NO: 152783 - DNA, 261 bp, Glycine max
gaagaaggctcaggaagcccttttggtaagagccaaggccaactcagaggcaactctgggaacctacaagggtaactcaaagcttgctgatggtgcctcagagagcctccatgttgaggactacaagtactgatcaatctaagtgcgggtaggaatcggtattttatgggtacaaccgaattttcttgttaatgagtattgtgcttcgactcttcccagaataataatcgtttggaattttgctttttgtttttcctagtg

SEQ ID NO: 152784 - DNA, 261 bp, Glycine max
cggctcgagcgcatcttctctctctctcagaaagatgaaggtggtcgccgcgtatttgctcgccgtcctcggtggcaacaacagcccctccgccgatgtcatcaaggaaatccttggctccgttggagtagaagcagatgaagataggattgaatcgtttttgtctgaagttaagggtaaggatatagttgagcttattgctgccggtagggaaaagttggccacggttccttctggtggtggtggtgccgttgccgtcgc

SEQ ID NO: 152785 - DNA, 262 bp, Glycine max
ccaagggtggcttcagttttgatctatgccgaagaaacgcaatgcttcaaaacaagggtgctcaaagccccaacctttctcaaaactggcaccactattgtcggtttagttttccaggatggtgtcattcttggtgctgatactagggcaactgaaggacctatagtggctgataaaaactgtgagaaaattcattatatggcacccaacatatattgctgtggagcaggcacagctgctgatacagaggctgtaacagaca

SEQ ID NO: 152786 - DNA, 272 bp, Glycine max
gtgagtgtttaccctcgagaagtacagcctgagaaccccaacagctatagagcaaggaagagagagtacttcagggtgaggcgtgaacgcaaaaaagctagacaaggagcaatacttaaatcccaactcgtgctggcttccgctgatgatgcagcaatcactaatccaatgtgttgactcttattcaatcgcttaaatgtgtaaaataccccgctcccagttttttgcttttgtgtacctgtaaaacctttagcattgttttgagttttatt

SEQ ID NO: 152787 - DNA, 266 bp, Glycine max
aaaggattctacccgccgctcgatgggaattgcgcttcaaggcgtctcgtagggctaatccgcctcacgagggtcaccaacggcacgtgcctttggggggccgaggccccctaactgctggtcggcaaacggacggcgggcgcacgcgtcgcttctagcccggattctgacttagaggcgttcagtcataatccaacgcacggtagcttcgcgccactggcttttcaaccaagcgcgatgaccaattgtgcgaatcaacggttcct

SEQ ID NO: 152788 - DNA, 203 bp, Glycine max
atcgagataactagaaacagtgtgatgaaaatgaaggtccttgttttcttcgttgctacaattttggtagcatggcaatgccatgcgtacgatatgttccctctccgaatgaacactggctatggtgcccgtactccggaggtgaaatgcgcaagttggaggcttgctgtggaagcacacaacatctttggctttgagaccat

SEQ ID NO: 152789 - DNA, 260 bp, Glycine max
caacaagacgcagcttcaagagctgcaatggaaaatggaaccgaggaagggcttggagactcagctgaatcagcccctattgcctttgctcaagacatacaaatggaggaaaggcctgaacctgttaggaacaacctgcctcatggtactcggcgctaccaggatcagatggtcccaagtatcacatcttcccatgtgagagttgaagaggaagaaacatcttcagaccttcgaaactcggctacagacagcagggccga

SEQ ID NO: 152790 - DNA, 263 bp, Glycine max
tttaattagaaaaggcgcagaaacagaaacagaaagaatggctggtcccggcaaatgcttcctcgtgacgggtcctccgggtgtgggaaaaaccactcttattatgaaagtattcgagtccctcaaagtcaatccatccctcaagcttcagggcttctacactcgggaaattaggcgcgccggccagagggttggttttgaagtggtcacactcgacggtcgcactgccccacttgcttccatcgacatttcaacccccgagt

SEQ ID NO: 152791 - DNA, 256 bp, Glycine max
cctgaacttgctagattaccaactgaatggatacaccatccatggaatgcaccggagtctgtactccaagctgctggcattgaacttggttcaaattatcctcttccccttgtgggaatagatgcagcagaagtaagacttcatgaagcacttattcaaatgtggcaacaagaagcagcttcaagagctgcaatggaaaatggcacgaggaagggcttggagactcagctgaatcagcccctattgcctttccaca

SEQ ID NO: 152792 - DNA, 259 bp, Glycine max
ctcgagccggtcgcaccttttcctcttctctctctttctctctttctagttcgtgttcttcgtcgcaaatccgaagtaggatctctcttgttttttctctaggtttttcgcgatggcgtcgaagcgaattttgaaggagcttaaggatttgcagaaggatcctccaacatcttgcagtgccggtcctgttcatgaagatatgtttcattggcaagctacaattatgggtcctccagacagtccctatgctggaggtgtt

SEQ ID NO: 152793 - DNA, 263 bp, Glycine max
gaaaagaaaaagagacaccacaacacaagactcattcttcctcattccgaaaaatggcgtctttgcagcaccccacagcttccctccaatccaaacacatcctaatcccccgaaataccctctcccagaaacccatcctcaacctctccctccatggtaccaccttcacccccctcaagctcaaattcggcgttaccaccaccaccaccgccgccgccgccacccgccgctccaccggcgccacgggagccagaatgtcagct

SEQ ID NO: 152794 - DNA, 264 bp, Glycine max
ccaacccctcgcagctgccgccaagctcggccccgccgccgtctccttcagcatatggccccccactcagcgcacgcgcgacgccgtcatcactcgcctcatcgaaaccctatcctccccctccgtcctctccaagcgctacggcacaatgtcccccgacgaggcctccgcctccgcccgccagatcgaggacgaggccttctccgtcgccgccagctccgccgcctccgacaatgacgggatcgagatcctccaggtctactc

SEQ ID NO: 152795 - DNA, 255 bp, Glycine max
gtccctgtctactatccagcgaaaccacagccaagggaacgggcttggcggaatcagcggggaaagaagaccctgttgagcttgactctagtccgactttgtgaaatgacttgagaggtgtaggataagtgggagctggaaacagcgaaagtgaaataccactacttttaacgttattttactttttccgtgaatcggaagcggggcactgcccctctttttggacccaaggtcggcttcggccggtcgatccgg

SEQ ID NO: 152796 - DNA, 258 bp, Glycine max
aaagaaactctctctttcacgaaacgtgttgtgctcaaaatgcaatgggaagggctcaaagtctggggcttcaatgacctgtgctggttgccagggtactggcatgaaggtgtctattaggcaccttggtccttctatgattcagcaaatgcagcatccttgcaatgagtgtaagggtactggagagacaatcaatgacagagacaggtgccccccctgcaagggagagaaggttgttcaggagaagaaagtacttga

SEQ ID NO: 152797 - DNA, 260 bp, Glycine max
  unsure (1)..(260): unsure at all n locations
gccctaaccaagttttaagtttntctcaacagaatggaagcaaccaacagaagctcttcctccacttcctccttcctctgattgctgctcttccgagtccaaccccaacaagcccgacagaatcaaaggcccatggagcgccgaagaggatcggatcctgaccggactcgtcgaacgatacggcccacgaaattggtccctcatcagccgctacattaagggaaggtccggcaagtcatgccggctccgatggtgcaatc

SEQ ID NO: 152798 - DNA, 259 bp, Glycine max
atcaaattagttcattctctttgcgcagttccctacctctcctttcaagatgcagatcttcgtcaagaccctcaccggaaagaccatcacccttgaggtggaaagctctgacaccatcgacaacgtcaaggccaagatccaggacaaggaaggaattcccccggatcagcaacgtctcatcttcgccggaaagcagctcgaggacggccgtaccctcgccgactacaacatccagaaggagtcaactcttcaccttgtc

SEQ ID NO: 152799 - DNA, 258 bp, Glycine max
cttcttcgctgtttcctcatggaaacaggcatgggaatgccgtggtctctgtgaaggcctctgcttctggggttgtgttggtggagaagtctgaggcagagaaggccaataggctcaaaacagcttacactgagaaaattattcccttgctcatggaagagttctcttacaccaacaaacaccaggtgcctaaaattgagaagattgtggtgaactgtggtattggagatgctgcgcaaaatgcaaagggtttggacg

SEQ ID NO: 152800 - DNA, 109 bp, Glycine max
  unsure (1)..(109): unsure at all n locations
agggagganacagcannaacganctgaagaagccagtttcggagaaagaagctccaggggaggggagaggagggcaggcacgtacggcctcgcgaggggaaccagaaaa

SEQ ID NO: 152801 - DNA, 257 bp, Glycine max
  unsure (1)..(257): unsure at all n locations
agagagtgagagagggagatggggagcgacagcgcnggcagagaagtcggtgcagaaagagaaggagaagaagaagatgttggccctggctcccattgctaaacctcttgctgggaagaagctttgcaagcgaaccctaaaacttgttcgtagagctgccgaacacaaatgcttgaaaagaggagtgaaggaggtcgttaaaagtataaggagaggtcataaaggattgtgtgtgattgctgggaacatatcaccgc

SEQ ID NO: 152802 - DNA, 260 bp, Glycine max
gtatttggagtgccttgccaagggaaagacctctgatgccattaagaagctagtggaacttactcctgcaacagctttattgattgccaaagataaaggtggtagaactgttgaagaaagggaaatagattccttgctcattcaacctggtgacacattaaaagttcttcctggtacaaagattcctgctgatggtattgttacttggggctcaagttatgtaaatgagagtatggtgactggtgaatctatacccgttt

SEQ ID NO: 152803 - DNA, 260 bp, Glycine max
caggggcctgttaaattggtcggaacagttgctatgccaatgctgtcttgcattgcttaacttctacaaagcctctagtcttctattggctttatagatcgcactcaaaagcttgttgtgctaaagattggtctctcatgtgtgagttagaccaacacataatgattgtaagagaaaatggggctcctctatctccgagtcggatactttggcatatgcggagcattaactgccatatgggtgaaggaagtcaggaagat

SEQ ID NO: 152804 - DNA, 262 bp, Glycine max
ctaaaatccaagacaaggaaggcattccaccggatcagcagcgtttgatcttcgccggtaaacaactcgaagacggcagaactctcgccgattacaatatccagaaagaatcgacgctccacctcgtcctccgccttcgcggtggcatgcaaatcttcgtcaaaaccctaaccggtaaaacgattacgctagaggtcgagtcctctgacaccatcgataacgtgaaagctaagatccaggacaaggaaggcattccaccaga

SEQ ID NO: 152805 - DNA, 257 bp, Glycine max
ttgtccttgcggtcctcacttttgatgggaagaggctactgagaattaatggtccagatgcgactatagtgctcaacactttgatattcaactcctttgtattttgccaggttttcaatgagataaacagccgagaaatcgaaaagataaacatattcaaaggcatgtttgagagctggatatttttcacggtgatattctccacagtggtgtttcaagtactcatagttgagttcctgggaacatttgccagcaca

SEQ ID NO: 152806 - DNA, 255 bp, Glycine max
cggcagtgaagttattagaatctgtgttgtgttgtgttgtgttgagcagagagagagagtgagggataagaagagaatagggttagggttagggttagggttagggtttgattgaggatgccgaagaacaagggaaagggaggtaagaacaggaagaggggaaagaacgaggcggacgacgagaagcgggagctggtgttcaaggaggacaggcaggaatacgcgcatgtgctccggatgctggggaacgggcgg

SEQ ID NO: 152807 - DNA, 241 bp, Glycine max
aaaatgccttacactctgctctatccttctagtgaggagggattgactttcagaggaattcccaacagtatctctatctaaggaccctatggttgcttaagtactgttcctggttttaaataaatgtgaaattgaaggaaccagattccttaatcagttgtgtatgcttaagtcatgtatttggagtggctgaatgtatttgtatacccaattaataaagagagttgtgttagtataatgg

SEQ ID NO: 152808 - DNA, 257 bp, Glycine max
ggattctacccgccgctcgatgggaattgcgcttcaaggcgtctcgtagggctaatccgcctcacgagggtcaccaacggcacgtgcctttggggggccgaggccccctactgctggtcggcaaacggacggcgggcgcacgcgtcgcttctagcccggattctgacttagaggcgttcagtcataatccaacgcacggtagcttcgcgccactggcttttcaaccaagcgcgatgaccaattgtgcgaatcaacgg

SEQ ID NO: 152809 - DNA, 266 bp, Glycine max
gataatccatcacttattgggactaattcatttactgccactaatgaatcacaacaagctatgggccctactctaaattctcgcacaggcccagcaagtgcaatcaatgtcaatgatagcaagacgcacaaaaaggatgatgcagcaacatttaacttgtctaagaggttgtcttgtaagtggaccactggggctggacctcgtattgggtgtgtccgtgactatcctgaacatttgcaatcgagggcgttggaacaggtcaattt

SEQ ID NO: 152810 - DNA, 247 bp, Glycine max
ctacttttcacggtatttgacttattccgtgaatcggaagccgggcactgcccctctttttggacccaaggtcggcttcggccggtcgatccgggcggaagacattgtcaggtggggagtttggctggggcggcacatctgttaaaagataacgcaggtgtcctaagatgagctcaacgagaacagaaatctcgtgtggaacaaaagggtaaaagctcgtttgattctgatttccaggacgaatacg

SEQ ID NO: 152811 - DNA, 251 bp, Glycine max
gttctgttcaaaaacctcgtccgagaacttgtatagagaaggatttcccgcggcgcacagttcttccataccaacttagcagcccggcgctgctattggcataacaaccggtacaccataggttggcccaacccagtcctctcgtactagggttggctcctcgcagttctccctttaacaccaacggtagataggaaccgaactgtctcacgacgttctaaacccaactcacgtaccacttgaatcggcga

SEQ ID NO: 152812 - DNA, 252 bp, Glycine max
gaaacttaatcgatcatcacttcacttcactaatacatcatggcagacgagacccagaacaagtatgagagctctgaggttgaggtccaggatcgtggtgtttttgactttctcggtaagtaaaaggatgaagaagacaagcctcatcctcaggaggaggtcatcgccaccgagtttcaaaaagtcactgtctcagaccaaggagagaacaagcacagcctcttagaaaagcttcaccgatctgacagcagc

SEQ ID NO: 152813 - DNA, 258 bp, Glycine max
tcgagtccttgcggtcctcacttttgattggaagatgctactgagaattaatgtgccagatgctactatagtgctcagcactttgatattcaactcctgtgtattttggccaggttttcaatgagatatacagccgtgaaatcgtaaagataaacatattcaaaggcatgtttgagagctggatatttttgaccgggatattctccacagtggtgtttcaagtactcatagtttagttcctggggacatgtgccagca

SEQ ID NO: 152814 - DNA, 253 bp, Glycine max
ccgcctcctccgcctgagccggagcccaagccacagccacaggttacggaggatttggtgaatctgagagacgacgcagtcactgcagatgatcagggaaataaatttgctttagcactctttgctggtgcacctgctaataatgcaaatggatcatgggaagccttcccgtcaaatggacagccagaagtgacttcagcctggcaaaccccggcagcagagcctgggaaagctgattgggaattggcattgg

SEQ ID NO: 152815 - DNA, 254 bp, Glycine max
ctcgagccgctcgagccgctgagtttgcacactgcataccttatcactgccgaattcgaagttaatttgcacagatggctaaggagaaggctcagatcaacattgttgtggtttggcatgtggaccctgaggaggcaaccaccagtaacgagctgaagaagcctgttgtggagaaagaagctccagggcatgccatatgagggcatgcacgtacggcctcggaggggaaccagaaaattatgtgaacaaaataa

SEQ ID NO: 152816 - DNA, 267 bp, Glycine max
caggcgcgcaaattacccaatcctgacacggggaggtagtgacaataaataacaataccgggctcattgagtctggtaattggaatgagtacaatctaaatcccttaacgaggatccattggagggcaagtctggtgccagcagccgcggtaattccagctccaatagcgtatatttaagttgttgcagttaaaaagctcgtagttggaccttgggttgggtcgatcggtccgcctccggtgtgcaccggtcggctcgtcccttctg

SEQ ID NO: 152817 - DNA, 264 bp, Glycine max
attgaagctaggggtgtgtgctgatgttctaggacttcttaatgttgttgttggttcccctgtctctagcaagtgttgtgcattgcttgaaggtttggctgattcggaggctgcactttgcctttgcactgctattaaggccaatgttcttggaatcaacttgaatgtgcctatcacactcagtgtgctactcagtgcttgccaaaaaactgttcctgctggcttccaatgtgcatagaactccatcacatgctaggttcattc

SEQ ID NO: 152818 - DNA, 256 bp, Glycine max
atttggtttgcctccaaggtatcgagattctgttagggctataacacctgggttaccattatttctttataactatactactcatcagctgcatggtatttttgaggcagcaagttttggtggctctaacatagatccaactgcctgggaggataaaaaatgcaaaggcgaatcaaggtttccagctcaggtaagaatccgtgtcaggaagctctgcaaggcattggaagaagattctttcaggccagtattgcat

SEQ ID NO: 152819 - DNA, 248 bp, Glycine max
gcatttttcgctgcagtgctctgcatggttgtggtgagtgcacccatggcacatgcagctatcacgtgcgggcaggtgacgaatagcctgatcaattgcatcggttacctccagaacggaggaacgccgccgtcgggatgctgcaacggagtgaagagcctcaatgccgccgccaagaccaccgccgaccgccagacggcgtgcaactgcctcaagtcggccgccagccaaatctccggcttcaaagc

SEQ ID NO: 152820 - DNA, 270 bp, Glycine max
caagagattcaagaccggcatggctaatgaagaggaacagaaaaaccacctcttcggcatcaaagatctcggtcacaagactctccttcagagtgatgcactctatcagtatatacttgaaaccattgtctatccaagagagcacgagtgcttgaaagagatacgcaagatgactgcaaaacacccactgaacatcatggcaacaccagcagacgaaggacaacttctgagcatgcttgttaagctcacgaattcaaagaacgccttgga

SEQ ID NO: 152821 - DNA, 233 bp, Glycine max
gcttccgggtggggcatggactgccacgtagcggcaggctccgccgggtcgaggtgctccgcgtgcttcgggccgcggctcggggtttccacaccgtcgatcatatactacgatgccgtgtgctactccaacgtgcagggaagtctgaacacgacgattcaattgaatgcgacgaagaaagtgcagcggcatggcatgctggatgctatacctgaagatgaagcgatgatggt

SEQ ID NO: 152822 - DNA, 259 bp, Glycine max
acaatgtgctaatctttgatgatgatgttgctaaaattgcagattttgatttatcaaatcaggctcctgacatggctgcacgtcttcattctactcgtgtccttggaacctttggttatcatgctccagaatatgcaatgactggacaattgaatgctaagagtgatgtatacagttttggcgttgttcttctggaacttctgactggaaggaaacctgttgatcatacactaccacgtggacagcagagtctggttac

SEQ ID NO: 152823 - DNA, 250 bp, Glycine max
cgtatcacgtgtatgcgatggggaggatggagagtatttgaggtcaggattgggcggagtttaagccagaaagatggttggagaaggttgaaacgggaaagtggaagtttgtgggaagggattcgttcacttatccggtgtttcaggctggtcccaggatttgtttggggaaggaaatggcatttatgcagatgaagaggttggtggctgggattctgaggcgcttcacggtggttccggcaatggctaa

SEQ ID NO: 152824 - DNA, 250 bp, Glycine max
gatcgcacggcctttgtgccggcgacgcatcattcaaatttctgccctatcaactttcgatggtaggatagtggcctaccatggtggtgacgggtgacggagaattagggttcgattccggagagggagcctgagaaacggctaccacatccaaggaaggcagcaggcgcgcaaattacccaatcctgacacggggaggtagtgacaataaataacaataccgggctcattgagtctggtaattggaatg

SEQ ID NO: 152825 - DNA, 204 bp, Glycine max
aaaaaaaaaaaaaaaaaaaaaaaaaaaaaaaaaaaaaagggggggaaaaaaaaagagagaagaagaggcccggggaaaaatccgagaaagagaacaaggagggaagaaagatgcccagaaagggagcagaaaagaaggggggggaaaagggggaaaaaggcgtgccgggggaaaaagggagaggggagaaaaagcacgaagaaa

SEQ ID NO: 152826 - DNA, 269 bp, Glycine max
  unsure (1)..(269): unsure at all n locations
tgtncgggcaaaggattctacccgccgctcgatgggaattgccttcaaggcgtctcgtagggctaatccgcctcacgaggtgcaccaacggctactgtctttggggggccgagggccctactgctggtcggcaaacggagggcgggcgcacgcgtctcttctagcccggattctgacttagaggcgttcagtcataatccaacgcacggtagcttcgcgccacttgcttttcatccaagcgcgagacccagttgtgcgaatcaacggtt

SEQ ID NO: 152827 - DNA, 252 bp, Glycine max
ccacacaagccacaaaaaaagacaagaaagcaaaaaaccagccccacaagggtgccgacggacagggaggagaggaccaacgcaacgggggtggcgccgcgcgccgcgcccgcgccccccccgcgccggcccgggccgcccggccgggcccccccccccccccccccgtgtgcttgcgcctcccccccgcgcccccccccccccccccccccccccccccccccccggcgcccccccccccccccccccccc

SEQ ID NO: 152828 - DNA, 162 bp, Glycine max
aatggagcgatctcctcggaggccacagaggcgaaagccggacctttaagcttcctaatcccctgtactacattcagtagttccttcacctctcaacaatctagcttgctcctatctatctatatgtaataagatgcgttcaaataggggcactagcttcac

SEQ ID NO: 152829 - DNA, 268 bp, Glycine max
gcaccctcggcgacaccgtcatcggcaccgtccatgttcctctcagggaactcctggataaccccggcgatgacagctccttccgccaagtcagttatcaggtgatgaagcaatcaagaaaatccaagggatccttgaatttctcctacaaattcggcgaacatgttcccgccccggccgccaagacacccaaagcggccaaggcgggacaagagccggtgatggcttatcctcctgctggggcgggatccagttcgatgccctatgg

SEQ ID NO: 152830 - DNA, 269 bp, Glycine max
caagtaccctcaaattcgggaccagaagttcgatgagaaggaaaacattgtgttcatcacagtggtgtgttctagccccgagaagataagagacaagctttgctacaaaggtggaggctctatcaagagcattgagatactggaactgcccaagcccaaggccgagaagcctaaagcagaccctcccaaagctgagaagcccaaggccgagcccgagaaaaagaaggacggtggcggcgagaagcccaaggccgagcccgagaaaaaga

SEQ ID NO: 152831 - DNA, 161 bp, Glycine max
cttccccgttattctctctccgagcttcactctcttcgcctctagccaaagggagtaaaatggggttctcctcctttctgggtcgtgttctctttgcctcccttttcatcctcactgcatggcagatgtttaatgaatttgatgccaatggtggacccatc

SEQ ID NO: 152832 - DNA, 248 bp, Glycine max
gttaagagaaataaatggaaaactgaggaagttaagaagctaattggtatgcgtgaggaactaagtgaaagatttcaagttgtgaagggaaggatggccctctgggaagagatttctcaaaaattgttggctgatgggatctgcagaagtcctggacagtgcaaatctctgtggacatctttggtagtcaaatatgaggggatcaagaatgaggataggaagaaaagttggccatacatagaggacat

SEQ ID NO: 152833 - DNA, 189 bp, Glycine max
ggtgaaggcactattgtaaattcatcaaatacactggtggggcttgacattaatggcttgtctagcaatgaagctgctctgaaagtcattgagtgggcagagaaaagtgggaatggaaagagaaaggtgaattacaagttaagggactggctttttgctcggcaacgttactggggtgaacctatccct

SEQ ID NO: 152834 - DNA, 268 bp, Glycine max
gctgcggtcttcagcgacgggtcgttttgctacattcctaaagacaccaagtgtcctatgcagatttcgacttacttcagaatcaacgcgttggagacaggacagtttgagaggactttgattgtcgccgacgatcggagctctgtggagtatttggaaggctgcaccgcgccttcctacgatcggaaccagctccatgccgcggtggtggagttgtattgcggcgagggggcggagattaagtactccacggtgcagaattggtacg

SEQ ID NO: 152835 - DNA, 265 bp, Glycine max
ctcgagccgcgccgcccaaaaccatttatagggttttcttttctttgccaagaaaatgagagagtgcatttcaatccacattggtcaggccggtatccaggtcggaaacgcctgctgggaactctattgccttgaacacggcattcagcccgatgggcagctgccgagtgacaagaccgttggaggaggagacgacgccttcaacacattcttcagcgagaccggcgccggaaagcacgtgcctcgcgccgtcttcgtggatctt

SEQ ID NO: 152836 - DNA, 267 bp, Glycine max
  unsure (1)..(267): unsure at all n locations
tcgagatgttctatgctctcaagtaccgcaaattggctgagtctgtgccccttgctgctgagtaaactgaggataaagagttggataaagaaatggaggaaccggctttttctttctcatttggagtttgtcgcacttgagtttataaataatgtccgtgattttagttttgtgattaagctttcgataagaggagagaaagagaaggaaaaaaaaagttgcttttttttttgtngttgcatgattnggatnnngnttggaaaagct

SEQ ID NO: 152837 - DNA, 264 bp, Glycine max
gatggcttcctttgtatccttcctagtgctgcttcttgcagcccttatcctcatgcctcaagggcttgctacttactacaaaccaattaagaagccaccagtgtacaagcctccagtgtacaagccaccagtgtacaaaccaccggtttataagccaaaaccaccggtttacaagccgaaaccaccggtttacaagccaccatataagaagccaccatacaggataccaccttatggaaagtaccctccagtagaggacaacac

SEQ ID NO: 152838 - DNA, 265 bp, Glycine max
caaaaagttagattccagtaatcagccagagtatgaatttctttctcaggtctccatcgtatcaaggctaaagcatgaaaacgttgttgagcttgttaactattgtgttgatggtcctttccgtgcccttgcctatgagtatgctcctaaaggatcccttcatgatattctacatggacgcaaaggtgtcaagggtgcacaacctggtccagttctctcatgggctcagagagttaaaattgctgttggagcagccaggggactt

SEQ ID NO: 152839 - DNA, 267 bp, Glycine max
gacaccatcaattttgaggcttttccccacaagctggtgcagtttggagagattcaggaaaaagttgtattgaaattttcacaagaggaatttcttacagcttggtcaactcaggtgcgtcctgcaacaactctgttggctgatgggtgtccatatttgtatgctatggtgcatgatagttcagtgtctacaataccaggtgattttgtcattggtgttaagttgacaaccataaacaatatgtgtgcatatgggctcaatcctggt

SEQ ID NO: 152840 - DNA, 263 bp, Glycine max
ggaagttgtcgttgcccagggcgattttctacattgtaatgcaatgcttgggtgctatttgtggcgctggcgtggtgaagggtttcgaggggaaaacaaaatacggtacgttgaatggtggtgccaactttgttgcccctggttacaccaagggtgatggtcttggtgctgagattgttggcactttcgtccttgtttacaccgttttctccgccaccgatgccaaacgtaacgccagagactctcacgtccccattttggca

SEQ ID NO: 152841 - DNA, 144 bp, Glycine max
ccaaaaaaaaaaaaaaaaaaaaaaaaaaaaaagaaaaaaaaaaataaagaaagaaaaaaaaaagaagaaaagaaaaaaaagagaaaaagacgtggggcgcgcgggctggggctgcccccccgtcggtgtggtggtgggtgtcct

SEQ ID NO: 152842 - DNA, 150 bp, Glycine max
ccaataaacgacaaagaacacagagacgtaaacaggacctttaaagctcctaaatccccctgtacgacgttcaatagtttcttcaacttttaaaagatcaaggttgcgcctatctatcgatgtgtgataagcgtgcgttccaattagggg

SEQ ID NO: 152843 - DNA, 264 bp, Glycine max
gcgtcgcagtcgcaaccctaatcagaagaagcgcacttcaagcgagtgacagccaccagccatgggtcgtatgcacagccgcggtaagggtatatcctcttctgctttgccctacaaaaggacacctcctagctggctcaagatctcttcgcaagatgtcgaagaaaatatctgcaagtttgcgaagaaaggtttgaccccgtctcagattggtgtcattctcagagattctcacggtattgctcaggtcaatagcgtcactgg

SEQ ID NO: 152844 - DNA, 265 bp, Glycine max
atagcccaagccctatacaaccaaaccctaacacacacccatttgattcagtttccatggctagcctcaaggttgcacttttggctgcagtgctctgcatggttgtggtgagtgcacccatggcacatgcagctatcacgtgcgggcaggtgacgaatagcctgatcaattgcatcggttacctccagaacggaggaacgccgccgtcgggatgctgcaacggagtgaagagcctcaatgccgccgccaagaccaccgccgaccg

SEQ ID NO: 152845 - DNA, 262 bp, Glycine max
  unsure (1)..(262): unsure at all n locations
ctcgagccgaatcggctcnagggctcgagcggctcgaggcgtacgaagaatgttgaggaagcaattgaggctctgcagtactcttgagaatgagataaaggacaagaagttctttggaggagaggagattgggttggtagatattgctgctgtctacatagcattttgggtccctatggttcaagaaattgcagggttggagttattcacaagtgagaaatttcctaagctccacaattggagccaagaatttttgaaccat

SEQ ID NO: 152846 - DNA, 263 bp, Glycine max
caagagtgtgacaattgaagccatggcaaaagcctttggagtgacagtagatttcattgatgtggagctatcacgttttattgcagcagggaagcttcattgtaagattgataaagttgcaggtgttcttgaaactaatcgccctgatgctaagaatgctctttaccaagcaactattaagcaaggggacttcctgctgaatcggatccagaaattgtcacgtgtgatagatctttaggtcatctcttgcattttagattaaa

SEQ ID NO: 152847 - DNA, 262 bp, Glycine max
aggagatgcaataacatttgaatctgaggtggatcgagtgtatcttagctctccaaacataattgcggtgctagatcatgagaggaaacgaacatttgttataaggaaggatggtctccctgatgttgctgtgtggaatccatgggagaagaaatcaaaatcaatgtcagactttggtgatgaggagtataaacaaatgctttgtgttgatggggcagtaatagagaaacctgtgaacttgaagccgggcgaggaatggact

SEQ ID NO: 152848 - DNA, 261 bp, Glycine max
ggagattttggctttgatcctctaggtcttgcatctgatcctgagagcctgagatggaatgtccaagcagagcttgtgcactgcagatgggccatgttgggagctgctggcattttcatcccagaattcctcacaaagattggtagactgaacaccccttcatggtacactgctggagagttggagtacttcacagacaccaccacactcttcatagttgagctcttttttcatcggttgggccgagggtagaaggtgggc

SEQ ID NO: 152849 - DNA, 237 bp, Glycine max
ggagctggtgcaaagaatgctattctcatgaatatgccaaatgctgttctttcaatgtggagatattttgttggagatctcgtctttgaagtttctaagatgacttctccttacattaaatgtacagtctctttcttcatagcatttggaaatttggctgatgacaccatcaattttgaggcttttcctcacaagctggtgcagtttggagagattcaggaaaaagttgtattgaaa

SEQ ID NO: 152850 - DNA, 173 bp, Glycine max
tgctgctcgaggataacgcaggtgtcctaagatgagctcaacgagaacagaaatctcgtgtggaacaaaagggtaaaagctcgtttgattctgatttccagtacgaatacgaaccgtgaaagcgtggcctatcgatcctttagtccttcggaatttgaagctagaggtgtcag

SEQ ID NO: 152851 - DNA, 263 bp, Glycine max
caatacttcaatttggatgccgttgactggcaagctgacatagaaaaatgcttgacttgggaagctcacagccgactttcaaacggattgtctattaactttcttgatatcgctgccaaagagttaggctgtactatttccatgtgaaatgaaatcatccatcttagtctgtgacaattttttgctagacttatagaaaaagaaaaagaaaacagaagttattgatatgcttatggaactaacgggtttgcaaataagcataa

SEQ ID NO: 152852 - DNA, 227 bp, Glycine max
atcgagataactataaacagtgtgatgaaaatgaaggtccttgttttcttcgttgctacaattttggtagcatggcaatgccatgcgtacgatatgttccctctccgaatgaacactggctatggtgcccgtactccggaggtgaaatgcgcaagttggaggcttgctgtggaagcacaaaacatctttgggctttaagaccattccgaaagagtggtttaagcaca

SEQ ID NO: 152853 - DNA, 259 bp, Glycine max
gtgattttgagaggctggttcatctttggacacttgattctgctgaacgtgatgcatttttggcaaacgaggcgactaaaaaatggacttcaagcaatcaggttctggtggaaatagcctgcactaggtcctctgaacaattgtttgctgcgaggaaggcttaccatgttctttataagaagtctctggaggaggatgttgctcatcacacaacaggagacttccgtaagctcatactacctctggttagttcttatcg

SEQ ID NO: 152854 - DNA, 254 bp, Glycine max
caatacttcaatttggatgccgttgactggcaagctgacatagaaaaatgcttgacttgggaagctcacagccgactttcaaacggattgtctattaactttcttgatatcgctgccaaagagttaggctgtactatttccatgtgaaatgaaatcatccatcttagtctgtgacaattttttgctagacttatagaaaaagaaaaagaaaacagaagttattgatatgcttatggaactaacgggtttgcaaa

SEQ ID NO: 152855 - DNA, 256 bp, Glycine max
  unsure (1)..(256): unsure at all n locations
caatacttcaatttggatgccgttgactggcaagctgacatagaaaaatgcttgacttgggaagctcacagccgactttcaaacggattgtctattaactttcttgatatcgctgccaaagagttaggctgtactatttccatgtgaaatgaaatcatccatcttagtctgtgacaattttttgctagacttataganaaagacaaagaaaacagaagttattgatatgcttatggaactaacgggtttgcaaata

SEQ ID NO: 152856 - DNA, 257 bp, Glycine max
caatacttcaatttggatgccgttgactggcaagctgacatagaaaaatgcttgacttgggaagctcacagccgactttcaaacggattgtctattaactttcttgatatcgctgccaaagagttaggctgtactatttccatgtgaaatgaaatcatccatcttagtctgtgacaattttttgctagacttatagaaaaagaaaaagaaaacagaagttattgatatgcttatggaactaacgggtttgcaaataa

SEQ ID NO: 152857 - DNA, 257 bp, Glycine max
ggaagaagaagacgccgcagccatggtgaagtactccagagaacccgacaatcccaccaagtcctgcaaggccagaggcgctgaccttagagtgcatttcaagaacactagggagactgcctttgccatcaggaagttgcccctggttaaagctaaaagatacctggaggatgttttggcccacaaacaggccatccctttccgacgcttctgtggtggtgttgggaggacagcccaggctaagagcagacactcca

SEQ ID NO: 152858 - DNA, 256 bp, Glycine max
ctagttctagatcacgagcgaagacgtgtcgaagtgaaagcccctgggattattgaacgtaaatctgtgcacgagcctatgcaaacagggttaaaagcagtagatagcctggttcctataggccgtggtcaacgagaacttataatcggggaccgacaaactggaaaaacagctattgctatcgataccatattaaaccaaaagcaaatgaactcaagggccacctcagagagtgagacattgtattgtgtctatg

SEQ ID NO: 152859 - DNA, 242 bp, Glycine max
tggttatgttgcctcaaactcaaaggatgaccctgcaaaggaggctgctaacttcacagcccaagtcatcatcatgaaccaccctggtcagattggaaatggctatgcccctgtcctcgactgccacacttctcacattgctgtcaagtttgctgaactccatgaccaagattgacaggcgatccggcaaagagcttgagaaggagcccaagtttttgaagaacggtgatgccgggtttggt

SEQ ID NO: 152860 - DNA, 254 bp, Glycine max
  unsure (1)..(254): unsure at all n locations
gaatgcctatggcttggccagatacgctgtcatatgccaggagaatggcctggttcccattgttgagcctgagatccttgttgatggatctcatgacattcacaagtgtgctgccgtcaccgagcgtgtccttgcagcatgctacaaggctttgaatgatcaccacgtccttcttgagggtaccctattgaagccaaacatggtcacccccggatccaattctgctaaggtttcccctcaggtggttgcggana

SEQ ID NO: 152861 - DNA, 254 bp, Glycine max
gagaggggtttgggattggagggattgacgctgcgtctcttcctcttctctttcgatccatccctcattcctaatcctccaatccaaccacctcagcctcacactcacatatacacatatctgaacgcgtatcgtccctcctatggcttcaaagcgcatcctcaaggagctcaaggacttgcagaaagacccaccaacttcttgcagcgctggtccagtagctgaggacatgttccattggcaagcaacaataa

SEQ ID NO: 152862 - DNA, 252 bp, Glycine max
cttggattcgagtgtgggtcaagaaaggaggaatgatcatcttacctgctggaatttatcatcgctttacactagatgagagcaactacattaaggctttgcgtttttttgttggtgagccagtttggactccacacaatcgtccaaatgaccatctccctgcaagacaacaatatgtcaaggattttgtggaaaaggatgttggcaaccatgctgttgatgccgccgcgtaagatctggttccgcctaatc

SEQ ID NO: 152863 - DNA, 238 bp, Glycine max
gtgaaacactagctagggtattgggagctctcgttgtttcggagttagggaccttacgcagccatggccactgctacgaatgccgccgccgccccaccacgccagctctcccagaaggaagctgacatccagatgatgttggccgccgacgtccacctcggcaccaagaactgcgacttccaaatggaacgttacatcttcaagcgccgcaacgacgggatttacattattaaccttg

SEQ ID NO: 152864 - DNA, 249 bp, Glycine max
gtgccggtcgggggacggattgggaacgggcccttcggggcctcttccccgggcgtcgaacagtcaactcagaactggtacggacaaggggaatccgactgtttaattaaaacaaagcattgcgatggtccctgcggatgttgacgcaatgtgatttctgcccagtgctctgaatgtcaaagtgaagaaattcaaccaagcgcgggtaaacggcgggagtaactatgactctcttaaggtagccaaatg

SEQ ID NO: 152865 - DNA, 248 bp, Glycine max
gatttcctaccttgaagttcttcccaaagggcaacaaagctggtgaagagtacggaggtggaagagacttggatgactttgtggcttttatcaatgagaaatctggaacaagtctagatgtaaaaggacaacttacttcccaagctggtatagtagaaagcttggatgtcttggttaaggagtttgtagctgccagcgatgaagagaagaaattcgtgtttacccgaatggaagaggaagttgagaag

SEQ ID NO: 152866 - DNA, 272 bp, Glycine max
gacgaactcggaatcggctcgagccgaccgtgccggcctccacccagcccaaccgcctattcgtgcactctgccacctccggtggcgccacgagcaacgtggcggccaagctcacggcgggctacccgcaacaaaccatcttcgacagcctccacgacgccggccacgacttcggcatctactaccagaacatcccggccaccctcttctaccgcaacctcagaaaactaaagtacgtgctcaagttccacatctacgacgtgtcgttcaag

SEQ ID NO: 152867 - DNA, 250 bp, Glycine max
agaaaatgagagagtgcatttcaatccacattggtcaggccggtatccaggtcggaaacgcctgctgggaactctattgccttgaacacggcattcagcccgatgggcagatgccgagtgacaagaccgttggaggaggagacgacgccttcaacacattcttcagcgagaccggcgccggaaagcacgtgcctcgcgccgtcttcgtggatcttgagcccaccgtgatcgacgaagtccgaaccggcgc

SEQ ID NO: 152868 - DNA, 247 bp, Glycine max
agtcgaccgaatcggctcacttgaatcttcgttatccttatttttttctccttgaactcgaatattcactatggcagatgaggtggttctgctagatttctggccaagtccatttgggatgagggtcaggattgcacttgctgaaaagggtatcaaatatgagtccaaagaagaggacttgcagaacaagagccctttgctcctcaaaatgaacccggttcacaagaaaatcccggttctcatccac

SEQ ID NO: 152869 - DNA, 248 bp, Glycine max
gctgtgtgctgttagatctgtacccgcctagccattgatttggaaaagtccaacttcaaggatgagtaagcttcagagtgatgctctaagagaagctatctcaggaatcatggctgattccaaggaaaagaacaggaaatttgtggagaccattgaactccaaattgggttgaaaaattatgatccccagaaggacaagcgtttcagtggctctgttaagttgcctcatattcctcgccccaagatga

SEQ ID NO: 152870 - DNA, 240 bp, Glycine max
ctcgagccgtgccggcctccacccagcccaaccgctcattcgtgcactctgccacctccggtggcgccacgagcaacgtggcggccaagctcacggcgggctacccgcaacaaaccatcttcgacagcctccacgacgtcggccacgacttcggcatctactaccagaacatcccggccaccctcttctaccgcaacctcagaccactaaagtacgtgctcaagttccacacaacatacg

SEQ ID NO: 152871 - DNA, 250 bp, Glycine max
gcgatgggtgcctacaagtatgtttcagagctatggcgcaagaagcagtctgatgtcatgcgcttcttgcagcgggtgaggtgctgggagtataggcagcaaccttccattgttcgcttgacaaggtcgacccgccctgacaaggctcgtcgcttgggcttcaaggctaagcagggctatgtgatataccgtgttcgtgttaggaggggtggccgaaagaggccagttcccaaaggtattgtttatggga

SEQ ID NO: 152872 - DNA, 250 bp, Glycine max
gagaaagaaaaaaggggaatttcaatggcgtcaagggtttctctgaaggcgaaggggaagagttcaaagggatcgaaggctgcggaagatcgatccgcgagcgagtgcctgaaggagtggacgacatgggcgatgcgaaaagcgaaggtcatcactcactacggtttcatccctttggtcatcgtcatcggtatgaactctgaccccaagcccccactttcccagcttctcagccccgtctgatccacct

SEQ ID NO: 152873 - DNA, 248 bp, Glycine max
ctatgagacatcagtgcctccttctggtctccctggtgttggtctcctacgctgcccggtcggaatcagcgctgggcggctggagccccatcaaggacgtaaacgacagccacgtggcggagatcgccaactacgcgctgagcgagtacgacaagcgttctggggccaagctcacccacgtcaaggtcgtcaagggcgagactcaggtcgtttccggcaccaactaccgtctcgtcctcaaagccaag

SEQ ID NO: 152874 - DNA, 249 bp, Glycine max
ctcaaagataagggttaggtctgagtcatgtgctgcttctggctccaaggcatgtcgggagaagttgagaagggataggcttaacgacaagtttgttgaattgggcgccattttggagcctggaaggcctgccaaaacagacaaggctgctatcctgattgatgctgtccgaatggtgacccagttacggggtgaagcccagaagttgaaagacactaatcagggtcttcaagaaaagattaaagagtt

SEQ ID NO: 152875 - DNA, 250 bp, Glycine max
ctcgagccgtaaagatgttaatgcagctgttggaattatcaagaccaagcgcactatacaatttgttgactggtgccccaccgggttcaagtgtggaatcaattaccagcctccgactgttgttccaggtggtgatcttgccaaggttcagagggccgtgtgcatgatctccaattccaccagtgttgttgaggtcttctctcgcatcgaccacaaatttgacctcatgtatgccaagagggcgttcgtt

SEQ ID NO: 152876 - DNA, 242 bp, Glycine max
gtcgatagagggggcaagggaggtgtggagggagttctttcaccagccacttgatgtgaaagaggtgtatgctaatacacccctcacttatgaagggtctggaagcaggttgggagtgacacaaggggccattttggattggagtgattacttcttcctccattacatgccttgacccctcaagggaccaagccaagtggcctgccctcccaacatccttaaggagcatcatctctgaatat

SEQ ID NO: 152877 - DNA, 252 bp, Glycine max
gagaaaccctaggtaagaagaaaagatgccggctggtcatggtttgagatcccgcaccagagattccttctctcgtcctttcaggaagaagggaaccatcgccctcaccacatacctgagaacctcccacgtcggcgactatgttgacgtcaaggttaacggtgccgttcacaagggaatgccccacaaattctaccatggccgcaccggacgcgtctggacatgtcaccaaacgtgctgttggcgtcgaag

SEQ ID NO: 152878 - DNA, 253 bp, Glycine max
gacgtcgtccccttcacccacgacatgcaccacgccgcccaggccggcgtccgctacgccatgcaaaaccctcaatcctacatccacagcaacatcgccgccttcatcaaccttctagaagcttccaaatccgctaaccctcaaccctccatcgtctgggcctcttccagctccgtctacggcctcaattccaaagtccccttctccgaaaaggaccgtacggatcaacccgcgagcctctacgccgccacaa

SEQ ID NO: 152879 - DNA, 252 bp, Glycine max
gtgaaagcgtggcctatcgatcctttagtccttcggaatttgaagctagaggtgtcagaaaagttaccacagggataactggcttgtggcagccaagcgttcatagcgacgttgctttttgatccttcgatgtcggctcttcctatcattgtgaagcagaattcaccaagtgttggattgttcacccaccaatagggaacgtgagctggggttagaccgtcgtgagacaggttagttttaccctactgatga

SEQ ID NO: 152880 - DNA, 252 bp, Glycine max
tggcgatgacgtttgttccttcaacatcttccagtttccgaccgacgttgattcgatgcgccaactccaacgagcggcgggcgctgtttagccgcattgctcctgtctatgataacctgaatgatttgctgagccttggccaacaccggatttggaagcgaatggcagtgtcctggactggagcgaaaatgggagaccgtgtgttggatgtgtgctgtggaagtggggatttgtcctttctcttgtccgatc

SEQ ID NO: 152881 - DNA, 252 bp, Glycine max
  unsure (1)..(252): unsure at all n locations
gaggaaccgttgattcgcacaattggtcatcgcgcttggttgaaaagccagtggcgcgaacntaccgtgcgttggattatgactgaacgcctctaagtcagaatccgggctagaagcgacgcgtgcgcccgccgtccgtttgccgaccagcagtagggggcctcggccccccaaaggcacgtgccgttggtgaccctcgtgaggcggattagccctacgagacgccttgaagcgcaattcccatcgagcggc

SEQ ID NO: 152882 - DNA, 247 bp, Glycine max
gtgaggtagaacccttccacggtggtgactgcgcgatgggtgcctacaagtatgtttcagagctatggcgcaagaagcagtctgatgtcatgcgcttcttgcagcgggtgaggtgctgggagtataggcagcaaccttccattgttcgcttgacaaggtcgacccgccctgacaaggctcgtcgcttgggcttcaaggctaagcagggctatgtgatataccgtgttcgtgttaggaggggtggccg

SEQ ID NO: 152883 - DNA, 246 bp, Glycine max
gttttggaattcttattatggaactaattacaggaaggaatccggttgattatagtcggcctccagaagaggtgaatttggtagactggctcaagaagatggttagcaacagaaatccagagggggtgcttgatcccaagcttcctgagaaaccaacttcaagagcactaaaacgagctcttcttgtagctttattttgcactgatcctaatgcacaaaagcggcctaaaatggggcatgtgatac

SEQ ID NO: 152884 - DNA, 247 bp, Glycine max
ggctgctgtggttaccacgccgcttgatgtcgtcaagactcaattgcagtgtcagggtgtctgtggttgtgataggttcacaagtggatcaattggggatgttattagaacaatagtgaaaaaagatggttacagagggctgatgcgagggtggattccaaggatgctctttcatgctcctgctgctgctatttgctggtctacatatgaagctggaaagtccttattccaagatttcaatcagcag

SEQ ID NO: 152885 - DNA, 249 bp, Glycine max
gaactagaacaacaggaatattttgatccaaagttggctgatgaggagagagaaaaaggaaacgaattcttcaagcagcagaagtatcctgaggctgtgaagcattacacagagtctatacgaagaaatccaaaagatcctagggcttatagtaacagagcagcatgctacactaaactgggggcaatgcctgaaggtttaaaggatgcagagaagtgtattgaacttgatccaaccttcgtaaagggt

SEQ ID NO: 152886 - DNA, 249 bp, Glycine max
tcccgaacccgtcggctgtcggtggactgctcgagctgcttccgcggcgagagcgggtcgtcgcgtgccggtcgggggacggattgggaacgggcccttcggggcctcttccccgggcgtcgaacagtcaactcagaactggtacggacaaggggaatccgactgtttaattaaaacaaagcattgcgatggtccctgcggatgttgacgcaatgtgatttctgcccagtgctctgaatgtcaaagtga

SEQ ID NO: 152887 - DNA, 250 bp, Glycine max
attcattcttcaccaaaacttcgcaaagaaacactacacatccatggcaactgctggcgtgcaagaagttcgtgttccccctctaacttccacctctgagccacctactctctttgacggaaccaccaggttgtacatcagttatatttgtccctatgcgcacgtgtttggatcactcggaactataagggactacaagacaagatcaaactggttcctattgacctacaaaacaggcctgcttggtata

SEQ ID NO: 152888 - DNA, 249 bp, Glycine max
aaaggattctacccgccgctcgatgggaattgcgcttcaaggcgtctcgtagggctaatccgcctcacgagggtcaccaacggcacgtgcctttggggggccgaggcccctactgctggtcggcaaacggacggcgggcgcacgcgtcgcttctagcccggattctgacttagaggcgttcagtcataatccaacgcacggtagcttcgcgccactagcttttcaaccaagcgcgatgaccaattgtgc

SEQ ID NO: 152889 - DNA, 248 bp, Glycine max
gtcttcggagaaatcacgaccaaggccaacgttgactacgagaagatagtgcgtgacacctgcaggaacatcggcttcgtctcaaatgatgtgggactggatgccgacaactgcaaggtcctcgtcaacattgagcagcagagccctgatattgctcagggtgtacacggccaccttaatacgaaacctgaagaaattggtgctggtgaccagggtcacatgtttggctatgccatgatgaaaccccc

SEQ ID NO: 152890 - DNA, 243 bp, Glycine max
ggggaaccgcggatccatttgcaactcctttggaaatattacccgaatggtatttctttcccgtatttcaaatacttcgtacagtgcccaataagttattgggcgttcttttaatggtttcggtacctacaggattattaacagtaccctttttggagaatgttaataaattccaaaacccatttcgccgtccagtagcaaccaccatctttttgattggtactgtagttgccctttggttag

SEQ ID NO: 152891 - DNA, 249 bp, Glycine max
aaggtcggcttcggccggtcgatccgggcggaagacattgtcaggtggggagtttggctggggcggcacatctgttaaaagataacgcaggtgtcctaagatgagctcaacgagaacagaaaactcgtgtggaacaaaagggtaaaagctcgtttgattctgatttccagtacgaatacgaaccgtgaaagcgtggcctatcgatcctttagtccttcggaatttgaagctagaggtgtcagaaaagtt

SEQ ID NO: 152892 - DNA, 251 bp, Glycine max
cggctcgagtgagacatcagtgcctccttctggtctccctggtgttggtctcctacgctgcccggtcggaatcagcgctgggcggctggagccccatcaaggacgtaaacgacagccacgtggcggagatcgccaactacgcgctgagcgagtacgacaagcgttctggggccaagctcacccttgtcaaggtcgtcaagggcgagactcaggtcgtttccggcaccaactaccgtctcgtcctcaaagcc

SEQ ID NO: 152893 - DNA, 228 bp, Glycine max
gttaggaggggtggccgaaagaggccagttcccaaaggtattgtttatgggaagcccacaaaccagggagttacccaactgaaatttcagcgtagaaagaggtcagttgctgaggagcgagctggacggaagctgagtggacttagggtcctcaattcttactgggtgaatgaggactctacttataaatactttgaggtgattctggtggatgtagctcatgctgct

SEQ ID NO: 152894 - DNA, 247 bp, Glycine max
ggcaaggcaagcgcttctcctctttgtgttctggctatgcttcttggcaagagttagatcggacgaggattgcgtgtacacggtgtacgttcggacgggttcgatcatcaagggaggcaccgattcagtaattggtctgaagctatacgacaagtccggctacggcatatacatcaccaacctcgaggcatggggcgggttaatggatccgggtcacaactactacgagcggggcaacctcgacata

SEQ ID NO: 152895 - DNA, 247 bp, Glycine max
cttggcttcaagattatattcttgtcaggaagaacactggacaaacaggccgtaacagaagcaaacttaaagaaggctggctaccacacatgggaaaaattaattctcaaggatccacaagatccttccactccaaatgcagtttcatacaaaacagcagcgagagagaaactgataaggcagggatacaacattgttgggatcattggagaccaatggagcgatctcctcggaggccacagaggcg

SEQ ID NO: 152896 - DNA, 249 bp, Glycine max
acaaagcattgaattcaaaaactaagttcatttcttgtgctttgctttattcctcaaaaccaaacatgtcgaacacatgcggcaactgtgactgcgctgacaagactaactgcaccaagggaaacagctatggtgttatagtagagactgagaagagctacatcgagactgttgacatggatgttccagcagctgagcatgatgggaagtgcaagtgtggcactaactgcacttgcacggactgcactt

SEQ ID NO: 152897 - DNA, 245 bp, Glycine max
ctttcgtgggctttgcagagatctgcaccctggtcctgttagactcttgcattggagtgggaaaggtaaaccgtgggttcgattggacgctaataggccttgtcctttggatgcgctttgggcaccttatgatctattgaacactcccttttctttggattcttgaacaaactttcttcagattgggatgataggatgcatccatataaatatatacccatacatatatatagtgtatacattac

SEQ ID NO: 152898 - DNA, 249 bp, Glycine max
ttgatctctcagtaacagaaagatttagggagagggtggttgacgaaggatataatccgagttatggggctaggcctctaagaagagctataatgcgacttttggaggacagcatggctgagaagatgcttgctagagagattaaagagggtgactcagttatagttgatgctgactccgatggtaatgtgattgtgctcaacggtagtagtggtgccccagattcattagaagaagctcttcctgtgt

SEQ ID NO: 152899 - DNA, 245 bp, Glycine max
atatagcccaagccctatacaaccaaaccctaacacacacccatttgattcagtttccatggctagcctcaaggttgcatttttggctgcagtgctctgcatggttgtggtgagtgcacccatggcacatgcagctatcacgtgcgggcaggtgacgaatagcctgatcaattgcatcggttacctccagaacggaggaacgccgccgtcgggatgctgcaacggagtgaagagcctcaatgccg

SEQ ID NO: 152900 - DNA, 247 bp, Glycine max
gttggttgcatctttatggagcttatgaataaaaagcctctgtttccgggcaaagaccatgtgcatcagatgcgcttattgacagagcttcttggcaccccaactgaggctgaccttgggttagtgaaaaatgaagatgcaagaagatatatcagacaacttcctcaatatcctcgccaacctttagctcaagtcttcccccatgttcatccggcagccattgatcttgttgataaaatgttgacag

SEQ ID NO: 152901 - DNA, 246 bp, Glycine max
gatttctgcccagtgctctgaatgtcaaagtgaagaaattcaaccaagcgcgggtaaacggcgggagtaactatgactctcttaaggtagccaaatgcctcgtcatctaattagtgacgcgcatgaatggattaacgagattcccactgtccctgtctactatccagcgaaaccacagccaagggaacgggcttggcggaatcagcggggaaagaagaccctgttgagcttgactctagtccgact

SEQ ID NO: 152902 - DNA, 243 bp, Glycine max
gcgacgcgatcctgcagaaaaccttggactatgcttgtggagctggtgctgactgtaatcctctccaccaaaacgggccttgtttccagcccaacaccgttagggcccactgtaactacgccgtgaacagctacttccaaaggaagggtcaagctcaagggtcctgcgactttgcgggaacagccattgttactgcatctgaccccagctctggcggtacttgtgtctacccttctagtgtca

SEQ ID NO: 152903 - DNA, 245 bp, Glycine max
ccacgtcagcgccggtcacggtcgtatcgggaagcaccgcaagcatcccggtggtcggggtaacgccggtggcatgcaccaccaccgcatcctcttcgacaagtaccatcccggtttcttcggaaaggtgggtatgcgctacttccacaaactccgcaacaaattctactgccccatcgtcaacattgataagctatggtccctcctaccccaggaggccaaggacaaggccaccgccgacaagg

SEQ ID NO: 152904 - DNA, 243 bp, Glycine max
gttctttcgggagagcatgcttaaggatgggactcttatgcccatgcccgatataagagataaaatgcccaaaaggtcgtttttgccccgctccattctgaccaaattgcccttctcgtcttccaaggttcacgagttgaagcgcctcttcaaggtttctgataactcctccatggagaagatgataatggactctttgggggagtgcgagagggtgccaagcatgggtgagaccaagcgctg

SEQ ID NO: 152905 - DNA, 273 bp, Glycine max
gagctttgccacaagaaggggactttgctctgtattgatggtacatttgcaacaccattgaaccagaaggcccttgcccttggcgctgatctgattctgcactccttaacaaaatacatgggtggacatcatgatgtaagttggcatgttcaagatttagtttgatggaaaaacaacacaaatatgttacatttcaggtgttcagagttaagcgtcaaggagcatttttcctctttcaggcccttggtggttgcataagtggttcaactaagg

SEQ ID NO: 152906 - DNA, 216 bp, Glycine max
cgtacgctcggcacgcggagcgcgatcaatgcggtcgacccagtacgatctcgttgtctagagcgatccgagaaaaactctcataaacatgttggttacccatgacctccttacaggtgatgagattctctctgactccttccgttacaaggaaattgagaatggaatgctgtgggaatctgaggggaagtgggttgttaaaggagcagttgatgt

SEQ ID NO: 152907 - DNA, 272 bp, Glycine max
tggttctcctcagtagtgatggctagcctcaagtttgcctgcgtagttactgctgctctagataattgttgcagtcgcttgaactcatgcaagtgcttgcattgcggcccggcgggccccgactttccgtctaaccggaatcggcccgccgcagcccgacaacaccgacgcgctgcagcaagtgggctggaaattagcccaattggcccagaacatcggcgtccagttcgaattccgcggcttcgtttgcaacagcctcgcggatctcgacc

SEQ ID NO: 152908 - DNA, 284 bp, Glycine max
ttcggctcgagccgaaagtttggagcatggtacgtgtggtaatcttctggcttcctcaatggtctcttccccagctgttaccactgtcaaccgtgccggtgccggcatggttgctccattcactggcctcaagtccatggctggcttccccaccaggaagaccaacaatgacattacctccattgctagcaacggtggaagagtgcaatgcatgcaggtgtggccaccagttggcaagaagaagtttgagactctttcctacctgccagaccttgatgatgcac

SEQ ID NO: 152909 - DNA, 270 bp, Glycine max
ctcgagcgaagaaattgaaagagtttgatggacttgcaatgtcaataggaaatggccatgctgaaagtgcagagcctggaggtgaaaacaggctgtcagagagtgtggatactgagggttccagtgatggaagtgatggcaacacttcaggggctaatcaaacaagaaggaaaagaagccgtgttggaacaccaaccactgatggagaagggaaaactgagatgcaaggcagtccaatttccaaagagactgcagcttctaataagatgt

SEQ ID NO: 152910 - DNA, 276 bp, Glycine max
cttaacttcgcggtgttcccttcgctgcagggtgggccccacaaccaccagatcggtgctctcgccgtggcgctgaagcaggccgcgtcgcccgggtttaaggcctacgcgaacaggttaaggcgaacgccgttgcgcttggaaaatacttgatggggaaagggtacagccttgtcactggcggaacggagaaccatcttgttttgtgggatctgagacctcttggattgactgggaataaggtggagaaactctgtgatctctgtaacattactg

SEQ ID NO: 152911 - DNA, 273 bp, Glycine max
gctgtcacagcagtgccacctcctggcacagaaatggcccagttagtatgtggaggttgccatactttactcatgtacatccggggcgcgacaagtgtgcaatgttcatgttgtcacactgtcaatctagctttggaagcaaatcaggtggcacatgtcaactgtgggaactgcaggatgctactggcgtaccaatatggagcaagatccgtgaaatgtgcagtttgcaattttgtaacatcagttggggccacagcaagcaccactgagcag

SEQ ID NO: 152912 - DNA, 266 bp, Glycine max
ctcgagcgtgatattttgagcagcttttagtggggttggtgaccgcattcaggcatgttggtgatgagatcaatccaaaattggcacaatctgaggctgaaattcttcatgatgctgtaaaagagaagaagggtagctatgaagagaccattagggtcttgactacaaggagcaggacccaacttgttgcaactttcaaccgctacagagagatccatggcacttccatctctaagaaattggtggatgaaggatctgatgagttt

SEQ ID NO: 152913 - DNA, 297 bp, Glycine max
tctacattcggtctcgaattagtatcgcatatgctagtctcaaagatcttgtcagctttgggatacgcttgatcctattcatacattgataccgcgattggcttcatttcttcagttatagtttgtctgatggtatcgactactcggataaccgtagtaattctagagctaatacgtgcaacaaaccccgacttctggaagggatgcatttattagataaaaggtctacacaggctctgcctgttgctttgatgattcatgataactcgtcggatcgcacggcctttgtgccggcga

SEQ ID NO: 152914 - DNA, 268 bp, Glycine max
ccaattttcacattctttgtattgagttacttgagctagccgcaaccatggaaccatccaaaaactcgcagaagccctcacatttccatgactacctccccgtgatggcgaacaagctcggcggggacggcctcatcgatgagctctgcaacggcttcaacctgctcaaggactccgacagaagggtgatcacctttgagagcctcaagaggaacgctgccctctggacctgggaaggactcggacagaaaaacataccgaggaaggc

SEQ ID NO: 152915 - DNA, 156 bp, Glycine max
tataactacatctacgagtacatgatcaccgtatagaaactaatagttcagctcgccgataaggctcaggtttgcacccagcggtcatggaaacggccttatggagttggactccgggtagctggattagatgaatcgggagctcacctctattac

SEQ ID NO: 152916 - DNA, 246 bp, Glycine max
agctcgtagttggaccttgggttgggtcgatcggtccgcctccggtgtgcaccggtcggctcgtcccttctgccggcgatgcgctcctgtccttaactggccgggtcgtgcctccggtgctgttactttgacgaaattagagtgctcaaagcaagcctacgctctgtacaccctaggatcggatgggaccacgagatcctcatcctagagcattagctctcgggatcggagtaatgcttaacaggg

SEQ ID NO: 152917 - DNA, 276 bp, Glycine max
cgcgtcgctccgcaccagtttcaccgcacgaatatctagttgtttggagcgatccgagaaaaactctgtaaacatgttggtttaccaggacctccttacaggtgatgagcttctctctgactccttccgttacaaggaaattatgaatagactactatgggcagttgaagggaaatcagttgttaaaggagcagttgatgtagacattggtgcaaacccttctgctgagggtggaggagaagatgagggagttgatgatgcagctgttaaggttgt

SEQ ID NO: 152918 - DNA, 266 bp, Glycine max
aagtagttgagaactaagaaggagaagcaaatggcttcctcaatgatctcttccccagctgttaccactgtcaaccgtgccggtgccggcatggttgctccattcactggcctcaagtccatggctggcttccccaccaggaagaccatgatgttcagttcctccattgctagcatcggtggaagagtgtaaggcatgcaggtgtggccaccagttggcaagaagaagtttgagactctttcctacttgccatacttggaggcgtc

SEQ ID NO: 152919 - DNA, 267 bp, Glycine max
gattgtttgttgttgtaactcgttcttcttcttttgttgttctgtgtttgtgtctgttttttctctcacctgacaatgtcttgctgccgtggtaactgaggatgcagcagctcctgctactgcggcctcggctgcggaagctgcacgatgtacccagacccgagctacactgcgtcaaccaccaccgagaccttggtcatgggagtggcacctgttaaggctcaatttgagggtgctgaaatgggtgtgcccgctgagaacgatggc

SEQ ID NO: 152920 - DNA, 266 bp, Glycine max
ctcgagcgcgcaggtgtcctaagatgagctcaacgagaatcgaaatctcgtgtggaacaaaagggtaaaagctcgtttgattctgatttccagtacgaatacgaaccgtgaaagcgtggcctatcgatcctttagtccttcggaatttgaagctagaggtgtcagaaaagttaccacagggataactggcttgtggcagccaagcgttcatagcgacgttgctttttgatccttcgatgtcggctcttcctatcattgtgaagcag

SEQ ID NO: 152921 - DNA, 301 bp, Glycine max
cacacgtcaggacgctcggcagtcggctcgagcagcatcatacaaagcactgaattcaaaaacttaagttcattctctgtgttttgctttcttcctcaaaaccaaacatgtcgaacacatgcggcaactgcgactgcgctgacaagactagctgcacccagggaaacagctatggtgtcattgtagagactgagaagagttacatcgagactgttgtcatggatgttccagcagctgagcatgatgggaagtgcaagtgtggcactaactgcacttgcacggactgcacctgtggccatta

SEQ ID NO: 152922 - DNA, 268 bp, Glycine max
gcggagaacggtgaaggcggcgaggagtacctgttcaagatagtgctgattggggactccgcggtggggaagtccaacctcctctcgcggttcgcgcggaacgagttcgatagcaactccaaggccaccattggggtcgagttccagacgcagctcgtcgagatcgacggcaaagagatcaaggcgcagatctgggacactgcgggacaagagaggtttcgagctgtcacctctgcttactacagaggcgctgttggtgcgctcgttg

SEQ ID NO: 152923 - DNA, 267 bp, Glycine max
ctttcttgcagcacgtcgttaccttcgggattgtcaagaacgaggactccgatttgtaccggaagcttgttattgcttccgcttggaggaaacagatgccgaagctcgcgctttcgcttggtctcgctcagcaaatgcctgatatgattgaagagttgatcagcaaagggcagcagcttgatgcggttcactttacatatgaagtgggtcttgtggaaaagttccctcctgttcccttgttgaagtcttttctcaaggatgctaaga

SEQ ID NO: 152924 - DNA, 191 bp, Glycine max
tagtcatatgcttgtctcatagattatgccatgcatgtgtacgtatgtaactagttctgactgtgaaactgagaattgctcaataactcagttatagtatgtttgatggtatctcactactcggataaccgcagtgtatctagtagtcgtatgaccgtataaattcgagttctaatacgtacaacataccc

SEQ ID NO: 152925 - DNA, 156 bp, Glycine max
cgaactttcatcgcaccagaagaacatcttcaaggtcgacaaccacatcggcgtcgccatcgccggcctcaccgccgacggccgcgtcctctcccgctacatgcgatccgagtgcatcaactataactacacctacgagtcaccgctccccgtagg

SEQ ID NO: 152926 - DNA, 219 bp, Glycine max
gagagagataactgtcctcagtgcaaaggaaccaaaatttcccaggaaaagaaggtgctggaagtgcatgttgagaagggtatgcagcagggtcagaagattgtttttgaaggacaagctgatcactctcctgacacaatcacaggagatattgtttttgtaatgcaagtaaatgatcacccaaggttcatcagggaacaagatgacctctttattgat

SEQ ID NO: 152927 - DNA, 159 bp, Glycine max
atcattcaaatttctgccctatcaactttcgatggtaggatagtggcctaccatggtggtgacgggtgacggagaattagggttcgattccggagagggagcctgagaaacggctaccacatccaaggaaggcagcaggcgcgcaccttacccaatcct

SEQ ID NO: 152928 - DNA, 267 bp, Glycine max
ctcgagccgctgatccacacaaaagataacagcattactcctgagattccgccaactgttactgctgttaagaaccctacttctaagattgtctatgatgatcacaaccatgaaagatttcccccaggtgacccaagcaagagggcatttgcctacttcgtacttacaggtggtaggtttgcttatgcctctgaggtccgactcctagtactcaagtcagggctaagtagttctcgcgacaccgcattaccaggggggtccgctcag

SEQ ID NO: 152929 - DNA, 298 bp, Glycine max
acgcgtacgtacgcgcattcagctccaccgcctcgagccgtgatattttgagcagcttttagtggggttggtgaccgcattcaggcatgttggtgatgagatcaatccaaaattggcacaatctgaggctgaaattcttcatgatgctgtaaaagagaagaagggtagctatgaagagaccattagggtcttgactacaaggagcaggacccaacttgttgcaactttcaaccgctacagagagatccatggcacttccatctctaagaaattggtggatgaaggatctgatgagttt

SEQ ID NO: 152930 - DNA, 193 bp, Glycine max
agctcgtagttggaccttgggttgggccgatcggtccgcctccggtgtgcaccggtcggctcgtcccttctgccggcgatgcgctcctgtccttaactggccgggtcgtgcctccggtgctgttactttgaagaaattagagtgctcaaagcaagcctacgctctgtatacattagcatgggataacaccaca

SEQ ID NO: 152931 - DNA, 268 bp, Glycine max
gtggcttggctggcctttctgctggcatggctattggtattgttggtgatgccggtgttagagccaatgcacaacaaccaaaactttttggtggaatgattctcatcctcatttttgctgaagcacttgccctttatggtctcattgttggtattatcctgtcttctcgtgctggccagtctagagccgactagacaggagttgtgctgcaaaatattctttgaccacccatctgttttaacctccttttaaagggggtgagggaggt

SEQ ID NO: 152932 - DNA, 261 bp, Glycine max
gtcgctccgcaccagtttcaccgcacgaatatcttgttgtttggagcgatccgagaaaaactctgtaaacatgttggtttaccaggacctccttacaggtgatgagcttctctctgactccttccgttacaaggaaattgagaatggaatgctgtgggaagttgaggggaagtgggttgttaaaggagtcgttgatgtagacattggtgcaaacccttctgctgagggtggaggagaagatgagggagttgatgatgcagc

SEQ ID NO: 152933 - DNA, 265 bp, Glycine max
ggttaacaagcctccaatttctttgtcaaggttaattaagtatacaaaggggaaggaggataaaattgctgtaatagtggggactgtaactgatgatatcagagtatatgaagttccagcattgaaaattacagcactcaagtttactgagagagcacgtgcaagaatagaaaaggctggtggtgaatgcttgacatttgatgagcttgcccttagggctcctttgggacagaatacggtccttcttagaggccccaagaatgct

SEQ ID NO: 152934 - DNA, 269 bp, Glycine max
gcgtgggtaaacggcgggagtaatcctgactctcttaaggtagccaaatgcctcgtcatctaattagtgacgcgcatgcatggattaacgagattcccactgtccctgtctactatccagcgaaaccacagccaagggaacgggcttggcggaatcagcggggaaagaagaccctgttgagcttgactctagtccgactttgtgaaatgacttgagaggtgtaggataagtgggagctggaaacagcgaaagtgaaataccactacttt

SEQ ID NO: 152935 - DNA, 261 bp, Glycine max
tacaagccagagcttgatattatttccaacgctagctgcacaaccaactgccttgctccactcgccaaggttatcaatgacaggtttggcattgttgagggtttgatgaccactgttcattccatcactgctacccagaagactgttgatgggccatcagccaaggactggagaggtggaagagctgcttcatttaacatcattcctagcagcactggagctgccaaggctgttgggaaagtccttcctgctttgaatgga

SEQ ID NO: 152936 - DNA, 262 bp, Glycine max
ttcatttcatcgtgcattcaatggccaccacagcagctctatccggaaccatggtgagcacctccttcatgaggaggcaacctatgaccaccacaagcctaaagacattccccaacgttggtgaagctctttttggtctgaaaagtggacgaggtggtcgtgtcacttgcatggcctcgtacaaggtgaagctcataaccccagaaggagaagtggagtttgaatgcccagatgatgttttcattgttgacaaggcagagga

SEQ ID NO: 152937 - DNA, 260 bp, Glycine max
ctctaacctacctctttttcttctctctcaacaacttcaccttcttcctcctcgatcatgtctcacttcaagggcaagtaccatgatgagcttatcgccaatgctgcgtacattggcactcctggaaagggtattcttgctgctgatgagtcaacagggacaattggcaagcgtttggccagcatcagtgtagagaacattgaatccaacaggcgagctcttagggagctgcttttcactgctcctggtgttcttcaata

SEQ ID NO: 152938 - DNA, 262 bp, Glycine max
aggtcaagaacaaatgtcatggttgatagacttcacaggattatcacttagtacaaatatgtctgttaaaacatctcgtgatattattcacattttacaaaaccactatccagaaaggcttgctattgcttttatgtacaatccaccaagaatattccaggctttctggaaggccatcagattcttcctggatcccaagacagtccagaaggtgaagtttgtttatcctaacaataaggacagtgtggagctgataaaatca

SEQ ID NO: 152939 - DNA, 263 bp, Glycine max
attcagactgtgaaactgcgaatggctcattaaatcagttatagtttgtttgatggtatctactactcggataaccgtagtaattctagagctaatacgtgcaacaaaccccgacttctggaagggatgcatttattagataaaaggtcaacacaggctctgcctgttgctttgatgattcatgataactcgtcggatcgcacggcctttgtgccggcgacgcatcattcaaatttctgccctatcaactttcgatggtagga

SEQ ID NO: 152940 - DNA, 263 bp, Glycine max
atttctctctccagtatggcttctactcacaatgagttagatgcacttatgctagtggtggtggttggctccatggtggcttcctgtggtgctaacttcaaccaagactttgatctaacatggggtgatcaccgtgctaagatattcaatggtggtcagcttctatctctttctctggacaaagtctctggctccggcttccaatccaagaaagagtacctatttgggaggatcgatatgcaactcaagctcgttgctggcaa

SEQ ID NO: 152941 - DNA, 256 bp, Glycine max
gcttgtctcaaagattaagccatgcatgtgtaagtatgaactaattcagactgtgaaactgcgaatggctcattaaatcagttatagtttgtttgatggtatctactactcggataaccgtagtaattctagagctaatacgtgcaacaaaccccgacttctggaagggatgcatttattagataaaaggtcaacacaggctctgcctgttgctttgatgattcatgataactcgtcggatcgcacggcctttgtg

SEQ ID NO: 152942 - DNA, 261 bp, Glycine max
cctgccagtagtcatatgcttgtctcaaagattaagccatgcatgtgtaagtatgaactaattcagactgtgaaactgcgaatggctcattaaatcagttatagtttgtttgatggtatctactactcggataaccgtagtaattctagagctaatacgtgcaacaaaccccgacttctggaagggatgcatttattagataaaaggtcaacacaggctctgcctgttgctttgatgattcatgataactcgtcggatcgc

SEQ ID NO: 152943 - DNA, 253 bp, Glycine max
ctcgagccgattcggccgagaaaggattctacccgccgctcgatgggaattgcgcttcaaggcgtctcgtagggctaatccgcctcacgagggtcaccaacggcacgtgcctttggggggccgaggccccctactgctggtcggcaaacggacggcgggcgcacgcgtcgcttctagcccggattctgacttagaggcgttcagtcataatccaacgcacggtagcttcgcgccactggcttttcaaccaagc

SEQ ID NO: 152944 - DNA, 259 bp, Glycine max
gtctgcaattacagctgttgccatctctacgccgagttccgggcagaagaatggatcaggaggttgttttcttagtggaaggaaattgagggtgaaaaaggagagagcagcaattggaggacgatcgatgggcactacagtgtgcgcagttgctgagcctgacagacctctatggttcccaggcagcacccctcctccatggcttgatggcactctacctggagacttcggctttgaccctcttggtcttggatctgac

SEQ ID NO: 152945 - DNA, 262 bp, Glycine max
ctaattctgcgaggtgagtgaaaatggcggtacccttgctctccaagaagatcgtgaagaagcgcgtcaagaagtttatacgcccccagagtgatcgcaagatctccgtcaagccaagctggcgcagacccaagggtattgattctcgtgtcaggagaaagttcaaaggatgcactttgatgcccaacattggttatggctcagacaagaaaacccgccattatctaccaaatggtttcaagaaatttgtcgtgcacaatgt

SEQ ID NO: 152946 - DNA, 262 bp, Glycine max
ctcgaccgaatcggctcgagtgcagctgacctcaaggagcatgacgatcaagccggtgatgccggagaagtaccttgatgagaagaccattttccacttgaacccctctggccgttttgtcattggaggtcctcacggtgatgctggtctcaccggccgcaagatcatcatcgatacttacggaggatggggtgctcatggtggtggtgccttctccgggaaggatcccaccaaggttgataggagtggtgcttacattgtg

SEQ ID NO: 152947 - DNA, 263 bp, Glycine max
  unsure (1)..(263): unsure at all n locations
cgcacgaatatcttgttgtttggagcgatccgagaaaaactctgtaaacatgttggtttaccaggacctccttacaggtgatgagcttctctctgactccttccgttacaaggaaattgagaatggaatgctgtgggaagttgaggggaagtgggttgttaaaggagcagttgatgtagacattggtgcaaacccttctgctgagggtggaggaagagatgagggagttgatgatgcagctgttaaggggtgtgnnacatgtg

SEQ ID NO: 152948 - DNA, 259 bp, Glycine max
tattgattgaagaggggctctaagcgatcacgagcgaagacgtgtcgaagtgaaagcccctgggattattgaacgtaaatctgtgcacgagcctatgcaaacagggttaaaagcagtagatagcctggttcctataggccgtggtcaacgagaacttataatcggggaccgacaaactggaaaaacagctattgctatcgataccatattaaaccaaaagcaaatgaactcaagggccacctcagagagtgagacattg

SEQ ID NO: 152949 - DNA, 258 bp, Glycine max
gtctgcaattacagctgttgccatctctacgccgagttccgggcagaagaatggatcaggaggttgttttcttagtggaaggaaattgagggtgaaaaaggagagagcagcaattggaggacgatcgatgggcactacagtgtgcgcagttgctgagcctgacagacctctatggttcccaggcagcacccctcctccatggcttgatggcactgtgcctggagacttcggctttgaccctcttggtcttggatctga

SEQ ID NO: 152950 - DNA, 218 bp, Glycine max
ggcgagccgttccgtccaccagttcggcggcgactggctcggaaaattcgcctcgttgcaagccttgcagctgatgacctcaacgcagcggtcaacgacgttgacctcggcggcgaaggggagaatcttttggcagctgttgagaaccgcgacggcgctgtggagcgtggagaggccgacctgagagactaaatcctccgtccttccggcgaggtttc

SEQ ID NO: 152951 - DNA, 258 bp, Glycine max
gccactcaggcttccattgcgggatgtctacaaaattggtggtattggtaccgtgccagtgggacgtgttgagactggtgtcgtgaagcccggtatggtggtgacttttggtcccactgggctgacaactgaggttaagtctgttgagatgcaccatgaggctctcacagaggctcttccaggtgacaatgttggctttaatgtgaagaatgttgcagtcaaggatctcaagcgtggttttgttgcatccaactccaa

SEQ ID NO: 152952 - DNA, 261 bp, Glycine max
cttgttcactaattaagctttcaagagacaaactgctttgaaaagtgggatccaaggttgttgcatccgttgcccttctcctctccatcaacattcttttcatttccatggttagctccagcagccactacgatccacagccccaaccttctcacgtcactgctcttattacacgacctagttgtccggatctgagtatttgcctcaatattttaggcgggtctctaggaaccgtggatgattgttgtgccctcatcggtg

SEQ ID NO: 152953 - DNA, 258 bp, Glycine max
taacttcgaaagcgcttatttgaaagccgcttcgtctatggacatgaaaagggtcgatccagtttccccctttgggctttgcttcgaatccaatggcgttggaagctcccaagtggggcccaacgtgccgatcattgatctggtgctgcagagcgagatggtgaagtggagcatatacggaagaaactctatggtgcaggtgagcgacgatgttatgtgcttagggtttgttgatggaggtgagaatcccagaaattc

SEQ ID NO: 152954 - DNA, 259 bp, Glycine max
caagagtgtgacaattgaagccatggcaaaagcctttggagtgacagtagatttcattgatgtggagctatcacgttttattgcagcagggaagcttcattgtaagattgataaagttgcaggtgttcttgaaactaatcgccctgatgctaagaatgctctttaccaagcaactattaagcaaggggacttcctgctgaatcggatccagaaattgtcacgtgtgatagatctttaggtcatctcttgcattttagat

SEQ ID NO: 152955 - DNA, 260 bp, Glycine max
caaaagaagtttgtggcactattaatggtggttgtggtaatggcttcttctatgtggaaagggtccaaaggtcttagtctctgtaacatggatgaaggtggattggaggcttgcaagccctcagtgactcagccaaacccagttgatccatcccctgattgctgcaaggctttggctggtgctgacttgaaatgcctttgctcttacaagaactcatcagagttgccttttcttggaattgatcgaactcttgctacttc

SEQ ID NO: 152956 - DNA, 274 bp, Glycine max
taacttcgaaagcgcttatttgaggaccgcttcgtctatggacatgaaaagggtcgatccagtttccccctttgggctttgcttcgaatccaatggcgttggaagctcccaagtggggcccaacgtgccgatcattgatctggtgctgcagagcgagatggtgaagtggagcatatacggaagaaactctatggtgcaggtgagcgacgatgttatgtgcttagggtttgttgatggaggtgagaatcccagaaattcaattgtgattggaggg

SEQ ID NO: 152957 - DNA, 277 bp, Glycine max
gggcactggtaagtggactgttcagcaaggtgctgaattatcaattgctgctcccactattgaagcatcattggatgcaaggttcctgagtgggttgaaggaggaaagagttgaagctgcaaaggtctttaaatcaggtggtattggtgatatcgtgactgatcaacctgtagacaagaaaaaattggttgatgatgttaggaaggctctttatgcagccaaaatctgtagttatgcacagggaatgaatttgatccgtgcaaagagtattgaaaag

SEQ ID NO: 152958 - DNA, 263 bp, Glycine max
gtccagttctttccaaatgctccagttgatgttgacaattctcccagctttgttgccatcaatgtcagtcctattgagtatgggcatgttttgctgattccgcgcatatttgagtagatgcctcaaaggattgaccgtgagagcttcctccttgcacttcagatggcagtggaagccgataatccttattttcgattgggttacaacagcttgggtgcttttgcaactatcaaccatcttcacttccaggcttattatttggc

SEQ ID NO: 152959 - DNA, 263 bp, Glycine max
gctcgaacagcagccgcggtaattccagctccaatagcgtatatttaagttgttgcagttaaaaagctcgtagttggaccttgggttgggtcgatcggtccgcctccggtgtgcaccggtcggctcgtcccttctgccggcgatgcgctcctgtccttaactggccgggtcgtgcctccggtgctgttactttgaagaaattagagtgctcaaagcaagcctacgctctgtatacattagcatgggatacaccacaggattct

SEQ ID NO: 152960 - DNA, 258 bp, Glycine max
gaacaaccaagtgagcctgcaaccccagttacaccgccaccatcagtagaacccaagccacagccagtctctgctccttcaccaaaggtgagcactaagttttctgatgtgttggcattcagtgggccagcacctgagaggatcaatggaaggttggccatgattgggtttgtggctgcaatggcagtggaagtagccaaagggcaaggtgtgttagaacaaatatccaatggtggcatcccatggttcttggggaca

SEQ ID NO: 152961 - DNA, 257 bp, Glycine max
gaaggatcctaccggagccaaggtcaccaaggctgcccagaagaagaagtgaatcgtgcgggctggttcatcaggggatgttggttacaataaatgttggtttcttttctgtactcttgtgtcttcttttctaggtagcttgtttttcggacaaagtttgaagtctccaccatcatctcgcaactgttgttcccagaactgggttcttgatcgacggtggcaaaattgcttttatttatctgtgttttaatgtgttg

SEQ ID NO: 152962 - DNA, 257 bp, Glycine max
gttaaaggctttaggggttcttggatttggcgagtacattgaggaagtttatgcagcatatgaacaacacaagttggaaacaatgcaagattctttaaaaggtgcaaagtggagcaacagagctgagatgactgaggaagaagcattggctgaacagcaaaggatgtttgcagaggcacgtgcaagaatgaatggaggagccattcaatccaaggagccagaggctgaccaaagtttagagagctaactttatagga

SEQ ID NO: 152963 - DNA, 253 bp, Glycine max
gccttttctaatgcccattgaagatgtattttcaattcagggacgaggaacagtagccactggacgtgttgaacaagggatcattaaagttggtgatgaagtggaggtgttgggtctaatgcagggtggtcctctgaaaacaacagtaactggagttgagatgttcaagaagattttggatcaaggacaagctggtgataacgttggtcttcttctccgtggtctgaagcgtgaagatattcaacgtggtcag

SEQ ID NO: 152964 - DNA, 260 bp, Glycine max
taacttcgaaagcgcttatttgaaagccgcttcgtctatggacatgaaaagggtcgatccagtttccccctttgggctttgcttcgaatccaatggcgttggaagctcccaagtggggcccaacgtgccgatcattgatctggtgctgcagagcgagatggtgaagtggagcatatacggaagaaactctatggtgcaggtgagcgacgatgttatgtgcttagggtttgttgatggaggtgagaatcccagaaattcaa

SEQ ID NO: 152965 - DNA, 264 bp, Glycine max
gcggcacatctgttaaaagataacgcaggtgtcctaagatgagctcaacgagaacagaaatctcgtgtggaacaaaagggtaaaagctcgtttgattctgatttccagtacgaatacgaaccgtgaaagcgtggcctatcgatcctttagtccttcggaatttgaagctagaggtgtcagaaaagttaccacagggataactggcttgtggcagccaagcgttcatagcgacgttgctttttgatccttcgatgtcggctcttc

SEQ ID NO: 152966 - DNA, 276 bp, Glycine max
acttcttatcaacccaaaagtgggaaaatccactgatgggctggacatccactggggacccctactctcatgttggtgattctgccttgacttttgatagcgaacaagcagcaaaagcatttgcagagaaacatggttgggagtaaccggtcatgaagccccacacaccattgctgaaggttaaatcatacgcggacaattttaaatggaagggcccccccaaatctggtgaagagtgatttgttggtttgtattcatgttaatgtattccgtctt

SEQ ID NO: 152967 - DNA, 264 bp, Glycine max
gttgttattcatttaacatgattactttctcgttagttgttcttttcaaatgttggatttcttaaggaatattttccatctcttatagatcgttttatcggcctgatctttactttatattcagtttttcgttcaatgaagattttgaattttgagtgtttctactaaaaaaaaaaaaaaaaaaaaaaaaaaaaaaaaaaaaaaaaaaaaaaaaaaaaaaaaaaaaaaaaaaaaaaaaaaaaaaaaaaaaaagaaggtgggggg

SEQ ID NO: 152968 - DNA, 257 bp, Glycine max
accaaaccctaacacacacccatttgattcagtttccatggctagcctcaaggttgcatttttggctgcagtgctctgcatggttgtggtgagtgcacccatggcacatgcagctatcacgtgcgggcaggtgacgaatagcctgatcaattgcatcggttacctccagaacggaggaacgccgccgtcgggatgctgcaacggagtgaagagcctcaatgccgccgccaagaccaccgccgaccgccagacggcgt

SEQ ID NO: 152969 - DNA, 256 bp, Glycine max
ggaagctgggttacggtgcccaactgcgcgctaacctagaccccacaaagggtgttggtcgattaagacagcaggacggtggtcatggaagtcgaaatccgctaaggagtgtgtaacaactcacctgccgaatcaactagccccgaaaatggatggcgctaaagcgcgcgacctatacccggccgtcggggcaaggaccaagccccgatgagtaggagggcgcggcggtcgctgcaaaacccagggcgcgagccgg

SEQ ID NO: 152970 - DNA, 253 bp, Glycine max
agccgccagccatacgccgtcagtcgtcgcgctggtcaccagacctccgccgaatcctggggtaccggccgagccgtctcccgtatcccccgtgttcccggcggcggaacccaccgcgccggccaaggagcctttggaaacatgtgccgcggcggacgcatgttcgccccgaccaagatctggcgccgctggcataggaagatcaacgtgaaccagaagcgctacgccgtcgtctccgccattgctgcctccg

SEQ ID NO: 152971 - DNA, 257 bp, Glycine max
cggaacgcggcactgccctctttttggacccaaggtcggcttcggccggtcgatccgggcggaagacattgtcaggtggggagtttggctggggcggcacatctgttaaaagataacgcaggtgtcctaagatgagctcaacgagaacagaaatctcgtgtggaacaaaagggtaaaagctcgtttgattctgatttccagtacgaatacgaaccgtgaaagcgtggcctatcgatcctttagtccttcggaatttg

SEQ ID NO: 152972 - DNA, 261 bp, Glycine max
ctcgagccgaatcggctcgagtgaagctgacctcaaggagcgtgagatcaagccggtgataccggacaagtaccttggtgggaagaccattttccacttgaacccctctggccgttttgtcgattggaggtcctcaaggtgatgctcgtctcaccggacgcaaggtcatcggtcatacttaaggaggcgggggtgctcatggtggtggtgccttctccgggaaggatcccaacaaggttggtaaggagtgtgttacattgt

SEQ ID NO: 152973 - DNA, 268 bp, Glycine max
tgaagctgggcccatcagccccagaagtgggaagggtgagcatgaggaagaccgtcaccaagcaggtctcctcaggaagcccatggtacggcccagaccgagtcaagtacttgggcccattctctggcgagcccccgtcctacctaaccggtgagttcccaggcgactacggctgggacactgctgggctttccgcagacccagaaaccttcgccaagaaccgtgaactcgaagtgatccactccaggtgggccatgctcggagcctt

SEQ ID NO: 152974 - DNA, 261 bp, Glycine max
gaaggatcctaccggagccaaggtcaccaaggctgcccagaagaagaagtgaatcgtgcgggctggttcatcaggggatgttggttacaataaatgttggtttcttttctgtaatcttgtgtcttcttttctaggtagcttgtttttcggacaaagtttgaagtctccaccatcatctcgcaactgttgttcccagaactgggttcttgatcgacggtggcaaaattgcttttatttatctgtgttttaatgtgttgtgtt

SEQ ID NO: 152975 - DNA, 259 bp, Glycine max
cagcagccgcggtaattccagctccaatagcgtatatttaagttgttgcagttaaaaagctcgtagttggaccttgggttgggtcgatcggtccgcctccggtgtgcaccggtcggctcgtcccttctgccggcgatgcgctcctgtccttaactggccgggtcgtgcctccggtgctgttactttgaagaaattagagtgctcaaagcaagcctacgctctgtatacattagcatgggataacaccacaggattctga

SEQ ID NO: 152976 - DNA, 254 bp, Glycine max
ctcgagccgaatcggctcgagcatctgttaaaagataacgcaggaatcctaagatgagctacaacgagaacagaaatctcatgtggaacaaaagggtaaaagctcgtttgattctgatttccagtacgaatacgaaccgtgaaagcgtggcctatcgatcctttagtccttcggaatttgaagctagaggtgtcagaaaagttaccacagggataactggcttgtggcagccaagcgttcatagcgacgttgct

SEQ ID NO: 152977 - DNA, 253 bp, Glycine max
gcaatgagaagaaggaagctgctgatcagtctatgaaagcatatgagtctgctaccactgcagcagaggctgatttacctccaacacatcccatccgattgggtctagctttaaatttcttagttttctattacgagatcttgaactctccagaaagagcctgtcatcttgcaaaacaagcttttgatgaagctatttctgagcttgacaccttgaatgaggagtcatacaaagacagcaccttaatcatgca

SEQ ID NO: 152978 - DNA, 254 bp, Glycine max
gtgttttccttgtgtcccctgttattgtctcgctctcacagaatcatggcattctctagtgctttgattctgtggtcgttgctagcaatcaacatggccctgccaaccctcgcaaccgtctacaccgtgggagatacttcaggttgggcaattggtactgattatggcacttggactggcgacgagatcttttcagtgggtgatagtctcgcgttcaactatggagctgggcacacagtggatgaagttaaaga

SEQ ID NO: 152979 - DNA, 261 bp, Glycine max
cagcaagattgcctgttgctcacatggtgtgcaatcaaactcctccagtaggaaacaagccaagtctaatgacattccgtgaggttgagactgttttccatgaatttggtcatgctcttcaacatatgcttactaagcaagatgagggtctggttgctggtattagagggatagagtgggatgctgttgagttaccttctcagttcatggaaaactggtgttaccatagagaaactttaatgggcattgcaaagcattttg

SEQ ID NO: 152980 - DNA, 126 bp, Glycine max
ctcgagccgttcgcgttctcgtcactggagctgcagggcaaattgggtatgctcttgtcactatgattgctaggggagtgatgttgtgtcgtgaccagcccgtgatcctccacatgcttgacattc

SEQ ID NO: 152981 - DNA, 270 bp, Glycine max
gaatgggttaacaagggcaatgcaccggcactgcccgagactcttaagaattacaacaagctggtgtctcttggcttcaagattatattcttgtcaggaagaacactggacaaacaggccgtaacagaagcaaacttaaagaaggctggctaccacacatgggaaaaattaattctcaaggatccacaagatccttccactccaaatgcagtttcatacaaaacagcagcgagagagaaactgataaggcagggatacaacatgttggga

SEQ ID NO: 152982 - DNA, 253 bp, Glycine max
catgattgcagacacaaccattctgtggaagccatgagcaaaacctgcatgttttctccctttggatggaaaggaacagttatgcttttcttagtaggatttggtctctctctctttttaccttttgattggtactatggttggtgccttgttggttggtgcaactaactggcaagggttgttcattgttttcttctattcctttccctcgttttccgattgttacaatgacaataatttaatggttattatc

SEQ ID NO: 152983 - DNA, 270 bp, Glycine max
aatacccttttgatttgtgaaaggaaagcaaacatgcttgatcaggtccaacaccctacaatcatggacaaggttgctggccagctccatctccgttctggtgtttctggtattaggagttatgaaggagcctactgccaccccacaatgtaccaaagaccctcttttgggaattactcgaatgctgcattgcagtatcctgtgatgccctcatgcaaagctactatggatttgtctgctgctgcaacaactgcctcccccgtctttgtt

SEQ ID NO: 152984 - DNA, 184 bp, Glycine max
gactaacgttgttgtttaattagtccatgcatctgcatcttgggcaccataagattgtatataaaataaattatggtgtgttgtgtatgttgtgcaagacctggaacttcacctttctacgtacgtgtgcttaggatgcagtgtgctttgatgatgctttgatgaatatgcagtgtgctttttt

SEQ ID NO: 152985 - DNA, 270 bp, Glycine max
agaccctccaggagtactggtggtgcaccgagcgcgccctcgactggggccccggtggtggacccgacctcatcgtcgacgacggtggtgacgctacccttctcatccacgaaggcgtcaaggccgaggagctctatgagaagaccggcgaactccccgaccccaactccaccgacaacgccgagtttcagatcgtgcttaccatcatcagagatgggttgaagaccgatcccaccaggtaccgcaagatgaaggagcgtctcgttgggg

SEQ ID NO: 152986 - DNA, 262 bp, Glycine max
cgaacccttcagtcacacaagtttcgtggctatgctcccactgcaggtcttccacaggccaggattgccattgctgaatacctgtctcgtgaccttccttaccaattatcaaatgaggatgtttatatcacttgtggatgcacacaagccattgatgattcagtggcaatgcttgctcgccccggtgcaaacatcttgcttccaagaccaggcttcccactctatgaacttagtgcttcatttagaggggttgaagtgaggc

SEQ ID NO: 152987 - DNA, 262 bp, Glycine max
ctaaacgtacattttggttggaggatgaagatcagattatcagaagtattgaccgtgaaatgcctttaggaaattacactcttcacattgatgaaggaatggccattaaattacctctctatgatgagcctgaccatatacctgtgcatactgaagataagatattttacactgaagacgatttccgtgattttctgacccgccggggttggatatgtctaagagaatttgacagctacagaaatattgacaacatggatga

SEQ ID NO: 152988 - DNA, 261 bp, Glycine max
cttccagcagatgtggattgcaaaggcagaatatgacgaatctggtccatcaattgtgcacagaaagtgcttctaaactgtttcgatagatagggttattgaagggaaagactactatcatcacgatttgtctggaagcaatgcattgcagattgtaaccctttgattctagcttttgttatcctttcattttattctcttgttggagtgatcatttatttgcagaaggtgaggagagttgttttttaaaatggtccagtt

SEQ ID NO: 152989 - DNA, 262 bp, Glycine max
atccaccattaacgagctgaagaagcctgttgtggagaaagaagctccagggcatgccatatgagggcatgcacgtacggcctcggaggggaaccagaaaattatgttaacaaaataatctggaaccctaatgtatcagtgtcatcatcagtgtgtagtttaagctagctttgctatggttacgttctttgagatgagagtcttgatgaacagtaccattctgatgtattgctttccttgaaagttaatgcatgcttcttat

SEQ ID NO: 152990 - DNA, 263 bp, Glycine max
tgcatacaactgctgatagaagtgattacttgtggtactcattaagcattgatcttgatgctggtgctcaaactttccttcatattaaatcccttgggcatgctcttcatgctttcataaatgggaagcttgcagggagtggaaccggcaaccatgagaaagctaatgtcgaagtagacatccccatcacactagtttctgggaagaacacaattgatctcctgagtttaactgtgggacttcagaactatggagcttttttt

SEQ ID NO: 152991 - DNA, 274 bp, Glycine max
  unsure (1)..(274): unsure at all n locations
ttcccctcttaccaagcgctcggtggacacaaggccagtcaccggaaacttcgccgccgccgccgaagaccaaccccccagcaccaccacttnnnnnnnnnnnnnnnnnnnnnnnnnntccggaggtaaggcccatgagtgctccatttgccacaaatccttccccaccggacaggcccttggcggacacaaacgttgtcactacgaaggtaacggtaacggaaataacaacaacagtaacagcgttgtcaccgtcgcctcggaaggcgtgggg

SEQ ID NO: 152992 - DNA, 256 bp, Glycine max
ggttctcctgagctgtgtttattctctttctctgccctctcatcttcgagctccgatggcgagcctgtggcgcgcggcaaccggcatgacggacaacgccaccgattacgacggcgtcgagttctggtcgaaccccgagcggaccggctggctcaccaagcagggcgagtacatcaagacctggcgccgccgctggttcgtcctcaagcaaggcaagctcttctggttcaaggataccgccgtcacgcgtgcgtct

SEQ ID NO: 152993 - DNA, 264 bp, Glycine max
caagtagttgagaactaagaaggagcagcaaatggcttcctcaatgatctcttccccagctgttaccactgtcaaccgtgccggtgccggcatggttgctccattcactggcctcaagtccatggctggcttccccaccaggaagaccaacaatgacattacctccattgctagcaacggtggaagagtgcaatgcatgcaggccccccccaccagttcggcaaccagaagtttgagactctttcctcacctgccagaccttga

SEQ ID NO: 152994 - DNA, 257 bp, Glycine max
gtcgcagttaaagtctcagctccccaagccacaaggttgggcatcaaggcttcgctgaaagacgttggagtcgctgttgtggccactgccgcgagtgcagtgctggctagcaacgccatggccattgaagtgttgctgggtggtgatgacgggtctctggctttcgttcccaacaatttctccgtggcctctggggagaagatcgtgttcaagaacaacgcaggtttcccccacaacgttgtgttcgacgaggacga

SEQ ID NO: 152995 - DNA, 220 bp, Glycine max
ctccgcagcagccacacttcttcgccgtttcagctgaagagccatccgcaggtaagcaatggttaagcataataatgttatccccaatgggcacttccggaaacactggcaaaactatgtgaagacttggtttaatcaaccagcccgaaagaccagaagacggttggctcggcagaagaaggctgtcaagattttccccaggcctactgctggatctctc

SEQ ID NO: 152996 - DNA, 270 bp, Glycine max
cacacaatgggtctctgggattccttcctcaattggctccgcagcttgttttttaaacaggagatggaactttcacttgttggccttcagaatgctggcaagacttctcttgtcaatgcaattgctactgggggctacagtgaggacatgattccaactgttggtttcaacatgagaaaagtgactaagggaaatgtcacaataaagctttgggaccttgggggacagaggaggttccgatcaatgtgggagcgatactgtcggggtgtc

SEQ ID NO: 152997 - DNA, 233 bp, Glycine max
actttaagaaggatagggatggctactggaaatggtttgctggcaacttggactctggtggtgatgttggtgcttcatcccttttgtttgtttactctcttgactatgcccgtacccgtcttgccaatgatgctaaggctgcaaagaagggaggagagagacagttcaatggcattattgatgtctactggaagacattggcatctgatggtgttgctgggatctaccgtggt

SEQ ID NO: 152998 - DNA, 265 bp, Glycine max
tgtcaaaggtggagatgatatcaaagctgttgcttccatttctgctggaaatgatgagttgattgggcaaatgattgcggaagcaattgataaggttggacctgatggtgttttgtccattgagtcttcatcatcgtttgagaccacagttgaagtggaagaaggaatggagattgacagagggtatatctcgcctcaatttgttacaaaccctgagaagttgattgttgaatttgagaatgcgagagtgttgattacagatcag

SEQ ID NO: 152999 - DNA, 259 bp, Glycine max
tgttgcccagcttaacgagggtcgtcacctcaagaagaggccaactgagttccgagttgataaggtccttcaaccctttgatgaaaacaaattcaactttaccaaagtcgggcaagaagaggtcctcttccaatttgaagctagcgaggatggacaagtccagttctttccaaatgctccagttgatgttgacaattctcccagctttgttgccatcaatgtcagtcctattgagtatgggcatgttttgctgattccg

SEQ ID NO: 153000 - DNA, 259 bp, Glycine max
cgtgacacaacaggtcaccaggatactacgatggacgctactggaccatgtggaagctgcctatgtttggttgcactgatgcttctcaggtgttgaaggagcttcaggaggctaagactgcataccccaacggcttcatccgtatcatcggattcgacaacgttcgccaagtgcagtgcatcagcttcatcgcctacaagcccccaggcttctaagtgtgagaaatttgcaaagcatttgtagccgcgaccccactttg

SEQ ID NO: 153001 - DNA, 268 bp, Glycine max
cctaaacctaaacctaaacataaactgaatttcccaaatccccttcccaattttcaccaaaacctaatactcccaaaccaatcttcgatcatggccgccgaatcacaacctcaactaatcgaagagagaagagaggagcaagaacttaagtacctggaatttgtgcaattcgcgaccatccaggccctgatgcgctgcgccatcctctactcctacgccaaggagcgcgcgggtcctctgaagcccggcgtcaacaccgtcgaggagg

SEQ ID NO: 153002 - DNA, 262 bp, Glycine max
taatattaccacgttaaagtttactaacatgtcactggtgcaaaatgaacctttttgtgacaagtgtccagatactaattacttgtttatgggtgattatgtggaccggggttattattcagttgaaactgtaacacttcttgtgtcactgaaagtgcgatatcctcagcgaattactattcttagaggaaaccattcaagccgtcagatcactcaagtatatggattttacgatgaatgcctcagaaaatatggtagtgct

SEQ ID NO: 153003 - DNA, 265 bp, Glycine max
tggcccaatacattcccactcttaactactacagcggaggagggttgccacttgcatgcaccatgtacgcttcatcagagtgttactttggactcaaccttaatccgatgtgcaagccctctgaggtttcatacaccattatgccaaacatggcatatttcgaattccttccccacgatcctaagcctggctccaccagttcaaaactagtggagttggcggacgttgaagtggggaaggaatacgaactggtgatcacaaccta

SEQ ID NO: 153004 - DNA, 138 bp, Glycine max
tgcaaaccctgatggccagaagagagctcttgtgacaggaggaggcatagccaactttactgatgttgctgccacatttagtggtataattcgggcattgaaggagaaggagtcgaaattgggagcagcaatgatgca

SEQ ID NO: 153005 - DNA, 159 bp, Glycine max
ctcttcttcgtctcaaacttctacgttccttcgattcattccatttcttccaaaatggccaaagacccagttcgcgttctcgtcactggagccgcagggcaaattggatatgctcttgtgcctatgattggtaggggagcgatgctgggtcctgaacag

SEQ ID NO: 153006 - DNA, 263 bp, Glycine max
tggcagaggagttgctagacctgttatgtgaaaatcttggattagaaaaagggtacttgaaaaatgcattttatggatcaagaggtccaaattttgggacaaaggtagcaaactaccctgcatgcccaaagccagagttggtgaagggtcttcgtgcacatacggcatgcgggtgggattatccttctcttgcaagatgacaaggtcagtggccttcagcttctcaaaaattaccaatgggtggatgtgcctccaatgcgcca

SEQ ID NO: 153007 - DNA, 259 bp, Glycine max
ggctttggctcggaaccttcgacacagccgaggaagccgctttggcttacgacaaagccgcgtacaggctccgaggcgacttggcgaggctgaacttcccgaacctgaaaggctcgtgccccggcgaggagtacaagcctatgcaggctgcgacggacgctaagctcgacgcaatctgcgcgaacttggcggaaatgcagaagcaagggaagaacgagaagggtgccaggtcggggaagaagtcgaagcaaggtccgaa

SEQ ID NO: 153008 - DNA, 259 bp, Glycine max
ctctctagcttggacgagtgaattagattcatcatcaagatgtcgtctctgatagcagaagatgtgaagagcagatcagaggtgtaccacggggacgaaatgtgccaagtgaagtccaaggagcttctcaaggaaatcgccctccccaacggccttcttcccctcaaggacatggaggagtgcggctacgacagacaaaccggcttcgtctggctcaaacaaaagaagagttacacccacaagttcgacaagatcggaa

SEQ ID NO: 153009 - DNA, 259 bp, Glycine max
ctcgatcacttgtgggatgataccctcgccggtcctcgcccggagaacggcctcggcaagctccgaaagcaccactccttcgctttccgatctgcctccgccaaggaatcagacagcggaagcgtgaaatcgtacggtgaggattcgcccaagaatgcggtgagagtgacgcgaagtataatgatcgtgaaaccacctggtaaccagagtcccagtggatccgctccggcttcccccgccggttctactcctccggtgt

SEQ ID NO: 153010 - DNA, 212 bp, Glycine max
cagagttgaatatatgcattcaagaggtttccttcaccgtgacataaagccggacaattttctaatgggtctaggacgaaaggcaaatcaagtatgttattgttgaagataatttcattcaatttttgtttccccccgtcttcttatattcccttatctattgtgaaatctgtatacctttttgtgaagtttaatgatcaagaatatgtatg

SEQ ID NO: 153011 - DNA, 261 bp, Glycine max
gtagccaaatgcctcgtcatctaattagtgacgcgcatgaatggattaacgagattccgactgtccctgtctactatccagcgaaaccacagccaagggaacgggcttggcggaatcagcggggaaagaagaccctgttgagcttgactctagtccgactttgtgaaatgacttgagaggtgtaggcatacgtgggagctggaaacagcgaaagtgaaataccactacttttaacgttatttctactattccgtgaatcgg

SEQ ID NO: 153012 - DNA, 258 bp, Glycine max
gccagtagtcatatgcttgtctcaaagattaagccatgcatgtgtaagtatgaactaattcagactgtgaaactgcgaatggctcattaaatcagttatagtttgtttgatggtatctactactcggataaccgtagtaattctagagctaatacgtgcaacaaaccccgacttctggaagggatgcatttattagataaaaggtcaacacaggctctgcctgttgctttgatgattcatgataactcgtcggatcgc

SEQ ID NO: 153013 - DNA, 261 bp, Glycine max
gtggtttctgaggaaaccaccactggagttaagaggctctatcagatgcaggcgaatgggactcttctcttccctgctattaatgtcaatgactctgtcaccaagagcaagtttgacaacttgtatgggtgccgtcactctctccctgatggtctcatgatagctaccgatcttatgattgctggaaaggtggctgttgtgcgctggatatggtgatgttggcaagggttgtgctgctgcaatgaagcacgctggtgctca

SEQ ID NO: 153014 - DNA, 261 bp, Glycine max
ctccattaaggttattcgcaataagcagactggtctatcagagggttatggatttgtggaattctattcacatggcacagctgataaagttttgcagaattatgctgggatattgatgcctaacaccgagcaaccgttccgcctgaactgggcaacatttagcacaggagacaagcgttcagataatgttcctgatctttctatttttgtaggagatttagctgcagatgttacagatagcatgttgcatgaaacttttac

SEQ ID NO: 153015 - DNA, 258 bp, Glycine max
ttgtgacagaaatacttccagcaaagaggttttacaaagcagaggaataccatcaacaatatctggagaagggtggaggtcaaggcaacaaacaatccgcagaaaaaggctgcactgatcccatcaggtgctatggctgatgaatgatgatcactttcttgctgcacacttcaccatgtctggcttctatcagccatctgttgtgtactccaatataataatattatcaaaaataaaataagtcatggtgtatcttca

SEQ ID NO: 153016 - DNA, 256 bp, Glycine max
gccagtagtcatatgcttgtctcaaagattaagccatgcatgtgtaagtatgaactaattcagactgtgaaactgcgaatggctcattaaatcagttatagtttgtttgatggtatctactactcggataaccgtagtaattctagagctaatacgtgcaacaaaccccgacttctggaagggatgcatttattagataaaaggtcaacacaggctctgcctgttgctttgatgattcatgataactcgtcggatc

SEQ ID NO: 153017 - DNA, 257 bp, Glycine max
atatagcccaagccctatacaaccaaaccctaacacacacccatttgattcagtttccatggctagcctcaaggttgcatttttggctgcagtgctctgcatggttgtggtgagtgcacccatggcacatgcagctatcacgtgcgggcaggtgacgaatagcctgatcaattgcatcggttacctccagaacggaggaacgccgccgtcgggatgctgcaacggagtgaagagcctcaatgccgccgccaagacca

SEQ ID NO: 153018 - DNA, 257 bp, Glycine max
aacgttctcttctccctgatcctctggaaagttcttagccgatggcgatcttctacgctttggtggccagaggcacggtggtgctggcggagttcagcgccgtcaccggcaacaccggcgccgtctcccgccgcattcttgagaagcttccggcggagtccgactccaggctctgcttctctcaggatcgctacatcttccacatactccgatcgtcagggcatcacctacgtctgtatggccaacgacaccttcgg

SEQ ID NO: 153019 - DNA, 254 bp, Glycine max
gtttcgtgtaaagtttatgtagcacctgttccaagaacggcaacggatgatgagattcgccctgtattcgaagaacatggaactattgttgagattgttcttttaaaacataagaaaactgggacacggcaaggaagttgttttgtaaaatatgcaacatttgatgaagctgatagggctattaaggttttaaacaataaatatacatttgctggggaatcatatcctgttgttgtcaaatttgctgatcgaga

SEQ ID NO: 153020 - DNA, 259 bp, Glycine max
ttgctttcaagagacaaactgctttgaaaaatgggatccaaggttgttgcatccgttgcccttctcctctccatcaacattcttttcatttccatggttagctccagcagccactacgatccacagccccaaccttctcacgtcactgctcttattacacgacctagttgtccggatctgagtatttgcctcaatattttaggcgggtctctaggaaccgtggatgattgttgtgccctcatcggtggtcttggtgaca

SEQ ID NO: 153021 - DNA, 251 bp, Glycine max
taatgactgaagctaactttggttggttaatccgatccgttcatcgatggtcggcaagtatgatggtcttaatgatgatcctacacgtatttcgtgtgtatctcacaggcggttttaaaaaacctcgcgaattaacttgggttacgggtgtagttttgctgtattgactgctacttttggtgaaaacggttattccctaccttgggatcaaattggttatgggcagtcaaaatgtaacagcgtaccgacgc

SEQ ID NO: 153022 - DNA, 266 bp, Glycine max
ggttattcgcttgctgtgatgccatcggctaaagggcaggttccagagcaccatccccatttcatcggaacttattggggtgctgtgagcactgccttctgtgctgagattgtggagtctgcggatgcatacttgtttgctggtcccatttttaatgactacagctctgtggggtattcgctccttctcaagaagaagaaggcgatcattgtgcagcctgatcgggtggtgatcgcaaatggacctgcatttgggtgtgtgctgat

SEQ ID NO: 153023 - DNA, 262 bp, Glycine max
acaggctcgctgttgctttgatgattcatgataactcgtcggatcgcacggcctttgtgccggcgacgcatcattcaaatttctgccctatcaactttcgatggtaggatagtggcctaccatggtggtgacgggtgacggagaattagggttcgattccggagagggagcctgagaaacggctaccacatccaaggaaggcagcaggcgcgcaaattacccaatcctgacacggggaggtagtgacaataaataacaatac

SEQ ID NO: 153024 - DNA, 260 bp, Glycine max
gcagttctctagcaacaaatggagatgtggaaagcttcttcaattatgtgcgttttgatccaaagttgttaacactagagcataagtctaatcgtcaaatggattttaagcgacatgttaatgctgctcttggaatttcacctgatgaatctccatctagttcttcaaaaggcaagctactgccatcgcctgtaccagaagacatgaaacgggtaaaggatgctttgggtgcaaacattgtgaaggcaagggaacgtgtg

SEQ ID NO: 153025 - DNA, 261 bp, Glycine max
gttcttcttcttttgttgttctgtgtttgtgtttgttttttctctcacctgaaaatgtcttgctgcggtggtaactgtggttgcggaagctcctgcaagtgcggcaacggctgcggaggctgcaagatgtacccagacttgagctacactgagtcaaccaccaccgagaccttggtcatgggagtggcacctgttaaggctcaatttgagggtgctgaaatgggtgtgcccgctgagaacgatggctgcaaatgtggacca

SEQ ID NO: 153026 - DNA, 254 bp, Glycine max
gtggggagaagtggtttcgtcattgccggaaaatccagccgcggcggaggcgagggaggtgttcgagagcttcaaccgcaaattcgaggaagggtatcggaaacagaactcattcgtcgtagctgaccgcgaattacgagacgaaataaaaggttcgatcgcgagaagcatagtgccaagatatcgcgagtggtataatgttgttcttgctacggtgggaacagtgagggatttgacggcgacggagtacgtga

SEQ ID NO: 153027 - DNA, 254 bp, Glycine max
gaaaacagcatcgaacccgtcgtagcagaaaaacttgtcaccatggtttcttccgacaaggatccacgagaggatgtccttcaagcctggtacatggatgatagtgatgaagatcaaagactcccccaccacaaagaacccaaggagtttgtctcgttggaccaacttgctgaacttggagtccttagctggaaactagatgctgataaccatgaaaatgatccagagctgaagaagattcgtgaagagcgtgg

SEQ ID NO: 153028 - DNA, 252 bp, Glycine max
atcgccgccttcttcggacacgtcggcagcaagacctcttgtggttatggagtggccactggaggacctttggcctggggtctttgttacaatcatgaaatgagtcctatgcagtcatactgtgatgactacttcaaactcacatacccctgtactcctggtgctgactactatggacgtggagccattcccattttttggaactacaactatggtgctgtcggagaagctttgaagattgacctactaagc

SEQ ID NO: 153029 - DNA, 240 bp, Glycine max
gctgcagctaccttcatgcaacccaccaaggttggcatagcctctcgcaacctcaaatctacacaatgcatttctaaggcttttggcttggaacctgctgcagctaaactcacttgctcccttcagcctgatctcaaagaatttgctcaaaaatgtgtcgacgctaccaaaattgcaggattcgcccttgccacctctgctctcgttgtttctggagccagtgcagaaggtgttccaaaa

SEQ ID NO: 153030 - DNA, 259 bp, Glycine max
cacaaacgcacactgaattcaaaaacatcgaaagagagaggcatggccgagcaaaccttcatcatgatcaagccagatggcgttcaaagaggccttattggcgagattattagcagatttgagaggaagggtttttacttgaaagggttgaaactcgttactgtggaccgtccttttgctgagaagcactatgctgatttgtctgcaaagcctttctttagtggtttggtggattacattgtctctggccctgttgttg

SEQ ID NO: 153031 - DNA, 260 bp, Glycine max
ctcagtgaaagagaatccgaggcgaagagaagagaaaaattaagatggaggggaaggagcaggatgtgtcgctgggagcgaacaagttcccggagagacagccgattgggacggcggcgcagagccaagacgacggcaaggactaccaggagccggcgccggcgccactggttgacccgacggagtttacgtcatggtccttttacagagcagggatagcagagtttgtggccacttttctgtttctatacatcactgtc

SEQ ID NO: 153032 - DNA, 259 bp, Glycine max
aaaggattctacccgccgctcgatgggaattgcgcttcaaggcgtctcgtagggctaatccgcctcacgagggtcaccaacggcacgtgcctttggggggccgaggcccctactgctggtcggcaaacggacggcgggcgcacgcgtcgcttctagcccggattctgacttagaggcgttcagtcataatccaacgcacggtagcttcgcgccactggcttctcaaccaagcgcgatgaccaattgtgcgaatcaacgg

SEQ ID NO: 153033 - DNA, 260 bp, Glycine max
ctctttgcctcgcaccttcaacttaaccttttctactcataatcttaacaacttgctagaagaagataaagaaagagaaaaagtgtgtgtgtgtgagagagagcaatggctggctcgtgggcacgccgttctctgattgttctggctatcatttccttcggatgtttatttgcaatttccattgctaaggaggaagccacaaaattggggacggtcatcgggattgatcttggaacgacctattcatgtgttggtgttta

SEQ ID NO: 153034 - DNA, 254 bp, Glycine max
gttcttcttcttttgttgttctgtgtttgtgtttgttttttctctcacctgaaaatgtcttgctgcggtggtaactgtggttgcggaagctcctgcaagtgcggcaacggctgcggaggctgcaagatgtacccagacttgagctacactgagtcaaccaccaccgagaccttggtcatgggagtggcacctgttaaggctcaatttgagggtgctgaaatgggtgtgcccgctgagaacgatggctgcaaatg

SEQ ID NO: 153035 - DNA, 253 bp, Glycine max
gccagtagtcatatgcttgtctcaaagattaagccatgcatgtgtaagtatgaactaattcagactgtgaaactgcgaatggctcattaaatcagttatagtttgtttgatggtatctactactcggataaccgtagtaattctagagctaatacgtgcaacaaaccccgacttctggaagggatgcatttattagataaaaggtcaacacaggctctgcctgttgctttgatgattcatgataactcgtcgg

SEQ ID NO: 153036 - DNA, 250 bp, Glycine max
ctagagccataggagtgagcaatttctcttcaaagaagcttcaagatttgttagatatagcaagagtggttcctgctgttaaccaagtggaattgcacccaggatggcagcagccaaagttgcgcgcattttgtgaatctaaagaaattcatctatctggatattctccactaggttcaccagcagctctcaaaagtgatattcttaagaatcctgttgtcacagagattgcagagagattggggaagac

SEQ ID NO: 153037 - DNA, 251 bp, Glycine max; identical to SEQ ID NO: 109417

SEQ ID NO: 153038 - DNA, 193 bp, Glycine max
ctcgagccgcaccgtaagggttgtgaagcaggcagagaagagccatggtgcacgtttccttctaccgaaactatgggaaaaccttcaagaagcctcgtcgtccgtacgagaaggagcgtttggacgccgagttgaagctggtcggtgagtacggacttcgctgcaagagggagttgtggagggttcagtacgc

SEQ ID NO: 153039 - DNA, 261 bp, Glycine max
ctctttgcctcgcaccttcaacttaaccttttctactcataatcttaacaacttgctagaagaagataaagaaagagaaaaagtgtgtgtgtgtgagagagagcaatggctggctcgtgggcacgccgttctctgattgttctggctatcatttccttcggatgtttatttgcaatttccattgctaaggaggaagccacaaaattggggacggtcatcgggattgatcttggaacgacctattcatgtgttggtgtttac

SEQ ID NO: 153040 - DNA, 256 bp, Glycine max
ctgcaattgagtttttgaagattgcagtgctacttgtaggatttggattatgttagtcttttttctttttcttttttttttttaaatttgcttattggctattcgatggtcaatatgatgtaaatctctctaccttggtcagctggttttttttttcttgcttggccatggagaatgattccgggttaggtctttgcctatgttttagtgttcgtccaagtactattattgatgtaattcaattctatttgtatct

SEQ ID NO: 153041 - DNA, 254 bp, Glycine max
ctgacagcctgagagaaagaatcagacgacatgagcagtacaaatggcaagaaaccagaggtgttgatgaagacagtttgattcgagatcttcccaaggatttaagaagggatattaagcggcatctttgcttggctttgctgatgagggtgccaatgtttgagaacatggacgagcaacttttggatgctatgtgtgaccgactcaagccagtgctgtacacagaagaaagctgcattgcccgggaaggagat

SEQ ID NO: 153042 - DNA, 257 bp, Glycine max
cagaacccgcaactcccccgacgcaccagcctcgcgcctgctcagtcttatgtccacagatatccagaaccttaagtccttcgatccgttcgcggaagccgaagacgcaggcggggaagtcaaggtcagcaatcagcagaactacattcacatccgtattcagcagcgcaatggtcgcaagacattgaccacggtctaaagcctgccgaagaagttcgaccagaagaagatcctcaaagtgatcaagaagcaatttg

SEQ ID NO: 153043 - DNA, 256 bp, Glycine max
agcctcgttcaagtacttgtctgctcttggtgatgctaatcaggatgccatcaaaagaggaactttctatggcaaagcagcccagcaagtaaaaattcccgttcctgaaggttgtactgatccaaatgcctcaaacttcgacccaactgcaagaagtgatgatggaacctgcttatacacaccctgagaacctaagcattctccacttgaagagaagctatgacttgatataatcaaataatttatcttgttcata

SEQ ID NO: 153044 - DNA, 251 bp, Glycine max
gggctgtccaaggttgcatccttactggagtttgggtcattgcccatgagtgtggccaccatgcattcagtgactaccagttgcttgatgatattgttggccttgtcctccactccggtctcctagtcccatacttttcatggaaatacagccatcgccgtcaccactccaacactggttctcttgagcgggatgaagtatttgtgccaaagcagaagtcctgtatcaagtggtactctaaataccttaac

SEQ ID NO: 153045 - DNA, 248 bp, Glycine max
ggcttcaatttccaattagggtttcgcttagagtaaccaattaccatgggagtcttcacctttgtcgttcgcaaatccggcgccgaatggagcgccaagcaacattccggcgacatcgaggcctccgccgactccacctacgatctccaaaggaagctcgtgcaagccgctctcgccgttgattcctccggtggagtccagtcctccttctctcccgtgtctcctacctccgctgtgttccaggtgat

SEQ ID NO: 153046 - DNA, 249 bp, Glycine max
cgagattgaggcgggggttgatttggaagaaacccagctaaggtaattcctcgcaacccctaactaaaccttcaaaggatcatcatgggcagtcacaatgctttggctgccactttcggaatattaggtaacatcatttctgtgatggtgtacttggctccggtgccaacgttttaccggatatacaaaaagaaatgcacggacggtttccactcgctgccatacttgttgtcattaatgagttctatg

SEQ ID NO: 153047 - DNA, 243 bp, Glycine max
ataatccttttggagattttaaaagtatgcatcgtcatatttctaaagggtcttggacattctctgatcaagaccatggatggcaagtttctgattgcactgcagaaggtttaaagtgttgtctacttctatcaatgttgccaccagagattgtgggagaaaagatggaaccgaaagattatacgattcagtcaatgtcttgttgtcgcttcagagtaaagaaggtggtttagcaacatggga

SEQ ID NO: 153048 - DNA, 255 bp, Glycine max
ccggactcggacccgttccgagcacgtggaaaggcgcgtgcgagacgggaacgaatttcaccgcgtcgaactgcaacagaaagttgatcggagcaagattctttgctaaaggtgtagaagccatgcttggtccaattaacgaaaccgaggagtccagatccgcgcgcgacgacgacggccacggcacccacacgtccagcaccgccgctggatcagttgtttccggcgcgagctcctcggttacgcctccggaac

SEQ ID NO: 153049 - DNA, 251 bp, Glycine max
cttcgttggctactgtgatgatgataacaagatggcactcatttacgagtacatggccaatggcagcctgaaagattttctcttgctctcagatggaaattcacattgcttgagttgggaaaggagaatacagatagcaatcgatgctgcagaggggttggattacctacaccatggatgcaagccaccaataatacacagggatgtaaagtcagccaacattcttttaagtcaagactttgaagctaaga

SEQ ID NO: 153050 - DNA, 261 bp, Glycine max
  unsure (1)..(261): unsure at all n locations
tgaacaaacaaagcaaccctatgtcgaaggtggtttgtgtcaccggagccagtggcgccattggatcatgggtggccctcctcctcctccagcgtggttatacggtccatgccaccgtccaagacatcaaggatgaaaatgagacgaaacatttnggaggaaatnggaaggtagcacaagagtcgtcatccatttttctctgaaattggatcttgcattgacatancgactcacattgccganctgccataacacgggttg

SEQ ID NO: 153051 - DNA, 236 bp, Glycine max
cttgagaggtgtaggataagtgggagctggaaacagcgaaagtgaaataccactacttttaacgttattttacttattccgtgaatcggaagcggggcactgcccctctttttggacccaaggtcggcttcggccggtcgatccgggcggaagacattgtcaggtggggagtttggctggggcggcacatctgttaaaagataacgaaggtgtctaagatgagctcaacgagacag

SEQ ID NO: 153052 - DNA, 185 bp, Glycine max
cttcgttggctactgtgatgatgataacaagatggcactcattacacgagtacatggccaatggcagcctgaaagattttctcttgctctcagatggaaattcacattgcttgagttgggaaaggagaatacagatagcaatcgatgctgcagaggggttggattacctacaccatggatgcaag

SEQ ID NO: 153053 - DNA, 253 bp, Glycine max
cggactgagggtggcgcgatcaaacggcagccgcgggagcgtggcgtgccggagcgcgtgcgaggccttcggggatcctcgtttttgctgcagtgaagcgtactcgacgcctgacacgtgtggcccttctccttattcactgttcttcaagcacgcttgtccacgcgcgtatagctacgcgtatgatgacaagaccagcacctacacatgtgccaacgctaactatttgatcattttctgccccttcccctat

SEQ ID NO: 153054 - DNA, 252 bp, Glycine max
caatatggggggagttcccatcaggcaacaacggttctgcctgaccctacttaagcatgcatattatgtcagtgaagacttggtgtgaagccttggagcttacgttagaagatcataaggcccggggctaaggtgagctgaggggggacagcgtaagtgagcgaatgagtgtaagcccagtcaaacatgactgttctaagcggggcgggccacccaccttcgaatggtgttggtcctacggaccgtgaatgg

SEQ ID NO: 153055 - DNA, 249 bp, Glycine max
aggtgctgagggtgcataatgctcatgacatggtgccacagtcgccggggttgattttcaacgaggattcgccgcagtggttgctgaagctggtggaggggtggtttccgtggtgttacttgcacgttggagaggagttgcagttggaccataagaaatccccgtttctcaaccctgacggggatgcttcctgcgcccataacttggaggctcacttgcacttgctagatggataccatgggaagaatc

SEQ ID NO: 153056 - DNA, 251 bp, Glycine max
ttccagaacccctctcttcccgcatccgagaactctctagttgtacttttcgttttctataagcccttccggctctccttatttttcccacttcatccaatcaaatcaaatcaaagtcattcacctaaaccctatggccgacgaagccaaagccaaaggcaacgcagccttctcctccggcgactaccccgccgcaattcaccacttctccgacgccatcgccttggcccccaccaaccacgtcctctatt

SEQ ID NO: 153057 - DNA, 246 bp, Glycine max
acacaaaatggctatacaagcatgtgcacagtgttcatcatgagtatgctacaccgtttggtcttacttctgaatatgctcatcctgctgagatacttttccttgggtttgctaccatttttggtcccgccattactgggccccacttgataactctctggttatggatggttctgagagtcctagagacagttgaggctcactgtggttaccatttcccatggagtctttcgaacttccttccat

SEQ ID NO: 153058 - DNA, 256 bp, Glycine max
acgacctgaaagaaagacccttcttcgatgggctgtgtgattttctaagctctggccctgttattgcaatggtgtgggaaggacagggagttatttcctatggccgaaagctaattggagccacagatccacagaaatcagaacctggaaccattaggggtgatcttgctgttgttgttggaagaaacatcatccatgggagtgatggtccagaaactgccaaggatgagattaagttgtggtttaaccagaggag

SEQ ID NO: 153059 - DNA, 254 bp, Glycine max
tgaacaaacaaagcaaccctatgtcgaaggtggtttgtgtcaccggagccagtggcgccattggatcatgggtggccctcctcctcctccagcgtggttatacggtccatgccaccgtccaagacatcaaggatgaaaatgagacgatacatttggaggaaatggaaggagcaaagagtcgtctccatttttttgaaatggatcttcttgacatcgactccattgccgctgccataaagggttgctccggcgta

SEQ ID NO: 153060 - DNA, 246 bp, Glycine max
caaaagatgttctgtgtaatgtgtatgtattttctctcacctgaaaatgtcttgctgcggtggtaactgtggttgcggaagctcctgcaagtgcggcaacggctgcggaggctgcaagatgtacccagacttgagctacactgagtcatccaccaccgagaccttggtcatgggagtggcacctgttaaggctcaatcccaacacgctgacatcagtgtggccgctgagaacgatggctgcaaatg

SEQ ID NO: 153061 - DNA, 250 bp, Glycine max
gcaaaacagagaatggcatcattacttttgagtttactcgtcccttggacccgtcttgtaggcgggaaaagagggtagaatgtaaaaatatcgttgatcccacaactcctctcaaagttgtttgggcaatgggtgctaaatggactgatgatcatcttactgacaggaatatgcattctagtacaagtaatagggctattcttgtacacctgatgcgtggttcagcagatgcggagaggatttacttcct

SEQ ID NO: 153062 - DNA, 247 bp, Glycine max
ctcgagccgaatcggctcgagtggggttgtcgttcacgaagctgaccagcaggttgtttgacgaagaaggaaatgaggattactgatggtaggtctcgatgctgctggtaagacaaccatcttgtacaagctcaagcttggagaaatcgtcaccactatccccaccatcggatttaatgttgagactgtggagtacaagaacatcagcttcactgtgtgggatgttggtggtcaggacaagatccgt

SEQ ID NO: 153063 - DNA, 246 bp, Glycine max
tcgcaacacaacaaaaaaagacaacccagagagcgcgtcttaataaacgctcttctctgaaaacccccatttcttttcttctttcttcttctctttcgcttcttcgatcttcgatcttcgtcgctgaaaatgagagagtgcatttcaatccacatcggccaggccgggattcaggttggaaacgcctgctgggagctttactgcctcgaacacggcattcagcctgatgggcagatgccaagtgac

SEQ ID NO: 153064 - DNA, 225 bp, Glycine max
agccctccttggattcttgcttttccctttgatatggagtgttcctgaagctttgatcactgctgagatgggtaccatgttccctgaaaacagtggttatgtggtttgggtttcatctgctttgggtcccttttgggggtttcagcaaggttggatgaaatggcttagtggggtgatagacaacgcattataccccgttttatttcttgactatctgaagtcagg

SEQ ID NO: 153065 - DNA, 245 bp, Glycine max
gctctcctcctttaactacccatcccagtctcttagccaaagcgtttcttcgtcgtcgcttgatgtcggagtggtgccggacgggaacacagtgtcggacatgtcgtattcgagtgggattgtggtgtcgggtggacaaggcgcgacgcagttgtgtgggatggatcgggaagcgagggtgctgcgatacagagagaaaaggaagaaccgaaaatttgagaagacgattcgatacgcatcgcgaa

SEQ ID NO: 153066 - DNA, 247 bp, Glycine max
aaataccttaacaatcctccaggcagagtcctcactcttgctgtcaccctcacacttggttggcccttgtacttggctttaaatgtttctggaaggccttatgatagatttgcttgccactatgacccatatggtcccatttactctgatcgtgaacgacttcaaatatatatatcagatgcaggagtacttgcagtatgctatggccttttccgtcttgccatggcaaaaggacttgcctgggtgg

SEQ ID NO: 153067 - DNA, 155 bp, Glycine max
gtaaggtttcaggaatcgtgaataaggtcttttttgcttcatgtgatgagtgtaatatcagagatggagttgagattaatgtaattttttatacagtttgggcttttaatgtatgttttgattcagaaaaaaaaaaaaaaaagggcgcccgcctt

SEQ ID NO: 153068 - DNA, 282 bp, Glycine max
gttcaatgtaaggttgcatcagatcttcccaagcttgttgaaggtcttaagcggttggctaagtcagatcctatggttgtttgtaccattgaggagtctggtgaacacattgttgctggtgcaggagagcttcatcttgagatctgtttgaaggacttgcaggatgatttcatgggtggagctgagattatcaaatctgaccctgttgtgtcattcagggagactgttttggagagatcatgccgcaccgtgatgagcaaatcacccaacaagcacaaccgt

SEQ ID NO: 153069 - DNA, 279 bp, Glycine max
ggcccactcactttgggcccaagcctcctctctatttcaatgctggcatgtttgtttatgagcccaatctggatacctaccgtgacctccttcaaactgtccaagtcactaagcccacttcctttgctgaacaggattttttgaacatgtacttcaaggacaaatataggccaattcctaatgtctataatcttgtgttggccatgctgtggcgtcaccctgagaacgttgagcttgaaaaagttaaagtggttcactactgtgctgctggatctaagc

SEQ ID NO: 153070 - DNA, 241 bp, Glycine max
tccagatcctccgtgacgtggacgatgcgaacgtggtgaagtgtcacgagatgtacgatcagaacagcgacatccaggtgctgctggagttcatggacggaggttctctggaggggaaacacatcacgcaggagcagcagctggcagatctgtctcggcagattcttagggggctggcgtacctgcaccggcggcacatcgtccacagggacatcaagccgtcgaatctgcttataaactc

SEQ ID NO: 153071 - DNA, 206 bp, Glycine max
aaataccttaacaatcctccaggcagagtcctcactcttgctgtcaccctcacacttggttggcccttgtacttggctttaaatgtttctggaaggccttatgatagatttgcttgccactatgacccatatggtcccatttactctgatcgtgaacgacttcaaatatatatatcagatgcaggagtacttgcagtatgctaatg

SEQ ID NO: 153072 - DNA, 161 bp, Glycine max
gccgctgacgccgagtcggctcctatgccgctagctatgccctgcttggtcccccggcacggtggaggtcccgtagcgcgtcatgagcaccgggctaagaggcggttgagcaactcaagcgaaccgccctaccttactacaacataaggacagaagggaga

SEQ ID NO: 153073 - DNA, 278 bp, Glycine max
agcttgtggaagacttagtgattaatcgctctcacgagcttctcttcacttgctcacccactcttctcttgaacggtttagctaccggtgccaaaggcatggtaggtcttgatcgatctcgcacttctttttcgtctcaggtttttcactcacttggaactcagagaaaaatcactctttgtctctcttcctctcctgggattgttcaatttgggaatgtggcgcatgaatcccaacccgggtctgaaattttcagatctcttacttttacacccctt

SEQ ID NO: 153074 - DNA, 280 bp, Glycine max
gtgattgttgtgactcgttcttcttcgtcgttatcttcttcttttgttgtttgtgtgtttgttttttctctcacctgaaaatgtcttgctgcggtggtaactgtggttgcggaagcgcctgcaagtgcggcaacggctgcggaggctgcaagatgtacccagacttgagctacaccgagtcaaccaccaccgagaccttggtcatgggagtggcaccagttaaggctcaattcgagagtgctgaaatgggtgttcccgctgagaacgatggctgcaaatg

SEQ ID NO: 153075 - DNA, 282 bp, Glycine max
cttcttcaacccctctctctctctccaaaacgccaaaccaaaaaatggctcagaaggccgagaaaaacgacaccgactttaaggtccccgaaaccatcatcaccccctgcaccaccaccaccgccacctcgattaccgaaccttctagattcttcgacgcaaccacccacgccacgtcatcgcgctcccccaagcgatccctccccctcgacgacgaatctcagacggaccaaacggcgtcgtcggagcccaaacgcgtcgtgagccgctgctcctgctgtc

SEQ ID NO: 153076 - DNA, 161 bp, Glycine max
attctacccgccgctcgatgggaattgcgcttcaaggcgtctcgtagggctaatccgcctcacgagggtcaccaacggcacgtgcctttggggggccgaggccccctactgctggtcggcaaacggacggcgggcgcacgcgtcgcttctagcccggattc

SEQ ID NO: 153077 - DNA, 164 bp, Glycine max
atttggctgtgactggtgggtctggcatatttgagggtgttaaaggtcaagtgaagctgcgtcagattgtgtatcctttcaagattttgtacacattttatctaaagggtatcaaggatttgcctcaggagcttcttgtcaagactgttgagccaattccatct

SEQ ID NO: 153078 - DNA, 128 bp, Glycine max
tataaatcttgtccctgattgggagaatgctgcaaaaaaaaaaaaaaaaacaaaaaaaaaaaaaaaaacaaaaaaaaaaagaaaaaaaaagaaaaacaagacaaaaaaaggaaaaaagaagcaaaaca

SEQ ID NO: 153079 - DNA, 162 bp, Glycine max
tttcaatcttcaatttttttttatatatccaccaatccgcaaagtgcaaatttctaatctttcacgtattgggttcttctcttttccctcttcgtctccgatcgatccaattctcttcccatggctacgatcggacacaacaatctcaatgccaaattggtt

SEQ ID NO: 153080 - DNA, 274 bp, Glycine max
tgttgttggaaagaaaccctagcaagcggaacaatggcagacgttgaggtcgatgtggcggctgcagcagcagcagggcagccgaagaagagaacgttcaagaagttcagtttcaggggcgtggatctcgatgcgcttctggacatgtccaccgatgaactcgtgaagatgttcagtgctcgcgcacgtagaaggttccagagaggcctcaccagaaagcccatggccttgatcaagaagcttcgcaaagcgaaaagagaagctccaccaggtg

SEQ ID NO: 153081 - DNA, 254 bp, Glycine max
ctcgagccgctcttcttcaagcccttgctgcaagacctggtggtgctccccatgttcggatcacagggattgatgatcctgtttccaaatatgcccgtggcgacggactagaagttgttgggaaaaggttggccttgatgtctgagaaatttggcatcccagttgagtttcatggagttcctgtttttgctccaaatgtgacaagggaaatgcttgatatcaggccaggagaggccttggctgtgaattttccc

SEQ ID NO: 153082 - DNA, 161 bp, Glycine max
aaggaacaaagaaagccctcctgatggatttatgtgccctggtggttggaaggtactggttgaatactatgatagcttagtactctcaagcaatggcaaagtgccggaagctgttccagcttaatcttgtattataatgtatatctcatgattgggagaaa

SEQ ID NO: 153083 - DNA, 162 bp, Glycine max
ctcgagccgttgctgctgacctcaaagagcatgtgatcaagcctgtgatcccagagaagtaccttgatgagaagaccattttccacttgaacccttcaggccgttttgtcattggtggccctcatggcgatgctggtctcaccggccgcaagatcattatcg

SEQ ID NO: 153084 - DNA, 256 bp, Glycine max
cacttctataaggtgaaggagacggagagtaagatggggttatcggcgtcaaagagagtggagaagagtctgtcgaactcgggcgattttgactcagcatgcgactcagccttctcccactgcctcgctctcacacagcacgccttcgaaggagtgttcccttaccaactcaaaaccgcctccgattacatccacggccaacaccaaacaccttttcattcgaaattggctccccacacctcccgatcggacccaa

SEQ ID NO: 153085 - DNA, 274 bp, Glycine max
actagaaacagtgtgatgaaaatgaaggtccttgttttcttcgttgctacaattttggtagcatggcaatgccatgcgtacgatatgttccctctccgaatgaacactggctatggtgcccgtactccggaggtgaaatgcgcaagttggaggcttgctgtggacgcacacaacatctttggctttgagaccattcctgaagagtgcgttgagcaaccaaggaatacatccatggcgaacaatatagatcagactccaaaccattaaccaacaa

SEQ ID NO: 153086 - DNA, 254 bp, Glycine max
aaaactctgaccgagtccgagaggcatcatggcgacactggattccgacgtgaccgtgtttccggccggcgaagctccagcagcgccggtccttcttcgtccaccaagaagccgaagcgtttcgagatcaagaagtggaatgcggtttccctctgggcttgggatattgtcgtgataaattccgctatttgtcggaaccatatcatcgatctctgtattgagtgccaggcaaaccaggctagcggcactagcga

SEQ ID NO: 153087 - DNA, 182 bp, Glycine max
caataatgcatacatattccctggatttggtctcggtttaataatgtctgggaccattcgagtgcatgatgacctgcttctggctgcctctgaggctttggctgcacaagtgagccaagagaactttgataagggactcatatacccaccattcaccaacatcagaaattttccaccacaca

SEQ ID NO: 153088 - DNA, 279 bp, Glycine max
attgaatttcaatttccctaggggcttaatatctccccgcatttgtgcctagcctcattattatcatagtagatattcattccccttatctttctctcttctctctccccgcccaaaccctaactccctaccctattccgctttctctcatccatcatgaaaggaggaaagtccaagaccgaatctaagagagccgatgccaaacttgctgtgaataagaagggcgccgccaccaagactaggaaacccgccggaaaggggaaggcagcgaaagatcct

SEQ ID NO: 153089 - DNA, 276 bp, Glycine max
caaacccactaagatggcttcctttgtatccttcctagtgctgcttcttgcagcccttatcctcatgcctcaagggcttgctacttactacaaaccaattaagaagccaccagtgtacaagcctccagtgtacaagccaccagtgtacaaaccaccggtttataagccaaaaccaccggtttacaagccgaaaccaccggtttacaagccaccatataagaagccaccatacaagaaaccaccttatggaaagtaccctccagtagaggacaacac

SEQ ID NO: 153090 - DNA, 254 bp, Glycine max
ctcgagccgttacgcttctcttctctgcagcaactatgcctaaccctaaggtcttcttcgacatgaccatcggcggtcaatctgctggccgcatcgtgatggagctctacgccgacgtcactccccgcaccgccgagaacttccgcgcgctttgcaccggcgagaagggcgtagggcggagcggcaagcccctccactacaagggctcgtccttccaccgcgtgatcccgagtttcatgtgtcagggtggcgac

SEQ ID NO: 153091 - DNA, 221 bp, Glycine max
gaagtctgctatgtgtgcattggtgcttgtggcactggttgtggttgaagtggggcccatggctgaggctgcggtgacttgcaacccaacacagttgactccttgtcttccggcaattaattcaggttctgcaccttcgagtgcttgttgccagaagctgaaggagcaaaagccatgcttctgtggctacctcaaaaaccctagcttgaagcagtatgtta

SEQ ID NO: 153092 - DNA, 160 bp, Glycine max
gtcaccaagagcaagtttgacaacttgtatgggtgccgtcactctctccctgatggtctcatgagggctaccgatgttatgattgctggaaaggtggctgttgtggctggatatggtgatgttggcaagggttgtgctgctgcaatgaagcaggctggtg

SEQ ID NO: 153093 - DNA, 162 bp, Glycine max; identical to SEQ ID NO: 153083

SEQ ID NO: 153094 - DNA, 152 bp, Glycine max
tgaggcatggtttattgattcttttgaggaatggagaaaagccaaaaacttgagcaattttatactgctcggacattcttttggtggttatgttgctgccaaatatgcgctcaagcaccctgagcatgtacaacacttgatcctggttggat

SEQ ID NO: 153095 - DNA, 279 bp, Glycine max
gctttcaagagacaaactgctttgaaaaatgggatccaaggttgttgcatccgttgcccttctcctctccatcaacattcttttcatttccatggttagctccagcagccactacgatccacagccccaaccttctcacgtcactgctcttattacacgacctagttgtccggatctgagtatttgcctcaatattttaggcgggtctctaggaaccgtggatgattgttgtgccctcatcggtggtcttggtgacattgaagccattgtgtgcctttg

SEQ ID NO: 153096 - DNA, 211 bp, Glycine max
aaataacaataccgggctcattgagtctggtaattggaatgagtacaatctaaatcccttaacgaggatccattggagggcaagtctggtgccagcagccgcggtaattccagctccaatagcgtatatttaagttgttgcagttaaaaagctcgtagttggaccttgggttgggtcgatcggtccgcctccggtgtacacgggtgggctc

SEQ ID NO: 153097 - DNA, 153 bp, Glycine max
aaaggacacacctgctgttggcttgttgttcaaggatggcaatttgtaagaaagatgtttggagagttgaatgtggaatcccttctggatttccgctcacagttatttgcaatagcatttttaatgagatgctcattagatatagctatgaaa

SEQ ID NO: 153098 - DNA, 219 bp, Glycine max
cgatcctttagtccttcggaatttgaagctagaggtgtcagaaaagttaccacagggataactggcttgtggcagccaagcgttcatagcgacgttgctttttgatccttcgatgtcggctcttcctatcattgtgaagcagaattcaccaagtgttggattgttcacccaccaatagggaacgtgagctgggtttagaccgtcgtgagacaggttagt

SEQ ID NO: 153099 - DNA, 275 bp, Glycine max
gagcgaagagaatggctcccaagggtttaatctttttggctgtgttatgcttctcagcactgtcactgagtcgttgtcttgcggaggataatggacttgttatgaacttctacaaggaatcatgccctcaggctgaagacatcatcaaagaacaagtcaagcttctctacaagcgccacaagaacactgctttctcctggctcagaaacatcttccatgactgtgctgttcagagttgtgatgcttcactgttgctggactccacaagaaggagc

SEQ ID NO: 153100 - DNA, 269 bp, Glycine max
gtcacaactagctgctgttgtgacggttctccttcccgatcatacctcagtgcaagcctgtcaagatatgatcgggaaggagatacgtcacaactagctgctgtagacattggtgtcagtactgttgatccattaaaggagcctccacttgtgactgccaataccgtactatcttttcttgcagttgactatccagtggataaggtctcctgctatgtgtctgatgatggtgctgcgaggttcacatttgaagcactgctgagacatcg

SEQ ID NO: 153101 - DNA, 160 bp, Glycine max
aaagaatgttgaagaagtagatggaaaagtggggcctggtgcactgtttgtaaaggtcagtatggatggtgcaccttacttaagaaaagtagacttgaagaattacaatgcgtatgccgacctatcttctgcgctggagaatatgttcagttgttttacc

SEQ ID NO: 153102 - DNA, 278 bp, Glycine max
ctcaattactcaactaaagcttcattcattcatcgtgtcgtgttgtgttctttgcaaccatgcttcttagaacagcgtcctctttctctctcttcaacgccaacggcgaccatatactactcccttcctctgttcgctactctcagggcaaacacttggttccatgcgctaccaagaactccaataaccggcccttaaccggcgtcgtatttgaaccctttgaagaggtcaagaaggagctcgaccttgttcccactgtcccacaagcttcccttgct

SEQ ID NO: 153103 - DNA, 198 bp, Glycine max
cgcgtcgcttctagcccggattctgacttagaggcgttcagtcataatccaacgcacggtagcttcgcgccactggcttttcaaccaagcgcgatgaccaattgtgcgaatcaacggttcctctcgtactaggttgaattactattgcgacactgtcatcagtagggtaaaactaacctgtctcacgacggtctaaac

SEQ ID NO: 153104 - DNA, 264 bp, Glycine max
  unsure (1)..(264): unsure at all n locations
acgaaatttcttagacaaaaaacaaggatcagaaccgttgaatcaagttgaggaagatggcactagtctctggaggaagatcaacactgaaccctaacgcccctctttacattcctgccgcgtttcgccaagtggaggatttctctccggaatggtggcagctggtgacgacgctgacatggtaccatgactactggctaagccagcagcacgatgagggagccttctacggcgangacgacgggtttgatggcaatgatgtcg

SEQ ID NO: 153105 - DNA, 266 bp, Glycine max
gctctagagacatcagactaccttaaagatgattgtctgtctgtgaattgtagtgttggtgttgtgaggtcacacacggaaggtccgaaaatctataccatagcaatacctccttctagcattggtcagaaatttggacaactgctggaaagtggtaaaggcagtgatgtaaattttgaagttaatggtgatatttttgctgcacataaattggtactagcagctcgttcaactgttttcagagcacagctttttggtcctatgaa

SEQ ID NO: 153106 - DNA, 157 bp, Glycine max
caatccaccaggttacaaagcaccatcttataatccaccatcttacaagtcaccttcctataatccaccagtttataaagcaccagtttacaagtcaccttcctacaatccaccaggttacaaagcaccatcttataatccaccagtttataagcca

SEQ ID NO: 153107 - DNA, 182 bp, Glycine max
atcctaccggagccaaggtcaccaaggctgcccagaagaagaagtgaatcgtgcgggctggttcatcaggggatgttggttacaataaatgttggtttcttttctgtactcttgtgtcttcttttctaggtagcttgtttttcggacaaagtttgaagtctcaaccataatctcgaaactgt

SEQ ID NO: 153108 - DNA, 192 bp, Glycine max
ctccacttggtgttgcgtcttcgtggtggtatgcagattttcgtgaagactcttacgggtaagactattaccctcgaggtggagagctctgacaccattgacaatgtgaaggccaagattcaggacaaggaaggcatcccaccggaccagcagaggctgatttttgctggcaagcagctcgaggatggaagg

SEQ ID NO: 153109 - DNA, 276 bp, Glycine max
ccgagaaccggtctaaccaaaccgtggcctcggacttggacggcaccctcctggtgtcccccagcgcatttccttactacatgctggtcgccatcgaagccggcagcttcctccgtggccttgtcctccttgcctccgtccctttcgtgtatctcacgtacatattcctctccgagaccgcggccatcaagtccctgatcttcatcgccttcgcgggcctgaaggtcagggacgttgagatggtcgcgtgctcggtgctgcccaagttctacgccg

SEQ ID NO: 153110 - DNA, 153 bp, Glycine max
ctcggtgcatgaggtggccgcgagggccggttcggcggacctaagcccggtccgggtcgcgggggcaattccggttcaccccggttttgtccggtccaaccggagccggtccgagatggaaatgccacagacaccgtttttaacgttggacat

SEQ ID NO: 153111 - DNA, 149 bp, Glycine max
ggaaaaattgacttccgggacaagggtggttctcgatatgacaacactcaccataatgcgagctcttcctcgagaagttgatccagtggtttacaatatgttgcatgaagatcctggtaatatcagctattcagctgttggcggcttag

SEQ ID NO: 153112 - DNA, 275 bp, Glycine max
ctttcatttgataggactttagcaaggaaaacatgaatgagctgggccatggagtttatgtaccagtggatttgagtctcctccctcctctgtatctcatctatgcggaaaatcctagtgattctggcaaggttcatagtaaagtacggcagaggtggcttgatggtgatgagttcattgtgtcttccatgcttgaaattgctaatatcgcccaagaaggaaagactgcattagaagaaaaggactactccaaatttgcagctctcatgaatcga

SEQ ID NO: 153113 - DNA, 272 bp, Glycine max
tctcgagccgaatcggctcgagcaatggcggagaacggtgaaggaggcgaggagtacctgttcaagatagtgctgattggggactccgcggtggggaagtccaacctcctctcgcggttcgcgcggaacgagttcgatagcaactccaaggccaccattggggtcgagttccagacgcagctcgtcgagatcgacggcaaagagatcaaggcgcagatctgggacactgcgggacaagagaggtttcgagctgtcacctctgcttactacag

SEQ ID NO: 153114 - DNA, 274 bp, Glycine max
tctcgagccgaatcggctcgagggcggctacccgctgagtttaagactatcaataagcggaagaaaagaaactaacaaggatatcccttagtaacggcgagcgaaccgggaaaagcccaccatgaaaatcggtcgccctcggcgtccgaattgtagtctggagaagcgtcctcagtggcggaccgggcccaagtcccctggaagggggcgccagagagggtgagagccccgtcgtgcccggaccctgtcgcaccacgaggcgctgtcggcgagt

SEQ ID NO: 153115 - DNA, 203 bp, Glycine max
aaaaaaaaaaaaaaaaaaaaaagaaaaaaaaaaaaaaaaaaaaaacaacaaaaaaaaaaaaaaaaaaaaaaaaaatagggagcaccagccccagaagtgggccgggcgaggattatgtttaccgtcaccaagcaggcctcctcaggaatcccatggtacggcccagaccgagtcaagtatgtaggcccattctctggcgatcc

SEQ ID NO: 153116 - DNA, 271 bp, Glycine max
ctctcagcaatatcttcgtcgatctctacggcgtcgtttgaagggcttcgaccttcggctgttcagtttgcttccgcgggcagaattagaattggcaatctctcccaaaggtctttccggggcttggttgtcaaagccgccaccgttgttgcccccaaatacaccgcgattaagcctctgggagacagagtgctgataaaaattaaggaagcagaggagaaaactgagggtgggattttgcttccatcaactgctcaaacgaagcctcaag

SEQ ID NO: 153117 - DNA, 272 bp, Glycine max
cttgagttaaaaaatggcagcagcttcttccatggctctctcatccccatccttggctggcaaggccgtgaagctgggcccatcagccccagaagtgggaagggtgagcatgaggaagaccgtcaccaagcaggtctcctcaggaagcccatggtacggcccagaccgagtcaagtacttgggcccattctctggcgagcccccgtcctacctaaccggtgagttcccaggcgactacggctgggacactgctgggctttccgcagacccag

SEQ ID NO: 153118 - DNA, 269 bp, Glycine max
ctgggctcggcaaggaagacgtgaagatctccgtggagcagaacactctcattatcaaaggtgaaggtgctaaagaaggcgatgaagaagagagcgctcgtcgctacactagcaggattgacttgccggacaagctctacaagattgaccagatcagagctgagatgaagaacggtgtgctcaaggtcgttgtgccgataatgaaggaggaagagaggaaagacgtgatcagtgttaaggttgagtagaacaacccagctgatttggca

SEQ ID NO: 153119 - DNA, 269 bp, Glycine max
cttgaagaaagtaggatacaaccctgacaagattccttttgttcctatctctggttttgagggagacaacatgattgagaggtccacaaaccttgactggtacaagggtccaactctgcttgatgcacttgaccagattagtgagcccaagaggccctctgacaagcccctcaggcttccccttcaggatgtgtacaagattggaggtattggaactgtgccagtgggacgtgttgagaccggtgtcttgaagcctggaatggtggtga

SEQ ID NO: 153120 - DNA, 262 bp, Glycine max
gttctagatcgcgagcggccgctcggatctagcggctcgagggattctacccgccgctcgatgggaattgcgcttcaaggcgtctcgtagggcacctccgcctcacgagggtcaccaacggcacgtgcctttggggggccgaggccccctactgctggtcggcaaacggacggcgggcgcacgcctcgcttctagcccggattctgacttagaggcgttcagtcataatccaacgcacggtagcttcgcgccactggctttt

SEQ ID NO: 153121 - DNA, 267 bp, Glycine max
ctcaacatgtcacagtgcttcgtgttgtcatcagggaggacttctcgaggactctcgcagagcgcctcgtggccgatgttgagaaggttctgcatgagcttgattcacttcctgctagggtcataagcagcactagtgtgacagtcactgctgaagaaaatggcaaggtagtggttgctaagaagagtgctatggagactcagagggaaatcactgccatttggaagaagtttgtgttggagaggaagaagaacaatgacaagatga

SEQ ID NO: 153122 - DNA, 268 bp, Glycine max
cacaggtgaaagcaagaaggctgttgagaactctccattcttagagaagttgaagaagaagggatacgaggttctttatatggttgatgccattgatgaatatgctgttggtcagctcaaggaatttgagggcaagaagcttgtctctgccaccaaggaagggctcaagcttgacgagagtgaagatgagaggaagaagcaagaagagttgaaggagaagtttgacaacctctgcaaggtgatcaaggatgttttgggtgacaaggtt

SEQ ID NO: 153123 - DNA, 156 bp, Glycine max
  unsure (1)..(156): unsure at all n locations
tacagataagtgaggatgagattacatttttgactgggggtgatgatccttatgatgataatgttgttttgaagaaactttttcacccaaatctcaagcttttaattgtcactgaaggttcacagggttgccnattttncccgaggccttaagggc

SEQ ID NO: 153124 - DNA, 272 bp, Glycine max
ctgcatcgccgacgcttccaacaataacaatggccgataatgcaacaacgcaaggaagcaacaccctattttctccttacaagatggccaaattcaacctctctcatagggtggtgttggctcctatgacaagatgcagagcgttgaactggattccacaggcagcgcttgctgacatatacgctcaaagatcaacaccaggtggatttctcatcagcgaaggcaccttgatctcccccactgctcctgggtttccccatgttcccgggata

SEQ ID NO: 153125 - DNA, 269 bp, Glycine max
aaacccgtaaggcgcaaggaagctgattggtgggatccccctgtgggttgcaccgccgaccgaccctgatcttctgtgaagggttcgagtgagagcatacctgtcgggacccgaaagatggtgaactatgcctgagcggggcgaagcagaggaaactctggtggaggcccgcagcgatactgacgtgcaaatcgttcgtctgacttgggtataggggcgaaagactaatcgaaccgtctagtagctggttccctccgaagtttccctca

SEQ ID NO: 153126 - DNA, 267 bp, Glycine max
tctcgagccgaatcggctcgagcagaaataacgtgtgctgcttgtaggggacatctaggtcacgtctttaaaggagaaggaattccaacgcccactaacgaacgccattgtgtcaatagcatttcactgaaatttgcgccagcaattcttaataaaaattgagtctgctgttcggacgtgactgcttaagtacccaacattagtaaaaaaaaattatgcaatgtacttatattatgaatgaagttcatataatgatggctaaatacc

SEQ ID NO: 153127 - DNA, 267 bp, Glycine max
ctctcttctctctccacccaaaccctaactcccgaccctgttcccctctcgtatccgtcatgaaaggaggaaagtccaagaccgaatctaagagagccgatcccaaacttgctgtgaataagaagggagccgccaccaaggctaggaaacccgccggcaaggggaaggcagcgaaagaccctaacaagccaaagaggcctccaagtgctttcttcgttttcatggaggagttcaggaaggtattcaacaaagaacatcctgaaaaca

SEQ ID NO: 153128 - DNA, 268 bp, Glycine max
ctaggcacccagagacgaggaagggcgtagtaagcgacgaaatgcttcggggagttgaaaataagcgtagatccggggattcccgatataggtcaacctttcgaactgctgctgaatccacgggcaggcaagagacaacctggtgaactgaaacatcttagtagccagaggaaaagaaagcaaaagcgattcccgtagtagcggcgagcgaaatgggagcagcctaaaccgtgaaaacggggttgtgggagagctatacaagtgtcgt

SEQ ID NO: 153129 - DNA, 140 bp, Glycine max
agttgggtcacccatccataaatttgagggtcacaaagctgctgttctttgtgttcagtggtctccagacaaatcatctgtatttggaagttcagctgaagatggtctcttaaacatttgggactatgagaaggttggta

SEQ ID NO: 153130 - DNA, 123 bp, Glycine max
ctcgagccgctcgagccgattcggctcgaggccttatccatctgcagcctttgacatggcacattgctcacgctgcttgattccttggggagctaatgatggaatgtatatgatggaagttga

SEQ ID NO: 153131 - DNA, 113 bp, Glycine max
cagaaaattatgttaacaaaataatctggaaccctaatgtatcagtgtcatcatcagtgtgtagtttaagctagctttgctatggttacgttctttgagatgagagtcttgat

SEQ ID NO: 153132 - DNA, 101 bp, Glycine max
aaaaaaaaagaaaaaaaaaaaaaaaaaaaaaacaaaaaaaaaaaaaaaaaaaaaagaaaaaaacaagaacaacgagaaaaaaaaactaacaagattcgcaa

SEQ ID NO: 153133 - DNA, 271 bp, Glycine max
gctttatgattctcatccacccataaatcttggaactgaattgagtacatttcattatgaattaacctctggctcagaggaacatgtggattgtgctgtgtgtctaagcaaatttggagaaagagatgaggtgattagagttatgagatgtgagcatgtcttccacaaaggttgtttggatagatggttggtttcaagaatgccacgtgtcctctttgcagaggatcagtgactccagaaaggcctatcactaactctggagctggggttg

SEQ ID NO: 153134 - DNA, 263 bp, Glycine max
gtgaaaggtgacgtggaccagtcagatggtagcttccttgatgatgaacaaatagaaagtggatgggttctcacctgtgttgctctacctaggtcagacgttgtcattgagacacacaaggatggagagatcgaatgatcgatatatatcataatgtaatcttgtccattgctcttctaatgccatctatctatgtcgtgttttgattttgttagagtgatttggcattggctagttagctagctgaaatcatcgcgagttta

SEQ ID NO: 153135 - DNA, 253 bp, Glycine max
ttctcttgcggctagggttttagcgcagcttcttctagatttaaggaagatgggtaaggaaaaggttcacatcagtattgtggttattggccatgttgactctgggaagtccactaccactggccacctgatctacaagcttggaggcattgacaagcgtgttattgagagatttgagaaggaagctgctgagatgaacaagaggtctttcaagtatgcctgggtgcttgataagcttaaggctgagcgtgaa

SEQ ID NO: 153136 - DNA, 267 bp, Glycine max
gcgatctgcttcgtgttgtagctagctcctcgaaaatgctggcacgcctcgccgcgagtcgcttcaacgagatccgtcagattttccccttctagggctttctcgaccgctctgaactaccaccttgacacaccggacaacaaccctaaacttccatgggaattcaccgaggccaatcaagcaaaggttaaggagattttgtctcactatccatccaactataagcaatctgctacaattcctcttttggatcttgcccagcagcag

SEQ ID NO: 153137 - DNA, 219 bp, Glycine max
ccttcatgaagaggtttatcaagaatttgactcccaagctcgatgcagagcaacaggagttgtttaagaagcacatcgagggagcaactaaatacctgctctctaagattaaagatttccaattttttgttggtgagagcatgggtgatgatgcttgcttggtctttgcctactacaaggacggcgctgctgatccaacattccagtactttgcatatg

SEQ ID NO: 153138 - DNA, 221 bp, Glycine max
tctctctcgttttttctcaaaaagttgcaagagttaaagcaaaaaccaaagtgagagagaaaatgatgaagccatcgatgctcagatctcttcactctgccgccacccgcggcgcctcccacctctcccgccgtggctacgcctccgagccggtgccggagcgcaaggtggccgttctaggtgccgccggcgggatcgggcaacccctctcccttctcatg

SEQ ID NO: 153139 - DNA, 140 bp, Glycine max
gcgggaagttctgtttttttattattgggaattctgggtatgagtttctatagctctaatgaaccaacattaaatttcgaatcattaactaatcaatcatatcccgtggcactggaaataatattctatatcgggttcct

SEQ ID NO: 153140 - DNA, 267 bp, Glycine max
cagctgtggattctgcacaggttttggggctactgtgaatgttgcaaaaccaaagcctaataatactgttgctgtctttggcttaggagctgttggtcttgctgcctgtgaaggggcaagggtttctggtgcatctagaatcatcggggttgatttacttcccaatcgatttgaacaagccaaaaaatttggggtcactgattttgtaaacccgaaagatcacaacaaaccagtccaagaggtcattgctgaaatgactaatggagg

SEQ ID NO: 153141 - DNA, 185 bp, Glycine max
cccgccgctcgatgggaattgcgcttcaaggcgtctcgtagggctaatccgcctcacgagggtcaccaacggcacgtgcctttggggggccgaggccccctactgctggtcggcaaacggacggcgggcgcacgcgtcgcttctagcccggattctgacttagaggcgttcagtcatattccaac

SEQ ID NO: 153142 - DNA, 242 bp, Glycine max
caaatccccgcttcgtggaaatcccgaaccagaaaccatgcttctccgaaccgctgctgcttctgcttcgtccctctccctcttcagcccgaacgccgaacctccccgttcggttcccgctcgtggattggtggttcgcgcagcaaaggatccacgaaccaccgcgccctgaccggagtgatttttgaaccgttcgaagaggtgaagaaggagctcgatctcgttcccaccgttccgcaagc

SEQ ID NO: 153143 - DNA, 260 bp, Glycine max
ccgagcttgacacattgggtgaagagtcatacaaagatagtacattgatcatgcaacttctccgtgacaatctgactttgtggacatcagacatcacggacgatgctggagatgagatcaaggaaacatctaagcaacaaccaggcgaataggcgatggcagttgcgatgtggtagttgattggatatgtattaccgataatatggatccaatgtggcttgccatagtgggattattgtattaatgaattttatgatttc

SEQ ID NO: 153144 - DNA, 189 bp, Glycine max
ggtagccaaatgcctcgtcatctaattagtgacgcgcatgaatggattaacgagattcccactgtccctgtctactatccagcgaaaccacagccaagggaacgggcttggcggaatcagcggggaaagaagaccctgttgagcttgactctagtccgactttgtgaaatgacttgagaggtgtaggat

SEQ ID NO: 153145 - DNA, 262 bp, Glycine max
gtctaagcagaaatggcctcttcagggatggcatctgtggccctcaaacctgcccctttcactgttgagaagtcctcagttagaggccttccctccctctcaaggaactcctcttcattcagagttgtggccagtggtggcaagaagatcaagactgacaagccttatggaattaatggtggcatggctttgagggaaggagttgatgcatctggcaggaaaggaaagggaaagggcgtttaccagtttgtagacaaatacg

SEQ ID NO: 153146 - DNA, 263 bp, Glycine max
gaagttttgtgcaaaatccttgggaacagtaattggttttgccatttcaaagctgggaaagaacattcaagtactttcaagttcctttgtcaataagcaagaccaatacactgtggaaggagtgcagaatcttggagacaaagcagtgatgtgtcataggctaaatttcagaactgcagtattttactgccatgaagtccgtgaaacaacagctttcatggttccattggtggctggtgatggaaccaaaactcaggcacttg

SEQ ID NO: 153147 - DNA, 152 bp, Glycine max
ctcgagccgcaaagaacggagtgcctattggtccaagggcttattcttattggctttacaacgtaccatggggcatgtacaaatcattgatgtacataaaggaacgttatggaaacccaactgtgttcttatccgaaaatggcatggatgat

SEQ ID NO: 153148 - DNA, 262 bp, Glycine max
gtgctctgaatgtcaaagtgaagaaatcacattgcgtcaacatccgcagggaccatcgcaatgctttgttttaattaaacagtcggattccccttgtccgtaccagttctgagttgactgttcgacgcccggggaagaggccccgaaggcccgttcccaatccgtccaccgaccggcacgcgacgacccgctctcgccgcggaagcagctcgagcagtccaccgacagccgacgggttcgggactgggacacccgtgcgttc

SEQ ID NO: 153149 - DNA, 220 bp, Glycine max
tcattccacccagttgcgaccatccttagttacctgaccaaggcccctctggttccaccgggtacaccagtggtgaatgcgttgtcaaagcagcgagctatgctggaaaacatcctgagggcttgtgttggattagctcctgagaacaacatgatcctagagtacaagtgaagttcagagtcttaagagtaacggtttgggatagtgtagttgaatgtga

SEQ ID NO: 153150 - DNA, 254 bp, Glycine max
cgccacacaacagcaactgcagcaatggctcccaaacgaggtggaaaggctccggctcttgccgctaagaagaagcctgagaaggtttcgaatccgttgttcgagaagcgtccaaagcagttcggaatcggaggtacgttgcctccgaagagagacttgactcggttcgtgaagtggccaaagaatgttcagattcagaggaagaagaggattctgaagcagaggttgaaggttccttcagctttgaaccagtt

SEQ ID NO: 153151 - DNA, 227 bp, Glycine max
gacaaaggtgaagctcaggctcaggattggagaggcagaccctccaacactgccaaacacggtggaatgattcccgctgcttttgttcttgggttgcaagcttttgagataatggcaatagccgcagtggggaacaatctgataacctacgtgacgagtgagatgcacttccctttgtccaaggctgccaacctagtcactaactttgttgggaccatctttctcct

SEQ ID NO: 153152 - DNA, 262 bp, Glycine max
ctctgctcgtgcctctagggttatcatatctccatttccatttcctctctctcagtttccaagaatcttaagctatgggaaagtcttacccaaccgtgagcgctgattaccagaaggccgttgagaaggcgaagaagaagctcagaggcttcatcgctgagaagagatgcgctcctctaatgctccgtttggcatggcactctgctggaacttacgacgtgagctcgaagaccggtggtcccatcggaaccataaagcaccc

SEQ ID NO: 153153 - DNA, 150 bp, Glycine max
gaacaagtagttgagaactaagcaggagaagcaaatggcttcctcaatgatctcttgcccagctgttaccactgtcaaccgtgccggtgccggcatggttgctccattcactggcctcaagtccatggctggcttccccaccaggaagac

SEQ ID NO: 153154 - DNA, 113 bp, Glycine max
aaagcattgcgatggtccctgcggatgttgacgcaatgtgatttctgcccagtgctctgaatgtcaaagtgaagaaattcaaccaagcgcgggtaaacggcgggagtaactat

SEQ ID NO: 153155 - DNA, 277 bp, Glycine max
ttccttactggttttctgccatgaccatgaagagtgttggaagtgcagctttgaagatggttgaggaggttcgtaggcagttcaacaccattccaggactgatggagggtcatgccaagcctgattatgccacctgcgtcaaaatttctactgatgcatccatcaaggagatgattcctccgggtgcccttgtcatgctcacaccactcattgttggaatcttcttcggggtggaaacactttcaggtgttcttgccggggctctagtttctggtgt

SEQ ID NO: 153156 - DNA, 262 bp, Glycine max
tttcaatgtggagatattttgttggggatctcgtctttgaagtttctaagatgacttctccctacattaaatgtacagtctctttcttcatagcatttggaaatttggctgatgacaccatcaattttgaggcttttccccacaagctggtgcagtttggagagattcaggaaaaagttgtattgaaattttcacaagaggaatttcttacagcttggtcaactcaggtgcgtcctgcaacaactctgttggctgatgggtg

SEQ ID NO: 153157 - DNA, 298 bp, Glycine max
cacgcgtacgcaaatccggctcgaggcgaatcaacgggcgagtaaacccgtaaggcgcaaggaagctgattggtgggatccccctgtgggttgcaccgccgaccgaccctgatcttctgtgaagggttcgagtgagagcatacctgtcgggacccgaaagatggtgaactatgcctgagcggggcgaacaagaggaaactctggtggaggcccgcagcgatactgacgtgcaaatcgttcgtctgacttgggtataggggcgaaagactaatcgacgccgtctagtagctggttccct

SEQ ID NO: 153158 - DNA, 271 bp, Glycine max
gaaagagaatccgaggcgaagagaagagaaaaattaagatggaggggaaggagcaggatgtgtcgctgggagcgaacaagttcccggagagacagccgattgggacggcggcgcagagccaagacgacggcaaggactaccaggagccggcgccggcgccactggttgacccgacggagtttacgtcatggtccttttacagagcagggatagcagagtttgtggccacttttctgtttctatacatcactgtcttaaccgtcatgggagt

SEQ ID NO: 153159 - DNA, 267 bp, Glycine max
gccactttacactcactcttgtgttgttgccttcatggccaagccagtgtccattgaggtatggaacccaagtggcaaatacagagttgttagcaccaaaccaatgcctggaactcgttggatcaatcttctcgttcaaaatgatgttcgccttgaaatatgtaccgagacgaaaacgattctgtcagttgaagacatcattgctttgattggtgataagtgtgatggagttattggacagctgactgaagactggggagaacagtt

SEQ ID NO: 153160 - DNA, 268 bp, Glycine max
gttcaaacgataggagaagaagggagtagcgacgaactcaaacggcgtcgtatcgactcgttgttcatcgattggattgaagggagagagagatctggtagcggtagcggaagatggataagggtaagatcgaagaggtgatcgagaagcaagtcctgacggtggcgcaagcgatggaggacaagatcgacgacgagatcgccgccctggagcgtctggacgccgatgacatcgaggccctccgcgagcgccgcctccagcagatgaa

SEQ ID NO: 153161 - DNA, 260 bp, Glycine max
attatttccattaacacccgattctgcttaaattggcacaccaccaattttcgtgggaacccgaaccaataaaacaaaaaaagagtccaattttgtgaaaattattaccattcattcttattcatcaacgtccccccttcagtgcccacttccaaatcttctcctctcgctatgggttgtggctcctcccttccagatagggattcaaggcagttgggtcgacccaattccgagaatggtggagggcaggacgccaagaa

SEQ ID NO: 153162 - DNA, 261 bp, Glycine max
gaaacttccaacaaaaaggggttagaaagtctccaaaacatccttctttctaaaacagttggagatatgaaaattgaagtaacaaattcgagagaaggaactgacataataaagcgtaactcaaggaaaagaaggttcttctggttctagatgatgttaatgaacatgaacagttacaagcgattattgacagccctgattggtttggtcgtggtagtagagtcatcatcaccactcgagatgaacaattgttagtgcttc

SEQ ID NO: 153163 - DNA, 261 bp, Glycine max
aagctgatgactctggacttgcttcatatgtttctggtcaaattgatcgtactttaagctggaaggatgtgaagtggcttcaaacaatcaccaaactgccaattctggtgaagggtgtgctgactgctgaggacacaaggatagctatacaaagtggtgcagctggaattatagtgtccaatcatggagctagacaacttgactatgttccagccaccatatcagccttagaagaggttgtcaaagctgctgaaggtcgcc

SEQ ID NO: 153164 - DNA, 262 bp, Glycine max
caaatgcctcgtcatctaattagtgacgcgcatgaatggattaacgagattcccactgtccctgtctactatccagcgaaaccacagccaagggaacgggcttggcggaatcagcggggaaagaagaccctgttgagcttgactctagtccgactttgtgaaatgacttgagaggtgtaggataagtgggagctggaaacagcgaaagtgaaataccactacttttaacgttattttacttattccgtgaatcggaagcggg

SEQ ID NO: 153165 - DNA, 270 bp, Glycine max
ctcgagccgctcgcaatggttaaagttaatgtagcatgtgctgctgttggcttgacatcaagttacactccaactccgttgttggaatctggtttgcaaaaagacagagggttaattgtggagtattttggaaggatgtcttacgttgctcataacgttaatcagccccaagagaaagatttgttggagggaaatttttcctttgatattaaatctcgctctagattggaaaaagtgtcctctacaaaagcacaatttgttagtggaaaa

SEQ ID NO: 153166 - DNA, 273 bp, Glycine max
gtatatttgcagagatggtaaaccgacgacctctattccctggggactctgagattgatgaattatttaaaatattcagaatcttgggtaccccaaatgaagacacatggcctggtgtaacttcattgcctgattttaaatcaacatttcccaaatggccatccaaggacttggcaaatgtggttccaaatcttgatgcagctggtcttaatcttctttctagtatgctttgcttggatcccagcaaaagaatcaccgccaggagcgctgtgg

SEQ ID NO: 153167 - DNA, 275 bp, Glycine max
ggttgattcggatctagagtcttcagtttctcctcgttgttcttcgctttcctgttttcaatttcgattctttcgttaatttaataagatgtttgggagggcaccgaagaagagcgataatacgaggtactacgaaatcctcggcgtctccaagaacgcttcgcaggatgatctgaagaaggcttacaagaaagccgccattaagaatcaccccgacaagggcggtgatcccgagaagtttaaagagctggcgcaagcttatgaggttctgagtg

SEQ ID NO: 153168 - DNA, 268 bp, Glycine max
ctcgagccgtgcttttgctgtcaaattaccaattatacccttacatacatggttaccagacacccacggagaggcacattacagcacttgtatgcttttagccggaatattattaaaaatgggagcatatgggttggttcgaattaatatggaattcttatctcgcgctcattctatattttctccctggttaatactattaggttcaattcaaataatctatgcagctttaacatctcttggtcaacgcaatttaaaaaaaagaata

SEQ ID NO: 153169 - DNA, 268 bp, Glycine max
ctatatttccgctttcacttcttctctctcaccctccaactatgacgttactacaaccagcagcagccacccgtcggtgttcctcctccccaaggttacccaccgccggaatcttacggaaaggacgcgtaccctccgccagggtaccctccacagggaggataccctccgcaggcgtatccagcacaggggtaccctccaccctaggcgcttcctcagtaggttcagcctccgccgcaacaacaccagaattcatctggcccgggtt

SEQ ID NO: 153170 - DNA, 262 bp, Glycine max
ctgagacggcgtgttttgagcaacatcgttgaaaggagtagtatttgtgaagtgtaatagagactgagagagaaaggggggaaatgggtatgtgatgagagtgagattggcgtcgttcttcaccggggctgcagcggcgtcgtttctggggctctacaccctccacaaggattacaaggtcccgcaccaatcctttactcaacaggtttttgaaggaaacaccaagtgaaaacatgattcttctcaaagacattgtgcctgc

SEQ ID NO: 153171 - DNA, 264 bp, Glycine max
taaataggtggatgggaaaactgactttcccccagggcacttcccgaagtgttaagagaatgcctctttctatagggggaggagctggtgcaaagaatgctattctcatgaatatgccaaatgctgttctttcaatgtggagatattttgttggggatctcgtctttgaagtttctaagatgacttctccctacattaaatgtacagtctctttcttcatagcatttggagatttggctgatgacaccatcaattttgaggctt

SEQ ID NO: 153172 - DNA, 265 bp, Glycine max
gtgatgaagtctattgtccctgttgttatggctggagttttgggtatttatggccttattattgctgttattatcagtactggcattaatcccaaggccaaatcttattacctctttgatggttatgcacatctctcctctggtcttgcctgtgggctggctggcctctctgctggcatggctattggtattgttggtgatgctggtgttagagccaatgcacagcagccaaagctttttgttggaatgattcttattctcattt

SEQ ID NO: 153173 - DNA, 265 bp, Glycine max
ctgcaaaggattctacccgccgctcgatgggaattgcgcttcaaggcgtctcgtagggctaatccgcctcacgagggtcaccaacggcacgtgcctttggggggccgaggccccctactgctggtcggcaaacggacggcgggcgcacgcgtcgcttctagcccggattctgacttagcggcgttcagtcataatccaacgcacggtagcttcgcgccactggcttttcaaccaagcgcgatgaccaattgtgcgaatcaacggt

SEQ ID NO: 153174 - DNA, 261 bp, Glycine max
gtaaaatccttgatctagcttgtttcactttgtttcagtcaaggaattctcctctctgatctgccctataaatctactaagcaaacacaaaggacagtcacaatttttttttttgtttaaaaaaatgtcaatggacatgatggcaaccgaacgtgtttgttatgttcactgcaacttctgcaacaccactctagcggttagtgttccatgcagcagtttgctcaccatagttacggttaaatgtggacattgtgccaattt

SEQ ID NO: 153175 - DNA, 266 bp, Glycine max
ctggcgcactaccctgaggcttctcttctcttctcttctctgtcgtgagtcaccatggtgagggttagtgtgctgaacgatgctctgaagagcatgtacaatgctgagaaaaggggaaagcgccaagtcatgattaggccatcctccaaagtcattatcaaattccttttggtgatgcaaaagcacggatacatcggagagtttgagtatgttgatgaccacagggctggtaaaatcgtggttgaattgaacggtagactgaacaa

SEQ ID NO: 153176 - DNA, 270 bp, Glycine max
atcaggggcaaagactaatcgaaccgtctagtagctggttccctccgaagtttccctcaggatagctggagcccgcgggcgagttctatcgggtaaagccaatgattagaggcatcgggggcgcaacgccctcgacctattctcaaactttaaataggtaggacggtgcggctgctctgttgagccgcgccatggaatcgagagctccaagtgggccatttttggtaagcagaactggcgatgcgggatgaaccggacactgggttacgg

SEQ ID NO: 153177 - DNA, 268 bp, Glycine max
ggcctttgtgccggcgacgcatcattcaaatttctgccctatcaactttcgatggtaggatagtggcctaccatggtggtgacgggtgacggagaattagggttcgattccggagagggagcctgagaaacggctaccacatccaaggaaggcagcaggcgcgcaaattacccaatcctgacacggggaggtagtgacaataaataacaataccgggctcattgagtctggtaattggaatgagtacaatctaaatcccttaacgagg

SEQ ID NO: 153178 - DNA, 254 bp, Glycine max
ccaccacaacaccctaaccctccaacactatctcaacgcccacgtgcccaatcacaagttgaaaattgcggctctcgaggccgccaacaaatcccatgcaccctacagtgggtccccctccggcgtcgcccttctcgactgccatggtaatgtttttaaaggctcctacatggaatccgccgcgtttaatcccagcttgggccccgtccagggcgccctcgtcgccttcgtcgccggcggcggcggcgactacg

SEQ ID NO: 153179 - DNA, 265 bp, Glycine max
atggcatctcgccgccgcatgttattgaaggtcataatcctcggagacagcggggttggtaaaacatcactgatgaatcagtatgtgaatcgtaaatttagtaatcagtataaggcaaccatcggtgcagattttcttaccaaggaagttcaatttgaagataggttgttcacattgcagatttgggatactgctggtcaagaacggtttcaaagtcttggtgtggctttctaccgtggtgcagattgctgtgtccttgtttatg

SEQ ID NO: 153180 - DNA, 265 bp, Glycine max
atatagcccaagccctatacaaccaaaccctaacacacacccatttgattcagtttccatggctagcctcaaggttgcatttttggctgcagtgctctgcatggttgtggtgagtgcacccatggcacatgcagctatcacgtgcgggcaggtgacgaatagcctgatcaattgcatcggttacctccagaacggaggaacgccgccgtcgggatgctgcaacggagtgaagagcctcaatgccgccgccaagaccaccgccgac

SEQ ID NO: 153181 - DNA, 268 bp, Glycine max
ctcaccccatttctccaccttgccaacaagttagccaaaaggggacacaaaatctccttcttcatacccagaagaacacaagccaagttagaagacctcaatcttcacccaaacctcatcacctttgtccccatcaatgttcctcacgttgatggtcttccttatgatgcagaaaccacttcagatgtaccctcctctttgttcccactcattgccactgccatggacctcacagagaaaaacattgaacttctcctccttgatctca

SEQ ID NO: 153182 - DNA, 265 bp, Glycine max
gtttgcccctacaatgatctactcgctctcttttggtctcggcatgaccccacttccatcaaccgtcagggcaatgatgtgggtgcacagtatagatcaggaatatactactacaacgatacccaagctcgtttaggccaggaatcaaaagatgcaaaacaattggaactgaaggagaagattgtgacagaaatacttccagcaaagaggttttacaaagcagaggaataccatcaacaatatctggagaagggtggaggtcaag

SEQ ID NO: 153183 - DNA, 263 bp, Glycine max
gattgtttgttgttgtaactcgttcttcttcttttgttgttctgtgtttgtgtttgttttttctctcacctgaaaatgtcttgctgcggtggtaactgtggttgcggaagctcctgcaagtgcggcaacggctgcggaggctgcaagatgtacccagacttgagctacactgagtcaaccaccaccgagaccttggtcatgggagtggcacctgttaaggctcaatttgagggtgctgaaatgggtgtgcccgctgagaacga

SEQ ID NO: 153184 - DNA, 265 bp, Glycine max
agccacttcacactcactcactcttgttgccttcatggccaagccagtgtccattgaggtatggaacccaagtggcaaatacagagttgtcagcaccaaaccaatgcctggaactcgttggatcaatcttctcattcaaaatgatgttcgccttgaaatatgtaccgagaagaaaacgattttgtcagttgaagacatcattgctttgattggtgataagtgcgatggagttattggacagttgactgaagactggggagcagag

SEQ ID NO: 153185 - DNA, 265 bp, Glycine max
cgaacgcccaccacctcgtcgttcctttgagtcttccttatcaatctatgttggtaatttgccatgggatgttgacaatacccggctgaagcaaattttcagtaaacacggtaatgttgtgaatgctcgggtagtctatgacagggagtcaggtcgatcacgtggctttggctttgtcacaatgtctgatgagacagaaatgaatgatgccgttgctgctcttgatggcgagagtttggacggaagggcaattaaggtgagtgtt

SEQ ID NO: 153186 - DNA, 266 bp, Glycine max
gccgatgctggagcctccaagacctatcctcaacaagccggaaccatccgcaaaaacggttacatcgtcatcaagggtcgtccctgcaaggttgttgaagtttctacttccaagactggtaagcacggtcatgccaagtgtcactttgttgggattgatattttcactgccaagaagcttgaagatattgtgccctcttctcacaactgtgatgttccccatgtgaatcgtactgattaccagttgattgacattgctgaggatgg

SEQ ID NO: 153187 - DNA, 271 bp, Glycine max
attctgtctgttagcattggagttctccaaagtgacctactcgccttcaatccaaccttacccagatggaaattggatgccatcgagaaatgtgatgtgatggtgtacactaaaatctttctcaagtttccgtataagttctggccgagtggacccgataaggaattcttcatctatgctcacgagcggagaggctactacacattttggcagcacatggagaacgcgtatcctgggtccaatatgttagtggtgacattgactaatgagg

SEQ ID NO: 153188 - DNA, 270 bp, Glycine max
gggagatctctttggttgatgcatggaatgttcagagccaatggagggtgcggttatgttaaaaaaccaaattttctattggagactggtccagatgacgaggtcttcaatcctaaagctaagttacctgtgaagactactttgaaggtgactgtatatatgggggaaggatggtactatgatttcaagcatacacactttgatcaatattcacctccagacttctacacaagagtggggattgctggagtccctaatgatactataatg

SEQ ID NO: 153189 - DNA, 262 bp, Glycine max
cggctcgagggcttcttccctcttatttgtctattctttggattatgcccgtactcgtttagcaaacgatgcaaaggctgcaaagaagggtggcgagaggcagtttaatggcttggttgatgtttacaggaaaaccatcaagtctgatggtgttgctggcctttatcgtgggttcaacatctcatgtgttggaattatagtgtatcgtggtctttactttggaatgtatgattccctgaaaccagtagttttggttggtggg

SEQ ID NO: 153190 - DNA, 263 bp, Glycine max
gaacgctgctgccgaaacccttccggaaccctaaggtaagtgagtaatcagtggttgagaatggtggagaaggcgaagggtagaaaggaggaggtggttacacgtgagtacaccattaacctccacaagcgcctccatggctgcacatttaagaagaaagctcctaaagctattaaggagataaggaaatttgcccaaaaggccatggggaccaatgatgtgagggtggatgtgaagttgaacaagtttgtctggagccaggg

SEQ ID NO: 153191 - DNA, 268 bp, Glycine max
actcgagccgaatcggctcgagatcccagtgactgctttctttctacaactaaccccaatcatcaactcagtcagcgaatgaatctgtggacggacgagaactcctcggtgatggaggccttcatgccatcctccgatctctcctccatctggccccctcccgctcctccgcagccgcaatccacggcggtcttcaatcaggacaccctccagcaccgcctccaggccttaatcgagggcgcccgagagacctggacctacgccatct

SEQ ID NO: 153192 - DNA, 263 bp, Glycine max
cggctcgagaactagtcaatctgaaggttatgggtttattgagtttaatagtcgtgctggagctgagagaattctccaaacatataatggggctattatgccgaatggggggcagagtttcaggttgaattgggcaacttttagtgccggtgagaagtcgcgtcaagatgattcgcctgattacaccatatttgttggtgacttggctgcagatgttactgattaccaccttcaggagacattcagggctcgttacaactcgg

SEQ ID NO: 153193 - DNA, 266 bp, Glycine max
attaaagattcaacaatggcctctgcttctgctactcttctcaagtcatctcctgttcttgacaagtgcgagtgggtcaaaggccagacccttcgccaacctctcgtgagatgtaacccttcctcagcatcagctctcaccatcaaagctgcttcctatgctgacgagctcgtcaaaaccgccaaaacagtggcctcaccggggcgtggtattttggcgatggatgagtcaaatgcaacctgcgggaagcgtttggcatctattgg

SEQ ID NO: 153194 - DNA, 265 bp, Glycine max
ccggcttcgtctggctcaaacaaaagaagagttacacccacaagttcgacaagatcggaaagcttgtctcctacgcgcccgaggtaactgctcatgtccaacaaggtaaaattaccaaactcaccggggttaagaccaaggagctcttgctctggatcacgctcagtgatatctatgttgatgaccctcccactggcaaaatcaccttcaagacccctgccggcctatttaggtcttttcctgtctccgctttcgagattcagga

SEQ ID NO: 153195 - DNA, 266 bp, Glycine max
gtcttacgttgctcataacgttaatcagccccaagagaaagatttgttggagggaaatttttcctttgatattaaatctcgctctagattggaaaaagtttcctctacaaaagcacaatttgttagtggaaaaaccttcaaatatgatataattggtgctggttcacattcttcagaagattttcctgaaaaggaagatcaagaaaaacccaaaaagattgatgccagattgagacaaagaatagatcctcaatataatgaggttc

SEQ ID NO: 153196 - DNA, 267 bp, Glycine max
aacatttctaatctcattctccttctgttcaaacactctctctcatggcatcagataagaagattaggatcggcatcaacgggtttggaaggattggccgtttggtggccagggttgcccttcaaaggaatgatgttgaacttgttgctgtcaacgatcctttcatcaccactgattacatgacatacatgttcaagtacgacaccgttcatggccagtggaagcattttgatgtgaaggtgaaggactctaagacccttctctttg

SEQ ID NO: 153197 - DNA, 264 bp, Glycine max
agctgctttgagagagggtcttccactgaggaaatcagagcaagctcactacttggactgggctgtccatgccttcagaatcaccaatgttggtgtccaggataccacccagatccacactcacatgtgctactcgaacttcaacgacatcatccactccatcatcgacatggacgccgatgttatcaccattgagaactctcgctccgacgagaagcttctgtcagtcttccgcgaaggtgtgaagtatggtgctggaattgg

SEQ ID NO: 153198 - DNA, 259 bp, Glycine max
cgatcctggctcacgatgtacgatggcggcatgccttacacatgcaagtcgaacgggaagtggtgtatccaatggcggtcaggtgaataacgcataagaacctacccttgggacgggaacaacatctggaaacggctgctaataccccgtaggctgatgagcaaaaggaggaatccgcccgaggagggactcgcgtctgattagctagttggtgaggcaatagcttagcaaggcgatgatcagtagctggtccgagaag

SEQ ID NO: 153199 - DNA, 260 bp, Glycine max
cgatcctggctcaggatgaacgctggcggcatgccttacacatgcaagtcggacgggaagtggtgtttccagtggcggacgggtgagtaacgcgtaagaacctacccttgggaggggaacaacagctggaaacggctgctaataccccgtaggctgaggagcaaaaggaggaatccgcccgaggaggggctcgcgtctgattagctagttggtgaggcaatagcttaccaaggcgatgatcagtagctggtccgagagga

SEQ ID NO: 153200 - DNA, 264 bp, Glycine max
gcagctgctgctcctgccaatgatgagcttgccaagtggtatggtcctgacgaaggatcttcttgcctgagggtctcttggaccgatctgagatcccagagtacttgaccggagaagtccccggagactatggttatgacccatttggtcttagcaagaagccagaagatttttccaaatatcaggcatttgaattgattcacgccagatgggcaatgcttggtgctgctggattcatcattcccgaggccttcaacaaatatg

SEQ ID NO: 153201 - DNA, 263 bp, Glycine max
catgaacattaattcacttgcccgcaaatccttggtcaatgcagacggtattatagagaaaacattcttgtggggtaggtactctttggaaatgtctgctgttatttacaaggactgggttttcactgatcaagcattgcctaatgatcttgtcaagagaggagttgcggttaaggatccatctgctccccatggagttcggcttttgatagtcgactatccttatgcttctgatgggctagagatatgggatgccatcaagt

SEQ ID NO: 153202 - DNA, 261 bp, Glycine max
caagccccgatgcgtatgagggcgcggcggtcgctgcaaaacccacggcgcgatccgggcgcatcgtcgtcggtgcaatacccggtggtagtagcaaatattcaaatgagaactttgaaggccgaagaggggaaaggttccatgtgaacggcacttgcacatgggttagtcgaccctaagggacgggggaagcccgtctgatagcgctctgtgcgcgtactccgaaagggaatcgggttaatattcctgaaccgggacgtg

SEQ ID NO: 153203 - DNA, 264 bp, Glycine max
gccaggcaagccccactcaaccaccacacctctcctcgttcacgctacccctttctgctcttcttctacctttcaagttttaaaagtataaagatggcagagacattcctatttacctcagagtcggtgaacgagggacaccctgacaagctctgcgaccaaatctccgatgctgtcctcgacgctatgcctcgagcaggacccagacagcaaagttgcctgcgaaacatgcacctaaaccaacttggtcatggtcttcggaga

SEQ ID NO: 153204 - DNA, 255 bp, Glycine max
gcttctctctgactccttccgttacaaggaaattgagaatggaatgctgtgggaagttgaggggaagtgggttgttaaaggagcagttgatgtagacattggtgcaaacccttctgctgagggtggaggagaagatgagggagttgatgatgcagctgttaaggttgttgacattgttgacacattcagacttcaggagcaacccgcattcgataagaagcagtttgttaccttcatgaagaggtttatcaagaa

SEQ ID NO: 153205 - DNA, 255 bp, Glycine max
gtcaccttcctataatccaccaggttacaaagcaccatcttataatccaccagcttacaagtcaccttcctataacccaccaggttacaaagcaccatcttataatccaccaggttaccagccaccttcatacaatccaccaggttacaaagcaccagcttataatccaccagcttacaagtcaccttcctataatccaccaatttacaagccaccttcctacaatccaccaggttacaaagcaccatcttataa

SEQ ID NO: 153206 - DNA, 252 bp, Glycine max
tctcgagccgaatcggctcgaggttctggcggtatgaaacttgcagtcactgtcaaatcaagtaaagcctctgatgccacacccactacttccactactaccgccactaaatcaaactcgtcttcagcgagtagtgtctcaccaattgttgctatgttcattgtttcctcgatctcttactatgttttgcgtatgctataagtttccccactcagtcaggacagaggcagtgctttctttctttcttatatt

SEQ ID NO: 153207 - DNA, 258 bp, Glycine max
ttttgctttaccaaattccattttccaattcaaaaccctaactccgttcgaagcaccaaatcgtgatggcaccaaaggcagagaagaagccagcagagaagaagcctgtggaggagaagaaatcgacggtgggagacaaggctccggcggagaagaagccaaaggccggaaagaagcttccgaaggagggaggcgccggcggagaaggtaagaagaagaagagaaacaagaagagcgtggagacatacaagatctaca

SEQ ID NO: 153208 - DNA, 261 bp, Glycine max
agagaacaagaacataagggaaccacagcggcggtaacagaagaacaagcagagaatgggtcgagtgagaacgaagacggtgaagaaatcctctcggcaggtgatagagcgtcactactcgcgcatgaccctggacttccacacgaacaagaagcttctggaggaagtggcgataatcccgtcgaagaggctaaggaacaagatcgcggggttctcgacgcacctgatgaagcgcatccagaagggccctgtgcgcggcat

SEQ ID NO: 153209 - DNA, 258 bp, Glycine max
tgtgagtgccatgcggtggagcggatctggaagttgttaacggaggttggggacatgaacctcatgatggatccagaggatttcttgaggctgaagaaggagttagggatgatgagaactgcgggcgaaacggtggcgttttgcttcaggtcgagggagcttgtggaggtggcgagggtgtgtaggaacctgagggagaaggtgccggagatattggaggtggacgtggaccccaagggtgggcccgggatgatggag

SEQ ID NO: 153210 - DNA, 256 bp, Glycine max
gactcctgctaggaagaggctgatgagagacttcaagaggctgcaacaagacccgcctgcagggatcagtggtgccccccaggataacaacataatgctgtggaatgctgtcatatttggtcctgatgatactccatgggatggaggcacgttcaagttgacactccaatttactgaggactatccaaataaaccaccgactgtacgatttgtgtctcgcatgtttcatccaaatatttatgctgatggaagtatt

SEQ ID NO: 153211 - DNA, 254 bp, Glycine max
gttatttctcagcgcgtaaagcatggctttgttggtggagaaaaccacgagtggtcgcgagtacaaggtcaaggacctttcccaggccgacttcggccgcctcgagatcgagctggccgaggttgagatgcccggcctcatggcctgtcggaccgagttcggcccctcccagcccttcaagggggcccgcatcaccggctccctccacatgaccatccagaccgccgttctcattgagaccctcaccgcccttg

SEQ ID NO: 153212 - DNA, 252 bp, Glycine max
ctggacctttgaccaggccacagggaagttggacatagccttcagacacacaggaatctctggaacagacaagtgggttgcatgggctatcaatcccagcaacaacctcaattcagctatgacgggagcacaagctctggtggctatcataccatctagcggtgccccaaatgcatatacttcttccattgcaaatcccggaaccacactggcagagggagccatctcttataatcactcaggattgacggc

SEQ ID NO: 153213 - DNA, 252 bp, Glycine max
tggaaaacccacaggcacgctgagcatggaacacagaaccctagaactcaacctggcttcagcaaaggatctcaaagacttgaatatattctcaaagatggatgtatatgctgtgctttcactctccggcgatcaaaagaccaagactcccgtccacagaaacggcggcaccaacccaacatggaattttccggtcaagttcacttttgatgaatcggtggcgcggcagaaccgtttggccctcgaaatcaa

SEQ ID NO: 153214 - DNA, 259 bp, Glycine max
aaaggattctacccgccgctcgatgggaattgcgcttcaaggcgtctcgtagggctaatccgcctcacgagggtcaccaacggcacgtgcctttggggggccgaggccccctactgctggtcggcaaacggacggcgggcgcacgcgtcgcttctagcccggattctgacttagaggcgttcagtcataatccaacgcacggtagcttcgcgccactggcttactcaaccaagcgcgatgaccaattgtgcgaatcaac

SEQ ID NO: 153215 - DNA, 262 bp, Glycine max
gacatcgcggtttatcaatgatcacctatttcaccatctcaagagatttacttcagagcaacaatcaatgtcggtggatgtaattcgcaaggcactccaagcaacagaagaggggtcatgctgtcttgttggtgttatttgtaatggaaccctttacatagcaaaccttggggattcccgggctgttttgggaagagcagtcaaggcaactggcgaggttttagccatgcaattatcagcagagcacaatgcatcgatagag

SEQ ID NO: 153216 - DNA, 260 bp, Glycine max
cgagataactagaaacagtgtgatgaaaatgaaggtccttgttttcttcgttgctacaattttggtagcatggcaatgccatgcgtacgatatgttccctctccgaatgaacactggctatggtgcccgtactccggaggtgaaatgcgcaagttggaggcttgctgtggaagcacacaacatctttggctttgagaccattcctgaagagtgcgttgaagcaacaaaggaatacatccatggcgaacgatatagatcag

SEQ ID NO: 153217 - DNA, 257 bp, Glycine max
gttggagcctggttcacactcccaggttagtcctcaggcactggagagcatcaaaagggttaagaagttgaccaagatgtctgagaaggttgccactggtgtcctctctggggttgtcaaggtgtctggattcttcacaagttctgtagtcaactccaaagctggaaagaagttctttagccttcttccaggggaaattgtccttgctaccatggatggattcaataaggttttggatgctgcagaagtagctggaa

SEQ ID NO: 153218 - DNA, 258 bp, Glycine max
gtcggatcgcacggcctttgagccggagacgcatcattcaaatttctgacctatcaactgtcgatggtaggacagtggcataccttagtagtgacggtgtagacggataattagggttcgattccggagagggagcctgagaactcggctaccacatccaaggatggcagcaggcgcgcagattagacactcctgacacggagctgtagtgacaatagatgacaataccgggctcattgaatctagtaattggtctga

SEQ ID NO: 153219 - DNA, 250 bp, Glycine max
caaagcacagaactggcatgtctactctgcttctgcagattctgtaactcaatgtgacaatgtttacactcttgagatgtgcatgactggcctggatagagagaaagcacaggttttctacaaagaacaatctgcttcagctgccatgatgactgttaattccggcattagaaaaattcttccagattccgagatttgtgactttgactttgaaccatgtggttattcaatgaactctgttgaaggcgct

SEQ ID NO: 153220 - DNA, 253 bp, Glycine max
cttgttcaccaattaagctttcaagagacaaactgctttgaaaaatgggatccaaggttgttgcatccgttgcccttctcctctccatcaacattcttttcatttccatggttagctccagcagccactacgatccacagccccaaccttctcacgtcactgctcttattacacgacctagttgtccggatctgagtatttgcctcaatattttaggcgggtctctaggaaccgtggatgattgttgtgccct

SEQ ID NO: 153221 - DNA, 237 bp, Glycine max
ttttgctttaccaaattccattttccaattcaaaaccctaactccgttcgaagcaccaaatcgtgatggcaccaaaggcagagaagaagccagcagagaagaagcctgtggaggagaagaaatcgacggtgggagacaaggctccggcggagaagaagccaaaggccggaaagaagcttccgaaggagggaggcgccggcggagaaggtaagaagaagaagagaaacaagaagagcg

SEQ ID NO: 153222 - DNA, 276 bp, Glycine max
tcagaattctgctcgaggctgcttcttccgccactcagcacttcggtcgctctgtgcttcaacaaccatggccggtatcgtagctaccgttccagatccctctcaaattgaggtcatacttttcaaccgctggagcttcgacgacgttgaggttactgatatgtctctggctgattacattggagtgtccccgtcaaagcatgctacatatgttcctcacactgctggtaggtactcagtgatgaggttcaggaaggcgcagtgtcccattgttga

SEQ ID NO: 153223 - DNA, 270 bp, Glycine max
tcggctcggaggcggatgttgacgcaatgtgatttctgcccagtgctctgaatgtcaaagtgaagaaattcaaccaagcgcgggtaaacggcgggagtaactatgactctcttaaggtagccaaatgcctcgtcatctaattagtgacgcgcatgaatggattaacgagattcccactgtccctgtctactatccagcgaaaccacagccaagggaacgggcttggcggaatcagcggggaaagaagaccctgttgagcttgactctagt

SEQ ID NO: 153224 - DNA, 261 bp, Glycine max
cgagataactagaaacagtgtgatgaaaatgaaggtccttgttttcttcgttgctacaattttggtagcatggcaatgccatgcgtacgatatgttccctctccgaatgaacactggctatggtgcccgtactccggaggtgaaatgcgcaagttggaggcttgctgtggaagcacacaacatctttggctttgagaccattcctgaagagtgcgttgaagcaacaaaggaatacatccatggcgaacaatatagatcaga

SEQ ID NO: 153225 - DNA, 257 bp, Glycine max
ctcgagccgagggaaaaatggtgtcgctgaaactgcagaagcgcctctccgcaagcgtgctcaagtgcggcagaggaaaggtttggcttgaccccaatgaagtcaacgaaatctccatggccaattctcggcaaaacatcaggaagttggttaaggatgggtttatcatcaggaagccaaccaagattcactcccgctcacgtgctcgtaggatgaaggaggcaaagaggaagggccgccactccggttatggtaaa

SEQ ID NO: 153226 - DNA, 254 bp, Glycine max
gagaaagaaaaaaggggaatttcaatggcgtcaagggtttctctgaaggcgaaggggaagagttcaaagggctcgaaggctgcggaagatcgatccgcgagcgagtgcctgaaggagtggacgacatgggcgatgcgaaaagcgaaggtcatcactcactacggtttcatccctttggtcatcgtcatcggtatgaactctgaccccaagcccccactttcccagcttctcagccccgtctgatccacctcttc

SEQ ID NO: 153227 - DNA, 249 bp, Glycine max
gtggcagccactggaatattagggaaaggtggtgggttgttggagaggccaaccatagagacaacatcacctggtcgggaatctgaatttgacttgaggaaatcgcggaaaacatccccaccctaccgagttttgctgcacaatgacaacttcaacaagcgagaatatgttgtgcaagtgttgatgaaggtgataccaggaatgaccattgataatgcggttaacatcatgcaggaggcacattataat

SEQ ID NO: 153228 - DNA, 249 bp, Glycine max
gtttattcttctctcggcgtcgccatggacgaagaagaggtgcgcaagatcttcagcaagttcgacaagaacggcgacggcaagatctcgtgcgcggagctgaaggagatgatggcggcgctgggatccaaaacgacgtcggacgaggtgaagcgcatgatggcggagctggaccggaacggcgacggctacattgatttgacggagttcggcgagttccactgcggcggcggtggcgacgggagggag

SEQ ID NO: 153229 - DNA, 252 bp, Glycine max
gttcttccacccccgtaccgtctctgcctctctgcaatccacagccgaaaatgcctttcaagaggtacgttgagatcgggagggttgctcaaatcaactacggcaaggaatatggcaggctcgtcgtcatcgtcgacgtcattgaccagaacagagcacttgtcgatgcccctgatatggtgaggtcccaagtcaatttcaaaaggctttcccttaccgacatcaagattgacatcaagagggtccctaaga

SEQ ID NO: 153230 - DNA, 255 bp, Glycine max
caaagaaggcgtcttcataaacgcctttcttctccgtatccgtttcctcgttcgaattcgctttttgatctgcgaaaatgagagagtgcatctcgatccacattggtcaggctggtatccaggtcggaaatgcttgctgggagctctactgcctcgagcacggcatcgggcccgatgggcaaatgccaagtgacaagacagttggcggtggtgatgatgctttcaatactttcttcagcgagactggtgctggaa

SEQ ID NO: 153231 - DNA, 255 bp, Glycine max
ggatgttggaaggaaaggctatggtgaaagaaacagacatgtcaaccaagatgcagatccatgccatggcctctgcttctcaggcccttgatctctacgatgtttatgattgcatctctattgctgcccatatcaagaaggaatttgatagtgtgtacgggaatgggtggcaatgtgtggtaggatccaattttgggtgctatttcacccattcatcagggactttcatctattttgctctggcgactcttaatt

SEQ ID NO: 153232 - DNA, 261 bp, Glycine max
gagagagataaatgtcctcagtgcaaaggaaacaaaatttcccaggaaaagaaggtgctggaagtgcatgttgagaagggtatgcagcagggtcagaagattgtttttgaaggacaagctgatgaagctcctgacacaatcacaggagatattgtttttgtattgcaagtaaaggatcacccaaggttcagaagggaacaagatgacctctttattgatcaaaatctcagcttaactgaggcactctgtggctttcagttt

SEQ ID NO: 153233 - DNA, 249 bp, Glycine max
gagcgagataaatgtcctcagtgcaaaggaaacaaaatttcccaggaaaagaaggtgctggaagtgcatgttgagaagggtatgcagcagggtcagaagattgtttttgaaggacaagctgatgaagctcctgacacaatcacaggagatattgtttttgtattgcaagtaaaggatcacccaaggttcagaagggaacaagatgacctctttattgatcaaaatctcagcttaactgaggcactctgt

SEQ ID NO: 153234 - DNA, 253 bp, Glycine max
aacaaaattgcgaagaaccctaattgattgattgattgattgattcccatggcgtcccgaagaggtggagtctcactcccagaaagaccaagcaacaactcaggctccgtcctggcgaagatctcgcgctcctccatcgtcacccgcggcaaggaagccgccgtcgacgccgcattcgtcgccaagaagctcctccgcagcaccggcaaggccgcgtggatcgccggcaccaccttcctcgtcctcgtcgtcc

SEQ ID NO: 153235 - DNA, 236 bp, Glycine max
gggaagacggcaaaatggatccgtaacctcgggaaaaggattggcactgagggctgcgcacgggggtcccagtcccgaacacgtcggctgtcagaggactgctcgagctgcttccgcagcgagagcgggtcgtcacgtgccggtcgggggacggattaggaacggacccttcagggcctattccccgggcgtcgaacagtcgactcagaactggtacggccccggggaatccgact

SEQ ID NO: 153236 - DNA, 249 bp, Glycine max
caaccctctctctatattccattgccacccagttttgaatatatttttattccttctttgtttcttcagcttcttccatacacataaccatgtcttctcagactgttgtcctcaaagttggtatgtcatgtcaagggtgtgctggagcagtgaacagggttttgggaaaaatggaaggtcgttgagtcatttgacattgatctgacggagcagaaggtgacagtgacaggaaatgcggagccagatgca

SEQ ID NO: 153237 - DNA, 250 bp, Glycine max
tatagcccaagccctatacaaccaaaccctaacacacacccatttgattcagtttccatggctagcctcaaggttgcatttttggctgcagtgctctgcatggttgtggtgagtgcacccatggcacatgcagctatcacgtgcgggcaggtgacgaatagcctgatcaattgcatcggttacctccagaacggaggaacgccgccgtcgggatgctgcaacggagtgaagagcctcaatgccgccgcca

SEQ ID NO: 153238 - DNA, 247 bp, Glycine max
aaggattctacccgccgctcgatgggaattgcgcttcaaggcgtctcgtagggctaatccgcctcacgagggtcaccaacggcacgtgcctttggggggccgaggccccctactgctggtcggcaaacggacggcgggcgcacgcgtcgcttctagcccggattctgacttagaggcgttcagtcataatccaacgcacggtagcttcgcgccactggcttatcaaccaagcgcgatgaccaattgt

SEQ ID NO: 153239 - DNA, 243 bp, Glycine max
gtcgaaacccggaaggtgagcttcaagtccgacgtgtacagcttgggagtgttgctgctggagcttctaacgggaaaagcgccaaaccaagcctcgctcggggaagagggcattgatcttcccaggtgggttcagtcagttgtgcgtgaagaatggaccgcagaagtgttcgatgcggactcatgaggttccaaaacatcgaggaggagatggttcaactgttgcaaattgctatggcgtgcg

SEQ ID NO: 153240 - DNA, 247 bp, Glycine max
ttgttctatctgtgacgagcatcatggcctcaagagcagtgttattgttggctatgtgtgtgcttccggcgatggttgtggccattcgcccagcaaagaaccctttttgcgtgaagggtcgtgtctactgtgacccttgccgtgctggttttgagacctcagctaccacctacattgctggtgctgagattatgttgcaatgcaagagcagggttagcaacgaggttgtgtacacgaagaaggggta

SEQ ID NO: 153241 - DNA, 249 bp, Glycine max
gcttgaagatgagcactaacttgcttggtttggaggttagggatgatgagttgttgtgcatgctcatggaaggtgatttggatggagatggggcccttaaccagatggagttttgcattctcatgtttaggttgagtccatgcttgatggatatgcaaggtatggttccagtgaatcatgttaatggcttaatgtcatataatgtagtgtaatatcgtaatacaatgttcttctagctagctagctata

SEQ ID NO: 153242 - DNA, 256 bp, Glycine max
gtgaggtagaacccttccactgtggtgactctgcgatgggtgcctacaagtatgtttcagagctatggcgcaagaagcagtctgatgtcatgcgcttcttgcagcgggtgaggtgctgggagtataggcagcaaccttccattgttcgtttgacaaggtctacccgccctgacaaggctcgtcgcttgggcttcaaggctaagcagggctatgtgatttaccgtgttcgtgttaggaggggtggccgaaagagacc

SEQ ID NO: 153243 - DNA, 256 bp, Glycine max
cacatacagaacagaatctgagaaccagaccctctcaaaccggaaccgcaaatgtagcccaagagcattcgcatccgtaacttaccaacgcacctgctgctaatcgctgtttgtctgttcacctcttcgtccgcttccaagatcggagaaaattgtgggtcagacaacaaatgcgacgctggactcagctgccacacatgtcctgccaatggaaatacccgaccaagatgttcgcggacacaacctttgagcccca

SEQ ID NO: 153244 - DNA, 257 bp, Glycine max
caacatctttagcccattattttgatgtgatatcaggaactagtactggtggcctcatgactgctatgttagcagccccaaactcatctaatgccaatagtcctctctttactccctcggaagtcgtgcaattctacaagaactatggccctaaaatatttgaacctagagcttggtatgatcttgacaaatgtcccaaattcaatggagagttcttacatgatataactcgtcagatattgaaagaaacacgactg

SEQ ID NO: 153245 - DNA, 253 bp, Glycine max
caattaagctttcaagagacaaactgctttgaaaaatgggatccaaggttgttgcatccgttgcccttctcctctccatcaacattcttttcatttccatggttagctccagcagccactacgatccacagccccaaccttctcacgtcactgctcttattacacgacctagttgtccggatctgagtatttgcctcaatattttaggcgggtctctaggaaccgtggatgattgttgtgccctcatcggtgg

SEQ ID NO: 153246 - DNA, 249 bp, Glycine max
ctcgagccgaatcggctcgagctcaaatcctctgagagacaaaaagcttagggttttgcatctcgggtcagacagactcaaccatgggaggaggcaatgcccagaagtcaaagatggctcgcgagaagaacctcgagaagcagagggctgccgctaagggaagccagttggattcaaacaagaaagccatgtctattcagtgcaaggtgtgcatgcaaacacctatatgcaccacatgactcgtgaagt

SEQ ID NO: 153247 - DNA, 213 bp, Glycine max
caaattcctactgccttcgatccttttgctgatgcaaatgctgatgactcgggtgctgggtcaaaggagtatgtgcatattcgcgttcagtagcgaaatggtaggtgaagcctgacaaccgatcagggattgcaaaaagcgttcgagctaactcactacggtgtcaacgctatggtcgagttcagctgcattagctcagttgttaaggaccca

SEQ ID NO: 153248 - DNA, 249 bp, Glycine max
cgctcgagccgattcggctcgagcaacagcacaaagcgggttactgtacgttcaagctaccatctctctctctctatcttagagcctccttgccagaagttaaaatggcccaagaaactttcctattcacatctgaatcagtgaacgaggggcaccctgacaagctctgtgaccagatctccgatgctgtgctcgatgcatgcttggagcaggaccctgacagcaaggttgcctgtgaaacctgcacca

SEQ ID NO: 153249 - DNA, 253 bp, Glycine max
ctttaccacattccacatgccagtcgaaaaccctaactccgttcgaagcactaaatcgtgatggcaccaaaggcagagaagaagccagcagagaagaagcctgtggaggagaagaaatcgacggtgggagacaaggctccggcggagaagaagccaaaggccggaaagaagcttccgaaggagggaggcgccggcggagaaggtaagaagacgaagagatacaagaagagcgtggagacatacaagatctaca

SEQ ID NO: 153250 - DNA, 255 bp, Glycine max
gatcaggacaagaacggcctcatatccgccacggagctctgccaggtgctgaaccgcctcggaatgaagtgctccgtggaggactgccacaacatgatcaaatccgtggattccgacggcgacggcaacgtcaacttccccgagttcaagcggatgatgagcaacaatcgcgacaatgctagcaatgctgaagaagaaacagattaggccctttggatttgaatttcatagataggctaggcactttcgctgcac

SEQ ID NO: 153251 - DNA, 257 bp, Glycine max
  unsure (1)..(257): unsure at all n locations
atcgaaccgtctagtagctggttccctccgaagtttccctcaggatagctggagcccgcgggcgagttctatcgggtanagccaatgattagaggcatcgggggcgcaacgccctcgacctattctcaaactttaaataggtaggacggtgcggctgctctgttgagccgcgccatggaatcgagagctccaagtgggccatttttggtaagcagaacttgcgatgcgggatgaaccggaagctgggttacggtgcc

SEQ ID NO: 153252 - DNA, 251 bp, Glycine max
atccagagttgttagagcttgtagaaatggagctccgtgagcttctgagcttctacaagttccctggagatgaaatccctatcattagaggttcagcattgtctgctttacagggtacaaatgatgagattggaagacaggccatcctaaaattaatggatgctgttgatgaatacattcctgaccctgttcgccaacttgataagccttttctaatgcccattgaagatgtattttcaattcagggacga

SEQ ID NO: 153253 - DNA, 248 bp, Glycine max
gaagcggggcactgccctctttttggacccaaggtcggcttcggccggtcgatccgggcggaagacattgtcaggtggggagtttggctggggcggcacatctgttaaaagataacgcaggtgtcctaagatgagctcaacgagaacagaaatctcgtgtggaacaaaagggtaaaagctcgtttgattctgatttccagtacgaatacgaaccgtgaaagcgtggcctatcgatcctttagtccttc

SEQ ID NO: 153254 - DNA, 249 bp, Glycine max
gcgggctctctggccgccggtgggcttgtggtgatcctcagcctttgcctcacaatctatgggatttcatccttcaacgaaggagccccatccactgctccgtcgctgaccttgacgggccgcaagaaggagcccgatcagctccaaactgctgatgggtgggccaagttcaccggaggcttcttcttcggaggcatttcgggtattatttgggcctacttcctcctcggcgtcttggaccttccatac

SEQ ID NO: 153255 - DNA, 206 bp, Glycine max
attttccctcactttctcgctccccaaacgcccctctctctcctccaatggccgaccagctcaccgacgaccagatcgccgagttcaaggaggccttcagcctcttcgacaaggacggcgatggttgcattactaccaaggaacttgggactgttatgaggtcacttggtcaaaacccaactgaggcagaactgcaggatatgata

SEQ ID NO: 153256 - DNA, 252 bp, Glycine max
ctcgagccgaatcggctcgaggccatgcatgtgtaagtatgaactaattcagactgtgaaactgcgaatggctcattaaatgcagttatagtttgtttgatggtatctactactcggataaccgtagtaattctagagctaatacgtgcaacaaaccccgacttctggaagggatgcatttattagataaaaggtcaacacaggctctgcctgttgctttgatgattcatgataactcgtcggatcgcacgg

SEQ ID NO: 153257 - DNA, 253 bp, Glycine max
tttcaagagacaaactgctttgaaaaatgggatccaaggttgttgcatccgttgcccttctcctctccatcaacattcttttcatttccatggttagctccagcagccactacgatccacagccccaaccttctcacgtcactgctcttattacacgacctagttgtccggatctgagtatttgcctcaatattttaggcgggtctctaggaaccgtggatgattgttgtgccctcatcggtggtcttggtga

SEQ ID NO: 153258 - DNA, 259 bp, Glycine max
atttcactgattttggtagctaggacaattaaattttactatagggcctcatcaacgagatcactccctcgtgggtggtcctcgccatgggttccgtcctcaacttctttggctacttcatgatatggctggcggtgacaaataaaatacccaagccgcacgtgtggcacatgtacctctacatctgcataggctcgaattctcagtccttcgccaacaccggttcccttatgacttgcgtaaagaacgtcccagaaag

SEQ ID NO: 153259 - DNA, 258 bp, Glycine max
ggggaaatgatactacaagccactaggcatgggtctagcaaaggaaacaataatgggaggtggaggccgtgtggccaaagttgaaattcagcagaagaagcctctctcaagggttccaaacacaaagccaccattcactgttggccaactcaagaaagccattccaccgcactgctttcagcgttccctcctcacttcattgtcctatgttgtttatgacctttcattggctttcattttctacattgccaccaccta

SEQ ID NO: 153260 - DNA, 252 bp, Glycine max
gccttgccagaaggtgcattgtccaagtttcctatgccattggtgtccctgagcccttgtcagtgtttgtggacacttatggaactgggaagattcctgacaaggagattcttcaaattgtgaaggagaatttcgacttcagacctggaatgatcaccattaacttggaccttaagaggggtggccataggttcctcaagacagctgcttatggacactttggaagggatgaccctgacttcacctgggaag

SEQ ID NO: 153261 - DNA, 251 bp, Glycine max
ctggacctttgaccaggccacagggaagttggacatagccttcagacacacaggaatctctggaacagacaagtgggttgcatgggctatcaatcccagcaacaacctcaattcagctatgacgggagcacaagctctggtggctatcataccatctagcggtgccccaaatgcatatacttcttccattgcaaatcccggaaccacactggcagagggagccatctcttataatcactcaggattgacgg

SEQ ID NO: 153262 - DNA, 249 bp, Glycine max
agcaaatggccttgctggtatccttcatgtgctgctacattttccacttccaagtgaggatgctgaggatgtcaagggaactttgtggtacctcatgagtaagcgtttccctcacagtggaaactatccctccagtgaaggtaatccaagggataagttagtgcaatggggtcatggggcgactggcatggccatcacgttgtccaaagcagcagaggtatttcctaatgacagagctctatgagatgc

SEQ ID NO: 153263 - DNA, 231 bp, Glycine max
gctttgaagaatggagatccaaggttgttgcatccgttgcccttctcctctccatcaacattcttttcatttccatggttagctccagcagccactacgatccacagccccaaccttctcacgtcactgctcttattacacgacctagttgtccggatctgagtatatgcctcaatattttaggcgggtctctaggaaccgtggatgattgttgtgccctcatcggtggtc

SEQ ID NO: 153264 - DNA, 251 bp, Glycine max
ggtggtgttcattgcaagctccttagccattttttggtgcatgcgttttcatcccatggtcaggagaagctacgatagggacctagacacttttcgccactatttccttgttggggcaagctttgctttggcactcatcttgcatgaaaagttcactgttcaagagattttctgggcattttcattatacttggaggcagtggcaatattacctcagttggttttgttgcaaagaagtggaaatgtggaca

SEQ ID NO: 153265 - DNA, 253 bp, Glycine max
cacttagttgcttccaattaagatggttctgctagagaagctctgggatgatgttgtggctggccctcaacctgagcgtggccttggcaagctcagaaaactcaccaccctcaaaactattgatgaaggagaaagtagcaagctgcagaagacgttgtcgatgccgtcgacaccaacaaccccgatgactccgacgactccaacgacaccgggatcggcccgtaaagctgacaacgtttggaggagcgtcttc

SEQ ID NO: 153266 - DNA, 239 bp, Glycine max
gctgaactcggcccctcagttttattctttggatgcaggaaccgtcaaatggactacatctatgaagacgagttgagtcacttcgttaatactggcgcacttgatgagctcattcttgccttctctcgagagggacccaccaaggagtatgtacaacataaaatgatggagaaggcttcagaaatttggagcatgatatcacaaggagcttacatttatgtgtgtggtgatgccaaggg

SEQ ID NO: 153267 - DNA, 258 bp, Glycine max
ggttactcagtggaatttggacttcacggatcacagcgaacagggagataggtaccgagagcttgctaaccgagttgatgaggctcttggattcatggctgctgctgggctcacagtggaccatcccataatgagaacaactgaattctggacatctcatgagtgcttattgttgccttatgaacaatccctcaccaggttggattcaacttctggtctctactatgactgttcagcccatatgctctgggttgggga

SEQ ID NO: 153268 - DNA, 253 bp, Glycine max
cgattagccgaaaattgcaagaacggcttcaggctcttgcgatcaacaaacgcagcgttttgatctcagatttgagggggagagaatggcaacaacagtgagaagtctgaagataaagacaagtacgtgcaaacgtatagtgaaggagctgcattcttatgagaaggaagttgagagagaagctgccaaaacagctgatatgaaggacaaaggagccgatccctatgatctcaagcaacaggaaaatgtcttg

SEQ ID NO: 153269 - DNA, 247 bp, Glycine max
cagttctctcatgggctcagagagttaaaattgctgttggagcagccaggggacttgaatatcttcatgaaaaggcagagattcatatcatccatcgttacattaagtctagtaacatacttctttttgatgatgatgttgcaaaggttgctgattttgatttgtcaaatcaagcccctgatgcagcagcacgtcttcattctactcgtgttcttgggacctttggttatcatgctccagaatatgc

SEQ ID NO: 153270 - DNA, 250 bp, Glycine max
ccaagccccactcaaccaccacaccactctctctgctcttcttctacctttcaagtttttaaagtattaagatggcagagacattcctatttacctcagagtcagtgaacgagggacaccctgacaagctctgcgaccaaatctccgatgctgtcctcgacgcttgccttgaacaggacccagacagcaaggttgcctgcgaaacatgcaccaagaccaacttggtcatggtcttcggagagatcaccac

SEQ ID NO: 153271 - DNA, 200 bp, Glycine max
aaggattctacccgccgctcgatgggaattgcgcttcaaggcgtctcgtagggctaatccgcctcacgagggtcatcaacggcacgtgcctttggggggccgaggccccctactgctggtcggcaaacggacggcgggcgcacgcgtcgcttctagcccggattctgacttagaggcgttcagtcataatccaacgcacg

SEQ ID NO: 153272 - DNA, 249 bp, Glycine max
tttacttattccgtgaatcggaagcggggcactgccctctttttggacccaaggtcggcttcggccggtcgatccgggcggaagacattgtcaggtggggagtttggctggggcggcacatctgttaaaagataacgcaggtgtcctaagatgagctcaacgagaacagaaatctcgtgtggaacaaaagggtaaaagctcgtttgattctgatttccagtacgaatacgaaccgtgaaagcgtggcct

SEQ ID NO: 153273 - DNA, 250 bp, Glycine max
gctttgaaaaatgggatccaaggttgttgcatccgttgcccttctcctctccatcaacattcttttcatttccatggttagctccagcagccactacgatccacagccccaaccttctcacgtcactgctcttattacacgacctagttgtccggatctgagtatttgcctcaatattttaggcgggtctctaggaaccgtggatgattgttgtgccctcaccggtggtcttggtgccattgaagccatt

SEQ ID NO: 153274 - DNA, 253 bp, Glycine max
caaaggattctacccgccgctcgatgggaattgcgcttcaaggcgtctcgtagggctaatccgcctcacgagggtcaccaacggcacgtgcctttggggggccgaggccccctactgctggtcggcaaacggacggcgggcgcacgcgtcgcgtctagcccggattctgacttagaggcgttcagtcataatccaacgcacggtagcttcgcgccactggcttttcaaccaagcgcgatgaccaattgtgcga

SEQ ID NO: 153275 - DNA, 258 bp, Glycine max
gccaaatgcctcgtcatctaattagtgacgcgcatgaatggattaacgagattcccactgtccctgtctactatccagcgaaaccacagccaagggaacgggcttggcggaatcagcggggaaagaagaccctgttgagcttgactctagtccgactttgtgaaatgacttgagaggtgtaggataagtgggagctggaaacagcgaaagtgaaataccactacttttaacgttattttacttattccgtgaatcgga

SEQ ID NO: 153276 - DNA, 250 bp, Glycine max
ccaacaccaaccccaagttccccactatcctccaaaactacatccgaaacgcgcgtttcaacacctcctcgacgcgaaaaccattactcatcgtcactccccagcaagaatcacacgtccagggcacagtaatctgcgccaaaagcgttgaaattcaactcaaaatcagaagcggaggccatgattacgagggcatctcgtacatctccgaggaacccttcgtcatcctcgacatgttcaactatcgcag

SEQ ID NO: 153277 - DNA, 238 bp, Glycine max
gacaatgctgccaaagtgacaggcatgcttcttgagatggaccagactgaagttctgcatttgctcgagtcgccagaagccctgaaagcaaaggtggcggaggcaatggacgtcctaagaaatgttgctcagcaacaggctggcggtactgcggatcagctggcttcattatctcttaatgacaaccttgtttcttaaggtttatattttggattgatttagtgacgatgggttgtta

SEQ ID NO: 153278 - DNA, 140 bp, Glycine max
gctgatatcattgttgagtccaccggagttttcaccgataaggacaaggccgccgcacatttgaagggtggtgcgaagaaggttattatttctgcccccagtaaggatgcccccatgtttgttgttggtgttaacgagca

SEQ ID NO: 153279 - DNA, 248 bp, Glycine max
gcgagcgagcgagcagtttcaaagagaggatttgggattgggaaggcgaggaattgcgctgcgtctcttcctcttctctttcgattcatccctcattcataatcttccaatccaacaacctcagcctcacactcacacatacacacatctgaacgcgtatcgtccctcccatggcttcaaagcgcatcctcaaggagctcaaggacttgcagaaagacccaccaacttcttgcagcgctggtccagta

SEQ ID NO: 153280 - DNA, 250 bp, Glycine max
gatttggttgaatattacatcccattggtgaagagattggcagcaggtgaatggtttaccgcccgagtctctgcatgtggactatttcatattgcataccctagcgcaccagaaacatcaaagacagagttgagatcaatatacagtcagttatgtcaggatgatatgcctatggttagaaggtcggctgcatcaaatcttgggaaatttgctgcaactgttgaatatgctcatttgaaggctgatgtca

SEQ ID NO: 153281 - DNA, 248 bp, Glycine max
atagtggcctaccatggtggtgacgggtgacggagaattagggttcgattccggagagggagcctgagaaacggctaccacatccaaggaaggcagcaggcgcgcaaattacccaatcctgacacggggaggtagtgacaataaataacaataccgggctcattgagtctggtaatgggaatgagtacaatctaaatcccttaacgaggatccattggagggcaagtctggtgccagcagccgcggta

SEQ ID NO: 153282 - DNA, 241 bp, Glycine max
cccctgtcaagcaaggatcagacagacctttgtggtttgcatcaaagcaaagtctttcttacttggatggcagccttccgggtgactatggatttgaccctctgggactttcagaccctgaaggaacaggagggttcattgagccgaaatggctagcatatggtgagataatcaatggtcgttatgcaatgttgggtgcagttggtgcaatagcacctgaaattctaggcaaggctggtct

SEQ ID NO: 153283 - DNA, 254 bp, Glycine max
  unsure (1)..(254): unsure at all n locations
gacaatttgtccatcaacagaggaacatagtccgaggaacagccaacacatgtatggtagggagttccaatcgatgttggacggactcgacgaggaagggtgtgttgaagaaccggggtatcaatctgagaagaagcgtcgtctaagtgtggatcnagtgaaggctttggagaagaactttgaggttgaaaacaagcttgaacctgagaggaaggtgaagcttncccaagaacttgggttgcaacctagacagg

SEQ ID NO: 153284 - DNA, 250 bp, Glycine max
ctcgagccggtccaaatctgcttctgtgcaacctcatgcagctgaatctttctctgttggatatattcagatgaagactgcagcgaactgttcttacctggtagttatatctacgagttgttcatcgcctaagttcactacggataagattggtattacgtttggcgatgcttatggcaaccaggtatatgaaccaagactggatgatccaatttcaaggacctttgagcagtgttcttcagatacattt

SEQ ID NO: 153285 - DNA, 248 bp, Glycine max
caagtgctgcagagccgcattttgcttgcaattcagaaactttgtgcgtagaggggacgaaacaatacaatggcttacgctgcaatgaagcctactaaggccggcttggaggagcctcaggagcagatccataagattaggatcaccctttcctctaagaacgtcaagaatctcgagaaagtgtgcgccgaccttgttcgtggtgccaaggacaagcgcctcagggtgaagggacctgttaggatgcc

SEQ ID NO: 153286 - DNA, 218 bp, Glycine max
aaaaacctcgtccgagaacttgtatagagaaggatttcccgcggcgcagagttcttccataccaacttagcagtccggcgctgctattggcataacaaccggtacaccataggttggcccaacccagtcctctcgtactagggttggctcctcgcagttctccctttaacaccacgggaggttaggaccggacctgtttaaggaggtcctaaaccaaa

SEQ ID NO: 153287 - DNA, 248 bp, Glycine max
cggctcgagaattatttacaagactggaatcatgggatggataaaattctggttgatgccatggttgggctatcacttctggatgagtacgtttaccatggtacatcatactgcaccgcatataccattcaaatactcagaagagtggaatgctgcgcaagcacagcttaatggaactgttcattgtgattatcctaaatggatcgagatcctatgtcacgatattaatgtccatattccacaccaca

SEQ ID NO: 153288 - DNA, 248 bp, Glycine max
gaaaaatacaggtgttaccaggttgtggacgagatgagctattgactatcatggattactcgtctctaccacatttctgtcgaagagaaggctctggatcatccagacattctgagagtggtagtgaaaattgctattccttggatcatcccttccatcaagagctctacaatcacatcaagcagcaagccagactccgtgaagctgttgaacccatcaagcagggatcatttcatgtagattttcca

SEQ ID NO: 153289 - DNA, 246 bp, Glycine max
gttcaccaattaagctttcaagagacaaactgctttgaaaaatgggatccaaggttgttgcatccgttgcccttctcctctccatcaacattcttttcatttccatggttagctccagcagccactacgatccacagccccaaccttctcacgtcactgctcttattacacgacctagttgtccggatctgagtatttgcctcaatattttaggcgggtctctaggaaccgtggatgattgttgtg

SEQ ID NO: 153290 - DNA, 247 bp, Glycine max
ttcaagactgatggaccccctgcaacagctttgggatttaatcctccagataaggatataatgaaaaagcctcctcgtcacagtgatgactcattaattaatttgtggattttattccgctatctggttattgggatttatgttggattagctacagttggtatcttcatcatatggtatacacatggttccttctttggtattgaccttagtggggatggacatagtcttgtgacttacacccaac

SEQ ID NO: 153291 - DNA, 249 bp, Glycine max
ctgtagcgtagcatggctttcagagttggaggagcgggaggaggaaatgcctcttctggcatgggtgttgctgagcatagcgtaagcacgttcctggaattgcagaggaagaaagttcatcgctatgtgatttttaaaattgacgagaaaaagaaagaggttgttgttgaaaaaactggaggccctgctgagagctatgatgatttcactgcatccttgcctgaaaatgattgccgatatgctatcttt

SEQ ID NO: 153292 - DNA, 248 bp, Glycine max
gtgaattttgagaatgctgatgatgctgctagggctgttgaggctctcaatggcaaaaattttgatgacaaagaatggtatgttggaaaagctcagaagaaatctgaaagggagaatgaattgaaacaacgatttgagcagagcatgaaagaagctgctgataaatatcaaggcgcaaacttgtatgtaaaaaatttagatgatagcattggtgatgaaaaacttaaggagctgttctccccttttgg

SEQ ID NO: 153293 - DNA, 247 bp, Glycine max
ctcgagccgattcggctcgagatatagcccaagccctatacaaccaaaccctaacacacacacatttgattcagtttccatggctagcctcaaggttgcatttttggctgcagtgctctgcatggttgtggtgagtgcacccatggcacatgcagctatcacgtgcgggcaggtgacgaatagcctgatcaattgcatcggttacctccagaacggaggaacgccgccgtcgggatgctgcaacgga

SEQ ID NO: 153294 - DNA, 247 bp, Glycine max
gacaatgctgccaaagtgacaggcatgcgtcttgagatggaccagactgaagttctgcatttgctcgagtcgccagaagccctgaaagcaaaggtggcggaggcaatggacgtcctaagaactgttgctcagcaacaggctggcggtactgcggatcagctggcttcattatctcttaatgacaaccttgtatcttaaggttgataggttggatttatttagtgacgatgggttgtcattttcggca

SEQ ID NO: 153295 - DNA, 180 bp, Glycine max
cagaaaaacaagtagttgagaactaagaagaaggaaatggcttcctcaatgatctcctccccagctgttaccaccgtcaaccgtgccggtgccggcatggttgctccattcaccggcctcaaatccatggctggcttccccacgaggaagaccaacaatgacattacctccattgctagc

SEQ ID NO: 153296 - DNA, 223 bp, Glycine max
gccacgacaacgcagcagcgcttctggctgctggccttgctcgcacctttgacagaatgccttatctgctgtctctgtcttcctttgtggctgacgatgttgccgctgctgttcctgctgctcaagatctgggggagcagtggtcttattaatggatgtgcttcaattcaaatagtctcgcactagtcatcattccctttgtttcggttacttgcttggtggt

SEQ ID NO: 153297 - DNA, 74 bp, Glycine max
cgacttctccttcctctaaatgataaggttcagtggacttctcacaacgtcgcgggcagcgaaccgctcacgtc

SEQ ID NO: 153298 - DNA, 250 bp, Glycine max
tctcgagccgattcggctcgaggccctatacaaccaaaccctaacaagcacccatttgattcagtttccatggctagcctcaaggttgcatttttggctgcagtgctctgcatggttgtggtgagtgcacccatggcacatgcagctatcacgtgcgggcaggtgccgattagcctgatcaattgcatcggttacctccagaacggaggaacgccgccgtcgggatgctgcaacggagtgaagagcctca

SEQ ID NO: 153299 - DNA, 220 bp, Glycine max
ctcaagtctctcgaagcctctttctctctcttctagaagctatctgtgtttggtgttactaagtctccaacaagcaaagtacatggttgatttggaaatccaggtccccaccccattcgacccgtttgccgaggcgagagaatcggatgcccccggagcaaaggagtatgtgcatattcgaattcagcagaggaatgggaagaagagtctgaccacagtg

SEQ ID NO: 153300 - DNA, 252 bp, Glycine max
tgaaaaatgggatccaaggttgttgcatccgttgcccttctcctctccatcaacattcttttcatttccatggttagctccagcagccactacgatccacagccccaaccttctcacgtcactgctcttattacacgacctagttgtccggatctgagtatttgcctcaatattttaggcgggtctctaggaaccgtggatgattgttgtgccctcatcggtggtcttggtgacattgaagccattgtgtgc

SEQ ID NO: 153301 - DNA, 256 bp, Glycine max
ctcgagccgattcggctcgagaaaggattctacccgccgctcgataggaattgcgcttcaaggcgtctcgtagggctaatccgcctcacgagggtcaccaacggcacgtgcctttggggggccgaggccccctactgctagtcggcaaacggacggcgggcgcacgcgtcgcttctagcccggattctgacttagaggcgttcagtcataatccaacgcacggtagcttcgcgccactggcttttcaaccaagcgc

SEQ ID NO: 153302 - DNA, 280 bp, Glycine max
acggctgaggtgttcgaggtggcgccggatgtcgccgttgttgagttttcgaagtccgccggcgacacgttggactacgcgaagttctgtgaggaggacgtgaggcccgcgctgaaggacattgtttggacgtggcaaggggatgccacgtgtgctgctaacgttcccgcctgtcacggtgaggagtgtcataagcaggttgttgttgttagtactatataaattcattaattataattagcgtgacagtccacggagagggttctagaaacggtaatgt

SEQ ID NO: 153303 - DNA, 220 bp, Glycine max
ctccgaattagggttttccaattcgcagagcaactcaacacaacgaaccaaaccaacaatgtcgcagccgcagcctcagtcgcagccgcaacacgggcaagcggcgctggagcaggtgcagtgcttcggtcgcaagaagacggcggtggccgtgacctactgcaagcgcgggcgcggcctcatcaagatcaacggctgccccatcgagctcgtcgagccg

SEQ ID NO: 153304 - DNA, 276 bp, Glycine max
ctcggataaccgtagtaattctagagctaatacgtgcaacaaaccccgacttctggaagggatgcatttattagataaaaggtcaacacaggctctgcctgttgctttgatgattcatgataactcgtcggatcgcacggcctttgtgccggcgacgcatcattcaaatttctgccctatcaactttcgatggtaggatagtggcctaccatggtggtgacgggtgacggagaattagggttcgattccggagagggagcctgagaaacggctacc

SEQ ID NO: 153305 - DNA, 277 bp, Glycine max
gtctggccctattcctaatgatcactggctccatttctatcaacaaaaccaattcccctcttccgtttccgacgccacaaccgtgacaaccaccgccgcgccggccaagctaagcccagaaggcggagtctcaaagcccattagacggcgttcacgggcctcaaggagaactcccaccactctgctgaacacggacaccagcaatttccgggccatggtgcaacagttcactggagctccttctgcgcctgatatgtttgggagcccagtccctgtc

SEQ ID NO: 153306 - DNA, 277 bp, Glycine max
cccagtttcactttctcattattttctctcctattgataaagaaacagagagagagagaaaaaaatgcctgcggtaggaggtattagcaacggagggggcaaggagtaccctggaagcctcactccttttgtgacggtaacatgtatagttgcagctagtgaatcctccagaaaagtggagcacccgtggaggaacttgttgcaaagaaagtacagaccccacctcaccatggctgtgctgattccattcttccagcaactcactggaatcaatgtc

SEQ ID NO: 153307 - DNA, 279 bp, Glycine max
actcgagccgaatcggctcgagaagatgatgagtcctttaacggttacttttccaagatgccactggcttgcaatcccatttgctgattcagacacacgcagccgccttgatgaattgtttcatgtgagggggattccccatcttgcattacttgatgaagctggcaatgttgtcactgaagatggagttgatgttatacgcgaatacggtgttgaaggatacccgtttacatcagcaaggatccaagagttgagagatcaagaagaggaagctaggag

SEQ ID NO: 153308 - DNA, 277 bp, Glycine max
cctggacctgcttctgagagagcctttggactctacaaccctgatcaatccatgatctatgatgctggcctctccaaacagcaagaaactagtagccccgtgccgacggttgccccgactactccggatgtgtcaaaatctccctctactccaaagccaacagtttcaagtccaaccaaaacaaataatagtgcaacatggtgtgtgccaaaaggaggagtggcagatgcacagttacaagcaaatttggattatgcttgtgggcaagggattgatt

SEQ ID NO: 153309 - DNA, 280 bp, Glycine max
ttgcccttctcctctccatcaacattcttttcatttccatggttagctccagcagccactacgatccacagccccaaccttctcacgtcactgctcttattacacgacctagttgtccggatctgagtatttgcctcaatattttaggcgggtctctaggaaccgtggatgattgttgtgccctcatcggtggtcttggtgacattgaagccattgtgtgcctttgcatccaactcagggccctcggaatattaaaccttaaccgtaatttgcagttaat

SEQ ID NO: 153310 - DNA, 280 bp, Glycine max
agaatccagagaaagagagatgtctggtatcgcccgtggacgtcttgccgaggagcgaaagtcatggcgcaaaaaccaccctcatggtttcgttgccaagcccgagactctccctgatgccaccgttaatttgatggtctggcattgcactattcctggcaaggctgggactgattgggagggtggatatttcccactgacaatgcacttcagtgaagattaccctagcaagcctcccaagtgcaaattccctcaaggtttctttcaccccaatgtgtat

SEQ ID NO: 153311 - DNA, 276 bp, Glycine max
aaggaatacatccatggcgaacaatatagatcagactccaaaacagttaaccaacaagcttacttttatgccagagacctcgaagtccatcccaaggacacatttgtgttcagtatagatggcaccgtactctctaatattccatactacaaaaaacatggatatggggtggagaaatttaactcgaccttgtatgatgaatgggttaacaagggcaatgcaccggcactgcccgagactcttaagaattacaacaagctggtgtctcttggcttc

SEQ ID NO: 153312 - DNA, 278 bp, Glycine max
gacgcagtgcccgggccaatgcgcatggcccttccaccagcccatttacggcccacagagcccaccattggtagcgcccaacaacgacgtgggcctggatggaatggtcatcaacgtggccaccctattggccgggaccgttacaaacccttgggggaatggctacttccaaggacccaaagaggctcctctcgaagccgcttccgcttgcacagggctgtacggcaagggcgcttaccctggctacgctggggaactcttgctggaccccactaccg

SEQ ID NO: 153313 - DNA, 273 bp, Glycine max
ccgtcggctgtcggtggactgctcgagctgcttccgcggcgagagcgggtcgtcgcgtgccggtcgggggacggattgggaacgggcccttcggggcctcttccccgggcgtcgaacagtcaactcagaactggtacggacaaggggaatccgactgtttaattaaaacaaagcattgcgatggtccctgcggatgttgacgcaatacgatttctgcccagtgctctgaatgtcaaagtgaagaaattcaaccaagcgcgggtaaacggcggg

SEQ ID NO: 153314 - DNA, 277 bp, Glycine max
tgcagtggcaatactagagaatcttttgaagcctgtggatgaatcccttgatcactataagaagcagcaattgagggaactggctatgctcaatggtactttgagggaggaaagtccaagcatgagcccaagtatgagtccaagcatgtcaccttttaacagcactggaatgaatcgagccaagacaggaagatgaccctgaaatgatagcaaacatgatctcttagacttttcacacccttgggctcaatctccacaggatgacacatggtttacg

SEQ ID NO: 153315 - DNA, 276 bp, Glycine max
cccctgtcaagcaaggatcagacagacctttgtggtttgcatcaaagcaaagtctttcttacttggatggcagccttccgggtgactatggatttgaccctctgggactttcagaccctgaaggaacaggagggttcattgagccgaaatggctagcatatggtgagataatcaatggtcgttatgcaatgttgggtgcagttggtgcaatagcacctgaaattctaggcaaggctggtctgatccctcaggagacagcactcccatggttcagaa

SEQ ID NO: 153316 - DNA, 275 bp, Glycine max
atctcactaaggttcatttggcttgaaattcccattatcttgagatgtttgttgtgaacttttacaggctatggaggagtcgtatgttgatctggcagagaagttagcaaggtcaggagtgaaggttgcaaaattcagagccgatggagagcagaaggaatatgcaaagagtgaactgcagttgggaagcttccccacaatacttctcttccccaagcactcttctcaaccaattaagtacccttcagaaaagagagatgttgattcattgacgg

SEQ ID NO: 153317 - DNA, 213 bp, Glycine max
gagaaattgaagaaggacaacgagaaattgagcggcgagttagcgctggcgaagaaacaatgcgaggagttggtggcgtttcttagagactcgctgaacgtgagccccgatgtgatagagcgcatcattcggcaaggaacgtgtgtgtccagcaacaatgatgcggtgcgttttgatgctattattaataatgatcttgatgacgacgaaaat

SEQ ID NO: 153318 - DNA, 274 bp, Glycine max
accggttcaggcgaaccggtgcggcgcgtgtaggaagcgcgtgggattgactgggtttaagtgcaggtgcggaaccacgtcttgtgggactcaccggtaccccgagaaacacgcgtgtggcttcgatttcaaggcggtggggagagaggagatagcacgggcgaatcccgtgatcaaaggcgagaagctacggaggatttaatctgcaccgttagatatgatgatcgaagcgattagggtgagttgatcaggaccgtccgtcgtgggccgttgt

SEQ ID NO: 153319 - DNA, 145 bp, Glycine max
ggcgtctcgtagggctaatccgcctcacgagggtcaccaacggcacgtgcctttggggggccgaggccccctactgctggtcggcaaacggacggcgggcgcacgcgtcgcttctagcccggattctgacttagaggcgttcagt

SEQ ID NO: 153320 - DNA, 273 bp, Glycine max
gcaaaggattctacccgccgctcgatgggaattgcgcttcaaggcgtctcgtagggctaatccgcctcacgagggtcaccaacggcacgtgcctttggggggccgaggccccctactgctggtcggcaaacggacggcgggcgcacgcgtcgcttctagcccggattctgacttagaggcgttcagtcataatccaacgcacggtagcttcgcgccactggcttttcaagcaagcgcgatgaccaattgtgcgaatcaacggttcctctcgta

SEQ ID NO: 153321 - DNA, 184 bp, Glycine max
accggttcaggcgaaccggtgcggcgcgtgtaggaagcgcgtgggattgactgggtttaagtgcaggtgcggaaccacgtattgtgggactcaccggtaccccgagaaacacgcgtgtggcttcgatttcaaggcggtggggagagaggagatagcacgggcgaatcccgtgatcaaaggcgag

SEQ ID NO: 153322 - DNA, 244 bp, Glycine max
gtgattccctatgttggtctcactggttatgttggtgccaatccactgctgcaaaatgctacttccaagaggcttgttgcaggacttctaggagtagagtccgggcaagatgcggttattcgaacattgttgtatgaacgccaagcatcattggtgcaaccatacaaagtgactgtggcagagtttacagatcgcatttcaatgcttaggaacaagctaggaaatgcaggtgtgaaagacgagg

SEQ ID NO: 153323 - DNA, 270 bp, Glycine max
ctcgagccgtttgaactatgttcttcacatgatgtttgggtatcagttttactcacagggcaggttagaagttgcagtgtcatgtgctgttattagcgtggttgcagttgtcaagttcggtgttatgaagccttgtttttagggactggctgtggcagcaagttatacaggtctgccataaccacgaccttttttcccctttgggaagggttgtgtttttttaccaagtcctagtttttttaaggcttcattttttttgaacttggcact

SEQ ID NO: 153324 - DNA, 271 bp, Glycine max
cttcctctaaaccctaaacaactctttctcttcttccttcgctcgttgttctccctcgcgtagatcgacaatggcggagacagagacgtttgctttccaggctgagatcaaccagctcctcagtctcatcatcaacaccttctactccaacaaggagattttccttcgtgaactcatcagcaacgcctccgatgctttggacaagattcgatttgagagtttgacagataagagcaagctcgatgctcagccagagttgttcattcatatt

SEQ ID NO: 153325 - DNA, 267 bp, Glycine max
ggcaaacggacggcgggcgcacgcgtcgcttctagcccggattctgacttagaggcgttcagtcataatccaacgcacggtatcttcgcgccactggcttttcaaccaagcgcgatgaccaattgtgcgaatcaacggttcctctcgtactaggttgaattactattgcgacactgtcatcagtagggtaaaactaacctgtctcacgacggtctaaacccagctcacgttccctattggtgggtgaacaatccaacacttggtgaa

SEQ ID NO: 153326 - DNA, 273 bp, Glycine max
cagagatcaaacctcctttgatgaattctttgcgggaatgccatggttggcacttccctttggggactcgaggaagaaattcctgagtcgcaaattcagggtatctggcatccccatgcttgtggccattgcatcaagtggtcagacattgacaacaaaagctcgagatctggtttcactctatggagcagatgcatatcctttcaccgaggagagaataaaagaaatagagacagaacaagaagagactgcaaaggggtggccggagaagct

SEQ ID NO: 153327 - DNA, 270 bp, Glycine max
gatcgatctagccatgagcaggttgaagagagctctaacaggccttggaggaccgaacccacgtatgtggcaaaatacggggatgacttgtggctaggggtgaaaggccaaccaagatcggatatagctggttttccgcgaaatctatttcagtagagcgtatgatgtcgatggcccgaggtagagcactcaatgggctagggtggccccatttcgccttaccaaccccagggaaactccgaatacaggcttagatcggttgtacagaca

SEQ ID NO: 153328 - DNA, 274 bp, Glycine max
gtctggccctattcctaatgatcactggctccatttctatcaacaaaaccaattcccctcttccgtttccgacgctacaaccgtgacaaccaccgccgcgccggccaagctaagcccagaaggcggagtctcaaagcccattagacggcgttcacgggcctcaaggagaactcccaccactctgctgaacacggacactagcaatttccgggccatggtgcaacagttcactggagctccttctgcgcctgatatgtttgggagcccagtccct

SEQ ID NO: 153329 - DNA, 272 bp, Glycine max
gaagactctgacaagtggcagcaactgtcacaggctgcttttgagaaatttgacctagataaagatggctatattactccggaagaacttagaatgcatacatgcttgagaggctccgttgatcctttgctagaggaagctgatattgacaaagatggaaaaataagcctaccagagtttcggagacttcttagaactgcaagcatgggttctcaaaatgtttcaagcccatctgttcatcggcggcagaggttctagattagaggtgcttc

SEQ ID NO: 153330 - DNA, 163 bp, Glycine max
tgatttcatgcgagtctggcggttcttggagaaagatgcttatcttttctagcgaatgttgtaatagcagaatgcttgctagaagtattctcttttgtgtaacttgggtttgtatgattgcttaaattagctaatacttttagctataattggaactcttgca

SEQ ID NO: 153331 - DNA, 270 bp, Glycine max
ctcgagccgcaagaagaggttagctactactggagcaaactttgcacgagcatacaccgtggaattcggtagttgcaagttccctgagaacttcactggttgccaagatcttgccaaacaaaagaaagtgccattccttagtgacgacttggagcttgaatgtgaaggaaaggacaacatacaagtgcggttctaatgttttctggaaatggtgaaaggaggcaacattttatgcctaactgcgaacttttcgccttgcaatgtacctaa

SEQ ID NO: 153332 - DNA, 264 bp, Glycine max
cgacgaaatgcttcggggagttgaaaataagcgtagatccggggattcccgatataggtcaacctttcgaactgctgctgaatccacgggcaggcaagagacaacctggtgaactgaaacatcttagtagccagaggaaaagaaagcaaaagcgattcccgtagtagcggcgagcgaaatgggagcagcctaaaccgtgaaaacggggttgtgggagagctatacaagtgtcgtgctgctaggcgaacagcagagaatgctgca

SEQ ID NO: 153333 - DNA, 268 bp, Glycine max
ctgcctttcactgttccacctcttgttttttcttctttaaagttggtcagacagttgcaaggtcaagaagaaaatccttttggagatgatgcatcaacaacaccaaagaaaatttttcagcttttaaatcagaccatcgagactttgtcaggtgtcctggcaccagaattagcattgcagttgtacttgcaatgtgctgaggctgcaaatgactgtgaattggaacctgttgcttatgaatttttcacccaagcttatattctatatg

SEQ ID NO: 153334 - DNA, 203 bp, Glycine max
tagtaattctagagctaatacgtgcaacaaaccccgacttctggaagggatgcatttattagataaaaggtcaacacaggctctgcctgttgctttgatgatcatgataactcgtcggatcgacggcttgtgccgcgacatatcaatttgctacatcgtgagaatgctacagatacgtagaatagtatcgaagactaacgtca

SEQ ID NO: 153335 - DNA, 248 bp, Glycine max
tgaaaatgtcgcagttgttggaaaaggccaaaaactatgttgcggagaaagtcaccaacatgcccaagccagaggcgagtgtcaccgacgtggacttcaagcgcgtgagccgcgacagcgtcgagtacttggccaaggtctccgttcagaacccttattccacttccattcccatttgtgagatcaagtactccctcaaaagtgctggcagggagatagcagcaggacaatacttgacccagggtcat

SEQ ID NO: 153336 - DNA, 271 bp, Glycine max
attgaagagacccagcagaccgacaaggacagatggaagggtcttgcctatgatatctcagacgaccaacaggacatcacaagaggaaagggtttggttgactcccttttccaagctccacaggatgctggaactcactatgctgtcatgagctcctacgagtaccttagcactggacttcgccagtacttggacaacaacatggatggattttacattgctccagcttttatggacaaacttgttgttcacattaccaagaacttcatga

SEQ ID NO: 153337 - DNA, 271 bp, Glycine max
tgaaaatcctaatgcaaagttgattattacgggtcatagtttgggtggggcactcgcaattctctaccctacgatcgtgttcttgcatgatgagaagttgctgatggagaggttggaagggatctacacttttgggcaaccaagagttggagatgaagcatatgcacagtacatgagacaaaaattaagggaaaattctatcaggtattgcagatttgtttattgcaatgatatagttccgaggttgccctatgataacgacttgctcttc

SEQ ID NO: 153338 - DNA, 256 bp, Glycine max
actcaagagatcaataatgggatctggggccggcaatttcctcgaggtgcttctcagaaacttcgatgtgcttgctgggcctgtcattagtcttgtgtatcctctatatgcttcaattagggcaattgagagcaagtctcctattgatgatcagcagtggctcacttactgggttctctacgcctatgatcatcctctttggacttacttttgctaaagtccttgagtggattccaatatggccctatgcgtagct

SEQ ID NO: 153339 - DNA, 268 bp, Glycine max
gatcgatctagccatgagcaggttgaagagagctctaacaggccttggaggaccgaacccacgtatgtggcaaaatacggggatgacttgtggctaggggtgaaaggccaaccaagatcggatatagctggttttccgcgaaatctatttcagtagagcgtatgatgtcgatggcccgaggtagagcactcaatgggctagggtggccccatttcgccttaccaaccccagggaaactccgaatacaggcctagatcgtttgtacaga

SEQ ID NO: 153340 - DNA, 266 bp, Glycine max
ctaagattggtgatggggtgttgataggtgcagggacttgtatttacgggaacattaagattggtcatggagctaagatttgtgcttgtactgtagtgttgtcggaattgccaccatggactactggtgtggggaaccctgctaggttagttggaaggaaggatgaccctattaaattggataagatgccgagtttgaccatggaccatacttcatggtctgattatgtcatatagaggctaattaattgtctaacatgttataga

SEQ ID NO: 153341 - DNA, 266 bp, Glycine max
gagaaaatggctggcttcttctcgatgggctgctgcagcccaatttgctctcgctgttagtctcacctcatcccataatgaccttcaacgattggaagtggaagacgagaatagtattctgaagaagacaaaggatgctctgataactttgcagggggttctggaaaggaagcacgataaagaaattgaggaatctttagagcagcgccaaatatccccagacggatggtggtcatcgctttataaaatgattgaaggtcttgcta

SEQ ID NO: 153342 - DNA, 265 bp, Glycine max
agaagaccggcgaggtgttaccggcagataaagaacaaaccgtacccgaaatcccgtttctgccgcggcgtgccggagccgaagatccgaatctacgacgtgggaatgaagaagaaaggcgtggacgagttcccgttctgcgtgcacctggtctcgtgggagaaggagaacgtctccagcgaggctttggaggcggcgcgcatcgcatgcaacaagtacatggccaagttcgccggaaaagatgccttccacctgcgcgtgaggg

SEQ ID NO: 153343 - DNA, 266 bp, Glycine max
ccgaacgatgttttgatgttgggatagcagaacaacatgctgtaacttttgctgcaggcctagctgctgagggcctcaaacccttttgcgcaatttactcttcctttctacaaagaggttatgatcaggtagcacatgatgtggatcttcaaaagcttccagttagatttgcgttagacagagctggcttagttggtgctgatggtccaactcactgtggagcatttgacacaacattcatggcttgtttgccaaacatggtggtc

SEQ ID NO: 153344 - DNA, 265 bp, Glycine max
aatcaaagccatggccacctccaacttctctattgttctctccgtctccctagccttctttttggtgctacttaccaaggcacactcgaccgataccgtttctttcaccttcaacaagttcaacccagtccaaccaaacattatgctccaaaaagatgctagtatttcatcctctggggtgttacaactcaccaaagttggcagcaacggcgtgcccacctcgggatctctcggtcgtgccctttacgctgccccaatccagatt

SEQ ID NO: 153345 - DNA, 265 bp, Glycine max
tgagagaggatgctaccaagactttggtgatgctgcaccaacagggtgagcagattacaaggagtcaccatgttgctgctgatattgatcacgatttgagtcggggagaaaagctgttgggaagtcttggtggcatgttctccaaaacttggaaacctaagaagacaggcacgataactggccctgttgtttttggagaggatccagtgagaaagaagggcaaccacttggagcaaagagagaagttaggattgacttctgcccc

SEQ ID NO: 153346 - DNA, 266 bp, Glycine max
aattagttcattctctttgcgcagttccctacctctcctttcaagatgcagatcttcgtcaagaccctcaccggaaagaccatcacccttgaggtggaaagctctgacaccatcgacaacgtcaaggccaagatccaggacaaggaaggaattcccccggatcagcaacgtctcatcttcgccggaaagcagctcgaggacggccgtaccctcgccgactacaacatccagaaggagtcaacccttcaccttgtccttcgtctccg

SEQ ID NO: 153347 - DNA, 172 bp, Glycine max
tctcgagccgctcgagccgctcgagccgattgtttgttgttgtaactcgttcttcttcttttgacgttctgtgcttgtgtttgctttgtctctcacctgaaaatgtcttgctgcggtggtaactgtggttgcggaagctcctgcaagtgcggcaacggctgcggaggctgca

SEQ ID NO: 153348 - DNA, 235 bp, Glycine max
gtcttaataaacgctcttctctgaaaacccccatttcttttcttctttcttcttctctttcgcttcttcgatcttcgatcttcgtcgctgaaaatgagagagtgcatttcaatccacatcggccaggccgggattcaggttggaaacgcctgctgggagctttactgcctcgaacacggcattcagcctgatgggcagatgccaagtgacaagaccgttggtggaggtgatgatg

SEQ ID NO: 153349 - DNA, 264 bp, Glycine max
ggacccccttgaagcaaaatgagtcactcgatgttttcctcttcgcgcttttcaatgagaaccagaaaacgggtcccacgtcggagagaaactacgggctgttctaccccactgagaagaaggtttacgatattccgctcacggcggaggaaatcaaggaggcacagccgtcaggagtagggaagagccaggttccggtgagtggtgaggtgtcaacgacgacgtctaaggaccagacatggtgcgtactagtggcggttcttc

SEQ ID NO: 153350 - DNA, 246 bp, Glycine max
attaagctttcaagagacaaactgttttgaaaaatgggatccaaggttgttgcatacgttgcccttctcctctccatcaacattcttttcatttccatggttagctccagcagccactacgatccacagccccaaccttctcacgtcactgctcttattacacgacctagttgtccggatctgagtgtttgcctcaatattttaggcgggtatctaggaaccgtggatgattgttgtgccctcatc

SEQ ID NO: 153351 - DNA, 249 bp, Glycine max
acttaccaggtccagacatagtaaggattgacagactgagagctctttcttgattctatgggtggtggtgcatggccgttcttagttggtggagcgatttgtctggttaattccgttaacgaacgagacctcagcctgctaaatagctatgtggaggtaaccctccacggccagcttcttagagggactatggccgcttaggccacggaagtttgaggcaataacaggtctgtgatgcccttagatgtt

SEQ ID NO: 153352 - DNA, 251 bp, Glycine max
atagcccaagccctatacaaccaaaccctaacacacacccatttgattcagtttccatggctagcctcaaggttgcatttttggctgcagtgctctgcatggttgtggtgagtgcacccatggcacatgcagctatcacgtgcgggcaggtgacgaatagcctgatcaattgcatcggttacctccagaacggaggaacgccgccgtcgggatgctgcaacggagtgaagagcctcaatgccgccgccaag

SEQ ID NO: 153353 - DNA, 249 bp, Glycine max
gaatttgaagctagaggtgtcagaaaagttaccacagggataactggcttgtggcagccaagcgttcatagcgacgttgctttttgatccttcgatgtcggctcttcctatcattgtgaagcagaattcaccaagtgttggattgttcacccaccaatagggaacgtgagctggggtttagaccgtcgtgagacaggttagttttaccctactgatgacagtgtcgcaatagtaattcaacctagtacg

SEQ ID NO: 153354 - DNA, 240 bp, Glycine max
tctcgagcggatcggctcagtgaggaactggaaaacagcgaaagtataaataccactactttaaacgttattttacttattccgtgaatcggaagcggggcactgccctctttttggacccaaggtcggcttcggccggtcgatccgggcggaagacattgtcaggtggggagtttggctggggcggcacatctgttaaaagataacgcacgtgtcctaagatgagctcaacgagaacag

SEQ ID NO: 153355 - DNA, 251 bp, Glycine max
gttcgaattgcggaagcaccattcacgataaatcatgttctagtttttatcgaggaataaaggcaagctctatttggagtcaagtgaaacatctatcttcctgtccaagttctttgaataaaagtctgaatgtgtcatctctgcactacaatatttgtgattctgaccaagttggttctatttgtttgatggccatcttgcacgtcctgatcttattgtgttcaagtgacagacaaatcagaacagggaag

SEQ ID NO: 153356 - DNA, 252 bp, Glycine max
tctcgagccgattcggctcgaggtttgatcctggctcagaaggaacgctagctatatgcttaacacatgcaagtcgaacgttgttttcggggagctgggcagaaggaaaagaggctcctagcgtgaaggttgcttgtctcgcccaggaggtgggaacagttgaaaacaaagtggcgaacgggtgcgtaatgcgtgggaatctgccgaacagttcgggccaaatcctgaagaaagctaaaaagcgctgtttga

SEQ ID NO: 153357 - DNA, 250 bp, Glycine max
cctcggtgccaattacaaggccatcgaactcgacactgaatccgatggaaaagagctccaagcagcattagttgagtggacggaccagcgaaccgtgcctaatgtgtttattggtggaaaccacattggtggctgtgactcaacaactgccctgcacactcaggggaagctggttcctctgctgatatctgctggagctgttgccaaatcaactgcttaaaggatctcccatttctaggttatgcagtta

SEQ ID NO: 153358 - DNA, 249 bp, Glycine max
cttgagaggtgtaggataagtgggagctggaaacagcgaaagtgaaataccactacttttaacgttattttacttattccgtgaatcggaagcagggcactgcccctctttttggacccaaggtcggcttcggccggtcgatccgggcggaagacattgtcaggtggggagtttggctggggcggcacatctgttaaaagataacgcaggtgtcctaagatgagctcaacgagaacagaaatctcgtgt

SEQ ID NO: 153359 - DNA, 146 bp, Glycine max
tttccttcagggttaagcggtgagatttgcgaatccgttacatggcgaaattggcggacaggccgagcgttacgaggagatggttgagttcatggagaaggttgcaaagactgtggaggttgaggagttgacggtggaggagagga

SEQ ID NO: 153360 - DNA, 250 bp, Glycine max
ctctctagcttggacgagtgaattagattcatcatcaagatgtcgtctctgatagcagaagatgtgaagagcagatcagaggtgtaccacggggacgaaatgtgccaagtgaagtccaaggagcttctcaaggaaatcgccctccccaacggccttcttcccctcaaggacatggaggagtgcggctacgacagacaaaccggcttcgtctggctcaaacaaaagaagagttacacccacaagttcgaca

SEQ ID NO: 153361 - DNA, 248 bp, Glycine max
caaacacctcgtccctcacaatgcagctagcaatggcggccaacgctgtcgtttcaccgtcgccgttccgacctcagccctttctccggtcatccttctccggcgtctccgtcaagctcactccccaatccataacgctttcacgctccaagcccctcaccgtcttcgccgccaccaagaaggccgtcgccgtcctcaaggggacctccgccgtcgaaggcgtcgccactctcatccaagaagacgat

SEQ ID NO: 153362 - DNA, 249 bp, Glycine max
aaaatagcaacaaaaacaagaaaaaaggttacctctttcaattttatcccttgttgtgagcttaattcaatttctgctcacacataatggcttgcacgctcgctgattcattactcctattcaagggttcttatcagaaaccagttctgaggagagacattgctgcccggtactccccgggtatatttagtctaaacagtaatgggcttatccagaaaaggttcaggcgtcaaaggaattttgttacta

SEQ ID NO: 153363 - DNA, 247 bp, Glycine max
gcacatcagggccaagggtggaaacatcacaagggaacctggtccagttcaaggtggaactactgttatcgcctttgttaaggatcctgatggttatacttttggacttatccaaagacctacagtccatgacccattttgtcaagtaatgcttcgtgttggtgatttagagcgctcaattaagttttatgaaaaggctttgggcatgaaggtggtgaggaaggttgataagcctgagtacaagtac

SEQ ID NO: 153364 - DNA, 248 bp, Glycine max
aaggaaggctaccattggggacttttatgctgttatattaccatctctccaacggcttcatggtagtttggagaagttggaggttgttaaagaagaaggccagtcaagcatagaaggtccaagttatggcaagaaggtcattgaagaaggtgtgaaactaaccgccaatgttgatttgcaaagagaagatgaatgtgggatttgcttagagccttgcaccaaaatggttttacctggttgctgccatg

SEQ ID NO: 153365 - DNA, 248 bp, Glycine max
caaaagggtaaaagctcgtttgattctgatttccagtacgaatacgaaccgtgaaagcgtggcctatcgatcctttagtccttcggaatttgaagctagaggtgtcagaaaagttaccacagggataactggcttgtggcagccaagcgttcatagcgacgttgctttttgatccttcgatgtcggctcttcctatcattgtgaagcagaattcaccaagtgttggattgttcacccaccaataggga

SEQ ID NO: 153366 - DNA, 250 bp, Glycine max
gtttttcattcgtttctgaaccacacaaacatcaccaccgaacaatgccgacggggttaccggcggcgaattccttagtggcgccggacgaagaggggtgggtgtgggggcagatcaaggcggaggcgcgccgcgacgccgagtcggagcctgctttggcgagctacctctactcgacgatcctctcgcactcgtcgctcgagcgttctctgtcttttcacctcggaaataagctctgttcctccacgct

SEQ ID NO: 153367 - DNA, 248 bp, Glycine max
atacctaggcacccagagacgaggaagggcgtagtaagcgacgaaatgcttcggggagttgaaaataagcgtagatccggggattcccgatataggtcaacctttcgaactgctgctgaatccacgggcaggcaagagacaacctggtgaactgaaacatcttagtagccagaggaaaagaaagcaaaagcgattcccgtagtagcggcgaccgaaatgggagcagcctaaaccgtgaaaacggggtt

SEQ ID NO: 153368 - DNA, 249 bp, Glycine max
agtgcctaaagatgttaatgcagctgttggaattatcaagaccaagcgcactattcaatttgttgactggtgccccaccgggttcaagtgtggaatcaattaccagcctccgactgttgttccaggtggtgatcttgccaaggttcagagggccgtgtgcatgatctccaattccaccagtgttgttgaggtcttctctcgcatcgaccacaaatttgacctcatgtatgccaagagggcgttcgttca

SEQ ID NO: 153369 - DNA, 249 bp, Glycine max
gtttgatgagcagaaggaccaagtagcagtggagcagattttgcgagttgtttttctagatccagagcgtccctgtcctgctttggaaaaactgaaccgacagctggctgatgctgatgctgcccttgaggcacgcaagaaacctgcagaagatgcaggtcctaaaattatcggggaaggacttgtcatagacgaatggaaaatccagacggttagatacctcgcaaagcagcagggtgaagtggctgt

SEQ ID NO: 153370 - DNA, 193 bp, Glycine max
attcattctcatctttctctcttctctctccacccaaaccctaactcccgaccctgttcccctctcgtatccgtcatgaaaggaggaaagtccaagaccgaatctaagagagccgatcccaaacttgctgtgaataagaagggagccgccaccaaggctaggaaacccgccggcaaggggaaggcagcgaaag

SEQ ID NO: 153371 - DNA, 174 bp, Glycine max
agggacttcttcctctcttggtattccaatcagctcatagctcatggagattgcctcctttcattggcatcttcaacttttggtgactctggggtgacaatctatggaaaactcccacttatgcactcttggtatgggactcgatcccatccttcagagctagttgcagggttc

SEQ ID NO: 153372 - DNA, 161 bp, Glycine max
gtcagctaggtggtcttcagcttgaccgagatgctagagctttggtaagccgtttcagtgtcatgacacagagaactgttagagacaagtttgcacgtcttactcaaatggcaacaattctaaatttagaaaaggtttctgagatccaagatttcgggggt

SEQ ID NO: 153373 - DNA, 241 bp, Glycine max
tgaaaaatgggatccaaggttgttgcatccgttgcccttctcctctccatcaacattcttttcatttccatggttagctccagcagccactacgatccacagccccaaccttctcacgtcactgctcttattacacgacctagttgtccggatctgagtatttgcctcaatattttaggcgggtctctaggaaccgtggatgattgttgtgccctcatcggtggtcttggtgacattgaag

SEQ ID NO: 153374 - DNA, 247 bp, Glycine max
ctcgagccgcgagggtttgggtttctcttcctcccttggagaaaaagaagagccaccgctgcgacgccgttcgtgcatttttgaggtgccgctgtcatgtttgggcgtggtggaccaaggaggagtgataactccaaatattatgatattctcgggatttccaaaaatgccagtgaagatgaaatcaagaaggcctatagaaaggcggctatgaagaaccatccagataagggaggagatcctgaaa

SEQ ID NO: 153375 - DNA, 247 bp, Glycine max
ctgagcttccattgtgctcactcatctcttacaacgaaaccctcttcatcttgttctatctgtgacgagcatcatggcctcaagagcagtgttattgttggctatgtgtgtgcttccggcgatggttgtggccattcgcccagcaaagaaccctttttgcgtgaagggtcgtgtctactgtgacccttgccgtgctggttttgagacctcagctaccacctacattgctggtgctgagattatgttg

SEQ ID NO: 153376 - DNA, 247 bp, Glycine max
gttttgttaagatgattccaaccaaacccatggttgttgaaactttctccgagtatcctccacttggtaggtttgctgttagggacatgcgtcaaactgttgctgtgggagtcatcaagaacgttgagaagaaggatcctaccggagccaaggtcaccaaggctgcccagaagaagaagtgaatcgtgcgggctggttcatcaggggatgttggttacaataaatgttggtttcttttctgtactct

SEQ ID NO: 153377 - DNA, 247 bp, Glycine max
gtttgatgagcagaaggaccaagtagcagtggagcagattttgcgagttgtttttctagatccagagcgtccctgtcctgctttggaaaaactgaaccgacagctggctgatgctgatgctgcccttgaggcacgcaagaaacctgcagaagatgcaggtcctaaaattatcggggaaggacttgtcatagacgaatggaaagagaggagggaaagatacctcgcaaagcagcagggtgaagtggct

SEQ ID NO: 153378 - DNA, 247 bp, Glycine max
atttgaagcgtggttatgttgcctcaaactcaaaggatgaccctgcaaaggaggctgctaacttcacagcccaagtcatcatcatgaaccaccctggtcagattggaaatggctatgcccctgtcctcgactgccacacttctcacattgctgtcaagtttgctgaactcatgaccaagattgacaggcgatccggcaaagagcttgagaaggagcccaagtttttgaagaacggtgatgctggttt

SEQ ID NO: 153379 - DNA, 248 bp, Glycine max
gcatcccaaaaccctagctcgcgttctgctttcgtcttttacatcaggatggagtctcaggtgaagcacgcacttgttgtcaaagttatgggtcgtactggatccagaggacaagtaacccaggttagagtgaaatttttggatgatcagaaccgtcacatcatgaggaatgtgaaaggacctgtgcgagaaggagacattctcaccctactcgagtctgaaagggaagcaagaagattgcgctagat

SEQ ID NO: 153380 - DNA, 184 bp, Glycine max
ttaaaaaaaaaaaaaaaaaaaaaaaaaaaaaaaaaaaaaaaaaaaaaaaaaaaaaaaaaaaaaaaaaaaaaaaaaggaaaccaaaccaaaaaaaaaccgccccgcccgacatttttataaaggggagagacaggagggggggcgccgcccccccccccgggccttctccccccccccggtgttt

SEQ ID NO: 153381 - DNA, 247 bp, Glycine max
ataggacctcataaaggaacgggagctgttgagaggttccatattgccgagctgaagggcagcacttctgtacgtgatcgtagtatgtcacgtcgtctcgtccccgcagcattgaaaagtacctatgcactatttccggttcacttctaaggaagatagagttggggtgggggtctacgatgtgatactcaaaagtatgacccggggagatacatgctaactatgggtagaaagcaggaacctttat

SEQ ID NO: 153382 - DNA, 245 bp, Glycine max
ctttgagaaacaggttcctattgatgccgtgttccagaaggatgagatgattgacatcattggtgtgaccaagggtaagggttatgagggtgttgtcactcgttggggtgttacccgccttccccgtaagactcacagaggcttgaggaaggttgcttgtattggtgcctggcatcctgcaagagtttcattcactgttgccagggctggtcagaatggataccaccaccgaactgagttgaaca

SEQ ID NO: 153383 - DNA, 198 bp, Glycine max
ggcatcgggggcgcaacgccctcgacctattctcaaactttaaataggtaggacggtgcggctgctctgttgagccgcgccatggaatcgagagctccaagtgggccatttttggtaagcagaactggcgatgcgggatgaaccggaagctgggttacggtgcccaactgcgcgctaacctagaccccacaaagggtg

SEQ ID NO: 153384 - DNA, 246 bp, Glycine max
  unsure (1)..(246): unsure at all n locations
aagggacccaactaattttcgcccaaggatcaacaaacttgattcaaccaaggacagagaacaaaagtctgccgggtcttattattaccttgatgactgagttcatactttggggctgttctttcaccaacacaaccttgcatctgtttgagcttttcatgggatctcagatttggttcagttcatgccttgaaatataagattgccatttttgccgatgacagcatctttctcanatgatagagg

SEQ ID NO: 153385 - DNA, 246 bp, Glycine max
gagggagtcagagaaaccctaggtaagaagaaaagatgccggctggtcatggtttgagatcccgcaccagagattccttctctcgtcctttcaggaagaagggaaccatcgccctcaccacatacctgagaacctaccacgtcggcgactatgttgacgtcaaggttaacggtgccgttcacaagggaatgccccacaaattctaccatggccgcaccggacgcgtctggaatgtcaccaaacgtg

SEQ ID NO: 153386 - DNA, 242 bp, Glycine max
agacgctgaggtcaactttcaaggacaagttcttcccggagtcagacgatcagacgggcctggcatacttaatcgccatggagaaggataaatgggcggagaggatttacctagagagcgagtactacttcgaagggtactgggaagaaattcagggaacgttcaagaacataacggaaaaatacaaggagatggaaaaaggggtgcagaggttaaggaggcgtcacgcggagaaggtgagt

SEQ ID NO: 153387 - DNA, 246 bp, Glycine max
gtgatttcatggggcattatgtggccattaatcaggggactaaaaggggaatggtttcctgcaagcatagcagagagtagcatgaagagtcttaatggttataaggtttttatttccattgctttgattcttggtgatgggctttacaattttgtcaaagtcctctatttcactgccacgaatattcatgccaccgtgaaaaggaagaaccccgaaactttttcagataaccagaaaccactccct

SEQ ID NO: 153388 - DNA, 245 bp, Glycine max
gcttcatgtcctccagcaactcgaggacggtgagattcggtgcgcccttcaatccgatctggtcaagtccgtctattccttcaattctctaaacggcaaggactctttcagcacgctctacaaagaggaaaccgacgccgatcagtacaacctcgtcttcgccaactgccactggcagcaactcaaggtgacaatggacgttaaatctgccatgtacaacctagaagggaatagcaacgtccgcg

SEQ ID NO: 153389 - DNA, 247 bp, Glycine max
ggttgagatcgtgatggcacttgaggaagcatttggtattgccattgaagaggacagtgcacagagcatcgctacggttcaggatgctgcagatcttattgaagaaatcgttcagaagaagagttcttagagtaaacatgtaccagaaggtttgtgtaaaacatgaactcatcatagtctccatgccgatcaatatttatggtgtggggcaattctgagtctcgagtgttttagttgtgaactctgt

SEQ ID NO: 153390 - DNA, 247 bp, Glycine max
gccatacccctgagggtgctaaacttgaagctgagtggaatgccaagtttgcagaatatgagaagaaatacagtgaggaagctgcagagctgaaggctattattactggtgaattaccagctggttgggagaaagcacttccgacatacactccagaaagccctgctgatgctacaagaaatctgtctcagcaaaatctaaatgcccttgttaaggttcttcctggtctacttggtggcagtgcaga

SEQ ID NO: 153391 - DNA, 246 bp, Glycine max
ctcgagccgtaacgcaggtgtcctaagatgagctcaacgagaacagaaatctcgtgtggaacaaaagggtaaaagctcgtttgattctgatttccagtacgaatacgaaccgtgaaagcgtggcctatcgatcctttagtccttcggaatttgaagctagaggtgtcagaaaagttaccacagggataactggcttgtggcagccaagcgttcatagcgacgttgctttttgatccttcgatgtcg

SEQ ID NO: 153392 - DNA, 246 bp, Glycine max
gtatttgtttggatatattacaaaaccagtggagtcctatatatgatgtagctgctatactcacttctatccagtcattgctttgtgatcccaacccaaattctcctgcaaactcagaagcagctcgaatgtttagtgagaacaagcgtgagtacaatcgaagagtgagagaaattgtggagcaaagttggacagctgactaagcttatcttcgcatgcttgtgggcctttgaagtcatgaattag

SEQ ID NO: 153393 - DNA, 246 bp, Glycine max
aatgcccccttttcagggtcacaaaagtagttaggcgatataatggagtaaaggtaacagtggaaagtgggaaaacgttttttgctgatgctgctgttattgctgtcccacttggggtgctcaaggcaaagaaaatattgtttaagccaaagcttccagactggaaggaagctgccattgcggatcttgggattggacttgagaataaaatcattttacactttgaaaatgtgttttggcctaatg

SEQ ID NO: 153394 - DNA, 248 bp, Glycine max
ttttctactttgagtcttcttgatccttctttttctccttgaactcaaacatggcagatgaggtggttctgctagatttctggccaagtccatttgggatgagggtcaggattgcacttgctgaaaagggtatcaaatatgagtacaaagaagaggacttgaggaacaagagtcctcttctcctccaaatgaacccggttcacaagaagattccggttctcatccacaatggcaaacccatttgtgaa

SEQ ID NO: 153395 - DNA, 250 bp, Glycine max
gtcaccttcctataatccaccaggttacaaagcaccatcttataatccaccagcttacaagtcaccttcctataacccaccaggttacaaagcaccatcttataatccaccaggttaccagccaccttcatacaatccaccaggttacaaagcaccagcttataatccaccagcttacaagtccccttcctataatccaccattttagagcccaccttcctacaatccaccaggttacaaggcaccatct

SEQ ID NO: 153396 - DNA, 196 bp, Glycine max
caacagcaatggcagtatatgtcttgacattctcaaggaacaatggagcccagctctaaccatttccaaggtccttttgtcaatttgctcattgttgacggatcccaaccctgatgatccacttgtacctgagattgcacacatgtacaagaccgacagggccaagtatgaggctacagcccgaagctggacccag

SEQ ID NO: 153397 - DNA, 238 bp, Glycine max
tcttcatcttgttctatctgtgacgagcatcatggcctcaagagcagtgttattgttggctatgtgtgtgcttccggcgatggttgtggccattcgcccagcaaagaaccctttttgcgtgaagggtcgtgtctactgtgacccttgccgtgctggttttgagacctcagctaccacctacattgctggtgctgagattatgttgcaatgcaagagcagggttagcaacgaggttgtg

SEQ ID NO: 153398 - DNA, 243 bp, Glycine max
gttcgtgggataattggaaaacaagaatggctttacagagatcagggaaggacttcacaataatgaaggtgctgccatctggtgtataccaatttagatttattgtggatgggcagtggaggtacgcacctgacttgccttgggctcaagatgatgctgggaatgcatacaacattttggacttgcaggattatgttcctgaagacattggaagcatttctagttttgaacctcctaaatcac

SEQ ID NO: 153399 - DNA, 246 bp, Glycine max; identical to SEQ ID NO: 147838

SEQ ID NO: 153400 - DNA, 245 bp, Glycine max
cagcaacatcgcgggcctcgtcacgcttctcgaggcctgcaaaaccgcgaaccctcagcccgctatcgtctgggcctcgtccagctccgtctacgggctcaacgagaaggttcccttttccgaatcggaccagaccgaccagcccgctagtctctacgccgcaacgaaaaaggccggtgaggaaatcactcacacctacaatcacatctacggtttatccatcaccggtttgagattcttcaccg

SEQ ID NO: 153401 - DNA, 246 bp, Glycine max
gtttttcattcgtttctgaaccacacaaacatcaccaacgaacaatgccgacggggttaccggcggcgaattccttagtggcgacggacgaagaggggtgggtgtgggggcagatcaaggcggaggcgcgccgcgacgccgagtcggagcctgctttggcgagctacctctactcgacgatcctctcgcactcgtcgctcgagcgttctctgtcttttcacctcggaaataagctctgttcctcca

SEQ ID NO: 153402 - DNA, 189 bp, Glycine max
gtcctgagtgggctatgcagcacataattcctcaggttttggagatgaacaacaacccacactatttgtatcggatgactattcttcgtgctatctctctgcttgctcctgtgatgggccctgaaatcacttgttcaaacttgttaccagttgttgttgctgcatcaaaagacagagtgcccaacataa

SEQ ID NO: 153403 - DNA, 242 bp, Glycine max
tgaacacacatttacagcttcaaaacctggatcaggaatggttgttgctgtaaaaaggcttaaacctgaaggttttcaaggtcataaggagtggttgactgaggttaattacctcggacaactgtaccaccctaatctggttaaattaatcgggtactgcttggagggagagaaccggctattggtgtatgagtttatgcctaaagggagcttagagaaccatctatttagaagaggaccgc

SEQ ID NO: 153404 - DNA, 243 bp, Glycine max
cgaactcgtccaaaccgccaaatctattgcatctcccggtcgtggaattcttgcaattgatgaatcaaatgccacatgtgggaagcgtttagcatccattggattggacaatactgaggtgaatcgccaggcctataggcaacttctgctcaccacacctggccttggtgaatacatctctggtgcaattctttttgaagaaaccctttaccagtcgacaacagatggaaataaatttgtgga

SEQ ID NO: 153405 - DNA, 242 bp, Glycine max
cttaaacctttctttcttgtaaactttattgattgattctgagaatagaactaagagggtatagacatggctagcgcaattgcagcttcttttttggttctgcttctggctttccccactgtatttggagctgaccatgaagttggtgacactagtggatgggccctcggagttaattacaacacctgggcctctgggaaaactttcacagttggtgacactttggtgttcaagtatgactc

SEQ ID NO: 153406 - DNA, 241 bp, Glycine max
ggttactcagtggaatttggacttcacggatcacagcgaacagggagataggtaccgagagcttgctaaccgagttgatgaggctcttggattcatggctgctgctgggctcacagtggaccatcccataatgagaacaactgaattctggacatctcatgagtgcttattgttgccttatgaacaatccctcaccaggttggattcaacttctggtctctactatgactgttcagcccat

SEQ ID NO: 153407 - DNA, 243 bp, Glycine max
gtttggagaaaacggattggtccaaagccccattcatagcagcctacaaggggttccacatcgacgggtgcgaggcctcggtgaacgccaagttctgcgacacgcagggcaagagctggtgggaccaaccagaattccgtgacctcgacgcttcccagtggcgtactcagatgggtgcgccagaaatacaccatctacaactactgcactgacagaaaacgctaccctcaactctcccctgag

SEQ ID NO: 153408 - DNA, 242 bp, Glycine max
ctcgagccgtttgaactatgttcttcacatgatgtttgggtatcagttttactcacagggcaggttagaagttgcagtgtcatgtgctgttattagcgtggttgcagttgtcaagttcggtgttatgaagccttgtttttagggactggctgtggcagcaagttatacaggtctgccataaccacgaccttttttcccctttgggaagggttgtgtttttttaccaagtcctagttttttta

SEQ ID NO: 153409 - DNA, 246 bp, Glycine max
gtttcttttatgcagacaataaagtcattcacacctgccaccacagttgttttgcaatggctagtgtggaggaagtattttgactggcgtatttgggcttctcttatacccattgttggagggattcttctcacatctgtaacagagcttagttttaatatgtttggattctgtgctgccttatttggctgtttggctacatctacaaagactattcttgcagaatctcttctgcatggatacaaa

SEQ ID NO: 153410 - DNA, 269 bp, Glycine max
gaacaagtagttgagaactaagaaggagaagcaaatggcttcctcaatgatctcttccccagctgttaccactgtcaaccgtgccggtgccggcatggttgctccattcactggcctcaagtccatggctggcttccccaccaggaagaccaacaatgacattacctccattgctagcaacggtggaagagtgcaatgcatgcaggtgtggccaccagttggcagaagaagtttgagactctttcctacctgccagaccttgatgatgc

SEQ ID NO: 153411 - DNA, 261 bp, Glycine max
cttcagggtggtgtggagaacaacatatgtcatcatcactgctttgatagctatgatgtttccattcttcaatgacttcctaggcctgattggttcactgtccttttggccattaaccgtttacttccccatagaaatgtacattaagcagtcaaagatgcaaaggttttccttcacgtggacatggctcaagatactgagctgggcttgcttgatctttctattatctcagctgctggttccatccaaggcctcgctcaa

SEQ ID NO: 153412 - DNA, 256 bp, Glycine max
cgagataactagaaacagtgtgatgaaaatgaaggtccttgttgtcttcgtagccacaagttaggtagcatggcaatgccatgcgtacgatatgttccctctccgaatgaagactggctatggtgctcgtactccggaggtgaaatgcgcaagttggaggcttgctgtggaagcacacaacatcttaggctttgagaccattcctgaagagtgcgtgaagcaacataggaatacatccatggcgaactatatagat

SEQ ID NO: 153413 - DNA, 256 bp, Glycine max
tgaaggtcctctgatgctctatgtctccaagatgattccagcatctgataaggggagattttttgcctttggccgtgtattctctggcagggtttcaactggtttgaaggtgaggattatgggacctaattatgtccctggggagaaaaaggatttgtatgttaaaagtgtgcaacgaactgtcatttggatgggaaagaggcaagaaactgtaaggatgtcccctgtggtaatacagtggctatggttggtcttg

SEQ ID NO: 153414 - DNA, 258 bp, Glycine max
ctcgagccgttaatttatattttcgttttttcgttcttttctttttcttagattataatccgaaaacaaaagagttaagtgaattaaaaacccaagggaggttcatggccaaaggtaaagatatccgagtaattgttattttggaatgtaccggttgtgataaaaagagtgttaataaggaatcaacgggtatttctagatatataactaaaaagatcgacagaatacgcctagtcgattggaattgagaaaattttg

SEQ ID NO: 153415 - DNA, 261 bp, Glycine max
atgaggattagcatgagctggttttaggtatcattgattttatgatgcagtatacatgggacaaacaccttgaaacttgggtgaagacctcaggcatcctatggtggacccaagaacacttctaccaactgttatatcaccacagcagtacaagaaacggtttaggaaagccaagagcttgtattaacttatggtgacagatcaatggtcccctccaagttacaccccagtgggtcacaatctgacatttgcgacgaaaat

SEQ ID NO: 153416 - DNA, 261 bp, Glycine max
ggctgatcaacccaccttcacccttaacttctccaaaggttctagccaagtcattgctcaatactaccaactgattcgccttggttttgagggatatagaaacgtgatggaaaactgcagggacaacatgctggtgctgaaagagggactcgagaaaacagggcgattttcaattgtgtccaaagacaatggtgtgcctttggtggctttcacactaaagaccacacccactttgacgaattccaaatctcagacttttta

SEQ ID NO: 153417 - DNA, 263 bp, Glycine max
ctccacacagcatgatgagtctgtcacaaatgatgagattgcagctgatcttaaagaacacgtgattaagcctgtgattcctgagaagtaccttgatgagaagaccattttccatttgaacccttctggcaggtttgtcattggagggccgcatggcgatgctggtctcaccggccgcaagatcatcatcgacacctatggaggatggggtgcacatggtgtggtgccttctctgggaaggatcctaccaaggttgataggag

SEQ ID NO: 153418 - DNA, 241 bp, Glycine max
atggccaccgtcacttctgcagccgttgctattccctcattcactggcctcaaggcaagcgcaggcaaagtgagtgccgcagttaaagtctcagctccccaagccacaaggttgggcatcaaggcttcgctgaaagacgttggagtcgctgttgtggccactgccgcgagtgcagtgctggctagcaacgccatggtcattgaagtcacgctaggttcgataacgggtctctggctttcgt

SEQ ID NO: 153419 - DNA, 260 bp, Glycine max
agagaagcgtcttaataaacgctaacctctgtaccattcttcttcttaaaaatgagagagtgcatttccatccacattggccagtccgtcattcaggtcggaaatgcttgctgggagctttattgcctcgagcatgccattcaggctgatgggcagatgccgagtgataagaccataggtggtggtgacgatgctttcaacaccttcttcagcgagccggtgccggaaagcacgtgcctcgtgcagttttcgtggatctc

SEQ ID NO: 153420 - DNA, 257 bp, Glycine max
gcaaaggattctacccgccgctcgatgggaattgcgcttcaaggcgtctcgtagggctaatccgcctcacgagggtcaccaacggcacgtgcctttggggggccgaggccccctactgctggtcggcaaacggacggcgggcgcacgcgtcgcttctagcccggattctgacttagaggcgttcagtcataatccaacgcacggtagcttcgcgccctggctgttcaaccaagcgcgatgaccaattgtgcgaatca

SEQ ID NO: 153421 - DNA, 249 bp, Glycine max
gctgcatcgtggtgagctagttgaaattttggccaagtttttccccgagtacccaattcctaccaaatgttcagatgaaaagaacccgagagtaaaaccctacatattttcaaatcaaaagctgaaagatttgggattggaattcaccccagtgaagcagtgtctatatgacaccgttaaaaatctgcaagagaatggccaccttcctgtccccccaagcaaaaagattcctattgaagttagatccta

SEQ ID NO: 153422 - DNA, 259 bp, Glycine max
atgaaggttgtacccgggctgccagagggaaatctggattatgcatccggcatggtgggggcaagagatgccagagagaaaattgtaccaagagtgcggaaggcctatcaggcctttgcatctcacatggtggagggcgtcgatgccaagttcctggatgtacaaaaggggcacaggggagcacaatgttttgcaaagcacatggtgggggaaaacgtgtactgcaccagggtgcaccaaaggtgctgacgggagcacc

SEQ ID NO: 153423 - DNA, 243 bp, Glycine max
cggtgcccaactgcgcgctaacctagaccccacaaagggtgttggtcgattaagacagcaggacggtggtcatggaagtcgaaatccgctaaggagtgttttatctttgctatgagggtctgatatttgatgcaaactatgtttattgtcgaaagtttcttactttgttgttgccttcgagaagttaaatttgggtgagtcgagtttttgatgagtatataaaatttgctgcttagtggtggt

SEQ ID NO: 153424 - DNA, 272 bp, Glycine max
cacaacgttcgaggtgctgacgtcatacgtctggcgctgccgcacgaaagcgcttcaaatccctccaaatgaagatgtgagaatgatgtgcatcgtcgacgcgcgtggaaagttcgatcctcccttcccggcggggttctacggcagctgcttcgcgtttccggcggcggtgacgggcgccggagatctctgcgagaaaccgctggagtacgcggtgcagttgatacaaaagcgcgcggcgaggtgagcgaagagtatattgattcggtggc

SEQ ID NO: 153425 - DNA, 256 bp, Glycine max
aataccactacttttaacgttattttacttattccgtgaatcggaagctgggcactgcccctctttttggacccaaggtcggcttcggccggtcgatccgggcggaagacattgtcaggtggggagtttggctggggcggcacatctgttaaaagataacgcaggtgtcctaagatgagctcaacgagaacagaaatctcgtgtggaacaaaaggtaaaagctcgtttgattctgatttccagtacgaatacgaac

SEQ ID NO: 153426 - DNA, 258 bp, Glycine max
aatctgttctccaagcggaactcgccggttgcgcacgcggtcggattttgggactaccactccttcatcgccgccgccgcgctttttgagccggaagggttcggcaccaccgggaacaagacgatgcagatgatggagatcgccgccttcttcggacacgtcggcagcaagacctcttgtggttatggagtggccactggaggacctttggcctgggtctttgttacaatcatgaaatgagtcctatgcagtcatact

SEQ ID NO: 153427 - DNA, 260 bp, Glycine max
aaaaaagtcagaataacaaaacaaatcctttatagtatatcttgtaataaatgtgattcttggaatagggataaataaaccatggaaaaatctaagcgaatctttatgaaatccaagcgatcttttcgtaggcgtttgcccccgatacaatcaggggatcgaattgattataaaaacatgggtttaattagtcgattatattagtgaacaaggacatattatccagacgcgaaaatagattgaccttaaaacaacaacga

SEQ ID NO: 153428 - DNA, 257 bp, Glycine max
gaggaaactctggtggaggcccgcagcgatactgacgtgcaaatcgttcgtctgacttgggtataggggcgaaagactaatcgaaccgtctagtagctggttccctccgaagtttccctcaggatagctggagcccgcgggcgagttctatcgggtaaagccaatgattagaggcatcgggggcgcaacgccttcgacctattctcaaactttaataggtaggacggtgcggctgctctgttgagccgcgccatgga

SEQ ID NO: 153429 - DNA, 255 bp, Glycine max
ggaaaaggaaaaaaaggcaaaatgggtaaggatctgagcgatgagcaagtgtcttcaatgaaggaagctttctctttattcgacacagacggtgacggtcggatcgcgccgtcggagctggggatcctgatgaggtctctgggagggaacccgactcaggcccaactcaaagccatcgtggccgaagagaacctcacggctcccttcgacttccccgattcctcgatcttatggccaaacacatgaaacccgaac

SEQ ID NO: 153430 - DNA, 259 bp, Glycine max
aagagtcgctgcgccgcttgtgctttccccgctgcacgcacgcggaaatataactggagcgtcaaggcaattcgcagaaagaccaccggaactggcaggatgagatacttgcgtaacgtgcctcgccgtttcaagagtggcttcagagaaggtaccgaagctgcaccaaggaagaagggagcagctaccactgcatagacctttcaaagatcgtctcgttgggtacggatttacaggaatagattgctttttgtgcttt

SEQ ID NO: 153431 - DNA, 255 bp, Glycine max
ttctttcgcaccttgcagaatcaattttctctctcaatcgtctttgctggctcgtgccaggcgagcttctcgctaattcaccggtgggatggcccctaggaagcaactcgccaccaaggctgcaagagaatctgcacctaccaccggtggagtcaagaagcctcatcgctatcgtcctggaactgttgctcttcggtaatttgctcctttcagcattgttttgtttcctcttctccttcgcgctttgaattttcg

SEQ ID NO: 153432 - DNA, 257 bp, Glycine max
cttgcacaaaagcaatgactatgtcatttaatccaaacccgtgatctgatgcatggagtttggaatttctgaagcgtaccggatttcattgtgatatcatttgtgtcactggatggactgccaccccaatgcaggatgttcaggttacaattgattggtttatttcctctcaggaatgtgttcccaggacctattgtgcatgaaatccacagatccttttgtgttacataggtggatgggaaaactgactttccccc

SEQ ID NO: 153433 - DNA, 256 bp, Glycine max
gaagttttgtgcaaaatccttgggaacagtaattggttttgccatttcaaagctgggaaagaacattcaagtactttcaagttcctttgtcaataagcaagaccaatacactgtggaaggagtgcagaatcttggagacaaagcagtgatgtgtcataggctaaatttcagaactgcagtattttactgccatgaagtccgtgaaacaacagtttcatggttccattggtggctggtgatggaaccaaaactcagg

SEQ ID NO: 153434 - DNA, 255 bp, Glycine max
aaaggattctacccgccgctcgatgggaattgcgcttcaaggcgtctcgtagggctaatccgcctcacgagggtcaccaacggcacgtgcctttggggggccgaggccccctactgctggtcggcaaacggacggcgggcgcacgcgtcgcttctagcccggattctgacttagaggcgttcagtcataatccaacgcacggtagcttcgcccactggcttctcaaccaagcgcgatgaccaattgtgcgaatca

SEQ ID NO: 153435 - DNA, 244 bp, Glycine max
ttcggctcgaggcatcattcaaatttctgtcctatcaactttcgatggtaggatagtggtctaccatggtggtgacgggtgacggataattagggttcgattccggagagggagcctgagatacggctaccacatccaaggaacgcagcaggcgcgcaaattacccaatcctgacacggggaggtagtgacaataaataacaataccgggctcattgagtctgtaattggaatgagtacaatct

SEQ ID NO: 153436 - DNA, 257 bp, Glycine max
aagaccttgtagcactctcaggatctcactctattggccaaggtcgttgtttctccatcatgtttaggctatacaatcagtctggaactggaaggcctgatcctgccattgatcctagctataggcaagagcttaacaggatatgtccactggatgttgaccaaaatgtcactgggaaccttgattccacgcctctcgtctttgataaccaaatttcaaggatttggttgctgggaggggctttctcaactctgatc

SEQ ID NO: 153437 - DNA, 256 bp, Glycine max
aacacgctgttcctacaatcattccgaatgtgcccttccggtcgcaccctcctcccttcctccgtctccgatttccgaccggcattcgacgtcctcggtcccgaccgcgacggcaaaatcagccgcgacgacctccgcgccttctacgccggagtcggcggcggaggagatgacgtgatcggggcaatgatgacagtggctgacaccaataagacgggttcgtggagtacgaggagttcgagcgcgtggtctcggc

SEQ ID NO: 153438 - DNA, 252 bp, Glycine max
aaaaaagtcagaataaaaaaacaaatcctttatagtatttcttgtaataaatgtgatttttggaatagggataaataaaccatggaaaaatctaagcgactctttatgaaatccaagcgatcttttcgtaggcgtttgcccccgatccaatcgggggaccgaattgattataaaaacatgggtttaattagtcgatgtattagtgaacaagaaaaatattatccagacgcgtaaatagattgaccttaaaac

SEQ ID NO: 153439 - DNA, 255 bp, Glycine max
ccaaaaaccctaggtagagagctcttcctccctttctcacagcaatggccgccgcagcacgccctctcgtcaccgtgcaggccctcgacggtgacatggcaaccgatgcctccgccaccgttcccatccctgacgtcatgaaggcctctatccgccccgacatcgtcaatttcgtacactcgaacatctccaagaacagccgccagccatcgccgtctgtcgtcgcgctggtcaccagacctccgccgaatcctg

SEQ ID NO: 153440 - DNA, 253 bp, Glycine max
atctgcacatgcacagtcatgtcatgtgccttttgagttcaatgctgtaagagtacctgcttctcaggtgcaacttgaagaccttgaacttctcccttatgaagctgtggcagtgaacttcgccataagtctgcaccatgtgccagatgaaagtgtgaacagtcacaatcatcgtgaccacttgttgagattggcaaagcgattatctcgaaagtggtgactctggttgagcaggaatttagcaccaacaatg

SEQ ID NO: 153441 - DNA, 252 bp, Glycine max
gatcattctgcgcaggtaagacagagagaaagaactgacctcagcggcggcggcggcggcaacagaagaacaaccaccaccacacacaatgggtcgcgtgagaacaaaaacggtgaagaaatcctcccgccaggtgattgagcgttactactcgcgcatgaccctcgacttccacacaaacaaaaactctctcgaagaagtggccatcatccttccaagaggctgcggaacaagatcgcgggtttctccacg

SEQ ID NO: 153442 - DNA, 258 bp, Glycine max
tatagcccaatccctatacaaccaaaccctaacacacacccatttgattcagtttccatggctagcctcaaggttgcatttttggctgcagtgctctgcatggttgtggtgagtgcacccatggcacatgcagctatcacgtgcgggcaggtgacgaatagcctgatcaattgcatcggttacctccagaacggaggaacgccgccgtcgggagctgcaacggagtgaagagcctcaatgccgccgccaagaccaccg

SEQ ID NO: 153443 - DNA, 255 bp, Glycine max
gcaaaggattctacccgccgctcgatgggaattgcgcttcaaggcgtctcgtagggctaatccgcctcacgagggtcaccaacggcacgtgcctttggggggccgaggccccctactgctggtcggcaaacggacggcgggcgcacgcgtcgcttctagcccggattctgacttagaggcgttcagtcataatccaacgcacggtagcttcggccactggcttttcctccaagctgcgatgacaattgtgcgaat

SEQ ID NO: 153444 - DNA, 256 bp, Glycine max
gaaagagtttcatttcttcgctgtcttcgacggccacggatgctcacatgtggcgactatgtgtaaggagaggttacacgaaatagtgaaggaagagattcacaaagcgaaggagaatttggaatgggaatcaacgatgaagaagtgtttcgcgcgcatggacgaagaggttctcaggtggagccagaacaacgagactccaaattgcagtgcgagcttcaaaccccgcactgcgacgccgtaggctccaccgctg

SEQ ID NO: 153445 - DNA, 252 bp, Glycine max
ctttgccgagctttatgtgtttaaatggacatcacttctcatccctcctacaacagtgcttattgtgaatttggttgggattgtggctggtgtatcctatgccataaacagtggttaccagtcttggggtccactatttggcaagctgttctttgctatctgggtcattgcccatctatacccattcttgaagggtctcttgggcaggaaaatcgtaccccaaccattgttattgtttggtccgttcttctt

SEQ ID NO: 153446 - DNA, 254 bp, Glycine max
cttctctcggcgtcgccatggacgaagaagaggtgcgcaagatcttcagcaagttcgacaagaacggcgacggcaagatctcgtgcgcggagcagaaggagatgatggcggcgctgggatccaaaacgacgtcggacgaggtgaagcgcatgatggcggagctggaccggaacggcgacggctacattgatttgaaggagttcggcgagtccactgcggcggcggtggcgacgggagggagctccgggaggcgt

SEQ ID NO: 153447 - DNA, 253 bp, Glycine max
gcgacgttgctttttgatccttcgatgtcggctcttcctatcattgtgaagcagaattcaccaagtgttggattgttcacccaccaatagggaacgtgagctgggtttagaccgtcgtgagacaggttagttttaccctactgatgacagtgtcgcaatagtaattcaacctagtacgagaggaaccgttgattcgcacaattggtcatccgcttggttgaaaagccagtggcgcgaactaccgtgcgttgga

SEQ ID NO: 153448 - DNA, 253 bp, Glycine max
ctcgagccgaatcggctcgagtgaggccaggcaagccccactcaaccaccacacttctcctagttcacgctacccctttctgctcttcttctacctttcaagttttaaaagtataaagatggcagagacattcctatttacctcagagtcggtgaacgagggacaccctgacaagctctgcgaccaaatctccgatgctgtcctcgacgttgcctcgagcaggacccagacagcaaagttgcctgcgaaacat

SEQ ID NO: 153449 - DNA, 253 bp, Glycine max
tctcgagccgaatcggctcgagggcaagtctggtgccagcagccgcggtaattccagctccaatagcgtatatttaagttgttgcagttaaaaagctcgtagttggaccttgggttgggtcgatcggtccgcctccggtgtgcaccggtcggctcgtcccttctgccggcgatgcgctcctgtccttaactggccgggtcgtgcctccgtgctgttactttgaagaaattagagtgctcaaagcaagcctacg

SEQ ID NO: 153450 - DNA, 251 bp, Glycine max
ctctctttctctctttctagttcgtgttcttcgtcgcaaatccgacgtaggatctctcttgttttttctctaggtttttcgcgatggcgtcgaagcgaattttgaaggagcttaaggatttgcagaaggatcctccaacatcttgcagtgccggtatatttttattttattgttttgatattcttttcctattttattgttgagaattggttgtgtttgtttaaacaatttggatttaaattttggtaagg

SEQ ID NO: 153451 - DNA, 254 bp, Glycine max
  unsure (1)..(254): unsure at all n locations
agaaaaccctaattcgctcgcagtcacccaagaggcgaatccttaccattgctcgagatgggtgaagaagtgaaggccgtggttccagagtctgttttgaagaagcagaagagagaggaggaatgggcgttggccaagaagcaagacctcgaggctgcgaagaagaagagagccgagagccgcaaactcatctacaacagagctaagaacangctaaggagtacgatcaccaggagaaggaattgattcggttg

SEQ ID NO: 153452 - DNA, 253 bp, Glycine max
gactactgcatccccatttccgttacaccatggaaatcaacgcgcttgctcgcgaggccctgataaacggcgacggaataatcgaaagcagtttctctccggggaagcactccatcctcttaagctcaatcgcctacgaccaacaatggcaattcgacctgcaatccctcccaaaggacctcatcagcagaggcatggccgtggaggaccaccgcaccccacggcctcaagctaatcatcgaagactaccctt

SEQ ID NO: 153453 - DNA, 251 bp, Glycine max
attctacccgccgctcgatgggaattgcgcttcaaggcgtctcgtagggctaatccgcctcacgagggtcaccaacggcacgtgcctttggggggccgaggccccctactgctggtcggcaaacggacggcgggcgcacgcgtcgcttctagcccggattctgacttagaggcgttcagtcataatccaacgcacggtagcttcgcgcactggctcttcaaccaagcgcgatgaccaattgtgcgaatcaa

SEQ ID NO: 153454 - DNA, 250 bp, Glycine max
ctgctgtcgtgggcgtttcatctgctgctgtagagggacaggcggaggacgcggagtccgcctacatcgaccccgaccgcgtggtggctgccacggcggcgcgtcccaaatgccgagggtgcgcaaagcgcgtggcctcggtggtcgttttgccgtgtcggcacttgtgcgtctgtacagaatgcgatgcgcatttccgagcgtgccagtttgtctcaccccaaagaattcaaccgttgaagtttttctc

SEQ ID NO: 153455 - DNA, 250 bp, Glycine max
gtcataacgtaaaatatgaaattagacactatcttcgcctttatcgtagtttatattctgctggtaacctcatcagagttccctagtgttgctgcagatgatgttagcagcatcatcagtgcttcccaatttgagcaattgctgaaacacagaaacgatcaaatttgtgaggggaagaacggattctacagctacaatgcttttgtactgctgccagaacctttgatgggtttggcactacgggtgatgt

SEQ ID NO: 153456 - DNA, 274 bp, Glycine max
cgtatgcacgcgtatgcggctcgagtcctcttgtctttgaaatcttttctaattcaaatattatataacgattgaaatggcagcacaagctgaaattgagcatcctaggaaagcattcggatgggcagctagggattcttccggtcttctctcccctttcaatttctgcagaagggaacccggtgagaaagatgtggcattcagagtgttgtactgtgggatatgccactcggacctccacagcataaagaacgaatggggtacttccatctat

SEQ ID NO: 153457 - DNA, 251 bp, Glycine max
aagctgggaaagaacattcaagtactttcaagttcctttgtcaataagcaagaccaatacactgtggaaggagtgcagaatcttggagacaaagcagtgatgtgtcataggctaaatttcagaactgcagtattttactgccatgaagtccgtgaaacaacagctttcatggttccattggtggctggtgatggaaccaaaactcaggcacttgctatttgccactcaaatacttctggaatgaatcatca

SEQ ID NO: 153458 - DNA, 247 bp, Glycine max
gttgcctcaaactcaaaggatgaccctgcaaaggaggctgctaacttcacagcccaagtcatcatcatgaaccaccctggtcagattggaaatggctatgcccctgtcctcgactgccacacttctcacattgctgtcaagtttgctgaactcatgaccaagattgacaggcgatccggcaaagagcttgagaaggaatcaaagtttttgaagaacggtgtgctggttttgttaagatgattccaac

SEQ ID NO: 153459 - DNA, 247 bp, Glycine max
ctcgagccgtgctttgaaaaatgggatccaaggttgttgcatccgttgcccttctcctctccatcaacattcttttcatttccatggttagctccagcagccactacgatccacagccccaaccttctcacgtcactgctcttattacacgacctagttgtccggatctgagtatttgcctcaatattttaggcgggtctctaggaaccgtggatgattgttgtgccctcatcggtggtcttggtga

SEQ ID NO: 153460 - DNA, 247 bp, Glycine max
gacccaaggtcggcttcggccggtcgatccgggcggaagacattgtcaggtggggagtttggctggggcggcacatctgttaaaagataacgcaggtgtcctaagatgagctcaacgagaacagaaatctcgtgtggaacaaaagggtaaaagctcgtttgattctgatttccagtacgaatacgaaccgtgaaagcgtggcctatcgatcctttagtccttcggaatttgaagctagaggtgtcag

SEQ ID NO: 153461 - DNA, 244 bp, Glycine max
aacacattcaagcaggagctaagaaggtgctcattactgctcctggtaaaggagacatccccacatatgtggttggtgtcaatgagtatgattacagccctgatgaacccatcatcagcaatgcatcttgcaccactaactgccttgcaccctttgtcaaggtccttgatcagaaattcggtatcatcaagggcaccatgaccaccactcactcctacaccggcgaccaaaggcttctcgacgc

SEQ ID NO: 153462 - DNA, 243 bp, Glycine max
gcgcaatgcaatcaaaaaggttggaaccgatgaggatgcactcactcgcgtggttgtgagccgggccgagaaggacctgaagataatctcagaggtttactacaagagaaacagcgttcttcttgagcatgctattgccaaggaaatctcaggggactacaagaagttccttctcactctgttggggaaagaagactaaatattttttctctgagggctttgtgattacgagtttaggacacc

SEQ ID NO: 153463 - DNA, 258 bp, Glycine max
actcggaatcggctctttcgaccgattcggctcgagctggagctcagccttctgctatagaaagaaataccaagacagttgcaagaaaggccctactcaactaagaatggaaccggtcataaccatacaggtgcttccatcagtggcagcgcaccggcttctaaggcacaggttgttggttggcctcctataagatcttttaggaaaaactcgatggccacgacaactaacaaaacaatgatgaagtggatgggaaac

SEQ ID NO: 153464 - DNA, 154 bp, Glycine max
ctcataacacaaagcacaaagcaaagctcatccttgagttaaaaaatggcagcagcttcttccatggctctctcatccccatccttggctggcaaggccgtgaagctgggcccatcagccccagaagtgggaagggtgagcatgaggaagaccg

SEQ ID NO: 153465 - DNA, 246 bp, Glycine max
ctctcatcttcgagctccgatggcgagcctgtggcgcgcggcaaccggcatgacggacaacgccaccgattacgacggcgtcgagttctggtcgaaccccgagcggaccggctggctcaccaagcagggcgagtacatcaagacctggcgccgccgctggttcgtcctcaagcaaggcaagctcttctggttcaaggactccgccgtcacgcgtgcgtctcgtccacgcggcgtggtccccgtcgc

SEQ ID NO: 153466 - DNA, 248 bp, Glycine max
gacccaaggtcggcttcggccggtcgatccgggcggaagacattgtcaggtggggagtttggctggggcggcacatctgttaaaagataacgcaggtgtcctaagatgagctcaacgagaacagaaatctcgtgtggaacaaaagggtaaaagctcgtttgattctgatttccagtacgaatacgaaccgtgaaagcgtggacgatcgatcctttagtccttcggaatttgaagctagaggtgtcaga

SEQ ID NO: 153467 - DNA, 247 bp, Glycine max
atcagttatagtttgtttgatggtatctactactcggataaccgtagtaattctagagctaatacgtgcaacaaaccccgacttctggaagggatgcatttattagataaaaggtcaacacaggctctgcctgttgctttgatgattcatgataactcgtcggatcgcacggcctttgtgccggcgacgcatcattcaaatttctgccctatcaactttcgatggtaggatagtggcctaccatggt

SEQ ID NO: 153468 - DNA, 241 bp, Glycine max
ggcttatggtggatacctagcgctgaaggaggcgaaggagttgatcgaagggttgccgaagaagttcaaggaagggatttcaaaggacgaagctgaagatgcgaagaagcaactcgaagaagctggtgccaaggttaccattgcttaaacactgtttagctgcagcatatatgttctgcttcttcttttgttggttgtagttgagttcaccagtacactgtaatttcatttccattttgtc

SEQ ID NO: 153469 - DNA, 243 bp, Glycine max
caagattggaggtattggaactgtgccagtgggacgtgttgagaccggtgtcttgaagcctggaatggtggtgacttttgcaccaactggactgacaactgaagtcaagtctgtggagatgcaccatgaatctcttacagaggcacatcctggtgacaatgtgggattcaatgttaagaatgttgctgttaaggatttgaagcgtggttatgttgcctcaaactcaaaggatgaccctgcaaa

SEQ ID NO: 153470 - DNA, 152 bp, Glycine max
ggaatgacagcctttgagtaccatggaacagatccaaggtttaacaaggttttcaacaagggaatggctgatcactctaccatcacaatgaagaaaattcttgagacctacacaggttttgagagtcttaaatctctggttgatgttggtgg

SEQ ID NO: 153471 - DNA, 244 bp, Glycine max
ggatgttgcacattttttgtttggaatctttgggaatgcttccgctctgttcctcttcttggctccagtgatcacattcaagaggattataaagaacagatccacagagaagttctcgggcattccatatgtcatgacactgctcaattgtctcctttcagcttggtatggtttgccttttgtgtctccccacaacatattagtgtcaacagtgaatggcactggatcattcattgaaatcata

SEQ ID NO: 153472 - DNA, 240 bp, Glycine max
ttgggattcaaggatcgcttgggccttcggtggcatgatcttcgccctcgtttactgcaccgctggcatctcagggggacacataaacccggcggtgacatttgggctgtttttggcgaggaagttgtcgttgcccagggcgattttctacatcgtgatgcaatgcttgggtgctatttgtggcgctggtctggtgaagggtttcgaggggaaacaaaatacggtgcgttgaatggtggt

SEQ ID NO: 153473 - DNA, 242 bp, Glycine max
gtggtcccaataagtggacccaattatcttcccttgatccaggacagaggatatgttggtgttttgcatgattggtgtgaggcttttccaacgtaccccagaacctatgacttggtgcatgctgcaggacttctatcccttgaaactgagcagcacagatgctccatgcttgacctgttcattgaaattgacaggatacttcgcccagagggttgggtaataattcgcgacacagttccctt

SEQ ID NO: 153474 - DNA, 245 bp, Glycine max
gaagctttggaaagggaatgcccaggagttgtttcctgtgctgatatcctcgttctctctgccagagatggcattgtttcgctaggaggtccccatatccctcttaaaacaggaagaagggatggtagaaggagcagagccgatgtggtagagcagttcctcccagaccacaatgaatccatttctgcagttcttgacaagtttggtgccatgggaattgacacccccggcgtagttgcattgct

SEQ ID NO: 153475 - DNA, 243 bp, Glycine max
gcaaaggattctacccgccgctcgatgggaattgcgcttcaaggcgtctcgtagggctaatccgcctcacgagggtcaccaacggcacgtgcctttggggggccgaggccccctactgctggtcggcaaacggacggcgggcgcacgcgtcgcttctagcccggattctgacttagaggcgttcagtcataatccaacgcacggtagcttcgcgccactggcttttcagccaagcgcgatgac

SEQ ID NO: 153476 - DNA, 238 bp, Glycine max
gcaagcatgttctctgtgggagaagtttgatgtccaagtggttctgcgcaagtttgatagtggagtcatggtaatacagacgaagtcccacagtgatgaggaggttttcaataaagtcaagatgcttgttttgaaacctgacgcccttcgagctggaataagtgctagtgatgctgcaaggacactaggggttgctccagcaatggcaaaggagcatctcttgtctgcagagagcaaa

SEQ ID NO: 153477 - DNA, 242 bp, Glycine max
atatagcccaagccctatacaaccaaaccctaacacacacccatttgattcagtttccatggctagcctcaaggttgcatttttggctgcagtgctctgcatggttgtggtgagtgcacccatggcacatgcagctatcacgtgcgggcaggtgacgaatagcctgatcaattgcatcggttacctccagaacggaggaacgccgccgtcgggatgctgcaacggagtgaagagcctcaatg

SEQ ID NO: 153478 - DNA, 267 bp, Glycine max
  unsure (1)..(267): unsure at all n locations
aatctctgaattcggcattcggttcgatgtgctgctattgtggattcaggaacatctttgcttgctggtccaactactgttgtaactgaaatcaatcatgctattggagctgaaggagttttaagtgtagaatgtaaggaagttgtttctgaatatggagaattgttatgggatctcttggtatctggggtacgacccgatgatgtatgctcacaggttggcttatgtttcaaaaggactanatcagagagcaatggaattgagatg

SEQ ID NO: 153479 - DNA, 242 bp, Glycine max
tttgagtcttcttgatccttctttttctccttgaactcaaacatggcagatgaggtggttctgctagatttctggccaagtccatttgggatgagggtcaggattgcacttgctgaaaagggtatcaaatatgagtacaaagaagaggacttgaggaacaagagtcctcttctcctccaaatgaacccggttcacaagaagattccggttctcatccacaatggcaaacccatttgtgaatc

SEQ ID NO: 153480 - DNA, 238 bp, Glycine max
aacgagtcaattcatcatttgctctctgctctgcttgttcaaattttaggagcggagaatccagagaaagagagatgtctggtatcgcccgtggacgtgctgccgaggagcgaaagtcatggcgcaaaaaccaccctcatggtttcgttgccaagcccgagactctccctgatgccaccgttaatttgatggtctggcattgcactattcctggcaaggctgggactgattgggaggg

SEQ ID NO: 153481 - DNA, 241 bp, Glycine max
ggtggccccctcggtgaggtcactgacccaatctacccaggtggcagcttcgacccattgggccttgctgatgacccagaggcttttgctgagcttaaggtgaaggaactcaagaacggacgattggccatgttctctatgtttggcttctttgttcaggccattgtcaccggaaagggtccattggagaacctcgccgatcaccttgctgaccctgtcaacaacaacgcctgggcctatg

SEQ ID NO: 153482 - DNA, 237 bp, Glycine max
caagattatattcttgtcaggaagaacactggacaaacaggccgtaacagaagcaaacttaaagaaggctggctaccacacatgggaaaaattaattctcaaggatccacaagatccttccactccaaatgcagtttcatacaaaacagcagcgagagagaaactgataaggcagggatacaacattgttgggatcattggagaccatggagcgatctcctcggaggccacagaggc

SEQ ID NO: 153483 - DNA, 239 bp, Glycine max
ggcgacactggattccgacgtgaccatggttccggccggcgaaccctccaccagcgccggtccttcttcgtccaccaagaagccgaagcgattcgagatcaagaagtggaatgccgtttctctctgggcttgggatattgttgtggataattgcgctatttgccgcaaccatatcatggatctctgtattgagtgccaggccaaccaggctagcgccactagcgaggaatgcactgtag

SEQ ID NO: 153484 - DNA, 237 bp, Glycine max
gagataactagaaacagtgtgatgaaaatgaaggtccttgttttcttcgttgctacaattttggtagcatggcaatgccatgcgtacgatatgttccctctccgaatgaacactggctatggtgcccgtactccggaggtgaaatgcgcaagttggaggcttgctgtggaagcagacaacatctttggctttgagaccattcatgaagagtgcgttgaagcaacaaaggaatacatc

SEQ ID NO: 153485 - DNA, 229 bp, Glycine max
atggtgaacattttgttcaggaattcaagaggaagaacaagaaggatattagtggaaatgccagagcattgaggaggttgagaacagcatgtgagagggccaagaggactctctcttccactgctcaaaccaccattgagattgattccttgtatgagggtattgacttctacacaaccatcaagatagcacgtttcgaagagcttaacatggacctattcaggaagtg

SEQ ID NO: 153486 - DNA, 243 bp, Glycine max
gaagaaagtaggaaaagtggatatagtatcagttggacctgccaaggaagagaagaaggaagaaaagaaagaggagaaaaaggaagaaaaaaaagaagagaaaaaggaggagaagaaagaggagaagaaggaagaaaagaaggaagagaagaaggaggagaaaaaataatagacaatacttgattatcatctggttttgtctaattctacccttttattttcttttcttttttttttaatttt

SEQ ID NO: 153487 - DNA, 242 bp, Glycine max
gcccttcctacttcaacaacaataataacagcgatgctgccaattttgaatgcaacatttgctttgaattagcgcaagacccgataattactttgtgtggtcatcttttctgctggccttgtctttacaaatggcttcactttcactcacaatcacgagaatgcccggtgtgcaaggctctcgtggaggaggagaatctggttcccttgtatgggagaggaaagtcgtccactgatccgaga

SEQ ID NO: 153488 - DNA, 240 bp, Glycine max
cttcgtcttagaatggcaatccctctccttgtaccacacatgaacctccacgacgcaaagcttgggggctatgatatcccagctgagagcaagatcttggtgaatgcatggtggctggccaacaaccctgcacactggaagaagccagaggagttccggcctgagaggttcttcgaggaggagtcgctttgcgaagccaatggcaatgactttaggtaccttccctttggtgttggcaga

SEQ ID NO: 153489 - DNA, 178 bp, Glycine max
cgcacgaatatcttgttgtttggagcgatccgagaaaaactctgtaaacatgatggtttaccaggacctccttacaggtgatgagcttctctctgactccttccgttacaaggaaattgagaatggaatgctgtgggaagttgaggggaagtgggttgttaaaggagcagttgatgta

SEQ ID NO: 153490 - DNA, 234 bp, Glycine max
ctcgagcgctcgagccgctcttcttctcttgcggctagggttttagcgcagttcttctagatttaagaccgctgggtaaggaaaaggttcacatcagtattgtggtcattggccatgtcgactctgggaaatccactaccactggtcacctgatttacaagcttggaggcattgacaagcgtgttattgagaggtttgagaaggaactgctgagatgaacaagaggtctttcaa

SEQ ID NO: 153491 - DNA, 237 bp, Glycine max
tcaccgtagacggcggaggtggcggtggtggtgtagacacggcgtgacggcgatctcttgagataaatgttggttgaaagaggaagaagaagaagagttgtattgtagaatgagccaaccaacggtgatacttgccactgcgagctatgatcacactattcgtttttgggaggccaagagtggccgttgctaccgcaccatccaatatcctgattcgcaagtaaaccggctggagat

SEQ ID NO: 153492 - DNA, 238 bp, Glycine max
gaggagacacaccttcagcagcagcagccatggttctcaaaaccgaactatgccgattcagcggtgccaagatctacccagggaaaggcatcagatttgttcgtggtgattctcaggttttcctgtttgctaactcgaaatgtaagaggtatttccacaacaggttgaagccatcaaagctcacctggactgcaatgtacagaaagcaaccaagaaggacattgctcaagaagctgtg

SEQ ID NO: 153493 - DNA, 170 bp, Glycine max
agagggtgactttgttgatggccgcatcactgtttcagggttcctctattggacccttgattgatttggctattcatatcgatccaagccttatctttagtgcatttgtgggaacagctttggcctttgcatgcttctcaggagcagctttggttgcaaggcgtagggag

SEQ ID NO: 153494 - DNA, 74 bp, Glycine max
cggatgtggaacggtgagagccggtccgccgatcgactcgggacattgaccgacgcggattgcgatggtgaccc

SEQ ID NO: 153495 - DNA, 239 bp, Glycine max
aattgtgcaagtttcctatgccattggtgtgcctgagcccttgtctgtgtttgttgacacttatggcactgggaagatccctgacaaggaaatcctcagcattgtgaaggagagttttgacttcaggcctggcatgatctccatcaaccttgatctcaagaggggtggaaatggcaggttcttgaagactgctgcatatggacactttggcagagatgaccctgacttcacatgggaag

SEQ ID NO: 153496 - DNA, 239 bp, Glycine max
ctccgaacccaaacacgccctcctcaaacaactcatgttcttcctcctcaaatcacgtcgcgcccacgtcatctctgagttccacgcgtcctacaaagaactcttcgagagggccgaggagtttgtcggggacaggttcgtcggggaggaaggggagaagctcctcaagcacgtgctgtggtccaatgggcctgagactgagtctccaacactgggaacaagcaatgcgccggaaaaga

SEQ ID NO: 153497 - DNA, 238 bp, Glycine max
caccaattaagctttcaagagacaaactgctttgaaaaatgggatccaaggttgttgcatccgttgcccttctcctctccatcaacattcttttatattccatggttagctccagcagccactacgattcacagccccaaccttctcacgtcactgctcttattacacgacctagttgtccggatctgagtatttgcctcaatattttaggcgggtctctaggaaccgtggatgattg

SEQ ID NO: 153498 - DNA, 233 bp, Glycine max
gcatttttggctgcagtgctctgcatggttgtggtgagtgcacccatggcacatgcagctatcacgtgcgggcaggtgacgaatagcctgatcaattgcatcggttacctccagaacggaggaacgccgccgtcgggatgctgcaacggagtgaagagcctcaatgccgccgccaagaccaccgccgaccgccagacggcgtgcaacgcctcaagtcggccgccagccaaatc

SEQ ID NO: 153499 - DNA, 234 bp, Glycine max
aaaggattctacccgccgctcgatgggaattgcgcttcaaggcgtctcgtagggctaatccgcctcacgagggtcaccaacggcacgtgcctttggggggccgaggcccctactgctggtcggcaaacggacggcgggcgcacgcgtcgcttctagcccggattctgacttagaggcgttcagtcataatccaacgcacggtagcttcgcgccactggcttttcattcaagcgc

SEQ ID NO: 153500 - DNA, 152 bp, Glycine max
aaattagccatttttgaaacaggaataaaagtagtagatcttttagctccttatcgtcgtggaggaaaaataggacttttcggtggagctggagtgggtacaacggtactgattatggaattgatcaataacattgccaaagctcatggagg

SEQ ID NO: 153501 - DNA, 103 bp, Glycine max
caatcctgacacggggaggtagtgacaataaataacaataccgggctcattgagtctggtaattggaatgagtacaatctaaatcccttaacgaggatccatt

SEQ ID NO: 153502 - DNA, 264 bp, Glycine max
ctttcctcctcttccttgtgatttttgtttgcatcacagggagaaactgagacacagaagatgagagagataattagtattcatattggacaagctggaattcaggtggggaattcatgctgggagttgtattgccttgagcatggaattaaccctgatggcaccatgcctagtgatacctcagttggtgtagcacatgatgctttcaacaccttcttcagcgagacgggatccggcaagcatgtgccaagggctttatttgtt

SEQ ID NO: 153503 - DNA, 264 bp, Glycine max
gagataactagaaacagtgtgatgaaaatgaaggtccttgttttcttcgttgctacaattttggtagcatggcaatgccatgcgtacgatatgttccctctccgaatgaacactggctatggtgcccgtactccggaggtgaaatgcgcaagttggaggcttgctgtggaagcacacaacatctttggctttgagaccattcctgaagagtgcgttgaagcaacaaaggaatacatccatgtcgaacaatatagatcagactcc

SEQ ID NO: 153504 - DNA, 263 bp, Glycine max
cggctcgagcctgagaataggtatccctgtgcatatgatgatgggtggacagctcttaagtgggttagttctacatcttggcttcagagtaggaaggataagaaagttcatatctacatggctggggatagctcgggtgggaacattgtgcaccatgttgccctcaaagccatggagtcgggaattgaagtgtttgggaatatactgctcaacccattgtttggcgggcaagaaagaacagagtccgagaagcgtttagatgg

SEQ ID NO: 153505 - DNA, 265 bp, Glycine max
cgggaggagtcatgactgtgttgattcccagaaacacaaccattcccaccaagaaggagcaggtattttcgacctattccgacaaccagcctggtgtgttgattcaggtctatgaaggtgaacgtacgaggactcgtgataacaatttgcttggcaaatttgagttatctggaattcctcctgctccgagaggtgttcctcagatcaccgtttgctttgacattgacgccaacggtatattgaacgtgtctgcggaggacaaaac

SEQ ID NO: 153506 - DNA, 260 bp, Glycine max
aaggctgtctcaacttctcggaattgaggttacgatggcaaatgactctattggggaggaagttgagaagttggtagcacaacttccagaaggtggtgttttgcttctagagaatgtgaggttctataaggaggaagagaagaatgaccctgagtttgcaaagaagttggcttctcttgctgatctctacgtgaatgatgctttcggcactgcccacagagctcatgcttctacagaaggagtggccaaatacttgaagc

SEQ ID NO: 153507 - DNA, 263 bp, Glycine max
cgtttccataatcccataccccttcacaaacctgaaataccccgttccagacacaaccccaaattcccgttccgtcatcgtgaagatatctgatccttgaatctccaagctgcttcctttgaatttcccattggtgaagatcacggagaaaaccatgtacaagcctttgccatcaagctgcgaatttacgtatatgccctgggccctaccaatgagctttgagtcgtcgctgggtcccactgttactgggtcgtctacgactg

SEQ ID NO: 153508 - DNA, 262 bp, Glycine max
agagaagcgtcttaataaacgctaacctctgtaccattcttcttcttaaaaatgagagagtgcatttccatccacattggccaggccggcattcaggtcggaaatgcttgctgggagctttattgcctcgagcatgccattcaggctgatgggcagatgccgagtgataagaccataggtggtggtgacgatgctttcaacaccttcttcagcgagaccggtgccggaaagcacgtgcctcgtgcagttttcgtggatctcg

SEQ ID NO: 153509 - DNA, 263 bp, Glycine max
accatttgctcccagcactgagcttaaccgagcttcacaaagatgaatcgggaaaaattgatgaagatggccggttcggttagaactgggggaaagggcaccgtgagaagaaagaagaaggctgtccacaagacaacaaccacagatgacaaaaggcttcagagcaccctgaagagaataggggtgaatgccatcccggctattgaggaggtcaatatctttaaggatgacgtattatccagtttctaaatcccaaagttcaa

SEQ ID NO: 153510 - DNA, 264 bp, Glycine max
tccatttctgcagttcttgacaagtttggtgccatgggaattgacacccccggcgtagttgcattgcttggagcacacagtgttggtcgaacccattgtgtgaagttggtgcaccgtttgtacccagagattgatccagctctgaaccctgaccacgtccctcacattctgaagaagtgccctgatgccattccagaccctaaggccgtgcagtacgtgagaaacgaccgtggcacccccatgattctagacaacaattactac

SEQ ID NO: 153511 - DNA, 261 bp, Glycine max
acttgttccttttgaaggttagaagtgctacaatacaaacaatggcagctactcaggaagatgtgaagcttttgggtattgtgggaagcccatttgtgtgcagggtccagattgcccttaagttgaagggagttgaatacaaatttttggaagaaaatttgggcaacaagagtgatttgcttctcaaatacaaccctgttcacaagaaggttccagtgtttgttcacaatgagaagcccatagcagagtctcttgtgattg

SEQ ID NO: 153512 - DNA, 261 bp, Glycine max
ttcaatctctctctctctctgtctctctctctctagacttagattttgtgaatggctgaagtggaagagggacaggtcatcggcgtccacaccgttgatgagtggaagctgcaactccagaatgcaaaagactccaaaaaactgattgtggtggattttactgcttcctggtgtggtccatgccgttttatggccccagttcttgcagagattgcaaagaaaactcctgaattgatcttcctcaaagtggatgtggatgaa

SEQ ID NO: 153513 - DNA, 248 bp, Glycine max
gctggaaacccaacactggctcaacgaattacagtgatcaaaggcaaagttgaggatgttgaattgccagagaaagcagatattctgatctctgagcccatgggcaccttgttagtcaatgaaagaatgctggagtcttatgtcattgccagagataggtttctcgttcctactgggaaaatgtttccaggtgtgggaaggattcacatggcacctttcactgatgaatatttgtttattgaaattgc

SEQ ID NO: 153514 - DNA, 259 bp, Glycine max
gtttccacactgcataccttaggtcttccgaattcgaagttaatttgcaagatggctaaggaaaaggctcagatcaacattgtggtggttggtcatgtggaccctgaggaggcaaccaccattaacgagctgaagaagcctgttgtggagaaagaagctccagggcatgccatatgagggcatgcacgtacggcctcggaggggaaccagaaaattatgttaacaaaataatctggaaccctaatgtatcagtgtcatc

SEQ ID NO: 153515 - DNA, 264 bp, Glycine max
ctcaaagggggcaaagagacctacgaggacttctttatgggaacggctcacttcaaagacatagcattggcacatattttggcacttgagaacaagaaagcagcaggaaggcacttgtgtgtggaatctattcgtcactttagtgatcttgtggacaaggttgctgagttataccctgaatacgatgtggctaagttgccaaaggatacccaaccagggttgttgagagcaagtggaaaggatgcatcaaagaagctgattgat

SEQ ID NO: 153516 - DNA, 263 bp, Glycine max
tgcagctgatggcgcaaattctgctccatgggactcttcatgccactatctatgaagtcgataagctcaaaattggtggaggcaactttttaaccaagatcgtaaaacatcgaggagactgttggtattggaaaaggtgtcactaaactatatgcaaccattgatctagagaaggcacgagtggggaggaccagaattattgaaaaagagattaaaaatccaagatggtacgagtcctttcatatttattgtgcccatatggc

SEQ ID NO: 153517 - DNA, 261 bp, Glycine max
ctcaccctcctcttcacacattttctgtgcgctctaacaaacattctcgttcacactttcagattgtgtgaagatgggggcgggtggccgaactgatgttcctcctgccaacaggaagtcagaggttgaccctttgaagcgggtgccatttgaaaaacctccatttagtctcagccaaatcaagaaggtcattccacctcactgtttccagcgttctgttttccgctcattctcctatgttgtttacgacctcaccatagc

SEQ ID NO: 153518 - DNA, 259 bp, Glycine max
caacaatcaatgcgtccataatttcctatattccctgattggtgtgattactgtcaataaaaacagctggaattggattctccaacataacatcgacttagaaagaatctttggagcatttttcactcatggctatgattatggatgctgttcttggaaaactgcttgatgagctgttgagaagaagaagtgaatcgtgcgggctggttcatcaggggatgttggttacaataaatgttggtttcttttctgtactctt

SEQ ID NO: 153519 - DNA, 261 bp, Glycine max
ggccaggcaagccccactcaaccaccacacctctcctcgttcacgctacccctttctgctcttcttctacctttcaagttttaaaagtataaagatggcagagacattcctatttacctcagagtcggtgaacgagggacaccctgacaagctctgcgaccaaatctccgatgctgtcctcgacgcttgcctcgagcaggacccagacagcaaagttgcctgcgaaacatgcaccaaaaccaacttggtcatggtcttcgg

SEQ ID NO: 153520 - DNA, 259 bp, Glycine max
gagcgagcgagcgagcagtttcaaagagaggatttgggattgggaaggcgagggattgcgctgcgtctcttcctcttctctttcgattcatccctcattcataatcttccaatccaacaacctcagcctcacactcacacatacacacatctgaacgcgtatcgtccctcccatggcttcaaagcgcatcctcaaggagctcaaggacttgcagaaagacccaccaacttcttgcagcgctggtccagtagctgaggac

SEQ ID NO: 153521 - DNA, 251 bp, Glycine max
aggctcataaatcttttttatgggtttcagggtcactactactctgtctctgctctccctgttttggctcttgtccctgcaccaagcaagagctgcaaagttccacaatgtgagtggcttgagagggaaaaagccagttgtagcaaatgggtgcaatttgttcctgggaagttgggtggttgacacgtcttatcctctctatgactcttcaacatgccccttcattgatcccgagtttgattgccaaaagt

SEQ ID NO: 153522 - DNA, 260 bp, Glycine max
caagcactccttggaagaagatgttgcagctcatacctctggccatctacgccagcttttagtggggttggtgacctcatataggtatgttggtgatgagatcaatccaaaattggcacaaactgaggctgaaattcttcatgatgctgtgaaagagaagaagggtagctatgaagagaccattagggtcttgaccacaaggagcaggacccaacttgttgcaactttcaaccgctacagagagatccatggcacttcca

SEQ ID NO: 153523 - DNA, 263 bp, Glycine max
ggctcttcttggatttcttctgggacttttcttaatggtcactcatgtcaaggggtatggttttggaggttggaccaatgcacatgccaccttctatggaggtggtgatgcttctgggacaatgggtggggcttgtggttatggaaatctgtatagccaaggttatggaactgatacaacagcactgagcactgctctgttcaacaatggcttgagctgtggtgcatgctatcaaattaaatgtgtgaatgatccacagtggt

SEQ ID NO: 153524 - DNA, 262 bp, Glycine max
ctcgagccgcatatgcttgtctcaaagattaagccatgcatgtgtaagtatgaactaattccgactgtgaaactgcgaatggctcattaaatcagttatagtttgtttgatggtatctactactcggataaccgtagtaattctagagctaatacgtgcaacaaaccccgacttctggaagggatgcatttattagataaaaggtcaacacaggctctgcctgttgctttgatgattcatgataactcgtcggatcgcacgg

SEQ ID NO: 153525 - DNA, 260 bp, Glycine max
agacatcagtgcctccttctggtctccctggtgttggtctcctacgctgcccggtcggaatcagcgctgggcggctggagccccatcaaggacgtaaacgacagccacgtggcggagatcgccaactacgcgctgagcgagtacgacaagcgttctggggccaagctcacccttgtcaaggtcgtcaagggcgagactcaggtcgtttccggcaccaactaccgtctcgtcctcaaagccaaggatggatccgccacggc

SEQ ID NO: 153526 - DNA, 257 bp, Glycine max
cttctctcggcgtcgccatggacgaagaagaggtgcgcaagatcttcagcaagttcgacaagaacggcgacggcaagatctcgtgcgcggactgaaggagatgatggcggcgctgggatccaaaacgacgtcggacgaggtgaagcgcatgatggcggagctggaccggaacggcgacggctacattgatttgaaggagttcggcgagttccactgcggcggcggtggcgacgggagggagctccgggaggcgttcg

SEQ ID NO: 153527 - DNA, 261 bp, Glycine max
cggctcgagccaatatagcccaagccctatacaaccaaaccctaacacacacccatttgattcagtttccatggctagcctcaaggttgcatttttggctgcagtgctctgcatggttgtggtgagtgcacccatggcacatgcagctatcacgtgcgggcaggtgacgaatagcctgatcaattgcatcggttacctccagaacggaggaacgccgccgtcgggatgctgcaacggagtgaagagcctcaatgccgccgc

SEQ ID NO: 153528 - DNA, 258 bp, Glycine max
ggtgaacaagtccccaagacacccgagatctcatccatgctttctgctgctcctttggacggtgaatctcagtttgtgcagggtgctgctgatcagaatcagaagaagaacaacctgctggatatggcatctgtgcaagatgattctgcaaaaactctttctgaggagcttgcagacattgaatcccagctgaagttctttgagaccccttcttttcttgatgaagcctgggctgatgctgcattggcgtctttgctc

SEQ ID NO: 153529 - DNA, 254 bp, Glycine max
gataactagaaacagtgtgatgaaaatgaaggtccttgttttcttcgttgctacaattttggtagcatggcaatgccatgcgtacgatatgttccctctccgaatgaacactggctatggtgcccgtactccggaggtgaaatgcgcaagttggaggcttgctgtggaagcacacaacatctttggctttgagaccattcctgaagagtgcgttgaagcaacaaaggaatacatccatggcgaacaatatagat

SEQ ID NO: 153530 - DNA, 257 bp, Glycine max
ctcgagccgctcgagccgtgactctggaagggaaggatgcactgtgaccactcttaccataactgcagaaccaaagaattggcaaaatgcaattagagttgctgttcaagaggttcggagacttaaagagtttggggttacccagggtgaattaactcgttatttagatgcccttctgaaagatagtgaacacctagcagccatgattgataatgtatcttctgttgataacttggattttatcatggaaagtgatc

SEQ ID NO: 153531 - DNA, 259 bp, Glycine max
ggaactcaatggatgactcttcttcaagcgcttgccgcaagacctggcggtgctccccatgtgcggatcacagggattgatgatcctgtttccaaatatgctcgtggcgacggaccagaagttgttggcaaaaggttggccttgatgtctgagaaatttggcatcccagttgagtttcatggggtgccagtttttgctccagatgtgacaagggaaatgcttgatatcaggccaggagaggccttggctgtgaacttcc

SEQ ID NO: 153532 - DNA, 110 bp, Glycine max
  unsure (1)..(110): unsure at all n locations
agagaatggcaactatgactggtgtgagcctttcatgccccagggttttcttcaacgcatcagcctcacngcaaaacgcgcatgctgtaaagttctcacttccacncanc

SEQ ID NO: 153533 - DNA, 260 bp, Glycine max
gagagaatagagggagttgaggaacaaccaagttcccttctcgggctcaaccacctaagcacgtctcagatttcccagatccaagcccaagcccaagcccagaactcgctctctcttaatttcttgggcccgaagcccgttcctatgaagcacgttggtgggccggcgaagccacgaagctgtaccggggcgtgaggcagaggcattgggggaagtgggtggcggagataaggctaccgaagaaccgaaccaggctttgg

SEQ ID NO: 153534 - DNA, 259 bp, Glycine max
attcttttcatttccatggttagctccagcagccactacgatccacagccccaaccttctcacgtcactgctcttattacacgacctagttgtccggatctgagtatttgcctcaatattttaggcgggtctctaggaaccgtggatgattgttgtgccctcatcggtggtcttggtgacattgaagccattgtgtgcctttgcatccaactcagggccctcggaatattaaaccttaaccgtaatttgcagttaatat

SEQ ID NO: 153535 - DNA, 260 bp, Glycine max
tttatccaccagttgtgccaaaaccaccaattgttacaccaccttatgtgccaaaaccacccattgtgaaaccaccaattgtttatccaccagttgtgccaacaccacctattgtgtatccacctgttgtaccaactccaccggtggttactccacccgtggttacaccaccaagtcctccaagtgaaacaccatgtccaccaccaccaccaccagtggtgccatacccaccaccagcacaaccaacatgccccatcgac

SEQ ID NO: 153536 - DNA, 258 bp, Glycine max
gggagacagaacttttctcgttgagctcaacaaaacttgatgagaaaccactgttccctttgcttcctacaaaggatggaatctgctcattgtctcaaaaaactgtggtctcgggcaacaaaagaggttttgctgacacaatggaccctgagtttcctggcaatgcagggataaacatgatgctatcacctaaaccttctggagttcagcctaccacagtgaaagaaataccaagcaaggtgttacaagaacttcctt

SEQ ID NO: 153537 - DNA, 257 bp, Glycine max
ggattctacccgccgctcgatgggaattgcgcttcaaggcgtctcgtagggctaatccgcctcacgagggtcaccaacggcacgtgcctttggggggccgaggccccctactgctggtcggcaaacggacggcgggcgcacgcgtcgcttctagcccggattctgacttagaggcgttcagtcataatccaacgcacggtagcttcgcgccactggcttttcaaccaagcgcgatgtacaattgtgcgaatcaacgg

SEQ ID NO: 153538 - DNA, 156 bp, Glycine max
aactaggaaagaaatcaagcattgggtcgaactcttctttgatgtcaaagtaatagctatgaatagtcatcgactcccggtaaagggtagaagagtacgacctattatgggacatacaatgcattacagacgtatgattattacgcttcaaccggg

SEQ ID NO: 153539 - DNA, 256 bp, Glycine max
gggaagaggaaccctagctagggtttggaagaagctgatccgagaagatggtgcagcgtctcacctaccgcaaacgccacagctatgctaccaaatccaaccagcacagagtcgtcaagactcccggtggcaagcttgtttatcagaccacgaagaagagggccagcggacccaagtgccctgtcactggaaagaggattcaagggattccacatttaaggccagcagagtataatagatcaaggttacacagaaa

SEQ ID NO: 153540 - DNA, 257 bp, Glycine max
ggatggaccaacaccaaagtctgagatcaagccttgaatcttttgcaacaagaatgttcccccttgctgaaagcgtggcagaagtactagcctacaaattgaatacgaaatccaactatttccgtgaaaattgcttgccaaagagttcgtacattcgactgaatagatatcctccatgccctatatcgtcaaaggtgcatggcctgttgcctcacagtgatacaagttttcttaccatcgtacatcaggaccaggtt

SEQ ID NO: 153541 - DNA, 257 bp, Glycine max
attttctggctaaccaaccctgacactccttcttctccgcttcctcttcgatcatcgcttcagaatgccgccgaagttcgacccctcccagatcgtcgacgtcttcgtacgcgtcaccggcggtgaggtcggcgcggcgagttccctcgccccgaagatcggtcccctcggtctctcccccaagaagatcggagaagatatcgccaaggaaaccgccaaggactggaagggcctccgcgtcaccgtcaagctcaccg

SEQ ID NO: 153542 - DNA, 257 bp, Glycine max
ggaagtttgaacaccaccaagtactattgcacagtcattgatgcccctggacacagggatttcatcaagaacatgatcactgggacatcccaagctgactgtgctgttcttatcattgattccactactggtggttttgaagctggaatttcaaaggatggccaggtatgatgaaattgtgaaggaagtttcttcctatttgaagaaagtaggatacaaccctgacaagattccttttgttcctatatctggttttg

SEQ ID NO: 153543 - DNA, 258 bp, Glycine max
gggaatgtgttgatttgatcatggaagagcttgaaaagagaaagataactaatgcatacacccttgcttatcagagtagagttggacctgtggaatggttaaaaccctatacagatgagacaataattgaacttgggaaaaagggagtaaaaagcctgctggctgtaccaattagctttgtcagcgagcatattgaaactctcgaagaaattgatgttgagtacaaagaattggctctaaactctggtatagaaaaat

SEQ ID NO: 153544 - DNA, 216 bp, Glycine max
gaagaagagatggaggaagcaaagggagtagtgaagcacgtgctcctagctaagttcaaggacgacgtcactccagagcggattgaagagctcatcaaggactatgccaatctggtcaatctcatcccacccatgaagtcattccattggggcaaggatgtaagtgctgaaaacctgcatcaaggcttcactcatgtctttgaatcaacctttgag

SEQ ID NO: 153545 - DNA, 262 bp, Glycine max
ggccaggcaagccccactcaaccaccacacctctcctcgttcacgctacccctttctgctcttcttctacctttcaagttttaaaagtataaagatggcagagacattcctatttacctcagagtcggtgaacgagggacaccctgacaagctctgcgaccaaatctccgatgctgtcctcgacgcttgcctcgagcaggacccagacagcaaagttgcctgcgaaacatgcaccagaaccaacttggtcatggtcttcgga

SEQ ID NO: 153546 - DNA, 256 bp, Glycine max
ctcgagccgcatatgcttgtctcaaagattaagccatgcatgtgtaagtatgaactaattcagactgtgaaactgcgaatggctcattaaatcagttatagtttgtttgatggtatctactactcggataaccgtagtaattctagagctaatacgtgcaacaaaccccgacttctggaagggatgcatttattagataaaaggtcaacacaggctctgcctgttgctttgatgattcatgataactcgtcggatc

SEQ ID NO: 153547 - DNA, 255 bp, Glycine max
gtggcctaccatggtggtgacgggtgacggagaattagggttcgattccggagagggagcctgagaaacggctaccacatccaaggaaggcagcaggcgcgcaaattacccaatcctgacacggggaggtagtgacaataaataacaataccgggctcattgagtctggtaattggaatgagtacaatctaaatcccttaacgaggatccattggagggcaagtctggtgccagcagccgcggtaattccagctc

SEQ ID NO: 153548 - DNA, 259 bp, Glycine max
cagcttcatgaacttcctagacctcctggtaatcaatctagcaagccacgagtgggtcactctgctccattagtattaaaaaatccagaggctgccatgactaataaatttccttcagttgtattgagggcagcatctccactcccaactccacctgtctctcggagtttctctataccttctagtggtcagagagttgtggcattaaatgtttctaataccaagtatttggatactccccaagtttcaaaggtcgata

SEQ ID NO: 153549 - DNA, 254 bp, Glycine max
ctcgagccgctcgagcagtgactctggaagggaaggatgcactgtgaccactcttaccataactgcagaaccaaagaattggcaaaatgcaattagagttgctgttcaagaggttcggagacttaaagagtttggggttacccagggtgaattaactcgttatttagatgcccttctgaaagatagtgaacacctagcagccatgattgataatgtatcttctgttgataacttggattttatcatggaaagtg

SEQ ID NO: 153550 - DNA, 257 bp, Glycine max
agaagagatggaggaagcaaagggagtagtgaagcacgtgctcctagctaagttcaaggacgacgtcactccagagcggattgaagagctcatcaaggactatgccaatctggtcaatctcatcccacccatgaagtcattccattggggcaaggatgtaagtgctgaaaacctgcatcaaggcttcactcatgtctttgaatcaacctttgagagtccagaaggcgttgcagagtatgtagctcatcctgcccatg

SEQ ID NO: 153551 - DNA, 254 bp, Glycine max
aaggattctacccgccgctcgatgggaattgcgcttcaaggcgtctcgtagggctaatccgcctcacgagggtcaccaacggcacgtgcctttggggggccgaggccccctactgctggtcggcaaacggacggcgggcgcacgcgtcgcttctagcccggattctgacttagaggcgttcagtcataatccaacgcacggtagcttcgcgccactggcttttcaaccaagcgcgatgaccaattgtgcgaatc

SEQ ID NO: 153552 - DNA, 254 bp, Glycine max
aacgtcttttctttcttatacattttactttagtttgtgaaattctatccaaagattttgagaatgtctagctgtgggtgtggaagcagctgcaactgtggcagcaactgcagttgcaacaagtactcttttgactacgttgagaagatcacaaatgagactctagttttgggtgttgggccggtgaaggcccaattcgagggtgctgaaatgggtgttgcagctgagaacggtggctgcaactgtggatcaaa

SEQ ID NO: 153553 - DNA, 257 bp, Glycine max
caaacactgctgctctaagcactgcactgttcaacaatggcttgagctgtggctcttgctatgagattaggtgtgccaatgaccacaggtggtgccttccaggttctattgtggtcactgccaccaatttctgtcctccaaacaatgccttgcccaacaacaatggtggctggtgtaaccctcctctccaacactttgacctagctcaacctgtcttcctacgcattgctcagtacaaagctggaattgtccctgtc

SEQ ID NO: 153554 - DNA, 255 bp, Glycine max
cccaagcagtgggaggaggctcgggactctgaccgcgtgcctgttgaagaatgagccggcgactcataggcagtggcttggttaagggaaaccaccggagccgtagcgaaagcgagtcttcacagggcaattgtcactgcttatggacccgaacctgggtgatctatccatgaccaggatgaagcttgggtgaaactaagtggaggtccgaaccgactgatgttgaagaatcagcggatgagttgtggttagggg

SEQ ID NO: 153555 - DNA, 259 bp, Glycine max
gcacaaagcgggttactgtctgttcaagctaccatctctctctctctttcttagtgcctccttgccagaagttaaaatggcccaagaaactttcctattcacatctgaatcagtgaacgaggggcaccctgacaagctctgtgaccagatctccgatgctgtgctcgatgcatgcttggagcaggaccctgacagcaaggttgcctgtgaaacctgcaccaagaccaacatggtgatggttttcggagagatcacaacc

SEQ ID NO: 153556 - DNA, 258 bp, Glycine max
tctcgagccgattcggctcgaggtgattgttgtgactcgttcttcttcgtcgttatcttcttcttttgttgtttgtgtgtttgttttttctctcacctgaaaatgtcttgctgcggtggtaactgtggttgcggaagcgcctgcaagtgcggcaacggctgcggaggctgcaagatgtacccagacttgagctacaccgagtcaaccaccaccgagaccttggtcatgggagtggcaccagttaaggctcaattcgag

SEQ ID NO: 153557 - DNA, 257 bp, Glycine max
gggagctggaaacagcgaaagtgaaataccactacttttaacgttattttacttattccgtgaatcggaagcggggcactgcccctctttttggacccaaggtcggcttcggccggtcgatccgggcggaagacattgtcaggtggggagtttggctggggcggcacatctgttaaaagataacgcaggtgtcctaagatgagctcaacgagaacagaaatctcgtgtggaacaaaagggtaaaagctcgtttgatt

SEQ ID NO: 153558 - DNA, 255 bp, Glycine max
attcttttcatttccatggttagctccagcagccactacgatccacagccccaaccttctcacgtcactgctcttattacacgacctagttgtccggatctgagtatttgcctcaatattttaggcgggtctctaggaaccgtggatgattgttgtgccctcatcggtggtcttggtgacattgaagccattgtgtgcctttgcatccaactcagggccctcggaatattaaaccttaaccgtaatttgcagtta

SEQ ID NO: 153559 - DNA, 257 bp, Glycine max
aagctttcaagagacaaactgctttgaaaaatgggatccaaggttgttgcatccgttgcccttctcctctccatcaacattcttttcatttccatggttagctccagcagccactacgatccacagccccaaccttctcacgtcactgctcttattacacgacctagttgtccggatctgagtatttgcctcaatattttaggcgggtctctaggaaccgtggatgattgttgtgccctcatcggtggtcttggtga

SEQ ID NO: 153560 - DNA, 263 bp, Glycine max
gcgcttctcctctttgtgttctggctatgcttcttggcaagagttagatcggacgaggattgcgtgtacacggtgtacgttcggacgggttcgatcatcaagggaggcaccgattcagtaattggtctgaagctatacgacaagtccggctacggcatatacatcaccaacctcgaggcatggggcgggttaatggatccgggtcacaactactacgagcggggcaacctcgacatattcagtggtagaggcccttgcttgga

SEQ ID NO: 153561 - DNA, 264 bp, Glycine max
gcgacgagcggtgcacgttagaggagtgccggcgcatgatagagggtgtggacagaaatggggacgggttcgtctgcttcgaggacttttctcgtatgatggagctgcagcagcagcgatgatgatgacgtggttgtgattgtgatgatgtcagatgatgatcatgatcatgttatgacttatgatgtgaaaatatatataagaaggaaggcaacttcataattttttttaatccccgtctgtcatttgcgtttgttattatta

SEQ ID NO: 153562 - DNA, 268 bp, Glycine max
ggcttgctatcttgacagcatgggtatctatattgtctggataccttgtagacgccatacagggagcatctgagtcattgaatatgtcagtggcttttatttctgtcatcttgcttccaattgtaggcaatgctgcagaacatgccagtgctatcatgtttgccgtgaaggacaagcttgatatcactattggagttgctattggatcatctacacagatatctatgtttgtgatccctttctgtgtggttgttggatggtgcatggg

SEQ ID NO: 153563 - DNA, 266 bp, Glycine max
ggctacttttgattgcttgatgaaaacctatggattcctgacaccagaattctggaaggagactcgcttctccaaatctccattccaagagtacacagatctactggcaaaaccaacaggaaagactctaatcttggaggaggaaagggtggatgcttgatttgctagttttgctttatggattttttaggaacttcattactttacatactttgttggttctgtgctttacttttggttttgatagacggtatgtctctgtatgc

SEQ ID NO: 153564 - DNA, 269 bp, Glycine max
caaaagtgcccttctctatttggcatacacatcagtggaatctctctctgattcattcaagctggatctggcatttgatttgtccctctctgcccttcttggggataacatctacaacttcggagagctacttgcccatcctataattaagagccttatggggacaaaggtggaatggctttactacattctgcaggcattcaatgctggtgatttattacaatatcaagaattatgtcgggtgcataatgctgctttaagagcccaac

SEQ ID NO: 153565 - DNA, 140 bp, Glycine max
ccgattttgcataaatatgctaatgaagatgtctcgcttggtgcatggttcattggtcttgaagttgagcatattgatgaccgcaatatgtgttgtggaactcctccaggtatataacctgaaaatatgtaaccaacaaa

SEQ ID NO: 153566 - DNA, 263 bp, Glycine max
gccacttctgaatctattgaatcaacaatcatgtcggacgaagagcaccatttcgagtccaaggccgacgccggagcctccaaaacctaccctcagcaagccggtaccatccgcaagaacggctacatcgtcatcaaaggccgcccctgcaaggttgtggaagtttcgacttccaaaactggaaagcacggtcacgctaagtgtcactttgttggaattgatattttcactgccaagaaacttgaggatattgtgccctcttc

SEQ ID NO: 153567 - DNA, 263 bp, Glycine max
caaagtatagagtgaaagaatgggtgagaaaagcaagattttgatcataggaggcaccggctacatcggcaaacatatagtggaagcaagcgcaaaggctggaaatcccacttttgctttggtgagggaatccacactctctgacccctccaaggcacaactcatccacaattttgaggctttgggcgttaatttggtccgcggggatctgtacgatcatgagaagttggtgaaagctatcaagcaagtagatgtcgtcatat

SEQ ID NO: 153568 - DNA, 264 bp, Glycine max
gaacctttttgcgtgaagggtcgtgtctactgtgacccttgccgtgctggttttgagacctcagctaccacctacattgctggtgctgagattatgttgcaatgcaagagcagggttagcaacgaggttgtgtacacgaagaaggggtacaccgactcaaccggagcatacacaatgtacgtggatgaggatcacgcagatcagatctgcagtgccaagcttgtaagcagccctcaccctcaatgcaaggaagtcaccccaggc

SEQ ID NO: 153569 - DNA, 268 bp, Glycine max
tgacaaagtgttcactgctttgtgccaagggaagatcattgatccacttttggaatgccttggggagtggaatggggcacctcttccaatatgttagtttttcttattttctgttttcttgaagagtggtttcttttctgtacacgtgtttgtgttgatattaagcatttggtttgtctatataaggctgtggcaaatcaatccacatacaacaacttcccagttttccttgatgtatgccatgcaaggaacttgtaattcataatgt

SEQ ID NO: 153570 - DNA, 259 bp, Glycine max
ccgctgagtttaagcatatcaataagcggaggaaaagaaactaacaaggattcccttagtaacggcgagcgaaccgggaaaagcccaccatgaaaatcggtcgccctcggcgtccgaattgtagtctggagaagcgtcctcagtggcggaccgggcccaagtcccctggaagggggcgccagagagggtgagagccccgtcgtgcccggaccctgtcgcaccacgaggcgctgtcggcgagtcgggttgtttgggaatg

SEQ ID NO: 153571 - DNA, 261 bp, Glycine max
aagacatggaccggatcaaaggcccatggagtccggaggaggacgaggctctgcagaagctggtggagaaacacgggcccaggaactggtctctgatcagcaagtccatcccgggccggtccggcaagtcctgcaggctccggtggtgcaaccagctgtccccccaggtggagcaccgggccttcacggccgaagaggacgacaccataatccgggcccatgcccgcttcggcaacaagtgggccaccatagcccgcctcc

SEQ ID NO: 153572 - DNA, 260 bp, Glycine max
atggcaagaaatcaaagcttggtttcacagtctacccctctcctcaggtgtccacctctgttgttgagccatacaacagtgtcctctccacccattctctcttggagcacaccgatgttgctgtcctcttggacaatgaagccatttatgacatctgcagacgctctctcgacattgagcgtcccacctacaccaacctcaaccgccttgtttctcaggtgatttcatctttgactgcttccttgaggtttgatggtgcc

SEQ ID NO: 153573 - DNA, 259 bp, Glycine max
cactctgctcgtagggtttctccacctagagggaaatggctcccaaaccgcctagtacgggtctgtttgttggactgaacaagggtcacgtcgtcaccaagaaggaattgcctccacgcccctcagatcgtaaggggaaaacaagcaagagggtgcactttgtgaggaacctcataagagaggtagccggttttgcaccctatgaaaagcgtataactgagttgctgaaggttgggaaggataagagggcactgaaggt

SEQ ID NO: 153574 - DNA, 262 bp, Glycine max
gcccatggtggttgaaactttctctgagtatcctccccttggtcgttttgctgtgagggacatgcgtcagaccgtagctgttggagtcatcaagagtgttgagaagaaagaccccaccggagccaaggtcacaaaggctgccgccaagaagaagtgattgcattttggcaattttgctagcacatgtgatcatcaacgtggtttcaaaaaaacttgttcctttacagtagtttatctttgcagagtcttaggtgtttgtttt

SEQ ID NO: 153575 - DNA, 263 bp, Glycine max
cgggggcgcaacgccctcgacctattctcaaactttaaataggtaggacggtgcggctgctctgttgagccgcgccatggaatcgagagctccaagtgggccatttttggtaagcagaactggcgatgcgggatgaaccggaagctgggttacggcgccctctcggaaacctccatcctccgccgcgttaccgactgcccccacgttgtccgcttccacagctccgtcgaaaagccctccggtgacgtggcgatcctcatgga

SEQ ID NO: 153576 - DNA, 258 bp, Glycine max
agagaagcgtcttaataaacgctaacctctgtaccattcttcttcttaaaaatgagagagtgcatttccatccacattggccaggccggcattcaggtcggaaatgcttgctgggagctttattgcctcgagcatgccattcaggctgatgggcagatgccgagtgataagaccataggtggtggtgacgatgctttcaacaccttcttcagcgagaccggtgccggaaagcacgtgcctcgtgcagttttcgtggat

SEQ ID NO: 153577 - DNA, 262 bp, Glycine max
cttgaattcaaaaacttaagttcattccttgtgttttgctttcttcctcaaaaccaaacatgtcgaacacatgcggcaactgcgactgcgctgacaagactagctgcaccaagggaaacagctatggtgttattgtagagactgagaagagttacatcgagactgttgtcatggatgttccagcagctgagcatgatgggaagtgcaagtgtggcactaactgcacttgcacggactgcacctgtggccattaaggaatatg

SEQ ID NO: 153578 - DNA, 265 bp, Glycine max
cgatcaccaccgcaaagcaatgggcgctatactttctgccttaactggcggtgccgcaacggcggcgacgtcttcgccggagagttctgcttctcgggtccagtctttccactcttcggcgacgctggcagctccacttcaacgagctcaaagaaaccaataagctcgttgtgatagatttctcggcgtcgtggtgcggcccttgcaaattcatagagccagcgattcacgccatgtccgaaaagttcaccgacgttgacttcgt

SEQ ID NO: 153579 - DNA, 257 bp, Glycine max
ctcgagccgattcggctcgagaaatagtaaaaatgtcaaaggacacagtttccggtgatccacgacgtgcagtgtgcacaggtatcaccatcttcctcctcttagccggcgtcactctcctcgtcctctggctggtctaccgtccccacaagccgcgcttcacggtcatcggcgccgccatctacggcctcaacaccagcacgccgccgctcatgtcaaccaccatgcagttctccgtcctcataaagaacccgaac

SEQ ID NO: 153580 - DNA, 256 bp, Glycine max
atcagttttactacatcttcggtttcctcttcttggtcttcgtcatcctcatcgtcacttgtgctgaaatcaccattgtgctttgctacttccagttgtgcagtgaggattacttgtggtggtggcgatcatacctcacatctggctcttctgccctatacctttttctttacgcaacattctacttcttcaccaagcttgaaatcacaaagttggatctggggtaccaatactttggttacatgctcatagcatc

SEQ ID NO: 153581 - DNA, 256 bp, Glycine max
gaaacaaatggcagcactgggtggctttaccgacatcaccggagcacagaacagcatcgatatcgaaaatctcgctcgctttgctgttgatgaacacaacaaaaaagagaatgcagttctggagtttgtgagggtgattagtgcaaagaaacaagtggtttctagcaccttgtactatatcactttggaggcaaatgatggtgtgacgaaaaaggtttatgaaactaaggtgttggagataccatggttgaacatc

SEQ ID NO: 153582 - DNA, 262 bp, Glycine max
cacgaatttgtttttgatgccgtcttgaatgaagaggttacaaatgatgaggtgtatcgtgaaactgtggagcccatagttccaataatattccaacgcactaaggcaacttgctttgcatatggtcaaacaggaagtggaaaaacttacacaatgaagccactgcctcttaaagcatcaagggacatcttgagattgatgcaccatacctacaggcatcagggatttcagttgtttgtgagtgtctttgaaatatatggtg

SEQ ID NO: 153583 - DNA, 248 bp, Glycine max
attccgtgaatcggaagcggggcactgcccctctttttggacccaaggtcggcttcggccggtcgatccgggcggaagacattgtcaggtggggagtttggctggggcggcacatctgttaaaagataacgcaggtgtcctaagatgagctcaacgagaacagaaatctcgtgtggaacaaaagggtaaaagctcgtttgattctgatttccagtacgaatacgaaccgtgaaagcgggcctatcgat

SEQ ID NO: 153584 - DNA, 254 bp, Glycine max
gtttgttgttgtaactcgttcttcttcttttgttgttctgtgtttgtgtttgttttttctctcacctgaaaatgtcttgctgcggtggtaactgtggttgcggaagctcctgcaagtgcggcaacggctgcggaggctgcaagatgtacccagacttgagctacactgagtcaaccaccaccgagaccttggtcatgggagtggcacctgttaaggctcaatttgagggtgctgaaatgggtgtgctcgctgag

SEQ ID NO: 153585 - DNA, 259 bp, Glycine max
taagtattgatatttcatacattttaatttataactatgattttatgaagcttttctcttagttttacttgacacgttttacgtcgttaattgggttctgattcgtgtcatgaatatgttacctcaggtttgctgatgcctaagcaacgtttaggggattgttgaagaggcatggtgcccataatatttctctaaaaaattgtatggtcatggtttttaatgccaatgtgggttccccagatttgagatagcttttgaa

SEQ ID NO: 153586 - DNA, 259 bp, Glycine max
caccgccaaacccctcgaccagcacgccaccacgggctctgaccctactgcgccagcggttcacatcgtgtacaccgagagaccacagaacgaggagcctgaggcctaccacatcagaaccctcacttcagtccttggcagtgaggaggctgcaaaggaagctttgttgtatagttacaagtctgcagccagtgggttctgagctaagcttactccggagcaggttgaacagatttcaaagctaccaggtgttcttcaa

SEQ ID NO: 153587 - DNA, 252 bp, Glycine max
caagcactccttggaagaagatgttgcagctcatacctctggccatctacgccagcttttagtggggttggtgacctcatataggtatgttggtgatgagatcaatccaaaattggcacaaactgaggctgaaattcttcatgatgctgtgaaagagaagaagggtagctatgaagagaccattagggtcttgaccacaaggagcaggacccaacttgttgcaactttcaaccgctacagagagatccatgg

SEQ ID NO: 153588 - DNA, 150 bp, Glycine max
ggaattcaagaggaagaacaagaaggatattagtggaaatgccagagcattgaggaggttgagaacagcatgtgagagggccaagaggactctctcttccactgctcaaaccaccattgagattgattccttgtatgagggtattgactt

SEQ ID NO: 153589 - DNA, 139 bp, Glycine max
gtttggcttggaactttcagcactgctgaagaagctgcaagagcttatgatgctgaagcaaggaggatccggggcaagaaagccacggtgaatttcccggatgagccgtcaggcgctgctgcttcctcaaaacgcctca

SEQ ID NO: 153590 - DNA, 251 bp, Glycine max
ctccattagattaccaagctctgcaactttgcttctcaacatggagtatcgtctcctacccatttttactttactcaatattgcactggtggcaacccatgctgctttaccccctgaagtttactggaagtcggtgcttcctactacgccaatgccaaaagccatcactgatatcctttacacgatgaccccaacgtggcactcttcttcttggaaaaggacttgcattctggaacaaagttggacttgca

SEQ ID NO: 153591 - DNA, 258 bp, Glycine max
gcaagggtctcttgatagtggatcaccaactagccaatgacaagaggaccaagccttatgtgaagaaaatggccaagagccaagactatttcttcaaggtgttctctagagccattaccttgctctcagagaacaaccctctcactggcacaaagggtgaggtcagaaagcagtgcaatgttgccaacaagcaccatgatcaggacccttgaattttcctccccttgtctatgatcgaggaagaaaatctgtaatata

SEQ ID NO: 153592 - DNA, 258 bp, Glycine max
gtttgctgaactcatgaccaagattgacaggcgatccggcaaagagcttgagaaggagcccaagtttttgaagaacggtgatgctggttttgttaagatgattccaaccaaacccatggttgttgaaactttctccgagtatcctccacttggtaggtttgctgttagggacatgcgtcaaactgttgctgtgggagtcatcaagaacgttgagaagaaggatcctaccggagccaaggtcaccaaggctgcccagaa

SEQ ID NO: 153593 - DNA, 112 bp, Glycine max
caggattctacccgccgctcgatgggaattgcgcttcaaggcgtctcgtagggctaatccgcctcacgagggtcaccaacggcacgtgcctttggggggccgaggcccccta

SEQ ID NO: 153594 - DNA, 247 bp, Glycine max
cttttacttccaaagtcatcatcttcagtggaacaaagcaagctgcgcatagattgaagattatattaggattagctggctcaaaagctgctgagcttcatggaaatcttactcaagcccagcgccttgaggctttggaacagttcaggaagcagcaagtggattttttggttgcaacagatgtggctgcccgtggccttgacattattggtgttcaaacagttatcaactttgcatgtccacgcga

SEQ ID NO: 153595 - DNA, 236 bp, Glycine max
gctgctcatattggtgccatgtttactgcatttttgtctgtggccactgctctggggactccgccattctttggagccatagtgctgtccttcctctccaaccttatgggtggccttactcattatggaattggatcagctcctgtgtttttcggtgccaactatgttccccttgctaaatggtggggctatggattcctcattagtattgttaacattataatctggctaggact

SEQ ID NO: 153596 - DNA, 243 bp, Glycine max
  unsure (1)..(243): unsure at all n locations
cttcacactatttacaaggggatcagcccctcaaagaaatggtggatccaactctagcatccttccaagaagaacagctcgaacaagtcgatgctttgattaaatcttgtgtccatcctgatcaaaagcaaagaccaacaatgaaagaagtttgtgtgagattaagagagataacaaaaataacacctgatgcagctgttccaaagctttctccactttggtgggcagagcntgagattgctt

SEQ ID NO: 153597 - DNA, 242 bp, Glycine max
caaaggattctacccgccgctcgatgggaattgcgcttcaaggcgtctcgtagggctaatccgcctcacgagggtcaccaacggcacgtgcctttggggggccgaggccccctactgctggtcggcaaacggacggcgggcgcacgcgtcgcttctagcccggattctgacttagaggcgttcagtcataatccaacgcacggtagcttcgcgccactggcttgatcaccaagcgcgatgac

SEQ ID NO: 153598 - DNA, 242 bp, Glycine max
gcagatgtgaactcacttatgctgttgttgggattgttgtgctacttgcttccaatgctgttcaaatacagtggtgcctcagctgctctcactgtagacccttcactacacttgtcaagagcttctagcattgtgatgttgattgcatatgttgtctacattgtctttcaactgtggacacacatggagttatttgaagaagaagatgacggtaaagatggcgaggatggttcagaagaaca

SEQ ID NO: 153599 - DNA, 251 bp, Glycine max
gttcaccaattaagctttcaagagacaaactgctttgaaaaatgggatccaaggttgttgcatccgttgcccttctcctctccatcaacattcttttcatttccatggttagctccagcagccactacgatccacagccccaaccttctcacgtcactgctcttattacacgacctagttgtccggatctgagtatttgcctcaatattttaggcgggtctctaggaaccgtggatgattgttgtgccctc

SEQ ID NO: 153600 - DNA, 249 bp, Glycine max
attaactctttcttctcataactctgccgccgcaacagccccaaatccaatggcttcagagaagaaactttcgaacccaatgagggagataaaggtgcagaagctcgtcctcaatatctccgttggcgagagtggagatcgtcttaccagagccgctaaggtgttggaacagcttagtggccaagcccctgtgttttccaaagcaaggtacacggttcgttcctttgggattagaagaaatgagaagat

SEQ ID NO: 153601 - DNA, 245 bp, Glycine max
ggtatcaaagatcctgttcgtcctggtgttaaggaatctgtggcaatgtgtcgttcagctggaataacagttagaatggttactggtgacaacattaatactgcaaaggctatagccagggagtgtgggattttaactgatgatggcatagccattgaaggtccagaatttagagagaagagtcaggaagagttgcttgaactgattcccaaaattcaggttatggctcgatcctcacctttaga

SEQ ID NO: 153602 - DNA, 233 bp, Glycine max
aaataatgttgtattgattttgtattgtgcaccgtcaaattatgaattgggcaagcttgtttgccttactttgtcttctagcttgtatgtaccatgaaacattgtcttatttgatcattaaaaaaaaaaaaaaaaaaaaaaaaaaaaaaaaaaaaaaaaaaggaaaaaaaataaaaaaggaagagaaaaaagaagaaaagtagaatgagaatgaaaaaaagagaaagagaggg

SEQ ID NO: 153603 - DNA, 247 bp, Glycine max
cagagagcagtacgtgtacttggcgaactagtcggagcaggcggagcggtacgaggagatggtggagttcatgcagaaggtggtggtggggtcgacgccggcgtcggagctcacggtggaggagcgcaacctcctctcggtggcctacaagaacgtcatcggctcgctgcgtgccgcgtggcgcatcgtctcctccatcgagcagaaggaggagggccgcaagaacgacgaccacgtctccctcgtc

SEQ ID NO: 153604 - DNA, 243 bp, Glycine max
ccaagttgtaccgaaaactgtggaaaattttagagctttgtgtacaggggagaaaggaaagagtgaaaatggcataaagcttcattacaaaggaacaccatttcatcggataatatctggttttgtgattcagggtggagacattgttcatcatgatggtaaagggtctgaatctatttttggtggcacctttcctgatgagaatttcaagattaaacattctcatgccggagttgtttctat

SEQ ID NO: 153605 - DNA, 248 bp, Glycine max
gggaattcttggttacactgaagatgatgtggtctccactgactttatcggcgatagcagatcaagtatttttgatgcaaaggctggaattgcattgaataagaactttgtgaagcttgtttcttggtacgacaacgagtggggatacagctcacgtgtcattgatcttcttgtattcgttgccaagaagtctctttaaggtgttacttcaaagtagcttgtcttcacattattaccgtatgtttatg

SEQ ID NO: 153606 - DNA, 250 bp, Glycine max
gggccctgttaaagttgtacccctgtattctacacttcctcctgctatgcagcagaagatttttgagccagctccacctccactgaaggagggtggacctcctggaaggaagattgtggtatcaacgaacatagcagaaacgtccttgacaattgatggtattgtttatgtcattgaccccggttttgctaagcagaaggtttataacccacgagttcgtgtggagtctttattagtgtcaccaatatcg

SEQ ID NO: 153607 - DNA, 248 bp, Glycine max
ctgacatcgggatctccagcaaagccatggggatcatgaacagcttcatcaacgacatcttcgagaagctcgctcaggaatcttccaggctcgcgcgctacaacaagaagcctaccatcacctctcgcgagatccagaccgccgttcgtcttgttctccccggcgagctcgccaagcacgctgtctccgaaggcaccaaggctgtcacaaagttcactagctcatgagtgggtttctgagaatttagg

SEQ ID NO: 153608 - DNA, 242 bp, Glycine max
tatagcccaagccctatacaaccaaaccctaacacacacccatttgattcagtttccatggctagcctcaaggttgcatttttggctgcagtgctctgcatggttgtggtgagtgcacccatggcacatgcagctatcacgtgcgggcaggtgacgaatagcctgatcaattgcatcggttacctccagaacggaggaacgccgccgtcgggatgctgcaacggagtgaagcctcaatgccg

SEQ ID NO: 153609 - DNA, 247 bp, Glycine max
ggctttgcaaggatgagacgggctgtgctagaaaagtatgcttctttgctcacaaacctgaagagctacgccctgtgtatgcttccactgggtcggctatgccatcaccaaaatcctattcagctagtggacttgacatgacagcgatgagtccattggctcttagttccacatctttgccgatgccaactgtttcaaccccacccatgtctcccttggcagcagcttcatctcccaagagtggaag

SEQ ID NO: 153610 - DNA, 246 bp, Glycine max
acccacgcagggtggctttgctgaaaccatggtcgttgagcaaaagtttgtggtgaaaattccagagggtttggcgccagagcaagtggcaccatcactgtgtgcgggtgtgacagtgtacagtccactggtacactttgggctgaaagagagtgggctgagaggtggaatattggggcttggaggagtgggacacatgggggtgaagatagcaaaggcactgggtcaccatgtgactgtgataag

SEQ ID NO: 153611 - DNA, 245 bp, Glycine max
gcttcttcgagtttcacagccaagtcgtaaaagggtttcaagggatggaaaacatgcagagcttctggcaattgggtgatgaactccgtgggcactcaaaagcatcggaggatcacaagtggttaatggttgcctcgaaactggccgaacagacaagattgaagggggagcgtgtgaacaaccttgatctttcaaagggacccattgaaacaaggtcaagggataaatttgggttccaggaagag

SEQ ID NO: 153612 - DNA, 248 bp, Glycine max
gagagtcggtggtggagatcgtgaagaatttgaaagaagcgcctctgctggtgcaggtttttcccaaatcggcgacgatgacgacggagaagaggacctctcccaggccttcttcaggcccataaacaacgccgcccctccctccccgaccaagcgccacaacaagatctccgtcatcggcgccggcaacgtgggaatggccatcgcgcagaccatcctcactcaggacctcaccgacgagctcgtcc

SEQ ID NO: 153613 - DNA, 250 bp, Glycine max
ctttccttctccctctttgctgtgatattaacaagttagtacttattcccatttcagattccagtgtcagaattgaaggggaaggttgtcctcctctacttctcagctcactggtgtcctccatgccgtgcattccttccaaaacttattgatgcatataataagattaaggaaaagggcaatgcattagaagttgttttcatctcaagtgacagagatcaaacctcctttgatgaattctttgcgggaa

SEQ ID NO: 153614 - DNA, 248 bp, Glycine max
cggctcgagctcgaccgaatcggctcgaggtgttacgagcaacgctcaaagaatgagccaccactgtgaccagactctgatgatcctaatgcagcaaggaacattcaattgcaagcttgcttgcacaaagcgccagttagttcaaaggaacgaggctcaaaattgcctgagctgtggccagccagactgatcaaagtgccttattggttgtcgagttcccaagttggagtttatggaaagccagcccc

SEQ ID NO: 153615 - DNA, 247 bp, Glycine max
aagctctgtgaccagatctccgatgctgtgctcgatgcatgcttggagcaggaccctgacagcaaggttgcctgtgaaacctgcaccaagaccaacatggtgatggttttcggagagatcacaaccaaggccaacgtggactatgagaagattgtgcgtgacacatgcaggaacattggttttgtctctgatgatgttagtcttgatgctgacaactgcaaggtcctcgtcaacattgagcaacaga

SEQ ID NO: 153616 - DNA, 246 bp, Glycine max
gaccgccaccacgacatcgagatgggcgccgccgccggtggcccccgcggcggcgaggtgaacctcgacaagttcttcgaggacgtggaaggcgtgaatgaggaactaaaggaattagaaggcttagcgcagagtttaagaagcagccacgagcagagcaagacgctgcacaacgcgaaggcggtgagggacctgcggtcaggcatggacggcgagtttcggcggcgctgaagaaggcgaactgat

SEQ ID NO: 153617 - DNA, 245 bp, Glycine max
gtcacttctgcagccgttgctattccctcattcactggcctcaaggcaagcgcaggcaaagtgagtgccgcagttaaagtctcagctccccaagccacaaggttgggcatcaaggcttcgctgaaagacgttggagtcgctgttgtggccactgccgcgagtgcagtgctggctagcaacgccatggccattgaagtgttgctgggtggtgataacgggtctcggtttcgggtcccaacaatttc

SEQ ID NO: 153618 - DNA, 245 bp, Glycine max
ttcaagactgatggaccccctgcaacagctttgggatttaatcctccagataaggatataatgaaaaagcctcctcgtcacagtgatgactcattaattaatttgtggattttattccgctatctggttattgggatttatgttggattagctacagttggtatcttcatcatatggtatacacatggttccttctttggtattgaccttagtggggatggacatagtcttgtgacttacaccca

SEQ ID NO: 153619 - DNA, 245 bp, Glycine max
ggaaaatatgtaatcacacagttctaccctgttcaagccattgttcaaccattggttcctgcaataagagtcttcaagagcttcccttttaatgggttccttgtgtttttgaccctttattttgttgtggtgagaaaccccaatttcagtaagtatgtgaggttcaacactatgcaagccgttgtccttgatgtgctcttgattttccctgacctccttgaaagagggtttaatcccaaagatgg

SEQ ID NO: 153620 - DNA, 246 bp, Glycine max
ctctcacactcctcttcacacatttactgtgcgctctaacaaacattctcgttcacactttcagattgtgtgaagatgggggcgggtggccgaactgatgttcctcctgccaacaggaagtcagaggttgaccctttgaagcgggtgccatttgaaaaacctccatttagtctcagccaaatcaagaaggtcattcgacctcactgtatccagcgttctgttatccgctcattctactatgttgtt

SEQ ID NO: 153621 - DNA, 242 bp, Glycine max
aaagcattgaattcaaaaacttaagttcattccttgtgttttgctttcttcctcaaaaccaaacatgtcgaacacatgcggcaactgcgactgcgctgacaagactagctgcaccaagggaaacagctatggtgttattgtagagactgagaagagttacatcgagactgttgtcatggatgttccagcagctgagcatgatgggaagtgcaagtgtggcactaactgcacttgcacggact

SEQ ID NO: 153622 - DNA, 243 bp, Glycine max
tcgtgatacacagtgtggtttcaagatgtttactagggcagcagccaggaagcttttttcaaatgtacgcttaaaaaggtggtgctttgatgttgagttagtctttctatgcaagtggtttagaatcccagtttcagaaatttctgtgaattggtctgaaattccaggatccaaggtgaatcttctgagtatacctaacatgctttgggagcttgtgctcatgtctgtggggtacaggactgg

SEQ ID NO: 153623 - DNA, 245 bp, Glycine max
ctcgagccgaatcggctcgaggtgggaagttgaggggaagtgggctgttaaaggagcagtcgatgtagacattggtgcaaacccttctgctgagggtggaggagaagatgagggagttgatgatgcagctgttaaggttgttgacattgttgacacattcagacttcaggagcaacccgcactcgataagaagcagtttgttaccttcatgaagaggtttatcaagaatttgactcccaagctcg

SEQ ID NO: 153624 - DNA, 245 bp, Glycine max
ctcgagccgctcgagccgcgcgtcgctccgcaccagtttcaccgcacgaatatcttgttgactggagcgatccgagaaaaactctgtaaacatgttggtttaccaggacctccttacaggtgatgagcttctctctgactccttccgttacaaggaaattgagaatggaatgctgtgggaagttgaggggaagtgggttgttaaaggagcagttgatgtagacattggtgcaaacccttctgctg

SEQ ID NO: 153625 - DNA, 247 bp, Glycine max
catcatcaaagtttcttcctttctctgctctttgccttctctgacacatttggtgccttgtagagcgtgttttggcaggaaggtggtatggcgaaggacgttgaggttgctgagcgtggctccttctctgggaaggactaccaggaccctccaccagcaccactcattgatgctgaggagctcacaaagtggtccttttacagggctctcattgctgaattcattgccactttgctcttcctctaca

SEQ ID NO: 153626 - DNA, 250 bp, Glycine max
tggatccagacgcgtcggcaaaggcattcgtggagcagtactattccaccttcgacaccaaccgcaacaatcttccatgctctctttcgaggctcagaagatcctgggcgcccccaacatcctcgccaaactcacttcccttcccttccaacagtgccagcactccatcaccaccgtcgattcccagccctccgctgtcaactccgccatgctcgtcttcgtcagcggcaacctccagctcgccggcgaa

SEQ ID NO: 153627 - DNA, 244 bp, Glycine max
ctgcaaaggattctacccgccgctcgatgggaattgcgcttcaaggcgtctcgtagggctaatccgcctcacgagggtcaccaacggcacgtgcctttggggggccgaggccccctactgctggtcggcaaacggacggcgggcgcacgcgtcgcttctagcccggattctgacttagaggcgttcagtcataatccaacgcacggtagcttcgcgccactggcttttcaaccaagcgcgatga

SEQ ID NO: 153628 - DNA, 245 bp, Glycine max
gtcatcgttgggatctccatacgccggatctgctaaaatacgcttgatccatatgggcctcctcgaccacttgtgggacgacaccgtcgccggcccaaggccggaaaacggtctcggcaagctccgaaaacaccacaccttcactttccgacctagctctggcaaggaaacggagggcgggagcgtgagatcgtacggagacgaatcgtcggaggaagcgacgagagtgacgcgtagtatcatga

SEQ ID NO: 153629 - DNA, 245 bp, Glycine max
tctcattctgtgactctgtgcttagttaacgttaacagtgacttaagatggcggattctgcagatgtcacccacgatgttgtgtccctcctctcttctcctcaaagggactttcttcttcgaaacaacggcgatcaggttaaaattgacagcttgaagggtaagaaacttggtttgtatttttcggcatcctggtgtggtccatgtcaaacatttacgccaactttggtggatgtgtacaatgag

SEQ ID NO: 153630 - DNA, 245 bp, Glycine max
ggaaaagattgtaacatttcagaagtcagctggctttcaagctctaatccagtatcaatcccgtcaaagtgctgttactgccagaagtactcttcagggacgcaatatttatgatggttgttgtcagctggacattcagttctcaaaccttgatgaactacaagtgaactacaataatgatcgttcaagggacttcacaaaccctaatctgcctacagagcagaaaggtcgatcttcacaacctg

SEQ ID NO: 153631 - DNA, 245 bp, Glycine max
gtttctcctcaacaaataagtgcttgggcaaaaaaaatcctacctaatggagagatagtgggggaggtaacaaaaccctatacttttcattactaaaccaataaacccgaaaaagatggattattttgtgaaagaatttttgggcctataaaaagtgggatttgtgcttgtggaaattatcgagtaatcagagatataaaggacgacccaaaattttgtgaacaatgcggagtagaatttattga

SEQ ID NO: 153632 - DNA, 245 bp, Glycine max
atgagagtgagtttcacatggggagggtttttgttcttgaattggatggcagatcttacggatgacaaattctgcaacacccctcttgccctcgctgatcacattctctctcggaatttcaactgcagtcaagggagagcctaccttttcagcaaagtggtgaacgtaatacttgggcctcaggtggagagaatgatgatatctggactgcacactgttgaagacatattttgttgcaactgtgg

SEQ ID NO: 153633 - DNA, 242 bp, Glycine max
aagctttcaagagacaaactgctttgaaaaatgggatccaaggttgttgcatccgttgcccttctcctctccatcaacattcttttcatttccatggttagctccagcagccactacgatccacagccccaaccttctcacgtcactgctcttattacacgacctagttgtccggatctgagtatttgcctcaatattttaggcgggtctctaggaaccgtggatgattgttgtgccctcat

SEQ ID NO: 153634 - DNA, 249 bp, Glycine max
aaagcaaccacaacaagcacttctcttatttcctatcacaccctattacagattcacaagcgcagacacttcaaatggctctggaagctcttcaatcacccagaactgccactccatcgtttagtccctttgaagaaaccaacctcagttacttggagacaccgtggaccaaaggaaagcgttctaagcgtaccgcatggagcagcaactgcaacactcttcatgcaccgaggaagagtacctcgctct

SEQ ID NO: 153635 - DNA, 246 bp, Glycine max
ctttcaagagacaaactgctttgaaaaatgggatccaaggttgttgcatccgttgcccttctcctctccatcaacattcttttcatttccatggttagctccagcagccactacgatccacagccccaaccttctcacgtcactgctcttattacacgacctagttgtccggatctgagtatttgcctcaatattttaggcgggtctctaggaaccgtggatgattgttgtgccctcatcggtggt

SEQ ID NO: 153636 - DNA, 245 bp, Glycine max
caagttcagaagccggaattggcctgtgattgttgccttgactgcaagcacagatgatttgtgggaaagatgtatgcaaattggcatgaatggagtcataagaaagccagttttgttgcatggaatcgctagtgaactcagaagaataatattgcagggaaatagtgtcatgtgaggattcatgctgcaagttaaagcacttgcaacatatcaagaaattaagttataaaaaaaattccagtcac

SEQ ID NO: 153637 - DNA, 242 bp, Glycine max
gtgcttccggccatggttgtggccattcgcccagcaaagaaccctttttgcgtgaagggtcgcgtctactgtgacccttgccgtgctggttttgagacctcagcaaccacctacattgccggtgctgagattatgttgcaatgcaagagcagggttagcaacgaggttgtgtacaccaagaaggggtacactgactcaactggagcatacacaatgtacgtggacgaggatcacgcagatca

SEQ ID NO: 153638 - DNA, 244 bp, Glycine max
ctaattcagactgtgaaactgcgaatggctcattaaatcagttatagtttgtttgatggtatcttctactcggataaccgtagtaattctagagctaatacgtgcaacaaaccccgacttctggaagggatgcatttattagataaaaggtcaacacaggctctgcctgttgctttgatgattcatgataactcgtcggatcgcacggcctttgtgccggcgacgcatcattcaaatttctgcc

SEQ ID NO: 153639 - DNA, 244 bp, Glycine max
aggatccattggagggcaagtctggtgccagcagccgcggtaattccagctccaatagcgtatatttaagttgttgcagttaaaaagctcgtagttggaccttgggttgggtcgatcggtccgcctccggtgtgcaccggtcggctcgtcccttctgccggcgatgcgctcctgtccttaactggccgggtcgtgcctccggtgctgttactttgaagaaattagagtgctcaaagcaagccta

SEQ ID NO: 153640 - DNA, 247 bp, Glycine max
aataagttctatcattgaggaagtttcctgtgcatcgtctccgaaaatgaacgacgcagatgtctcaaagcaaatccagcagatggtgcagttcatccgccaggaagctgaggaaaaggccaacgagatctctgtctccgccgaagaggaattcaatatcgagaagctgcagttggtcgaagccgacaagaagaagatcaggcaagaatacgaacgcaaagagcgccaagttgaaattcgcaagaag

SEQ ID NO: 153641 - DNA, 265 bp, Glycine max
cttaattctgaagattgttgaaagccagaattctggcaagctgagcgagtgtgccgagaaccaagcaaggcttcagagaaatctcatgtacttagctgcaatagctgattctcaaccccaaccacccaccatgtctggtcagtaccctccgagtgggatgatgcagcagggagcacagtacatgcaggctcaaccctcggcacagcagatgacaccacaacactaatggcagcacgctcatctcttttgtacgcacagcagccgt

SEQ ID NO: 153642 - DNA, 259 bp, Glycine max
attgactagtatcattaagatggctaattcctacttatccttgcttgtcttgatccttgtagctctgctcctcacccctcaagggcttgctgatgaatctgattcttactataagccaccagtttacaagaaaccaccagtgtacaagcccaagcccaagccacccattcacaagcccaagccacccgtttacaagcccaagccacccgtttacaagaacccccttatggtaagtacccaccagttcaagacaacgatc

SEQ ID NO: 153643 - DNA, 251 bp, Glycine max
aacagcacaaagcgggttactgtctgttcaagctaccatctctctctctccttcttagtgcctccttgccagaagttaaaatggcccacaaaactttcctagacacatctgaatcattgaacgaggggcaccctgacaagctctgtgaccagatctccggtgctgtgctcgatgcatgcttggagcaggaccctgacagcaaggttgcctggatacctgcactaagaccaacatggtaatcgatttcggag

SEQ ID NO: 153644 - DNA, 251 bp, Glycine max
atcttttagctgttcataaaacccttctccgacaacttgtagctgctgctgctgtttctctttcattttttttttgctaaggactcaaggaatacaacatcctgatatttggaggacagattaaagagaaacatcgtggaggaaacaatggcagcaaggtattggtgtcacatgtgctctcaaatggtcaatcccatcatggatatggaatcagatgcccgttttgccaaagtggatttgttgaagaaatg

SEQ ID NO: 153645 - DNA, 152 bp, Glycine max
gagaagcaaaggttactccggcggtgtttttcgagaagtatccggctctggtgaccggattcttcttcttcacgtggtacttcttgaacgtgattttcaacatccttaacaagaagatctacaattacttcccctatccatacttcgtatcg

SEQ ID NO: 153646 - DNA, 258 bp, Glycine max
gttttggaattcttattatggaactaattacaggaaggaatccggttgattatagtcggcctccagaagaggtgaatttggtagactggctcaagaagatggttagcaacagaaatccagagggggtgcttgatcccaagcttcctgagaaaccaacttcaagagcactaaaacgagctcttcttgtagctttacgctgcactgatcctaatgacaaaagcggcctactatggggcatgtgatacacatgcttgaagc

SEQ ID NO: 153647 - DNA, 256 bp, Glycine max
tgttctagatcgcgagtggccgctcgcgatctagaactgttttattgctcatctcatataataaatatataatacggaatataatacggaatatgatatgataagtaatagttagggatagggatgacaggatttgaacccgtgacattttgtacccaaaacaaacgcgctaccaagctgcgctacatcccttttccatttgtttctagtgtattgtaaagaatctttgtcttgttttccacatttttatctgttg

SEQ ID NO: 153648 - DNA, 253 bp, Glycine max
gtgataaggcaaaagagattttgatggaagagagcaatgtacagcctgtgaaaagtcctgttacaatttgtggtgatattcatgggcaattccatgatcttgcagagctttttcgcattggagggaagtgtccagatacaaattacttgtttatgggagattatgttgatcgtggctattattctgtcgaaactgttacgcttttggttgccttaaagtgcgttatcgtcagcgtattactattctgagggga

SEQ ID NO: 153649 - DNA, 253 bp, Glycine max
gggaatggtaccattgacttccctgagttcctaaatctcatggccaggaagatgaaggacactgattctgaggaggagctgaaagaggcattccgggttttcgacaaggaccagaatgggttcatctctgctgctgagctccgccatgtgatgaccaacctcggggagaagctcaccgatgaagaggttgatgagatgattcgcgaggcgatgttgatggcgatggccaaataaactacgaggagttcgttaa

SEQ ID NO: 153650 - DNA, 250 bp, Glycine max
tctcattctgtgactctgtgcttagttaacgttaacagtgacttaagatggcggattctgcagatgtcacccacgatgttgtgtccctcctctcttctcctcaaagggactttcttcttcgaaacaacggcgatcaggttaaaattgacagcttgaagggtaagaaacttggtttgtatttttcggcatcctggtgtggtccatgtcaacatttacgccaactttggtggatgtgtacaatgaggttgca

SEQ ID NO: 153651 - DNA, 252 bp, Glycine max
tggtggatgtgcctccaatgcgccattccattgttgttaaccttggtgaccaaattgaggtcattaccaatgggagatacaagagtgtggagcatcgtgtgattgcccaaacgaatgggaccagaatgtccgtagcctcattctacaaccctgccagtgacgctcttatctaccctgcaccagcattgttggagcaaaaggcagaggaacagaacaagtgtatccaaaatttgtatttgaggattacatgaa

SEQ ID NO: 153652 - DNA, 251 bp, Glycine max
cttgatccttctttttctccttgaactcaaacatggcagatgaggtggttctgctagatttctggccaagtccatttgggatgagggtcaggattgcacttgctgaaaagggtatcaaatatgagtacaaagaagaggacttgaggaacaagagtcctcttctcctccaaatgaacccggttcacaagaagattccggttctcatccacatggcaaacccatttgtgaatccctcattgctgttcagtaca

SEQ ID NO: 153653 - DNA, 257 bp, Glycine max
cgaggagaagcagaaggagcaaaagcaatggcgccgaagaagccgagaaccacgacaaggaaccctgatttggttagggggattggcaagtattcgaggtcgcagatgtaccacaagaggggcatctgggccatcaaggccaaaaacggtggcgttttgccccgccacgatcccaagcccaagcccgaggccccggcccagaagccgcccaagtctaccccgcggacgatgttaagaagcccctcgtcaacaagcac

SEQ ID NO: 153654 - DNA, 258 bp, Glycine max
gtttctcctcaacaaataagtgcttgggcaaaaaaaatcctacctaatggagagatagtgggggaggtaacaaaaccctatacttttcattacaaaaccaataaacccgaaaaagatggattattttgtgaaagaatttttgggcctataaaaagtgggatttgtgcttgtggaaattatcgagtaatcagagataaaaaggacgacccaaaatttgtgaacaatgcggagtagaatttattgattctcggatacgta

SEQ ID NO: 153655 - DNA, 256 bp, Glycine max
gagtttaagcatatcaataagcggaggaaaagaaactaacaaggattcccttagtaacggcgagcgaaccgggaaaagcccaccatgaaaatcggtcgccctcggcgtccgaattgtagtctggagaagcgtcctcagtggcggaccgggcccaagtcccctggaagggggcgccagagagggtgagagccccgtcgtgcccggaccctgtccaccacgaggcgctgtcggcgagtcgggttgtttgggaatgcag

SEQ ID NO: 153656 - DNA, 252 bp, Glycine max
ctcgagccgcgcgtgcatagcagagtcagagacagagacgcagccatggggcggagacctgcgaggtgttataggcaaattaagaacaagccataccccaagtcacgtttctgccgtggtgttcctgatcccaagatcaggatttatgatgttggtatgaagaagaagggtgttgatgagtttcctttctgtgtccatctggttagttggagaaggaaaatgtttcaagtgaggccctggaagctgctcgca

SEQ ID NO: 153657 - DNA, 250 bp, Glycine max
gccacttttccttctccgtcttcgccgctaccagcagaagctgctcctgctagctctgcacctccaaaagcagctcctgccttgccttcccccggaaaagcaagcacatcttctcacccaccactgaaatgtccaatggcaggaaccttctataggagtccagcacctggtgaacctgcatttgtcaaggtgggagataaagtgaagaaggccaggttatttgcattatcgaggctatgaaactgatgaa

SEQ ID NO: 153658 - DNA, 250 bp, Glycine max
cttgaatcttcgttatccttctttttttctccttgaactcgaatattcactatggcagatgaggtggttctgctagatttctggccaagtccatttgggatgagggtcaggattgcacttgctgaaaagggtatcaaatatgagtccaaagaagaggacttgcagaacaagagccctttgctcctcaaaatgaacccggttcacaagaaatcccggttctcatccacaatggcaaacccatttgtgaatc

SEQ ID NO: 153659 - DNA, 249 bp, Glycine max
caagttcctacgttctttaccaagcaagggattactatggagagaacaatatttcctggctttgacatacccgctgcttctcttcaaacgcttgtcactgtggccattgttctgttcagccccatctatgaccgcctatttgtgccaatggcaagagctattactggcaaaccctcaggaatcacaatgctgcaaagaattgggacggaatatctatatccatatttaccatagtatttgcagcccttg

SEQ ID NO: 153660 - DNA, 249 bp, Glycine max
atccctaacgcgtgcatagcagagtcagagacagagacgcagccatggggcggagacctgcgaggtgttataggcaaattgagaacaagccataccccaagtcacgtttctgccgtggtgttcctgatcccaagatcaggatttatgatgttggtatgaagaagaagggtgttgatgagtttcctttctgtgtccatctggttagtgggagaaggaaaatgtttcaagtgaggccctggaagctgctcg

SEQ ID NO: 153661 - DNA, 245 bp, Glycine max
tccttctacactaactaaagccgagcagcgagagagagaaaccctagcaaaaatgccggctggtcacggtttgagatcccgcaccagagattccttctctcgtcccttcaggaagaagggtaccatcgccctcagcacatacctcagaacctaccacgtcggcgattatgtcgacgtcaaggttaacggcgccgtccacaagggaatcctcacaagttctaccatggccgcaacggtcgcgtctg

SEQ ID NO: 153662 - DNA, 247 bp, Glycine max
ggcttacgaggaggcgctcggtggagtccacaacttgttcggcggccccagcgtggtcagggtgtcgcagagcgatggccctcacagctttgcggtcacgcgtgccgtgccggggccatcctgtggagatgttcttcgagtgatgcagcaccagcccgagctcatgttcgagacactcaagcaccgcgcgcaggagtatgtcagcccgacaacgcagcagcgcttctggctgctggccttgctcgca

SEQ ID NO: 153663 - DNA, 248 bp, Glycine max
ctgcaaccctatcattgccaagatgtaccagggtggtgctggtccagacgtgggtggtgcaatggacgatgatgttcctgctgctggaagcggtgcggggccaaagattgaggaagtagactaaatttagtttatttctgcttttgatttactatttatttttaaatgtctgatttcatgtcctttggttggatttagtttctcaagaagacaatatttggtagtatgtcatgtcgaattatgttttc

SEQ ID NO: 153664 - DNA, 255 bp, Glycine max
attggatacgactcagaccattatttggaatggaccaatgggtgtttttgagtttgataagtttgccacaggaacagaggctatagccaagaaactggcagagctgagtgggaagggagtgacaaccatcattggaggaggtgactccgttgccgctgtggagaaggttggacttgcagacaagatgagccacatctccactggtggtggtccagcttagagcttcttgagggaaagcaactccctggtgtcctt

SEQ ID NO: 153665 - DNA, 254 bp, Glycine max
agatgccgttgttgttcagagcaagggtcgatcgtctttttctcaaacagctgctgtgaggcatcttacaggttctgttaccagagcccatggacttcgttttgctgtggttgttgctagatttaatgaaattgttaccaaaccgctcttggaaggtgctttgggtactttcaataattattcagttcaagatgaggatatcgatgttgtcgggtacctggtagttttgaaattggtgttgttgcagaaaggct

SEQ ID NO: 153666 - DNA, 251 bp, Glycine max
gataagtgggagctggaaacagcgaaagtgaaataccactacttttaacgttattttacttattccgtgaatcggaagcggggcactgcccctctttttggacccaaggtcggcttcggccggtcgatccgggcggaagacattgtcaggtggggagtttggctggggcggcacatctgttaaaagataacgcaggtgtcctaagatagctcaacgagaacagaaatctcgtgtggaacaaaagggtaaaa

SEQ ID NO: 153667 - DNA, 252 bp, Glycine max
catcacaccccattctcccaaactaacaaacaaatcccagggagccaccaaccatggcttccaagctctgcgactcatgcaaatcagccactgctaccttgtactgccgccccgacgcggccttcctctgcggcgcctgtgactctaaggttcatgccgccaacaagctcgcatcgagccacccgcgcgtcgtgctctgcgaggtgtgcagcaggcgcccgcgcatgtgacctgtaaagccgacgccgccgc

SEQ ID NO: 153668 - DNA, 249 bp, Glycine max
gcaccagtttcaccgcacgaatatcttgttgtttggagcgatccgagaaaaactctgtaaacatgttggtttaccaggacctccttacaggtgatgagcttctctctgactccttccgttacaaggaaattgagaatggaatgctgtgggaagttgaggggaagtgggttgttaaaggagcagttgatgtagacattggtgcaaaccttctgctgagggtggaggagaagatgagggagttgatgatgc

SEQ ID NO: 153669 - DNA, 251 bp, Glycine max
ctcgagccgggacactgctgggctttccgcagacccagaaaccttcgccaagaaccgtgaactcgaagtgatccactccaggtgggccatgctcggagccttgggctgcgtcttcccggagttgctgtcccgcaacggggtgaagttcggagaagccgtgtggttcaaggccgggtcccagatcttcagcgagggtgggctcgactattgggcaacccaagcctgatccacgcccagagcatcctcgccat

SEQ ID NO: 153670 - DNA, 274 bp, Glycine max
gttgataactgttcaaccacagctaggttgggttcgaggaaatgggctccacgatttgactacatcctaacccagcaggccatggtggctgtggacaatggaactcctgttaacagggacttaatcagcaacttcctgtcagacccagtgcacggagccattaaagtttgcgctgaactgagacccacagtagacatttctgtgccaccagatgcagactttgttcgtcggagttgcgttctagcaattagaacttaaaagcaattatggcttt

SEQ ID NO: 153671 - DNA, 157 bp, Glycine max
gctccgacaccattgacaatgtgaaggcgaagatccaggacaaggaaggaatcccaccggaccagcagaggcttatttttgctggcaaacagctagaggatggaaggaccctcgctgactacaacatccagaaggagtcaactctgcacttggtgtt

SEQ ID NO: 153672 - DNA, 251 bp, Glycine max
attgcatttgagtatatctgttgtagactttgtagtatactactgaaagatggattcgaagacgaaggtagcaatacttattcctggcatgttagccatactccttttcatctcctcagaggtggcagccagggacttgaaagaggagggggttcttaaagagacaagtaaagttggtgatgccaaattagttggtggagggttgcaggctctggtcgtggctcacctactcctgtcttccctggtcgtgg

SEQ ID NO: 153673 - DNA, 249 bp, Glycine max
cagacattgaatcccagctgaagttctttgagaccccttctttcttgatgaagcctgggctgatgctgcattggcgtctttgctcagtgaagatgcatctcaggatgctgctggaaaccctatgaacctttggagcttcgacgacctgccttccatggcaggagtcttctgaacaccttcatatcccgttttatgtaaataaagctcaagaattgtgatcgtgatgttggtgatggaatccacagcaag

SEQ ID NO: 153674 - DNA, 248 bp, Glycine max
gagaaaataaaccaatattattccacaaaacaaattaaatttcgtgagagtttaatcaatttgatacacgtacccttatggccaaagaaggtcttggacttgaaatcaccgagctaaggttgggtctacccgatgcggagatgtaactgtggtcaataagaatgagaagaagagggccttctcgcaaattgatgatgaaaatagtcctccggcggcgaccggaaaatcaagaccaataagagtcaagt

SEQ ID NO: 153675 - DNA, 247 bp, Glycine max
cttcctccaagcaagatgatcttggatgactggaaaagactctactcaaacaccaagaccaacttccgcgaggttgcaatcaaaggattttgggacatgtacgatccagagggatattctctgtggttctgtgattacaaatacaatgatgagaacacagtttcctttgttacgttaaacaaggttggtggatttcttcagaggtggatctggctcgcaagtatgcatttggaaagatgctggtgat

SEQ ID NO: 153676 - DNA, 250 bp, Glycine max
cgcaatgtgatttctgcccagtgctctgaatgtcaaagtgaagaaattcaaccaagcgcgggtaaacggcgggagtaactatgactctcttaaggtagccaaatgcctcgtcatctaattagtgacgcgcatgaatggattaacgagattcccactgtccctgtctactatccagcgaaaccacagccaagggaacgggcttggcggatcagcggggaaagaagaccctgttgagcttgactctagtccg

SEQ ID NO: 153677 - DNA, 250 bp, Glycine max
gttcgcctacatctgggtgggaaactccgaaacccaatgcccggggcaatgcgcgtggccattccaccaacccatttatgggccccagagcccacccttggttgctcccaacaacgatgtgggacttgacggaatggtcataaacctcgccagcctccttgccggaaccgccaccaaccccttcggaaacggctacttccagggtccgcggaggctccgctcgaagccgcgtcggcgtgccctggggttt

SEQ ID NO: 153678 - DNA, 249 bp, Glycine max
tctcgagccgaatcggctcgagccgcacgaatatcttgttgtttggcgcgatccgagaaaaactctgtaaacatgttggttatcccaggacctccttacaggtgatgagcttctctctgactccttccgttacaaggaaattgagaatggaatgctgtgggaagttgaggggaagtgggttgttaaaggagcagttgatgtagacattgtgcaaacccttctgctgagggtggaggagaagatgaggga

SEQ ID NO: 153679 - DNA, 247 bp, Glycine max
cgctctttctttctcccctacacaaaacatggctttgcccaatcagcaaaccgtcgattaccccagcttcaagcttgtcatcgtcggcgacggtggcacaggaaagacaaccttcgtgaagaggcatctcactggtgaattcgagaagaaatatgaaccgaccattggtgtggaggttcatccgttggatcttttcacgaactgtgaaagattcgcttctattgttgggatactgctgggcaagaga

SEQ ID NO: 153680 - DNA, 245 bp, Glycine max
cttaattctgaagattgttgaaagccagaattctggcaagctgagcgagtgtgccgagaaccaagcaaggcttcagagaaatctcatgtacttagctgcaatagctgattctcaaccccaaccacccaccatgtctggtcagtaccctccgagtgggatgatgcagcagggagcacagtacatgcaggctcaacaacaggcacgcagatgacaccacaacaactaatggcagcacgctcatctct

SEQ ID NO: 153681 - DNA, 248 bp, Glycine max
atagcccaagccctatacaaccaaaccctaacacacacccatttgattcagtttccatggctagcctcaaggttgcatttttggctgcagtgctctgcatggttgtggtgagtgcacccatggcacatgcagctatcacgtgcgggcaggtgacgaatagcctgatcaattgcatcggttacctccagaacggaggaacgccgcgtcgggatgctgcaacggagtgaagagcctcaatgccgccgcca

SEQ ID NO: 153682 - DNA, 249 bp, Glycine max
ggttgaaactttctctgagtaccccccacttggtcgctttgctgtcagggatatgcgtcaaactgttgctgtgggagtcatcaagaacgtggagaagaaggatcctactggagccaaggtcaccaaggctgcccagaagaagaagtgaatcgtgcggtttggttcatcaggggatgtcgtttcttatggttacaataaatgttggttcttgcccttgtgtcttcgtttctaggtagcttgtttttcgga

SEQ ID NO: 153683 - DNA, 256 bp, Glycine max
gaaatctcgtgtggaacaaaagggtaaaagctcgtttgattctgatttccagtacgaatacgaaccgtgaaagcgtggcctatcgatcctttagtccttcggaatttgaagctagaggtgtcagaaaagttaccacagggataactggcttgtggcagccaagcgttcatagcgacgttgctttttgatccttcgatgtcggctcttcctatcttgtgaagcagaattcaccaagtgttggattgttcacccacca

SEQ ID NO: 153684 - DNA, 271 bp, Glycine max
cttcctttctctgctctttgtcttctctgacacatttggggcctcgttgagtgtgtgtttgcaagagggtatggcgacggacgttgcggctgctgagcgtggctccttctctgggaaggactaccaggtccctccaccagcagtactcattgatgctgaggagctcacaaagtggtcctttcacagggctcttattgctgactgcattgccactttgcgcttcctctacattactgtgctcacagtggatagggtacccgctccagacgga

SEQ ID NO: 153685 - DNA, 260 bp, Glycine max
ctttctctccttcaaaatcgttgtcaatttcgcctctttctttcgcaactcccttagattctcgccatcgggtcttcaaaaatgcggatgagctgcaatggatgtcgagttctcagacaaggttgcagtgaaaattgcagcatcagaccctgtttacaatggttcaaaagcccagaatctcaagccaatgctactgtgtatcttgccaaattctacggtcgtgctggtctaatgaacctgttagacgggccctcgaacat

SEQ ID NO: 153686 - DNA, 262 bp, Glycine max
accaattaagctttcaagagacaaactgctttgaaaaatgggatccaatgttgttgcatccgttgcccttctcctctccatcaacattcttttcatttccatggttagctccagcagccactacgctccacagccccaaccttctcacgtcactgctcttattacacgacctagttgtccggatctgagtatttgcctcaatatcttaggcgggtctctaggaaccgtggatgattgttgtgccctcatcggcggtcttggt

SEQ ID NO: 153687 - DNA, 267 bp, Glycine max
ggcacccagagacgaggaagggcgtagtaagcgacgaaatgcttcggggagttgaaaataagcgtagatccggggattcccgatataggtcaacctttcgaactgctgctgaatccacgggcaggcaagagacaacctggtgaactgaaacatcttagtagccagaggaaaagaaagcaaaagcgattcccgtagtagcggcgagcgaaatgggagcagcctaaaccgtgaaaacggggttgtgggagagctatacaagtgtcgtgc

SEQ ID NO: 153688 - DNA, 262 bp, Glycine max
ctcgagccgaatcggctcgacggctcgagaagtacatgaatggggaattggaactggagccattcatcactcacacagagccattctcagagattaacaaggcttttgattacatgctgaaaggggagtccatcagatgcatcattcgaatgggggagtgaatctatatcagaccaatgatgacatgacatggtccctgttgggggactgagttctctttctggttgtgaaaagaagaaaataaatttcatatatgatatat

SEQ ID NO: 153689 - DNA, 259 bp, Glycine max
ctcgagccgtccaaatgtgcccttccggtcgcaccctcctcccttcctccgtctccgattgccgaccggcattcgacgtcctcgatgccgaccgcgacggcaaaatcagccgcgacgacctccgcgccttctacgccggagtcggcggcggaggagatgacgtgatcggggcaatgatgacagtggctgacaccaataaggacgggtgcgtggagtacgaggagttcgagcgggtaggtctcggcggagagaaatcccg

SEQ ID NO: 153690 - DNA, 265 bp, Glycine max
cgcttgtgcgtactcagactcttgtaaaaagtgctagtgttcaggttgatgctgctccattcaaacagtggtaccttcagcactatggtgttgagattggtaggaagaagaagacagctgccaagaaggaaactgcagaggagggtgctgctgctgttgctgtggaagacgccagaaagagtaatcatctgcagagaaaattggagaagcgccagagagatcgtaagcttgatgctcacattgaggagcagtttggtggtgggcg

SEQ ID NO: 153691 - DNA, 267 bp, Glycine max
gctggaatttgtgtgttgatccaaaacaaatcagagaagaagggagatatgtatgaggcaatctacagcttctactttggggactatagccacattccagtgcagggttcaaactgatccaatgaagacacttatcttgctgtgactggtggactggccacctttaaaggggctaagggtcaagtcaagctgcatcaaattgtgtacccctttaaattattcgacacatttatcctaaagggcatcaaggacttgcctcaggagctt

SEQ ID NO: 153692 - DNA, 287 bp, Glycine max
gttcggaagtccgctcgagctcctgtataatgggacaagttcgatacattgttccaaggcttgttattggggtatttattcaggtactatgtagctacagcaccctgccactgtatgcaattgttacgcagatgggaactcactataagagggcaatatttaatgagcatttgcaacaaaacattgttggttgggcacagaaggcgaagaagaggaaaggactaaaagctgatggcaatcctggccaaggaagttctcaggagagtgctaatacaggaatccagctt

SEQ ID NO: 153693 - DNA, 266 bp, Glycine max
  unsure (1)..(266): unsure at all n locations
ggcatttctcactcatctaangcttggccgcagccaaatgttccagctcttcatttaccaggaagcaatattcaaactagccgattgagatcttctcttagtgctcgtgacatgccaccagaagactttgatgtgttgcaagantttgatggccagcaacaccttttgagtgacttgggctgtttctcgcagccccgtccnggcgccatttcagtgagtcgatctggtcggtctaagacactaaccccatcaaatctggatgaata

SEQ ID NO: 153694 - DNA, 264 bp, Glycine max
aaaggattctacccgccgctcgatgggaattgcgcttcaaggcgtctcgtagggctaatccgcctcacgagggtcaccaacggcacgtgcctttggggggccgaggccccctactgctggtcggcaaacggacggcgggcgcacgcgtcgcttctagcccggattctgacttagaggcgttcagtcataatccaacgcacggtagcttcgcgccactggctttccaaccaagcgcgatgaccaattgtgcgaatcaacggttcc

SEQ ID NO: 153695 - DNA, 131 bp, Glycine max
cacagccttggggcgacgctagccttattggtggctgaggagataagcacgtgttgcccccaagtgccacccgtggctgttttttccttcggtgggcctcgcgtgggtaacaaggcctttggggatcgctt

SEQ ID NO: 153696 - DNA, 265 bp, Glycine max
ggccaggcaagccccactcaaccaccacacctctcctcgttcacgctacccctttctgctcttcttctacctttcaagttttaaaagtataaagatggcagagacattcctatttacctcagagtcggtgaacgagggacaccctgacaagctctgcgaccaaatctccgatgctgtcctcgacgcttgcctcgagcaggacccagacagcaaagttgcctgcgaaacatgcaccacaaccaacttggtcatggtcttcggagaa

SEQ ID NO: 153697 - DNA, 262 bp, Glycine max
ggaacaagcccagcattactgtgcattcgtcaggccatgctgttcatgtgtttgttaatggtcaattttcaggctccgcttttgggacaagtgaagacagaagttgcacatttaatggccctgtcaacctacgtgcaggaactaataaaatagcacttctcagtgttgctgttggattaccaaatgttggattccattttgaaacatggaaggctgggatcactggagttttgcttcatggtcttgaccatggacagaaaga

SEQ ID NO: 153698 - DNA, 264 bp, Glycine max
cggctcgaggaatgtctcagggaagaggcagtgcatctttgcctattgtggtcactgtggtttcactactgtgccttttggaacgtgctaacgcagcaacttactccgttggaggaccagggggatggaccttcaacactaatgcttggcccaatggaaaaagattcagagctggtgatatcctaatcttcaactatgactcaacgacccacaatgtggttgctgtggacagacgtggatacaacagctgcaagacaccagggg

SEQ ID NO: 153699 - DNA, 265 bp, Glycine max
tgctcgagccgattcggctcgaccagctggctcatcaagtccaagacccaacctaccttttgcaatctcaattcaatggcgtcctcgctcattgcgaacgcttcctctcctcttccctcctctccaggtccctccttcgccccgccgtttcggttcccaagcgctctttcaacaccaacgccatgcgccagtatgacaaccgcgccgacgaccacagcaccgacatcgatcgtcactccgaacgctctttccctagcactgcgcg

SEQ ID NO: 153700 - DNA, 267 bp, Glycine max
acttaacaacagcacaaagcgggttactgtctgttcaagctaccatctctctctctctttcttagtgcctccttgccagaagttaaaatggcccaagaaactttcctattcacatctgaatcagtgaacgaggggcaccctgacaagctctgtgaccagatctccgatgctgtgctcgatgcatgcttggagcaggaccctgacagcaaggttgcctgtgaaacctgcaccaagaccaacatggtgatggtttcggagagatcacaa

SEQ ID NO: 153701 - DNA, 266 bp, Glycine max
  unsure (1)..(266): unsure at all n locations
ctcgagccgaatcggctcgagtttccattctcttcaacctaacgcggcatcgctatactcttcattccatggctttgcccaatcagcaaaccgtggattaccctagtttcaaactcgttatcgtcggtgatggtggcacaggaaagacaacctttgtgaaaaggcatctcaccggagaattcgagaagaaatatgagccaacccccggntgtggaggttcacccattggattttttcacaaactgtggaaagatcgattctactgc

SEQ ID NO: 153702 - DNA, 239 bp, Glycine max
ctcgtcttcggaaccctagccatcatcatcggttccctcatggcctataatcacgtcggcggcgacaccgctcacggtctgttctttgcgatactgggaacactcttgttcattccgggtttctactatacgcgctttgcctattgtgcttacaaaggatacaaagacttctctttctctaacatacctcccgtatagctcagctctaacataccacctttatgtatagatcttctcgg

SEQ ID NO: 153703 - DNA, 133 bp, Glycine max
actggttagtctgtgtagactgaaatttccttagtgagggattctatgacgcccaagcctgggggcagagacaacactcggtgaccttctctagaaaaaggcaaatgccgcggttcaaggtattgatgcttgt

SEQ ID NO: 153704 - DNA, 261 bp, Glycine max
gtccagtgactcggttcctttttaccggagtgtgcagtcatttagccctcatttttgcaggttccttcaatgggaagcctgttctttttggcatccattttgcccccttttaaatggctgcatatctgagaacatagctaccgggttctggagtgtaggaatctttgttactggtgttggcacctgatgtttttagctcagctttgcattggttttgccaccatgtgtgtcttaattttctaagtttttacagctagctgt

SEQ ID NO: 153705 - DNA, 263 bp, Glycine max
gtggaccctgaggaggcaaccaccattaacgagctgaagaagcctgttgtggagaaagaagctccagggcatgccatatgagggcatgcacgtacggcctcggaggggaaccagaaaattatgttaacaaaataatctggaaccctaatgtatcagtgtcatcatcagtgtgtagtttaagctagctttgctatggttacgttctttgagatgagagtcttgatgaacagtaccattctgatgtattctttccttgaaagtta

SEQ ID NO: 153706 - DNA, 256 bp, Glycine max
agcgcttctcctctttgtgttctggctatgcttcttggcaagagttagatcggacgaggattgcgtgtacacggtgtacgttcggacgggttcgatcatcaagggaggcaccgattcagtaattggtctgaagctatacgacaagtccggctacggcatatacatcaccaacctcgaggcatggggcgggttaatggatccgggtcacaactactacgagcggggcaacctcgacatattcagtggtagaggccct

SEQ ID NO: 153707 - DNA, 261 bp, Glycine max
ggattctacccgccgctcgatgggaattgcgcttcaaggcgtctcgtagggctaatccgcctcacgagggtcaccaacggcacgtgcctttggggggccgaggccccctactgctggtcggcaaacggacggcgggcgcacgcgtcgcttctagcccggattctgacttagaggcgttcagtcataatccaacgcacggtagcttcgcgccactggctcgtcaaccaagcgcgatgaccaattgtgcgaatcaacggttcc

SEQ ID NO: 153708 - DNA, 262 bp, Glycine max
cccaaacctagctatgtctcccaccacttcctcctccaccgcccactggacctccgacgccatacacggcggatccctccgccgcgtcgacctcgactccggcaccaacggctgggcctctcctcccggcgaccttttcctcctccgctcttccaattacttcacaaaacgccaaaaatcccccgccggcgactacctcctctccccggccggcatggactggctgaaatcccaatccaagctcgagaacgtgctctcccgg

SEQ ID NO: 153709 - DNA, 265 bp, Glycine max
aaacactcccattttctctctttctctttctctccgacctagcgagaccgagcgatccgatcctaaccccgcgatgctccgccgcgcaaccacctccctcatctccggcgcctcccgccgccgcctctccaccgacgtgccggcgccgcggcgagcggattccgtcttcgcggcggcgtggcagaaagtgagccccaacatcgagccgccgaagacgccgctggcgtacatgcagccccgaccacccactccttcgactctcccc

SEQ ID NO: 153710 - DNA, 259 bp, Glycine max
cttcatcttgttctatctgtgacgagcatcatggcctcaagagcagtgttattgttggctatgtgtgtgcttccggcgatggttgtggccattcgcccagcaaagaaccctttttgcgtgaagggtcgtgtctactgtgacccttgccgtgctggttttgagacctcagctaccacctacattgctggtgctgagattatgttgcaatgccagagcagggttagcaacgaggttgtgtacacgaagaaggggtacaccg

SEQ ID NO: 153711 - DNA, 260 bp, Glycine max
agcaaccatggcaatggcaacccaagcctctctcttaaccccacccctctccggtctcaaagccagcgaccgcgcctccgtgccatggaagcaaaactccagcctctccttctccagcccgaagcccctcaagttctccagaacaatcagagcagcagccgccgacgagaccacagaggcaccagcaaaagtagaggctgcaccggtcgggttcaccccacagaacttgacccaaacaccccttccccgatcttcggggg

SEQ ID NO: 153712 - DNA, 259 bp, Glycine max
gctttcaagagacaaactgctttgaaaaatgggatccaaggttgttgcatccgttgcccttctcctctccatcaacattcttttcatttccatggttagctccagcagccactacgatccacagccccaaccttctcacgtcactgctcttattacacgacctagttgtccggatctgagtatttgcctcaatattttaggcgggtctctaggaaccgtggatgattgttgtgccctcatcggtggtcttggtgacatt

SEQ ID NO: 153713 - DNA, 259 bp, Glycine max
gtttcttgcaggaaagattagctctgaaagaaggaggagctgaactcggcccctcagtttgattctttggatgcaggaaccgtcaaatggactacatctatgaagacgagttgagtcacttcgttaatactggcgcacttgatgagctcattcttgccttctctcgagagggacccaccaaggagtatgtacaacataaaatgatggagaaggcttcagaaatttggagcatgatatcacaaggagcttacatttatgt

SEQ ID NO: 153714 - DNA, 262 bp, Glycine max
gtgcagccctactccggctcccctgccaacttcgccgcctacaccgccgtcctcaacccccacgaccgcatcatggggctggatctcccctccggcggccacctcacccacggctactacacctccggcggcaagaagatctccgccacctccatttacttcgagagcctcccttacaaagtaaactccaccaccggctacatcgactacgaccgcttggaggaaaaagccctagacttcaggcccaaattgataatctgcg

SEQ ID NO: 153715 - DNA, 259 bp, Glycine max
tgatgtttcttccggaattatctttggaagggagcttgtaaattctcctgctaatgtgctcacaccaggggtgttggcagaagaggcagctaagattgcttctacctacagtgatgttttcactgcaaaattttaaatgccgagcaatgtgctgaattaaaaatgggatcctatctgggtgttgctgcagcctcggaaaatcctcctcattttatccatctatgtgacaaacctctgagtggacctgtcaatgtcaagt

SEQ ID NO: 153716 - DNA, 262 bp, Glycine max
attcatagtagcggccaaaactggggcaggtcggatgggtacatgatttcttctgggcaacctgtcaaagattacattgactctgcagtgagacatgtgctcctgagacagggtgttcttggcattaaggtgaagatcatgcttgattgggatcctaaggggaaacagggtcctaaaactcccctccctgatcttgtcacaatccattctccaaaggaggaggaggaatacatccgacctgccccagttttggctgctaata

SEQ ID NO: 153717 - DNA, 238 bp, Glycine max
caattaggtttttgctgctctccttcaaactccgtctttccgaatcctctctttgtgattgtgttctgttctgcttcctaccgcgatagtttctcttctgaagcatggccatggcggtttctgcaattggttttgaaggtttcgagaagaggctggaaatatcctttttccagccgggactttttgctgaccctgagggaatgggtttaagagctcttgcaaagtcccagttggatga

SEQ ID NO: 153718 - DNA, 258 bp, Glycine max
cacaacctatgaggggaagcacaaccatgatgttcctgcagctcgtggcagtggcagccattctgttaacagaccaatgccaaacaatgcttcaaaccctaccaacactgcagccactgccataagtcccttgcaagtgatccaacacagtgacaattcccatcagaaccaaagatctcaagcaccaccagaggggcaatcacccttcaccctagagatgctacaaagtccaggaagttttggattctcagggtttgg

SEQ ID NO: 153719 - DNA, 258 bp, Glycine max
  unsure (1)..(258): unsure at all n locations
caaaaaggtaaacntctgcaacaaccatggttgcaatggcagcagcaacagcatcctcccagttgattttctcaaagcctcgttnaccctcgcgtctactgccccttccaacnatgtgtctntgacaccaaacaagngctgtcaagtncaagtggcaggagaaggcatgtggggggttctggagttaggtgcatggcggtgggagaagctgcaaccactgagactaagaagagaagtggatatgagcttcaaacactc

SEQ ID NO: 153720 - DNA, 258 bp, Glycine max
gagccattcttcaatgctgctgcttcacagttcatacttggccaatcaatccccatcactttgtggctgtcactggctcctgttgttattggtgtgtccatggcatctttgaccgagctctcattcaactgggtcggcttcataagtgctatgatttcaaacatttccttcacgtaccgaagcatctattcaaagaaagccatgactgatatggacagtaccaatatctatgcctacatttccatcattgctctaatt

SEQ ID NO: 153721 - DNA, 255 bp, Glycine max
gttagcttcctgactgagcaaattgcatatttcaccggcccaacagttggagggcttctgaatgcaacatgtggaaatgcaaccgagatgatcatagcattattagcacttcaccagaacaaagttcatgttgtgaagttgtctttgctgggttccattctctcaaaccttctcttggttcttggcagttcactcctctgtggtggtttagccaatcttaagagagaacaaagatatgacagacagcaggcagat

SEQ ID NO: 153722 - DNA, 255 bp, Glycine max
cgaaccgaccattggagtggaggttcacccattggatttcttcacaaactgcggaaagattcgcttctactgttgggatactgctggacaagagaagtttggtggcctcagagatggatattatatccatgggcaatgtgcgattataatgtttgatgttactgcccgtctaacatacaaaaatgtccctacctggcaccgggatctttgccgggtctgtgaaaacatcccaattgttctttgtggtaacaaggt

SEQ ID NO: 153723 - DNA, 241 bp, Glycine max
cgctctttctttctcccctacacaaaacatggctttgcccaatcagcaaaccgtcgattaccccagcttcaagcttgtcatcgtcggcgacggtggcacaggaaagacaaccttcgtgaagaggcatctcactggtgaattcgagaagaaatatgaaccgaccattggtgtggaggttcatccgttggattttttcacgaactgtggaaagattcgcgtctattgttgggatactgctggg

SEQ ID NO: 153724 - DNA, 253 bp, Glycine max
cgcctcacgagggtcaccaacggcacgtgcctttggggggccgaggcccctactgctggtcggcaaacggacggcgggcgcacgcgtcgcttctagcccggattctgacttagaggcgttcagtcataatccaacgcacggtagcttcgcgccactggcttttcaaccaagcgcgatgaccaattgtgcgaatcaacggttcctctcgtactaggttgaattactattgcgacactgtcatcagtagggtaaa

SEQ ID NO: 153725 - DNA, 256 bp, Glycine max
tctcgagccgattcggctcgagccagcttgctcatcaagtccaagaaccaacctaccttttgcactctcaattcaatggcgtcactctctcattgcgaacgcttcctctcctcttccctcctctccaggtccctccttcgccccgccgcttccgcttcccaccgctctttcaacaccaacgccatgcgccagtatgacaaccgcggcgacgaccacagcacggacatcaatcgtcactccgaacgctctttcccta

SEQ ID NO: 153726 - DNA, 260 bp, Glycine max
acaaaggttgctgtaggagataagattgcagtagtgctaagtgctaacacctgcagtgaacaatggcctctgcatcagcatctctgctcaagtcttcacttgttcttgacaagtctgagtgggtgaagggacaaacccttcgccaaccttctgcatcagttgtgagatgcaaccccaccaccccatcaggcctcaccatcagagctggttcctatgctgatgagctcgttaagaccgcgaaaacagtggcttcaccaggg

SEQ ID NO: 153727 - DNA, 219 bp, Glycine max
gactaattctagatcgtcagcgtattactattctgaggggaaatcatgaaagtacgcagattactcaagtttatgggttgtatgatggatgcctgcggaagtattgtagtgctaatgtttggaagagctttaccgatttggttgactatttccgttgacagcgttggttgaatctgagataatttgtcatcatggtgggttgtcgccatctattgaaaa

SEQ ID NO: 153728 - DNA, 278 bp, Glycine max
gtttttcatttcatcgtgcattcaatggccaccacagcagctctatccggaaccatggtgagcacctccttcatgaggaggcaacctatgaccaccacaagcctaaagacattccccaacgttggtgaagctctttttggtctgaaaagtggacgaggtggtcgtgtcacttgcatggcctcgtacaaggtgaagctcataaccccagaaggagaagtggagtttgaatgcccagatgatgttttcattgttgacaaggcagaggacgaaggcattga

SEQ ID NO: 153729 - DNA, 275 bp, Glycine max
gttcgaggaaaatacctctttgctggagtggttgatggaaggaacatctgggccaatgaccttgctgcttctctcactaccttgcagggtcttgagggcattgtgggcaaagataagcttgttgtgtccacctcctcctcccttcttcacactgctgttgatctagttaacgagaccaagttggatgatgagatcaagtcatggctagcttttgctgcccaaaaaattgttgaagttaacgcattggctaaagcattgtctggccacaaggatga

SEQ ID NO: 153730 - DNA, 275 bp, Glycine max
ctcgagccgttttgatatcgggcctttgctacatgatgatagttgacgttccagcaagctttgttgggccagaagagtaatgatccatttgctgtgacgcttgaatagatccgattctctcgggctcatggctcatttatgctctctgcttaggtatccagtggctcctaatggggtgggttgagagcaagagatgggtggacttcttcaacccagattctcagtcagtggagtgggccactccatggtcaaaatctgctgagaactttggcaac

SEQ ID NO: 153731 - DNA, 269 bp, Glycine max
atccagcgagaccacagccaagggaacgggcttggcggaatcagcggggaaagaagaccctgttgagcttgactctagtccgactttgtgaaatgacttgagaggtgtaggataagtgggagctggaaacagcgaaagtgaaataccactacttttaacgttattttacttattccgtgaatcggaagcggggcactgcccctctttttggacccaaggtcggcttcggccggtcgatccgggcggaagacatgtcaggtggggagttt

SEQ ID NO: 153732 - DNA, 267 bp, Glycine max
tacgattcgttttgccccttttgttgccctaatttcaaccatgcctcgccgtagctccggtggaagatctgcccgtcctgctcctcgggcagctcctcgtcctgctccagttcaccatgctcctcctccagcccctgctcagagtggtggtggatctatgcttggtggcattggttcaaccatagctcaaggtatggcttttggcaccggaagtgcagtggcacacagggctgtggatgcagtcatgggtcctcgtaccattcgaca

SEQ ID NO: 153733 - DNA, 266 bp, Glycine max
cagctgtggttgtaaggcaaatgcttaaggctgcggctgagtgtcatttacatgggttggtacaccgggacatgaagaccaggtgagttttcttctcaagtcacccatagacgattcacctttaaaggctaccgattttcgtttgtctgatttgatacaacctggaaagaggtttcaagatatcgtgcgcagtgcttactatgtttcaccacaagtgttaaaacgagagtctggtcccgagtcagatgtatggagtgattagtgtg

SEQ ID NO: 153734 - DNA, 264 bp, Glycine max
ggggtgcagagacaaccaggaggtttgcctagaatcagccacccttgaaagagtgcgtaatagctcactgatcgagcgctcttgcgccgaagatgaacggggctaagcgatctgccgaaactgtgggattctgggagaacgagaaagtccggttggactacaggccagtgcatttgaatgtattggatgatgaggttgaatcattccctcccaaggctcgggtgtattaatatactagctaatggatggatgagacttgtctca

SEQ ID NO: 153735 - DNA, 156 bp, Glycine max
gcacaatttctctgtctctctttttttgtgtgtccaaaatggctcctagttctgctcacaacaatgggttctatgtgcttatgctagttgggataatggttagcactatggttgctacctgtgctggtagcttctaccaagactttgatctaacat

SEQ ID NO: 153736 - DNA, 269 bp, Glycine max
cttcaaaacactcataacacaaagcacaaagcaaagctcatccttgagttaaaaaatggcagcagcttcttccatggctctctcatccccatccttggctggcaaggccgtgaagctgggcccatcagccccagaagtgggaagggtgagcatgaggaagaccgtcaccaagcaggtctcctcaggaagcccatggtacggcccagaccgagtcaagtacttgggcccattctctggcgagcccccgtcctacctaaccggtgagttcc

SEQ ID NO: 153737 - DNA, 268 bp, Glycine max
gaacaagttcaaaaatgagtcagtgaattggaatgcaccaaccaattcgtggatccaagcagggagtgaagaacgctctaatggacccgagatcttgtggaagctgaagcgatggctcaggctcggaatggaagtgagcctgagccggagcctgaaacacatcgacaattacctctcccacatcatcaagaaccgcaagctggagcttctgaatggcactgggtcccaccacgacgacctcttatcccgcttcatgaggaagaaagaa

SEQ ID NO: 153738 - DNA, 263 bp, Glycine max
ctaatggtggccaatgctggcgactgccgagcagttctctgtcgcaaaggagaggccattgacatgtctgaagatcacaggcctatttatctatcagagcggaggcggtttgaagaattgggtggctacatagaagatggttatctgaatggggttttatcagttactcgagcactaggggactgggacatgaagttacctaagggtgctccctcacctttgattgcagagcctgagtttcggcaagtggttctaacagatga

SEQ ID NO: 153739 - DNA, 121 bp, Glycine max
attttctagggttttattcattttccgatggcttctgcagatgttgagtaccgttgctttgtcagtgggctcgcttgggccactgacgaccatgccctcgagagagccttgtctcagtacg

SEQ ID NO: 153740 - DNA, 267 bp, Glycine max
caattatatcaggtggatccatcgggttcatatttttcttggaaagcttctgctatggggaaaaatgtttcgaatgcaaagacgtttcttgagaagaggtacacagatgatatggagcttgatgatgcagtccacacatcaatattgactttgaaggcagggtttgagggacagatctcaggaaaaaacattgaaattggcataatcggtgctgataaaaaattcagggtattgacaccggccgaaattgatgactatttggctgaa

SEQ ID NO: 153741 - DNA, 250 bp, Glycine max
agctgaactcattcatgggaggtgggcaattgctctacatttataggcatctacattggccaggcatggagtggagttccatggtttaaggctgaagcagatcctaatgcattgctcctttctcaattgggtctctcttaggtacccagttgctcctaatggggtgggttgagagcaagagattggtggacttcttcaacccagattctcaatcagttgaatgggccactccattggcaaaaacttgtga

SEQ ID NO: 153742 - DNA, 268 bp, Glycine max
cgggcttgcccgcttcagcggcacaaggcctcgcacgggccgcgttccggtcgggatcggcggcaggaggcagcgaatggtcgtcaccggcggcgcgggcttcgtcgggagccacctcgtcgacaaactcatcgctcgcggtgacgacgtcatcgtgatcgacaatttcttcacgggaagaaaagagaacctggtgcatctgttcgggaaccctaggttcgagctcattcgccacgacgtcgttgatagctaggaccacacccatggt

SEQ ID NO: 153743 - DNA, 264 bp, Glycine max
gttgccacagctgaagggcaagcttaatggaatagcgctccgtgtgcctacacccaatgtttcagttgttgaccttgttgtgaatgttgagaagaagggtcttactgctgaagatgtgaatgcagcattcagaaaggcagctgagggtccactgaaaggtgtgttggacgtgtgtgatgttccacttgtgtctatcgacttccgctgctctgatgtttcctctactattgactcctccttgactatggtcatgggagatgacat

SEQ ID NO: 153744 - DNA, 263 bp, Glycine max
cacgctttttgtcatccaatttccctctcccgtgtcgtgtcgtgtcttcttctctaaaataaaaaaccctaacttctgaacctttcaccgcatcgccaccgattccctatctccactaatcaaagataagaaaatgagtcgacgctcgagctgaactgtctacgttgggaatctacccggtgatatccgtgtaagagaagttgaagatttgtttctgaagtacggacacataacacacatcgacctaaaggttcccccaagac

SEQ ID NO: 153745 - DNA, 265 bp, Glycine max
ctttaggtttggaattgggaattagggttgttcgcgtcacgaagatgatcgaggtggtgttgaacgatcgattggggaagaaggtgcgcgtgaagtgcaacgacgatgacaccatcggcgacctgaagaagctggtggcggctcagacgggcacaagagccgacaagatccgcatccagaagtggtacaccatatacaaggatcacatcactctcaaggattacgagatccacgacggcatgggtctcgaactctactacaacta

SEQ ID NO: 153746 - DNA, 265 bp, Glycine max
cctcagtagtgtcatttacgcttctcttctctgcagcaactatgcctaaccctaaggtcttcttcgacatgaccatcggcggtcaatctgctggccgcatcgtgatggagctctacgccgacgtcactccccgcaccgccgagaacttccgcgcgctttgcaccggcgagaagggcgtagggcggagcggcaagcccctccactacaagggctcgtccttccaccgcgtgatcccgagtttcatgtgtcagggtggcgacttcac

SEQ ID NO: 153747 - DNA, 263 bp, Glycine max
aactgaagtcaagtctgtggagatgcaccatgaatctcttacagaggcacatcctggtgacaatgtgggattcaatgttaagaatgttgctgttaaggatttgaagcgtggttatgttgcctcaaactcaaaggatgaccctgcaaaggaggctgctaacttcacagcccaagtcatcatcatgaaccaccctggtcagattggaaatggctatgcccctgtcctcgactgccacacttctcacattgctgtcaagtgtgctg

SEQ ID NO: 153748 - DNA, 267 bp, Glycine max
ctctctgtgtatttccctacctctcccttcaagatgcagatcttcgtcaagaccctcaccggcaagaccatcacccttgaggtggaaagctctgacaccatcgacaacgtcaaggccaagatccaggacaaggaaggaatccccccggaccagcaacgtctcattttcgccggaaagcaacttgaggacggccgtacccttgctgactacaacattcagaaggagagtactcttcacctcgtcctccgtctccgtggtggcatgcag

SEQ ID NO: 153749 - DNA, 266 bp, Glycine max
gcttcaatttctaattagggtttcgcttagagtaaccaataaccatgggagtcttcacctttgtcgtccgcaaatccggcagcgaatggagcgccaagcaacattccggcgacatcgaggcctccgccgattccaccttcgatctccaacggaagctcgtgcaagccgctctcgccgttgattcctccggtggagttcagtcctctttctctcccgtgtctcctacctccgctgtgttccaggtgatagtgggtggtgcagtattc

SEQ ID NO: 153750 - DNA, 195 bp, Glycine max
ctagccgtggggctcccagataacgctttcgctctctccttcgatcgagccaccgaggccactctacaacgctttattttacccgagatcttgtggaagctgaagcgatggctcaggctcggaatggaagtgagcctgagccggagcctgagacacatcgacaattacctctcccacatcatcaagaagcgcaag

SEQ ID NO: 153751 - DNA, 261 bp, Glycine max
cagagatcggaacgtggaactgcggaaaccggaatatctcacttctcagatcagatcaatccgacgtcgttgcagttataatggctccattcagcggcgatgagacggcaccgtttttcggcttccttggagccgcagctgccctcgtcttctcctgtatgggagctgcctatggcacagcgaagagtggcgtgggcgtggcttcgatgggtgtgatgagaccggagctggtgatgaagtctattgtccctgttgtaatgg

SEQ ID NO: 153752 - DNA, 262 bp, Glycine max
gggtgttcccgctgagaacgatggctgcaaatgtggagctaactgcacctgcaacccctgcacttgcaagtgaggtgttggagagctaaagcttcaagcagaaatggcccttagaaataatgataaagactatatgtagttcaaaaacttcaaattatgtagtatgtattatgttgcactctggtgttttgtgtctaaacaaacacccttagaataaagtggtcatttcttgcccttgagcaagttcaagtgttttggactt

SEQ ID NO: 153753 - DNA, 260 bp, Glycine max
  unsure (1)..(260): unsure at all n locations
agtcgnacgaatcggctcgagattagataaaaggtcaacacagggtctgcctgttgctatgatgattcatgataactcgtcggatcgcacggcctttgtgccggcgacgcatcattcaaatttctgccctatcaactttcgatggtaggatagtggcctaccatggtggtgacgggtgacggagaattagggttcgattccggagagggagcctgagaaacggctaccacatccaaggaaggcagcaggcgcgcaaatta

SEQ ID NO: 153754 - DNA, 257 bp, Glycine max
gtttctgattcctttcttcagaattccaagttttcatttcgttagggacaaaagattgtgagatagagtatggctggaaaaggcgagggtcctgctatcggaatcgatttgggaacgacgtactcttgcgtcggcgtgtggcaacacgatcgtgttgaaatcatagccaacgatcagggtaatagaactaccccatcctacgtggctttcaccgatacagaacggttgatcggcgatgcggcgaagaaccaggtcgc

SEQ ID NO: 153755 - DNA, 257 bp, Glycine max
gtttaggttgggatttgggaattagggttattcgcgtggcgaagatgattgaggtggttttgaacgatcgattggggaagaaggtgcgcgtgaagtgcaacgaccgatgataccatcggcgacctgaagaagcttgtggcggctcagactggcacaagagccgacaagatccgcatccagaagtggtacaccatctacaaggatcacatcactctcaaggattacgagatccatgacggcatgggtctcgaactcta

SEQ ID NO: 153756 - DNA, 216 bp, Glycine max
aaaggattctacccgccgctcgatgggaattgcgcttcaaggcgtctcgtagggctaatccgcctcacgagggtcaccaacggcacgtgcctttggggggccgaggccccctactgctggtcggcaaacggacggcgggcgcacgcgtcgcttctagcccggattctgacttagaggcgttcagtcataatccaacgcacggtagcttcgcgccac

SEQ ID NO: 153757 - DNA, 257 bp, Glycine max
gcgattaatagtgtggaatgctctaactaggcagaaaattcatgccataaagctgccttgtgcatgggtcatgacatgtgctttttcaccaactggtcagtctgttgcatgcggtggtcttgacagtgtttgttctattttcaatcttaattcacccactgacaaggatgggaatctacctgtttcccggatgcttagtggacataagggttatgtttcctcttgtcagtatgttccagatgaagatactcatttaa

SEQ ID NO: 153758 - DNA, 258 bp, Glycine max
atcccctacaaccccttctcagctatgctcaggaaagagtgggattttcagtccctcacaggcacttcttgtgaagccagtgaagaggcagatgatggggaagagcaagggaatgagaattgcatgccaagccaccagcattcctgctgatagagtccctgacatgggcaaaagacagctcatgaatctgcttcttcttggtgccatttcactcccctctgctggaatgcttattccctacacctacttttttgtccc

SEQ ID NO: 153759 - DNA, 254 bp, Glycine max
gaaagagagagagagagagagaaactgagagaaattcgcaaaccctaatttcggaaagatcggcgatggctgcctccaaggatcgcgagagcttcgtctacatcgccaagctcgccgaacaggccgagcgatacgaagagatggtggaatcaatgaagaacgttgcgaatctcgacgttgaactgactgtggaggagcggaatttactttctgttgggtacaagaatgtgattggtgctcggagacatcgtgga

SEQ ID NO: 153760 - DNA, 255 bp, Glycine max
gcaaaggattctacccgccgctcgatgggaattgcgcttcaaggcgtctcgtagggctaatccgcctcacgagggtcaccaacggcacgtgcctttggggggccgaggccccctactgctggtcggcaaacggacggcgggcgcacgcgtcgcttctagcccggattctgacttagaggcgttcagtcataatccaacgcacggtagcttcgcgccactggcatttcaaccaagcgcgatgaccaattgtgcgaa

SEQ ID NO: 153761 - DNA, 255 bp, Glycine max
cggaaagcgaaaaacacccgcagagcttctgcgggaaaataagaggatgctggacaaatcaatcagagaaattgagcgcgagcggcaaggcttgcaaacgcaagagaagaaattgattgcggagataaagaaaagtgccaaacagggccagatgggagctgttagagttatggcaaaagatcttgttagaacaaggcatcaggttgagaaattttataagctaaaatctcagctccaaggtgtatcactcagaat

SEQ ID NO: 153762 - DNA, 254 bp, Glycine max
ggctcattgagtctggtaattggaatgagtacaatctaaatcccttaacgaggatccattggagggcaagtctggtgccagcagccgcggtaattccagctccaatagcgtatatttaagttgttgcagttaaaaagctcgtagttggaccttgggttgggtcgatcggtccgcctccggtgtgcaccggtcggctcgtcccttctgccggcgatgcgctcctgtccttaactggccgggtcgtgcctccggtg

SEQ ID NO: 153763 - DNA, 253 bp, Glycine max
ctcgagccgaatcggctcgagattagataaaaggtcaacacaggctctgcctgttgcttatgatgattcatgataactcgtcggatcgcacggcctttgtgccggcgacgcatcattcaaatttctgccctatcaactttcgatggtaggatagtggcctaccatggtggtgacgggtgacggagaattagggttcgattccggagagggagcctgagaaacggctaccacatccaaggaaggcagcaggcgc

SEQ ID NO: 153764 - DNA, 270 bp, Glycine max
agctatttctgagcttgacaccttgaatgaggagtcatacaaagatagcaccttaatcatgcaacttctcagggacaacctaactttgtggacttctgacatcccagaagatggagaagatgcccagaaagtgaatggcactgccaagcttggtggaggtgaggatgcagagtgagtccgatggatgatggaatcttccataggattcgatgcatgcgtttgggaatgaaacatgagggccgattacttatctgtgtattagctagagat

SEQ ID NO: 153765 - DNA, 142 bp, Glycine max
cggctcgagtgagaactaagaaggagaagcaaatggcttcctcaatgatctcttccccagctgttaccactgtcaaccgtgccggtgccggcatggttgctccattcactggcctcaagtccatggctggcttccccaccag

SEQ ID NO: 153766 - DNA, 252 bp, Glycine max
caagagcaagtttgacaacttgtatgggtgccgtcactctctccctgatggtctcatgagggctaccgatgttatgattgctggaaaggtggctgttgtggctggatatggtgatgttggcaagggttgtgctgctgcaatgaagcaggctggtgctcgtgtcatcgtgaccgagattgatcccatctgtgcccttcaggctctcatggaaggccttcaggttctgaccttggaggatgttgtttctgaggc

SEQ ID NO: 153767 - DNA, 254 bp, Glycine max
cattacctcactcagttcggcagtgtccttattccataagctcccaaaaaatgagttcaaagccattcaccaatttcttggtaatttttactcttgtattgctttgcctggtcggttcaagtcacaccaagtgtgatttcaaggcaattttcaactttggagactcaaattcagatactggtggcttctgggcagcttttcctgcacaatccagtccctttggaatgacttacttcaagaaaccaacaggccga

SEQ ID NO: 153768 - DNA, 252 bp, Glycine max
gaaaaatgcgaaagttcgatccatggcccgttttcttcaagcgcgagtggaaacgcaactggcccttcctcgttggattcgcagtcaccggagctctaatcaccaaactttcccttggccttaccgaggaagaggctaagaattccaaattcgttaaggcgcacaaaaggtgacttctgaatcgtgacatctgcctggctttgcattttatgttaggtttgtcaagattactttgcttgacttgattttatg

SEQ ID NO: 153769 - DNA, 250 bp, Glycine max
ctcgagcgatcgagataactagaaacagtgtgatgaaaatgaaggtccttgttttcttcgttgctacaattttggtagcatggcaatgccatgcgtacgatatgttccctctccgaatgaacactggctatggtgcccgtactccggaggtgaaatgcgcaagttggaggcttgctgtggaagcacacaacatctttggctttgagaccattcctgaagagtgcgttgaagcaacaaaggaatacatcca

SEQ ID NO: 153770 - DNA, 250 bp, Glycine max
gtctttcggttatgtcagttaccacggttgggtatggagaccacgcgttcaagaccatgcacggtcggatctttgctgcgatttggttgcttgtgtcgacgcttgctgtggcccgggcgttcctctatttggctgaggcgagagtggataagcggcataggaggatggcaaagtggattcttggtcaggatatgactgtttctgagtttcttgcagcagacatagacaataatggctttgtgagtaaatc

SEQ ID NO: 153771 - DNA, 256 bp, Glycine max
ggtcggttagtgcttcagcctcagggctttgctattcctcattattcagatatatccaaagtaggttatgtgcttcaagggaacgatggcgtactgggatggccctccgcaacagtactactagagaagaggtggttgtgaagcttaagaagggagatgttataccagtacctattggaagtgtctcgtggtggttcaacgatggggactcagatcttgtcattgtttttcttggagaaacttcaaaggctcttat

SEQ ID NO: 153772 - DNA, 125 bp, Glycine max
gtgctggtgaccagggtcacatgtttggctatgccactgatgaaacccctgaattgatgccattgagccatgttcttgcaacaaaactcggtgctcgtctcaccgaggttcgcaagaacggtacc

SEQ ID NO: 153773 - DNA, 253 bp, Glycine max
cttattgttttcttaaaatttcttccttgccactgccagtgtgacaccaccatggccaccgtcacaacccaagcctccgccgcgattttccggccatgtgcctcgaaatcgaggtttctgaccggctcttccggtaaactcaaccgggaagtgactatgaggccaatggggtgccctccttctgcctctttcaaggttgaagccaagaagggagagtggttacctggcttggcctccccaacttacctcaatg

SEQ ID NO: 153774 - DNA, 254 bp, Glycine max
gagaaaggcgatggacctcggaacctatgaagtgccagaaggagtggacattctaggaagatacgatgcagagtttgcaaaaatcctcacaaaagacgctagaaaattcgttgctgagctgcaacgtgagttcaggagcgatatcaagcatgcattagagagcagaagagaggcaaagaagaagtacaatgaagggactcttccggggtttgatcctgccaccagtcacattagagaccaggagtggctgtgtg

SEQ ID NO: 153775 - DNA, 251 bp, Glycine max
gcaaaacccaactgaggcagagctccaggacatgatcaatgaagtggatgctgatgggaatggtaccattgacttccctgagttcctaaatctcatggccaggaagatgaaggacactgattctgaggaggagctgaaagaggcattccgggttttcgacaaggaccagaatgggttcatctctgctgctgagctccgccatgtgatgaccaacctcggggagaagctcaccgatgaagaggttgatgaga

SEQ ID NO: 153776 - DNA, 251 bp, Glycine max
gcagggtctgctcatgacataatccctgattcagctacatttggaggtacctatagagcattcagtaaaaagagcttctatggactgaggaaaaggatagaagaggttattaaagggcaggcagaagtacataggtgctctggagaggttgagttctgtggcaatgaacatcccacaatccctccaaccacaaatgatgtgagaatataccaactagcacggcaagtgtctagcaagattgttggagaaga

SEQ ID NO: 153777 - DNA, 250 bp, Glycine max
agcaatagtaataggtgtaggaattgaaattactttgccattgggtctttttgccattctgcttggtagaactttgaaaggttctgtttttggaggactcagggccatttcagacctttccattttagctgacaaaggccacaaaaaggaattccctcttcaagaactcttcacccatgaggtcacattagcagacataaacaaagcatttgagctactaaaacaacccaattgtgtcaaagttgtcatc

SEQ ID NO: 153778 - DNA, 248 bp, Glycine max
ggaacgcagagctggacccagaaaagaggctgtacccaggtggcagttacttcgacccactgggcctggcctcagatccagagaagaaagccacccttcaattggcggagatcaagcacgcccgtctcgccatggtgggcttcttgggctttgcagtccaagctgccgccactggcaagggcccgctcaacaactgggccacccacttgagtgacccactccacacaaccatcattgacaccttctca

SEQ ID NO: 153779 - DNA, 249 bp, Glycine max
cacgaagctgttcagcaggttgtttgcgaagaaggaaatgaggattctgatggtaggtctcgatgctgctggtaagacaaccatcttgtacaagctcaagcttggagaaatcgtcaccactatccccaccatcggatttaatgttgagactgtggagtacaagaacatcagcttcactgtgtgggatgttggtggtcaggacaagatccgtccactgtggaggcattatttccagaacactcagggtct

SEQ ID NO: 153780 - DNA, 256 bp, Glycine max
cttagccgttgctctgcttcaacattgcggaagcagaagaagcgccgcagctatggtgaagtactccagagaacccgacaatcccaccaagtcctgcaaggccagaggcgctgacctcagagttcattttaagaacactagggagactgcctttgccatcaggaagttgccccttgttaaagctaaacgatacttagaggatgttttggcccacaaacaggctattcctttccgacgcttttgtggtggtgttggg

SEQ ID NO: 153781 - DNA, 262 bp, Glycine max; identical to SEQ ID NO: 132827

SEQ ID NO: 153782 - DNA, 229 bp, Glycine max
gtacaaagaattattcacttgttctttgagtacccatacaataactttttgcatcacctcgtggaaaacattataatgtcttgcttggagagtaagaattcttctcttctggaacaccttctccgtgattgtgattttgttgggaagattattcaagcagaaaagctattcacgttagaagctgatacaaacaagccaacaatacctgctgaaggtaaatcagcaccca

SEQ ID NO: 153783 - DNA, 250 bp, Glycine max
ctaggacgcagagaagctgatatcaagaacagattcacactgccaccatgtttgacattgaagaactttgaaggattggaccttggaaagatggacaaagctgatgactctggacttgcttcatatgttgccggtcaaattgatcgtactcttagctggaaggatgtgaagtggcttcaaacaatcaccaaactgccaattctggtgaagggtgtgctgactgctgaggacacaaggatagctgtacaaa

SEQ ID NO: 153784 - DNA, 246 bp, Glycine max
gttgagaccaagacacactcgttcatatatctctctgctcttctcttctcttctacctctcaagtttttgaagtataaagatggcagagacattcctattcacctcggagtcagtgaacgagggacaccctgataagctctgcgaccaaatctccgatgctgtcctcgacgcttgcctcgaacaggacccagacagcaaggttgcctgcgaaacatgcaccaggaccaccttggtcatggtcttcg

SEQ ID NO: 153785 - DNA, 249 bp, Glycine max
ctcaactctccaacatagtcttcgctaacaccaaccccaagttccccactgtcctccaaaactacatccgaaacgcgcgtttcaacacctcctccaccccaaagccttcactcatcgtcactccccagaaagaatcacacgtccaagccactgtaatctgcgccaaaagcgttaacattcaactcaaaatcagaagcggaggtcatgactacgagggcatctcgtacatctccgacgaacccttcatca

SEQ ID NO: 153786 - DNA, 248 bp, Glycine max
caaagtctttgggttccggggggagtatggtcgcaaggctgaaacttaaaggaattgacggaagggcaccaccaggagtggagcctgcggcttaatttgacccaacacggggaaacttaccaggtccagacatagtaaggattgacagactgagagctctttcttgattctatgggtggtggtgcatggccgttcttagttggtggagcgatttgtctggttaattccgttaacgaacgagacctcag

SEQ ID NO: 153787 - DNA, 105 bp, Glycine max
cagcgaaaccacagccaagggaacgggattggcggaatcagcggggaaacaagaccctgttgagcttgactctagtacgactttgtgaaatgacttgagcggtgt

SEQ ID NO: 153788 - DNA, 246 bp, Glycine max
gcagggtctgctcatgacataatccctgattcagctacatttggaggtacctatagagcattcagtaaaaagagcttctatggactgaggaaaaggatagaagaggttattaaagggcaggcagaagtacataggtgctctggagaggttaggtcctgtggcaatgaacatcccacaatccctccaaccacaaatgatgtgagaatataccaactagcacggcaagtgtctagcaagattgttgga

SEQ ID NO: 153789 - DNA, 129 bp, Glycine max
gctggtgttattgtcaatcccaaaggagaaatgaaaggttctgctatcactggtcccattggaaaagagtgtgctgatctgtggccaaggattgcaagtgcagacaatgctatcgtctgagtgggaatt

SEQ ID NO: 153790 - DNA, 248 bp, Glycine max
gatccacacaaactcagggtagggcagagagagagagagagagagagagagagagagagaatgggagggtgggctatcgcggtgcatggtggcgctggtgtcgaccctaatctcccactcgagcgccaagaagaagcgaaacaacttctcacgcgctgtctcaatcttggaatctctgctctaaattctaatcttcccgacatagatgtcgtcgaacttgtggtgagggaattggaaacggatccgct

SEQ ID NO: 153791 - DNA, 251 bp, Glycine max
actcagtgaaagagaatccgaggcgaagagaagagaaaaattaagatggaggggaaggagcaggatgtgtcgctgggagcgaacaagttcccggagagacagccgattgggacggcggcgcagagccaagacgacggcaaggactaccaggagccggcgccggcgccactggttgacccgacggagtttacgtcatggtccttttacagagcagggatagcagagtttgtggccacttttctgtttctata

SEQ ID NO: 153792 - DNA, 254 bp, Glycine max
gttcacttggcaaccatcccagtaacaggcactggcattaaccctgctaggagtctaggagctgctgtcatgtacaaccaacagaaggcctgggatgaccattggatcttttgggttggaccatttattggagcagccattgcagccttctaccaccaattcatcttgagagcaggtgctgctaaggctcttggatcattcaggagcaaccccgctatttgagtcaatttaatttcttcttcatgatgagttca

SEQ ID NO: 153793 - DNA, 258 bp, Glycine max
gaaggtggcaccagctggcccaatgtatcaggctgggaccttgagtgggaaccctttggccatgactgcaggaatacagaccctgcagcgtattaaggagccaggaacttatgagtacttggacaaaatcaccggtgagcttgttcagggcattattgaagctgggaagagggcaggccatgcaatatgtggtggtcatataagggggatgtttgggtttttcttcacagaaggaccagtgtataattttgcagatgc

SEQ ID NO: 153794 - DNA, 189 bp, Glycine max
cgaagagaatggctcccaagggtttaatctttttggctgtgttatgcttctcagcactgtcactgagtcgttgtcttgcggaggataatggacttgttatgaacttctacaaggaatcatgccctcaggctgaagacatcatcaaagaacaagtcaagcttctctacaagcgcacaaggacattgtttt

SEQ ID NO: 153795 - DNA, 284 bp, Glycine max
gatctgaatgcgaagaacgaacgagagtgcagcgccacgacaatgggaaggagcactttggctttggttctcgcgattctgatctctttgcagggaaccccccacgttagatccgatgcctccgatcatcgttacaatgacggagactccgttcctctttacgccaacaaagtcggtccctttcagaaccgcagtgatacgtatcggtactttgatctgacattctgtgtaacaggtcgtgagaaagatgtgactgatggcctcggtgaagtgttatatggcgt

SEQ ID NO: 153796 - DNA, 282 bp, Glycine max
gaagtttcattttttagtccaatggcaacttggatattatcagaatgtggcttgaagcctcttgctccagtaattcctagacctagaactggggctgctttgtccagcacctcaagggttgaatttttggacacaaacaaggtagtggcaggtcctaagtttcaacctttgaggtgcaacctcagggagaggaattgggggctgaaagtgagtgcccctttgagggttgcttccattgaagaggagcaaaagagtgttgatttaaccaatgggactaatggg

SEQ ID NO: 153797 - DNA, 280 bp, Glycine max
caaaggattctacccgccgctcgatgggaattgcgcttcaaggcgtctcgtagggctaatccgcctcacgagggtcaccaacggcacgtgcctttggggggccgaggccccctactgctggtcggcaaacggacggcgggcgcacgcgtcgcttctagcccggattctgacttagaggcgttcagtcataatccaacgcacggtagcttcgcgccacaggcttttcaaccaagcgcgatgaccaattgtgcgaatcaacggttcctctcgtactaggttg

SEQ ID NO: 153798 - DNA, 238 bp, Glycine max
ccaccaccgagaccttggtcatgggagtggcacctgttaaggctcaatttgagggtgctgaaatgggtgtgcccgctgagaacgatggctgcaaatgtggaccaaactgctcctgcaacccctgcacttgcaagtgaggtgttgggagagcaagcttcaagcagagatagcccttaattaggaataatgataaactattaatgtgtagctcaaaacttatgtattatgtctgtgatgg

SEQ ID NO: 153799 - DNA, 280 bp, Glycine max
ggttctttaaagaagaaacctttctctttgcgcgtgtcccgttctcttctccaatcctcctccatccccactgtgtgatctgatcctaaaccttatagccatgactaccatggagattaagctatggaatgacaagcgcgaaagagaaatgtatgacaactttggggagctttatgccattatcaaagccactgagaggcttgagaaggcctatgttagagatataatttcaccgacagaatatgagttggagtgccagaagctcatagctcatttcaaa

SEQ ID NO: 153800 - DNA, 275 bp, Glycine max
accacatgccagatgagagtgtgagcacagagaaccacagagacaggctattgagattggtcaaaagcttgtcacccaaggttgtgacacttgttgagcaagaatccaacaccaacacttctccctttttccaaaggtttgctgagaccttgagttactacactgctatgtttgagtccatagatgtggccctccccagagatgataagcaaaggatcaatgcagaacaacactgcgtggctcgcgacattgttaacatggtagcttgtgagggg

SEQ ID NO: 153801 - DNA, 279 bp, Glycine max
atggagcccgtggagaagtgtttgcgggatgccaagatggataagagtaccgtccatgatgttgttcttgttggtggttctactaggattcccaaggttcaacagttgttgcaggacttcttcaacggaaaggaactttgcaagagtattaacccagatgaagctgttgcttatggtgctgcagtgcaggctgcgattctcagtggcgagggtaatgagaaagtgcaggatcttcttttgttggatgttactcctctatccactggtttggagactgcg

SEQ ID NO: 153802 - DNA, 278 bp, Glycine max
atgctcgttgagcaaggggggaagcgccttgtgccagtgggtctaggtgatgatgatcaatgcattgaggatgactttactgcatggaaagaagaactgtggccagcattggatgaattgcttagagatgaggacgatgcaactgtgtctacaccttatactgctgcagttttggagtaccgggttgttattcatgatccattggaagcatctgtcgacgaaaagaagtggcataatgtaaatggtcacgccattgtggatgctcaacatccagtcag

SEQ ID NO: 153803 - DNA, 280 bp, Glycine max
cccgccgctcgatgggaattgcgcttcaaggcgtctcgtagggctaatccgcctcacgagggtcaccaacggcacgtgcctttggggggccgaggccccctactgctggtcggcaaacggacggcgggcgcacgcgtcgcttctagcccggattctgacttagaggcgttcagtcataatccaacgcacggtagactcgcgccactggcttttcaaccaagcgcgatgaccaattgtgcgaatcaacggttcctctcgtactaggttgaattactattgc

SEQ ID NO: 153804 - DNA, 281 bp, Glycine max
gatcaacaacacccccacttcctctccgcttgttttctctgcaaaaaaccactcggggacaatagagacatcttcatgtatagaggggacacgccattttgtagcgaagagtgtaggcaagagcagattgagatagacgaagccaaagagaagaataggaacctttcttcatcgatgaaggctttgaggaacaaggagcagagaaataataatagatccacgtcgccaaacaaggcgcaacaagattactcgttccgtacgggggcagttgcggcggcgta

SEQ ID NO: 153805 - DNA, 286 bp, Glycine max
aagcaaagctcatccttgagttaaaaaatggcagcagcttcttccatggctctctcatccccatccttggctggcaaggccgtgaagctgggcccatcagccccagaagtgggaagggtgagcatgaggaagaccgtcaccaagcaggtctcctcaggaagcccatggtacggcccagaccgagtcaagtacttgggcccattctctggcgagcccccgtcctacctaaccggtgagttcccaggcgactacggctgggacactgctgggctttccgcagacccaa

SEQ ID NO: 153806 - DNA, 279 bp, Glycine max
gccaaggttctcggcagtgaggaggaagctaagaagaagatttacaatgtttcctgtgagaggtactttggattcggctgcgagattgatgaagaaacttctaataagctcgaagggttgcctggtgttctgtttgtgctgccggattcgtatgttgatcctgagaacaaggactatggtgctgaattatttgtgaatggagagatcgtccagagatcacctgaaagacagagaagggtggaaccacagccacaaaggcatcaggacagaccacgatac

SEQ ID NO: 153807 - DNA, 271 bp, Glycine max
tgctggcttcgccaccggaatttggttccgttgctggggtggtgtcgccgccgtggtgacctcctccttgtgtatgatttcatggaaaatgggagcttagataagtacttgtttgatgggccaaaaacaatcttaagttgggagcaaaggtttaaggtcatcaaggatgttgcttcagcccttttgtatcttcatgagggctatgagcaggtggtgatacatagagatgtgaaggctagcaatgtgcttctagatggtggactcaatggaa

SEQ ID NO: 153808 - DNA, 136 bp, Glycine max
atttctttcccgtatttcaaatacttcgtacagtgcccaataagttattgggcgttcttttaatggtttcggtacctacaggattattaacagtaccctttttggagaatgttaataaattccaaaacccatttcg

SEQ ID NO: 153809 - DNA, 193 bp, Glycine max
agagattgttcaagagaaacaaaccatggtagtgaaggtttacggtccccactgtgcttccacaaagcgggtgctggtttgtctggttgagaaggaagtcgaatttgatgttgtccctgttgatgtcactaagggggagcagaaggatcctgagtacctcaaattacagccctttggagttgttcctgtcatc

SEQ ID NO: 153810 - DNA, 275 bp, Glycine max
gtccggagacgtcggcgggggccccggaaagagttatcttttctgtttaacagcctgcccaccctggaaacggctcagccggaggtagggtccagcggctggaagagcaccgcacgtcgcgtggtgtccggtgcgcccccggcggcccttgaaaatccggaggaccgagtgcctcccacgcccggtcgtactcataaccgcatcaggtctccaaggtgaacagcctctggtcgatggaacaatgtaggcaagggaagtcggcaaaatggatccgt

SEQ ID NO: 153811 - DNA, 273 bp, Glycine max
gaaaacacagagagaaacaaaacattacttctttgaacttgatgtgtattgtagcaaatgtccttccgcagtattgttcgtgatgttagggacggatttggaagcttatcaaggcggagttttgatgtaaggctttctggtgggggcaagttgaatagtctggtccatgatgagcacgaatgcctgccagttgtacagaacagccggtgggctagccttccgcctgagcttcttcgtgatgttattaaaagattggaagaaagtgagactaca

SEQ ID NO: 153812 - DNA, 273 bp, Glycine max
gattatctggtgaggggaacgatgatataaaacctcactctcactcgcagatcttcactcacccaaaaccaacctactccaaggaagtcccctaatcagaaccagagatggacaccaaacccaccgagatcagcagcggcaagatgttcggaggttacaacaagagattcaagcatttcagccttaccctgggatgctccatgaacttccacatctacttccctccatctccttctccctctcacaaattccctgtgctgtactttctctctg

SEQ ID NO: 153813 - DNA, 272 bp, Glycine max
gtggagcttgtggcaggcagggaaagtgccattgcccaaatcatcagaacagttaccaacaaagtctacaacatcacattttcagttggagatgccaaaaatgggtgtcatggatcaatgatggttgaagcatttgccgctaaagataccttcaaagttcccttcaaatctgaagggaagggaacatccaagactgtaagcttcaagttcaaagcaattgcaccaagaaccagactcactttctacagttccttctaccataccagaattga

SEQ ID NO: 153814 - DNA, 271 bp, Glycine max
atttctttcccgtatttcaaatacttcgtacagtggccaataagttattgggcgttcttttaatggtttcggtacctacaggattattaacagtaccctttttggagaatgttaataaattccaaaacccatttcgccgtccagtagcaaccaccatctttttgattggtactgtagttgccctttggttaggtattggagcaacattacctattgagaaatccctaactttaggtcttttttaaacttataaaattgattccattttgaa

SEQ ID NO: 153815 - DNA, 273 bp, Glycine max
gtccggagacgtcggcgggggccccggaaagagttatcttttctgtttaacagcctgcccaccctggaaacggctcagccggaggtagggtccagcggctggaagagcaccgcacgtcgcgtggtgtccggtgcgcccccggcggcccttgaaaatccggaggaccgagtgcctcccacgcccggtcgtactcataaccgcatcaggtctccaaggtgaacagcctctggtcgatggaacaatgtaggcaagggaagtcggcaaaatggatcg

SEQ ID NO: 153816 - DNA, 269 bp, Glycine max
gaaaacacagagagaaacaaaacattacttctttgaacttgatgtgtattgtagcaaatgtccttccgcagtattgttcgtgatgttagggacggatttggaagcttatcaaggcggagttttgatgtaaggtcttctggtgggggcaagtcgaatagtctggtccatgaggagcacgaatgcctgccagttgtacagaacagccggtgggctagccttccgcctgagcttcttcgtgatgttattaaaagattggaagaaagtgagac

SEQ ID NO: 153817 - DNA, 275 bp, Glycine max
gattatctggtgaggggaacgatgatataaaacctcactctcactcgcagatcttcactcacccaaaaccaacctactccaaggaagtcccctaatcagaaccagagatggacaccaaacccaccgagatcagcagcggcaagatgttcggaggttacaacaagagattcaagcatttcagccttaccctgggatgctccatgaacttccacatctacttccctccatctccttctccctctcacaaattccctgtgctgtactttctctctggc

SEQ ID NO: 153818 - DNA, 269 bp, Glycine max
atttctttcccgtatttcaaatacttcgtacagtgcccaataagttattgggcgttcttttaatggtttcggtacctacaggattattaacagtaccctttttggagaatgttaataaattccaaaacccatttcgccgtccagtagcaaccaccatctttttgattggtactgtagttgccctttggttaggtattggagcaacattacctattgagaaatccctaactttaggtcttttttaaacttataaaattgattccattttg

SEQ ID NO: 153819 - DNA, 268 bp, Glycine max
ctcatctcttacaacgaaaccctcttcatcttgttctatctgtgacgagcatcatggcctcaagagcagtgttattgttggctatgtgtgtgcttccggcgatggttgtggccattcgcccagcaaagaaccctttttgcgtgaagggtcctgtctactgtgacccttgccgtgctggttttgagacctcagctaccacctacattgctggtgctgagattatgttgcaatgcaagagcagggttagcaacgaggttgtgtacacgag

SEQ ID NO: 153820 - DNA, 267 bp, Glycine max
cgtggcactcccatgattctagacaacaactactacagaaacatattagacagcaagggtctcttgatagtggatcaccaactagccaatgacaagaggaccaagccttatgtgaagaaaatggccaagagccaagactatttcttcaaggagttctctagagccattaccttgctctcagagaacaaccctctcactggcacaaagggtgaggtcagaaagcagtgcaatgttgccaacaagcaccatgatcaggacccttgaatt

SEQ ID NO: 153821 - DNA, 261 bp, Glycine max
cagcagaggatcaggatttgttgcattttcaactcctgaggaagcaactcgagctcttggtgagatgaatggtaaaatgtttgctggaaaacctctgtatgttgcccttgcacagagaaaagaagagagaagagcaaggttacaggcacaattttcacagatgaggcctgttgcaataacgccttctgttgcgccccgtatgcctctctaccctcctggtgctcctggtcttggacaacaatttttgtatgggcaaggacc

SEQ ID NO: 153822 - DNA, 269 bp, Glycine max
  unsure (1)..(269): unsure at all n locations
gccgtgagagccgccgctatctcgagatgttctatgctctcaagtaccgcaaattggctgagtctgtgccccttgctgctgagtaaactgaggataaagagttggataaagaaatggaggaaccggctttttctttctcatttggagtttgtcgcacttgagttttataaataatgtccgtgattttagttttgtgattaagctttcgataagaggagagaaagagaaggaaaaaaaagttgctttttttttggtngttgcagatttgg

SEQ ID NO: 153823 - DNA, 199 bp, Glycine max
cttccggtcgcaccctcctcccttcctccgtctccgatttccgaccggcattcgacgtcctcgatgccgaccgcgacggcaaaatcagccgcgacgacctccgcgccttctacgccggagtcggcggcggaggagatgacgtgatcggggcaatgatgacagtggctgacaccaataaggacgggttcgtggagtacga

SEQ ID NO: 153824 - DNA, 274 bp, Glycine max
catcgatcaattaatttccaatggccgatcagctcaccgacgaacagatctctgagttcaaggaagcctttagcctcttcgacaaggacggcgatggttgtattaccaccaaggaacttgggactgtgatgcggtcgcttgggcagaacccaactgaggctgagctgcaggacatgataaatgaggttgatgctgatgggaatggtaccattgatttcccagaattcctcaatctcatggcgcgcaagatgaaagacactgattcagaggaaga

SEQ ID NO: 153825 - DNA, 266 bp, Glycine max
gccaagggaacgggcttggcggaatcagcggggaaagaagaccctgttgagctgactctagtccgactttgtgaaatgacttgagaggtgtaggataagtgggagctggaaacagcgaaagtgaaataccactacttttaacgttattttacttattccgtgaatcggaagcggggcactgcccctctttttggacccaaggtcggcttcggccggtcgatccgggcggaagacattgtcaggtggggagtttggctggggcggca

SEQ ID NO: 153826 - DNA, 265 bp, Glycine max
gtcactttacattggttgctagcaagtggtatggggaggcaaccctgctgtgacaaacttggggtgaagaaaggtccatggactgctgaggaagacaaaaaactcataaacttcattctctccaatggccagtgctgttggcgagctgttcccaagcttgctgggcttcggcgttgtggtaagagttgtcgtcttcgttggactaattatctaaggcctgacttgaagagagggctcctcacacaggctgaagagcagcttgtta

SEQ ID NO: 153827 - DNA, 267 bp, Glycine max
gtcgtgtcgcagcaaaaccaagccacccactaacttgtttggtccaagacatggctctgatcctgcatgctaccaaaacaaacaagaatgccttcaagactctgattgcggcagagtacagtggcgtccaagtggaattggcccctaatttcgagatgggtgtctctaacaaaactcctgaatttctcaagatgaatcctattggaaaggttcctgttttggaaacgcccgatggtccagtctttgagagcaatgcaatcgctcgta

SEQ ID NO: 153828 - DNA, 269 bp, Glycine max
ctatccactcacctgcctcttcctcacccctttctccatctaacgagtaaggaaaaatggcgcgtaagaagatcagagagtatgactcaaagaggttgttgaaggagcactttaagagactttctggcaaggagttgccgatcaagtctgcacaaattactgcatcaactgatttcactgagctacaagagaaggaaccctggctttcatcttctaaattggttgtgaaacctgacatgttatttggaaagcgtggcaaaagtggtttg

SEQ ID NO: 153829 - DNA, 266 bp, Glycine max
ggctgcaaatgttgaaaagattgtaactactttcttaaaaagtggtgtggtaccaagtcagattggtgtgataacaccttatgaggggcaaagagcttatattgtgaactatatgtcaagaaatggtgctctcaggcagcagctttacaaggagattgaggttgctagcgttgattcctttcaaggaagggagaaagactacatcattctgtcttgtgttagaagtaatgaacatcagggcattggatttctgaatgatcctagga

SEQ ID NO: 153830 - DNA, 267 bp, Glycine max
tgcaaaggattctacccgccgctcgatgggaattgcgcttcaaggcgtctcgtagggctaatccgcctcacgagggtcaccaacggcacgtgcctttggggggccgaggccccctactgctggtcggcaaacggacggcgggcgcacgcgtcgcttctagcccggattctgacttagaggcgttcagtcataatccaacgcacggtagcttcgcgccactggctttacaaccaagcgcgatgaccaattgtgcgaatcaacggttct

SEQ ID NO: 153831 - DNA, 266 bp, Glycine max
tttgccttgatatattgaaggagcagtggagccctgctctaaccatttccaaggtgttgctctcaatttgttccctattgacggatccaaatcctgatgatcctttggtccctgaaattgcacacatgtacaagacagataggaacaagtacgagtcaaatgcaagaagctggacccagaaatatgccatgggctaattgacatatatagaatgagggagagcgattgtttaggcctaacaacctttgtatgaatatttgtggtct

SEQ ID NO: 153832 - DNA, 267 bp, Glycine max
tcgtgaagagttggttgaagcttccgctaccctcatatggattgcttcagctcttcatgctgctgttaactttggacagtatccatatggaggtttaatcctgaataggccaactattagcaggagattcatgcctgagaaagggtctcctgaatatgatgcttagctaagaaccctgagaaggagtttttgaagactattactggcaagaaagagaccctcattgaccttacaattatagaaattttatcaaggcacgcatctgat

SEQ ID NO: 153833 - DNA, 271 bp, Glycine max
tgcaagtttcctatgccattggtgtgcctgagcccttgtctgtgtttgttgacacttatggcactgggaagatccctgacaaggaaatcctcagcattgtgaaggagagttttgacttcaggcctggcatgatctccatcaaccttgatctcaagaggggtggaaatggcaggttcttgaagactgctgcatatggacactttggcagagatgaccctgacttcacatgggaagtggtgaagccactcaagggggagaaggtacctgctta

SEQ ID NO: 153834 - DNA, 268 bp, Glycine max
caaggacggcgatggttgcatcacaaccaaggagcttggaactgttatgcgttcattggggcaaaacccaactgaggcagagctccaggacatgatcaatgaagtggatgctgatgggaatggtaccattgacttccctgagttcctaaatctcatggccaggaagatgaaggacactgattctgaggaggagctgaaagaggcattccgggttttcgacaaggaccagaatgggttcatctctgctgctgagctccgccatgtgata

SEQ ID NO: 153835 - DNA, 265 bp, Glycine max
ctcgagccgtctgtacctatagaggaaacagtgggtgaacttaagaaattggtcgaagagggtaaagtcaaatatattggattatctgaagccagcccagatacaataaggagagcacacgcaattcatcccatcacagctgtgcaaatagagtggtctttgtggactcgtgacattgaagaagagatagtccctctctgcagggaacttggtattggaattgtaccatatagtcctcttggtcgtggcttttttggcagcaaag

SEQ ID NO: 153836 - DNA, 262 bp, Glycine max
ctaaaagcagaattttttcattgcatggtcccctgacacatcaagggtgaggagcaagatgatctatgcaagctccaaagacagattcaagagggagctggatggaattcaagtagagctgcaagcaactgatcctactgagatgggtcttgatgtgttcaaaagccgggccaactaaaatgattatagaaaatagtaggctttctggtgggagcagcactcctaaagcctaagtacaccatggaaaatatcctagtttgtg

SEQ ID NO: 153837 - DNA, 265 bp, Glycine max
ggagagagtagttatggaaggagaagaaggaggaattgcaacaaagaagagagggaaagagggtgaaactgagacgacgcgctacaaaggaatcagaatgagaaagtggggcaagtgggtcgctgagattcgagaacccaacaagcgttcaaggatttggctcggttcttactccacgcccgtcgcggcggcgcgtgcttacgacaccgccgttttccacctccggggcccctctgcgcgcctcaacttccccgagcttgttgcg

SEQ ID NO: 153838 - DNA, 262 bp, Glycine max
ctctcatccccatccttggctggcaaggccgtgaagctgggcccatcagccccagaagtgggaagggtgagcatgaggaagaccgtcaccaagcaggtctcctcaggaagcccatggtacggcccagaccgagtcaagtacttgggcccattctctggcgagcccccgtcctacctaaccggtgagttcccaggcgactacggctgggacactgctgggctttccgcagacccagaaaccttcgccaagaaccgtgaactcg

SEQ ID NO: 153839 - DNA, 245 bp, Glycine max
cggagcctctcttcaggtcaccatctagactgcaatcatggctgatggaccacagcatccatcagttgttcagaagctagctggacagtcttacctggtgtccaggcttagccccaactttaactctaggaattattctgcaactggttcttacgtcaatggcggaatgcactcgcctgggttggctgttgtgtcacctgtatctccagttactgtgcatgctccagcagagaaaggagtgagtg

SEQ ID NO: 153840 - DNA, 266 bp, Glycine max
ggctaatccgcctcacgagggtcaccaacggcacgtgcctttggggggccgaggccccctactgctggtcggcaaacggacggcgggcgcacgcgtcgcttctagcccggattctgacttagaggactgttcagtcataatccaacgcacggtagcttcgcgccactggcttttcaaccaagcgcgatgaccaattgtgcgaatcaacggttcctctcgtactaggttgaattactattgcgacactgtcatcagtagggtaaaat

SEQ ID NO: 153841 - DNA, 266 bp, Glycine max
accaggttacaaagcaccatcttataatccaccagcttacaagtcaccttcctataacccaccaggttacaaagcaccatcttataatccaccaggttaccagccaccttcatacaatccaccaggttacaaagcaccaacttataatccaccagcttacaagtccccttcctataatccaccaatttacaagccaccttcctacaatccaccaggttacaaagcaccatcttataatccaccatcttacaagtcaccttcctata

SEQ ID NO: 153842 - DNA, 268 bp, Glycine max
ccaccacctcctcctaagaagccatacaagtacccatctccgccacctcctgtccatcactaccctcaccctcaccctcccttcgtccattactctcctccaccatctcctaagaagccatacaagtacccatcacctccaccaccagtacaccctccttacactccccacccagtttatcactctcctccaccacctcctaccaacaagccttacatctatgcgtcacctccccctccttaccactattagctagcatagctctatg

SEQ ID NO: 153843 - DNA, 209 bp, Glycine max
caacctacaactactcggacatcacttggtcccagtacggcccatactggcgccaggcccgtagaatgtgcctgatggaattattcagtgctaaacgcttagaagaatacgaatacattagaaaacaagagcttcgtggccttcttaacgaactcttcaattccgcaaacaaaacaattttactaaaagaccacctttccaaccttagc

SEQ ID NO: 153844 - DNA, 216 bp, Glycine max
gtggaggtccgaaccgactgatgttgaagaatcagcggatgagttgtggttaggggtgaaatgaccactcgaacccagagctagctggttctccccgaaatgcgttgaggcgcacagttgactagacatctaggggtaaagcactgtttcggtgcgggccgcgagagcgctaccaaatcgaggcaaactctgaatactagatatgacctcaaaata

SEQ ID NO: 153845 - DNA, 251 bp, Glycine max
aagagaatggctcccaagggtttaatctttttggctgtgttatgcttctcagcactgtcactgagtcgttgtcttgcggaggataatggacttgttatgaacttctacaaggaatcatgccctcaggctgaagacatcatcaaagaacaagtcaagcttctctacaagcgccacaagaacactgctttctcctggctcagaaacatcttccatgactgtgctgttcagagttgtgatgcttcactgttgct

SEQ ID NO: 153846 - DNA, 267 bp, Glycine max
ggagattgctggtttgagagaaatgtttcaggctatggatactgataacagtggtgcaatcactttcgatgaactcaaagctggtctaagaagatatgggtctacccttaaggatatagaaatacgtgatcttatggaagcggctgatgtggacaaaagtggaaccatagattatggggagtttattgctgctacatttcatctcaacaaactagagcgtgaagaacatcttattgcagcattccaatattttgacaaggatggtag

SEQ ID NO: 153847 - DNA, 264 bp, Glycine max
gaagccactgtcaatagaaaccatagaagtggcaccaccccagaaaggtgaagtgcgtttgaggatcctcttcaactccctttgccgtagtgatgtttattggtgggatgctaaggaccagactcctctgtttcctcgtatcttaggccacgaagcttcagggattgtggagagcgtgggcgagggtgtgacacatctgaaaccaggtgaccatgcactcccaatattcactggggagtgtggtgaatgcacttattgtaagtc

SEQ ID NO: 153848 - DNA, 268 bp, Glycine max
gttatgttgaggactatggtgcttttgttcatttgcgcttccctgacggtctttatcaccttactggactaatacacgtctcagaagtgtcatgggatctaattcaggatgtcagagatatcttaaaagtaggtgatgaagtgagggccaaagttgttggtattgattggggaaaatcaaggattaacctatcaattagacagctagaagaagatccactcttagaaactctggacaaagtaatacctcaggatggttcagctgatcc

SEQ ID NO: 153849 - DNA, 269 bp, Glycine max
atcaagtgttagggaggacaaataccgcccctttatgcgcgaagacagtgagaagaacatcaaatggagatatggtgctcctccaaattatgacgttgtcaacaaattatttgatgaaggcagaaccaaggtatggcctccgggttcacttgaagaaaaggtgcagactttagtgaagaattgggagatggaaatgttccacaaggaggatttcaaggataacagatcagtggacccagagaaatacactttcagcctaaacggaagga

SEQ ID NO: 153850 - DNA, 271 bp, Glycine max
ttttcaaacaaccccaaattgaacagtgttgttgggcatctgctgcattcttcaattctagtgccatatcatggatggagaatcagtcataggactcatcaccaacatcatggtcatgttgaaaatgatgaatcatggcatccgttgcctgaaaaattgttcagaagcttggacactgtaacacgtatgttaagattcacagcaccttttccacttcttgcatatcccgtgtacctttggggtaggagtcctggcaagactggttctcact

SEQ ID NO: 153851 - DNA, 280 bp, Glycine max
gggaacggtccttcagaattagcggatgatgacttgccaagtgtgatgacgtgtgcaaattaccttaagcttcctccttattctaccaaggaaattatgtacaagaagctactctatgcaatcagtgaaggccagggatcctttgatttatcgtgagtttctggaactaaccaacccggccctgtatgttaatatgatgatgaatcagggtttactcttgagacttgattattttttggttatatgtactttcctccctgcttctcaaataatggcctct

SEQ ID NO: 153852 - DNA, 266 bp, Glycine max
tccgctttcacttcttctctctcaccctccaactatgagttactacaaccagcagcagccacccgtcggtgttcctcctccccaaggttacccaccgccggaatcttacggaaaggacgcgtaccctccgccagggtaccctccacatggaggataccctccgcaggcgtatccagcacaggggtaccctccaccctacgcgcctcctcagtacgctcagcctccgccgcaacaacaccagaattcatctggcccgggttgcttag

SEQ ID NO: 153853 - DNA, 213 bp, Glycine max
cacagtgctcactgtgattggttacaagagccagagtgatgtaaaggctgggggtgatgtgtgtggtggagttggcattcttggcattgcttgggcctttggtggcatcatcttcattctggtgtactgcactgctggaatctcagggggtcacataaacccagcagtgacatttgggctcttcttggctcgcaaggtgtctttgattagagc

SEQ ID NO: 153854 - DNA, 249 bp, Glycine max
cgcccgccgctcgatgggaattgcgcttcaaggcgtctcgtagggctaatccgcctcacgagggtcaccaacggcacgtgcctttggggggccgaggccccctactgctggtcggcaaacggacggcgggcgcacgcgtcgcttctagcccggattctgacttagaggcgttcagtcataatccaacgcacggtagctacgcgccactggcttttcaaccagcgcgatgaccattgtgcgaatcacggt

SEQ ID NO: 153855 - DNA, 265 bp, Glycine max
gtctctccgcagcagccacacttcttcgccgtttcagctgaagagccatccgcaggtaagcaatggttaagcataataatgttatccccaatgggcacttccggaaacactggcaaaactatgtgaagacttggtttaatcaaccagcccgaaagaccagaagacggttggctcggcagaagaaggctgtcaagattttccccaggcctactgctggatctctcaggcctattgttcatggccagactctgaaatacaacatgaa

SEQ ID NO: 153856 - DNA, 269 bp, Glycine max
gttctccaagcggaactcgccggtgccgcacgcggtcggattttgggactaccactccttcatcgccgccgccgcgactttttgagccggaagggttcggcaccaccgggaacaagacgatgcagatgatggagatcgccgccttcttcggacacgtcggcagcaagacctcttgtggttatggagtggccactggaggacctttggcctggggtctttgttacaatcatgaaatgagtcctatgcagtcatactgtgatgactacttc

SEQ ID NO: 153857 - DNA, 269 bp, Glycine max
actcgttcttcttcgtcgttatcttcttcttttgttgtttgtgtgtttgttttttctctcacctgaaaatgtcttgctgcggtggtaactgtggttgcggaagcgcctgcaagtgcggcaacggctgcggaggctgcaagatgtacccagacttgagctacaccgagtcaaccaccaccgagaccttggtcatgggagtggcaccagttaaggctcaattcgagagtgctgaaatgggtgttcccgctgagaacgatggctgcaaatgt

SEQ ID NO: 153858 - DNA, 266 bp, Glycine max
gcgagtctggcggttcttggagaaagatgcttatcttttctagcgaatgttgtaatagcagaatgcttgctagaagtattctcttttgtgtaacttgggtttgtatgattgcttaaattagctaatacttttagctataattggaactcttgcaccctcttgtgcgtgcgtgctgtgttgcttacatcttgtttgtttgatttttgattgaatatatttccatgcgttttgttctaaaaaaaaaaaaaaaaaaggggcggccgccg

SEQ ID NO: 153859 - DNA, 237 bp, Glycine max
caggacccagacagcaaagttgcctgcgaaacatgcaaaaaccaacttggtcatggtcttcggagaaatcacgaccaaggccaacgttgactacgagaagatagtgcgtgacacctgcaggaacatcggcttcgtctcaaatgatgtgggactggatgccgacaactgcaaggtcctcgtcaacattgagcagcagagccctgatattgctcagggtgtacacggccaccttaccaa

SEQ ID NO: 153860 - DNA, 270 bp, Glycine max
gtttgcaccttgaggggtttcgaccctctccgaccatgggagcctgcttttccggcaccaaagtaagcggctcgaaaggcaatggcgtcaacgtcaacaaaaagcgcagggggaccacgaagaagccgaaatcagagacggcgaaggcgaatccccaacggcacaaggcggcaagttcgcgccacgtgccgtgcgggaagcgcaccgatttcggttacaagaaggatttcaatcagcgttactcgctcggaaaattgctcggacacggcc

SEQ ID NO: 153861 - DNA, 268 bp, Glycine max
ctaggcacaagcaagaaattgtgaggctgctgaaagaggaaggggaagtggtagccatgactggggatggtgttaatgatgctcctgccttgaagcttgcagacattggtattgcaatgggcattgcagggacagaggtggcaaaggaagcttcagatatggtgttggcagatgataattttagttcaattgttgctgctgttggtgagggtagatctatctacaataatatgaaggcctttatcaggtatatgatctcttccaatat

SEQ ID NO: 153862 - DNA, 205 bp, Glycine max
gtttgatcctggctcagaaggaacgctagctatatgcttaacacatgcaagtcgaacgttgttttcggggagctgggcagaaggaaaagaggctcctagcgtgaaggttgcttgtctcgcccaggaggtgggaacagttgaaaacaaagtggcgaacgggtgcgtaatgcgtgggaatctgccgaacagttcgggccaaatcctg

SEQ ID NO: 153863 - DNA, 266 bp, Glycine max
cgttgatgttcacccttgcttcaaggaggagttttttgcttacgacatgactatctcctacgccggccacaacacacccctcgccgccgtccaggtgacggaactcgccgacggagttttcgtcggctgcaccgtcaaccactccgtcaccgacggcacctcgttttggcacttcttcaacacctttgccgccgtcaccaaaggcggcgccgccaaaaaagtcctccgagcaccggactttactcgcgacaccgtcttcaactccg

SEQ ID NO: 153864 - DNA, 269 bp, Glycine max
ccagcacaaagggcgtaggagaagagggtttcgttccgtttcaatggggagcgaagagcagaacggcgaattctacctgcgttactacgtcggtcacaagggcaagtttggtcacgagttcctggagttcgagttccgcccagacggcaagctccgctacgccaacaactccaactacaaaaacgacaccatcatccgcaaggaggtttacctaacccccgccgttctccgcgagtgccgtcgcatcatcgccgagagcgagattatga

SEQ ID NO: 153865 - DNA, 270 bp, Glycine max
gaaagaccggaagccgaaaactgaaattggtaaccaagtgagtccgttacctgagctcattgcagagcctacggatgctcggtccatgtcatttgttggaactcacgagtacttggcaccggagatcattaagggtgaaggtcacgggagtgcggttgattggtggactttcgggatctttctatacgagctgttgttcggtaaaacacctttcaagggatccggtaaccgagctacgttgtttaacgtggtcggtcagccactgcgatt

SEQ ID NO: 153866 - DNA, 272 bp, Glycine max
cagactcagaagcctaacctcgctgggttgtctgaatttctgaaaccattgaatgaagtgatcacaaaagctaccaaattgacagaaggaaggagatctgatttttttaatcacttaaaggctgctgctgacagtctctcagctctagcatggattgcatatacagggaaggattgtggtatgagcatgccaattgcgcatgtggaagaaagttggcaaatggctgagttttacagcaacaaggtgcttgtggagtacagaaacaaagaccc

SEQ ID NO: 153867 - DNA, 267 bp, Glycine max
ctcgagccgcgaagcacatgcgccgagtgcaaagaagcgtttgagctgcacgcggaggcgagtgagttaccgtgcaagcacatctaccactccgattgcatcctcccgtggctctcgatgcggaattcgtgcccggtgtgccgccacgagcttccttccgatttggacactagggttcccagccagatcgacgacgagacgatagggttacgatttggaggcttcccggcggcggattcccgtggggagattctccggcgccggaga

SEQ ID NO: 153868 - DNA, 150 bp, Glycine max
cttgctactgagtttccacactgcataccttaggtcttccgaattccaagttaatttgcaagatggctaaggaaaaggctcagatcaacattgtggtggttggtcatgtggaccctgacgaggcaaccaccattaacgagctgcagaagc

SEQ ID NO: 153869 - DNA, 171 bp, Glycine max
gcgggctgtatgcatgatcagcaacaacactgcagttgctgaggtgttctctcgcattgaccacaaatttgatctgatgtatgccaagagggcctttgttcactggtatgttggtgacggtatggaagaaggagagttctctgaagctcgtgaggatcttgctgctcttga

SEQ ID NO: 153870 - DNA, 270 bp, Glycine max
cacgcgtacgcgggctccgagttcagctcgatgctcgatgggaattgcgcttcaaggcgtctcgtagggctaatccgcctcacgagggtcaccaacggcacgtgcctttggggggccgaggccccctactgctggtcggcaaacggacggcgggcgcacgcgtcgcttctagcccggattctgacttagaggcgttcagtcataatccaacgcacggtagcttcgcgccactggcttttcaaccaagcgcgatgaccaattgtgcgaatc

SEQ ID NO: 153871 - DNA, 262 bp, Glycine max
gagcggcatggatttcttccaccgcgcgaaggcggtgcgcctccgcagccaccacgacaagtacctcctcgcggaggaggacgaggagtcggtgacgcaggaccgcaacggctcctccaaaagcgcacggtggacggtagaatacgtggccgaatacgacaacataattcgcctgaagagctgttacggcaagtacctcaccgcttccaaccacctcttcctcttgggcatgacgggccacaaggttctccagacgcttccc

SEQ ID NO: 153872 - DNA, 265 bp, Glycine max
tgatggggagcatggtattgatagaacttttgaagtagcccaaaaggtctgggcagaggttttcttctaccttgctgagaacaatgtcctttttgagggtattctccttaagcctagcatggttacacctggagccgagtccaaggacaaggccagtcctcagacagttgctgattacaccctcaagctccttcacaggagaattccccctgctgtccctggaattatgtttttgtctggtggacagtctgaggttgaagctacc

SEQ ID NO: 153873 - DNA, 267 bp, Glycine max
caccgcacgaatatcttgttgtttggagcgatccgagaaaaactctgtaaacatgttggtttaccaggacctccttacaggtgatgagcttctctctgactccttccgttacaaggaaattgagaatggaatgctgtgggaagttgaggggaagtgggttgttaaaggagcagttgatgtagacattggtgcaaacccttctgctgagggtggaggagaagatgagggagttgatgatgcagctgttaaggttgttgacattgttga

SEQ ID NO: 153874 - DNA, 234 bp, Glycine max
ggtgcatgttcttcaaaagcatgaccaggtaatttctgggatagactggagcacaagatcaaatagaatagttactgcatcccatgatcggaattcatatgtctggaaccttgaaggatcagaatgggtgcctactcttgttatccttagactaaaccgtgctgctctttgtgttcaatggagtccaaaagataacaaatttgcagtgggaagtggagccaaaactgtttgtat

SEQ ID NO: 153875 - DNA, 263 bp, Glycine max
gtgtagcatctcaccctgatacaaggatgctattcctcaatgctcatatacctttatatctgtatcccttccttaatacaacaagcaagtcaagaccatttgagtacttaaggcttaccagtcttggtgtaattggtgcattggtgaaggttgatgatacagaagttataagtttccttctttcaacagagataattcccctgtgcctgcgcaccatggaaatgggcagtgaactatccaaaacagttgcaacatttattgtt

SEQ ID NO: 153876 - DNA, 258 bp, Glycine max
acgaaaccctcttcatcttgttctatctgtgacgagcatcatggcctcaagagcagtgttattgttggctatgtgtgtgcttccggcgatggttgtggccattcgcccagcaaagaaccctttttgcgtgaagggtcgtgtctactgtgacccttgccgtgctggttttgagacctcagctaccacctacattgctggtgctgagattatgttgcaatgcaagagcagggttagcaacgaggttgtgtacacgaagaa

SEQ ID NO: 153877 - DNA, 257 bp, Glycine max
gtgattgttgtgactcgttcttcttcgtcgttatcttcttcttttgttgtttgtgtgtttgttttttctctcacctgaaaatgtcttgctgcggtggtaactgtggttgcggaagcgcctgcaagtgcggcaacggctgcggaggctgcaagatgtacccagacttgagctacaccgagtcaaccaccaccgagaccttggtcatgggagtggcaccagttaaggctcaattcgagagtgctgaaatgggtgttccc

SEQ ID NO: 153878 - DNA, 257 bp, Glycine max
cagcgatcgaagtttcacatcagccttatccagtttagggtttcggttccttaccctacctttgacgtatcgaaaccttaaatttgggattaggtctgagcaatctggttggtagaacctttggtcttagagagtcaagttttatgtctggattagacgatcaaattcctactgccttcgatccttttgctgatgcaaatgctgatgactcgggtgctgggtcaaaggagtatgtgcatattcgcgttcagcagcga

SEQ ID NO: 153879 - DNA, 260 bp, Glycine max
taaaaaagagctgaggagacggacatcatgcctgcccagcagcccaccgtgttcaagcgtttcgtcgaggttggccgtgtcgttctcgtcaacgacggcccctctgccggcaagctcgccgtcattgccgagatcatcgaccacaaccgggcgctcattgacggccccacctccggtgtcccccgccagtcgctcccttaccgcaacatgatcctgaccccttacaccatcgcctcgctcccccgcggtgccggctcggg

SEQ ID NO: 153880 - DNA, 264 bp, Glycine max
ctcgagccgttctggtgcatcctcagatctcaggcaagcaaccagtctggcaagggaaatggttaccaaatatggcatgggcaatgaagttggactagtcactcacgattacaaagatgatggtaggagcatgagctcagagactaggcttcttattgagaaagaggtgaagcaattcctggagagggcctacaacaatgcaaaaactattctgaccactcacaacaaggagcttcatgcacttgcaaatgcccttctggagca

SEQ ID NO: 153881 - DNA, 230 bp, Glycine max
cactgatgcttccattaaagaaatgattccacctggtgctcttgtcatgcttacaccccttgttgttggaatcctttttggtgtcgaaacactttctggtgtcctagctggatctttggtgtctggtgtacagattgctatctctgcatccaacaccggtggtgcttgggataatgccaagaagtacattgaggctggtgcttctgagcatgcaaggagccttggtccaa

SEQ ID NO: 153882 - DNA, 123 bp, Glycine max
atcgacatgaccatcggcggtcaatctgctggccgcatcgtgatggagctctacgccgacgtcactccccgcaccgccgagaacttccgagcgctttgcaccggcgataagggcgtagggcgc

SEQ ID NO: 153883 - DNA, 236 bp, Glycine max
ctcttctctcggtttcatcgccatggatgaagaagtgcgcaagatcttcagcaagttcgacaagaacggcgacggcaagatctcgtgcgccgagctgaaggagatgatggtggcgctgggatccaaaacgacgtcggaggaggtgaagcgcatgatggcggacttgatcggaacggcgacggctacattgacctgaaggagttcggcgagttccattgcggcggcggcgacgggag

SEQ ID NO: 153884 - DNA, 253 bp, Glycine max
cacaaacactcacactctctctttctttcttcctgctgctacaatatggagcctctctcttccaccaaacacaacaacaatctctccaagccttcctccctccacacggaggctccgccgccggaggccagtcccctccggaagatcatggtggtggcctccatcgccgccggggtgcaattcgggtgggccctacagctctctctacttaccccttacgtccaactgctggggattccccacacttgggccg

SEQ ID NO: 153885 - DNA, 258 bp, Glycine max
attttgcgggtatttgtgagtgtgtgagagagagagcgagcagtttcagacacagagagaggggtttgggattggagggattgacgctgcgtctcttcctcttctctttcgatccatccctcattcctaatcctccaatccaaccacctcagcctcacactcacatatacacatatctgaacgcgtatcgtccctcctatggcttcaaagcgcatcctcaaggagctcaaggacttgcagaaagacccaccaacttct

SEQ ID NO: 153886 - DNA, 260 bp, Glycine max
gtgtaggataagtgggagctggaaacagcgaaagtgaaataccactacttttaacgttattttacttattccgtgaatcggaagcggggcactgcccctctttttggacccaaggtcggcttcggccggtcgatccgggcggaagacattgtcaggtggggagtttggctggggcggcacatctgttaaaagataacgcaggtgtcctaagatgagctcaacgagaacagaaatctcgtgtggaacaaaagggtaaaagc

SEQ ID NO: 153887 - DNA, 260 bp, Glycine max
gctctttccattgtgcaagcaagattggttggactagcccacttttccgtaggttatatatttacttatgcagccttcttaattgcctcgacttcgggcaaatttggttaatttcattaattctttattattatatctggcatatcatttccttctatggggaaggaaggccatttatacatctaggatccgacttctatcattgatactaataggaaatgaaccactatggcaaggaaaagtgtgattcagagggagaa

SEQ ID NO: 153888 - DNA, 261 bp, Glycine max
agccaacacacggtgtttgagatagcagaccatctgagaaaattcgggtggatagttccggcctatacaatgccaccggacgcgcaacacatagcggtcctccgggtggtgatcagggaggatttcagccgtggcttggccgagagacttgctgctgacatagagaaggttgtgaagctcttggacacacttcctagccccctcactaccaaagttgctcatatcacagccatcactagtgagactagtgagactagtgag

SEQ ID NO: 153889 - DNA, 253 bp, Glycine max
gctttcaagagacaaactgctttgaaaaatgggatccaaggttgttgcatccgttgcccttctcctctccatcaacattcttttcatttccatggttagctccagcagccactacgatccacagccccaaccttctcacgtcactgctcttattacacgacctagttgtccggatctgagtatttgcctcactattttaggcgggtctctcggaacccagacagattgttgtgccctcatcggtggtcttggt

SEQ ID NO: 153890 - DNA, 269 bp, Glycine max
atggtcaattgtgagattgattcatgtgcctattgcgtactatgctgtaatggtacatgcttatcaggtaaattggagcaccttgaagtgctcccttatgaagctgtggcagtgaacttcgccataagtctgcaccatgtgccagatgaaagtgtgaacagtcacaatcatcgtgaccaattgttgagattggcaaagcgattatctcctaaagtggtgactctggttgagcaggaatttaacaccaacaatgcgccattcttgcagcg

SEQ ID NO: 153891 - DNA, 260 bp, Glycine max
ctgctatcgataacatatttcacttgagacagttatctttatctacgcaagagaagaatagaaaatggatatcaggttgatggatttggactctccattgttcaacactctgcaccgaatcatggatctgacagaggacgcagagaagaacttgaacgctccgacgcggacatacgtgcgcgacgcgaaggcaatggctgcgactcctgcggacgtgaaggagtaccctaactactacgtgttcgtgatcgacatgccag

SEQ ID NO: 153892 - DNA, 266 bp, Glycine max
gtcggatccatctccgtaattctagatcgcgagcggccgcgcgcgatgctatgtggtcaactctcttagcttagacgacgttgaccctaggcttttatctctgtgtggcaaggcctaagccaatgtcaaggtcacttccgccgccgagcaggactaccgcaaaaaagttctccgcgaactcaactccgtgttctccggctcctcctcctcctccgccgcctccgacgacgtcgacgaggaggtcaccgacaccgagtggttcttcc

SEQ ID NO: 153893 - DNA, 257 bp, Glycine max
gctcttccacctggttatgttttgaaatctcaaatgaaggctttgttagaggaagaaacgtggcccggtccggttcactcgagccgtggctcgagcaacacggtgacttcaaccgggttttcctcataggagacagttctggcggaaactcggtgcatgaggtggccgcgagggccggttcggcggacctaagcccggtccgggtcgcgggggcaattccggttcaccccggttttgtccggtccaaccggagccgg

SEQ ID NO: 153894 - DNA, 264 bp, Glycine max
gagaggctctatggtctcgcccccgttgctaagtacctggtcaagaccgaagatggtgtcctccattgctgctcttaacctcatgaaccaggacaaagtcctcatggaaagctggtactatttgaaagatgctgtccttgaagggggtattcaattcagcacatcagatggaatgacagcctttgaataccctggatcagatccacggtttaacacggttttcaacaaggggatggctgatcactccacaatcacaatgaagaa

SEQ ID NO: 153895 - DNA, 256 bp, Glycine max
  unsure (1)..(256): unsure at all n locations
tctagggttgacatttctagatttaattgtgatccagattgagaatctcaattccaaatatggaagcaatgttcctttgcttttgatgaattcattcaacactcatgatgacactcaaaagattgttgaaaaataccaaaactccaatattgagattcatacttttaaccagagccagtatcctcgattggttgcngaggactttctgccangcctccaacggggacactgannggnggctggtacccncctggcg

SEQ ID NO: 153896 - DNA, 262 bp, Glycine max
agacttaacaacagcacaaagcgggttactgtctgttcaagctaccatctctctctctctttcttagtgcctccttgccagaagttaaaatggcccaagaaactttcctattcacatctgaatcagtgaacgaggggcaccctgacaagctctgtgaccagatctccgatgctgtgctcgatgcatgcttggagcaggaccctgacagcaaggttgcctgtgaaacctgcaccaagaccaacatggtgatggttttcggaga

SEQ ID NO: 153897 - DNA, 260 bp, Glycine max
tgtttatccatggacttccatagctcgggttcggtactgagcaatcccacattcttcgagttccctttagaactcagaagggccttgttcgtcagcggtgctaaaatttggaagacgggccaaactaggtccctcatattaactagcttgctgaagctccgatggagtggtgtaaccatcgaagccctttggcgtaccgagcaattttgggtcattggaggtgttcctgctcaccttttcgccgtgttccaaggcctcct

SEQ ID NO: 153898 - DNA, 197 bp, Glycine max
ctcgagttgaacctttgaggtgtaaccttagggagaggaattgggggttaaaagtgagtgtccctttgaggattgcttccattgaagaggaggagcaaaagagtgtcgatgtaatcaatgggagtaatggggttgagcatgagaagcttccagaatttgaccctggtgctccaccaccattcaacttagctgatatt

SEQ ID NO: 153899 - DNA, 262 bp, Glycine max
gagaatccgaggcgaagagaagagaaaaattaagatggaggggaaggagcaggatgtgtcgctgggagcgaacaagttcccggagagacagccgtttgggacggcggcgcagagccaagacgacggcaaggactaccaggagccggcgccgacaatattggtttacccgtcgagattgtcgcactgaacgttttcaagcgcggggttatcgcatctaatgccaactttcccgttccaagaaatcatggacttaaccgtcatg

SEQ ID NO: 153900 - DNA, 105 bp, Glycine max
ttcacgactctgatgtcttctatgacctcaagcagatgcttattcaaagtaacagtcctgttccacctgaactggcaaggcacgaggcttcaaaattcaagccag

SEQ ID NO: 153901 - DNA, 271 bp, Glycine max
gaaaatttctgcccagaattcttgggtgggaaaaggtggggctttcacgggagaaatcagtgtggagcaactaaaagaccttggctgcaagtgggttattcttggacattctgagcgaagacatgtaattggagaaaatgatgagtttatagggaagaaggctgtctatgctttgagtgagggtctaggtgtgatagcatgtattggggaactgttacaagaaagagaagctgggaaaactttcgatgtttgttttcagccattgaaggcc

SEQ ID NO: 153902 - DNA, 238 bp, Glycine max
ctctctacaatttttttttaatctttttgattcgcttctggcttttttgactctaaattgggacgaaaagtcgagccttcgaagaaacgcagaaactcataaaccatcgctgactccgcaattttcgtcggttcctcacacactctctgatttaacctcggtgccaagctcaccgaggttcggaagaacgggacatgcccttggctgagacctgatggcaagacccaagtcactgttg

SEQ ID NO: 153903 - DNA, 263 bp, Glycine max
tggatcttgagattaggcgtcgagaatccacaggatcagggaccaacacccatgttgagacagaaacattggctaaatttgagttgatggatggtgctcctgttagaggtgaatcaattccaatcagattgttcctcagtccctatgagctgaccccaacacatcgtaacattaataacaaattcagtgtgaagtactttttaaatcttgtgttggttgatgaagaggacaggcgatatttcaagcagcaggaaatcacaatg

SEQ ID NO: 153904 - DNA, 264 bp, Glycine max
gtgattgttgtgactcgttcttcttcgtcgttatcttcttcttttgttgtttgtgtgtttgttttttctctcacctgaaaatgtcttgctgcggtggtaactgtggttgcggaagcgcctgcaagtgcggcaacggctgcggaggctgcaagatgtacccagacttgagctacaccgagtcaaccaccaccgagaccttggtcatgggagtggcaccagttaaggctcaattcgagagtgctgaaatgggtgttcccgctgaga

SEQ ID NO: 153905 - DNA, 267 bp, Glycine max
gaaagccccgcgctcctcacctcgttactctccgattagggttgcaaccgtggagcccgacacttcaactgtcgactacaactctgcgttctcagtgtttcctgcagaagcatgcgaaactgtaggaggggaagcctgcatggcggagatgtaccctgaaacgaagctacagccagatgctaagagtccacgagtcgttacagagaacgttgagagagagtatcttgaatacgatgatcctaaaacggtatttcgaggagaggcttg

SEQ ID NO: 153906 - DNA, 269 bp, Glycine max
gctttcaagagacaaactgctttgaaaaatgggatccaaggttgttgcatccgttgcccttctcctctccatcaacattcttttcatttccatggttagctccagcagccactacgatccacagccccaaccttctcacgtcactgctcttattacacgacctagttgtccggatctgagtatttgcctcaatattttaggcgggtctctaggaaccgtggatgattgttgtgccctcatcggtggtcttggtgacattgaagccattg

SEQ ID NO: 153907 - DNA, 185 bp, Glycine max
tctcgagccgcaatctggctacgagcgctctacacgcgatgcagacgcagatgagacgacgcagccatggggcgaagacccgcgaggtgttatatgcaaattaagaacaaaccataccccaagtcacggttttgccgtggtgttcctgatcccaagatcaggctttacgatgttcgtatgcagaa

SEQ ID NO: 153908 - DNA, 262 bp, Glycine max
cccgaacccgtcggctgtcggtggactgctcgagctgcttccgcggcgagagcgggacgtcgcgtgccggtcgggggacggattgggaacgggcccttcggggcctcttccccgggcgtcgaacagtcaactccagaactggtacggacaaggggaatccgactgtttaattaaaacaaagcattgcgatggtccctgcggatgttgacgcaatgtgatttctgcccagtgctctgaatgtcaaagtgaagaaattcaacca

SEQ ID NO: 153909 - DNA, 258 bp, Glycine max
tctcgagccgattcggctcgaggtagtcatatacttgtcggttcttcggagaagaagctgcagaacgctcttaactacgcttgcggagagggtggggctgattgcactccaattcaaccaggtgccacgtgttacaatcctaacaccttggaggcacatgcttcctacgccttcaacagttactatcagaagaaggcacgtgcatccggcacgtgcgattttggtggcactgcttatgtcgtcactcagccccctaag

SEQ ID NO: 153910 - DNA, 257 bp, Glycine max
ggctaatccgcctcacgagggtcaccaacggcacgtgcctttggggggccgaggcccctactgctggtcggcaaacggacggcgggcgcacgcgtcgcttctagcccggattctgacttagaggcgctcagtcataatccaacgcacggtagcttcgcgccactggcttttcaaccaagcgcgatgaccaattgtgcgaatcaacggttcctctcgtactaggttgaattactattgcgacactgtcatcagtaggg

SEQ ID NO: 153911 - DNA, 238 bp, Glycine max
aattccacgcggaggagctcccccggcattgtcagcgcattacctggcggaggagctgtcggaggactacggatatctctcggagctggcgttccgaggggactatgaaacgtgcctggtgtacacggaggagatgaaagagcggtgcgtggagcagttcaagcaggggacggtgtgtatggaacagctggcagcggtggaagggttgtgtgaattggtgaggaaggcggttggggcg

SEQ ID NO: 153912 - DNA, 132 bp, Glycine max
agaagaacaagtagttgagaactaagaaggagaagcaaatggcttcctcaatgatctcttccccagctgttaccactgtcaaccgtgccggtgccggcatggttgctccattcactggcctcaagtccatgg

SEQ ID NO: 153913 - DNA, 263 bp, Glycine max
caaggacggcgatggttgcatcacaaccaaggagcttggaactgttatgcgttcattggggcaaaacccaactgaggcagagctccaggacatgatcaatgaagtggatgctgatgggaatggtaccattgacttccctgagttcctaaatctcatggccaggaagatgaaggacactgattctgaggaggagctgaaagaggcattccgggttttcgacaaggaccagaatgggttcatctctgctgctgagctccgccatg

SEQ ID NO: 153914 - DNA, 263 bp, Glycine max
ttctaatcctccctctctctaactttcacacgcagcggcttcttcttccgttttcctgaatcggtgtgaacaatggcgacgtacgctgcgatgaaacccaccaagccagggttggaggagtcccaggaacagatccataagataaggatcaccctttcttccaagcacgtcaaaaacctcgagaaggtttgtgcggacttggttcgtggtgcaaaggacaagcgcctcagggttacgggacctgttaggatgcccagtaaggt

SEQ ID NO: 153915 - DNA, 268 bp, Glycine max
acaaaattggtggtattggtaccgtgccagtgggacgtgttgagactggtgtcgtgaagcccggtatggtggtgacttttggtcccactgggctgacaactgaggttaagtctgttgagatgcaccatgaggctctcacagaggctcttccaggtgacaatgttggctttaatgtgaagaatgttgcagtcaaggatctcaagcgtggttttgttgcatccaactccaaggatgaccctgccaaggaagctgccaacttcacatctca

SEQ ID NO: 153916 - DNA, 265 bp, Glycine max
ctttgaggagcttatggattatgcaatctcaagaggtgcgtccataaatcaatctgcaaccccagttacaccgccaccatcagtagaacccaagccacagccagtctctgctccttcaccaaaggtgagcactaagttttctgatgtgttggcattcagtgggccagcacctgagaggatcaatggaaggttggccatgattgggtttgtggctgcaatggcagtggaagtagccaaagggcaaggtgtgttagaacaaatatcc

SEQ ID NO: 153917 - DNA, 259 bp, Glycine max
gcaacagagtcctgatattgctcaaggtgtgcacggccacctcacaaagaggcctgaggagattggtgctggtgaccaaggtcatatgttcggctatgccactgacgagactcccgagctcatgcccttgagccatgtccttgccacgaagctcggtgccaagctcaccgaggttcggaagaacgggacatgcccttggctgagacctgatggaccactgatgaatgattacgatcacgattaattcggccccgacagt

SEQ ID NO: 153918 - DNA, 262 bp, Glycine max
cggtgctgttactttgaagaaattagagtgctcaaagcaagcctacgctctgtatacattagcatgggataacaccacaggattctgatcctattgtgttggccttcgggatcggagtaatgattaacagggacagtcgggggcattcgtatttcatagtcagaggtgaaattcttggatttatgaaagacgaacaactgcgaaagcatttgccaaggatgttttcattaatcaagaacgaaagttgggggctcgaagacga

SEQ ID NO: 153919 - DNA, 222 bp, Glycine max
gtcttggggctaatgtaggatctgctcaaggacctacaggtttaggtaaatatctaatgcgttccccgacaggagaagttatttttgggggagaaactatgcgtttttgggatttgcgtgctccttggttagaacctctaaggggtccgaatggtttagacttgagtagactgaaaaaagatatacagccttggcaagaacgccgttctgcggaatatatga

SEQ ID NO: 153920 - DNA, 268 bp, Glycine max
aaaaatgattgaagtttttctatttggaatcgtgttaggtttaattcccattactttggctggattatttgtaactgcatatttacaataccgacgaggtgatcagttggatctttgattaattaatgtctctttttttgcggattccctatttttttgttttaatcctaatctacaaggattaaattcagactttttaatgttcaattatttcagtgtaattatcattcgaaacatacaagaatcacgttctgtaggatttgaatca

SEQ ID NO: 153921 - DNA, 190 bp, Glycine max
tgtttatccatggacttccatccctctgcttgcatactgcacaattccagctgtgtgtctcctgactggaaagttcatcatccccacactaaacaaccttgctagcatttggtttatggctctatttatctccatcatttggactagcgtgctggagctccgtggaattggggtgaccttcgaagccctg

SEQ ID NO: 153922 - DNA, 253 bp, Glycine max
gagaatccgaggcgaagagaagagaaaaattaagatggaggggaaggagcaggatgtgtcgctgggagcgaacaagttcccggagagacagccgattgggacggcggcgcagagccaagacgacggcaaggactaccaggagccggcgccggcgccactggttgacccgacggagtttacgtcatggtccttttacagagcagggatagcagagtttgtggccacttttctgtttctatacatcactggctta

SEQ ID NO: 153923 - DNA, 205 bp, Glycine max
aaaaaaaaaaaaaaaaaaaaaaaaaaaaaaaaaaaaaaaaaaaaaaaaaaaaaagaaaaaaaaaaaaaaaaagaaaaaagaagaaaaagaaaagaagagaaaaacggttaaaggtgaatcaattccaatcagattgttcctcagtccctatgagctgaccccaacacatcgtaacattaataacaaattcagtgtgaagtacttt

SEQ ID NO: 153924 - DNA, 187 bp, Glycine max
agtcctttctctgctctttgccttctctgacacatttggtgccttgtagagcgtgttttggcaggaaggtggtatggcgaaggacgttgaggttgctgagcgtggctccttctctgggaaggactaccaggaccctccaccagcaccactcattgatgctgaggagctcacaaatgggtcttttaca

SEQ ID NO: 153925 - DNA, 257 bp, Glycine max
acgagctctttcgaatttcgatactttgatcagatccacaacacttcttcatccatgacgcttggttcttcaggatccagtgtcgtggttccaaggaacttcagattgctggaggagcttgagaagggagaaaaaggaataggagatggcacagttagttatggaatggatgatggtgatgacatttacatgcgctcttggcatggagccattattggtccctataatactgtacatgaaggaagaatttatcaatt

SEQ ID NO: 153926 - DNA, 252 bp, Glycine max
tctatctcttgtctgtgcatgctgacacttatggcactgggaagatccctgacaaggaaatcctcaggattgtgaaggagagttttgacttcaggcctggcatgatctccatcaaccttgatctcaagaggggtggaaatggcaggttcttgaagactgctgcatatggacactttggcagagatgaccctgacttcacatgggaattggtgaggcgactcaagggggagaaggtaccacttaactataagg

SEQ ID NO: 153927 - DNA, 118 bp, Glycine max
tgccagctttcttagatgctagtgaacgcggagtccatcacaacgtcatatagagattcggcgttgatcatacagtactcgctaatatcccatgctataggcaacatggatatggggt

SEQ ID NO: 153928 - DNA, 256 bp, Glycine max
gcaacagagtcctgagagggtgagtgcgaccatgggacccttgttttgggggttgaataaattgaaattgttgaggatttcttccgaggatgagcttgcggggatggatcttacccgtcatggaggatttgcttttttgcctttgttttctctttcccatgtcgtttaggggattgcggtgttatggatatcatttcgaaacccttcccctttgaatccttcctttcctttctaaaatatcagtatcatgtggttc

SEQ ID NO: 153929 - DNA, 262 bp, Glycine max
ctttcaagagacaaactgctttgaaaaatgggatccaaggttgttgcatccgttgcccttctcctctccatcaacattcttttcatttccatggttagctccagcagccactacgatccacagccccaaccttctcacgtcactgctcttattacacgacctagttgtccggatctgagtatttgcctcaatattttaggcgggtctctaggaaccgtggatgattgttgtgccctcatcggtggtcttggtgacattgaag

SEQ ID NO: 153930 - DNA, 163 bp, Glycine max
  unsure (1)..(163): unsure at all n locations
ntgtctgaacaatgcaaaaggagcaacagttggtgatgcggtgaagaagcttggtttgtggggtctctttacgcgtggtctccccctccgaattgttatgattggaactcttactggagcccaatggggaatatatgatgcattcaaagtcttcgtcggattg

SEQ ID NO: 153931 - DNA, 261 bp, Glycine max
gatccctccctgaaacgctcccgtcaggcaatgctctggaaacaccaggttttcatcgtggaaggtgaccttgacgacacccccttgcttgagaagctcttcgacgttgtccccttcacccacatcctccacctcgccgctcaggctggcgttcgctacgccatgcagaacccccaatcctacgtcaccgccaacattgctggcttcgtcaacctcctcgaggctgccaaatccgccaatccccaacccgccatagtctgg

SEQ ID NO: 153932 - DNA, 249 bp, Glycine max
caaaagctcatggtggtttctctgtgtttgctggtgttggagaacgaacccgagagggtaatgacttgtacagagaaatgattgagagtggtgtcattaagcttgatgataagcagagtgaaagcaagtgtgctcttgtgtatggtcaaatgaatgagccccctggtgcccgtgcccgtgttggtcttactgggcttactgtggctgaacacttccgtgatgctgaagggcaagatgtgcttcttttcg

SEQ ID NO: 153933 - DNA, 242 bp, Glycine max
gcgacgctctctacacgctgaaacggatcctctcggaccctgacaacgtcctccagagctgggatcccactctcgttagtccctgtacttggttccacgtcacctgcaacctggacaaccgagtcactcgagtggatcttggtaactctaacctatctggacatttggtacctgaacttgggaagctggagcatctacagtatcttgagttgtacaaaaacaacattcaaggaactattcct

SEQ ID NO: 153934 - DNA, 241 bp, Glycine max
tagatggcaatttcttaccaaattagaaattctggtgtcttctttttcctttgtgttcttctctttggtgtgtctgatctgggtcgaccagccacttttctgcaagactttcatgtcacgtggtctgactcccacatcaagcaacttctgcaaggcagggcaagccaactcagacttgaccagagctctggatgtggatatgcttccaaggtgaagtacatgtttcgggcgtgttagcatg

SEQ ID NO: 153935 - DNA, 243 bp, Glycine max
  unsure (1)..(243): unsure at all n locations
gtacacccctgaccccttgatttctctcagttccgttctgcatcatagagtaaggccanccacgatcttcgattcttcnanttgaacacaagcgctaagataccttccgttggtttgggaacgtggctcgctgaatctggcgttgttgctcgcgccttggtcactgcaataaacgttggatatcggcatatagattgtgcgcaaatttatggcaatgaaaaggagattggtgctgccttgaag

SEQ ID NO: 153936 - DNA, 247 bp, Glycine max
gagcttgattatctagttggggctgtgtcaaaccccaagagaccatttgctgctattgtcggtggatcgaaggtgtcttccaagattggagttattgaatccttgttggagaaagttaatgttctcttgcttggtggaggaatgatctttaccttttacaaggctcagggttattcagttgggtcatctcttgtggaggaagacaagcttagccttgcaactacacttcttgaaaaggccaaggcta

SEQ ID NO: 153937 - DNA, 240 bp, Glycine max
  unsure (1)..(240): unsure at all n locations
ctaaaatacgtaaccaggcgtctcacagtcgccgtcctgtcaagagcgctaatgaacgttctcattaccacgcangagtaccgggagccctgaaccgcccgctgctcggcggatcccagctgcggtggcgacggcgggaaggcgctttccgctgttcctcagcgggccgggcccttgaccagcgcggcccgcaggtcttccttctcgccgtcttgcagttgaagagctacatacgtagtc

SEQ ID NO: 153938 - DNA, 235 bp, Glycine max
aattgctgcagtccctaaacaacgacaaactcttatgtctagtaaatgatcagcttcatcaagcaccaagaccttcacacccatcagcctagttgcaaaaccagcagtattctcagtatgatctcttagccttccaggagtagcaacaaggatctggcaagggtttgcctgcatccgtttctgctctaaagcaagtcttgtccctccaatcacgacttgtacaccaatggttggt

SEQ ID NO: 153939 - DNA, 235 bp, Glycine max
gtggtttcagtgagtgatcggtgttcacttgatccttcataagtcgtcatcatcatcatcatcatcaccgttgattgaagaagatgccgatcagaaacatcgccatcggaaggcctgaagaggctactcaccccgacacgttgaaggcggggttggctgagttcatctccaccttgatcttcgtgttcgccggttcaggttccggcatcgcctacaacaagctcaccgacaacgg

SEQ ID NO: 153940 - DNA, 242 bp, Glycine max
caccattccagaacaagatgaatgggtatacagtgatggaaagtcgacaacttgtgttgcctttatcctttctatgtataaagaggctgaagtttttggtcccattgctaattccattcaagtaaccgagttcaccattcgcgatgcatacatgctcagaattttcgaggacaaccaaacacgcctaccaagttggtgcaacaatgagaatgaccggattccattctgtcagattcttggtg

SEQ ID NO: 153941 - DNA, 238 bp, Glycine max
cgcaacaaaaagaaagaatcccaggcgaggagaaacatggaggggaaggagcaggatgtgtcgttgggagcgaacaagttccccgagagacagccgattgggacggcggcgcagagccaagacgacggcaaggactaccaggagccggcgccggcgccgctggttgacccgacggagtttacgtcatggtcgttttacgcagcagggatagcagagtttgtggccacttttctgtttc

SEQ ID NO: 153942 - DNA, 233 bp, Glycine max
tagcagactctgctgcagtgagtcgtcgatgcagagtacctcaaggaggtcgacaaggctcgccgcgatctccgcgcactcatcgctaccaggaactgcgctcctctcatgctccgattagcctggcacgatgccggaacttacgatgctaagaccaagaccggtggacctaacggttcgatccggaacgaggaagagtattctcacggagccaataatggcttgaagaaagc

SEQ ID NO: 153943 - DNA, 223 bp, Glycine max
taaagccactaccttcattgaaaaaatacaagcttcagatggatcatggtatggttcttggggagtttgcttcacttacggtgcttggtttggggtaagaggtctgattgctgctggaaggagtttcagtaattgctcaagcatccgtaaagcttgtgaatttctgctgtccaagcagcttccttctggtggctggggagcgagttatctgtcctgtcaaaac

SEQ ID NO: 153944 - DNA, 231 bp, Glycine max
  unsure (1)..(231): unsure at all n locations
cgaaggnaacgctgtcgttgcgccaatcgcggcgttgttgttggtggtgctactcgcggcgagtgtggtggtggaggctcaggagaactcggacgtgaagacgctggtgaagcacatgcacgggaagaagtactgcgacaaaggatgggaatgtaagggctggtcaattactgttgtaacctcactattactgaatatttccagacctaccagttcgagaatctcttctcc

SEQ ID NO: 153945 - DNA, 237 bp, Glycine max
tggaaaaccctagttcgcttgcagtcacacaagaggccaatcctattcatagctcgagatgggtgaagaagtgaaggtagttgttccagaatcagtgttgaagaagcgcaagagggaggaggaatgggcgttggccaagaagcaagaactcgatgctgccaagaagaagagagccgagagccgcaaactcatctacaacagagctaagcagtacgctaaggagtacgatcaccagga

SEQ ID NO: 153946 - DNA, 235 bp, Glycine max
cacaacaaaaaaagacaacacagagagaagcgtcttaataaacgctcttctctgaaaaacctgatttcttctcttcttctcttctctttcgtttcgatcttcgatctctgaaaatgagagagtgcatttcaatccacatcggtcattttgttattcaggtcggaaacgcctgctgggagctctactgcctcgaacacggcattcagcctgatgggcagatgccaagtgataagac

SEQ ID NO: 153947 - DNA, 238 bp, Glycine max
ctctcacacacactttctctctctctctctctcacccagatcttgtagcaatggcgagcgctcccactccacgcgaagagttcgtgtacatggcgaactggcggacaggccgagcgctacgaggagatggtggagttcatggagaaggtctccgcctccgccgagagcgaggagctgaccgtggaggagcgtaacctcctctccgtcgcctacaagaacgtgatcggcgctcgccgcg

SEQ ID NO: 153948 - DNA, 241 bp, Glycine max
ccggaccagcagaggctgatttttgctggcaagcagctcgaggatggaaggaccctcgctgactacaacatccagaaggaatcaacccttcaccttgtcctccgtctccgtggggggctttaagctcgttgtgtaatgttggatgtgttcccaaaacatttgaagaactttgatgtttaatgggtctgtaataatgtcccttgaaaataagttcggtttgtgttgaactcaattgtgtccc

SEQ ID NO: 153949 - DNA, 265 bp, Glycine max
agcatgtccatcaccaccttccttctcctcctcctcctctcgccggcgatcaccgccaccccgacggcgtacgagatgctggagagctttcactttccggcgggtattctccccaagggagtgaccggttacgagctggatccgtccagcggcaaattcagcgccgatctgaacggttcgtgcagtttctccctcgaaggttcgtaccagttgagctaccagaaaaccatcaccggctacgtatccgaagaaggctcaccgaact

SEQ ID NO: 153950 - DNA, 240 bp, Glycine max
aaacaataaaataaaataaaacagaagagaaggaaacagaagtagaaaaaaaataaaatgggttacacaagatcttctactctgtccgtggctcttgtcttggcattctgttcaagcattcagggtttggacatcaccaaattgttgggcgaatatcccgaatatgcacagttcaacaaatacctaactgaaaccaagctggcggaccaaatcaacagccgtaacgccttacagtccttg

SEQ ID NO: 153951 - DNA, 234 bp, Glycine max
gtgatttcagtgagtgatcggtgttcacttgatctcatcataatcgtcagcgtcaattgaagaagatgccgatcagaaacatcgccgtcggaaggcctgaagaggcgactcaccccgacacgttgaaggcggctttggctgagttcatctcaaccttcatcttcgtgttcgccggctcaggctccggcatcgcctacaacaagctcaccgacaacggcgctgcacccctgccgg

SEQ ID NO: 153952 - DNA, 235 bp, Glycine max
ctctcactcacaaacacacactgtactaaacctaatcagcagagacatggttgagcaaaccttcatcatgatcaagcctgatggcgtccaaagaggccttattggcgagatcattagcagatttgagaagaaaggtttctacttgaaaggtttgaaacttgttactgtggaccgtccttttgctgagaagcactatgctgatttgtctgccaagcctttcttagtggtttggtgg

SEQ ID NO: 153953 - DNA, 233 bp, Glycine max
  unsure (1)..(233): unsure at all n locations
gtccgtttcagacgcgtgggcacccgaacaggtgtttcccatttcctcaattcaccgtttggacgaaaagccttcggtgaggggtattctctcggacttgacttgtgacagcgacgggaagattgacaagttcatcaacggagagtccctngtggcgcttcatgagatggaatgaggaagaacttactatctgggaatgtttttgggtggggcttacgaggagcgctcggtgg

SEQ ID NO: 153954 - DNA, 239 bp, Glycine max
gcatattccaattcccaattcccaattctaaacccttattcctttcaaagaaccaaattgagtgatcgtgatggcaccaaaggcagataagaagccagcggagtagaagcccgcggaggagaagaagtcgacggtgggagacaaggctccggcggagaagaagccaaaggccggaaagaagcttccgaaggagggaggcgccggcggagaagggaagaagaagaaagatacaagaatag

SEQ ID NO: 153955 - DNA, 228 bp, Glycine max
aattctgctcgaggtgctgtttatttgaaattaacaagtagcacagatgtttggaatcatcggaggaaacaagggtcacaagataaatgggaacttggtgattatgcgaaagaatgtgtttgatatcaacagcattatcagtgttaagggtgtcatcggaaccggcattaacatcattggatgagtcgtctgtaccgtttctgcgttggcgtcccacatctccatcca

SEQ ID NO: 153956 - DNA, 269 bp, Glycine max
cggaattcggatcgaggtgatacagcacaagaggaccctcgagaggtgactgctgcaaaggcagacttaaattatattgggttagatggagaaataggctgcatggtgaatggagcagggttagcaatggccacaatggatataattcaattgcatgggggtactcctgtcaattttttggatgtaggtggcaatgcctctgaaggccaggtggttgaggcatttaaaatattgactgctgatgacaaagtgaaggaattgtggttaac

SEQ ID NO: 153957 - DNA, 238 bp, Glycine max
agacgggccccattaccattttactgagaagagtataatggagaaagaaatcaaagagggaaagcttcttgagtttgcttccgtccatggtaatctgtatggaacaagtgttgaggctgtcgaactggtatcagatgcagggaaaagatgtattcttgatattgacgttcaaggtgcaagatctgtgagggccagttctcttgaagccatattcatctttatctgtctccatcaatgg

SEQ ID NO: 153958 - DNA, 253 bp, Glycine max
gtgatacaacacaagaggacgctcgagaggtgactgctgcaaaggcagacttaaattatattgggttagatggagacataggctgcatggtgaatggagcagggttagcaatggccacaatggatataatttaattgcatgggggtactcctgccaattttttggatgtaggtggcaatgcctctgaaggccaggtggttgaggcatttaaaatattgactgctgatgacaaagtgaagcaattttggttaac

SEQ ID NO: 153959 - DNA, 269 bp, Glycine max
ctgagcttggcgaatgtgaaacttggaagcagaaaccttagggtttgtgcctcaactgtgcctctctcaggggtgattttcgaaccattcgaggaggttaagaagggtgaacttgctgttccaacggctccccaagtctcgcttgctcgtcagaactacgctgacgagtgtgaatctgccattaatgagcagataaatgtggaatacaatgcttcctatgcgtaccactccttgtctgcatactttgacagggacaacgtggctctcaa

SEQ ID NO: 153960 - DNA, 269 bp, Glycine max
ctgattttgaaaactggaacgcgtaaaatgaacggtacccctccctcataaataaaatctactactaaacgctcttctcttctgcaatcaatttgcaaaccaaacacaacacaaggagaagaaccagatctctctttctcaaatcaccaagaatagttgaaaatggggctgtctttcacgaagctgttcagccggctctttgcgaagaaggagatgcgtattcttatggtgggtctcgacgccgccggtaaaaccaccattctctacaa

SEQ ID NO: 153961 - DNA, 123 bp, Glycine max
ttgcagctggctatcaggggagatgaggagctggacactcttatcaaagggaccattgctggtggtggtgtcattcctcacattcacaagtccttagatcaacaaataccgccaaggggattg

SEQ ID NO: 153962 - DNA, 265 bp, Glycine max
aaataaatagagagttggttaaaagtaggaaatgaaagtgagggagagagaatggaggaagaggcagggatctaccgtctagcggaggacagcctccggcagatattctgcaggctgccactgagggaaataatgatatgccgctcagtgtcaaaattcttcctgcagctgctctcaacaccttcgttcctccaggtcctctccagctcccatccacccctccagctcctggccctccgcaaccgccaccacaccccttctcaca

SEQ ID NO: 153963 - DNA, 182 bp, Glycine max
attgacggcgcaccgacctacattccactctatctgagtaagctcaaagggtacacccgacctacaggctgcaaggcagtagcagagtccataagaactgtccatcataaatttcactacactgttcaggatggcctagatgccatccagatgtgatctatcacttgaaccatatgctgtga

SEQ ID NO: 153964 - DNA, 262 bp, Glycine max
attcttaactcaacttctgctaccctctctcttcttccaagtccaaccacgcttttctctacagtcatgggcaaggtcaagatcggaatcaacggatttggaagaattggccgtttggttgccagagtcgctctgcaaagagacgatgtggagctcgttgccgttaacgaccctttcattaccaccgattacatgacatacatgtttaaatacgacagtgttcacggacactggaagcatcacgatgtcaccgttaaggacg

SEQ ID NO: 153965 - DNA, 216 bp, Glycine max
tgcggagattaatattttatctaggtccatcgtcgatagaagatacgacttcccaaaggcaatgtttcagtgggactagagctatgggcattctaacttcgctcgggctgtggcagaaggcggccaagatcttattcttgggcctcaataacgctggcacaactacactgcttcacatgaccaaagatgagagattagtccagcatcagcctaccc

SEQ ID NO: 153966 - DNA, 266 bp, Glycine max
tgtcaaatctgtatgagtacgcaaagcagaattctgggcctttgagatccgtcgtaggaacggttgagaacactgtaaccaccattctcggtcctgtctgcaacaaattcaaggacgtcccatatgatgtccttgtttttgttgacaaaaaggtggatgaagcttcccacaagttcgatgagcatgctcctccttttgctaaacacattgcggatcaagccaagggtgtgattcagaaagtgacttgtgaggcagggaaagtagca

SEQ ID NO: 153967 - DNA, 266 bp, Glycine max
aacacaaacacatacattgtagtatcacttttgtctcggaatttgttcttttgagttatggcaagcttaaaggttgcatgtgtggttttgatgtgcatggctgtgatgagtgcaccaatgatggtgcaagccgtgtcatgcaatgatgtttctgtgaacctagcaccgtgcctatcttacctgatgcagggtggagatgttccagaatcgtgctgtaacggagtgaggaacattctgggttctgccagcaccacctttgacaaaca

SEQ ID NO: 153968 - DNA, 258 bp, Glycine max
attcgaggtcagaagttcgatgagaaggaaaacattgtgttcatcacagtggtgtgttgtagccccgagaagataagagacaagctttgctacaaaggtggaggctctatcaagagcattgagatactggaactgcccaagctcaaggccgagaagcctaaagcagaccctcccaaagctgagaagtccaaggccgcgcccgagaaaaagaaggacggtggcggcgagaagtcccaggccgagcccgagaaaaagaag

SEQ ID NO: 153969 - DNA, 262 bp, Glycine max
gtggtgtgacatgttgtcttcgattccctggtcaactcaactcagatcttcgcaaactcgccgtgaatctcattcccttccctcgtctgcacttcttcatggtgggatttgccccactcacttcccgcggttcccaacagtacagggctctcactgtccctgaattgacccaacaaatgtgggatgctaagaacatgatgtgtgcagctgatcctcgccacggtcgttacttgacagcttctgcgatgttccgtggaaagat

SEQ ID NO: 153970 - DNA, 256 bp, Glycine max
tcaagatgaagatgattcgcattcttttcatctttgctcttctatccttcacttcccatgcttctaatgtcaatgacttctgtgtggcagacctgaagggtccagatagccctactggctatcactgcaagccacctaaaacagtaacatcacatgactttgtgttccatttaggccctggaaacacttcaaacgtgttcaagtccgcaataacctctgcatttgtcaaagattttcctgctgtcaacggtcttag

SEQ ID NO: 153971 - DNA, 263 bp, Glycine max
ttcttctttttcaatcttttttcttttaacatttgttcttgattaatgaaaacatccttggcaaatgctttcgcagttgttcgtctttcataaatccaagaatttcacctctgactatgaaatacgaatgcccccgactgttcctgttaatcattactccgatcccgatatccaacacaataggatcagaatcgtgtggtgatatcccatgctaatgtatacagagcgtaggcttgctttgagcactctaatttcttcaaagt

SEQ ID NO: 153972 - DNA, 262 bp, Glycine max
ctcgctcttcccttcctctggtggcgacaatgtcgactcctgctaggaagaggctgatgagagacttcaagaggctgcaacaagacccgcctgcagggatcagtggtgccccccaggataacaacataatgctgtggaatgctgtcatatttggtcctgatgatactccatgggatggaggcacgttcaagttgacactccaatttactgaggactatccaaataaaccaccgactgtacgatttgtgtctcgcatgtttca

SEQ ID NO: 153973 - DNA, 261 bp, Glycine max
cacaaacaaatacattgtagaatcacttttgtctcggaatttgttcttttgagttatgccaagcttaaaggttgcatgtgtggttttgatgtgcatggctgtgatgagtgcaccaatgatggtgcaagccgtgtcatgcaatgatgtttctctgaacctagcaccgtgcctatcttacctgatgcagggtggagatgttccagaatcgtgctgtagcggagtgaggaacattctgggttctgccagcaccacctttgacaa

SEQ ID NO: 153974 - DNA, 217 bp, Glycine max
ctgcttcaacctggcggaagaagaagacgccgtagccatgatgaagtactccatacagctcgacaatcgcatcaagtcctgcaagcgtaaggcgctgaccttatagtgcatttcaagaacactagggagactgcctttgccatcaggaattgcccctggttaaagctaaagagacctggagattttggccacaaacagtcatccttccgacgcttct

SEQ ID NO: 153975 - DNA, 258 bp, Glycine max
ctgatgttgtcatagcagacaagtttgctgctgatgctaacagcaagactgtgccggcatcaagcatcccagatgggtggatggggttggatattggtcctgattccatcaagacatttggtgaagcattggatacgactcagaccattatttggaatggaccaatgggtgtttttgagtttgataattttgccacaggaacagaggctatagccaagaaactggcagagctgagtgggaagggagtgacaaccatca

SEQ ID NO: 153976 - DNA, 260 bp, Glycine max
  unsure (1)..(260): unsure at all n locations
gctataagctagtttatcgtgaggagaatatgaagttgtttgttttctttgttgctgcagtagttttggtagcatggccatgccatggcgcaggctaccaaaggttccctctccgaatgaaaactggctatggtgagcgttcttcggaggtaaaatgcgcaagttttaggcttgctgtggaagcacacaacatacgagagaananaaccattcctnaacagtgcgttgaaccaacaaaggactacattaatggcgaacaa

SEQ ID NO: 153977 - DNA, 255 bp, Glycine max
caacactttccacttgtctccgaatgagttatcttgagaaacattattcccattgctatatattatggctagcatgaaggttacatgggtggttgtgatcatgtgcatggccgtggtgggtgcaccgatgatggcgcaagccatgacatgcaatgatgtgacggtgaacatggcacagtgcctatcctacctgatgcagggaggaacaccttcaacactttgctgcagcggagtcaagaacattcttggctctgc

SEQ ID NO: 153978 - DNA, 253 bp, Glycine max
aattcaggtactgcgtttcggaagcagacacagatggctcgtacgaagcaaaccgctcgtaagtccacaggatgaaaggctcctaggaagcagcttgcaaccaaggctgcacgtaagtctgcaccaactactggtggtgtgaagaagccccaccgttaacgtcctggtaccgttgctcttcgtgagattaggaaataccagaagagtaccgagcttttgatccggaagctccccttccagaggctggttcgtg

SEQ ID NO: 153979 - DNA, 254 bp, Glycine max
gaagaaggcagacaagaagaccgtggagacgtacaagatctacatattcaaggtgctgaagcaagtgcaccctgacatcgggatctccagcaaaaccatggggatcatgaacagcttcatcaacgacatcttcgagaagctcgctcaggaatcttccaggctcgcgcgctacaacaagaagcctaccatcacctctcgcgagatccagaccgccgttcgtcttgttctccccggcgagctcgccaagcacgctg

SEQ ID NO: 153980 - DNA, 252 bp, Glycine max
cagaactaaatgaaattcttgcccatgatactgtggatgagggtgggttatggaagaagaaactcactgatcaatcattgaagctttttgactttttacctcaagcaattcaagaacaattgatgcttgaaagagatccacatggaaatgttcaggttgccaagatagaaacagagaaaatgcttattcaaatggttgaaactgagttggagaagagaaagcaagaaggcaaatacaaaggcgaatttaaag

SEQ ID NO: 153981 - DNA, 250 bp, Glycine max
atagtgttaaaagacctatatttggtaaaccaatcaaattggacattaataaaggaattgagagggcataacatattggaggaggcaaatctgtagccacagtcctagccattggcacagcaaatccacccaatttcatcctacaggaggattatcctgacttctactttcgggtcaccaatagcgaccatttgcaccgcttgaagcaaaagttcaagcgcatttgcgagaattcaaagatagaaaagcg

SEQ ID NO: 153982 - DNA, 249 bp, Glycine max
gttttagcgcagttcttctagatttaaggaagatgggtaaggaaaaggttcacatcagtattgtggttattggccatgttgactctgggaagtccactaccactggccacatgatctacaagcttggaggcattgacaagcgtgttattgagagatttgagaaggaagctgctgagatgaacaagaggtctttcaagtatgcctgggtgcttgataagcttaaggctgagcgtgaaagaggaatcacaa

SEQ ID NO: 153983 - DNA, 248 bp, Glycine max
aagtcttcttgatccttctttttctccttgaactcaaacatggcagatgaggtggttctgctagatttctggccaagtccatttgggatgagggtcaggattgcacttgctgaaaagggtatcaaatatgagtacaaagaagaggacttgaggaacaagagtcctcttctcctccaaatgaacccggttcacaagaagattccggttctcatccacaatggcaaacccatttgtgaatccctcattgc

SEQ ID NO: 153984 - DNA, 248 bp, Glycine max
agcagatagaaaaaagagctgagttttgagttcaaaagatgactaacttcccagtgatcaacttggagaagctcaatggtgaggagagaaacgacaccatggagaaaataaaggatgcttgtgaaaactggggattctttgagctggtgaatcatggcataccccatgacttattggacactgtggagaggttgaccaaagagcactacaggaaatgcatggaagagaggttcaaggaatttatggca

SEQ ID NO: 153985 - DNA, 220 bp, Glycine max
  unsure (1)..(220): unsure at all n locations
catgcgcttatnaagatggaggggaaggagcaggatgtgtcgttgggagcgaacaagttccccgagatacagccgattgggacggcggcgcagatccaagacgacggcaaggactaccaggagccggcgccggcgccgctggttgacccgacggagtttacgtcatggtcgttttacatagcagggatagcagagtttgtggccacttttctgtttctct

SEQ ID NO: 153986 - DNA, 248 bp, Glycine max
cgaagaagaggaagaatcagagctcagcgataagcagaaagtggagatcgcgaaatggttcctcctcaactctcctcccggagaaatccaatacgttgccaaagatgtgaaatcgattctcaacaacgacgatttgtacaaggaagccgcttccgaggcttttccctattacaacaaatcgcacttgatttccattccaatgcccaaccgaagcggagacgtactggttacttcgttcggtgagcttg

SEQ ID NO: 153987 - DNA, 244 bp, Glycine max
caatcttctctatcgagaatggcgtgtggttctatgtgatctagatgccactgccattggagttctttctataatcctctgcgtgttgtttgtgtataatcccgtgatatttgcattaggtagaaaagaggctcccaaatttgcaggttcatggcccatacttggtcacctacgactattgagtggtgtagagacacctgatagggtgtgtggtgctttggcttataagtatggagccatattc

SEQ ID NO: 153988 - DNA, 246 bp, Glycine max
cgcaacaaaaagaaagaatcccaggcgaggagaaagatggaggggaaggagcaggatgtgtcgttgggagcgaacaagttccccgagagacagccgattgggacggcggcgcagagccaagacgacggcaaggactaccaggagccggcgccggcgccgctggttgacccgacggagtttacgtcatggtcgttttacagagcagggatagcagagtttgtggccacttttctgtttctctacatc

SEQ ID NO: 153989 - DNA, 186 bp, Glycine max
ctagttataaaataattaatttaataaaggatataattaatttaataaaggatccctcttttttgacacgaaatggatatatccataccatatatcttggatttatttttatgaaataattaaatatggcaaaacctatatctaaaaagggttcgcgtaaaaatgtacgtattggttcgcgtaaca

SEQ ID NO: 153990 - DNA, 186 bp, Glycine max
tgaacacctacagtctgattcacactgtccagtttgtaaggaacgatttgaactgggatccgaggccaggaagatgccatgtaaccacgtttaccactcagattgtatcgttccatggttagttctgcataactcgtgtcctgtgtgccgtgttgagctgccaccgaaagaacatactagttctcg

SEQ ID NO: 153991 - DNA, 188 bp, Glycine max
cctccttactactatcaaagtcctcctccaccatctcccactcctcatcctccctactactacaaatcccctccaccaccaacgtcgcatcctccaccttaccactatgtgagccctccaccaccttctccatctcctcctccaccataccattacacatcaccatctcctccttccccagctcccgc

SEQ ID NO: 153992 - DNA, 186 bp, Glycine max
tagagagtgagtgccccaagtttattgcttgggccaagaggtgccttcagaaagaaagcgttgccaagtctcttcctgatcagcaaaaggtttatgagttcattatggatctaagaaagaagttaggcattgagtaggttggagcttaatggccattgtgaagtagtggttttccattggtcgttc

SEQ ID NO: 153993 - DNA, 184 bp, Glycine max
aaagaacttatctcaggagcaaccaaatcagtttatgcccctgaaccttttgatgttggacgcatattacaagttgatattatttcagaaaacgagcacatcacactttcaattgctggtccaatagatccagctgctggtttgggaacgtaagtagaggcactaatgcgcaaacatgacactg

SEQ ID NO: 153994 - DNA, 182 bp, Glycine max
gcgactataatgggtccccctgatagcccttatgctgggggtgtttttctagttactattcattttcctccggattatccattcaagccacccaaggttgcatttaggactaaagttttccacccaaatatcaacagcaatggtagtatttgtcttgatatcttaaaggagcagtggagccc

SEQ ID NO: 153995 - DNA, 181 bp, Glycine max
acttcctcagctgcaacagtcgtagcaacaggtccagcagcagcagcttgcgcagtgcaacagcagcagcttccgcaaatccagcaacagcagcagctacctcaacttcaacaactcccacaactacagcaacagcagcagcttccgcagttacagcaactgcagccgcagcagcaacaga

SEQ ID NO: 153996 - DNA, 182 bp, Glycine max
gaaaagccttccactattccatatatatcagcccataaagaatgaagaatactgcgttgttcactatctttctactccttgctttcacctcatacctaccttcagccaccgctgctagtgtgtacgatacggatggtaatattcttcaatagggtcgcacatattttgtgttggcagctaca

SEQ ID NO: 153997 - DNA, 181 bp, Glycine max
gcggaatcagctagaattttctaataatggccaaagacgttgagcaggttacagagcaaggtgaatactccgcgaaggattaccatgacccacctccggcgccgttgatcgacccagatgagctcactaagtggtccttgtacagagccgccatagctgagttcatagcaacactcctttt

SEQ ID NO: 153998 - DNA, 174 bp, Glycine max
ttcctctcgcccagaatccgagatcaaccctgacccctaaggccaggggtttttctcggcttcttcagattcctgaaatggcgtctgtttcagctttagcccagtacaagctcgtcttcttgggtgaccaatccgtgggcaaaaccagcatcatcactcgcttcatgtacgata

SEQ ID NO: 153999 - DNA, 182 bp, Glycine max
gcggaatcagctagaattttctaataatggccaaagacgttgagcaggttacagagcaaggtgaatactccgcgaaggattaccatgacccacctccggcgccgttgatcgacccagatgagctcactaagtggtccttgtacagagccgccatagctgagttcatagcaacactccttttc

SEQ ID NO: 154000 - DNA, 182 bp, Glycine max
ataaaattcttccaccaagttatgggtttccttgtgttgcttcttttctccctcttaggtctctcttctagttccagcatatcaactcatcgttccatattggaccttgacctaaccaagtttaccacacagaaacaggtgtcttcactgttccaactatggaagagtgagcatggacgtgt

SEQ ID NO: 154001 - DNA, 177 bp, Glycine max
cagcttttccctcgttgaaatgaaaatgggttcttctttgtggactttgtgtctaattttggcttcactagcctcttctgcattctgtgcctttccacggaggccagtggatgttccattcggcagaaactacgttcccacttgggcttttgatcacatcaaatacttcaatggagg

SEQ ID NO: 154002 - DNA, 177 bp, Glycine max
gtcgatgtttacattgccaagggtgctggcatcacggtgcagtttgtgaagaacatcatcatccatgggatcaaggtctttgacatcgtgattcgtgagggtgggacaatcagagattctgagacacattatggtttcaggactaagagtgatggtgatggcatttccatctttggt

SEQ ID NO: 154003 - DNA, 78 bp, Glycine max
agatggggtctccaatggcctctcttactctcactattgcattaaccataatctctctcaccttgccatctcaaacat

SEQ ID NO: 154004 - DNA, 260 bp, Glycine max
tccggtgcttcaggatacgatcctttgacacccaaaataacgtcagttatatcattatctactcaactagacatgttcagggaatacataggaaagctgaaaggaattgttggagagagcagaacaaactacatcctagccaacagtctttatcttgtggtggcaggcagtgacgacattgccaacacctattttgttgctcacgccagaatattacagtatgacattccttcttacaccgaccttatggtcaactcggc

SEQ ID NO: 154005 - DNA, 260 bp, Glycine max
atcataagtggttggaggaagagttcactgaaaaggttcaaaagagaggtggtgcgcttattcaaaaatggggaagatcatcagctgcatcaacttctgtgtcaattgttgatgccataagatctttagtaactcctactcccgagggtgattggttttcttctggtgtatatagcaatggaaatccttatggaatagctgaaggtattgttttcagtatgccatgccgatcaaagggtgatggtgattatgaacttgtc

SEQ ID NO: 154006 - DNA, 260 bp, Glycine max
ctgctagcacctgttatcatgaagggcaatagcaagacttctttgagccaccaggagaaccgaatactaggagagaccaaggatcaaattgaacagatacttacacttgtttttgagaattataaatcacttgatgagtcttctttctcgggcatcatagaggttttcagaccagcaacgggtcaagcagcaccagccttggaacctgctgttaaactctacaagcttcttcatgatatcttatctcctgaggctcaaat

SEQ ID NO: 154007 - DNA, 266 bp, Glycine max
ggagaaagcaacaagagtgaaaatacttgaagtttgccttgtgtcaccaccacaggaaaaaacgacaacacaaacatctttgtctctcacattctttgagttactatggctgaggcttcccccagttgagcgtcttttcttctatgaattccccaaccaaaccatttcattcttcgacaccattcttccaactctcaaacactctctttccctcacactccaacactttctaccttttgctggcaccatcatttggccccttgact

SEQ ID NO: 154008 - DNA, 257 bp, Glycine max
gtgcaataactcgttgtacagtcctagtgtgtgggagagacatggctaagatgtgtgttttggtgttggttcttgctctggctgtggccacaagtgccagaaacgttcccaaccccaaggatgctggtcttaaggaccagaagaacttcatcagctatggtggagttggtggttattccgggattgggaacaatggactgccttttggaggagctggtgccggaataggtggtggttttggcggaggtggtggactt

SEQ ID NO: 154009 - DNA, 258 bp, Glycine max
caaaacttgctatagcagtaagctataactcatttgaggctctgtgagaattgagaaatggctaaagatgttgaggttcaagagcaaggaggagagtactctgccaaagactaccatgaccctcctccagcacctttgttcgacccagaggagctcacacagtggtccttctatagagccctcatcgctgagttcatagcaacccttctcttcctttatgtcactgtgctcaccattattggctacaaaaggcagact

SEQ ID NO: 154010 - DNA, 257 bp, Glycine max
atcgaaactcagaagtagaaagaaacacaaatcacaatcgctatggctaggtacgaccgagcaatcaccgtgttctcccctgacggccatctcttccaggtcgagtacgccctcgaagccgtccgcaagggcaacgccgccgtcggcgtccgcggcaccgacaatgttgtcctcggcgtcgagaagaaatccaccgccaaactccaagactccaggtcggtgaggaagatagtgaatctggacgaccacattgcgct

SEQ ID NO: 154011 - DNA, 257 bp, Glycine max
gacaaaggtagcgtgttgtacaaggggcaattttttcaaaacctttttctctctcgcaacctcacctcttcctccttcaatctctttcggaatttcccaaaatccttagtgggaggaagagatggttctgactcagaagcttcacgaagccttcaaaggcaccgtcgagaggattactggcccccgaaccgtttccgccttcaaagaaaaaggagttctcagtgtctctgagttcgtcaccgctggcgataatctcg

SEQ ID NO: 154012 - DNA, 264 bp, Glycine max
aaaacactcaattctcttctcttctcttctgggtttttgctttttcctcattctctcattctcaaacaccacaaaaaaatgggccttgtttcccaggatgccctcaaccaactccaagctctcatggatcaagtgctacttgaggaggagccactgcagagaacgtttcagaatgttcatcaaggatgtgtcaccgaaaccttaacacggtttctaaaagcaagggagtggaatgctaccaaggcccataaaatgatagtcgat

SEQ ID NO: 154013 - DNA, 259 bp, Glycine max
ggtccacaaaccttgactggtacaagggtcctactctgctagatgcacttgaccagatctctgagcccaagaggccttctgacaagcccctcaggctaccccttcaggatgtgtacaagattggaggaattggaactgtgcctgtgggacgggttgagactggtgtcttgaagcctggaatggtggtgacttttgcaccaactggactgacaaccgaagttaagtctgtggaaatgcaccatgaagctctcacagaggc

SEQ ID NO: 154014 - DNA, 256 bp, Glycine max
gggaggtgcatgcgggaaccagatcggagccaagttctgggaggtggtgtgcgcggagacgggatcgattcaacggggaggtaccaaggggacaacgagttgcaactcgagcgagtcaacgtctactacaatgaagcgagttgcggaaggttcgtgcctagggcggtgctcatggatctggaaccagggaccatggacagcgtcagatctggtccctacggtcagattttccggccagataacttcgtctttggac

SEQ ID NO: 154015 - DNA, 255 bp, Glycine max
gtccgacttacagctgtggatatgattacatactcaggtgcagacagtggggagaagccatttttattgcggtcagccgaagagcttgaaccttttcttgacaagattactgacgaaatgttgaaagttactttacgggaaggagttggatacttgcatgagggattgaacagtcttgatcatgacattgtgactcagctatttgaagctggctggatacaagtctgtgttttaaacagttccatgtgttgggga

SEQ ID NO: 154016 - DNA, 256 bp, Glycine max
aacatcatcatgtcggacgaagagcaccatttcgagtccaaggcagacgccggtgcctccaaaacctaccctcagcaagccggtaccattcgcaagaacggctacatcgtcatcaaaggacgcccctgcaaggttgtggaagtttcgacttccaaaactggaaagcacggtcacgccaagtgccactttgttggaattgatattttcactgccaagaaacttgaggatattgtgccctcttctcacaactgtgatg

SEQ ID NO: 154017 - DNA, 254 bp, Glycine max
cttcagagaagaaactatcgaacccaatgagggaaataaaggtgcagaaactcgtcctcaatatctccgttggtgagagtggagatcgtctcaccagagccgccaaggtgttggaacagcttagtggccaaaccccagtgttttccaaagcaaggtacactgttcggtcctttgggattagaagaaatgagaagattgcatgttatgtcactgttagaggtgataaggctatgcaacttttggagagtggttta

SEQ ID NO: 154018 - DNA, 254 bp, Glycine max
aacaaacccactaagatggcttcctttgtatccttcctagtgctgcttcttgcagcccttatcctcatgcctcaagggcttgctacttactacaaaccaattaagaagccaccagtgtacaagcctccagtgtacaagccaccagtgtacaaaccaccggtttataagccaaaaccaccggtttacaagccgaaaccaccggtttacaagccaccatataagaagccaccatacaagaaaccaccttatggaaa

SEQ ID NO: 154019 - DNA, 250 bp, Glycine max
gttgtgtgtgtgtgcgcgtttgtagataactgttgattgtatgtctttcatgctatagcaggagtgtataatctgagcgatgtcagatcttgaggctcccttgcgccctaagaggaagaaggtttgggtggactatttcgttcagtttcgatggatccttgttatttttgtggtccttcccatctccttcaccatttatttccttacataccttggggttgtaagatctgagtggaagtcctataagacg

SEQ ID NO: 154020 - DNA, 252 bp, Glycine max
gaaaagggtttatggcttaactcttatgcttatggttgtgtgttccgttgcctcagggctctcttttggacacacccccaagggtgtcatggccacactttgtttcttcaggttctggcttggctttgggattggtggtgactaccctctatcagctacaatcatgtctgaatatgccaacaaaaagactcgaggggcattcattgctgcagtgtttgcaatgcagggttttggaatcctggctggtggaat

SEQ ID NO: 154021 - DNA, 252 bp, Glycine max
ggccaccgtaccatcaccagcaacaacgggtccagtacgtgcagaggcatttgctgcagcaacagcagcagcaatggctgagaagggacggcagcgccgccgtcgacgaggtcgagaagaccgtgcagtctgaagccgtggattcgagttctcaagattggaaggcaagactaaagcttccaccagctgatactctcgataaaacagaggatgtaacggcaactaaaggaaatgagtttgaggattactttt

SEQ ID NO: 154022 - DNA, 260 bp, Glycine max
  unsure (1)..(260): unsure at all n locations
aagaaacacaaaagatagannganaataaagagaaggagaaggggagaagagaganaggttgtattgagagatatgnnggaggggtaagattgagatcaaaaggnttgagaactcaagcaacaggcaagttacctactcaaagaggaagaatgggatccttaagaaggcaaaggaaattagtgttctatgtgatgctcaagtttcccttatcatctttggtgtctctgggaagatgcatgagtacntcagcccctccact

SEQ ID NO: 154023 - DNA, 253 bp, Glycine max
tgggtttgtggaacacaacgaatgcagtgtcttgccgctttcacaagtttggtgatgaccaagagaatctggtcttccaaggtgatgccacgtcttcttccaggggcatagaactcacaaagttagacggtggaggaaaaccagtgggtggcagtgtggggagagtgttatactcttctccagtgcacctgtgggaaagctctacagtggtcgcaagctttgagaccggacttcaccttttccatctcatcag

SEQ ID NO: 154024 - DNA, 252 bp, Glycine max
cggacgtacccttgctgactacaacatccagaaggagtcaactctccacttggtgttgcgtcttcgtggtggtatgcagatcttcgtcaagacccttacgggtaagactattaccctcgaggtggagagctccgacaccattgacaatgtgaaggcgaagatccaggacaaggaaggaatcccaccggaccagcagaggcttatttttgctggcaaacagctagaggatggaaggaccctcgctgactacaa

SEQ ID NO: 154025 - DNA, 249 bp, Glycine max
agttgaagaagcctgaacgttatgtaaaaaaagaagaaaagaaaggtgtggttgagggagtgaggaaatggtgcacagcgcgtacgattgtctggaactggtgcgcgagtgcccagccaagatcgaatccatcgaatcctacgattcgaagcttctcgtgggctgctccgatggatcgctccgaatattcgccccggaaacggaatcttcctcctccaacgggtccaagtcctacgcgttggagaagaa

SEQ ID NO: 154026 - DNA, 249 bp, Glycine max
cttcagcagttattatcagttgcagagaagtttaaaaggagtccatacagttacgtctgggtagctgcagggaagcagccagatcttgagaagaatgtgggtgttggagggtatggttatccagctttagtggcccttaaccttaagaaagctgtttatgctcctctcaagagtgcttttgaacttgaccaaattatagaatttgtgaaagaagctggacgtggaggcaaagggaatttgcccattgaa

SEQ ID NO: 154027 - DNA, 248 bp, Glycine max
ggaaggtttggaattgctgaaaactgccattgccaaagctggttacacaggcaaagttgtcattggaatggatgttgcagcttctgaattctacaaggaagataaaacatacgatttgaacttcaaggaagataacaatgatggctcacagaagatctctggagatgctttgaaagatctatacaagtcatttgtgacagagtatccaattgtttcaattgaggatccttttgaccaggatgactggg

SEQ ID NO: 154028 - DNA, 268 bp, Glycine max
aacagccaccgttgatttgatgcttaacctctcacccaaggaagctgctgctgctgatggtgcagatccacgtgagaagccaaagacttcgccgaaggagaagacccttctgcttcccgatcccgccaagcctcctgccaagcgcaagtggtgggatggccacccgtgaggtctttccggaagaacatgttcgcagcccaaaagagcagcggcggagaggaaagcgaaaagagcagccctaatgcaagctttgtcaaagttagcatgg

SEQ ID NO: 154029 - DNA, 261 bp, Glycine max
gaaaaagttagggtttgtaactttgtcttttgcttgcgaatctgaatcgaataataatcaatcaatcatcatgtcgtcggcgaagaagatcacactgaagagttcggacggcgaggctttcgaggtggacgaggcggtgcgctggagtctcagacgataaagcacatgatcgaggacgactgcgccgacagcggcatccctctgccgaacgtgacgagcaagatcctggcgaaggtgatcgagtactgcaagaagcacgtc

SEQ ID NO: 154030 - DNA, 261 bp, Glycine max
cacctttctcctaaaacatctccagtgggttcttcttcttctattacaacaacgtcctacaagaccatgaccatggccatggccacgatcctgctcctgttcacggtcttcgcggtttcatcggccctagacatgtcgaaatctcgtacgacaacgcccacgccgccacgtcgcgcacacagtggagctgatgtccatgtacgagcagtggctagtaaagcacggcaaggtgtacaacgcgctcggagagaaggagaagag

SEQ ID NO: 154031 - DNA, 261 bp, Glycine max
ctagaaacagtgtgatgaaaatgaaggtccttgttttcttcgttgctacaattttggtagcatggcaatgccatgcgtacgatatgttccctctccgaatgaacactggctatggtgcccgtactccggaggtgaaagcgcaagttggaggcttgctgatggaagcacacaacatctttggctttgagaccattcctgaagagtgcgttgaagcaacaaaggaatacatccatggcgaacaatatagatcagactccaaaa

SEQ ID NO: 154032 - DNA, 262 bp, Glycine max
ggcgttctacagcgaggaggcgaagttgaacaatgaatcggacgatttgcagaactctatcagactcactaaggataacatcaaggctatcattatggacgtgatgttcggaggcacggaaacggtagcgtcagcgatcgagtgggccatggcggagctcatgagaagcccagaagatcaaaagcgggtccaacaagagctggcggatgtagtgggcctggaccgtcgggccgaagagtccgatttcgagaaactcacttat

SEQ ID NO: 154033 - DNA, 261 bp, Glycine max
gatgaatgccagaggaagtatgggaatgctaatgcttggcgatattgtacagatgtttttgactatcttactctttctgcaattatagatggaactgtgctttgtgttcatggtggcctttctccagacattcgatcatagatcagataagggtcattgagaggaactgtgaaattcctcatgagggaccattttgtgatctgatgtggagtgatcctgaagatatcgaaacatgggcagtcagtcctcgtggagctggtt

SEQ ID NO: 154034 - DNA, 264 bp, Glycine max
ctgaaccaaatcatcacacacacatactaagaagcaacaattcttctacaatggatctcctccttctggaaaagaccctcataggtctcttcctcgctgcggtggtcgccatcgccgtctccaccctccgcggccggaattcaagctcccaccgggcccactccccgtcccaatcttcggcaactggctccaagtcggcgacgacctcaaccaccgcaacctcaccgatttggccaaaaaattcggtgacatcttcctcctccg

SEQ ID NO: 154035 - DNA, 259 bp, Glycine max
ctcaatacccttttgatttgtgaaaggaaagcaaacatgcttgatcaggtccaacaccctacaatcatggacaaggttgctggccagctccatctccgttctggtgtttctggtattaggagttatgaaggagcctctgctaccccacaatgtaccaaagaccctcttttgggaattactcgaatgctgcattgcagtatcctgtgatgccctcatgcaaagctactatggatttgtctgctgctgcaacaactgcctc

SEQ ID NO: 154036 - DNA, 260 bp, Glycine max
tccaggagtactggtggtgcaccgagcgcgccctcgactggggccccggtggtggacccgacctcatcgtcgacgacggtggtgacgctacccttctcatccacgaaggcgtcaaggccgaggagctctatgagaaaccggcgaactccccgaccccaactccaccgacaacgccgagattcagatcgtgcttaccatcatcagagatgggttgaagaccgatcccaccaggtaccgcaagatgaaggagcgtctcgttg

SEQ ID NO: 154037 - DNA, 260 bp, Glycine max
tggagcagaagaaggcaaagatagtggcagagctccaagctgtgaagcacaacagtggcaagtcctacaatcagttagcggaggagactggactcaccaacgtctatgttgctcagcttctcaggagacaggctcactcaatccccaaactgcccctctacttcgggcagcgctgcccgacctgccccaagaccttgtttctgagatgatgagaccccctttgaggtcttatgaccctaatctcatccaagaccccactg

SEQ ID NO: 154038 - DNA, 258 bp, Glycine max
cattaatggctgattttggtgactattttgggttgcttttcatttggctagcctccatcttcattttacgtgtaatattattcacaaagtctcgcatcaagtcacgtctacccccaagtcctagagccctccctggttaggacacctctacctcctcaccaagctcccccaccaagcattccacaacatctcaatacgttatggtcctttggtctacctcttgttcggttccaagccttgtgttcttgtttcatcacc

SEQ ID NO: 154039 - DNA, 260 bp, Glycine max
cttcccttctccaacatgccaaacgactgcgttcatagtctttacttcttcgttaccctcttcacatgccttctctctgctaattcccacgatgaccatattttcctaccgagtcaactccatgacgatgactcaggagttgcactgctaccgacccaaaccttaactacaagccggtgatcggaatcctgacccaccccggcgacggtgcctctggccggctcagcaacgccaccggggtttcttacatcgccgcctcc

SEQ ID NO: 154040 - DNA, 257 bp, Glycine max
cagtttctcagtttcttattcgttagatctcatcttacactcaccgtcaagttcgtctcgcgccaccgtcgacgcagttccggccactgcctttggttccctcactttctgtctcttcttcttcttctcagaaatatccttctcagaaggttgaaacgggtcatcaagacacagtccatgatgttgcgatggattattatggtaagaggctggccacggcttcatcagatcacacgattaagataattggggtgagc

SEQ ID NO: 154041 - DNA, 255 bp, Glycine max
gaaacacacagaagacagagtgagacgcttctcacgatggagggaggagtatactacgcgcgcatgcctcgggtcaaaatccgcgagctgaaggacgactacgccaagttcgagctccgcgacaccgacgcgagatcgccaacgcgctgcggcgcgtgatgatcgcggaggtgccgacggtcgccatcgacctcgtggagatcgaggtcaactcctcggtgctcaatgacgagtttatcgctcacaggctgggcc

SEQ ID NO: 154042 - DNA, 254 bp, Glycine max
gctatggagtggaaaatatgtggatgtaggagatttcgggatgaatggcctcaaaacgctttgtcgtttgtggttattgagtcctgagtgatcttgtcatccgacctttgccatgacaggtgcgcttgcatgcaggtcaaaaaatgttaataaaaaaagttttattggtttggggagagatcgcacgggggttgcccggggtctcttcctcttgtgtggtgtggtgtttgctgtgctctccttttcgttatgcc

SEQ ID NO: 154043 - DNA, 253 bp, Glycine max
gtgccacactgacacatcagaatggaaccctaaacatttggcctttcaggtgctcaaagttaagccaggaactattcctgtctgccacttccttcctgaggatcatgttgtttgggttcccaagtagatttgcttcaagtcctttttccatatatgtccttgaataactagcttcaatagcatcagctacagaactcgatgcatgtatttgctcgtactatatagttctctagatatgtatacttttttgctg

SEQ ID NO: 154044 - DNA, 256 bp, Glycine max
ctagagtcttcagtttctcctcgttgttcttcgctttcctgttttcaatttcgattctttcgttaatttaataagatgtttgggagggcacgaagaagagcgataatacgaggtactacgaaatcctcggctctccaagaacgcttcgcaggatgatctgaagaaggcttacaagaaagccgccattaagaatcaccccgacaagggcggtgatcccgagaagtttaaagagctggcgcaagcttatgaggttctg

SEQ ID NO: 154045 - DNA, 254 bp, Glycine max
ctcttataatccttgctttggtgcctcttctaggactaaatggatatctgcaattcaagttcttaaaaggattcagtgcagatacaatgaaattgtatgaggaagcaagccaagtggcaaatgatgctgtgggagtataagaacagttgcttctttctgtgctgaagagaaggtgatggaattataccaggaaaaatgtgaaggaccaattaagacaggcaaaaggcaagggataataagtggaattagttttg

SEQ ID NO: 154046 - DNA, 140 bp, Glycine max
taatggggcaagtggagggtatgattatataatagtggggggtggaacagcagggtgtccattggctgcaaccctgtctcagaagttcaaagttctgctgcttgaaagaggaggagtccctttcaacaacccaatgtgtc

SEQ ID NO: 154047 - DNA, 255 bp, Glycine max
cacaagcctagtgaaagtgagaaaaaataaaaatcaaagagcataatgtcagggatcattcacaagattggggagacccttcatctgggagggcacaagaaggaggatgagcataagggtgagcaccatgctgagaatacaaaggggagcaccatggtgaacacagtagtgagtacaaaggagagcatcatggtgaacacaaagctggagagtaccatggtgagcacaagccagagcacaaagaggggttcctag

SEQ ID NO: 154048 - DNA, 254 bp, Glycine max
ccctatcgcgcaggagaatgtgttggcttcttctccccgacgaactgtggaggcgaattctggagatcggaatcgagagcaacggtttcagttacaaggatctctgctgcgtctcaatctcatgccgccgcttcatcgcctctcctcggaagaacctctttggaaccgtcttctcttctctgactatccccaatcccaatctcacccttcttcttcttcttcttcttcttcttctaaatctctttacagattaa

SEQ ID NO: 154049 - DNA, 254 bp, Glycine max
gaggaatcttgagaaatggcaggggacagcaagagcaagattctgttcatcggagggactggttacatcggaaaattcatcgtggaagccagcgccaaagctggccacccaactttccttttggtgagggatccactctctccaaccccgcaaaatcacccctcatcgacaatttcaaaggcctcggtgtcaatcttgttttaggagatctatacgatcaccagagtttggtgagtgctataaagcaggtcgat

SEQ ID NO: 154050 - DNA, 251 bp, Glycine max
  unsure (1)..(251): unsure at all n locations
cttttctctctctgaactctgaagcnaaacaacattaccagagtggttctagtaattcagtgctgctagaagatggaaactagtgaatggcatatcgagcgaagatctagcttcggctctgaatccccctagcaagagaggcaggaaatgtgcctgaaactgggtcactctctattgtggtgcttggtgcttctggtgatcttgctaagaagaagacatttcctgcacttttccacctatacctgngntac

SEQ ID NO: 154051 - DNA, 252 bp, Glycine max
gcctccggcagatattctgcaggctgccactgagggaaataatgatatgccgctcagtgtcaaaattcttcctgcagctgctctcaacaccttcgttcctccaggtcctctccagctcccatccaccctccagctcctggccctccgcaaccgccaccacaccccttctcacacctctctccccctcttcgaccccgccaccaaatcatggctccacttccccctcgacttcctccccttccactcccctct

SEQ ID NO: 154052 - DNA, 250 bp, Glycine max
gtggtgatgggtgggtgagtccgaattgtgaaagtaagcaaagatggctttcacggaatcgtctctcctccttccttcggtttcaggaaccaacaagaacaagaacaaggttccagaagacaaatggttttagcctacattgtgtattttaccctgggtctcggttaccttctcccatggaacgctttcatcaccgccgttgattacttctcctttctctaccctgacgccagcgttgaccgcatcttcg

SEQ ID NO: 154053 - DNA, 249 bp, Glycine max
actcgagctgaattcggctcgagcgagactgcgtgtggtatccttatagattggctgcaatattaccctttttcatttttgaactatcgtttgaaattgaagtacaatggcactttccttcagggatgaagtgatacctttggagccattcaagttccctccgagaaattatggggagcacaaactcaaagatcgttgcagaacttcgatatcggtgggccccgcgaacgcatgcccgaacccatcatt

SEQ ID NO: 154054 - DNA, 250 bp, Glycine max
catcaagcaaacgataagaaatgttatcagaaacattggccatccctgcagtactccttgtaatactcattttgattctatcctctgtcttgttccatcttcaagatgaaagaacaaatccaccaggcctaaacccctcccaattattggtaaccttcacatgctggggaaactcccacatcgttcccttcaagcccttgccaaaaattatggacccataatgttcataaagttgggacaagtcccaacc

SEQ ID NO: 154055 - DNA, 248 bp, Glycine max
tcagttttctacttgaatcttcgttatccttctttttttctccttgaactcgaatattcactatggcagatgaggtggttctgctagatttctggccaagtccatttgggatgagggtcaggattgacttgctgaaaagggtatcaaatatgagtccaaagaagaggacttgcagaacaagagccctttgctcctcaaaatgaacccggttcacaagaaaatcccggttctcatccacaatggcaaac

SEQ ID NO: 154056 - DNA, 250 bp, Glycine max
tcttgctcttgttcaagattggcctatcaaattatgtaccagcgtcttttgttttcggggattccctgctcgatgtagggaacaacaactatattgtttcactggccaaagcaaaccatgacccttaggaattgattttggaatggccactggtcgtttcagcaatggaagaacagttgcagatgttataaatcagaaactgggtcttggcttttctcctccttacttggctcccactactactggatca

SEQ ID NO: 154057 - DNA, 248 bp, Glycine max
cttcctcctctctctgcatcgctgcgttttccgaatcgaaaggtgaggttagtaagtaacaatggtggagaaggccaagggtaggaaggaggaggttgtcactcgagagtacaccatcaacctcccaaacgcttgcatggctgcacatttaagaagaaggctcctaaagcaattaaggagataaggaagtttgctcagaaagcgatggggacgaatgatgtaagagtggatgtgaagctcaacaaggc

SEQ ID NO: 154058 - DNA, 219 bp, Glycine max
ggaaattccacagagaagatccagttttggataaaattgatgctgaactattatccagaggtcctggaatgactgttcccggaggttggtgcatagggaaaagggagaatggcaccgatccctgctctgaagtcggtgatactaacgttctgaggcctggcccaggttccaagagacttgaaacattaatcaactcattgttgtcgaatgaaaagttcc

SEQ ID NO: 154059 - DNA, 215 bp, Glycine max
gtttgatcctggctcagaaggaacgctagctatatgcttaacacatgcaagtcgaacgttgttttcggggagctgggcagaaggaaaagaggctcctagcgtgaaggttgcttgtctcgcccaggaggtgggaacagttgaaaacaaagtggcgaacgggtgcgtaatgcgtgggaatctgccgaacagttcgggccaaatcctgaagaaagcta

SEQ ID NO: 154060 - DNA, 215 bp, Glycine max
attgaaggtccaagcaccatgtttggctctgtcttgagttatattactctgagattgctaggtgaggggcctaatgatggacaaggggaaatggagaaggcacgtgactggattctagggcatggtggtgctacttatataacgtcatgggggaagatgtggctttcagtacttggagtgtatgaatggtctggaaataatcccctgccccctga

SEQ ID NO: 154061 - DNA, 223 bp, Glycine max
cgctattctcttcattccatggctttgcccaaccagcaaaccgtggattaccctagtttcaaactcgttatcgtcggcgatggtggcacaggaaagacaacctttgtgaaaaggcatctcaccggagaattcgagaagaaatatgagccaaccatcggtgtggaggttcacccattggattttttcacaaactgtggaaagattcgattttactgctgggata

SEQ ID NO: 154062 - DNA, 227 bp, Glycine max
agcaagcaaagcgcgggagaaagagaggcagcaaacaaaaacaatggcgacgtcgctctctgtttcgccatctctctctctcaacactctcttcatcgtcaaagcgcttccactatctcgcccctctattctctctctccctctccccaaatccctactctctctctccacgcgccgccgcaccttcatcgtccgcgccgaatcccaaaacggcgccgaccccgttc

SEQ ID NO: 154063 - DNA, 229 bp, Glycine max
ctttgattgctttatatgaaggagatgccacatcagaaactactcatattgagattgagccttttaccatcttgggagttattgcagggttaattccatatcctcatcataatcagtcacctagaaacacgtatcagtgtgccatgggtaagcaagctatgggaaatatagcatttaaccagctgcgccggatggacagtttgctttacctactggtttatcctcaacg

SEQ ID NO: 154064 - DNA, 219 bp, Glycine max
attcaaagaaggcgtcttcataaacgcctttattctccgtttccgtttccttcccggaattcgatttttcatctctgaaaatgagagagtgcatctcgatccacattggtcaggccggtatccaggtcggaaatgcttgctgggagctctactgtcttgagcacggcatcgggcccgatgggcaaatgccaagtgacaaaacagttggcggaggtgatg

SEQ ID NO: 154065 - DNA, 216 bp, Glycine max
cggatctcttcttcagtggtggaagctactagaacactagtttgctcagcactgcgatgaggaagtggacggttgcttccgctctccttcttctctctctcctctttctctttgcagatcaaggtcgaaagtttcaggcgaatgccgagggagattccgacgagcttgtagatcctccgaaggtggaggacaagatcggtgctgtgcctcatggcc

SEQ ID NO: 154066 - DNA, 240 bp, Glycine max
gccatttgggagttaggttctgcacgctctgcttccagcgagtgttctttcttcgtttcaacaccttaatttgcatacgctgcttcttcagcttgagaaatggcacaagaaacctttctattcacatctgaatctgtaaacgagggtcaccccgacaagctgtgcgaccagatctctgatgcagtgctcgatgcgtgccttgaacaggaccctgacagcaaggttgcctgtgagacatgc

SEQ ID NO: 154067 - DNA, 238 bp, Glycine max
acgcaccagaaaacgtatgggcaaattggcagtggagatcaattaacgatgtgtacatgaatggagcattttttgtgcaatctgggcctgagctggctagcagaccattctcaagagaagacatgatcaccgctaaggtaggaaattatgtaggaaggcttacacgctattctggcaacctgttgaagtgcagagtgggtcgccttgttaattatcctttttcccattaattctcttc

SEQ ID NO: 154068 - DNA, 222 bp, Glycine max
caaagtttaagtcatcatgggtaaggaaaagactcacatcaacattgtcgtcattggacatgtcgactctgggaagtcaactaccactggtcatttgatctacaagcttggaggtattgacaaccgttcgattcaaaggtccaaaaaggggccccctaagttgaacaggaggtcatccacgtatccctgggtgcttgaaaacctcaaggctgagcgcgaaag

SEQ ID NO: 154069 - DNA, 218 bp, Glycine max
cgatctcaacggagcacctctcttcaggtcgccatctagactgcaatcatggctgatggaccacagcatccatcagttgttcagaagctagctggacagtcttacctggtgtccaggctaagccccaactttaactctgggaattattcctcgactggttcttacttcaatggaggactgcactcttctgagttggctgttgtgtcgcctggatctcc

SEQ ID NO: 154070 - DNA, 216 bp, Glycine max
ctctaaaccctaaacaactctttctcttcttccttcgctcgttgttctccctcgcgtagatcgacaatggcggagacagagacgtttgctttccaggctgagatcaacctgctcctcagtctcatcatcaacaccttctactccaacaaggaccttttccttcgtgaactcatcagcaacgcctccgatgctttggacaagattcgatttgagagt

SEQ ID NO: 154071 - DNA, 231 bp, Glycine max
ttcgatttgttgtggattggatgatggaaaaaccagcaagcccctttcattgaaagggcgcagtgaactgtaattgtgaaaaggttggaagatctggccaaagaaggtgatagccctgtagattcgttcccatggttcgatccttcccagtaaaacgcggcgtgttcgaattctgatcgcttttacgcgagaaagggggaccaccctctaagcctaagtattcctcaatga

SEQ ID NO: 154072 - DNA, 238 bp, Glycine max
gttcttccttctcaaatattcttgagatccccattttctccgaagcaaagccatggctaagggtcctggtctctactctgacatcggcaagaaagctagggatctgctgttcaaggactaccacagtgaccagaagttcaccatcaccacctactcaccgactggagtggctattacagcatcaggaaccaggaaaagtgaactgtttctggctgatgtcaacaccagttgaagaaca

SEQ ID NO: 154073 - DNA, 219 bp, Glycine max
cgaagagcagtagaaagaaattagaatggccactttagacgaacgcccttctgcgaaaaggtggcttcctcttgaagctaaccctgaagtcatgaaccagttcctttggggtcttggccttccattggacgaggcagattgctgtgatgtgtttggcttagatgaagagcttctggaaatggttccgaagcccgtcctcgccgtgctttttctttatcc

SEQ ID NO: 154074 - DNA, 215 bp, Glycine max
gccagacactgacgatgttcacgtcgtcgctgtatctcgccgcgttgctgtcgtcgttggttgcctccaccgtcacacgtaggttcggccgaaaactctccatgcttttcggaggcttgcttttcctcgtcggtgcccttatcaacggttttgcccaacacgtgtggatgctcatcgtgggtcggatcttgctcgggttcggtatcgggtttgcc

SEQ ID NO: 154075 - DNA, 213 bp, Glycine max
aaacacaagccaagtgaaagtgagaaaaaataaaaatcaaagagcataatgtcagggatcattcacaagattggggagacccttcatgtgggagggcacaagaaggaggaggagcataagggtgagcaccatgctggagaatacaaaggggagcaccatggtgaacacagtagtgagtacaaaggagagcatcatggtgaacacaaagctgga

SEQ ID NO: 154076 - DNA, 135 bp, Glycine max
tagacatctagattgcacaaggtgcaaaacctggtgaaggtggacaattgcctggaaaaaaagttagcatgtatattgctaggttgagaaattctaaaccaggagttcctcttatatctccacctcctcatcatg

SEQ ID NO: 154077 - DNA, 218 bp, Glycine max
actcgctctatttctcagcgtctgtgtttgcggctgaggattccgaacgagtgaccttcttcgtttctcgcaaagttcaagtaatcatgggtaaggaaaaggttcacatcaacattctcgtcattggacatgtcgactctgggaagtcaactaccactggtcacttgatctacaagcttggaggtattgacaagcgtgtgattgagaggttcgagaag

SEQ ID NO: 154078 - DNA, 219 bp, Glycine max
ctcaacttctgctacccactctcttcttccaagtccaaccacgccgttctctacagtcatgggcaacgtcaagatcggaatcaacggatttggaagaattggccgtttggttgccagagtcgctctgcaaagagacgatgtggagctcgttgccgttaacgaccctttcattaccaccgattacatgacatacatgtttaaatacgacagtgttcacgg

SEQ ID NO: 154079 - DNA, 223 bp, Glycine max
cgctcctcacttgcagaattctaagaaggcgtcttcataaacgcctttattctccgtttccgtttccttcccggaattcgatttttcatctctgaaaatgagagagtgcatctcgatccacattggtcaggccggtatccaggtcggaaatgcttgctgggagctctactgtcttgagcacggcatcgggcccgatgggcaaatgccaagtgacaaaacagtt

SEQ ID NO: 154080 - DNA, 231 bp, Glycine max
ctagcaatggaggcgattaggaagagtaggattcttatatttggaggaactggttacatagggaagtatatggtgaaggcaagcgtcacgttaggccatccaacttttgtctacactcgccctcttgatgcacaaactccttcctctaaggcacagctttgcaaggagttcaactctatgggggtcacacttgtccatggagaacttgagcatgaccagattctggcagtg

SEQ ID NO: 154081 - DNA, 224 bp, Glycine max
ggaagacttactcggccttttaaggattcacatcaagcgcggtgtcaacctcgccgttcgtgatgtcaatactagcgatccatacgtcgtcgttaagatgggcaagcagaagctgaagactcgtgtgattaaaaaggatgttaatcctgagtggaaggaagatcttacgctttctgttacagatccaattcatccatttatactgacagtgtatgactatgaca

SEQ ID NO: 154082 - DNA, 220 bp, Glycine max
cctcgctctatttctcagtctctgtgtttgcggctgaggattccgaacgagtgaccttcttcgtttctcgcaaagtttaagtaatcatgggtaaggaaaaggttcacatcaacattgtccgctttggacatgtcgactctgggaagtcaactaccactggtcacttgatctacaagcttggaggtattgacaagcgtgtgattgagaggttcgagaagga

SEQ ID NO: 154083 - DNA, 201 bp, Glycine max
gaagaattcgaagagaaatcaaatcgaatctcatttgatctgtgtgtggttgcggcggcggcaatggcggacacttggcatcgatattcgggacggagaaggacagggtgaactgcccgttctacttcaagatcggcgcgtgcaggcacggcgaccggtgctcgcgtctccacacaacatacgagaaaaggtcgccgtgcc

SEQ ID NO: 154084 - DNA, 209 bp, Glycine max
  unsure (1)..(209): unsure at all n locations
tccacacaacatacgacacataactgtgagcctttctttcaggttcttaacttgatcagtcagtagtgtccagantctaagggtagttgcaaattgcaatggctaagcatgatgttgagggtggttccttctctgcaaaggactaccatgatcctcctccagcaccgttgattgatgctgaggaactcacacagtggtccttctacagg

SEQ ID NO: 154085 - DNA, 225 bp, Glycine max
ctgaatatggcctgtataccagtgttgttccacctcttatttatgctatgatggggagctcaagagaaattgcaattggacctgtagctgtagtgtcaatactgttagcctctctggtcccaaaagtggaagatcctgttgccaatcctaatgcctatagaaatcttgtctttaccgtgacttttttcactggaatttttcaaactgcatttggtgttttcagat

SEQ ID NO: 154086 - DNA, 238 bp, Glycine max
gtggagatctagtgctgccaaacctcgctgaaaattagggtttcgtttcggaggtagacgaagatgttcggaagggcaccgaagaaaagcgacagcaccaggtactacgaaatcctcggcgtttcgaagaacgcttcgccggatgatttaaagaaggcttacaagaaagccgccattaagaaccaccctgacaaaggcggtgatcctgagaagttcaaagagcttgctcaagcctatg

SEQ ID NO: 154087 - DNA, 206 bp, Glycine max
gctagcaatattgtgtctgctatctacattgccactggtcaggatcctgcccagaatgtggagagttctcactgcatcaccatgatggaagctatcaatgatggcaaggaccttcacgtttcggtgaccatgccctccattgaggttggtactgttggaggcggcacacaactcgcatctcagtcagcatgtcttaatttacttgg

SEQ ID NO: 154088 - DNA, 208 bp, Glycine max
agggtgttgagaaagagtatgttatccttcttgcagcaagagcttctaggactgaaaatcaagatgccatagatgctgcaattgttggcatgcttgctgacccaaaggaggcacgtagtggtgttagggaggtacatttccttccattcaatcctgtagacaagaggactgcactgacctacattgattctgatggaaattggcatag

SEQ ID NO: 154089 - DNA, 215 bp, Glycine max
aagatttcagcaataaaagatattataccactgttggagaaaaccactcagttgagatctcctttgcttatcattgctgaggatgtcactggtgaggctttggccacccttgttgtgaataagctacgtggtatccttaacgttgctgccatcaaagctcctggctttggtgagcggcgaaaggccctgcttcaagacattgctatattgactgg

SEQ ID NO: 154090 - DNA, 225 bp, Glycine max
gccttctttctttttttcaatttccaaatcacgaaactcaagaagatggagaaagcgatcaacagacagaagattttgcttcatcatctcaacccttcatcatccacccaccccaacgaagaatactccctccatgcttcagcatgtgtggcgggggatagcgctgcttatcaaaggacatcgacattcggggacgatgttgtgatcgtggctgcttatcggact

SEQ ID NO: 154091 - DNA, 252 bp, Glycine max
ctcgagccgtgtcacaggtgtagcggcgaaactgaggtcgtagaaagaatggcgaaaacgacgtcgttgttgctctttacactgctcctcttcggaaccttagctctcatccaggcgaagatctcgaaggaggatttgaaggaagtgacccacaaggtttactttgatgttgagattaatggaaaagaagcaggtcgtattgtgatgggtctttttggaaaggctgttccaaaaactgcagaaaactttcga

SEQ ID NO: 154092 - DNA, 152 bp, Glycine max
cccaaaccgaaaccctaaccctaacggagagatggcggacacttggcatcgatattcgggacggagaaggacagggtgaactgtccggtctacttcaagatcggcgcgtgcaggcacggcgaccggtgctcccggcttcacaccaagccgac

SEQ ID NO: 154093 - DNA, 249 bp, Glycine max
cattgatattgctgaggatggatttttgagtctgcttactgaaaatggtaacactaaggatgacctcaagcttcccactgatgagagtctgctcactcagataaaggatggatttgctgagggcaaggatcttgttgtgtctgtcatgtctgctatgggtgaggaacagatttgtgccctcaaggatattgggccaaagaactagcttttggtgcttgttgcttgttatttctattttctatttaagca

SEQ ID NO: 154094 - DNA, 246 bp, Glycine max
cttgttctctaggtgatcagcttgccattgccaaagaaactggccgaaggcttgggatgggaacaaacatgtacccatcttcttcattgcttggtcagagcaaggatgctgctgtttcagcagttccagttgatgaattgattgagaaggctgatggatttgctggagtatttcctgaacacaaatatgaaattgtgaagaggctgcaagagaggaagcatatttgtggaatgacaggtgatggtg

SEQ ID NO: 154095 - DNA, 248 bp, Glycine max
ggccaggcaagccccactcaaccaccacactactcctcgttcacgctacccctttctgctcttcttctacctttcaagttttaaaagtataaagatggcagagacattcctatttacctcagagtcggtgaacgagggacaccctgacaagctctgcgaccaaatctccgatgctgtcctcgacgcttgcctcgagcaggacccagacagcaaagttgcctgcgaaacatgcaccaaaaccaacttgg

SEQ ID NO: 154096 - DNA, 247 bp, Glycine max
ccaactctctctctctctccacttgccaaaggaaaaaggctaaagagaaacccacacacacacacacacacagatatatgtcttccccaagcaagcgccgagagatggacttgatgaaactgatgatgagtgattacaaggtcgagatgattaatgatggaatgcaagaattttatgtgcaattccatggacccaatgacagtccttatcatggtggtgtgtggaaagtaagagttgagttgccgga

SEQ ID NO: 154097 - DNA, 207 bp, Glycine max
cgagacagaaaaaggggttagggtttgttcttgtgatcgaagctaagcgaacagaaatgggtggatcagtgagggacgtgaagtcgaagggcgaggtcgacgaggtggtggcgagtggctctccggttatcctccacttctgggcgtcgtagtgcgaacttccaagcacatggaccaactcttctctcacctttccactgatttccc

SEQ ID NO: 154098 - DNA, 244 bp, Glycine max
tagaactagaactagggtttcatctttgccatcagaaacaacaatgatctacgacgttaactctccccttttccgatccttcctcagccagaagggaggctcctccgataagaggaaaacggatgaacagaagccaaaagagcagaaacccaaagccagcgagaacaaacctataatgacagagtgacaacaaatttgctgcattcagttgtagaatgataataggtggtagatattgcatttg

SEQ ID NO: 154099 - DNA, 243 bp, Glycine max
gtgaggtagacagacagaggcggcacaaataagaatggcttcaaatcccaaacctttgacttttgaggaggtggctaatcacaacaacaaaaaggattgctggattattatcaatggaaaggtgtatgatatcacgccatttctggatgagcatcctggaggagatgaagttttggtaacgtcaacagggaaggatgccaccattgattttgaagatgtgggccacagtgattctgccataga

SEQ ID NO: 154100 - DNA, 244 bp, Glycine max
caaagttctaatctttcgcctattgggttctactcctttctctcttcgtttccgatcgatccaattttcttcccatggctacgatcggacacaacaatctcaatgccaaattggttcttctcggggacatgggtgctgggaaatccagcttcgttttgcgctttgtcaagggtcaatttctcgaatttcaggaatcaacaataggggcagcgttcttttcacagacgctggcagtaaatgacgc

SEQ ID NO: 154101 - DNA, 245 bp, Glycine max
aaaaaactattttggcttctgcctttccttttccagggagctcattgacaatggctgaaacaaagtgggtcatgaaggacaaaagatggtctctccatggaatgacagctctagtcacaggaggcacccgaggcatagggcatgccattgttgaagagttagctgagtttggagcaactgttcatatatgtgcacgtaatcaagatgatattgataaatgtttagaagagtggaaaaacaaggga

SEQ ID NO: 154102 - DNA, 245 bp, Glycine max
ggaagatgtgtttgagttcctcgggaacgttcctctgctacagaggcttctgggctcgtctgtaaggaagatatctgagcttgtgattctcaaacactatgagccgggagagtatgttgttcgtgagggagaacgtggggatggtctttacttcatctaggagggagaggctgaggttgttggctctgttaatgctgacgatgataatcatccagagtttcaattgaaaagatttgactattttg

SEQ ID NO: 154103 - DNA, 242 bp, Glycine max
gtcaaattattcctttccaccaggcttttgatgtgaaaaaatgggagaagtttaatagtgaaaaagtagcctcacttgcctatgcccgaattcaaggaaaagcttctcttattgctcattttcagaactcaagcctgatgaacgaagacaaacgttgccgtcctattctcttccatacagatggcccaactgctggtgatccggagccttttcccatgggtgccaatattagactgagacct

SEQ ID NO: 154104 - DNA, 242 bp, Glycine max
atcaaaatggttgctgctggtgctgaacatagtgtagcaatcactaaagatgggaatttgtatggatggggctggggccgatatggaaacttgggattgggtgacagaaacgatcgattgctgcctgagaaagtgactgttgatggtgacaagatggccatggttgcttgtggctggcggcacacaatatgtgtttcatcttctggtggattatacacaaatggatggggcaaatacggcca

SEQ ID NO: 154105 - DNA, 244 bp, Glycine max
aacactttccacttgtctccgaattagttatcttgagaaacattattcccattgctatatattatggctagcatgaaggttacatgggtggttgtgatcatgtgcatggccgtggtgggtgcaccgctgatggcgcaagccatgacatgcaatgatgtgacggtgaacatggcacagtgcctatcctacctgatgcagggaggaacaccttcaacactttgctgcagcggagtcaagaacattc

SEQ ID NO: 154106 - DNA, 242 bp, Glycine max
  unsure (1)..(242): unsure at all n locations
ctaaaacatctcaatgggttcttcttctattccaccttcgagattaaancatgaccatggctgcgatcgngctcctgttcacggtctttgccgtttcctccgccctagacatgtcgtaaatctcgtacgacagcgcccacgcggacaaggccgccacgttgcgcaccgaggatgagctgatgtccatgtacgagcagtggctcgtgaagcacgggaaggtgtacaacgcgctcggcgagaag

SEQ ID NO: 154107 - DNA, 242 bp, Glycine max
ttccaatatattccattctctctgtgtatttccctacctctcccttcaagatgcagatcttcgtcaagaccctcaccggcaagaccatcacccttgaggtggaaagctctgacaccatcgacaacgtcaaggccaagatccaggacaaggaaggaatccccccggaccagcaacgtctcattttcgccggaaagcaacttgaggacggccgtacccttgctgactacaacattcagaaggag

SEQ ID NO: 154108 - DNA, 242 bp, Glycine max
gcgttggtgaatccgtttctgtctccccctcgaactcccctctctctgcgagtttcagctccgccaaaccaagcactactacgttggactctctgctcccaatattcattcacaccatcaacgctaagatcgaagcacgccatgtgtggcgccactgccgacatcaaggctgcacctttagctgatggagaagcagatcacgcggttcttgtgggccccgccagcgaggacgagagaaaagg

SEQ ID NO: 154109 - DNA, 238 bp, Glycine max
ctctttgacacaaggaagaagcctaacaatattaagctttatgtccgccgtgtctttatcatggacaactgtgaggagttgattcctgagtatttgggctttgtcaagggtattgtggattccgaagatcctaacaattcaacatttcaagagaaatgttgcaacagaccaagatcttgaaggtcatcagaaagaacttggttaagaagtgccttgagctcttctttgaaattgcaga

SEQ ID NO: 154110 - DNA, 241 bp, Glycine max
tctcgagccgattcggctcgaggccgtgatcataaatccttccttgtgtgcaaaaagaagatgagaacatctcctgagatgctatgctgtttttgccctgctccttttaggcagttccttgagattgtagtgaacatgaagtttgatgaagaacctaactattccaggctaatatctttgtttgatggtatgcttggaccgaatcctgcattgaggccaattaacactgaaggtgctcaaa

SEQ ID NO: 154111 - DNA, 235 bp, Glycine max
agcggagatagcaatctcatctcattcatttcaatggcaactcaaggtcaagtcattacctgcaaagctgcggtggcctgggaacccaacaagcccttaactgtccaagacgttcaggtggctccgcctcaggccggcgaggtccgtgtccaaatcctcttcaccgctctctgccacaccgatgcttacacttggggcggcaaggatcccgaaggtctcttcccctgtattcttg

SEQ ID NO: 154112 - DNA, 205 bp, Glycine max
caaaactggaactctgaccctgaataagctcagtgttgataaaaacctgattgaggtttttgccaagggtgttgagaaggactatgttatccttcttgcagcaagggcttctaggattgagaatcaggatgctatagatgctgcaatagttgggatgcttgctgatccaaaggaggcacaagctggtatcagggaggtccacttt

SEQ ID NO: 154113 - DNA, 241 bp, Glycine max
ctctctctctagggtttgatcagactcaagggtttaagccatgggaaaaaggaaggcaaaggcaaagcctcctccaaagaagcgaatggataagctcgataccgtcttcagctgccctttctgcaatcaatggcagcagcgtcgaaatgccgccttgaccatgaagaccttgataggggaagctatttgcgggatatgccaagagagctttagcactaccatcacagctttatcagagcca

SEQ ID NO: 154114 - DNA, 267 bp, Glycine max
gttaacaaaagggtactagagcatgcaccatgctcagttggaatctttgttgatcgtgggcttggtggtacatctcatgtctccgcaagtaatgtttcatatcgtgttacagtgcttttctttggtggtggtgatgatcgtgaagcccttgcttatggagctcgtatggctgagcaccctggcatcagattgctggttattcgctttgtaggggaaccaatgaatgaaggagagattgtaagagttgatgtgggtgactccatggca

SEQ ID NO: 154115 - DNA, 259 bp, Glycine max
gcttctatcaactctctacctgtcaaagggagcaaagcgtcttgctatcataggatggatttgccttgttttcaacatcagtgtctttgctgcacctctcttcattattaggcgagtcataaagacgaggagcgtcgaatacatgccatttactttgtccatgtttttaaccatcaatgctgttatgtggttcttctatggccttctcctcagggattattacgttgctcttccaaacacgcttgggtttcgctcggca

SEQ ID NO: 154116 - DNA, 260 bp, Glycine max
cggctcgagcccaattcttccccctccacccacccagcatatctctctattcctatttattagaccccctcacattaccttcccgtcaccaactactttgactcctttaccataccattacaataattatcaaacctaaccagtaaaaatggtgaccgtggaggaaatccgcaacgctcagcgttcccatggacccgccaccatcttggccttcggcaccgccacgccgtccaactgcgtctcccaagccgattacctga

SEQ ID NO: 154117 - DNA, 257 bp, Glycine max
ccacttcaagggacagaatacatttgtgctttaggcagtttagaagcaacaaaatcaagccctttgacttgagtaaattgcgtggttactatgctcaaccaattctttcttgcttacaccttgattcaatccagcaccctgagttcctagcaagagaagatgaagagttgagtgcaggtgatgatgtgaaagtaggagtcaagaggaggaggggtgataaggggtctcctcagtcttcgataagtcgccaggggtta

SEQ ID NO: 154118 - DNA, 260 bp, Glycine max
cgcgtctcctggaggctcactccggagcggggctagtgcacgcccgattcggcttcggcaagaaaaaggctcccgccccaaagaaagcctccaggggatcgggccgagacaccgacagacccctttggtatccgggcgccaaagcgccgcaatacctcgatgggagtgctgtcggagactacgggttcgatccgtttgggctagggaagcccgcggagtacctgcagttcgagctggactcgctggaccagaacctgcga

SEQ ID NO: 154119 - DNA, 267 bp, Glycine max
gctttagccatcactaacactcagtctctgaattggggctgagggtttcgagtaacgtttatttttcacgagtttaagatatcatgggtaaagagaaggttcacattaacattgtggtcattggccatgttgactctgggaagtcaaccaccactggccacttgatttacaagcttggaggtattgacaagcgtgttattgagaggtttgagaaagaagctgctgagatgaacaagaggtcattcaaatacgcctgggtgttgacaa

SEQ ID NO: 154120 - DNA, 265 bp, Glycine max
taactagaaacagtgtgatgaaaatgaaggtccttgttttcttcgttgctacaattttggtagcatggcaatgccatgcgtacgatatgttccctctccgaatgaacactggctatggtgcccgtactccggaggtgaaatgcgcaagttggaggcttgctgtggaagcacacaacatctttggctttgagaccattcctgaagagtgcgttgaagcaacaaaggaatacatccatggcgaacaatatagatcagactccaaaca

SEQ ID NO: 154121 - DNA, 263 bp, Glycine max
atcactagaagtgttggatgcatttctatttctaactaattattgtgcttattattattgttgagaaagaaaagaatggcaaagttaataaaattctttgagttgaacacaggggccaagattccttctgttgggttaggcacttggcaagctgagcctggtgttgtagccaaagctgtcaccacagccattctggttggatacaggcatattgattgtgctcaagcgtataacaatcaagcagagattggttctgctcttaa

SEQ ID NO: 154122 - DNA, 258 bp, Glycine max
caaaaagaaggctacaccaacacctccaaaaaaagctgctgctgctgctcctgccaatgatgagcttgccaagtggtatggtcctgacagaaggatcttcttgcctgagggtctcttggaccgatccgaaatcccagagtacttgaccggcagaagtccctggagactatggttatgacccatttggtcttagcaagaagccagaagactttgccaaatatcaggcatttgagttgattcatgccagatgggcaatgc

SEQ ID NO: 154123 - DNA, 256 bp, Glycine max
ccttggcccagtatttctgaaagtgctaaaagccttgttaggcaaatgttagaacctgaccctaagcttcgattaactgccaaacaagtgcttgagcatccctggctccaaaatgctaagaaggctcctaatgttccacttggagatgttgtcaagtcaaggcttaagcaattttcgatgatgaacagattcaaaagaaaagcccttagggtcattgctgatttcttatccaatgaagaagttgaagacacaaaga

SEQ ID NO: 154124 - DNA, 260 bp, Glycine max
gtatttccctacctctcccttcaagatgcagatcttcgtcaagaccctcaccggcaagaccatcacccttgaggtggaaagctctgacaccatcgacaacgtcaaggccaagatccaggacaaggaaggaatccccccggaccagcaacgtctcattttcgccggaaagcaacttgaggacggccgtacccttgctgactacaacattcagaaggagagtactcttcacctcgtcctccgtctccgtggtggctgcagat

SEQ ID NO: 154125 - DNA, 278 bp, Glycine max
tcggaattcggtcgggtcgagcgattcggctcgagctatactaaggtgaaaaaggagacatggcagctgcaacatctagtgctgtgttaaacggctttggatctcacttcgtgtgtggaggaaagaggagccatgcccttcttgctgctagcattggagggaaagttggtgcttctgttagtcctaaaagagttattgtggcagttgctgctgcaccaaagaagtcatggatccccgctgtaaaaggtggtgggagtttcatagacccagaaggcttg

SEQ ID NO: 154126 - DNA, 226 bp, Glycine max
gtgattctcataaatgcagtgctaacatctattccaatttatttgctatcttttgtcagggtccctaggcaggtgattagcaagataaccagattacaaaggaacttcttatggggtggtgcagctgatcaaaataagatcccttggatcaagtgggaaaaggtgtgtttgccataggaacaaggtgggttgggagtcaaggatatcatctcgttcaacacatcat

SEQ ID NO: 154127 - DNA, 265 bp, Glycine max
agcaattcctcttgcattggaaggaaaagatgtgataggacttgcccaaactggttccggtaagactggagcttttgctcttcccatattgcatgccttattagaagcaccacgcccaaaagatttctttgcttgtgtgttgtctcccacaagagaacttgctattcaaattgcggaacagtttgaagctctaggttctgagattggtgtcaagtgtgccgtgcttgttggaggaattgacatggtacaacaatccatcagatag

SEQ ID NO: 154128 - DNA, 249 bp, Glycine max
cttggcatattgtgccctccctctttctagctatatccctctctttatacaattaacaaagatatatcatatcatatcaactccaaatgatgaaaaatattgggttgtttcttcttgtggtggtggctacttttgtggtggcagccacagctggtagcttttaccaagactttgaaataacatggtgtggtgagcgtgccaaaatctatgaaactggacatcttctcaccctctccctagacagagctc

SEQ ID NO: 154129 - DNA, 241 bp, Glycine max
  unsure (1)..(241): unsure at all n locations
gcagagatgacaggtgggatgtgtggacagaaggtgcaagagatagaggtgacagtggtgatgatgccaaagaaggtggtggacttcaacggcgtaacctccgtctgataagtgagttgctatggggancgccaccgagttcgtggggaaatgcttgggcgcattaggtcatgcagttgatgctctcactgccctgcgctcgccatagtatctccttgcagctgtatcagtgctacgcaga

SEQ ID NO: 154130 - DNA, 208 bp, Glycine max
ctcgttagtcgtttgtaacgcctttgtttgcgttttttgcacagcagaattaacacgtatatagcaagcatggcagtcacactctacgaccttagctctgcctctgggttgaagaagcttgatgagtaccttctcccacgcagctacatcacccggtaccaagctacaaaggatgatcttactgtctatgcagctttgccaactgctc

SEQ ID NO: 154131 - DNA, 250 bp, Glycine max
gtgatgactcattaattaatttgtggattttattccgctatctggttattgggatttatgttggattagctacagttggtatcttcatcatatggtatacacatggttccttctttggtattgaccttagtggggatggacatactcttgtgacttacacccaacttgccaactggggtcaatgctcctcatggcagaacttcactgcttctccattcactgctggtgctaaaacaatcacgttgacaac

SEQ ID NO: 154132 - DNA, 249 bp, Glycine max
aaagattcaacaatggcctctgcttctgctactcttctcaagtcatctcctgttcttgacaagtgcgagtgggtcaaaggccagacccttcgccaacctctcgtgagatgtaacccttcctcagcatcagctctcaccatcaaagctgcttcctatgctgacgagctcgtcaaaaccgccaaaacagtggcctcaccggggcgtggtattttggcgatggatgagtcaaatgcaacctgcggaagcgtt

SEQ ID NO: 154133 - DNA, 250 bp, Glycine max
gagagataaagctgtggaatcactatgtaggattggattgcaaatgagggagagtgatttggttgagtatttcatccctttagtgaagagattggcatcaggtgaatggttcactgctcgagtcgtcttcatgtggactatttcatattgcttaccctagcgcacctgaaatgtcaaagatagaattgagatcaatgtacagtctgttatgtcaagatgacatgccaatggttagaagatctgctgcttc

SEQ ID NO: 154134 - DNA, 248 bp, Glycine max
ctaaaacatctccagtgggttcttcttcttctattacaactacgtcatacaataccatgaccatggccatggccacgatcctgctcctgttcacggtcttcgcggtttcatcggccctagacatgtcgataatctcgtacgacaacgcccacgccgccacgtcgcgcagcacagggagctgatgtccatgtacgagcagtggctagtaaagcacggcaaggtgtacaacgcgctcggagagaggagaa

SEQ ID NO: 154135 - DNA, 251 bp, Glycine max
tagaagagtacaaacgtcttgcaaagaattggagcaaaatgaaagggcttaaaataccaaagaagggtgaaatgagcgccttatcccgaaatatgaatgctcagcacatgagcaaagtcctccctccacagatgctaaagcaaatcggaggcatgggtgggttacaaagcttgatgaagcagatgggatctgctaaagatatgatgggaatgtttggtggtggtgataattagattgactgtggcatatga

SEQ ID NO: 154136 - DNA, 245 bp, Glycine max
aattggctaatgttcctcctaattccactgtgtactacgaagctgagctgctttcctttgtaaaggaaaaggaatcgtgggatctgaatacacaagagaagattgaggcagctgggaagaaaaaggaagaagggaatgccttttttaaggttggcaaatatgaaagggcttcaaagagatatgaaaaggccataaagtttgtcgagtatgattcctcctttagtgatgaggagaacagcatacta

SEQ ID NO: 154137 - DNA, 261 bp, Glycine max
ctctctctagagtaattgcggaatcagctagaattttctaataatggccaaagacgttgagcaggttacagagcaaggtgaatactccgcgaaggattaccatgacccacctccggcgccgttgatcgacccagatgagctcactaagtggtccttgtacagagccgccatagctgagttcatagcaacactccttttcctttacatcaccgtgttgaccattattggctacaagagacagagtgacaccaaatccccggt

SEQ ID NO: 154138 - DNA, 260 bp, Glycine max
tgttagaagtagtgaagaaaatgaaagtcattgttttcttcgttgctataataattttaggtgcagaatggcaatgcaatgggtcagagcaggagcatgagcatggccacagctaccaaattttccctttgcgaatgaaaaccggccccggtggccactacattccggaggtatcgtgcaaaagttggaggcttggtgtggaagcacacaacgtcattgactggagaaccattcctcaagattgcgagggatatatagga

SEQ ID NO: 154139 - DNA, 250 bp, Glycine max
ggtgcttctcgagtccgcgatttattcaggaaggccaaagagaatgccccatgcattgtgtttgttgatgaaattgatgctgttggaaggcaaagaggtactggaattggtggagggaatgatgaaagagaacagaccctcaatcaacttttgacagaaatggatggatttgagggtaataccggtatcattgtcattgcagctactaacagggttgacattcttgattctgcattgttaaggcgggacg

SEQ ID NO: 154140 - DNA, 247 bp, Glycine max
gtaatttccttccttcctttctttctttctttctttctttatcttctcatttttctcaatacaatttttttctttctttctcaagttttgctacttttctcttcttaaccatagttcacatattatatcatcacatatcatagtgatatcatatcacaatgtgtggcatacttgctgtgcttggttgctctgattcatctcaagccaaaagggtccgcgtccttgagctttctcgcagattgaagca

SEQ ID NO: 154141 - DNA, 246 bp, Glycine max
gtgaaagtgagacaaaataaaaatcaaagagcataatgtcagggatcattcacaagattggggagacccttcatgtgggagggcacaagaaggaggaggagcataagggtgagcaccatgctggagaatacaaaggggagcaccatggtgaacacagtagtgagtacaaaggagagcatcatggtgaacacaaagctggagagtaccatggtgagcacaagccagagcacaaagaggggttcctag

SEQ ID NO: 154142 - DNA, 245 bp, Glycine max
ctttctcctaaaacatctccagtgggttcttcttcttctattacaacaacgtcgcccaagaccatgaccatggccatggccacgatcctgctcctgttcacggtcttcgcggtttcatcggccctagacatgtcgataatctcgtacgacaacgcccacgccgccacgtcgcgcagcacgaggagctgatgtccatgtacgagcagtggctagtaaagcacggcaaggtgtacaacgcgctcgga

SEQ ID NO: 154143 - DNA, 246 bp, Glycine max
tccatttccatttcctctctctcagtttccaagaatcttaagctatgggaaagtcttacccaaccgtgagcgctgattaccagaaggccgttgagaaggcgaagaagaagctcagaggcttcatcgctgagaagagatgcgctcctctaatgctccgtttggcatggcactctgctggaacttacgacgtgagctcgaagaccggtggtcccttcggaaccataaagcacccctccgaactcgctc

SEQ ID NO: 154144 - DNA, 247 bp, Glycine max
gcagaaagcaagctcatcctagagttttaaaaatggcagcagcctcctccatggctctctcttccccatccttggctggcaaggccgtgaagctgggcccatcagcccccgaagtcgggagggtcagatgaggaagaccgtcaccaagcaggcctcctccggaagcccatggtacggcccagaccgcgtcaagtacttgggcccattctctggcgagcccccgtcctacctcactggcgagttccca

SEQ ID NO: 154145 - DNA, 249 bp, Glycine max
gagaagcatcgccgactgtcaaatgctttcattaggcagaatccaggtttgttggagaaatcactttccatgatgctcaaggcaccaaggctgatagacttcgataacaagagagcctatttccgctcaagaataaggcaacaacatgaccaacacttgtctgggccattgcgtataagtgtaaggcgggcttacattttggaggactcttataatcagctaaggatgcgtcctactcaggatctgaag

SEQ ID NO: 154146 - DNA, 252 bp, Glycine max
cttgatccttctttttctccttgaactcaaacatggcagatgaggtggttctgctagatttctggccaagtccatttgggatgagggtcaggattgcacttgctgaaaagggtatcaaatatgagtacaaagaagaggacttgaggaacaagagtcctcttctcctccaaatgaacccggttcacaagaagattccggttctcatccacaatggcaaacccatttgtgaatccctcattgctgttcagtaca

SEQ ID NO: 154147 - DNA, 242 bp, Glycine max
  unsure (1)..(242): unsure at all n locations
ctaagtgtgagagaaagaaaatgccaaagtctcaatttcgaaccccatttcttgtttctttatctctattgttattcatcttcaacctcaccccttcatacgcactctatggagcatccacacccgtgcttcaactcantccctctaacttcaagtccaaggttctgaattcaaatggagttgttcttgttgaattctttgctccatggtgtggacactgtcaggctctgactcctatatgg

SEQ ID NO: 154148 - DNA, 243 bp, Glycine max
attcacagctgtcacgccgttaacggaaaatggcaacggcgagacgcagtttcccgcctatcaccgaatgcaacggaacgacaccgtgcgagtctgtggccgccgacctcgacggtacgctcctcatctcccgtagctcgttcccgtacttcatgctcgtcgccgtcgaagccggcagcctcctccgcggcctcatcctcctcctctcccttccgttcgtcatcatcgcctacctcttcatct

SEQ ID NO: 154149 - DNA, 243 bp, Glycine max
accgggtggatactttgtttggacatcaccactcacaaatgctcgtaacaaagagaatcagaaaaggtggaagtttatacaggattttacattaacactttgctgggagcttctgtcacagcaagatgaaactgtcgtatggcagaaaactagtaaaaaaagttgctatgcatcaagaaagtctggttctggcccttctttgtgtggtagaggtattgatgtggagactccctattatcagaa

SEQ ID NO: 154150 - DNA, 244 bp, Glycine max
gtgagagtgtgagtgagatagagagagacgcttcgcaaatctcaatcgaatctcagaaaaatgagagaaatcatcagcattcacataggtcaggccgggatccaggtcggaaactcctgctgggaactctactgcctcgaacatggcatccagcccgacggcatgatgccttctgactccaccttcggtgtagcccacgacgccttcaacaccttcttcagcgcaaccggatctggcaagcacg

SEQ ID NO: 154151 - DNA, 245 bp, Glycine max
gtttaaacctaattctcatttcttcatcgttcgattcttctcctcctaaagatgcagatcttcgtgaaaactttgaccggtaagaccatcacccttgaggtggagtcctccgacaccatcgataacgcgaaagctaagattcaagacaaggaagggatcccacctgaccagcagagacttatctttgcgggtaaacagcttgaggatggtcgaacccttgccgactacaacatccaaaaggaatc

SEQ ID NO: 154152 - DNA, 246 bp, Glycine max
gcttaaaaagcccaagaaatttggcttgtcttggacgattaactggatctgcattattcttggggtaatgttgatgatagtatctccaattggtgctctaaggaatatcatattatcggccaaaaactacgagttcttctcataaactattgatgcaatcattgattccccaaccgattttaaagttgatgagtgaaactaaataacaagaaagcacgcagacatgcgttatacattgaatataga

SEQ ID NO: 154153 - DNA, 240 bp, Glycine max
aaaaaatggcagcagcttcttccatggctctctcatccccatccttggctggcaaggccgtgaagctgggcccatcagccccagaagtgggaagggtgagcatgaggaagaccgtcaccaagcaggtctcctcaggaagcccatggtacggcccagaccgagtcaagtacttgggcccattctctggcgagcccccgtcctacctaaccggtgagttcccaggcgactacggctgggaca

SEQ ID NO: 154154 - DNA, 238 bp, Glycine max
ggcacggcatgtgggagtgtgtggacttcttccctgtgtccaaggagaatgagaatggattggatacttctattagtggggctgaggtgaagcatgtgatgaaggtgagcctggatgatgatagacatgattactattcaattgggacttatgatgagaagaatgttctgttcacaccagatgatgcgcggaatgatgttggcgttggattgaggtatgactatgggatattctatgc

SEQ ID NO: 154155 - DNA, 244 bp, Glycine max
ctttagcaaagtatgttaaagctgtatatcatactcgagtttcagttggtatgcgcttcaggatgctgtttgaaacagaggaatctagtgtgcgtcgatacatgggcacaataactggcattagtgacttggattctattcggtggccaaattcccattggcgctcagtcaaggttggctgggatgaatccacagcaggagagaggcaacctcgagtgtctttatgggaaattgagccattaac

SEQ ID NO: 154156 - DNA, 247 bp, Glycine max
ctcgagccgaatcggctcgagaggaaatactacgggagtggaaaaacaaaggaagcaccacggagagaatcacagcttaacgggttgcacaattttctcgtggaaaaagaggaagaaattgtgacggccctcaagcatgatttggggaagcattacgtggaggcttttagagacgagcttggaacattaatgaagaccttaaacttggcaaccaagtctttgacaaattggatggcggggaaagagg

SEQ ID NO: 154157 - DNA, 237 bp, Glycine max
cagagagtggtttcagtgagtgatcggtgttcacttgatccttcataagttctcatcatcatcatcatcatcaccgttgattgaagaagatgccgatcagaaacattgccatcggaaggccgaagaggctactcaccccgacacgttgaaggcggggttggctgagttcatctccaccttgatcttcgtgttcgccggttcaggttccggcatcgcctacaacaagctcaccgacaa

SEQ ID NO: 154158 - DNA, 245 bp, Glycine max
ctatagtaaaaaaaggacattcattcatctatggctacccttattgctcccagcaaccactctccccaagaagatgctgaagctctcagaaaggcttttgaaggatggggaactgatgagaacactgtcatagtaattttgggtcatagaactgtgtatcagaggcagcaaatcagaagagtttatgaggaaatttaccaggaggatcttgtgaagcgcctagagtctgagatcaaaggagactt

SEQ ID NO: 154159 - DNA, 239 bp, Glycine max
aagaggctctccatgccaatgtaaccaacctcaaacatgactgggaaccctgcagcgatgtcataacaaagtgggttgatcaagcttcaacagttcttccacttttacatgaattcctcaacaatagcctcagggtttggattttcagtggtgacacagatggaagggtgcctattacatcaaccaagtattcagttaagaagatgaaccttcccattaaatctgtttggcacccttgg

SEQ ID NO: 154160 - DNA, 228 bp, Glycine max
  unsure (1)..(228): unsure at all n locations
cggctcgattctgcagcatatatttgtactcctgactgggcggcaactagatgaagcagtgcagctggctgtgtccaaaggagatgtgaggttggcttgtttgttaagtcaggctggtggttctactgtgaatcgctctgatattgcaaggcaacttgatattntgagaaataaaggcctggattttagtttcattgaaaaggacagattgagactctatgaattgct

SEQ ID NO: 154161 - DNA, 246 bp, Glycine max
cctctgtgacatttgtgctgctagttcatatatttgcggctgacaccgagaaggaaagcaggaaaaaaacaaaaaggagcagatgggtagctcaggtttctcatggaaattggcggatcatccaaagcttccaaagggtaagactgtggctgttgtggtattggatggttggggagaggccacacccaatgagtacaactgcatccacaaggctgaaacaccctgcatggattcacttaaaaaggg

SEQ ID NO: 154162 - DNA, 243 bp, Glycine max
cttaaattggcttccttatcttgggggaatcccgacattcaaagctatattgtgtttaatgatagcttttggtgttacaccaacagtcacatgcaatgttagtaatgtttacaaggttgtgaagggaaagaatggaagcatgccacttgcattggcaatgctttacccatttgttgtacttgtgggaggagtgcttgtgtgggattatttgtcaccatcagacatcatggggaaatatccaca

SEQ ID NO: 154163 - DNA, 236 bp, Glycine max
cacacatagcagggtatgttcagctaagtgggaaccaaatgagtggtgaaatcccttcagaaattgggaacatggtgaacttcagcatgttgcattttggggataacaagttcactgggaaattccctccagagatggtaggtttgccacttgtagtcttgaacatgaccagaaacaatttttctggtgaacttccaagtgatattggcaacatgaagtgtctacaggatctggat

SEQ ID NO: 154164 - DNA, 234 bp, Glycine max
gcagagagtgcggtaggctcatccgagaccggaagcagcaatggggatcgatctcaaggccggaggtacaagcaaaaaaaccaaaagaacagcacccaagtccaatgatatctatcttaagctcttggtcaagctttatcgcttccttgttcggagaactggcagcaaattcaatgccgttatactcaagagattgttcatgagcaaggttaacaagcccccattgtctttgtc

SEQ ID NO: 154165 - DNA, 221 bp, Glycine max
agagaatttgccttgaggtcatttaaaagtggtaacacccccatattggttgccaccgatgttgctgcacgtggtcttgatattccccatgttgctcatgtggtcaactttgacctgcaaatgacattgatgattatgtacaccgaattggaagaacagggcgagctggaaagaaaggtcttgcaactgcattctttaatgacaacaattccacactagat

SEQ ID NO: 154166 - DNA, 154 bp, Glycine max
  unsure (1)..(154): unsure at all n locations
gttaaaggaggtgaagctccgtgatgattattatgtaatggaccctgaaaaggccgtggaattggtggatgagaacactatttgtgttgctgctatccttggttccacactacatggagcatcannnaagatgtgaaaacgcttaaaatgatct

SEQ ID NO: 154167 - DNA, 254 bp, Glycine max
gataaagcattccatagcctcccataaaaatgaagaatactatcttctctgctctctttctactttgtgccttcaccacctcatacctaccttcaaccaccgcggtggtcgataccgacggtgatattcttcagaatcctggcacatactttatcttgtccgtttttcgacccggcggcggagtagaattcgccgccactggaaacgaaacttgccctctcactgtcgtgcagactctcttcgggaggggcttt

SEQ ID NO: 154168 - DNA, 255 bp, Glycine max
cacagacacacccttccatcaacgttaactccgtcaaaatcaacggcaaaaaggtttctttcgacacccccttgggtgggggtgctcagctgagcacggtggtgccttacaccactctccaaacctcgatctatgcaaacttcgaaagcgcttatttgaaagccgcttcgtctatgagcatgaaaagggtcgatccagtttccacctttgggctctgcttcgaatccaacggcgttggaagctcccaagtggggg

SEQ ID NO: 154169 - DNA, 131 bp, Glycine max
actctcatattcttcaggagtctactgctagctcgattaatgagtatcccgaggcaggatgggaggctgctataaatcctcgtttctccaattatacagttgatcaatttaagcgccttcttggagtcaaa

SEQ ID NO: 154170 - DNA, 251 bp, Glycine max
gattggtgctgatcgtaccgcatctatagaaacagtaatgaaccatttgcaagaaactgcacttaatcatgttaaaagttctgggcttcttggtgatggctttggttccacgccagaaatgtgccacaaagaacttgatatgggtggttactcggatgcaggttgtggtggaacgctatcctacatggggtgacatagttcaagtggacacttgggtttctggatcagggaagaatggtatgcgccgtgat

SEQ ID NO: 154171 - DNA, 249 bp, Glycine max
  unsure (1)..(249): unsure at all n locations
ggcggcgtttctgtgaacctcggaggactcaacgagagacacgatntgtgcggttgcttgcgggtcaaggcaaacgcacaagcccctccgaagaccatccagaaggttgagaatgatttgccatggttgccgtcgtcgtcgatttcgcacgccccgaggacttttataaatcagttacctgactggagcatgcttctggccgccatcaccaccgtgttcctcgcggcggagaagcagtggatgatgctg

SEQ ID NO: 154172 - DNA, 249 bp, Glycine max
  unsure (1)..(249): unsure at all n locations
cgaaatatggcttcaactcatctgctatacctagcaacgttcttcttacttctctccgcttcttatctccagtccgctggggcgttnaganaaccgttgactagtctcaagcttaactctcatattcttcaggagtctactgctaaagagattaatgaaaatcccgaggcaggatgggaggctgctataaatcctcgtttctccaattatacagttgaacaatttaagcgccttcttggagtcaaacca

SEQ ID NO: 154173 - DNA, 237 bp, Glycine max
gtttctttcttcaacgtttccatcatacacagatcccaatcctctctcaagccctaatttcccctcatttccatcgccatacggagaggtagcccctctggtgcaggctcggctgaatgttgtggtgttggatagttctccagggaactcaatttatcagttggcgatggtgaactatgtgaagagggtgtaccctgagcttgatgtgattggggggaatgttgtgactatgtacca

SEQ ID NO: 154174 - DNA, 251 bp, Glycine max
  unsure (1)..(251): unsure at all n locations
tgttgatcgagataactagaaacagtgtgatgaaaatgaaggtccttgttttcttcgttgctacaaatgtggtagnctggcaatgccatgcgtacgatatgttccctctccgaatgaacactggctatggtgcccgtactccggaggtgaaatgcgcaagttggaggcttgctgtggaagcacacaacatctgtggctttgagaccattcctgaagagtgcgttgaagcaacaaaggaatacatccatggc

SEQ ID NO: 154175 - DNA, 244 bp, Glycine max
  unsure (1)..(244): unsure at all n locations
ccctccccaaaaaaaacaagctganananaaattaatcaaatactacttcgtgtgggggctagaaaatgggnnantctgaggaaaacagtgatgttgctgccaggcagaaggcaatcgatgattggcttcctgtcactggttcccgaaatgccaaatggtggtcttcagccttccacaatctcacagctctagnaggtgcaggtgtcctcagccttccatttgccatgtcaaatatgggctggg

SEQ ID NO: 154176 - DNA, 248 bp, Glycine max
tgttgatgctgtcatcaaaagtggtcctcgtgcagatgcaataagaaataccgcacgctcgaattgtaaggaggcaggctgtggatatttcaccccttcggcgtgtgaatcaggtcatatatcttctaacaactggtgcacgcgaagctgctttcagaaatattaagacaattgctgaatgcttggctgatgaacttattaatgcagcaaaagggtcgtccaacagctatgctatcaagataaaggat

SEQ ID NO: 154177 - DNA, 248 bp, Glycine max
ctagaaacagtgtgatgcaaatgaaggtccttgttttcttcgttactacaattttggtagcatgtcaatgccatgcgtacgatatgttccctctccgaatgaacactggctatggtgcccgtactccggaggtgaaatgcgcaagttggaggcttgctgtggcagcacacaacatctttggctttgagaccattcctgaagagtgcgttgaagcaacaaaggaatacatccatggcgaacaatataga

SEQ ID NO: 154178 - DNA, 251 bp, Glycine max
catgcttggctggggacgcgagaaccatggaagaagctgctggcatggcggtctcatccgcatcctgtggctggcatggccagttaagctgtgcgcattatggccagaagtgtgatcggtgagcatgaggaagactcgtcacagggcacgtgtcatcaggaagcccatggtacggtcgaaaccgagtcaagtacttgggctcattctctggcgaccccgggtactatgtaaccggtgagttcggatgtgac

SEQ ID NO: 154179 - DNA, 268 bp, Glycine max
tcggtattcggctcgatggcaccttggcagcaggtatttgtactggatacgcggtcatttgtagtgctggagattcatcgactgaaccctatatctgttgacactacttattacttgctcatggatctgctgccatattatacaagacaaaatatcaggttcgtcagaaacggcaaattgggatcactaatccaatacactactttttgccaaaatctcaaagtgctgtcgattacaatgcagtaagcagagctctggacttcttctt

SEQ ID NO: 154180 - DNA, 268 bp, Glycine max
gctcggggttcggctcgagcgaaatatggcttcaactcatctgctttccctagcatcgctcttcttacttctctccgcttcttatctccagattcctggggcggaagcacaaccgttgactagtctcaagcttaactctcatattcttcaggagtctactgctaatgagattaatgaaaatcccgaggcaggatgggaggctgctataaatcctcgtttctccaattatacagttgaacaatttaagcgccttcttggagtcaaacca

SEQ ID NO: 154181 - DNA, 250 bp, Glycine max
gattattatagcaatggcagatcaaaaccagaaccatataactgaagctggaaggcatcaagaggttggctacaagagccttctccagagtgatgctctttaccagtatattctggagaccagtgtctactcaagagaacctgaatccatgatagaactgtgagagttgacagcagaacacccattgaacatcatgacaatctctgaagacgaatggcaattcttgaacatgctccttaagctcatcaat

SEQ ID NO: 154182 - DNA, 247 bp, Glycine max
gcctgactctttacctggactcgctgcagaataagtctccttctagaatagccagtggtcctcactttgatagggaatgtcattgggcatgaaactgccactattagcgatggatatctcgttggtcctgttgttacaatcggtactggctgtgttgttgcatcaggtgtcatgctttcacgctgcacaattatgataggttttctgcgtaacaagcatacttgcatatccaacagtatcatatggt

SEQ ID NO: 154183 - DNA, 248 bp, Glycine max
  unsure (1)..(248): unsure at all n locations
caacgacctagggaacagaaccacgccgtcttacgtcggattcactgacaccgagcgtctcatcggtgatgcggctaagaatcaagtcttgatgaacctcatcatcaccgtcttctanttctttgggntgattggtcgtagattcagcgattcctctgttcagagtgatatcaggttgtggcctttcaaggtcattcctggtgctgctgacaagccaatgatcgtggttaactacaagggtgaagaga

SEQ ID NO: 154184 - DNA, 248 bp, Glycine max
gtggtggggttggcattcttggcattgcatgggcctttggtggcatgatcttcatccttgtctactgcactgctgggatttcaggaggtcacattaacccagcagtgacatttgggctgtttttggctcgcaaggtgtctttgatccgagccatcatgtacatggtggctcagtgcttgggtgctatctgtggagttggtttagttaaggctttccaaaagtcttacttcaacaagtatggtggtggg

SEQ ID NO: 154185 - DNA, 242 bp, Glycine max
aatgtctaattatggttacgcttacagtaaccaataaccatgggagtcttcacctttgtcgtccgcaaatccggcagcgaatgtagcgccaagcaacattccggcgacatcgaggcctccgccgattccaccttcgatctccaacggaagctcgtgcaagccgctctcgccgttgattcctccggtggagttcagtcctctttctctcccgtgtctcctacctccgctgtgttccaggtgat

SEQ ID NO: 154186 - DNA, 245 bp, Glycine max
gtatggttatagtggaaggctaaagtggctcgagaggttcgcatatgtgaacaccacaatctatccagttacttccattccccttctcatgtattgtaccttacctgctgtacgtctcctgactaacaagttcattattccacagattagtaacattgcaagtatatggtttatctctctctttctttccatctttgccacgggtatccttgagatgaggtggagtggtgttggaattgatgagt

SEQ ID NO: 154187 - DNA, 246 bp, Glycine max
gaaatggcaacaagcgaagaagtggttgctacgcgcggaggagccgcgccggaggagggttgaagcacaaactggagagaaaatggacgttttggtgcgacaaccaatccaaacccaagcaaggcgctgcttggggaacctctcttcgcaaggtctacaccttcgacaccgttgaagagttctggtgtttgtatgatcaggtattcaagcccagcaagttgcaaatcaatgccgattttcacttgt

SEQ ID NO: 154188 - DNA, 229 bp, Glycine max
gtgatttcagtgagtgatcggtgttcacttgatctcatcataatcgtcagcgtcaattgaagaagatgccgatcagaaacatcgccgtcggaaggcctgaagaggcgactcaccccgacacgttgaaggcggctttggctgagttcatctcaactttcatcttcgtgttcgccggctcaggctccggcatcgcctacaacaagctcaccgacaacggcgctgccacccc

SEQ ID NO: 154189 - DNA, 182 bp, Glycine max
atcgtgaggagaatatgaagttgtttgttttctttgttgctgcagtagttgtggtagcatggccatgccatggcgcaggctaccaaaggttccctctccgaatgaaaactggctatggtgagcgttcttcggaggtaaaatgcgcaagttttaggcttgctgtgggagcacacaacatccga

SEQ ID NO: 154190 - DNA, 202 bp, Glycine max
aatttctaattagggtttcgcttagagtaaccaataaccatgggagtcttcacctttgtcgtccgcaaatccggcagcgaatggagcgccaagcaacattccggcgacatcgaggcctccgccgagtccaccttcgatgtccaacgggagctcgcgcgaaacgctcttggcgttggaacccccgggggagttcagggcccct

SEQ ID NO: 154191 - DNA, 254 bp, Glycine max
actctcttcgctcgtcgtcaaagaattcctatcttcatgctaggctggccttgctcgcaggcctggttcctccgtacttatatcgtcgacgcctccgcttactcttcaacgctttctgggattccttttcggctctgaccatggcgacgtcttcgtcatcggcggtggtcccggctgctatgtggccgtcatcagtcccgcgctgtctgtctatccaccacttgcatcgatgagcgtggcagtctcgggggtac

SEQ ID NO: 154192 - DNA, 143 bp, Glycine max
cagaggtttgatatgcaagagttgctcagagcctctgctgagattttgggtagtggttgcttcagctcttcttacaaggctgccttgttgaatggcccatcaatagtggtgaataggttcaagcagatgaacaatgtcgggaa

SEQ ID NO: 154193 - DNA, 243 bp, Glycine max
catgggtttgtggaacacaacgaatgcagtgtcttgccgctttcacaagtttggtgatgaccaaaagaatctggtcttccaaggtgatgccacgtcttcttccaggggcatagaactcaccaaagttagacggtggaggaaaaccagtgggtggcagtgtggggagagtgttatactcttctccagtgcacctttgggaaagctctacagtggtcgcaagctttgaaaccgacttcacctttt

SEQ ID NO: 154194 - DNA, 248 bp, Glycine max
gctgtggaaacactcattgtatgggaaaatttggatattaataggtatgtgctgaaaaatggtactactagtgagattatcataaaacacttgaacaaggaacaagatgctgatcaaagcaacttccgtgattcagccacctctgcagagttggaagttcaggagaagatgcccttgcttgagtggtttgccaatgagtacaaaaaatttggatgctccttggaatttgtgaccaacaaatctcaaga

SEQ ID NO: 154195 - DNA, 249 bp, Glycine max
gaaagctttcactcagacaagttggtggaggatggttagctcaggattcagatgactcaaccccacatgacatcaagttcaacgtagtctctgagaaggctccacaggatgatgagcttcgtgatgcagagtttgcatggttgtgtgtgaagcatgtcaaaagcaatgctattgtgatagctaagaacaattgcatgttaggtatgggaagtgggcaaccaaaccgtgtcgagagtttgagaatagcaa

SEQ ID NO: 154196 - DNA, 250 bp, Glycine max
gtcgtgagagcgcatcaaccagtacagtgtttctccctccaactttgacattaatttttggagctgatgtgactcatccacatcctggagaggattcaagtccatcaattgcagcagttgtggcttcgcaagactatcctgaaattacaaagtatgctggtttagtttgtgcccaagctcataggcaggaactcatccaggatcttttcaaacaatggcaagatccagtcagaggaacagtgactggtgg

SEQ ID NO: 154197 - DNA, 248 bp, Glycine max
ggtattcgggtcgagcaatatcatcctgatgcgttaaaatggcagtggctactcgattgctctcccttgtcgatcgttggtccggcagcgagtgaagctgggcgcatcattccggggagttcggagggtccgcatgttgcacattgtcactacgcaggcctcttgcggaagccgatcttgccgttgattcctcgtgaagtgcttaggcctattgttttgccgtgtctcgtactacctcactggtgcat

SEQ ID NO: 154198 - DNA, 248 bp, Glycine max
ctggggatggagattgagtttgggaggtgctatggtccctgcccttataatcacaataggatcactagtccttccggacactcccaattccatgattgaaaggggtgatcgtgaaaaggccaaggctcagcttcggagagttcgcggcatcgacgatgtggaagaagagttcaatgaccttgttgcagctagtgaatcctccagaaaagtggagcacccgtggaggaacttgttgcaaagaaagtaca

SEQ ID NO: 154199 - DNA, 244 bp, Glycine max
gcttctgcatgggacttggtgtgattccaaacatcttgtgttcagaaatcttcccaacaagtgttcgcggaatatgcatttctatttgctccctcacattttggatctgcacattgatagtcacttctttatttcccttcttgctccatctccttggtcttactggggtctttggattattcgttgttgggtgcatcattgcatggatatttgtctacttgaaagttcctgaaacaaagggcat

SEQ ID NO: 154200 - DNA, 247 bp, Glycine max
ctcgagccggccagtccgagaagcctgacgtcacttataatgacattggaggatttgatatacagaaacaggaaatccgtgaggctgtggagctaccccttacacatcatgaactatacaaacaaataggtattgatcctccccgtggtgttttactgtatggaccccctggcactggcaaaacaatgcttgccaaagctgttgcgaatcataccactgctgctttcatcagggttgtgggatctga

SEQ ID NO: 154201 - DNA, 186 bp, Glycine max
gccgaacttgggtcgtttcactaatccccctgattggcaggaaattcttacctattttcgtggatctgatctgcagagttattgtactcggattctacaggcttgtttgttggctatcatcaagcctctgtatgttgaccatatgccatcagctgtgcaagggtatgtggggcaggtgctagacca

SEQ ID NO: 154202 - DNA, 237 bp, Glycine max
aaaagaaagatagatcatattcatggcgatggcaagcctggctcgacggaagggttacgccgtcgtaatgtcgtcgaggtcgtcgttttgtctgacaagctggaggggattcgtgtccggatctgacgaaaacgacgtcgtcgtcatcggcggcggtcccggcggctacgtggccgccatcaaagccgcgcagtcggtctgaaaaccacttgcatcgaaaagcgtggcactctcggc

SEQ ID NO: 154203 - DNA, 233 bp, Glycine max
gcacagaacagttgaagtgactggcatagaaactgcatgttgcagagaaaggagagggtccagtggtgttgttcctccacggcttccctgagctctggtactcatggcgccatcagattctctctctcagctccctcggctaccgggccgtcgctcccgatctccgtggctacggtgacaccgaagcaccagcttcaatcagcagctacaactgcttccacatagtgggtgat

SEQ ID NO: 154204 - DNA, 220 bp, Glycine max
atttgatgtgtctttactcaccattgaggagggtatctttgacgtgaaagtcactgctggtgacacccatcttggaggtgaagattttgataacaggatggtgaaccactttgttcaagagttcaactgaaacaacaagaaggacattagtggaaaccccagagcacttagaaggttgcggacatcttgtgagagggccaacataacactttcatcgact

SEQ ID NO: 154205 - DNA, 245 bp, Glycine max
tttcattccaactgcaaaacaacaactcaattaagaaattcttctccggagccatggcagatctcaagtctacattcttgaacgtctattccgttctcaaatctgaactcctccacgaccccgccttcgagttctccgatgatgctcgccattgggtcgaccggatgctagactacaatgtgcctggaggaaagttgaaccggggactgtcagtcattgacagctacagattgttgaaagaagga

SEQ ID NO: 154206 - DNA, 243 bp, Glycine max
  unsure (1)..(243): unsure at all n locations
aatggtggcctcaaattggtctacctaaagatcaaggccctccaccttacaagaaaccacatgacttaaagaaggcgtggaaggttggtgttctcactgcagtcatcaagcatatgtcccctgagtatcgccaaaattcgcaagcgttctaggcagntcaaactccttcaagacaaaattacagcaaaggaaagctcaaccgtgccttccagcagcaaccaagaggaagccattgcgtgagag

SEQ ID NO: 154207 - DNA, 276 bp, Glycine max
gagtaagggtgtaaaaatatttgtttcattttattttattgaaggagtagaatttgggaactaggttttgttaagtttgggcttgatcaccccatagggaagttttggagaatttgtgggtgtcaggggaaaatgcagcaagatcacaggaaaaagagttcagctgagatggactttttctccgaatatggtgatgccaaccggtacaaaattcaagaagtcattgggaagggaagttatggtgttgtctgttcagccattgacactcacacaggt

SEQ ID NO: 154208 - DNA, 276 bp, Glycine max
gaaaaatattaagagagaaaataatcaatactacaactttgcaattttcgtggtagctagaccaaggtagttcaattgccatggatattggtggtggagtggaagagccagtgagagagttgaggcaatacttcaaaactggaaaaaccaagagtgtaacatggaggaaaaaccagctcacatctctcatagaccttgttcatgagaatgaagatgctatatttaaggccctccataaagatcttgggaagcacctgttgaggcttaccgtgatga

SEQ ID NO: 154209 - DNA, 272 bp, Glycine max
ttcctcttggctcccttaaactctctttctctctttgtgtgtctctttctctatttctgagtctcagtgttaggggggttattcattattcataataacttggctttatagcattttcccttttgatataaaatgggaaggcaaccttgttgtgacaaagttgggttgaagaaggggccatggactgcagaggaggataagaagctcataagcttcatcctcactaatggccaatgttgctggagagctgtccctaagctagcagggctttt

SEQ ID NO: 154210 - DNA, 251 bp, Glycine max
agcgaatccagccacagcacagcactctttgcaacacaacaaaaaaagacaacacagagagaagcgtcttaataaacgctcttctctgaaaaacctgatttcttctcttcttctcttctctttcgtttcgatcttcgatctctgaaaatgagagagtgcatttcaatccacatcggtcaggccggtattcaggtcggaaacgcctgctgggagctctactgcctcgaacacgagcatcagcctgatgggca

SEQ ID NO: 154211 - DNA, 265 bp, Glycine max
atggctcgtcactccttgctcttagccctcctcctcttcgccgccgtggccaccgccgcgatggcgtggcgcgtccgacgccgacgacatcctgatccgtcagtggtgccagatgttggcaacgaagaggaggacaacctgctgaacgccgatcaccacttcgagtgcttcaaggccaagttcgccaagacctacgccaccaaggaggagcacgatcatcgcttcggcgtcttcaagtccaacctccgcagagccaggctgcacg

SEQ ID NO: 154212 - DNA, 273 bp, Glycine max
tagaaacagcaactatgtctctcatgcagcttactagctcccctgttggctcactggtccgtttcattgtaatatttgctttatggtacagaaccatggctttggccaagttgccaccaaacgcttcatcagttccagcagttttagcgtttggtgattccatcgtggacccaggcaacaacaacaacataaaaacattgatcaagtgcaacttcccaccttatggaaaggattttcagggaggaaacccaacgggtcgattttgcaatggaa

SEQ ID NO: 154213 - DNA, 279 bp, Glycine max
gtggaaactcgtgcgatatgccgccgcctccaacctcgcccgatcgcggcggttctccgccgcgattcctggtccgtgcattgttcacaagcgcggtgccgacatactccatgacccctggttcaacacggatacagggtttcctttgactgaacagggatcaggttggggcttcggggcctcttacctcctcgtgttatatcctttgagcagcaatatgatcgctttatgaattcattccgatctttggagaataatactcaggggcaaccagataaa

SEQ ID NO: 154214 - DNA, 272 bp, Glycine max
  unsure (1)..(272): unsure at all n locations
tagccccttaccagccctcaaggaaatcttccgcactgatggtgaatgggttcttcaatttccaccacctcatgtagctgaagttagtaagtctgggtggatgactgatgaggaatttgctagagaggtgattgccggtgtaaacccaaatgtgatccgacgtcttcaagaattcccaccaaagagcacacttgatcccacactctatggtgatcanaccagtaccataacacaagaacaattggagattaacatgggaggggtcacagtag

SEQ ID NO: 154215 - DNA, 277 bp, Glycine max
gccaaatatatgcaatctccaaggatcttgctacttatatatccatcaattggcccatattacacagatacgcaaatgaagacgtatctttaggttcatggttattgggcctagaagttgaacatgtcgatgaacgctctatgtgttgcgggacccctccagattgtgattggaaggcaaggacaggaaatgtgtgcgtggcatcttttgattggtcgtgcagtggtatctgtaagtcggtggagagaatgagagatatacacaaaacttgtgggga

SEQ ID NO: 154216 - DNA, 272 bp, Glycine max
gaagcgtgagatatatgatcagtatggtgaagatgcgcttaaggaaggaatgggtggtggcggtggccatgatccatttgatatcttttcatctttctttggcggtgggagtccctttggatcaggtggaagtagtcgaggtaggaggcagaggcgcggagaagacgtggttcaccctctcaaggtctctttggaggacctttatcttggaacttccaagaagctctccctctccagaaatgttatatgctccaagtgcagtggcaagggtt

SEQ ID NO: 154217 - DNA, 265 bp, Glycine max
cgtcaaactgttgctgtgggagtcatcaagaacgttgagaagaaggatcctaccggagccaaggtcaccaaggctgcccagaagaagaagtgaatcgtgcgggctggttcatcaggggatgttggttacaataaatgttggtttcttttctgtactcttgtgtcttcttttctaggtagcttgtttttcggacaaagtttgaagtctccaccatcatctcgcaactgttgtcccagaactggggttcttgatcgacggtgcaaaa

SEQ ID NO: 154218 - DNA, 269 bp, Glycine max
ctagggttatcatttctccatttccattttctctctcacttttcaagaatcgtaagctatgggaaagtcttacccaactgtgagtgctgattaccagaaggccgttgagaaggcgaagaagaagctcagaggcttcatcgctgagaagagatgcgctcctctaatgctccgtttggcatggcactctgctggaacctttgacaagggcacgaagaccggtggacccttcggaaccatcaagcaccctgccgaactggctcacagcgcta

SEQ ID NO: 154219 - DNA, 270 bp, Glycine max
gttttgtctctctcggaatacagggcgcaactctatgattatctgaagagtagaatgatcaccattgcacccaatttgactgcaatggttggggagcttgttggtgctcgcctcattgcccatggtggtagcttattaaatcttgcaaagcagcctggtagtactgtgcaaattcttggtgctgagaaggctctctttagggcactgaagactaagcatgctactcccaagtatggtcttatataccatgcttccttgattggtcaggca

SEQ ID NO: 154220 - DNA, 274 bp, Glycine max
ggtccaatctcaattactgttccagattctgactttcatgactttgacaaagataggtcagaggaatgcttcaggccaaagcaaatatgggccttgtatgatgaggaagatggaatgccacggttgtattgtatgatccgtgaggttgtgtctgtcaatccatttaagattcacatcagttacttgagttccaaaactgatagtgagtttggctcagtaaactggcttgattcaggttttaccaaatcttgtggaaatttcagggcttttaatt

SEQ ID NO: 154221 - DNA, 273 bp, Glycine max
caaggccaggtatgatgaaattgtgaaggaagtctcttcctacttgaagaaagtaggatacaaccctgacaagattccttttgttcctatctctggttttgagggagacaacatgattgagaggtccacaaaccttgactggtacaagggtccaactctgcttgatgcacttgaccagattagtgagcccaagaggccctctgacaagcccctcaggcttccccttcaggatgtgtacaagattggaggtattggaactgtgccagtgggacg

SEQ ID NO: 154222 - DNA, 269 bp, Glycine max
cgctcgagcaggacagctttatatggttatgaacctcctcttaaacccaagcataaaaagcctgggttgttatcatcactctgtggtggaactcggaagaagagttcaaaatctagtaagaaaggatcagacaagaaaaaatctagcaagcatgttgacccaactgtgcccattttcaatttagaggatatagaagaaggagtagaaggtactggatttgatgatgagaaatcactacttatgtcacaaatgagtcttgagaaaaggtt

SEQ ID NO: 154223 - DNA, 275 bp, Glycine max
gtcaaggcatgcttctgatgaggtctaccttggacagagggacaatccaaattggactgatgacacaaaggcaattcaagcctttaagaagtttggaaacaagctgaaggaaattgaggacaaaatctcagggaggaacaagaattcaagccttaggaaccgtaatggaccggcgcagatgccctacactgtgcttcttcctaccagtggagaaggccttactttcagaggaattcccaacagcatctctatctaatgagagtgtgtggtgtgtg

SEQ ID NO: 154224 - DNA, 268 bp, Glycine max
gtgagttcttcaaggatgcactgaataaagttctgccatatatggactacgtttttggtaatgagactgaagcaagaacattttctaaagctcaaggctgggagactgataatgttgaggaaatagctttgaagatttctcagttgccaaaggcatcggaaacacataaaaggattacggttatcacccaaggtgcagatcctgtttgcgttgccgaggatggaaaagtgaaaatttaccccgtgataccgttacctaaagagaaatt

SEQ ID NO: 154225 - DNA, 267 bp, Glycine max
ctcactaggagctcctctccactggttcttcatctgcatgcacacagttgcatagttttggaaaccaagaattcctgaagaagggtagcatcaacaagcagttctgaaaatggagatcaccaatgtcagtgagtatgaggctattgcaaagcagaagttgccaaagatggcgtttgactactacgcatctggtgcagaggaccagtggactctgcaagagaacagaaatgccttttccagaattttgttcggccacgtattcttatt

SEQ ID NO: 154226 - DNA, 267 bp, Glycine max
  unsure (1)..(267): unsure at all n locations
gcagaaagcaagctcatcctagagttttaaaaatggcagcagcctcctccatggctctctcttccccatccttggctggcaaggccgtgaagctgggcccatcagcccccgaagtcgggagggtcagcatgaggaagaccgtcaccaagcaggcctcctccggaagcccatggtacggcccagaccgcgtcaagtacttgggcccattctctggcgagcccccgtcctacctcactggcgagtatccaggntgactacggctggaca

SEQ ID NO: 154227 - DNA, 271 bp, Glycine max
attgaggagaaagaagaagaaggatgtggcacgaggcgaggaggtcggagaagaaggtccacgacatgatggacgcggctcggaagagagcgcaacgacgcgccgtttacctagccaagaggcgcggcgatcctcagcaatctattcagctcgtcggctttcgaagccgaacctatcgcgacgacgctctctaccaagccacgcaggatcagcagggcctgataccttggaatgggaaacaagatgtattgattgacagatttgatgggcg

SEQ ID NO: 154228 - DNA, 270 bp, Glycine max
gctagccttcagaggacacaatgttttgcccgaaatacaggggacgctgccttcaaatttcgaacaaacatccaaaagaccaatgcgaagaggagttagcatatcatatgtactcatttccatgtgcatgtttcccctcgcaattgccggattttgggcctatggaaaccagataaatgacgggggattgttaacttcgttcccacaattccacaagaggcaaatcacaaaattctctatgggtgcaatatatgttctagtaataataca

SEQ ID NO: 154229 - DNA, 265 bp, Glycine max
gcgacgctctctacacgctgaaacggagcctctcggaccctgacaacgtcctccagagctgggatcccactctcgttagtccctgtacttggttccacgtcacctgcaaccaggacaaccgagtcactcgagtggatcttggtaactctaacctatctggacatttggtacctgaacttgggaagctggagcatctacagtatcttgagttgtacaaaaacaacattcaaggaactattcctccggaacttggaagcctgaagag

SEQ ID NO: 154230 - DNA, 264 bp, Glycine max
ggggtacgtccttggcctaagggtatcacctcagcacaggagaaaagggattggctcaagccttgtgagaacactagaagaatggttcacttcaaaagatgtggactatgcatacatggcaacagagaaagacaaccatgcctcagtgagtctcttcatggacaagtttggctacaccaagttcaggactccagctattcttgtcaaccctgtgaaccatcattgctttcaaatatcacccaacattgagatagcaaggttgaa

SEQ ID NO: 154231 - DNA, 263 bp, Glycine max
cgagaataagaccaagtcccctgcttccggcgtgtggtccaccatcaagcctttcgtcaatggcggagctccggcatgctcgccacctgcgttattcaacccatcgatatgatcaaggtgaggattcaacttgggcaaggatcagctgcgcaggtcacttccaccatgcttaagaatgagggtgttgctgccttctataagggtctatctgctggattactcaggcaggctacatacaccactgcccgtcttggatcatttaa

SEQ ID NO: 154232 - DNA, 270 bp, Glycine max
gtcggacgaagagcaccatttcgagtccaaggcagacgccggtgcctccaaaacctaccctcagcaagccggtaccattcgcaagaacggctacatcgtcatcaaaggacgcccctgcaaggttgtggaagtttcgacttccaaaactggaaagcacggtcacgccaagtgccactttgttggaattgatattttcactgccaagaaacttgaggatattgtgccctcttctcacaactgtgatgttcctcatgtgaatcgtactgatta

SEQ ID NO: 154233 - DNA, 265 bp, Glycine max
ctcataacacaaagcacaaagcaaagctcatccttgagttaaaaaatggcagcagcttcttccatggctctctcatccccatccttggctggcaaggccgtgaagctgggcccatcagccccagaagtgggaagggtgagcatgaggaagaccgtcaccaagcaggtctcctcaggaagcccatggtacggcccagaccgagtcaagtacttgggcccattctctggcgagcccccgtcctacctaaccggtgagttccaggcga

SEQ ID NO: 154234 - DNA, 270 bp, Glycine max
atttgatccagattttatcaacattaggacaaaggctcgtgaagttctgcaaagggaagatgacctgaatgaaattgttcagcttgtgggcaaggatgctttagctgaaggagataagatcaccttagaaactgcaaagcttttgagagaggattatcttgctcaaaatgcctttacaccatatgacaaattctgccccttctacaagtctgtttggatgatgcgcaacattatccatttctacaatttggcaaatcaggcagtagagag

SEQ ID NO: 154235 - DNA, 266 bp, Glycine max
gccgtgcctacgtcaccttcctcgccggaaacggtgactatgtgaaaggtgtcgttggcttggccaaaggtctgaggaaggtgaaaagcatgtaccctctggtggttgcagtgttacccgatgttccagaacatcaccgaaacattctcacctcccaaggtggcattgttagagaaattgaacccgtgtaccctcctgagaatcagacgcagttcgccatggcatattacgtcatcaactattccaagctacgtatttgggagttt

SEQ ID NO: 154236 - DNA, 265 bp, Glycine max
ggcctgcaaccctcgaaacgtgaatagccgtggcggccacctatttctctgtttaacgtcttcactcattctacattttcgcctcaaactacttcttccaccgatcactgttcagcagagaagtgttgccttggactcttgaggtgcaatgagattggagaagtgttggttctgttcttctaccatataccctggacatggaatccagtttgttcgtaatgatgcaaagatttttcggttttgtagatctaaatgccacaaaaac

SEQ ID NO: 154237 - DNA, 258 bp, Glycine max
  unsure (1)..(258): unsure at all n locations
caacaacactctctcttctcgctcttggcttttcgctcttcactcactctcattcattcatttccaccgttcatggatccagtaagcgtgtggggtaacacgcccttggcgacggtggatcccgagatccatgacctcatcgagaaggagaagcgccgtcaatgccgcggaatcgagctcatcgcctccgagaacattcacctcctcgccgntcatgaggcccacggcagcgcatatacgaacaaactcgtcgagggc

SEQ ID NO: 154238 - DNA, 253 bp, Glycine max
cttaaaaatgctcctattttgttgttggatgaagctagttcatcacttgaatctgagtcaagccgagtggtgcaagaggctctagacaccctaataatgggaaacaaaaccacgattttaatagcacacagggctgcgatgatgaggcatgtggataacatagtagttctaaacggaggaaggatagtggaggaggggacccaggattcattagtggcaaaaaatggtctgtatgtccgattgatgcaacctc

SEQ ID NO: 154239 - DNA, 266 bp, Glycine max
tggattttcagcggcgagggcattggatgtgctgaatttcactccactcaacaacagacctattaggatcatgtattctcatcgggatcctagtcttaggaagagtggtactgcgaatatttttatcaagaatttggataaggctattgaccacaaggccttacatgatactttttcttcttttggactcattctttcttgcaaaatagcaactgatgcttctggcctgtctaagggctatggttttgttcaattcgacagtgaag

SEQ ID NO: 154240 - DNA, 263 bp, Glycine max
accagattaaaaatgatcttggcatgtccaactatcccatggtcccaggacatgaagtggttggtgaggtactggaggtgggatcaaacgttagcaggttcagagtgggagagttggtgggagttggactcctcgtaggttgctgcaaaaactgccagccatgccaacaagacattgagaattactgcagcaagaagatctggtcttacaatgatgtgtatgtcgatggaaaacccacacagggtggctttgctgaaaccatg

SEQ ID NO: 154241 - DNA, 259 bp, Glycine max
catatactcataaatcacatagctagttgtttaaagtaagagagaagaaagaagcaaatggcaaactttccagttgttgacatggggaagcttaacaccgaagagagacctgcagccatggagattataaaagatgcctgtgagaactggggtttctttgagttggtgaaccatgggatatccattgagcttatggacacagtggagaagctcacaaaagagcattacaagaagactatggagcaaaggttcaaagaaa

SEQ ID NO: 154242 - DNA, 206 bp, Glycine max
caaaggtggagtgaacgtaaacacaggaccaaagaagggtaagccagtgcacgttggagtgggcccacattctccatttgattacaattacgcagccagcgaaacccagtggcacgatgaccccaacgtggcactcttcttcttggaaaaggacttgcactacggaacaaagttgaaccttcactgtcactcgctacttcacctaa

SEQ ID NO: 154243 - DNA, 259 bp, Glycine max
attttccagaggatgaagaactatactatctatgctgtgtcaatcaccattcgtattgtgtttggtttcttgtttattgcgttgatctggaagtttgattttgcacccttcatggttttgattattgccatactcaatgatggtaccattatgactatatccaaggatagagtgaaaccatcaccacttcctgatagctggaaactgagggagatatttgctactggcgttgtgctaggaagttacatggcactaatga

SEQ ID NO: 154244 - DNA, 260 bp, Glycine max
gttgaaacatgatcagctcaagatggagctcacagagggacatgtattccaaggttggcatgaaggagctatagagtttccacctacatacaaataccgtctgacttctgtagactacctaggctgtgatcagcagcatgtgagcagaaagcggcgctccccagcatggtgcgatagaataatatggtttgggaagggaatgaagcaaatccaatacaacaggagcgagtcaaaactttctgatcataggcctgtacgag

SEQ ID NO: 154245 - DNA, 261 bp, Glycine max
ggcgtcttcataaacgcctttcttctccgtttccgtttcctcgttcgaattcgctttttgatctgcgaaaatgagagagtgcatctcgatccacattggtcaggctgctatccaggtcggaaatgcttgctgggagctctactgcctcgagcacggcatcgggcccgatgggcaaatgccaagtgacaagacagttggcggtggtgatgatgcttgcaatactttctgcagcgagactggtgctggaaagcacgtgccacg

SEQ ID NO: 154246 - DNA, 260 bp, Glycine max
  unsure (1)..(260): unsure at all n locations
aattaagatatncggttgtcttgcatcaagcttttgagccggatctttgccaagatcgtgttgcggattgtcatgantgctgcgtatgctactgataaggcgactatcttatacatgctcgaggttgtagacattgatgtgatcagtcgtcttaatgaattcactgcgatgagtagantagatcccagaatctatggtgctcaaatgagtaccataagactagaacaattggagattaacatgggaggggtcacagtaga

SEQ ID NO: 154247 - DNA, 263 bp, Glycine max
ccttcagtcccaaacaccctccttacgatgagatgatatacacagcaatcggagctctgaaggagagggatggttcgagcaagcgagccataggaaagtacatagaacaagtctacaaggaccttccacccactcaccctgccttgttgactcaccatctcaaccgattgaaatcctctgccctcctcgtcctcgtcaagaaatcctacaagcttcctggatctcatcatctgcctgcgctccagccccaaaagacccgtggt

SEQ ID NO: 154248 - DNA, 257 bp, Glycine max
attttgtgtcgtcagcttctattttacgggcagaaacatttggtatcccaatccctgactgggtgacagatgagaaggccaccagtctctctacagcttctatagatgatgcagcggttattaatgatctagtaatcaagttagagaggtgccgggcaaatcttccaccagtgttcatgatgaaaccaattcaatttgagaaggatgatgacacaaactaccatatggatgtgattgctgggcttgccaacatgagg

SEQ ID NO: 154249 - DNA, 256 bp, Glycine max
gttttgtttatttgaaattaacaagtagcaaagatgtttggaatcatcggaggaaacaagggtcacaagataaaggggaacttggtgattatgcgaaagaatgtgttggatatcaacagcattaccagtgttaagggtgtcatcggaaccggcattaacatcattggacgagtcgtcgacaccgttactgctttggcgtcccacatctccatccagctcattagtgccaccaaggctgatggacatgggaaaggaa

SEQ ID NO: 154250 - DNA, 256 bp, Glycine max
gccgaagacgtgcacccggagagttggagagtgttcaactctttcgggaagcgttacattgtcacggctagtcctagggtgatggtggagccgtttgttaaggcgtttctcggggctgacaaggtgcttgggactgaacttgaggccaccaaatcggggacgttcactgggtttgttaagaagcctggtgtgcttgttggggagcataagaaagtggctctggtgaaggagtttcagggtaatttacctgacttgg

SEQ ID NO: 154251 - DNA, 261 bp, Glycine max
ctttcacggaatcgtctctcctccttccttcggtttcaggaaccaacaagaacaagaacaaggttccagaagacaaatggtatttagcctacattgtgtattttaccctgggtctcggttaccttctcccatggaacgctttcatcaccgccgttgattacttctcctttctctaccctgacgccagcgttgaccgcatcttcgccgtggtttacatgatagtcgggctggtggggatctccctcataatcctctacagcc

SEQ ID NO: 154252 - DNA, 261 bp, Glycine max
aataatagttacactaacacacagtagtgaacaacaactccaacaacaacaatcaacaacaacaacaacgttgtagtgtgttgttttgttttttagtgcagtttatttttttggcatcaaagtggttgaatccatggattctgattatggtattcccagggaactctcagatcttcaaaagattcggtctttgtaccagccagagctccctccttgtctccagggaaccactgtgagggttgaatttggtgacgcaaccac

SEQ ID NO: 154253 - DNA, 263 bp, Glycine max
ggatggtcttgatgaattcaagcgatttgttgtttatgttcttgataaagtatgtgcaagtatgccacctgggcaagaaaagtttgtcggtatagcagaacttaagggatggggatactcaaacagtgacgtgcgtggatatcttagtgctctatccattttgcaggattactacccagagagattggggaagttgtttattgtgaacgcaccatacatctttatgaaagtgtggcaaattgtttacccattcattgacaaca

SEQ ID NO: 154254 - DNA, 270 bp, Glycine max
  unsure (1)..(270): unsure at all n locations
tacttcagctcgagattagatttcatctcccggggttttttgaactgtgcccatgtctaaagtcttcagctttaccggaaatgatgatttttatcatgggggtcctatttatcctaacccgaaggaaccgtgtctcttcttgtctcttggccgtcaagttgatgtttaccttcctcttcagaagaggtctcgcttcagtgttcccattgatatcagtggtgaatggtntgagcagaagcctaagacatctattgaatctttgccagatga

SEQ ID NO: 154255 - DNA, 255 bp, Glycine max
gacaattcaacttaagagatcaatatggccaccaccactacccagcctccctctaatatctgttttttccttctgttgttgcttctagcacactttcatttgggcataagccaacttgagctgaattactactctaaaagctgcccaaaagctgaagagatcatcaaggaacaagtcacacaactatataacaagcatggaaacactgccgtttcgtgggtcagaaatctcttccacgattgcgtggttaagtca

SEQ ID NO: 154256 - DNA, 257 bp, Glycine max
gcgccgccctcgccgcctccctccccgccatcatcgcctccgttgattaccgcctctgcccccaacagcgcctccacgccgcctaccacgacgccctcgaagccctccattgggcccaggcccaggcccaagcccaagcccaatcagacccgtggctccgcgactatgtagacttctcaaaaaccttcctcatgggaagcagcgccgggggaaacatcgccttcttcacagccctaaattctctctccctctcactc

SEQ ID NO: 154257 - DNA, 254 bp, Glycine max
gttacaccctccccctggcagacaaagggaactgggttttacattctcatttccagtgaagcaaacatccatagcatctgggactctaataaagtggactaaaggtttcaatattgaggatgcggttggagaagatgtggtgggtggactaaccaagtccttagaaaaaattggtctggatatgcgtgttgcagctctagttaatgacacagttggaactgtggctagagctagattcagcaatcaggatgtca

SEQ ID NO: 154258 - DNA, 257 bp, Glycine max
aaggaatcaaaccttaataaaaagtcccccaaaatggctccaacaagaaaccaccttcttcacattgccatgttcccatggtttgcaacaggtcacatgactccattcctccacctttcaaacgacgttagccaaaaggggtcacaaaatcacgttcttgctacctaaaaaagccaaactacaactccaacacctcaacaaccatcctcacctcatcacattccataccctcacaattcctcatgtaaaaggccttc

SEQ ID NO: 154259 - DNA, 255 bp, Glycine max
caggcctgcaatatcttggccctgacttggatgctatgaaagctgttgctgatgcacattctaagcggtcccttaatttgtttgaaattgctttgagggactacaaggcacagttggaggaagacccaattgtacacaggcacctttcatccttgtacgatacccttatggagcagaatctctgcaggttgatcgagcctttctcaagggttgagattgcacatattgctgaacttattgaacttcccacggatc

SEQ ID NO: 154260 - DNA, 257 bp, Glycine max
cataaacatctataagttaataattcgggtgtgtaataaattaaaaaatacatatgcttgtgacaaaaaggagatgtcacaagaattatgtgaattcggatttctagtatgaaaatatttgtgtaaaattgaaataaagcgaattatactttgatttgttttataaattctttctgcatttgcttcattatcgtaaatgcagttagaatttataaaacaaataaagcgaattatactttgatttgttttataaattc

SEQ ID NO: 154261 - DNA, 199 bp, Glycine max
caacaagcaaagtacatggttgatttggaaatccaggtccccagcgcattcgacccgtttgccgaggcgagagaatcagatgcccccggggcaaaggagtatgtgcacatacgaattcagcagaggaatggaaagaagagtctgacaacagtgcaagggctgaagaaggagttcagctacgagaagatcctcaaggacc

SEQ ID NO: 154262 - DNA, 257 bp, Glycine max
gacaaaccctacctctctggtcagagtctccgccgttgcgctccttcccccgccgtctccgtttcatttcgacgccgaatatcatgcgtcgcctcttccgctgtcgctcagaaagttgggctgaaagattttcttcacttggatgattttgataaggatactattttgaagatgttggaccgggcccttgaggtcaaggcattgctgaagtcaggggacaggtcatttcggccttttgaggggaagacaatggcaat

SEQ ID NO: 154263 - DNA, 251 bp, Glycine max
accggacaaaagctattagttggggccaatttcgcttccgcggggataggaatccttaacgacactggcatccaatttgtggggatcttaagaatgttcgagcagtatgcgctgttcgagcagtaccagcaacgattaagtgcattagtgggagcagcgcaggctcagcgaatcgtgaatcgggcactgttcctcatgacacttggtggtaacgatttcgtgaacaactactttctcactcctgtgtctgc

SEQ ID NO: 154264 - DNA, 253 bp, Glycine max
gctcttcaaatcaatctcttctcagaaatgggtgtggctcaaaacattcccgatgcggaggagggaaccttggagattggaatggaatacagaactgtgtctggagttgctgggccattggtcattcttgataaagttaagggacctaagtttcaagagattgttaatattcgcttgggagatggaactactcggcgtggacaagtgctataagttgatggtgaaaaggctgttgttcaggtctttgagggta

SEQ ID NO: 154265 - DNA, 248 bp, Glycine max
agaaaagttagggttcacaacttttccttttccttttgcttgcgaatctgaatcaaataatcaatcatccattcattattcatcatatcgtcggcgaagaaaatcacgctgaagagttcggacggcgaggctttcgaggtggaggaggcggtggcgctggagtcgcagacgataaagcacatgatcgaggacgactgcgccgacagcggcatccctctgccgaacgtgacgagcaagatcctggcgaa

SEQ ID NO: 154266 - DNA, 249 bp, Glycine max
cgacgtgcgtggactctttgaaggtggaattcatctccctacagatgcactcagtaaaattagccccctaccagtgctcaaggaaatcttccgcactgatggtgaactagtcctcaagtttccaccacctcatgtcattaaagttagtaagtctgcatggatgactgatgaagaatttggaagagagatgcttgctggtgttaatccatgcctaattgagtgccttcaagtgtactctccaaagagcaa

SEQ ID NO: 154267 - DNA, 248 bp, Glycine max
gtgagagcagaggaaagaaagatgttttttaacggatatgggtatcaagggacatcatcatttgagcagacatttcgatgttactctgcttcgtttattgaaaagcccgaaattgaaaatggtgataaaattataatgcctccttcagtccttgaccgtctagcatttctacgtatggattatccaatgatgtttgaactcagaaatggtgcttctgagagggtttctcattgtggggttctggagtt

SEQ ID NO: 154268 - DNA, 250 bp, Glycine max
ggcgccaaaaagggtggattcattgtctccagccatctccaaggggaatcggtgcaggactggagagaaatagtgacatacttttcgtacccaaaaagagagagggactattcaaggtggccagacacgccagaagggtggagatcggtgactgaggaatacagcgacaaagtaatgggtctagcttgcaagctcatggaggtgttgtccgaagcaatggggttagagaaagagggtttaagcaaagcat

SEQ ID NO: 154269 - DNA, 250 bp, Glycine max
tggatgtgttgaaggtgcattgggaatacgtgagtggctggaatcacagggtcatcagtacattgtcactgatgacaaagaaggacctgattctgaacttgagatacacattccagatgcacatgtcatcatatctactccattccaccccgcctatgtcaccgcagtaagaattaagaaagccaaaaatttggagctgcttttgactgctggcattggttctgatcatgttgatctcaaagctgcagct

SEQ ID NO: 154270 - DNA, 253 bp, Glycine max
cctaaaataatgattcttaagagcggattcatcttcggtcattttattttgtataataaaagaaagataataaagagaataatcatattaaatattaaatagaaaaaatggcccgatcatttatcaaaggccaatcttcggtagaagagaaggttcctttggaacacttatttctatttcagtataccgggtctctttctttcatttcaaaaaatttatagaatttcgattttgaaatgaaagacaagtgtgg

SEQ ID NO: 154271 - DNA, 248 bp, Glycine max
gtaagatcaagtcattgggagtcaaaatggttatctctggagaaggatctgatgaaatctttggagggtatctatatttccacaaggcacccaacaaagaagagtttcaccaagaaacatgccgcaagattaaagcactccacaaatatgattgcttgcgagccaataaatcgacctttgcctggggtctagaagccagagtaccatttttggacaaagagtttatcagagttgcaatgaacattgat

SEQ ID NO: 154272 - DNA, 242 bp, Glycine max
tggagactctctgctctgcattggtgttcccatctttcagaatcacaacttcagctttctccaaatgtggcatcagggcttccattgccgttgagcaacaaacttcgcagactaaggttgctctcctcaaaattggtaccagaggaagttccactagctctggctcaggcatatgagaccagagacaagctcatggcatcacatccagagctagcggaagaaggggctattcagattgtgat

SEQ ID NO: 154273 - DNA, 248 bp, Glycine max
aaaaaaagaaaaaggaaggagataggaaagggttaattgaatccaaaaaaaagaagagaaaaacaaaatgggcagggtttggacttcgatgatagcattgttgctttgcctgatgacatcatcggttcggggcgaggacccttacatttactacacatggaacgtgacctacggcaccattgccccattgggtgtcccccaacagggtatcctcatcaatggtcagtttcccggccccgaaatcaact

SEQ ID NO: 154274 - DNA, 247 bp, Glycine max
aacggagccaaacagagtattgctcaggcagtgcttgcagtttcctcccctggagatgaggttattattccagctccattctgggttagttacccagaaatggcaaggttggctgatgcaacacctgtgattcttccaaccttaatatctgataatttccttttggatcccaaactcctcgaatccaaaattactgaaagatcaagactgcttattctttgttctccatctaacccaacgggatctg

SEQ ID NO: 154275 - DNA, 245 bp, Glycine max
cgcaactgaaaaggaaaaccctaagagatgaagagaactcctatcttgttccctctcttctttcttctttgtgccttcacctcatatctaccttcagccaccgctgatgatgatcatgtgtacgacactgacggcgataagcttcaatacggtgtcaattatttcgtgttgccagtgataagaggaaatggcggtggaatacaagtagcaaaagcaggaaacgaaacttgccctctgactgtggt

SEQ ID NO: 154276 - DNA, 248 bp, Glycine max
  unsure (1)..(248): unsure at all n locations
cgagagaagaagggtgagctaaagtcaattttccttcctttcctttccactagtcacataatcctngtagtggacatggccagactcttcgccttgcacgacgtcgacgtcaccatcatcaccaccgcacataacgccaccgttttccaaaagtccatcgatttagatgcgagtcgcggtcgccccatcagaacgcacgttgtcaacttccccgccgcacaagtgggtctccccgttgggatcgaagc

SEQ ID NO: 154277 - DNA, 248 bp, Glycine max
cctaaaatggccactcttccctcctacgaccacctcatcttcactgccttagctttcttcttatctggccttattttcttcctcaaacacaaatccaaatccaaatccaaaaaattcaacctccctccaggaccccctggatggcctattgttggaaacctcttccaagttgctcgttccgggaaacctttctttgaatacgtgaacgatgtgagactcaaatatggctcaatcttcaccctcaagat

SEQ ID NO: 154278 - DNA, 247 bp, Glycine max
acaaaatgagattcgtgtacgctcattttcctatcaacgctagcattggcaacaacagcaagtccatcgagatcagaaatttcctcggcgagaagaaggtgaggaaagtggacatgcttgagggcgtgtcggttgttagatctgaaaaggtcaaagatgaattggtcttggatggaaacgacattgaacttgtttctaggtcatgtgctctcattaaccagaaatgtcatgttaagaacaaggatat

SEQ ID NO: 154279 - DNA, 245 bp, Glycine max
aaaacgcattgtgtttctctctttccgcggcgtagatctgagcagtttgggaaaccctaactgctctcaccactctctttgctttttttcctctccgatcaacgacctctttcgtcgccctaagtcatggcaggacttgcacccgagggatcacagtttgatgctcgtcaatatgataccaagatgaatgagttgcttacatctgatggacaggatttttttcacatcttatgatgaggtttatg

SEQ ID NO: 154280 - DNA, 243 bp, Glycine max
ctctctcctactatcttttaaatccttttgtaccctcaactccataagccactagtacctcacaatgcccattgtagcaacctctcttctcttctttcttcttaatttatgcctcagaggcacttatgctgactatggaggtggttggcaaggtggtcatgccacattttatggtggaggtgatgcatctggcacaatgggaggggcttgtggatatggaaatttgtacagccaagggtatgg

SEQ ID NO: 154281 - DNA, 244 bp, Glycine max
actacactggccttttgttctcgtgtcaatttctaaatccaccaccacaccctctcttctattctctattattattatctccacacccttcactctctctcactcttctctcgaatcttccaccgcaatggccaccgctgccgagaaactctccgctctcaaatccgccgtcgccggattgaacgaaatcagtgagaatgagaagaacggattcatcagcctcgtcggccgctatctcagtggg

SEQ ID NO: 154282 - DNA, 245 bp, Glycine max
gcagatcttcgtcaagacccttcaccggaaagaccatcacccttgaggtggaaagctctgacaccatcgacaacgtcaaggccatgatccaggacaaggaaggaattcccccggatcagcaacgtctcatcttcgccggaaagcagctcgaggacggccgtaccctcgccgactacaacatccagaaggagtcaacccttcaccttgtccttcgtctccgtggtggcatgcagatcttcgtcaag

SEQ ID NO: 154283 - DNA, 265 bp, Glycine max
atttacaacaacaatggcttctgtgcctcaaccaaaaatctcccttctaaccttattcttcttctcgtccttcaccatcattgcgcatgcaattgttcctcaaaacgaaaccttcaaatttgagaactcaggtgaacttggaccctacatcgttgagtacggtgcagattacagaatgataagcatcttcaactctccattccaagttggtttctacaacaccaccccaaatgccttcactctagctttgcgtgtagggctccaa

SEQ ID NO: 154284 - DNA, 257 bp, Glycine max
tttatttacaacaacaatggcttctgtgcctcaaccaaaaatctcccttctaaccttattcttcttctcgtccttcaccatcattgcgcatgcaattgttcctcaaaacgaaaccttcaaatttgagaactcaggtgaacttggaccctacatcgttgagtacggtgcagattacagaatgataagcatcttcaactctccattccaagttggtttctacaacaccaccccaaatgccttcactctagctttgcgtg

SEQ ID NO: 154285 - DNA, 260 bp, Glycine max
tcttaatccaaccagctattgcaccagcagcttttgctacctttcaaactgctgccaagaccggtggtcctgctgctgcagttggtagaaaactaatccatactgagctcctaagtagtgcttggactggtttcttagctggctgcttgcacaccttatcagggcctgaccacctagctgccttggctccattgtcaatcggtcgaacacgaatggagagtgctgctgttggagccctttggggttgtggccatgatgct

SEQ ID NO: 154286 - DNA, 257 bp, Glycine max
gtaactcgttcttcttcttttgttgttctgtgtccgtgtttgttttttctctcacctgaaaatgtcttgctgcggtggtaactgtggttgcggaagctcctgcaagtgcggcaacggctgcggaggctgcaagatgtacccagacttgagctacactgagtcaaccaccaccgagaccttggtcatgggagtggcacctgttaaggctcaatttgagggtgctgaaatgggtgtgcccgctgagaacgatggctgca

SEQ ID NO: 154287 - DNA, 256 bp, Glycine max
gtgagtttgttgatcgagataactagaaacagtgtgatgaaaatgaaggtccttgttttcttcgttgctacaattttggtagcatggcaatgccatgcgtacgatatgttccctctccgaatgaacactggctatggtgcccgtactccggaggtgaaatgcgcaagttggaggcttgctgtggaagcacacaacatctttggctttgagaccattcctgaagagtgcgttgaagcaacaaaggaatacatccatg

SEQ ID NO: 154288 - DNA, 255 bp, Glycine max
tatggcacagaaaaaagcttctcatgtgcttgtatgcaaagagttaaagccacacctgctaatggtcttagtccaggtgggctatacctttttgtatttcatcactgaagcctccttcaatcatggtatgagcccttatgtgtatgtaacctatcgccatattgtggctgcggttgtgatgttcccttttgcatactttttggagagaaatgcaagaccgaagctgacatttgctcttttcatggaaatttttgt

SEQ ID NO: 154289 - DNA, 254 bp, Glycine max
gtctggaataatgatgtcaggttcttctgtgttaaggattcttctggtagtccaattgcgtatttttattttgatccttatagtcgtcctgctgaaaaaaggcaaggtgcatggatgaatgaagtctttgctcgtagtcgtgtattatcgcgtgatggcacctcagcaagattgcctgttgctcacatggtgtgcaatcaaactcctccagtaggaaacaagccaagtctaatgacattccgtgaggttgagac

SEQ ID NO: 154290 - DNA, 261 bp, Glycine max
gggaagaggaaccctagctagggtttggaagaagctgatccgagaagatggtgcagcgtctcacctaccgcaaacgccacagctatgctaccaaatccaaccagcacagagtcgtcaagactcccggtggcaagcttgtttatcagaccacgaagaagagggccagcggacccaagtgccctgtcactggaaagaggattcaagggattccacatttaaggccagcagagtataatagatcaaggttacacagaaaccgaa

SEQ ID NO: 154291 - DNA, 262 bp, Glycine max
gaacaataacttttctggcgttgtgcctgaagggttatggggtttgccccatttgtatttgttggagcttgtttataattctctttctgggtcgatttccaattcgatttccggggcttggaacttgtcaatgttgttaatttccgggaataagttttctgggtcgattcctgagggggttggggaattgggtaatcttgaaaagtttgtagctaataataatagtcttactggtcggattccgaaaagtgtgtttaggttg

SEQ ID NO: 154292 - DNA, 266 bp, Glycine max
  unsure (1)..(266): unsure at all n locations
cacgtgtcaaagtctacgacaccgacccggcagtgttacgggcactatccggatccggaatcaaagtgacggttgatcttccgaaccagcaacttttcgcagccgccaaagctccctcctttgcatcctcatgggtcgaaaggaacgtcgccgcgtactaccctcacacgcaaatcgaatccattgcggtcggcaacgaggttttcgtggatccacacaacataaatgcaganctcgtacccgccatgaagaacatccaaaaagcc

SEQ ID NO: 154293 - DNA, 265 bp, Glycine max
ctcaaagcccgagctcaaggactaccagatcaacctaaaggagtgcgggcccatggtcctggacgcgctacatcaagatcaagaacgagatcgacccgagcctcacgttccgccgctcgtgccgcgaggggatctgcggctcctgcgccatgaacatcgacggttgcaacggcctcgcgtgcctcaccaagatcccctccgaaggcgccgccaccacgatcacccctctgccacacatgttcgtgatcaaggacctcgtcgtcga

SEQ ID NO: 154294 - DNA, 259 bp, Glycine max
acgaaaattagggtttgtagtgtagcaggaagaagcagcaatggcgccgaagataacacgtaaggttagcagaaaccctgaattgataaggggaatcggaaagtactcgaggtcgcagatgtaccacaagaggggcatttgggctatcaaggccaaaaacggtggcgttttacctcgccacgaccctaaacccaagcctgaagctcctgctgaaaaaccacccaaattttaccctgctgatgatatcaagaagcccctt

SEQ ID NO: 154295 - DNA, 257 bp, Glycine max
attgaccacaaggcgttgcatgatactttttctacatttgggaatatcctttcgtgcaaggtagctacagattcatctgggcaatcaaagggctatggctttgttcaatttgataatgaggaatctgcccaaaaggccattgagaagctgaatggaatgctgctgaatgataaacaagtgtatgtgggacccttccttcgcaagcaagagagagaaagtactgctgacaaggcaaagttcaacaatgtttttgtgaa

SEQ ID NO: 154296 - DNA, 250 bp, Glycine max
gcgtcttcataaacgcctttcttctccgtttccgtttcctcgttcgaattcgctttttgatctgcgaaaatgagagagtgcatctcgatccacattggtcaggctgctatccaggtcggaaatgcttgctgggagctctactgcctcgagcacggcatcgggcccgatgggcaaatgccaagtgacaagacagttggcggtggtgatgatgctttcaatactttcttcagcgagactggtgctggaaagc

SEQ ID NO: 154297 - DNA, 252 bp, Glycine max
aaacagccaccatagttcttcgtggtggagctgatcagttcatagaggaagcagagcgaagtttgcatgatgcaatcatgattgttaggagggctttgaagaattcaacagtggttgctgggggaggtgcaatagatatggagataagccggtatctgaggcagcatgcacgtacaatagctggaaagtctcagcttttcattaactcctatgcaaaagctcttgaggttatacctagacaattatgtgaca

SEQ ID NO: 154298 - DNA, 252 bp, Glycine max
ggttatgtgctttaccagcattttgggtagggttattgtacgatgaagtttctctacaaagtgttttggatatgacagctgattggactccagaagaaagacaaatgctaaggaataaggttcctgtaactggtttgaagacaccattccgagacggtgcgctgaagcatgttgctgaagatgttctaaagttggcaaaggatggcttggaaagaagaggcttcaaggaatcaggatttttgaatgaggttg

SEQ ID NO: 154299 - DNA, 255 bp, Glycine max
ccaattccaaagcccttgtttcactttttccaatccgatatggccgccgcgaccgccttgctccgctctctcccacgccgcgaccttccctcgtcttctctctccgcctttcgttcgttgacgagtggcacaaagacatcatatgtagggaacaagtgggcaagtttgtctcggccgttcagttcaaagcctgctggtaatgatgtcattggaattgatctgggtactaccaattcatgtgtttctgttatggag

SEQ ID NO: 154300 - DNA, 256 bp, Glycine max
ggcaccgttgggttagctcttggtcctcctcaatcatcgacatcagggttccatgctggcagctcttctgctataaatccttttgatgattggtcccacaacagggacaagggggctgatgaattcttttcggaagaagaaatccgcttcagaagtcacgagatgctagagaatgaagatatgcagcagttgcttcgcctcttcagcatgggaggtcatggctccatgagtgctgaggatggcttttcattcccat

SEQ ID NO: 154301 - DNA, 260 bp, Glycine max
ctacaatatggaagtttctctatcttacattactggattgattggggtatcattggaagcagaagaggtcactaagttcttaaatcggatgcagttgcatgccaaactgtctacatctgataataagcagtgtaactttgtggtatctgtacctccttctagaagtgatgttcttcacccatgtgatgttatggaggatgtggcaattgcttatggattcaatgctattaaggatcaagcagtagtagataataaaggct

SEQ ID NO: 154302 - DNA, 257 bp, Glycine max
tcttcttctcttgcggctagggttttagcgcagttcttctagatttaaggaagatgggtaaggaaaaggttcacatcagtattgtggtcattggccatgtcgactctgggaaatccactaccactggtcacctgatttacaagcttggaggcattgacaagcgtgttattgacaggtttgagaaggaagctgctgagatgaacaagaggtctttcaagtatgcctgggtgctggacaaacttaaggctgagcgtgaa

SEQ ID NO: 154303 - DNA, 258 bp, Glycine max
atttcagtgagtgatcggtgttcacttgatctcatcataatcgtcagcgtcaattgaagaagatgccgatcagaaacatcgccgtcggaaggcctgaagaggcgactcaccccgacacgttgaaggcggctttggctgagttcatctcaaccttcatcttcgtgttcgccggctcaggctccggcatcgcctacaacaagctcaccgacaacggcgctgccacccctgccggcctcatctccgcctccatcgcccatg

SEQ ID NO: 154304 - DNA, 253 bp, Glycine max; identical to SEQ ID NO: 152163

SEQ ID NO: 154305 - DNA, 252 bp, Glycine max
ggcttatttaaacagcgaataaccaaagatgggcaggaggaagttgctgatgattggcttgagatgggcaatccctgggagattatttgaaatgatgtttcatatcctgtaaagttctatggcaaggttgtttcagggtcagatggtaaaaaacattggattggaggagaagatataaaagctgttgcacatgatgttcccataccaggatataacactaagactacaatcaacttgagactttggtctaca

SEQ ID NO: 154306 - DNA, 252 bp, Glycine max
aaacagactcaagttttactacaatggtgaatacgctggtttcgatgaagatgagccaacatcaaggcagggaggcaagggagatgttattaaaatgttgaagaagactcacagatacaactcaataattctgattggagacggtgcaaccgatcctgaagcctgcccaccagctgatgccttcattggttttggtggaaatgttgtgagagaggaggtgagatcacgtgccaagtggtttgtctccgattt

SEQ ID NO: 154307 - DNA, 253 bp, Glycine max
ggtggatgaagctgctcacaaattcgatgagcatgcaccttctttggccaagcaggttgcaagccaagtcacttgtttggttcaggaagtgacacacaaagctgagaaagtagtgagtgaagctcaatctggaggggcacgagcagcagcaaattatgtagccactgagtccaagcaaattgtgctctttggttcagtgaaattgtggactggtctcaaccactatccaccattccatgcagtggctgagatg

SEQ ID NO: 154308 - DNA, 252 bp, Glycine max
catactcaaactcactctttctaagttttttctatctctttctctctctctctgtctgccatggttctctccaaaaccacctccgaatccgacgtctctgtccactcaaccttcgcttctcgatatgtcagaacttcgcttcccaggtttaagatgccggaggagtcgataccaaaggaggcagcgtatcaaataatacacgatgagttgcatgttggatgggaacccaaggttgaacttggcatcatttgt

SEQ ID NO: 154309 - DNA, 256 bp, Glycine max
cgataaaggaactgtcctcatacatacagctgtgcagctagaaaattattcaaaaaccgaagaggctaaagtagaggagctcatcaaggcagtagcagattctggtgccaaagtgattgtcagtggaggagcagtaggagagatggcgttgcatttctgtgagcgttacaagcttatggttctgaaaatcagctcaaagtttgaactacgtcgattttgccggacaactggttctgttgccatgctaaaacttggc

SEQ ID NO: 154310 - DNA, 258 bp, Glycine max
tggatcatttggaatcgttttccaggcaaaatgcttggtaactggggaggcagtggcaattaaaaaggttttacaagacagaagatacaagaatcgtgaactgcagttaatgcgtgtgatggatcatccaaatgtgatctctttgcagcattgtttcttttcaactacaagtacagatgaactttttctcaatttggtgatggagtatgttccagagtccatgtatagagtcttaaagcactatagcaatgctaatca

SEQ ID NO: 154311 - DNA, 260 bp, Glycine max
gaagcaataagatgaaaatgaaagtgcttgttttgtttgttgctacagttttggtagcatatgaatgccatggctcagactaccagaagttccctctccaaatgaaaactgggtttggtgggcaatacagcaatgaggtggcatgtgccagttggaggcttggcgtggaagcaaacaacgtagtcaagtggcaaactgttcctgcagcttgcggagagtacatagctgactacgttctaggagaccaatatagatcagat

SEQ ID NO: 154312 - DNA, 253 bp, Glycine max
ggcaagaccatcacccttgaggtggaaagctctgacaccatcgacaacgtcaaggccaagatccaggacaaggaaggaatccccccggaccagcaacgtctcattttcgccggaaagcaacttgaggacggccgtacccttgctgactacaacattcagaaggagagtactcttcacctcgtcctccgtctccgtggtggcatgcagatcttcgttaagacactcaccggcaagaccataaccctagaggttg

SEQ ID NO: 154313 - DNA, 249 bp, Glycine max
gagaggacccggttattccattctcaagaaaatattattcggatagatatgaagttggcaaacgaagatgttagtatgcttgcatttacttcagagcagattactgctccattcctacttcccgagatggttgaaagagtggctagcatgctcaattactttctgctgcaattggtgggtcctcaaagaaaatcgcttagtctgaaggatcctgagaaatatgaatttcgtcctaagcatttgctaaaa

SEQ ID NO: 154314 - DNA, 252 bp, Glycine max
caaggagagaacaagcacagcctcttagaaaagcttcaccgatctgacagcagctctagctcttcaagtgaggaggaaggagaagatggagagaaaaggaagaagaagaagaaggaaaagaaagggctgaaagagaagatcgaggagaaaatagagggtgatcatcatcatcacaaggatgaggacacaagtgtccctgttgagaaagttgaggttgttgaaacagcacatgctgaggaaaagaaggggttc

SEQ ID NO: 154315 - DNA, 251 bp, Glycine max
gtggttttcatcgtcttccttctcttatatttctttttttttttgtcttcgccgcacgccgaaacaatggccggaaaaggagagggtcctgctatcggaatcgatctcggaaccacctactcttgtgtcggtgtgtggcaacatgaccgagttgaaatcatcgccaacgaccaagggaacagaacgacgccgtcttacgtcggcttcactgataccgagcgtctcatcggtgatgcggctaagaaccaagt

SEQ ID NO: 154316 - DNA, 254 bp, Glycine max
ccagaacatgggatggagagctgatggtggtctgtggcttcttgttcgtggaggtggtctttatctcagcaagggcaaagggttaactgaagaatttgaggaggttcctgttcaaagccggggttttggcattcttgatgttggatatcgttcaacggatgaggcttgggcagcaggaggaagtggtattctcttgagaactactaatggtggcaagtcatggatccgtgacaaagctgccgacaacattgctg

SEQ ID NO: 154317 - DNA, 260 bp, Glycine max
tgtgattccagaccttaatttttctctcattcgcttcaaatttcaggaaatcaattatggctcaaccctcaacaagaataggccttgctggactggctgttatgggccaaaatctagcactcaatattgctgagaaaggctttcccatttctgtttataaccgaaccacttccaaggttgatgagactgtagaacgagcaaaacaagaaggaaatcttccagtttatggctaccatgaccccgaagcttttgttcattcc

SEQ ID NO: 154318 - DNA, 259 bp, Glycine max
attaattgcaagaatggcacctcgttgcttggtgatgtccctttctgttctcttcactcttggtcttgcgagagaaagccatgccagagacgaagatttttggcatgctgtttggccaaacactcccattccaagttcattgcgagatcttctaaagcctggccctgcaagtgttgaaatcgatgatcaccctatgcaaattgaagaaacacagtacccgaaaaccttcttctataaagaagaccttcatccaggcaaa

SEQ ID NO: 154319 - DNA, 257 bp, Glycine max
gaaggtttctctgttaaaaagcaagccagtacagctataacataccttcattcatggagcaagatacaagttgagattagagctcgccgaatctgtatggtaaccgaagacaagatcaggaggaagaaactggagtctcaattaaaactggaggcaaagcttcatgatctggaggttgaatggtgtggtggttctgaaaccaaggaggaaatccttggaaggatacatgacagggaagaagcagcagttaagcgtga

SEQ ID NO: 154320 - DNA, 253 bp, Glycine max
ctgaagagcctcctcttctctctcttcctcttcctcttcttagcctcctccgccgtcgccaccgtccccgcccacaacatcacccgcatgctggccgcacaccccggcttctccaccttcaaccactacctctccgtcacccacctggccgaagagatcaaccgccgccagaccatcaccgtcctggccctcgacaatgccgccatgtcctccctcctcgacaagcacctctccctccccaccatcaaaaacg

SEQ ID NO: 154321 - DNA, 251 bp, Glycine max
cgtgggttgggattgccttatttttcttagctttcacagcctcatgctttgcaacagaggttacttatgatgcacgttctctcattattaatggagaaagacgtgttattttttctggtgcggtccattatcctcgaagcacagtgcagatgtggcccgacatcatacaaaaggcaaaggatggagggcttgatgccattgaaagttatgtattttgggaccgtcatgaacccgttcgacgtgaatatgat

SEQ ID NO: 154322 - DNA, 254 bp, Glycine max
cccaggtttcgtgttttgtgtaggcgtctacgacttgacgctgttttgttgggagttgggattaggtgcatcaattgactgtggcattatagcttattaagagaaagcaacaacatgtggaggctgaagatagcagatggtggaaaagacccatacattttcagcacaaacaattttgtaggcagccagacatgggcgtttgatcctgaggcaggaactccagaggaacgagctcaagttgaagcagctcgtca

SEQ ID NO: 154323 - DNA, 258 bp, Glycine max
aaggcagaaagcaagctcatcctagagttttaaaaatggcagcagcctcctccatggctctctcttccccatccttggctggcaaggccgtgaagctgggcccatcagcccccgaagtcgggagggtcagcatgaggaagaccgtcaccaagcaggcctcctccggaagcccatggtacggcccagaccgcgtcaagtacttgggcccattctctggcgagcccccgtcctacctcactggcgagttcccaggtgact

SEQ ID NO: 154324 - DNA, 260 bp, Glycine max
gcaagacccgtttggataagggaaaactccagagattgctttgaagcaagatccttgcgttgaccctttcctgaaccagaaccggggggggagaggaaagaaaaggggatccaaatttcccatccatcaataaagtgagggctttccggaccttccccacccctctttccattcttccttcccctctcactccccctttttcaagaaataagccccgctccctaagaaggggcccctctctgataaggaaggaaacgaaa

SEQ ID NO: 154325 - DNA, 260 bp, Glycine max
gagaagcactcatcattcttcgtttgtctaagatccgccttctctgaattgtaaaaatgtcgctcggagaaactgcttgttcatacgcagctctcatccttcatgaagatggaatcagtgtaactgccgacaagatcagcaccttgttggaaactgcaaaggttcaagtagatacctattggccaaccttatttgctaaacttgctgagaagaaaaatcttggcgatttgatagccaatgcagcaggcggtggtgcacca

SEQ ID NO: 154326 - DNA, 270 bp, Glycine max
gttcctcttattagcgacggccattctcgccgttgtgtgctccgccgtgagcggttgctcgccatcggatagggcggcgctgctggccttccggaaggcgctgagcgagccctaccttggcctcttcaactcgtggacgggctccaactgctgcctcgactggtacggcatcagctgcgacgccaccaccggccgcgtcaccgacatcaacctccgcggggagtccgaagacccatcttcgagaaagccggtcgctcggctacatgacgg

SEQ ID NO: 154327 - DNA, 266 bp, Glycine max
tgccactactaaagacaggtttagacgagagctagatggtgtccattatgaaattcaggctactgaccccacagaaatggatcttgaagtactgagagaccgtgcacattgaaatgtttaagcactgaattcattttcttatcagaatctactaggttttaaagttttacttttaatgaattacctcttcatgctttgtcatcaatagaacccatcttgccacaggaatatacctccactaatatgaatctgaaggctgatgggtt

SEQ ID NO: 154328 - DNA, 265 bp, Glycine max
tgctcttagggaaggaatgggtggtggtggcggtggccatgatccatttgatatgttcagttcattctttggtggaagtccgtttgggtcaggtggtagcagtagaggacggaggcagaggcggggagaagatgtggttcatcccctgaaggtctctctggaggatctttacctcggaacttcaaagaagatctctctttcacgaaacgtgttgtggtcataatgcaatgggaaaggctcaaagtctggggcttcaatgacctgt

SEQ ID NO: 154329 - DNA, 236 bp, Glycine max
gctagaccagaccctaaaaagaacatcacaactttggtaaaagcatttggagaatgccgtcctcttcaagagcttgccaaccttacattaattatgggtaaccgagatggaattgatgagatgtcaagcacaaatgcttctgtacttctctcggtacttaagttgattgacaagtatgatctgtatgggcaagtggcatatccgaaacatcacaaacaatatgatgttcctgacat

SEQ ID NO: 154330 - DNA, 261 bp, Glycine max
ttctcttcttcaattcattctagttctggattccgactcgccgcattgactcggtccgggttggggtcgactcagttcggtttttcattctctcgcgaatctaatctataggaaaagctaagggcacatcacaatgaaggcattgattctggttggggggtttggaacaaggctgaggccactgacactcagttttcctaagcctcttgttgattttgctaacaaacctatgattctgcatcagatagaggcccttaaggc

SEQ ID NO: 154331 - DNA, 260 bp, Glycine max
tgctgcattaacctccgcatttgttactgattttccaggtgtgaatggtcttggtgtatctgcggcacggttagacatagccaaaggtggatcaatcccaatgcacacacaccctgctgccactgaacttctaataatggtggaaggtcaaatcactgctggttttatgaccccaactgcactttataccaagacactgaaacctggagatattatggtttttccacaaggacagttgcattttcaggttaattctggaa

SEQ ID NO: 154332 - DNA, 262 bp, Glycine max
ccggaagaggaagatttctagtgacttcaacatgatgatggatcagaaaatatacacatgtgagcatccccaatgcccttatagcgaagttcgccttggtttccatgataggtctgctagggacaatcatcaattgaattgtgcatacagaaacagttctgcagattatggtggtggtcccaatttccatgctactgaggataagccagtcatattcccccagtcctttgttcaacccaacactacaacacagtctgcaagt

SEQ ID NO: 154333 - DNA, 245 bp, Glycine max
ctcgagccgctcgagccgattcggctcgaggacgaattaaagagtgtttctcaagattgagctattgaacgctatgcccacttttgtgtttgtgaaacagggaacgcttctggacaaagtggtgggagcaaagaaggatgagctgcagcagaaaatacagaaacatgtggcttcagctagtgcttaatctagctcaccttcagaaactttatatatgcgctttcttttcataatcttgtactaga

SEQ ID NO: 154334 - DNA, 167 bp, Glycine max
caagaacacagatccttcttttcttcttatgtattattgcttttttagtttgaaaaatgtattctttctcttttgctttctcacattcttcttttttgtataccagtaaacactaaacgagaacacatcttattattaatgcaattaagcttatacacaattgatct

SEQ ID NO: 154335 - DNA, 258 bp, Glycine max
caacaatgtgctttgcattgctttcattatcactttaacgtgggcagttgaagctcgaattccggggatttactctggtggtgcatggcaaagtgctcacgccaccttctacggaggatccgacgcttccggcaccatggggggagcgtgtgggtatgggaacctgtacagccaggggtacggtgtgaacacggcggcattgagcacggcactcttcaacagcgggcttagctgcggtgcgtgttttgagataaagtg

SEQ ID NO: 154336 - DNA, 260 bp, Glycine max
atttcgttacccttttctcgattcgatcttcagatctgtcgccgacagcaaacatggttgatcaggtccaacaccctacaatcatggacaaggttgctggtcagctccatctccgttctggtctttcatctggtattagaagttatgatggagcctaccgccacccagctatgtaccaaagaccctcttttgggaattactcgaatgctgcattgcagtttcctgtgatgcccacatgcaaagctaccatggatttgtct

SEQ ID NO: 154337 - DNA, 260 bp, Glycine max
aaaaaaaacccttagccaacacaaccatcatattaaaatctgctattcagcaatcagcattcactggtcaaactgctctgaagcagctcaatgagttcgtccgcaagaccggtggcgccggcaaaggtcgcactaacatgcgccgcaccgtcaagagtgctcctcagagcatttggtatggccctgaccgtcccaagtacttgggtccattctcggagcagattccatcatacctgaccggagaattccctggtgactac

SEQ ID NO: 154338 - DNA, 259 bp, Glycine max
ctgcttcacccgtaatcatcaccatcatcaaggacatctcagcaattaaacaatatacaaaacataatcaaactgctctgaagcagctcaatgagttcgtccgcaagaccggtggcgccggcaaaggtcgcactaacatgcgccgcaccgtcaagagtgctcctcagagcatttggtatggccctgaccgtcccaaatacttgggtccattctcggagcagattccatcatacctgaccggagaattccctggtgacta

SEQ ID NO: 154339 - DNA, 259 bp, Glycine max
cggctcgagaattataagcatgggtttgtggaacacaacgaatgcagtgtcttgccgctttcacaagtttggtgatgaccaaaagaatctggtcttccaaggtgatgccacgtcttcttccaggggcatagaactcacaaagttagacggtggaggaaaaccagtgggtggcagtgtggggagagtgttatactcttctccagtgcacctttgggaaagctctacagtggtcgcaagctttgataccgacttcactttt

SEQ ID NO: 154340 - DNA, 259 bp, Glycine max
caagcaatgcttacagccctgtacaagatgttgctgattcctgccggactggagctgcaaccaatgtcatctttggccttgctctgggatacaagtctgtcattattcctatttttgccatcgcaatcagcatttttgtgagttttacttttgctgcaatgtatggcattgctgtggctgcccttgggatgctgagcaccattgcgacagggttggctattgatgcctatgggccaatcagtgacaatgcaggaggtat

SEQ ID NO: 154341 - DNA, 260 bp, Glycine max
gcgttgcgtggttggttttgcggtatcgaagaagaagagggggaaacaggttgtgccggtgaaatcagtgatctacgcgctttcccctttccagcaaaagattatgccgggtctctggaaggacttgcccacgaagattcaccacaaggtctccgagaattggatcagcgccactcttttgctcggtcccctcgtcggcacctacgcgtatgttcaaaactacctggaaaaggagaagctggctcacaggtactgagctc

SEQ ID NO: 154342 - DNA, 262 bp, Glycine max
  unsure (1)..(262): unsure at all n locations
tccggatttcgttttgctttgttcaggtagccagccagtcatggtgctcttcaatgtttcacgcgtagagnccacnnccttacgatggncngaagcctggaacctctggtctccgcaagaaggtganagtgttcgtgcaacctcattacctccataactttgttcagtcaacattcnnngcattnactgtggataaagttngaggtgctncgctagttgtntctggtgatggtcgtnattttcaaaggaagctattcagatt

SEQ ID NO: 154343 - DNA, 259 bp, Glycine max
gtcggtgggacgtgtgttattcgtggttgtgttcccaaaaagattttggtctatggagcatcttttggaggtgatcttgaggatgccaggaattatgggtgggagttgagtgagaaagttgacttcaattggaagaagctcttgcaaaagaagacagatgaaataaacagattaaatggactttacaagcggatgttatccaattggggggttaaattatttgaaggacgaggcaagatagatggtccaaatgaagttg

SEQ ID NO: 154344 - DNA, 258 bp, Glycine max
gcaatggacgcccacatcaaagaaggggacgtgttcttcattccaaggtactttgccttctgccaaatagcatcaaggggtgaaccacttgagttctttggcttcaccacctcggctcaaaagaacaggccacaatttctggttggtgccacgtcactcatgaggaccatggtggggcccgagcttgcggctgcatttggtgtgagcgaggagaccatgaatcgcgtggctagggcacaacatgaagctgtgattcta

SEQ ID NO: 154345 - DNA, 258 bp, Glycine max
caaatctattccatgctcctataagtgagagatgagactgcagtaggtgtgggaactgtggggtcatcggaggcaataatgttggcaggtctagcttttaaaaggaaatggcagacaaagagaaaagcagaaggcaaaccatatgataagcccaacatagtaactggggctaatgtgcaggtttgttgggaaaaatttgcaaggtactttgaggtagagctcaaggaagtgaaactcaaagaaggatactatgtgatg

SEQ ID NO: 154346 - DNA, 256 bp, Glycine max
aagagactcacctcctcaacgaagctcaatctataggggtgtcacaaggcatcgatggactggtcgatacgaggctcatttgtgggataagaattgctggaatgaatcacagagcaagaaaggaagacaaggttttcattattttgctctctataatctttagtttaattttctgatttccttcgctttatatgatttattgtcatattaattatcttgggttggttgacaatggcaatggaaaacaactggatgc

SEQ ID NO: 154347 - DNA, 257 bp, Glycine max
  unsure (1)..(257): unsure at all n locations
aagaaagatccgtaaattaacattctctccctcccttcgctataatagcaagcttttcaagcatatttctggggtttggtcccttttccttgtttggggttttcttgggaaaaaagaagtaattaggtataataatagtataactaaagcaaaaaaaaagacagtaatatggnaaggggtagggttcagctgaagaggatagagaacaagatcaatcggcagtaactttctccaaaaggagagctgggttactccaa

SEQ ID NO: 154348 - DNA, 256 bp, Glycine max
gacaattcaacttaagagatcaatatggccaccaccactacccagcctccctctaatatctgttttttccttctgttgttgcttctagcacactttcatttgggcataagccaacttgagctgaattactactctaaaagctgcccaaaagctgaagagatcatcaaggaacaagtcacacaactatataaccagcatggaaacactgccgtttcgtgggtcagaaatctcttccacgattgcgtggttaagtcat

SEQ ID NO: 154349 - DNA, 261 bp, Glycine max
gtgctcgtgacattccaccagaagacttgaacatgatgtctgatcttgatggccagcagcagcaccatctgaatgacttgagctgttacatacagcctcgccccggtgccagttctgtgagtagatctggtcggtccaagaccctaactccatcaaatctggaagagctcttttctgctgagatttctttgtctccccggtattctgatccagcagccggttctgtgttttcccctatcacaaatcagctgttctcaatca

SEQ ID NO: 154350 - DNA, 260 bp, Glycine max
caattcttccccctccacccacccagcatatctctctattcctatttattagcacccctcacattaccttgtgtcaccaactactttgactcctttaccataccattacaataattatcaaacctaaccagtaaaaatggtgaccgtggaggaaatccgcaacgctcagcgttcccatggacccgccaccatcttggccttcggcaccgccacgccgtccaactgcgtctcccaagccgattaccctgactactacttcc

SEQ ID NO: 154351 - DNA, 256 bp, Glycine max
ggcgaccatcaccaccaccaccaccaccatcaagatcacgatcatcatcatcatgatcatgatcaccatcatcatcacgatggagagggagagaccaactcatgggtaggtaaggatgggaaggtgtaccatagccacgatggtctggcgccgcattctcacgaacccatttactcccccggctacttcaccagaagagctccaccgcttctcaacagaaacttcaacgaaagagccttcaacgtcggaatcggtg

SEQ ID NO: 154352 - DNA, 256 bp, Glycine max
tcgagcttcagcaatggtgtacgtcaaggctcagaaatcaaaagcctacttcaagagatatcaagtcaagttcaagagaagaagagagggaaaaaccgattaccgtgccaggattcggttgattaatcaggacaagaacaaatataacactccgaaataccgatttgtggttcgctttagcaacaaggacattgttgcacaaataatatctgctagcattgccggcgatttagttcttgctacagcatattcacat

SEQ ID NO: 154353 - DNA, 258 bp, Glycine max
gtgtaggaggtgattggaagttgttcgaatccagaatccgaaaaaagggcaccaccgtgtcaacaagtagaagcagaagctgtttttgttcttcgccgctgacactaatcgtttcttcaatgccttacgagaaggagttcgccgctgcaaaaaaagcagccatctctcgctgctcgtctctgcaagaaagtacagaaggctcttctgcaatccgatgtgcactcaaagtcagacaaaagtcctgtcacagtggctgat

SEQ ID NO: 154354 - DNA, 255 bp, Glycine max
gagtcccttctttgcatgttatccactgcctcagtcccggaccttggctaccggaacggggaggacaactaattccggaagtggcactttccttctcacaatgtgagtgtctcattgtactggtccccttttcttgtgcaaggtgtagctaagtcatactcagggccaaatcataataagttgtatttggatcatgttgatgagaggtgggcctaggatatggatcaaatggccctgattgtgttatcacttggg

SEQ ID NO: 154355 - DNA, 246 bp, Glycine max
caacaaacaatattattcaatagaaaagaaagaaagatgagtccaacatgggtttttgtgttaggtattattgcagcaatgttggtggttgtgaatggacaatcatcagtgaagccattggtgaagacagtgaaggggaagaaggtgtgtgacaaagggtgggagtgcaagggttggtctgcttattgctgcaatgagactatctccgattactttcagacataccagtttgagaacctcttcgcg

SEQ ID NO: 154356 - DNA, 251 bp, Glycine max
ctcgagccgaatcggctcgagcaaaaatggcggcgaaacttcaaatctttacgggattgcaccccgcgccatttcaatctacttcttcctccactctctgcgtactcaagaagcctctcactacctccttcttcggcaccgcgcgagtggaagttctgaaacttagagtgatgaggattgtgaagcctacgcgtggcggaggtgctctcggtgctcgcatgaacctctttgacaggttcgccagagttgtg

SEQ ID NO: 154357 - DNA, 252 bp, Glycine max
caggaattgacggaggcattcgaaatcggtgaagatggttgctatgaggtttcatcagtaccaggtggtgggaagggctcttcctaccgaatccgatgagcatcctaagatctaccgcatgaaactctgggcaactaacgaggtccgtgccaaatccaagttctggtatgctttcttcttcttcttcttcttttttcaaatgttttttattcgtattcgtactgattcaataatattttttttatgatttgt

SEQ ID NO: 154358 - DNA, 252 bp, Glycine max
tcccaatgctagagatttgataccagggatgcttgtggttgaccctatgaggagaatgaccatacctgagatccgtcaacacccatggttccaagctcgacttccgcgttatttagctgtgccaccaccagatacaatgcaacaggccaaaaagattgacgaggagatccttcaggaagtcgtgaaaatgggatttgacaggaatcaattggttgaatctcttgggaacaggatacaaaatgagggtactgt

SEQ ID NO: 154359 - DNA, 253 bp, Glycine max
gactgggtcggtctttttgaggccatcactggttatggtcttggtgggtcttctatggctttgtgtggtagagttggtcgaggtatctatactaaggctgctgatgttggtgctgatcttgtcggaaaggttgaaagagacatccccgaagatgatccaagaaatccagctttgattgctgataatgaccgtgataatgttggggatatcgctggtatgggatctgatctgtttgcggtcatatgccgagtca

SEQ ID NO: 154360 - DNA, 265 bp, Glycine max
accaactgcattggagcgggttatctggggattcggggatggatctaccattccagtgtttgaaactcccgttggaaaaataggtgctgccatttgttgggagaacagaatgccactgttaaggacagcaatgtatgccaaaggtgtggagatatattgtgctccaacagctgattccagggatgtttggcaagcatcaatgacccatattgcacttgaaggtggatgttttgttttgtcagcaaaccagtttgtaggagaaagg

SEQ ID NO: 154361 - DNA, 261 bp, Glycine max
ctctacgctttctcgttcgagatccctcaagggatccactaactgaaggagaaatggggttgacattcaccaagcactttcagccggcttttcgccaagaaggaaatgcgaattctgatggtgggtctcgatgcagctggtaagaccaccatcctgtacaagctcaaacttggagagatcgttaccacaattcccaccattgggttcaatgtggagactgtggaatacaagaacattagtttcactgtctggatgttggtg

SEQ ID NO: 154362 - DNA, 255 bp, Glycine max
gccttgaacttgaactatcgtgtcttcttggctttctctgttcaggatcaacatggatattgtatcacgagctttgctatttccgttggctatacttgtgctcatattaagcacaccttgctcaggtgcttttgggaagagtggaactaatgtgaaaacagctatttttctgtcccccaagtttgaacttggaccaggatcggtagccaataaatatgattatgacgctgattttccaagaggtcattagcactt

SEQ ID NO: 154363 - DNA, 261 bp, Glycine max
aacatcatcatgtcggacgaagagcaccatttcgagtccaaggcagacgccggtgcctccaaaacctaccctcagcaagccggtaccattcgcaagaacggctacatcgtcatcaaaggacgcccctgcaaggttgtggaagtttcgacttccaaaactggaaagcacggtcacgccaagtgccactttgttggaattgatattttcactgccaagaaacttgaggatattgtgccctcttctcacaactggatgttcctc

SEQ ID NO: 154364 - DNA, 266 bp, Glycine max
caacaaacaatattattcaatagaaaagaaagaaagatgagtccaacatgggtttttgtgttaggtattattgcagcaatgttggtggttgtgaatggacaatcatcagtgaagccattggtgaagacagtgaaggggaagaaggtgtgtgacaaagggtgggagtgcaagggttggtctgcttattgctgcaatgagactatctccgattactttcagacataccagtttgagaacctcttcgcgaagcaattcgccggtggcac

SEQ ID NO: 154365 - DNA, 258 bp, Glycine max
agagaatggctcccaagggtttaacctttctggctgtgttaatatgcgtttcagcactgtcactgagtccttctgttgcgggggaagggcaaaataatggccttgttatgaacttctacaaggaatcatgccctcaggctgaagacatcatcacagaacaagtcaagcttctctacaagcgccacaagaacactgctttctcctggctcaggaacatcttccatgactgtgctgttcagagttgtatgcttcactgtt

SEQ ID NO: 154366 - DNA, 234 bp, Glycine max
ggaagatggtgttgccggcaccaattgccctatccaaccaggcacaaactacacgtaccacttccaggtgaaggaccaaaacggtagcttcttctactaccctagcctagggttgcagcgtgctgccggaggcttcggcggcctccgcatcaacagccgccaactcatcccagtcccctatgctgatcccgaggatgactacaccgtcctcgccggcgactggttcacaaagag

SEQ ID NO: 154367 - DNA, 258 bp, Glycine max
ctatttttcttcctcagtagtgtcatttacgcttctcttctctgcagcaactatgcctaaccctaaggtcttcttcgacatgaccatcggcggtcaatctgctggccgcatcgtgatggagctctacgccgacgtcactccccgcaccgccgagaacttccgcgcgctttgcaccggcgagaagggcgtagggcggagcggcaagcccctccactacaagggctcgtccttccaccgcgtgatcccgagtttcatgtg

SEQ ID NO: 154368 - DNA, 260 bp, Glycine max
aaagcattgaattcaaaaacttaagttcattccttgtgttttgctttcttcctcaaaaccaaacatgtcgaacacatgcggcaactgcgactgcgctgacaagactagctgcaccaagggaaacagctatggtgttattgtagagactgagaagagttacatcgagactgttgtcatggatgttccagcagctgagcatgatgggaagtgcaagtgtggcactaactgcacttgcacggactgcaccgtggccattaagg

SEQ ID NO: 154369 - DNA, 259 bp, Glycine max
gtcgctactaagagttgctgcttcttcagccactccgcacctcgcagcctctgtgccctcaacaaccatggctgaaatcgaaactaccgttccagatcccacccaaatcgacgtgagactcttcaatcgctggagcttcgaggattttgatgttaagcatatgtctcgggctgattacattggagtgtccccagcaaagcatgctacatatgttcctcacactgctggtaggtactcattgaagaggccaggaaagccc

SEQ ID NO: 154370 - DNA, 256 bp, Glycine max
caaggacctacttgaagccgaaacagtgttcaaggaaatgccacaaagaaacgttgtagccgagtccgcaatgattgatgggaatgccaaagttggtcgcttggatgatgcccgtaatgttttcgacaacatgacccagaggaatgcattttcctggacaagtttgatttctgggtattttagttgtgggaaaattgaggaggctttgcatttgtttgatcaaatgcctgagagaaacgtggtgtctggactatgg

SEQ ID NO: 154371 - DNA, 211 bp, Glycine max
cgaattctgatcgcttttacgcgagaaagggggaccaccctctaagcctaagtattcctcaatgaccgatagcagtcagtaccgtagggaaaggtaaaagaacctatttagggatgcaatagagaactgagatccgtgcgacatcgtcgaagagttacaccttattgaatttataaacgatcactctaacggcgtacctttcatgatgggt

SEQ ID NO: 154372 - DNA, 250 bp, Glycine max
agagagtgatttcagtgagtgatcggtgttcacttgatctcatcataatcgtcagcgtcaattgaagaagatgccgatcagaaacatcgccgtcggaaggcctgaagaggcgactcaccccgacacgttgaaggcggctttggctgagttcatctcaaccttcatcttcgtgttcgccggctcaggctccggcatcgcctacaacaagctcaccgacaacggcgctgccacccctgccggctcatctccg

SEQ ID NO: 154373 - DNA, 252 bp, Glycine max
gttgcgtgcttggagaggagtacagatgaagggaaagtggggatttcacttcagaaggatctcatggcgattgcaggtgaggctctcaagtctaagatgactactatgagtgctcttgttcttccggcttccgagcatttggctgttccgtctcagtctcattgggaggaaaatcttcaaccccaaatggaagccttagatgcgtgacttcatacaagcctgggagcacttctgcatccacgctggtggacg

SEQ ID NO: 154374 - DNA, 104 bp, Glycine max
cgacgtgcgtggactctttgaaggtggaattcatctccctacagatgcactcagtaaaattagccccctatcagtgctcaaggaaatcttccgcactgatgatg

SEQ ID NO: 154375 - DNA, 246 bp, Glycine max
  unsure (1)..(246): unsure at all n locations
tatcagcagcagcaccagtgctaagggtgtcatcggtaccggtattatcatcagtgaaagtgtcatcgacaccgtgactgctttagcgtcccacatatccatccagcttagcaatcatagcaaggctgatgtacatgagaaaggtatacttggacaggctacatgattttcaaggaacatacctcgggcnaccttngcanctnncnaagatncatacgatcttaattttgaatgggacagtacttc

SEQ ID NO: 154376 - DNA, 249 bp, Glycine max
ccgacgccttcgacgtcgccgccgaattcaatgcctccccctacgtcttctacccctccacagccaccgtcctctccatcgccctccacctccccaccctcgacaagcaggtccagtgcgagttccgagacctcccggaaccggtcaccatccccggttgcattcctcttcccgtcaaggactttctagacccggttctggagcgcaccaacgaggcctacaagtgggtgctacaccactcaagcgcta

SEQ ID NO: 154377 - DNA, 252 bp, Glycine max
caacttctctgtaaatgttagcaacaatggctacattagtgctaatgaccccttgaactggggtgcggcggcggaggctatggctgggagccacctcgacgaggtcaagcgcatgctagaggagtaccggaggcccgtcgtcaagctcggtggagagaccctgaccatctcgcaggtcgcggcgatcgcggcccacgaccagggggtgaaggtggagctggcggagtcctccagggccggtttaaggccagc

SEQ ID NO: 154378 - DNA, 259 bp, Glycine max
tgcacaagctcttgtatcatcatcatctcttaccttctcagccgaggctacaagacaaagtcttggaccaagatcactccaatctccatttggcttctcaagaaaagcctcctttcttgttaaggcagctgctaattccccttgttaaagcaagatcagacagacctttgtgggttggattcaaggcaaagtctttcctacttggatggcagccttccggggaataatgaatttaaccctcgggaactccggaccctga

SEQ ID NO: 154379 - DNA, 260 bp, Glycine max
  unsure (1)..(260): unsure at all n locations
ctttattctctcacacaaaataatgncnacagaagcttggcaacangtctcatgatcctnaagtgagaaagaagccatngacaatggaagaagacttaatcttgatcacctatattgccaatcacggggaaggggtttggaactctttggccaaggctgctggacttaaacgtaccggaaagagttgccggctccggtggctaaactacctccgtcctgatgttagaagagggaatattacacccgagaacagcttttga

SEQ ID NO: 154380 - DNA, 252 bp, Glycine max
cgccatccaattgatgggtttcttcttcatgacagtcttcatgtttgctcttgctataccttacaatcattggaagaaccacaacaatattggctttgttgttatgtactcattcacattcttcttctccaactttggtccaaattccaccacatttgttgtgccagcagagattttcccagcaaggctaagatctacttgtcatggaatctcagctgctgcaggaaaggcaggagctatgttggtgcattt

SEQ ID NO: 154381 - DNA, 251 bp, Glycine max
caaaaagaaagaatcccaggcgaggagatagatggaggggaaggagcaggatgtgtcgttgggagcgaacaagttccccgagagacagccgattgggacggcggcgcagagccaagacgacggcaaggactaccaggagccggcgccggcgccgctggttgacccgacggagtttacgtcatggtcgttttacagagcagggatagcagagtttgtggccacttttctgtgtctctacacaccgtcttaac

SEQ ID NO: 154382 - DNA, 251 bp, Glycine max
  unsure (1)..(251): unsure at all n locations
ctttattctctcacacaaaataatggnnaagaagcttggcaacangtctcatgatcctgaagtgagaaaggggccatggacaatggaagaagacttaatcttgatcacctatattgccaatcacggggaaggggtttggaactctttggccaaggctgctggacttaaacgtaccggaaagagttgccggctccggtggctaaactacctccgtcctgatgttagaagagggaatattacacccgaggaac

SEQ ID NO: 154383 - DNA, 251 bp, Glycine max
aacactttccacttgtctccgaattagttatcttgagaaacattattcccattgctatatattatggctagcatgaaggttacatgggtggttgtgatcatgtgcatggccgtggtgggtgcaccgatgatggcgcaagccatgacatgcaatgatgtgacggtgaacatggcacagtgcctatcctacctgatgcagggaggaacaccttcaacactttgctgcagcggagtcaagacattcttggctct

SEQ ID NO: 154384 - DNA, 251 bp, Glycine max
tttcactttccatttccatttccattttttctggttcactttctcgatggcctccgagaaccccaccgccgacgacgccgtcaacggcttcaatcggccggaaatgttctcggaaaacctcgccggcaccgtcgacgcctacgaccgccacgtgttcctctgctacaagagtcacctgtcctggcccccgcgcatcgaggcctccgacgccgatcccttccccaagcgcgtcgccgccacttcaaagcccg

SEQ ID NO: 154385 - DNA, 247 bp, Glycine max
tccttctcctggatgtggctcccctcactctcggaattgaaactgttggtggagtcatgacaaagttgattcccagaaacactgttatcccaaccaagaaatctcaggtgttcaccacctatcaggaccagcagactacagtctccattcaggttttcgaaggcgagaggagtctcacaaaggattgccgccttcttgggaaatttgatctgtctggaattcctccagccccaagggtacgcctcaa

SEQ ID NO: 154386 - DNA, 245 bp, Glycine max
ccaatgtgaacccaagtgaagttggggatattgttgtaggtagtgtattggctcctggagctcaaagagctagtgaatgccgaatggctgcattttatgctggttttcccgaaactgtgcctgttaggaccgttaataggcaatgttcatctgggctccaggctgtcgctgatgtagctgctgctataagggctgggttctatgacattggtattggtgccggtttggaatcatgaccactaatc

SEQ ID NO: 154387 - DNA, 244 bp, Glycine max
  unsure (1)..(244): unsure at all n locations
catagctcaaaccgttttacctacatttcaatctgcatttggtttaaatgccgagtttgataggtttgacgacgtgcgtggactctttgaaggtggaattcatctccctacagatgcactcagtaaaattagccccctaccagtgctcaaggaaatcttccgcactgatggtgatacactcctcaagtttccacaanctcatgtctacaaagnnagtaagtctgcatggatgactgatgaagaa

SEQ ID NO: 154388 - DNA, 208 bp, Glycine max
atcgactcacccaacgctttgtctaccgctccggcagcgggtagtaggaagaacgcgacgctaatttgcgtcccaataatgggagaatcagttgaaaagatggagattgacctggacaaagcgaaagccggaggcacggaccttgttgaaatgcgattggattgcttgaaaacctttgacccctatcgagatctcaacgctttcagtc

SEQ ID NO: 154389 - DNA, 248 bp, Glycine max
catttttcttggatttattgctagctcacaaggagtgcaggttgatccatagaaggtcaaagccattcaagattggccaacccccaaaaatataagtgaggtaaggagctttcatggcttagcaagtttctatagaaggtttgttagaattttttgcactttggctacacctctaaatgaaattgttaagaaaaatgttgtttttgaatggggtgatcaacaagagaaggcttttattgctttgaaag

SEQ ID NO: 154390 - DNA, 291 bp, Glycine max
cgcatgcacgcgtccgcgagcccagtgccacgcttgaattttgactgaagacaaagttagaacaaaacaacatgtcttgctccgtcgcggtttccaattcgccggtgttctctccttcttcttccctcttctgctcgaagccctccatcatctcttcttcgccggaatcctctccctctctctgtcgcatctcaaaccttcgaactcttctacgtcgtcgtcttgttcttcgccttctgctgctgctgcttcttcttctccttcttctccgtttcgacttcgccttcccaa

SEQ ID NO: 154391 - DNA, 258 bp, Glycine max
caagcagatcaatctctctctctctctcaaccataatagtcatgggtttgaaggaggattttgagcagtacgctgagaaagcaaagactttgccaccgactcaatcaaacgaagacttgcttatcctttatggattgtacaacaggccaccgttggacctgtcaacaccagccgtcctggaatgttcaacatgacggacagagctaaatgggatgcatggtaagctgttgaagggaaatccaaggacgaagcaatggg

SEQ ID NO: 154392 - DNA, 259 bp, Glycine max
atctcttctctctccacccaaaccccaaccaccgcccctgttccactctcgtatccgtcatgaaaggaggaaagtccaagaccgaatctaagagagccgatcccaaacttgctgtgaacaagaagggagccgccaccaaggcaggaaacccgccggcaaggggaaggcagcgaaagaccctaacaagccaaagaggcctccaagtgctttcttcgctttcatggaggagttcaggaaggcattcaacaaagaacatcct

SEQ ID NO: 154393 - DNA, 258 bp, Glycine max
gtcacttctggaatcttcgattacctgcaagagcgcgcaccaggaagcacgttgtatggtttcaaaggtggacctgcgggcattatgaagtgcaaatacgttgagctcacctctgaatatatttatccttatagaaatcaggcggctttgacatgatttgcagtgggagggacaagattgaaactccagagcagtttaagcaagcggaagaaacagctaagaagctagacttggatgggctcgttgttactggtggtg

SEQ ID NO: 154394 - DNA, 267 bp, Glycine max
tagagaccattcattgcactgatagcagcgatggggatcgatcttaaggctgggggtaagagcaaaaagaccacaagaacagcaccaaagtccaatgacatctacctcaaattacttgtcaagctttatcgattccttgttcgaaggacgacagcaatttcaatgctgtgatactcaagcgcttgttcatgagcaaggttaacaagcctccaatttctttgtcaaggttaattaagtatacgaaggggaaggaggataaattgctgt

SEQ ID NO: 154395 - DNA, 256 bp, Glycine max
aaaagctgtggatgaggatcctgagaatgacctctatagaaagtccttgcaagcagccattaaggccccagaactacacatggagatccataaaaatgggcttggtctgatgagtaatgcgggatcctctgctacttcaaagaaaaggaatctaaaaggcagaagagcaatgactttaagtatgacatatttggatggactattcttgcagtgggcatagtagcatgggtgggaatggccaaatctaacattcccc

SEQ ID NO: 154396 - DNA, 248 bp, Glycine max
aatcactctagctgttgcaaatttctactatttttcaatggcttctgcagatgttgagttccgttgctttgttggtaggcttgcttgggtcaccggcaacgatgccctcgagaaagccttttcaatctacggcgacatgttgaatcgaaggttatcaacgaccgtgtgactggaaggtccagaggattcggatttgtgaccttcgcatcagagcagtcaatgaaagatgcgatcgcaggaatgaacgg

SEQ ID NO: 154397 - DNA, 256 bp, Glycine max
atcctttaccatcccggattctccctgccactacaaattcccccactcgcaaaccataggcagcagcagcagcagcaacaacaacagcaacgaagaattcgaagagaaatcaaatcgaatctcatttgatctgtgcgcgctgaggcggcggcaatggcggagcacttggcatcgatattcgggacggagaaggacagggtgaactgcccgttctacttcaagatcggcgcgtgcaggcacggcgaccggtgctcgc

SEQ ID NO: 154398 - DNA, 263 bp, Glycine max
atctcattaattaattcacaaactaacttagcttccaaattcatatggacctggcgacaaagatggtatcagagaggccagtggtgatattcagcaagagctcgtgctgcatgagccacaccataaagacccacttgtgtgatttggggtgaatccagcggttcatgagctggatgagatcccaagaggcagagacattgagcaagctctttcaaggcttggttgttctccatctgttcctgctgtattcatttctggtgagc

SEQ ID NO: 154399 - DNA, 239 bp, Glycine max
aacggttcgctggtccgtgcctaatgtgtttactggtggaaaccacattggtggctgtgactcaacaactgccctgcacactcaggggaagctggttcctctgctgatatctgctggagctgttgccaaatcaactgcttaaaggatctcccatttctaggttatgcagctaaataaaaataaaaacccaagtagttgggtcggctatataattcaggctccagaaactaatgtgtgta

SEQ ID NO: 154400 - DNA, 234 bp, Glycine max
attcagaaaccctaatttctcaaaatcttcagaggacacacagcacaaccacaacctccacagcctctcctacccaccggagccatggccgccgccgactcctccgccgctccatcgcaccagttgtcgcagagggagcggacatccagatgatgctcgcagccgacgttcacctcggcaccaaaaactgcgactttcagatggaacgctacgtcttcaagcgcagaaccgatg

SEQ ID NO: 154401 - DNA, 252 bp, Glycine max
gggactccctggaacaactggggctacttacatagactacttagtcactgatgagtttgtttcaccactagggtatgcaaatatatattcagagaagattgtacatctcccccattgctactttgtaaatgattacaacagaaaaatcaagatgtgttagatcccaactgcccacacaaccgacagacaaatggtctacctgaggataaattcatatttgcatgcttcaatcaactgtacaagatggatcct

SEQ ID NO: 154402 - DNA, 250 bp, Glycine max
cacaaggcagaaagcaagctcatcctagagttttaaaaatggcagcagcctcctccatggctctctcttccccatccttggctggcaaggccgtgaagctgggcccatcagcccccgaagtcgggagggtcagcatgagaagaccgtcaccaagcaggcctcctccggaagcccatggtacggcccagaccgcgtcaagtacttgggcccattctctggcgagcccccgtcctacctcactggcgagttc

SEQ ID NO: 154403 - DNA, 250 bp, Glycine max
agcgctccgctccggagcgatgagtgagagtgagaagcagagggtaacggggaaggtgaagtggttcgatgaccagaagggctctgcactcataaccaccgacgacagcggcgaggaattcttcgtccaccagtactcatccgatccgacggcttccgcagcctcgccctcggcgagtccgtcgagttccttactgactctgctcccgaagccgcaccaaggctgtcgacgtcaccggccctgacgaatc

SEQ ID NO: 154404 - DNA, 249 bp, Glycine max
aagataactagaaacagtgtgatgaaaatgaaggtccttgttttcttcgttgctacaatttcggtagcatggcaatgccatgcgtacgatatgttccctctccgaatgaacactggctatggtgcccgtactccgaggtgaaatgcgcaagctggaggcttgctgtggaagcacacaacatctttggctttgagaccattcctgaagagtgcgttgaagcaacaaaggaatacatccatggcgaacaat

SEQ ID NO: 154405 - DNA, 248 bp, Glycine max
acaaaggttgctgtaggagataagattgcagtagtgctaagtgctaacacctgcagtgaacaatggcctctgcatcagcatctctgctcaagtcttcactagttcttgacaagtctgagtgggtgaagggacaaaccttcgccaaccttctgcatcagttgtgagatgcaaccccaccaccccatcaggcctcaccatcagagctggttcctatgctgatgagctcgttaagaccgcgaaaacagtgg

SEQ ID NO: 154406 - DNA, 253 bp, Glycine max
acctagttcgcttgcagtcacacaagaggccaatactattcatagctagagatgggtgaagaagtgaaggtagttgttccagaatcagtgttgaagaagcgccacaacgacgaggaatgggcgttggccaagaagaagaactcgatgctgccaagaagaagagagccgagagccgcaaactcatctacaacagagctaagcagtacgctaaggagtacgatcaccaggagaaggaattgattcggttgaaacg

SEQ ID NO: 154407 - DNA, 247 bp, Glycine max
gacaaggacaagctcgctgacaagttggagtctgatgaaaaggagaaaattgagactgctgtgaaagaagcactggaatggctggatgacaaccagagtatggagaaagaagattatgaagagaagctgaaggagttgaagccgtttgcaacccaatcattagtgctgtgtatcagagatctggaggagccccaggcggtggtggtgcatcaggcgaagaagacgaggacgattctcacgatgagct

SEQ ID NO: 154408 - DNA, 250 bp, Glycine max
agcaagttattagattttttgctgggccatcgacatgaagccctattccgcagagctgagctgaaaacactcgtaaatttgcatggtaatgaggctggaaaagggggggaactgacacatgatgaaacaacgatcatgccggggcacttgaactcagtgagaagacggcgagtgatgccatgactcctatatctgaaacatttactgctgatattaattcaaagcttgatagggaactgatgaatgagat

SEQ ID NO: 154409 - DNA, 249 bp, Glycine max
agcttgctcgtttggttatggacaaatccccgcattcctacctcgccttctccggcgccgaagaatttgctaggcaacagggcgcagaggttgtggacaacgagtactttatcacacctgacaacgttggcatgtcaagctggcaaaggaagcaaacacaatcctgtttgattaccgaatcccaacatcggggtacgagacgtgcggatccggtgtggagagtcactgcaaatgaatggactcccaata

SEQ ID NO: 154410 - DNA, 251 bp, Glycine max
tacaagctagtttatcgtgaggagaacacgaagttgcttgtactctatgttgctgcagtagttttggtagcatggccacgccatggcgcaggctaccaaaggttccctatccgaatgaaaactggctatggcgacgttcttcggaggtaaaatgcgcaagcttcaggcttgctgtggaagcacacaacatccgagatattaaaaccattcctgaagagcacactgaacaaacaaaggactacattaatggc

SEQ ID NO: 154411 - DNA, 245 bp, Glycine max
gtcggtccttcgaagcattttataagcctccaatttcctgaactacacccaacatacaatctttcaagtacacctccccagcttccatttaagaacgccactcactagaataggccaatggttaagtcttctgattgtgtactactattactgcagacagaaggggttcctgtgggaatcacttttgttgaaaatgcagtggcaaaaggggctgtttgtttggatgggagtcctccagcttacca

SEQ ID NO: 154412 - DNA, 250 bp, Glycine max
tccagaccttaatttttctctcattcgcttcaaatttcaggaaatcaattatggctcaaccctcaacaagaataggccttgctggactggctgttatgggccaatatctagcactcaatattgctgagaaaggtttcccatttctgtttataaccgaaccacttccaaggttgatgagactgtagaacgagcaaaacaagaaggaaatcttccagtttatggctaccatgaccccgaagcttttgttcat

SEQ ID NO: 154413 - DNA, 247 bp, Glycine max
gtcgaggcatcggcacgcacgggattggtatcttacttgacggtctctatggaacagggacaggttccactgtttctgtggaaaatgtaggactccttggcctaacccgagttggaagtcgccgagttgttaaatttctgctggttttatgatattcttctctactttaggaaagtttggagctgtgtttgcatccatacccttcccaatatttgctgcattatactgtgttctctttggccttgtt

SEQ ID NO: 154414 - DNA, 249 bp, Glycine max
aggctcgagaaggggccagattattgagcagtgtaggagatccaaagttgggaagctgttggagtgtgattttggggagagtaagtgtcattcccctagtagtataatgcagatgtttcaagggtcgcttttcttcttcagcctcaaggggattcgtataccagaagatctgcttttgattcaatgctggctgggcgtataccagtgttcttccatccgggttcggcgtacacccagtatacatggcat

SEQ ID NO: 154415 - DNA, 248 bp, Glycine max
tccctcattcttatttttttgctgtcttcactttcactctgtctgtgtctctcagccatcatcatgggagcagtgattctcccagatctcggcaccgagattttgattccggtctgcgccatcattggaataggttcgccctcttccagtgggtcctcgtctccaaggttaagctctccgctgccagagacgcttcccctaacgccgccggcaaaaatggctacaacgattacctcatcgaagaagag

SEQ ID NO: 154416 - DNA, 231 bp, Glycine max
aatgaatccaaaagcagagaatgcatggcaatatttgagaatttcattgagctgtgcttctaggaatgacatgttggaagcttgtgatagtcgtaatttggaccttctccagaaggagtttccactacagtagggcgcgtttgagtgaacagcttaatcaagcgcttagtgaataagtacttatcatataagcactattgtataagatttttttttttaataattgaagag

SEQ ID NO: 154417 - DNA, 250 bp, Glycine max
agcaagtggatcgccgaacagacccacgccaatcgccaacgccgcaccgaagaggtttctcgcgagttcgctcaggagcaagagttctttcgccaaaccgctctcatctccaaaaaagagaaggaaaaggtgggctcatgcaagctgttagtttcatgtacgttcgtactccgggctacaacgccgagagtgccaaagctgctgaaatgaacgacgagaagaaaaaagaggacatgagcaaggggcttag

SEQ ID NO: 154418 - DNA, 249 bp, Glycine max
gcctcgctctgtttctgtatctgtgtttgcggctgaggattccgaacgagcgaccttcttcgtttctcgcaaagtttaagtcatcatgggtaaggaaaagactcacatcaacattgtcgtcattggacatgcgactctgggaagtacaactaccactggtcatttgatctacaagcttggaggtattgacaagcgtgtgattgagaggttcgagaaggactacgctgagatgaacaagaggtcattcaa

SEQ ID NO: 154419 - DNA, 279 bp, Glycine max
ctaattctccaagaataagagaatccaaaagtctctcaaaaaataaccatgatgatgcatgtcctttgcttctcagtgttcctagcagcagcaatgcaaggaacactggcggttgaatacagtgtcaccaacaacgccctctcaacccctggtggtgttcgtttccgtgatgcaataggggacgaatacgccaaacaaacacttgactcagccacccaattcatatggggggccttccagcaaaacgctcctgctgatagaaaagatatacaaaaaata

SEQ ID NO: 154420 - DNA, 281 bp, Glycine max
attttctctcttctctgcttcttcttgttcaaatcttaggagctgaggagaatcaatcgagagaaatatgtctggtatcgctcgtggacgccttgctgaggaacgaaagtcatggcgcaaaaaccatccacacggtttcgtagagaagcccgagactctacctgatggcaccgtaaatttgatggtctggcattgcactattcctggcaagaccgggactgattgggagggtggatatttcccactgacaatgcacttcagtgaagattaccctagcaagc

SEQ ID NO: 154421 - DNA, 275 bp, Glycine max
taaaatcatgtgattatagaacattggctattggtgatggtgggaatgatgtaaggatgatacaacaagctgatattggtgtgggcatcagcggcagggaaggattgcaggcagcaagagcagctgattatagtattggaaagtttagattcctgaagagattaattctggtccatggccgctactcttacaaccgtacagcatttctttctcaatattcattctataagtccctactgatatgcttcatccaaatccttttttcatttatttca

SEQ ID NO: 154422 - DNA, 272 bp, Glycine max
cctttgttcactcttcttctcttgcggctagggttttagcgcagttcttctagatttaaggaagatgggtaaggaaaaggttcacatcagtattgtggtcattggccatgtcgactctgggaaatccactaccactggtcacgtgatttacaagcttggaggcattgacaagcgtgttattgagaggtttgagaaggaagctgctgagatgaacaagaggtctttcaagtatgcctgggtgctggacaaacttaaggctgagcgtgaaagag

SEQ ID NO: 154423 - DNA, 278 bp, Glycine max
gaaagggcacttcaacagagcacccttaaggcatggagtggaaaagaggagaatgtgaagaaggctcaggaagcccttttggtaagagccaaggccaactcagaggcaactctgggaacctacaagggtaactcaaagcttgctgatggtgcctcagagagcctccatgttgaggactacaagtactgatcaatctaagtgcgggtaggaatcggtattttatgggtacaaccgaattttcttgttaatgagtattgtgcttcgatcttcccagaata

SEQ ID NO: 154424 - DNA, 280 bp, Glycine max
gtgacataactggagctataaagaacagcaatggtcttgacatcccaagcctacttgagcattccaaagtgcacaggggagtaaaaggattcaatggtagtgatccaatagaccctaactcaatattggttgaagattgtgatgttctagtcccagcagctcttgggggtgtcatcaatagggaaaatgcaaatgaaatcaaggccaaatttattgtggaagcagctaatcacccaactgacccagaagctgatgagattttgaagaagaaaggggttgt

SEQ ID NO: 154425 - DNA, 272 bp, Glycine max
attaattgcaagaatggcacttcgttgcttggtgatgtccctttctgttctcttcactcttggtcttgcgagagaaagccatgccagagacgaagatttttggcatgctgtttggccaaacactcccattccaagttcattgcgagatcttctaaagcctggccctgcaagtgttgaaatcgatgatcaccctatgcaaattgaagaaacacagtacccgaaaaccttcttctataaagaagaccttcatccaggcaaaacaatgaaagtac

SEQ ID NO: 154426 - DNA, 276 bp, Glycine max
ccctcaccaccaacgccaaacaagccctaaatctctcttctctttcttcttcttcctttaaccatgagagagatcttgcacgttcagggaggccaatgcggtaaccaaatcggttccaagttctgggaggtgatctgcgacgagcacggcatcgatcccaccggaaagtacaacgaggaaggcaacagcagcatccaactcgaaaggatcaatgtgtattacaacgaggcctctggcggaaggtacgttccccgtgccgtgcttatggatctcgaa

SEQ ID NO: 154427 - DNA, 275 bp, Glycine max
gtcaaacagtcggtaactctttcttttcttttctttctttctccgatcgcatcgctcgcaaccacaatcatgccttcccgaagaagaactctcttgaaggtcatcattctctgtgacagcggggtggggaagacgtctttgatgaaccagtatgtgaataagaagtttagtaatcagtacaaggcaaccattggagcggattttttaaccaaagaagtgcaatttgaagataggcttttcaccttacagatttgggatacagctggccaagaaag

SEQ ID NO: 154428 - DNA, 274 bp, Glycine max
catgctcatgttcaaatctggctcttctattccatctagaggttctgttgactttgcttcagcagtcagaaaattggcttctcaggattctggtatatggaagtatgataaaaatggttctggtgatgcttccactggctctagtaggggtttaaatgctctggctagtgcctacaatggtggacaggggagagtcaacattggtgatagattacagagtcgtggttctgctcgggcagctcctgtttggcttgaaactggtgacgcattgcaa

SEQ ID NO: 154429 - DNA, 178 bp, Glycine max
gactgaggttgggtttggaaggcaagggcttgtgttgtcacaatccaagagagaagtaatggcgaacatagacatcgaagggatcttgaagcagcagcagccttatgatgggcgcgttccgaagacgaagatagtgtgtactttgggccctgcttctcgatccgtagaaatgaccgag

SEQ ID NO: 154430 - DNA, 269 bp, Glycine max
ccaaaacactgccttgaagacatggggaggccgcccagagaacgtgaaggcagcacaagatgcactcgcattccgtgccaagtccaactcactcgctcagcttgggaagtacactggtgagggtgaatccgaggaagccaagaaggagttgttcgtcaaaagctactcctactaagatgtttgcagtgaatatgatacttgttaggcagcaacaccagcagttacagtaggtgttgacggacgatgaagtggaagactaatttgtctaa

SEQ ID NO: 154431 - DNA, 257 bp, Glycine max
gtcctctgttgctgtcatgttttcaattgctgtttatggtgtccatagggtgcagtagtgtctgggctcatcttggtgctgccctcttgttgggcttgctttggatgcaaagcacttacgtgggtcatgactctggccactatgaggttatgtctagccctggctacaacaaattggcacaaatcctttgtggcaattgcatgactgggataagcattgcatggtggaagtggactcacaatgctcaccacatctca

SEQ ID NO: 154432 - DNA, 268 bp, Glycine max
ctcgagccgttctcttaggtttccgcaagatctgcaaactttggcttccaggaaattcgagaaggctcactccggcgacggcgccagtccaggcaaaatcttcattggagggttagccaaagacaccaccctagagacgttcgtgaagtactttgagaagtacggggagataacggactccgttataatgaaagaccgtcacacgggtcggccaaggggattcggcttcatcacctacgccgatccctccgtcgttgaccaagtcatt

SEQ ID NO: 154433 - DNA, 271 bp, Glycine max
ctcacgtcgcctcattccctggggtctgaatgaggggatttatttgaatgaagttgatcgagttctacgtcctggtgggtattggattctatcagggccacccataaactgggagaatcactggaatggttggaagaggactcgtgagagtctcaaagaggaacaggatggaattgagaaagtggcaaaaagcttatgctggaaaaagttggtgcaaaagggtgaccttgcaatatggcagaagcccaccaatcatattcactgcaaaatc

SEQ ID NO: 154434 - DNA, 265 bp, Glycine max
gttatgcaaatgatgtccaagaccatattgactatggaacttctggaaaagttgctggatttatagctgaaacaatgcagggagttggaggagctgttgaactggcaccagggtatttgaaacttgtttatgacattatacataaggctggtggtgtctgcattgccgatgaagttcaaactgggtttggtcgaacaggaagccattattggggatttgagacacagggtgtcattcctgatatagttaccatggcaaagggtat

SEQ ID NO: 154435 - DNA, 266 bp, Glycine max
gagaaggctctctttagggcactaaagactaagcatgctactcccaagtatggtcttatataccatgcttccttgattggtcaggcagctccaaagttcaaggggaaaatttcccggtcacttgcagcaaagacggcattggctattaggtgtgatgctcttggagatagccaagataacaccatgggattggagaacagagccaagcttgaagcacgattgaggaaccttgaaggcaaagagttaggtcgttttgctggttctgc

SEQ ID NO: 154436 - DNA, 267 bp, Glycine max
gtgagtttggaacttgaaagaaactagaatggccactttagacgaacgcctttctgcgaaaaggtggcttcctctcgaagctaaccctgacgtcatgaaccagttcctttggggtcttggccttccagtctgtgaggcagagtgcggtgatgtgtttggcttagatgaagagcttctggaaatggttcccaagccagttctcgccgtgctttttctttatccaattaccgcgaagtctgaagaagaaaggttgcaacaggaaaacgt

SEQ ID NO: 154437 - DNA, 264 bp, Glycine max
aatttttctctcaaccggcccaatttagcataagcccagcatggccaccgcaacagcagcagccacctcgtccttcatggggacgcgcctcctggaggcccactccggggcggggcgggtgcaggcccggttcgggtttggcaagaagaaagccgccgccccgaagaaagtttccagggggtcgggctctagctccgataggcccctgtggtatccgggcgccaaggcgcccgagtacctggatgggagccttgtcggagacta

SEQ ID NO: 154438 - DNA, 265 bp, Glycine max
caaagagcgactacagctacttctggacctgcaactggttttccacgcaacccacaacagaaaactgcaatgtctggcctgctcaatgatccaagtatcaaggacttggctgaacagatagcaaaagatccatcattcaaccagatggctgagcagcttcagaaaacttttcaaggagctccacaggatgctatgccgagctttgataatcaacaatatttttcaaccatgcaacaggttacgcagaatcctaattttatgacca

SEQ ID NO: 154439 - DNA, 264 bp, Glycine max
gtctcaaacaactgccagacattccttcaatctcaaagcaagaatgtcattatttcatttttggcagctttatcaataatcattcatgtgtccctctcttggctattcacaatgcaattcaagtatgggattcctggggcaatgatttcaacaattttggcatactggattccgaatattggtcaactaatatttattacatgtggttggtgccctgaaacatggaaaggtttctctgttttagcattcaaagatctttggcct

SEQ ID NO: 154440 - DNA, 262 bp, Glycine max
ggaaaatgaagaacaatgccattgtttgcaacattggtcactttgacaatgagatcgacatgcttgggctggagaactaccccggcgtgaagcgcatcaccatcaagccccaaactgacagatgggtcttccctgagaccaacaccggtatcattgtcttggctgagggtcgattgatgaacttgggatgcgccactggacaccccagttttgtgatgtcctgctccttcaccaaccaggtcattgctcagcttgagttgtg

SEQ ID NO: 154441 - DNA, 261 bp, Glycine max
gggttttagcgcagttcttctagatttaaggaagatgggtaaggaaaaggttcacatcagtattgtggttattggccatgttgactctgggaagtccactaccactggccacgtgatctacaagcttggaggcattgacaagcgtgttattgagagatttgagaaggaagctgctgagatgaacaagaggtctttcaagtatgcctgggtgcttgataagcttaaggctgagcgtgaaagaggaatcacaattgatattgc

SEQ ID NO: 154442 - DNA, 260 bp, Glycine max
aacaacacaaggccatcatcatggcagctgcttctcctatggcaagccaactcaagtccaccttcactaaaactcttgtagctcccaagggcctctctgcctcttcaccactccacctcctgccttctaagaggcaatttagctccactgttagggccatccaatcagaaaagccaacctatcaagtgattcaaccaatcaacggtgatcccttcattggaagccttgaaaccccagttacatccagccccttgattgca

SEQ ID NO: 154443 - DNA, 263 bp, Glycine max
ctccaacagttcaaattcgaggacagccagtgaaccagaaggctggttgctgctcgacttagagagagacgaagtatttggggtcttagaagttcatgtgtctcagtggcatctaaaactagcttttcacattgctttcatatcaagattgttcgtcatgatttgttcctcttatcgttaagccgttgttaaaacttccattattttctatgtatttgattttaaaagaaaaaacatttgtacaaaattaggaatattggtga

SEQ ID NO: 154444 - DNA, 248 bp, Glycine max
atttgagggttaatataatagaggcacaagacttgcagccaagtgataagggtagataccctgaagtttttgtgaaggctactctgggaaatcagaccttgaggactagaatctctcagagcaggaccatcaatccaatgtggaacgaggatttgatgtttgtggctgctgaaccatttgaaggagctcctgatctgaatgtggaagacagatgtgcaactaaccaagaggagtcgctgggggaggtg

SEQ ID NO: 154445 - DNA, 258 bp, Glycine max
gattgagtcatgggcaagcaagggccttgctatcactgtggagttacaagcacacactttggcgtaatgggccacctgagaagccagtactatgcaatgcatgtggatctcgatggaggacaaagggaacacttgcaaattatacccctttgcacgcccgggcagaaaatattgattatgaggatcaaaaggtttccagggtaaagagcatatcattaaataagaacacagaagtgaaattggtcaaacgaaagcaaa

SEQ ID NO: 154446 - DNA, 262 bp, Glycine max
gagaggaagagggagtgagagagagtgttcttcgtttgctaccttctcccagaaatggttacgttcaggtttcaccagtaccaggtggtcgggagggctctcccaacggaagcagatcagcatccgaagatctaccgaatgaagctctgggccaccaacgaggttcgcgccaagtctaagttctggtattttttgaggaagctgaagaaggtgaagaagagcaatggtcaagttcttgctatcaacgagatttttgagaaga

SEQ ID NO: 154447 - DNA, 259 bp, Glycine max
ctcgcaagcaaaaagaaagaatcccaggcgaggagaaagatggaggggaaggagcaggatgtgtcgttgggagcgaacaagttccccgagagacagccgattgggacggcggcgcagagccaagacgacggcaaggactaccaggagccggcgccggcgccgctggttgacccgacggagtttacgtcatggtcgttttacagagcagggatagcagagtttgtggccacttttctgtttctctacatcaccgtcttaa

SEQ ID NO: 154448 - DNA, 251 bp, Glycine max
gcacaatatcttagaaagcgaatactgattccagataagaaactaggtactcttactagtgatattgctgggcagttgaaagatctaagacaaggccgtgtagagtttaatatggaaagtaaatcaattttgcatgtgggacttggaaaggtaagctacaaagaagaggctttacgggagaatattagtgcatttatgaatgctgtattgcttgtaaagcctgctggcttaaaaaagacttccaaatatgc

SEQ ID NO: 154449 - DNA, 253 bp, Glycine max
  unsure (1)..(253): unsure at all n locations
gtgttgtgtgagatataagagcgtagaagatggtgagactgagataattgancatcaatgagtggaagctgatcgatgngagtcgccacacggaggcatgccacgtgtgctgccagaagctgctcgtacagcggatgagtcgctatctccgccttcagcttccacacaacatacgantccncttctggcatcacacgtggcatgcntngcgtntgggantnccnntngtaatttannccgnanngtgcncatt

SEQ ID NO: 154450 - DNA, 253 bp, Glycine max
gtgagttacagacacaacacaacgcacttcttctcactgtccccatggcatcgagcacgatccgcaaggcgattggcgtggtcaaggaccaaaccagcatcagcattgccaaagtcgccggcaatttggcccccgacctcgaggtcttaatcgtcaaagccaccagccacgaacaagtccccgccgatgaaaaatacgtccgagaaatcctgacattgacgtcgctttccagaagctacatcaacgcttctct

SEQ ID NO: 154451 - DNA, 253 bp, Glycine max
tttcctttcattttccctcactttctcgctccccaaacgcccctctctctcctccaatggccgaccagctcaccgacgaccagatcgccgagttcaaggaggccttcagcctcttcgacaaggacggcgatggttgcattactaccaaggaacttgggactgttatgaggtcacttggtcaaaacccaactgaggcagaactgcaggatatgataaacgaggttgatgctgatggcaacggaaccatcgattt

SEQ ID NO: 154452 - DNA, 257 bp, Glycine max
ggcaagaatatcaaattggtctcttgtcttcctcctcatctctacactactccacatagagcccagcctctcaagcccaagcccaagcccaagcccaagcccgttcataaaatcctcctgcagcagcacccagtacccagccctctgcgtctcatccctctccgtctacgcctccagcatccaacaggaccctcaccaactggttcagacagcactctccctctccctgaaccgcacccaagccaccaaaaccttcg

SEQ ID NO: 154453 - DNA, 257 bp, Glycine max
ctcaactcaagtaagggttttctctttgagaaaatcgtatcttacaccttttggtgaccactttgagtgagagaagagaaattaagagagatactcaaattagattcaagagagatggccatcaaccatgaaacttgggctttcattttcggtcttctaggcaacgtgatctcctttatggtgttcctcgctccattaccaactttttaccaaatctacaagaaaaaatctacggatgggtttcaatcactacctta

SEQ ID NO: 154454 - DNA, 252 bp, Glycine max
agaagatggagatgtatcagatctggagcaggagaatagcgttgggagcgttcgcgtttgttctgcttttcctatcggcctcagcagacgacgtcgttgtgctctctgaagataacttcgagaaggaagttggtcaggacagaggagctctcgttgagttctatgctccttggtgtggacactgcaaaaagcttgctccagaatatgaaaagcttggtagcagcttcaagaaagccaaatctgttttaatcg

SEQ ID NO: 154455 - DNA, 251 bp, Glycine max
gtagtgaagaaaatgaaagtccttgttttctttgttgctatagttctagcagcatggcattgccatggctcagaccatgaccatgaccatggccacacctaccaaattttccctctgagaatgaaaactggccatggtggccactacattccggaggtatcatgccaaagttggaggcttggtgtggaagcacacaacgtcattgactggaaaaccgttcctcaagattgcgagggatatattgggaacta

SEQ ID NO: 154456 - DNA, 251 bp, Glycine max
ctcgagccgcgtcgacgacattggcgacgtcaccatcaccaacgacggcgccacgattctcaagatgctggaagtggagcatcctgctgccaaggttttggttgaactcgccgagcttcaggatcgagaagtcggagacggcactacttctgtcgtcattgtagctgctgagcttctcaaaagggcaaatgaccttgtcaggaacaagattcatcctacctcgattatcagtggatctagacttgctatgc

SEQ ID NO: 154457 - DNA, 253 bp, Glycine max
ctttcaatctgttgatagatccagtcatcattcttcaaccacagtttcatctatggccaagtctctgctccctacgaagaggaggctccatcttgatccttccaacaagctctactttccatatgaacctggtaagcaagttaggagtgcaatcgcaattaaaaacacttgcaagtctcatgtagctttcaagtttcaaacaactgcacccaagagttgttatatgcgccctccagctggtattcttgcccct

SEQ ID NO: 154458 - DNA, 255 bp, Glycine max
aagagcaagaattctcctaagccaattctctattggttttcttctgattggttcaccattcaacgagggtccttggaaaatgtcaccttcacatctgatccagaaacttttgaacttggatttgattaccatgtggccaattcttcatctggtggcaatagaatccttggcaggccagtgaacaatagcaccataacatatctcaggcttggaattgatggcaacattaggttctacacttacttccttgatgtg

SEQ ID NO: 154459 - DNA, 255 bp, Glycine max
ggattggtgaggtaaacttgaattgaagtgaagaaggagatggctgcaacctcttccttgtgctcatcgaccctccaatcccagatcaatggattcttccttcacaaaacctctctttcccatactccttccctcactttctccaggaggaaaatttcaaccacagtgaaggctacatctcgagtcgacaagttttcaaaaagcgatatcattgtctctccgtccattctttctgcaaacttttcaaaattggga

SEQ ID NO: 154460 - DNA, 257 bp, Glycine max
gatcagagctgtaattgtacgtacttgtaaagaactcaaacgtagcaacggtataataattcagtatgatgataatgctgcagttgtcattgatcaagaaggaaatccaaaaggaactcgaatcttttgtgcaatcgcccgggaattgagacagttaaatttcactaaaatagtttcattagcacccgaggtattataagacgaaactgtgctatggatacattatttttttgtgaaatagattaattaatctattt

SEQ ID NO: 154461 - DNA, 247 bp, Glycine max
gatgattcgacacgccatgttgtgcgtgctctgttacggaattgtagttatgaagtcactgctgtttccaatggtcttcaagcgtggaaagtcctggaagatccagaaaatggcattgatcttgtcctaacagaggtagctatgcctattttgtctggaataggtcttttgtgcaagatcatgagccacaaaactctgaagaatattcctgtgattatgatgtcatctcatgattctatgggtatag

SEQ ID NO: 154462 - DNA, 252 bp, Glycine max
gtttctcttcctccctggaagaaaaagaagagtcaccgctacgacgccgttcgtgcttttttgaggtgccacagtcatgtttgggcgtggtggaccaaggaggagtgacaactccaaatattatgatattctcggggtttccaaaaatgccagtgaagatgaaatcaagaaggcctatagaaaggctgctatgaagaaccatccagataagggaggagatcctgaaaagttcaaggagttaggtcaagcata

SEQ ID NO: 154463 - DNA, 250 bp, Glycine max
gcttggaataattcctggatttggaggaacacagcgacttcctcgtcttgttggtttgacaaagggacttgagatgatactggcttcaaaaccagttaaagggaaggaagcttttagtttggggcttgttgatggtttggtgtcacctaatgatttggtgaacactgcacgccaatgggcactggatatgttgggccaccgacgaccatggattgctagtctttataagaccgaaaaattagaacccctt

SEQ ID NO: 154464 - DNA, 255 bp, Glycine max
cccaaagtgcttctctcctctgtctttttctctctcttgctatccttttggctagtggcactgctgcaagtgcaactccaagaagcgcagtgccaagccaccatgtttcaacattcaacagaagcctttttccttccacttttctctttggaattggttcttctgcttaccaggcagaaggagcagcaagtgtagatgggagaggaccaagcatatgggacacctacactagacagcatactgaaaagatttggg

SEQ ID NO: 154465 - DNA, 256 bp, Glycine max
tcaacttccctaagcactagcaccacacaatggtcattgcagcaacccctcttctcttctttcttcttaatttatgcctaagaggcacttatgctgactatggaggtggatggcaaggtggtcatgctacattttatggtgggggtgatgcatctggcacaatgggaggggcttgtggttatggaaatttgtacagccaaggctatggaaccaacactgcagcactcagcactgctctattcaacaatggcatgag

SEQ ID NO: 154466 - DNA, 201 bp, Glycine max
ttccaatcgttaacagtgtcagccaaatctgttacaatggcaagggcattaaaacgcaagcctcaatgttactgtagccatagatggtagtggagatttcaaaagcatcaatgaggcattgaagcaagtgccggagaaaaaccgaaagccatttgtgatctacatcaaggaaggcgtttaccaagagtatgttgaagttac

SEQ ID NO: 154467 - DNA, 249 bp, Glycine max
accggagcaaaaaaacttgttacgatggtttcttccgacaaggatccacgagaggaagtccttcaagcatggtacatggatgatagtgatgaagatcaaagactcccccaccacaaagaacccaaggagtttgtctcgttggaccaacttgctgaacttggagtccttagctggaaattagatgctgataaccatgaaaatgatccagagctgaaaaagattcgtgaagagcgtggctacacctacatg

SEQ ID NO: 154468 - DNA, 251 bp, Glycine max
cgaaactcttgattaccataaccatgtcaatggcaacaacatcccctcacaccgccctcttccaaaaccgcaccaaccctttcactctctcctccttcaaacccacatccatcaaatgcgccacccaactccatacccaagccccgcccctcacccactcccaagatcgcgtcttcaacttcgccgccggtcccgccaccctcccggaaaacgtcctcctccgtgcccaatccgagctctacaactggcgc

SEQ ID NO: 154469 - DNA, 249 bp, Glycine max
gagaggtgttggtgccctaatcgtgagaagaaaggaaagggaaaagaggaaaatggtgtgcataaggaaggcgacggtgaaggaccttctggcgatgcaggcgtgcaacctgttctgcctccctgagaactaccagatgaagtactacctctatcacatcctctcctggccccagctcctctacgtcgccgaagactacaacggccgcatcgtcggctacgtcctcgccaagatggaggaagaaaccac

SEQ ID NO: 154470 - DNA, 250 bp, Glycine max
agaggatgtcccctgtggtaatacagtggctatggttggtcttgaccagttcatcacaaagaatgcaacattgacaaatgagaaggaagtcgatgcccaccctatccgagctatgaagttttctgtctcacctgttgttcgtgttgctgttcaatgtaaggttgcatcagatcttcccaagcttgttgaaggtcttaagcggttggctaagtcagatcctatggttgtttgtaccattgaggagtctggt

SEQ ID NO: 154471 - DNA, 250 bp, Glycine max
ctattgtgttggtatgtagctggggctcttggagcatacccagatgaatggctgccaaaaaatggaaatcactttgtttttgctcttatgttttcaatatctgttgtggtgattgcatgtccatgtgcacttggtttggcaacaccaactgctgtcatggtggcaacaggggttggggccaacaatggtgtgttaattaaaggaggagactccttggaaagggctcagatggtgaagtacgtcatatttg

SEQ ID NO: 154472 - DNA, 252 bp, Glycine max
gtcaaagcaaccatcgagaggtacaaaaaagcaagttcagattcgtctggcgctggatctgcttctgaggctaatgctcagttttaccagcaagaagcagataaacttcgtcaacaaattagtaacctgcagaataacaacaggcaaatgatgggtgattctttgggctctctgactgccaaggatctcaaaaatctggagactaaattagaaaaaggaattagtaggattcgttcaaaaaagaacgagctg

SEQ ID NO: 154473 - DNA, 256 bp, Glycine max
caacaacatagtgaacaacaaccttggtaataataaccatggagagcaccgaagactcatccacgagttcacagcaacaaccgaacctgccacccgggtttcggttccaccccacagacgagatactcgtggttcattacctcaagaagaaagtagattctgttcctctccctgtttcaatcatcgctgatgttgatctctacaagtttgatccatgggaattaccagccaaagcatcgtttggggcggaagagtg

SEQ ID NO: 154474 - DNA, 255 bp, Glycine max
cttacccccagatgtgctcaaagagagacttcctggcatctctgaaactgctgctatttttgctggtgtggatgttacaaaggaacccattcctgttttgccaactgtacattataacatgggcggtattcccacaaaccattatggagaggtggttaccattaaaggtgacaatccagatgcagtggttcctggattgatggctgccggggaaacggcctgtgcatcagtccatggtgccaataggcttggtgc

SEQ ID NO: 154475 - DNA, 247 bp, Glycine max
caacaatggcaccagctgcagccaagactctgacttacctggcccagcagaagaccctagaatcgagcttcgttcgggacgaggaggagcgtcccaaggttgcctacaacgaattcagcgacgagatcccagtgatttctcttgccggaatcgacgaggtggatggacgcagaagagagatttgtgagaagatcgtggaggcttgcgagaattggggtatattccaggtcgttgatcacggtgtgga

SEQ ID NO: 154476 - DNA, 248 bp, Glycine max
caagtaccctgagtctgacatttactggaaaaaatttgaagagaaatatcatttctcatgccaatttactgctgatctttttgcaatgaaccacacagactttatcatcaccagcaccttccaagagattgctggaagcaaggacactgttggacagtatgagagtcacactgccttcacccttccaggactttaccgtgttgttcacggtattgatccatttgatccaaagttcaacattgtctctc

SEQ ID NO: 154477 - DNA, 252 bp, Glycine max
ttgtaccatcgactttgtctttggagaacagccactgcatcaccaaagacaaagtcgatggtacctgatactgatgcaatcacggtagaattgacgcatggtgtgtgcgtagagtgtgtcctggtagccatccattcgacatttgtaaaagatggacctgtcagcttgaaccctcaaggccactgcttgatgtttttcagcaccagctgagttctccaaaattgcactttcgtggtgcgaaaaccattggaa

SEQ ID NO: 154478 - DNA, 253 bp, Glycine max
ataaaaattaaggaagcagaggagaaaactgagggtgggattttgcttccatcaactgctcaaacgaagcctcaagggggtgaggtggttgctgttggagaaggaaagacaattgggaagaacaatgtagagattagtgtgaagactggtgcacaagttgtgtattcgaagtatgcaggtactgaggtggatttcgatggtacaaagcatcttattgtgaaggatgatgacattgttggtatccttgaaactg

SEQ ID NO: 154479 - DNA, 251 bp, Glycine max
agctattgaatttcacttcacttcacttgcatgccaaatgaaaacaacctcttcccagaatcttgtcggtatttaactccctcgatttcacaacaccaataacaatgagagtttcaacagagacagagccgtagactaaaaagataaaacgcattcgccgcggcggggactcgagcaagcaccctttgtaccgcggcgtgcggatgcggaactgggggaattgggtgtcggaaatccgcgagccgaggaag

SEQ ID NO: 154480 - DNA, 250 bp, Glycine max
attttctggtgaatgaattcaaaagaactgagagtattgaccttgcaaaggacaggcttgcactgcagaggcttcgtgaagctgctgagaaagctaagatcgagctgtcttcaacatctcaaactgagatcaacctgcctttcatcactgctgatgcatctggtgcaaagcatctgaacataacattgacaagatcgaagtttgaggctttggtgaatcacttgattgataggaccaaggcaccatgtat

SEQ ID NO: 154481 - DNA, 249 bp, Glycine max
cagcagcctcaggaggagaataaggatgtctcacaggaagttcgagcacccaaggcacgggtcactgggatttctccccaggaagcgtgctgctcgtcacaggggaaaagtgaaggcattccccaaggatgacccatccaaggcacccaagctcactgcattcttgggttacaaggctggtatgactcacattgttagagaggtcgagaagccaggatcaaagcttcacaagaaggaaacatgtgagcc

SEQ ID NO: 154482 - DNA, 250 bp, Glycine max
cttcatattcatcaaactcatcaaaatgaatctgtaccactcctccaccaccaccaccaccaccaccatcttcaccgtcatattcctcctccttgcaatattattcactctcacaccccacaaggccaacggtgccacgtgtcaccctgaggaagaagcgggcctgttgggcttcaaatccggtatccgatccgacccgtccggcctgctcagtaactggatatcgggtacggactgctgcacatggacc

SEQ ID NO: 154483 - DNA, 251 bp, Glycine max
ccaagagcgagatatctatttagatctctgaaaaacagagtttcatttcaattcagtcttattattagggtttgccgattgagagagaaagagaaatgggagaacgaaaaggaatcccaatggctttggggctcttggcgatgatcctcttcttcattgcttcctcttcctctcacctcgttcgcgcttccgatgacgccgacgacgcgatcttctacgagtcgttcgacgaggattttgatggacggtgg

SEQ ID NO: 154484 - DNA, 253 bp, Glycine max
gttttctctttgagaaaatcgtatcttacaccttttggtgaccactttgagtgagagaagagaaattaagagagatactcacattagattcaagagagatggccatcaaccatgaaacttgggctttcattttcggtcttctaggcaacgtgatctcctttatggtgttcctcgctccattaccaactttttaccaaatctacaagaaaaaatctacggatgggttttaatcactaccttatattgttgcact

SEQ ID NO: 154485 - DNA, 273 bp, Glycine max
ctcgaaccctctctttccggcaactaggttaaagttcatcaatggcaggtcgtggcaaaaccctaggatccagcgccgccaagaaggccacctcaaggagcagcaaagccggcctccaattccccgtcggccgtatcgcccgtttcctcaaggccggaaaatacgccgagcgcgtcggcgccggtgctcccgtttacctcgccgctgtcctcgaatatctcgcagccgaggttttggagttggctggaaacgctgcgagagacaataagaaga

SEQ ID NO: 154486 - DNA, 258 bp, Glycine max
ctcagaaccttctgaggttaaagcaaaaaacaaagagagagagagagagaaaatgatgaagccatcgatgctcagatctctccactccgccgccacccgcggcgcctctcatctcttccgccgtgggtacgcctccgagccggtgccggagcgcaaggtagccgttctcggcgccgccggcgggatcgggcagcctctctcccttctcatgaagctcaatcccctcgtttcgagcctctccctttacgatatcgccgg

SEQ ID NO: 154487 - DNA, 261 bp, Glycine max
ataatcttcatattcatcaaactcatcaaaatgaatctgtaccactcctccaccaccaccaccaccaccaccatcttcaccgtcatattcctcctccttgcaatattattcactctcacaccccacaaggccaacggtgccacgtgtcaccctgaggaagaagcgggcctgttgggcttcaaatccggtatccgatccgacccgtccggcctgctcagtaactggatatcgggtacggactgctgcacatggaccggagta

SEQ ID NO: 154488 - DNA, 248 bp, Glycine max
ctataatgcattaatgctctgttgtcttctcttttcagatttggaatcttggctctcctgatcctaattttactttggatgctcatcagcaaggagtgaattgtgtcgattactttacaggtggtgactaaccatatctaatcactggttctgatgatcacactgctaaggtatgggattatcagaccagaagttgtgtcaagaccctagaaggtcacacacgcaatgtatctgctgtatgctggcat

SEQ ID NO: 154489 - DNA, 262 bp, Glycine max
tgtgatttcagtgagtgatcggtgttcacttgatctcatcataatcgtcagcgtcaattgaagaagatgccgatcagaaacatcgccgtcggaaggcctgaagaggcgactcaccccgacacgttgaaggcggctttggctgagttcatctcaaccttcatcttcgtgttcgccggctcaggctccggcatcgcctacaacaagctcaccgacaacggcgctgccacccctgccggcctcatctccgcctccatcgcccatg

SEQ ID NO: 154490 - DNA, 264 bp, Glycine max
gcacaatatcttagaaagcgaagactgatgccagataagaaactaggtactcttactagtgatattgctgggcagttgaaagagctaagacaaggccgtgtagagtttaaaatggaaagtaaatcaattttgcatgtgggacttggaaaggtaagctacaaagaagaggctttacgggagaatattagtgcatttatgaatgctgtattgcttgcaaagcctgctggcttaaaaaagactccaaatatgctgggtatgtgttgt

SEQ ID NO: 154491 - DNA, 134 bp, Glycine max
gagggaatccccccagaccagcaacgtctcatcttcgccggaaagcaacttgaggacgggcgcaccctcgccgactacaacatccagaaggaatcaacccttcacctcgtcctccgtctccgtggtggcatgca

SEQ ID NO: 154492 - DNA, 254 bp, Glycine max
cacaaatcttagccgccattgatttttcctcttccatttctcttactttctcagcctttttcgattacccatttggttatttcgccctaatggctcttgctccatccaaagtttccaccttttctggtttttctcccaaacccagtgttgggggtgctcagaaaaacccaacttgctctgtttctctgagctttttgaatgagaaacttggaagcagaaaccttagggtttgtgcctcaacggtgcctctcact

SEQ ID NO: 154493 - DNA, 257 bp, Glycine max
cactcagattgttgcaaatttacagaggcagcaggttcagtccaagctcatcgcctctgattacttggatactaatttggatcttatggatgtcttggtatctggatatgaaaacacagacatggctttacactacggtgcaatgttgagggagtgcataagacaccagattgttgcaaaatatgttctggactcacctcatatgaagaagttttttgactacattcagcttccaaattttgacatagctgcagatg

SEQ ID NO: 154494 - DNA, 251 bp, Glycine max
cacaaaccctaacaccaaaaccagaagcgaaatcgcaatcgcaatccagcgaatatgaaggtcgtcgctgcatacttgctcgcagtgttgggagggaatccttccccttctgccgatgacatcaaacacatcctcggcgcagttggagctgaggctgagaatgagttgattgagttgctcttgactgaagtcaagggaaaagacttcaatgagctaattgctagtggaagtgaaaagatgtctgcagtgtc

SEQ ID NO: 154495 - DNA, 248 bp, Glycine max
ggatatgtatcttatccttgtcaacctaaatggttatactaagggtgccagaaatgagatatttgctatgcaacctgcaccaattcaagtttcatatatgggattccctggaacaactggggctacttacatagactacttagtcactgatgagtttgtttcaccactagggtatgcaaatatatattcagagaagattgtacatctcccccattgctactttgtaaatgattataaacagaaaaatc

SEQ ID NO: 154496 - DNA, 249 bp, Glycine max
aagagagcaaggcaggaagtcagtgtttataaaacgacagtaggagcctggtctggtcggtgtggcactcaaacattgtttgttgtaggaagaggaatcttgagaaatggcaggggacagcaagagcaagattctgttcatcggagggactggttacatcggaaaattcatcgtggaagccagcgccaaagctggccacccaactttccttttggtgagggagtccatctctccaaccccgcaaaatca

SEQ ID NO: 154497 - DNA, 251 bp, Glycine max
gcctttttgggcacccagatttccaccattctgagtaacttcacacactatataacagaaaatgagggggggcttatggcaactcgggcaatcaatcactcgccgtcttgcccagggtgataagaaggctgttgctcgtaggtattttgcctcagatgctgagctgaaaaagacagtcgtttatgacttccatgttgctaatggagggaagatggtgccatttgctggatggagcatgccaattcaatata

SEQ ID NO: 154498 - DNA, 248 bp, Glycine max
cgagaacagaaatctcgtgtggaacaaaagggtaaaagctcgtttgattctgatttccagtacgaatacgaaccgtgaaagcgtggcctatcgatcctttagtccttcggaatttgaagctagaggtgtcagaaaagttaccacagggataactggcttgtggcagccaagcgttcatagcgacgttgctttttgatccttcgatgtcggctcttcctatcattgtgaagcagaattcaccaagtgtt

SEQ ID NO: 154499 - DNA, 249 bp, Glycine max
cttttccctcgttgaaatgaaaatgggttcttctttgtggactttgtgtctaattttggcttcactagcctcttctgcattctgtgcctttccacggaggccagtggatgttccattcggcagaaactacgttcccacttgggcttttgatcacatcaaatacttcaatggaggttctgagattcaacttcatcttgacaagtacactggtactggcttccagtccaaagggtcatacttgtttggtca

SEQ ID NO: 154500 - DNA, 245 bp, Glycine max
tgttggatgagtttttgaaacctaggattgccgatttcgggcttgctaagcttgtccaagccaacgttggcaaggattcctccactcgtgtcattgccggaacccacggctacattgctcctgaatatggctacacatacaaggtgaacgagaagagtgatgtgtacagctttggggtggtgttgatggagttagtaactgggaaaaggccaattgaaccggagtttggggaaaataaggacata

SEQ ID NO: 154501 - DNA, 75 bp, Glycine max
aacactcattaattgcaagaatggcacttcgttgcttggtgatgtccctttctgttctcttcactcttggtcttg

SEQ ID NO: 154502 - DNA, 189 bp, Glycine max
cctgtttcttgcactcatagcattgtcagtaggatgatgatcaatgaggagcttcatgcaagctgggaccagccaactgggtgcattcttttccaagatgttgaacactctaggctgcaggccttggcattccagttgacagagaaattatctatccttgcagagagtaatgaaagagcaacagaggca

SEQ ID NO: 154503 - DNA, 276 bp, Glycine max
gtctacacgcactcttatgagaaagagcagaaataccagacattcaaagaaaacgtgcaacgtatagaagcctttaaccatgcgggaaacaaaccttacaagctaggcatcaaccattttgctgatctcacaaacgaggaattcaaagccataaatagattcaagggtcatgtgtgctccaaaataacacggacacccacatttaggtatgaaaatatgacagcagtgccagctacattggattggagacaggaaggagctgtcacacccatcaag

SEQ ID NO: 154504 - DNA, 267 bp, Glycine max
gtgccctccctctttctagctatttccctctcttaacacaattaacaaagatatatcatatcatatcaactccaaatgatgaaaaatattgggttgtttcttcttgtggtggtggctacttttgtggtggcagccacagctggtagcttttaccaagactttgaaataacatggggtggtgagcgtgccaaaatctatgaaaatggaaatcttctcaccctctccctagacagagcctctggctctggctttcgttccaaaaaagaa

SEQ ID NO: 154505 - DNA, 267 bp, Glycine max
ttcatgatcaagacactgcgaagatctgaagtcaaggtccttctaagaatgcttccagactatcatcatcatgtgaagtcatatgaaaatacacttatcacaaaattttttggtctgcacaggattaaaccttcaagtggtcaaaagtttcgctttgttgtaatgggaaatatgttctgcacagacttaaggatccatcggaggtttgatttaaaaggttcttcccttggaagatcatcagacaagatagaaattgatgagagtact

SEQ ID NO: 154506 - DNA, 269 bp, Glycine max
aactcgaaagcgcgtaatattaataatcgtaacaaacaagagagagaacagaactactactgtttctttttttgcctttgtttctctgcccctttgtgcagcgtctcacacaccaatggaagaaccaagtggttgcaacaagagcgctccaaaaggaaaaaaggatgacctttaccatgtacttcacaaggtcccttatggagatagcccttatgtcagagctaagcatgcccagctggtagaaaaggacccggaagctgcaattgtat

SEQ ID NO: 154507 - DNA, 268 bp, Glycine max
ggatagggttaaggccatggagcgcatcatctgcgccaagtacaagctaggtcgcaagatcggaagcggatccttcggcgaaatctaccttgcgacgaatattgataccttcgagatcgtcgccgtcaagatcgagaacggtaaaacgaagcatccacaattgctttacgaggccaagctctacaatattcttcaaggaggaagtggcatcccgaacataaaatggtgcggcgtagacggggaggatactgtgcttgttatggacttg

SEQ ID NO: 154508 - DNA, 267 bp, Glycine max
gccattctcttcagtttaaagttacatagtttttcattgttttacttaatctacaatggctgcttcaacaatggctctctcttcatcatcattggctggccaagctatcaagcttgccccctccacccctgagcttggtgttggaagggttagcatgaggaaaacagcctccaaaactgtttcctcaggaagcccatggtacggcccagaccgtgtcaagtacttgggcccattctcaggtgagcccccatcctatctcactggtga

SEQ ID NO: 154509 - DNA, 269 bp, Glycine max
aatatccattgcacctttctctttctccgatggctaatccctcactcttgttcttcagtctcctcctattatccgccaccgtagccgccgccgaacggatcgacgatgaagacgaccttctgatccgtcaagtggtgccggatgcggaggaccaccacctgctcaacgcggagcaccacttctccgccttcaagacaaagttcggcaagacctacgccacgcaggaggagcacgaccaccgcttccgtatcttcaagaacaacttgctc

SEQ ID NO: 154510 - DNA, 261 bp, Glycine max
tgaagttctgttggtgagtgtgagtgagtgtatcaatcggccacacagaaatgggcagtgcttctctgattccagtttcctggttgccctggcggccactttctcctttcaagggaacggtgaaaatcttggtcgcaaaaccatggctgaagaagattcagcaagcaagacccctcatttccgtggttaacaaggctgcctctctatcttcccccgtgacagcacccagcgtcggcgttcggtttcggctggacaatttgg

SEQ ID NO: 154511 - DNA, 272 bp, Glycine max
gttattctcctttgaaacacttgccccgtagctgcaaaagctaaaacacttagtgaatgagagcaataatgggctctggaaatatacgaccttcttcttccggctgctctcacttgtctatctccgagctccgcgagaagcaccattgggagctagaaaatctgacactaacctcacaacctttcaaaacattgaaattcttcacattagctgttattcaatacatcaagaaaacatcattatatctattggcaaaaggtggatgggttatg

SEQ ID NO: 154512 - DNA, 250 bp, Glycine max
gaggttaccgcctgtgaaaccaaggtgattcctggtgaatatggtttcgttgcccagcttaatgagggtcgtcacctcaagaagagaccaactgagttccgagttgacaaggtccttcaaccctttgatgaaaacaaattcaactttaccaaagttgggcaagaagaggtcctcttccaatttgaagctagcgaggatggacaagtccagttctttccaaatgctccagttgatgttgacaattctccca

SEQ ID NO: 154513 - DNA, 267 bp, Glycine max
attcttccccctccacccacccagcatatctctctattcctatttattagcacccctcacattaccttgtgtcaccaactactttgactcctttaccataccattacaataattatcaaacctaaccagtaaaaatggtgaccgtggaggaaatccgcaacgctcagcgttcccatggacccgccaccatcttggccttcggcaccgccacgccgtccaactgcgtctcccaagccgattaccctgactactacttccgcattacca

SEQ ID NO: 154514 - DNA, 265 bp, Glycine max
ggcatattgtgccctccctctttctagctatttccctctcttaacacaattaacaaagatatatcatatcatatcaactccaaatgatgaaaaatattgggttgtttcttcttgtggtggtggctacttttgtggtggcagccacagctggtagcttttaccaagactttgaaataacatggggtggtgagcgtgccaaaatctatgaaaatggaaatcttctcaccctctccctagacagagcctctggctctggctttcgttc

SEQ ID NO: 154515 - DNA, 265 bp, Glycine max
aaactgcgaatggctcattaaatcagttatagtttgtttgatggtatctactactcggataaccgtagtaattctagagctaatacgtgcaacaaaccccgacttctggaagggatgcatttattagataaaaggtcaacacaggctctgccttttgctttgatgattcatgataactcgtcggatcgcacggcctttgtgccggcgacgcatcattcaaatttctgccctatcaactttcgatgctaggatagtggcctaccat

SEQ ID NO: 154516 - DNA, 265 bp, Glycine max
gcagccactatagtaaacaatcttctctatctaaaatggagtttgttctaaactacctaaatgccactgccattggagttctttctctaaccctcttctttttgtttttgtataatcccttcaaatttgcattaggtaaaaaagaggctcccgaagttgcaggtgcatggccaatacttggtcacctaccactattgagtggttcagagacacctgatagggttttgggtgctttggctgataagtatggacccatattcaccat

SEQ ID NO: 154517 - DNA, 259 bp, Glycine max
ccacaaccttgaatgtttaccgccccgccggataaggagaaggagaaggaggatctgcgtcgcaggcactgttcatcgccatgtctcgggttgataacagaaattcctcagccaccaagcgtgctaggactgatggtagtcgtagggaagatgattggacatgccccagctgtggcaatgtcaatttctctttcaggacaacttgtaacatgcgtaattgcactcaaccaaggccggctgatcataattcgaaatctgc

SEQ ID NO: 154518 - DNA, 265 bp, Glycine max
tgggagcttttcctccagttgacttacgagcagtttgctttgcttgcattgcaagaggctgctgaggcataccttgttgggctctttgaggacactaacttgtgtgccattcacgccaagcgtgtgactattatgcccaaggatattcagctggcaagaaggattcgtggtgagcgtgcttgagttggtgcgttctgtgtttgtgaagatggattgttggtggctgcggatggtgttttgttactaagttttctttttgttgaag

SEQ ID NO: 154519 - DNA, 261 bp, Glycine max
ggcaaggaccagcttctgaaccttctttgcgacgcggcggcgaagaccgcgatgtggaggagaggatccgaaaggcggcggatggagatccggtgcaccggaagatatttgtccacggattgggctgggacactaccgccggaaccctaattagcgcgttccggcagtacggagagatcgaggactgcaaggccgtcaccgacaaggtctccggcaagtccaagggctacggcttcatcctcttcaagacgcgccgcggcg

SEQ ID NO: 154520 - DNA, 263 bp, Glycine max
gacaattcaacttaagagatcaatatggccaccaccactacccagcctccctctaatatctgttttttccttctgttgttgcttctagcacactttcatttgggcataagccaacttgagctgaattactactctaaaagctgcccaaaagctgaagagatcatcaaggaacaagtcacacaactatataacaagcatggaaacactgccgtttcgtgggtcagaaatctcttccacgattgcgtggttaagtcatgcgatgc

SEQ ID NO: 154521 - DNA, 165 bp, Glycine max
ggagattatataaactagaggaggcaattacaaggagtgacaatgttcaaggaactttatcatattgcctttacatctctcattcctttgtaaaccttaggtagtacagacaggaggttctccgtctccttgttaaagtatttcaaaagcttccttcaccagttt

SEQ ID NO: 154522 - DNA, 261 bp, Glycine max
cccatggccaccacctccgcattcctcctccttccgctcctcctgctgctccacctcgccatcgccgctcacggcatcggcatcaactacggcacgctcggcgacaaccttccaccgcccgcggcgtggcgaacttcctgaagacgaagacgaccatcgaccgcgtgaagatctacgacgtgaacccggacatcctgcgggccttcgccggcagcggcatctccgtgacggtgaccgcccccaacggcgacatcgccgcct

SEQ ID NO: 154523 - DNA, 264 bp, Glycine max
  unsure (1)..(264): unsure at all n locations
gagaaggctaaaaaaggctattatggcaggaggaggagctccagctaaagcagatgagccacagccacatccaccaaaggatcagttttcanatatttcttactgtattactagtcctcctccatggcctgaggccatacttcttggttttcaacattttcttgtgatgcttggcacaactgtgttgattcccactgctcttgttccccagatgggaggtggcaataatgagaaggcaagagttatcgaaaccctgctttttgt

SEQ ID NO: 154524 - DNA, 264 bp, Glycine max
tgcttccagagaaaggttgggaggttgatctagatgctgttgaagctcttgctgatcagaacacagtggcgttggcgatcataaaccctgggaatccttgtgggaatgtgtacagttaccaccatttggagaagattgctgaaactgcaaaacgggttggaacaattgtgatctctgatgaagtttatggtcaccttgcatttgggagcaagccttttgtaccgatgggagtttttggctctactgttcctgttctcactcttg

SEQ ID NO: 154525 - DNA, 265 bp, Glycine max
gcatcaatgggccaaaagaaaagttagattccaccgttattagccagcctgctatttatgtcacaagtcttgctgctatagagctacttcgtgcacgtgaaggaggtcagcagattattgactcagttgatgttacatgtggtttaagcctgggagaatatactgctctggcatttgctggggctttcagctttgaagatggactcaagttggtcaaactgaggggagaggccatgcaggatgccgctgatgctgctagaagtgc

SEQ ID NO: 154526 - DNA, 265 bp, Glycine max
atcattgttgagtccaccggagttttcaccgataaggacaaggccgccgcacatttgaagggtggtgcgaagaaggttattatttctgcccccagtaaggatgcccccatgtttgttgttggtgttaacgagcacgagtacaagccagagcttgatattatttccaatgctagctgcacaaccaactgccttgctccacttgctaaggttattaatgacaggtttggcattgttgagggtttgatgaccactgttcattccatca

SEQ ID NO: 154527 - DNA, 264 bp, Glycine max
aaagaatacaaaccttgtctttgaaccagctcaaggagcttccaccccagttcatccgtccagccaatgaaaggcctgagaacaccaaagccatagaaggtgtcattgtgcctctcatctcactgtctcagtcacatcatcttttggtgaaggaaatagctgaagctgcttctgagtggggatttttcgtcataaccgaccatggtatgtcacaaacattgatccaacgtttgcaagaggttggtaaggagttctttgccctcc

SEQ ID NO: 154528 - DNA, 259 bp, Glycine max
cgccggtgcactacaaatacaaccccgtcaagaccatcaagacgaatgtgatgggcacgcttaacatgcttggccttgcgaacgaattggggctaggtttctgcttactagtactagtgaggtttacggtgatccgctggagcatcctcagaaggagacttactggggaaatgtcaatccaattggtgagaggagctgttacgatgaagggaagcggactgcggagacattggccatggattatcatcgaggagctggt

SEQ ID NO: 154529 - DNA, 260 bp, Glycine max
ttaagatggaggggaaggagcaggatgtgtcgctgggagcgaacaagttcccggagagacagccgattgggacggcggcgcagagccaagacgacggcaaggactaccaggagccggcgccggcgccactggttgacccgacggagtttacgtcatggtccttttacagagcagggatagcagagtttgtggccacttttctgtttctatacatcactgtcttaaccgtcatgggagtcgccggggctaagtctaagtgc

SEQ ID NO: 154530 - DNA, 259 bp, Glycine max
agctcactattactgatgatgatgtgatagagaagagtaacttaagcagacagttccttttccgtgattggaatattggacaggccaagtccacagttgctgcttcatctgctgcagctataaatcctagttttaatattgaagctctacaaaatcgggttggttctgaaactgagaatgtgtttaatgataccttctgggaaaacttgagtgtcgttgtaaatgcactggacaacgttaatgcaagactatatgttga

SEQ ID NO: 154531 - DNA, 262 bp, Glycine max
gaagaagcgaaacaacttctcacgcgctgtctcaatcttggaatctctgctctaaattctaatcttcccgccatagatgtcgtcgaacttgtggtgagggaattggaaacggatccgctgttcaattcgggccgtggatctgccctgacagaaaaaggaacggtggagatggaggctagcatcatggatggtccaaaacgacgatgcggcgccgtttcgggtcttaccaccgttaagaacccgatctcgcttgctcgtttgg

SEQ ID NO: 154532 - DNA, 263 bp, Glycine max
tcgtgttgtaacttctctcttcaaccctagcttagggtttatgctctaaaaccctcccttttcaggtttattgggagagaaaaatgctcgtattgtttgaaacacccgcgggttttgccctgtttaaagtgctggatgaaggcaagctttctaaagttgaggacttgtggaagaacttttccagtgcagatactgctagacaggtggtcaagttgaaagcattttctaaatttgagaacacttcagaagctctagaggcagct

SEQ ID NO: 154533 - DNA, 262 bp, Glycine max
gccctgttcggaaaatacgagctgggccgcgtcctcggctgcggtgccttcgccaaagtccactacgcgcgcaacgtgcaaacggggcatagcgtggccgatggcggtgcggtggaagaaggagtgtggggtggagttggaagggatgaatgggaggtttgggattggggtggaggtttaccggctcacggcggagctcgcggtggtggaggtaaggaagaggggcggcgacgccgtggccgcggcagtgaggggtgtgtgg

SEQ ID NO: 154534 - DNA, 256 bp, Glycine max
catagtcatttctcagagttcgctcgggaagatgatgatttggaaagtctggagagagatgttagtgaagaatctggctggaaacttgtgcatggtgatgtttttcgaccgcctcgcaacttagttattctttcagctgttgttggcacaggtgctcagcttgcgttgctggttcttcttgtcgtcttgttggctattgttgggatgttgtatgttgggcgaggagccatcatcactactttcattgtgtgttatg

SEQ ID NO: 154535 - DNA, 257 bp, Glycine max
attcaacttaagagatcaatatggccaccaccactacccagcctccctctaatatctgttttttccttctgttgttgcttctagcacactttcatttgggcataagccaacttgagctgaattactactctaaaagctgcccaaaagctgaagagatcatcaaggaacaagtcacacaactatataacaagcatggaaacactgccgtttcgtgggtcagaaatctcttccacgattgcgtggttaagtcatgcgat

SEQ ID NO: 154536 - DNA, 257 bp, Glycine max
gtgaaaaaacgtttacaataatgagtcttggtcaatttatttgcgaaaatgtatgtatagttcaaacgaaaaatgcaccacacctaaaatcgggtcaaattctaacagttcaaatggattctgtaggaataagatcggctaacccttatttggcgactcctggagcaacggttcatggccattatggggaaatactttctgaaggagatatattagttacatttatctatgaaaaatcgagatcgggtgatataaca

SEQ ID NO: 154537 - DNA, 259 bp, Glycine max
ctccacaatcccttctccgcccaccgcaccgcctccggcgccatcttcgcccgcggcgcccaggacgacaaatgtatcgctattcagtacctggaagccatccgcaacctcaaatcccaatccttcactccacaccgcacaatccacatctccctcgtccccgacgaggaaatcggcggcatcgacggggccgccaagttcgtggagtccgaggaattcaacggactcaacgttggattcgcgctcgacgaggggcagg

SEQ ID NO: 154538 - DNA, 263 bp, Glycine max
gttcctttgtcaataagcaagaccaatacactgtggaaggagtgcagaatcttggagacaaagcagtgatgtgtcataggctaaatttcagaactgcagtattttactgccatgaagtccgtgaaacaacagctttcatggttccattggtggctggtgatggaaccaaaactcaggcacttgctatttgccactcaaatacttctggaatgaatcatcaaatgcttcatcaacttatgggagttgatcctggaactaaccct

SEQ ID NO: 154539 - DNA, 258 bp, Glycine max
caagaacagattcacattgccgccatttttgacattgaagaactttgaaggattggaccttggaaagatggacaaagctgatgactctggacttgcttcatatgtttctggtcaaattgatcgtactttaagctggaaggatgtgaagtggcttcaaacaatcaccaaactgccaattctggtgaagggtgtgctgactgctgaggacacaaggatagctatacaaagtggtgcagctggaattatagtgtccaatca

SEQ ID NO: 154540 - DNA, 256 bp, Glycine max
tctgcttcccctggcaaccttcttcttagttctctccgcttcttatctccagattgctggggcgaaagcacaaccgttgactagtctcaagcttaactctccgatccttcaggagtctattgctaaagagatcaatgaaaatcctgaggcaggatgggaggctgctataaatcctcatttctccaattatacagttgaacaatttaagcgccttcttggagtcaaaccaacgcctaagaaggaactgagaagtaca

SEQ ID NO: 154541 - DNA, 254 bp, Glycine max
ctatgctgtgtcaatcaccattcgtatagtgtttggtttcatgtttattgcattgatttggaaatttgattttgcacccttcatggtgttgattattgccatactaaacgatggtaccatcatgacaatatccaaggatcgagtgaaaccatctccaatgccagacagctggaagctgagggagatatttgccactggtgttgtgctaggagcttacatggcactaatgacagtagtatttttctggctcatga

SEQ ID NO: 154542 - DNA, 257 bp, Glycine max
aacatattcttcagttagctcccccaacctatacacttcaccaccacaccacaaccctaccctctctctctgtcatggtcattggaggagccttccctcgtttcgacccaatcaccaaatgtagcacccaagaccgctccaaccagaccatcgcctcggacctcgatggcaccctccttgtctcccggagtgccttcccctactacttcctcgtcgccctcgaagccggcagcgtcttccgagccctccttctctta

SEQ ID NO: 154543 - DNA, 253 bp, Glycine max
tcgatattcgaggtggactgggcatagattacgacggttccaaatcgtgtgactctcatatttccgttgagtacagtctcgaggattatgcagtcgcggttgctcacgcggttcagtgtgtgtgcgaccgaagtccgtgaaacacccagttatctgcagcgagagtgggagagccatcgtgtctcatcattcggtcttgattttcgaggcggttggcaccagcagcaccaccgggggaggagcttcccctgca

SEQ ID NO: 154544 - DNA, 253 bp, Glycine max
tcactcttcttctcttgcggctagggttttagcgcacttcttctagatttaaggaagatgggtaaggaaaaggttcacatcagtattgtggtcattggccatgtcgactctgggaaatccactaccactggtcacctgatttacaagcttggaggcattgacaagcgtgttattgagaggtttgagaaggaagctgctgagatgaacaagaggtctttcaagtatgcctgggtgctggacaaacttaaggctg

SEQ ID NO: 154545 - DNA, 259 bp, Glycine max
ggtaggtactctttggaaatgtctgctgttatttacaaggactgggttttcacttatcaagcattgcctaatgatcttgtcaagagaggagttgcggttaaggatccatctgctccccatggagttcggcttttgattgaggactatccttatgcttctgatgggctagagatatgggatgccatcaagtcctgggtgcatgaatatgtctcattctactacaagtcagatgcagcaattcaacaagatcccgagctcc

SEQ ID NO: 154546 - DNA, 260 bp, Glycine max
tgaagagcgaagagaatggctcccaagggtttaatctttttggctgtgttatgcttctcagcactgtcactgagtcgttgtcttgcggaggataatggacttgttatgaacttctacaaggaatcatgccctcaggctgaagacatcatcaaagaacaagtcaagcttctctacaagcgccacaagaacactgctttctcctggctcagaaacatcttccatgactgtgctgttcagagttgtgatgcttcactgttgct

SEQ ID NO: 154547 - DNA, 252 bp, Glycine max
ctgcattcggtgctctccggtggggctccgttgagcaaggaggtcatagagggctttgtggccaagtatcccaacgtcaccatccttcagggttatggtttgacggaatccaccggcgttggggcctccaccgactccttggaggagagtcgaaggtacggcacggcggggctcttgtctccggccacccaggctatgatcgtcgatcctgaatccggccaatcgcttccggttaacgcaccggggagctct

SEQ ID NO: 154548 - DNA, 228 bp, Glycine max
accagatataaagtcgcagctgaagtgaaagggtgttataattgcgcttttgtgttgatatttaaggtatcgagatcttttttatgggcaggattcatcaactgcagaaaacctccataccatcaaccttcctatgcttgtttgtattaattaactgataataatactgtatggtttggtacttgctaaataaaaagaaaagataaataaggtatcgaaaatcagggg

SEQ ID NO: 154549 - DNA, 254 bp, Glycine max
  unsure (1)..(254): unsure at all n locations
ctaggtagtgattccctgcaatctagtgccattgcaagaggttctgtcatggattatccacaagcaattactccattacacccttatcaaactactcctgtgaggaattttcttggacataacacaccttggatgtcccaaaccccccttcgaggaccatggattggttctccaactcctgcacctgacaatagcacccatatttctgcacctggnncctcagatacaattaagctaggttcagtcaaaggatc

SEQ ID NO: 154550 - DNA, 257 bp, Glycine max
cggtggcctttcaacaagctagtaagagaaaaggcccttcaggtaacaatgaagcatatcctttacgaagatgaaaatagtcgatacataaccattgggtgtgtggaaaaggctttatatatgcttgcttgttgggtggaagatccaaatggagatgctttcaagaagcatcttgcaagggttccagattacttatgggtttctgaagatggaatggccatgcagagttttggtagccaaggtgggatgctagtttg

SEQ ID NO: 154551 - DNA, 248 bp, Glycine max
atggactctcccaacgctttgtctaccgctccggcagcgggtagtaggaagaacgcgacgctaatttgcgtcccaataatgggagaatcagttgaaaagatggagattgacgtggacaaagcgaaagccggaggcgcggaccttgttgaaattcgattggattctttgaaaacctttgacccctatcgagatctcaacgctttcattcaacaccgttctttacccttgttgttcattacaggcccaaa

SEQ ID NO: 154552 - DNA, 252 bp, Glycine max
agaagaaaaacaaaaccctcactgagcgctgctgctttgagagagagatggctccgaaccttgaatgtcgtatgtacgaagcgaagtacccggaggtggacatggcggtgatgatacaggtgaagaacatagcggacatgggggcgtacgtgtcgtagctggagtacaacaacatcgagggcatgatcttgttctcggagctctctcgacgtcgtattcggagtgtgagcagcctcatcaaggttggccgca

SEQ ID NO: 154553 - DNA, 248 bp, Glycine max
gcggtccttccggaagaacatgttagctgtacaaaagagcgtcggagaagagaacgagaagaacagcagcagccctaatgcaagctttgtcaaagttagcatggatggagcaccttacctccgcaaagtggacttgaagatgtacaagagttaccgagagctctctgattctttaggcaaaatgttcagctccttcaccataggcaattgtgaatcccaaggaatgaaggatttcagaatgagagcaa

SEQ ID NO: 154554 - DNA, 251 bp, Glycine max
atatattccattctctctgtgtatttccctacctctcccttcaagatgcagatcttcgtcaagaccctcaccggcaagactatcacccttgaggtggaaagctctgacaccatcgacaacgtcaaggccaagatccaggacaaggaaggaatccccccggaccagcaacgtctcattttcgccggaaagcaacttgaggacggccgtacccttgctgactacaacattcagaagggagtactcttcacctc

SEQ ID NO: 154555 - DNA, 250 bp, Glycine max
gttgggcaagaagaggtcctcttccaatttgaagctagcgaggatggacaagtccagttctttccaaatgctccagttgatgttgacaattctcccagctttgttgccatcaatgtcagtcctattgagtatgggcatgttttgctgattccgcgcattttcgagtgtttgcctcaaaggattgaccgtgagagcttcctccttgcacttcacatggcagtggaagctgataatcatattttcgattggg

SEQ ID NO: 154556 - DNA, 248 bp, Glycine max
cttttgggggagagtgagtgagagtaaaaagatgtttctgcgtgcggtggcgcggccgttgatggcgaaggtgaaggcttcgacggggatcgtggggctggacgtggtgccgaacgcgagggaggtgctgattgggctgtacagcaagacgctgaaagagatccagaaggttcccgaagatgaagggtaccgcaaggccgtggagagcttcaccaagcacaggctcggcgtgtgcaggaggaggagga

SEQ ID NO: 154557 - DNA, 253 bp, Glycine max
gtcgaacagtcaactcagaactggtacggacaaggggaatccgactgtttaattaaaacaaagcattgcgatggtccctgcggatgttgacgcaatgtgatttctgcccagtgctctgaatgtcaaagtgaagaaattcaaccaagcgcgggtaaacggcgggagtaactatgactctcttaaggtagccaaatgcctcgtcatctaattagtgacgcgcatgaatggattaacgagttcccactgtccctgt

SEQ ID NO: 154558 - DNA, 259 bp, Glycine max
cttgttgctctccaagcctgccaagggagtcgagaaatccttttctctcctctctctccttcccaaggttcttgctgtctacaaggaagttattgctgaccttaaggcagctggtgcttcatggattcaatttgatgagcctacccttgtcttggaccttgaatctcacaagttgcaagctttcactgacgcatatgcagaacttgcacctgctttgtctgatctgaatgttcttgttgagactactttgctgacatcc

SEQ ID NO: 154559 - DNA, 249 bp, Glycine max
cctcgctctatttctcagtctctgtgtttgcggctgaggattccgaacgagtgaccttctttgtttctcgcaaagtttaagtaatcatgggtaaggaaaaggttcacatcaacattgtcgtcattggacatgtcgactctgggaagtcaactaccactggtcacttgatctacaagcttggaggtattgacaagcgtgtgattgagaggttcgagaaggaggctgccgagatgacaagaggtcattcaa

SEQ ID NO: 154560 - DNA, 248 bp, Glycine max
cttctttattccttttgtaatttcattcattcttaatctttgtgaaaaataatgttcatcgagaattttaaggttgagtgtcctaatgtgaagtacaccgagactgagattcagtccgtgtacaactacgaaaccaccgaacttgttcacgagaacaggaatggcacctatcagtggattgtcaaacccaaatctgtcaaatacgaatttaaaaccaacatccatgttcctaaataggggtaatgctt

SEQ ID NO: 154561 - DNA, 250 bp, Glycine max
gtaacttcaaaacatacaccccttctctctgtttctcttcactctctctctccctccctcttcaactaacatggcaatccacaaccaagacaccgctgtcagagaaatcaagcccaagaacaggagaatcatgggtgctggagggcctgatgatgaggacaataggtggccaccgtggtcgaagccactgctgaaagagagcttctatgttcaatgcaagttgcatgctgattctcacaagagcgactgc

SEQ ID NO: 154562 - DNA, 243 bp, Glycine max
agagaaccccaaagcgtccaacagcattgcaaggatagttaataaaaatcatttcatgagactccagaaccttctcactgagccaagggtcaaagaatcggtggcttatggtggttcaatggacgacaatgacttatttattgaaccgacaatattgctggatccgccacttgattcagcagtcatggctgcggaaatctttggccctgtacttccaataatcaccctggagaagattgaaga

SEQ ID NO: 154563 - DNA, 245 bp, Glycine max
gtttgataaaatattgtacacataaatctagctccaattcctaatcacctggttaatttcttcacatagagctatcaagatccaacgttaacatgaagaatgttttagtaaggtcagctgcgcgagctctgcttggcggcggtgggcggagctactaccgccagctctcaacggcggcgatcgtggaacagagacaccagcacggtggcggcgcgtttggaagcttccacttgcggaggatgtcc

SEQ ID NO: 154564 - DNA, 248 bp, Glycine max
ccctcgctctatttctcagtctctgtgtttgcggctgaggattccgaacgagtgaccttcttcgtttctcgcaaagtttaagtaatcatgggtaaggaaaaggttcacatcaacattgtcgtcattggacatgtcgactctgggaagtcaactaccactggtcacttgatctacaagcttggaggtattgacaagcgtgtgattgagaggttcgagaaggaggctgccgagatgaacaagaggtcatt

SEQ ID NO: 154565 - DNA, 244 bp, Glycine max
caccaatttagtttgaagaatttggctgaatcactaaaaacactaggtaacaaggcaatgcaatctaagagatactctgatgcaattgagttgtataattgtgccattgcagtccatgaaaagagtgctgtttactactgcaacagggcagctgcttacactcagattaacaaatatacagaagcaatccaagattgtcttagatccattgagattgatccaaactataccaggcatacagtcg

SEQ ID NO: 154566 - DNA, 247 bp, Glycine max
cccttccattcactccacttcttaacacccccaaacagaacaacggcagagcaagcagccagaaaaatggtgttgctgtccaaagcaacaacagaacaatactcctacatcaagaactacatgccaactgcattctcctcaacaattcccatagtggacctctccaaacccgatgcaaagaccctcatagtgaaggcttgtgaggagtttggattcttcaaagtcatcaacatggtgttcccattga

SEQ ID NO: 154567 - DNA, 245 bp, Glycine max
tacaaaggggagcaccatggtgaacacagtagtgagtacaaaggagagcatcatggtgaacacaaagctggagagtaccatggtgagcacaagccagagcacaaagaggggttcctagacaaagatagagacaagatccatggtgagggcggcgccgccgagggcgagaagaagaagaaggagaaggagaagaaggagcatggccatgagcatggccatgacagcagctgcgcagtgacagtgat

SEQ ID NO: 154568 - DNA, 248 bp, Glycine max
ggaattcatattgagtacatgttccctgatgcggttgaggttcaggcattagtaagaactaaggggctcttctcattttacgaggatgggcatcaagagtgctgtagagtaagaaaggtgaggcccttgaggagagcccttaagggtctcaaagcatggattactggacagagaaaagaccagtctcctggtactaggtctgaaatccctattgtccaggttgatcctgttttgagggactggatggt

SEQ ID NO: 154569 - DNA, 248 bp, Glycine max
caccaatttagtttgaagaatttggctgaatcactaaaaacactaggtaacaaggcaatgcaatctaagaaatactctgatgcaattgagttgtataattgtgccattgcagtccatgaaaagagtgctgtttactactgcaacagggcagctgcttacactcagattaacaaatatacagaagcaatccaagattgtcttagatccattgagattgatccaaactatcccaggcatacagtcgtctg

SEQ ID NO: 154570 - DNA, 245 bp, Glycine max
ggcatttccatgggacaacagcatgttgtcttggcagagaactgcttttcatttccaaccagagaaaaactggatgaacgatcccaatggtcctatgtactacaagggatggtatcactttttctaccaatacaacccgaacggtgcagtttggggtgacatagtttggggacatgcagtttcaagggacatgatccattggcttcaccttccactggcaatggtggctggacaatggtatgaca

SEQ ID NO: 154571 - DNA, 242 bp, Glycine max
caaatcttctatggaataatgggaagttggactgcttatctgattagcattctgtacatcgagtacaggaccagaaaagagaaagagagtgtcagcttcaaaaaccatgtcattcagtggtttgaagtgctggaaggtttactgggtccatactggaaagccattggcttggccttcaattgcacttttctcctctttggatccgttatccagcttattgcttgtgcaataacatatacctc

SEQ ID NO: 154572 - DNA, 244 bp, Glycine max
cgcgccgacatggctttcgcgcactacggtcccttctggcgccagatgcgcaagatctgcgtcatgaagctcttcagccgcaagcgcgccgagtcatggaacaccgtcagagacgaagtcgacttcatcatccgttctgttacgaacaacctcggaagccccgtcaatgtcggagaactcgtcttcaacctaacgaagaacatcatctaccgcgccgcgttcgggtctagttcccaggaggggc

SEQ ID NO: 154573 - DNA, 246 bp, Glycine max
catgaattaggaatgaactataatttcatccgtccagacttgattgtggaatcatgcctacagactcctgaagatgtagacaagttgcgtagaattggagtgaaaactatattttgcttacaacaagattcagaccttgaatattttggagttgatattaatgccatacgagaatatgccaagacatgcaatgacattcaacacttgcgtgctgagataagggactttgatgcatttgatctacgg

SEQ ID NO: 154574 - DNA, 249 bp, Glycine max
gcgactctctttccttccctctttttccgaatctgaatcgaaatggcttcggagactgagacgtttgcttttcaggccgagatcaaccagctcctcagtctaatcatcaagaccttctacagcaacaaggagatatttcttcgaaagctcatcagcaatgcctctgatgctttggacaagattcgatttgagagtcttacagacaagagcaagcttgatgctcagccagagttgtcattcacattattc

SEQ ID NO: 154575 - DNA, 249 bp, Glycine max
ctcgagccgcccaaaaccatttatagggttttcttttctttgccaagaaaatgagagagtgcatttcaatccacattggtcaggccggtatccaggtcggaaacgcctgctgggaactctattgccttgaacacggcattcagcccgatgggcagatgccgagtgacaagaccgttggaggaggagacgacgccttcaacacattcttcagcgagaccggcgccggaaagcacggcctcgcgccgtctt

SEQ ID NO: 154576 - DNA, 247 bp, Glycine max
gcctccactctcatcttcatggacatcactcattcgaatgccttcttgattggaatcggcgtatgaatattgcaattggttctgctgaaggaattgtatcttcatcaccaagcaacaccgcatatcatccacagggatattaaagcaagcaacgtgttgctggattctgatttccgtgctcgtgttgctgatttcgggtttgctaagttgatccctgacggggcaacgcattgactacaaaagttaa

SEQ ID NO: 154577 - DNA, 245 bp, Glycine max
cctaaacgactctatctctcttcgttttgttcttccttgcgctcctcctcgttcgttcgttctccctcgcgtagatcggcaatggcggagaccgagacgtttgctttccaggctgagatcaaccagctcctcagtctcatcatcaacaccttctactccaacaaggaaatcttccttcgtgaactcatcagcaacgcctctgatgctttggacaagattagatttgagagttgacggacaagagc

SEQ ID NO: 154578 - DNA, 235 bp, Glycine max
ggttggctgaacaaaatggtacagtttaaagagaaatctcgcaaggcggtgcgttcattgctggagctgaagaagttggggttgcccttttgacttatcctgttctgatggcttctgatatacttctatatcagtctgattttgtcccggttggtgaagatcaaaagcagcatttggagttgacccgtgacttggctgaacgggttaataatttctatggaggaagaagtggaag

SEQ ID NO: 154579 - DNA, 245 bp, Glycine max
atcaactgcttttgcagttgccgtggaattggcgtgtattgtcatgtatgatgcctcgggagttagacttcatgcaggtagacaagcagaattgcttaatcaaattgtgtgcgaactacctccagaacatccttgttccaatgacagacctctgcgtgattcacttggtcatactccacttcaggttgttgccggtggcatattgggatgcattatagcatttttgatgagaagatcaagttaag

SEQ ID NO: 154580 - DNA, 243 bp, Glycine max
gagggtcagagtgagaaagagagagagagagagagaaactgagagaaattcgcaaaccctaatttcggaaagatcggcgatggctgcctccaaggatcgcgagaacttcgtctacatcgccaagctcgccgaacaggccgagcgatacgaagagatggtggaatcaatgaagaacgttgcgaatctcgacgttgaactgactgtggaggagcggaatttactttcctgtgggtacaagaatgt

SEQ ID NO: 154581 - DNA, 240 bp, Glycine max
tcactcttcttctcttgcggctagggttttagcgcacttcttctagatttaaggaagatgggtaaggaaatggttcacatcagtattgtggtcattggccatgtcgactctgggaaatccactaccactggtcacctgatttacaagcttggaggcattgacaagcgtgttattgagaggtttgagaaggaagctgctgagatgaacaagaggtctttcaagtatgctgggtgctggaca

SEQ ID NO: 154582 - DNA, 246 bp, Glycine max
ctctttgcaacacaacaaaaaaagacaacacagagagaagcgtcttaataaacgctcttctctgaaaaacctgatttcttctcttcttctcttctctttcgtttcgatcttcgatctctgaaaatgagagagtgcatttcaatccacatcggtcaggccggtattcaggtcggaaacgcctgctgggagctctactgcctcgaacacggcattcagcctgatgggcagatccaagtgataagactg

SEQ ID NO: 154583 - DNA, 265 bp, Glycine max
caaagatcccatcttttcacgatttggagcagaacaacaattctgggtatcttcatatctgtgccaatgagaccatccatggggtggagttcaaggactaccctgttcccaagagtggtgttttggttgctgatatgtcctcaaatttctgctccaagcctgtggatgtgtcaaggtttggggttatctatgctggggcccagaagaatgtggggccctctggtgtcaccattgtgatcatcagtcaggacctcattgggaatgc

SEQ ID NO: 154584 - DNA, 261 bp, Glycine max
cctcgagccgaatcggctctaggttgcacggcacagagtggagtcacaagatggtgtcctggacagctgcagaagctgctcgcagctagcgtcctaaagtgcggcaagggcagtgtctggcttgatccaaatgaagtcaatgaaatctccatggccaattctcgacaaaacataaggaggttggttaaggatgggtttattatcaggtagccgactaagattcactctcgctcccgtgctcgtcgaatgaaggaggccaag

SEQ ID NO: 154585 - DNA, 273 bp, Glycine max
cttcttcctcttcttcaccaacgaccaaggtggagagtactggttcccaaaagaagaaggaggagcttagaaaagtgttctccactttcgacaaaaacggcgacggattcataacgaagcaggagctgagggagtccctgaggaacatcagaatcttcatgacagaacaagaggtcgatgatattgttgtcaagtacgattccaacggggacgggttgatcgattttgaagagttttgcttgttgactagtgagtgtgtaggagtggatcatg

SEQ ID NO: 154586 - DNA, 281 bp, Glycine max
  unsure (1)..(281): unsure at all n locations
gatttcgatcatcgtttattgttgttcagagatgatcccgtaccttagacagtggcttctcntagcactagcatttccatgtttactaacacttcatctgttagtatcaggtgtagtagcaacaacatcgttcacactggttaacaaatgcgactacacagtgtggccaggcattctctcaaacgcaggagtcgccacgcttccaacaacaggtttcgtccttcaaaccggagagtccaaaaccgtaaccgctccaacctcttggggtggccgtttctggg

SEQ ID NO: 154587 - DNA, 277 bp, Glycine max
acagcacgaggctattctgtcaaatgatatgcatagtgaagtgattatgtctagtggggcaattgggattcctcaattgctaatgcttagtggaatagggccaaaagcagaactccagaagttgaacatcccagtggtccttgacaacccctttgttgggaaaggaatggtagacaatcccatgaacacaatgtttattccttctaatagaccagttcatcagtcactcatagaaactgttggtatcaccaagatgggtgtgtacattgaggctagc

SEQ ID NO: 154588 - DNA, 268 bp, Glycine max
atttcacaaaaaataaaaaaaaataagcctctttctctctctgaatttctaagcctctctcacaacaatggaggagccacaaccaggacccagcccgttacgcaaaatgattttggtgtcatcaatggcggccggtatccaattcgggtgggccctatagctctcccttctcaccccatatgttcaaaccctaggcgtcccgcacgcttgggcctcatttatttggctatgtggcccgatatctgggctgctggtgcagccattgtgg

SEQ ID NO: 154589 - DNA, 240 bp, Glycine max
  unsure (1)..(240): unsure at all n locations
atttcaagggctgaaacatctatctttaactgtattctccctttgtttcctcaccagttgattcangttgcaaacatggcttttccagacccatccatgtcagtttctccacagaggaagatgggaagggggaagattgagatcaagaggattgagaacactaccaatcgccaagtcacattctgcaagcgcaggaacggcttgctcaagaaagcatatgaattatctgtgctttgtgat

SEQ ID NO: 154590 - DNA, 279 bp, Glycine max
catgtcctaatctttctgcaccatcgttctccatttttggctttacaaaaccactgtgtctgattaagggttctttaatatttccaatatttcttgtagtgaaaaagttgttagctaaaagaagaccaagtttttggtgttgtagaaggaagagaagaattaacatgaaaattcagtgtgacgtgtgtgagagagctccagtaacagtgatttgttgcgcggatgaggctgctttgtgtgccaaatgtgacgttgaagttcatgctgcaaacaagcttg

SEQ ID NO: 154591 - DNA, 265 bp, Glycine max
aaccttactggcaaaacaatcacgctagatgtggagtcctccgacacaatcgataacgtgaaagccaagattcatgataaggaagggattcctccggatcaacaacgtttgatcttcgccggaaaacaactcgaagacggcagaaccctcgccgattacaatatccagaaagaatcgactctgcatttggtgcttcgtctccgcggagggatgcagatcttcgtgaaaaccctaaccggcaaaacgattacgctagaggtagagt

SEQ ID NO: 154592 - DNA, 265 bp, Glycine max
gttgaggccttacatggaatctatggttccactccccggaatctatgaccccgatttcattgctgccaaccaaggagaccgtgccaacaacgtgatcaagggcacaaagaaagaacaagttcaacaaatcatcaaagacattaaggagtttaaggaaagcactaaggttgacaaggtggttgtcctgtggacagccaacacagagaggtacagcaacctagttgtgggactaaacgacaccatggaaaacctctttgcttccttg

SEQ ID NO: 154593 - DNA, 271 bp, Glycine max
gatcgatcgatggctcttgtaggagttggactgaagcatgctgcggagggcgtaccggaggcgaattgctccgccaagcccaccaagcagggcgagggcctccgccactactattctctcaacatccacgagcatcagctccttcttcgccaagagagtcatgacctcaaccgtctcgaggctcagagaaacgacctcaattctagggtgaggatgctgcgcgaagaattacagcttctgcaggcacccggctcttatgtcggtgaagttg

SEQ ID NO: 154594 - DNA, 270 bp, Glycine max
  unsure (1)..(270): unsure at all n locations
ttcagccctgcctgttttgcntncattctgttttcanagtgacgaacttctgnagaaatngcaaatcatcctttgacacactctcactctttccgcgagaggtttgntgngactctcactggtcacaggaacganattntggcccttctgtcaaggcttgaagccaagggcaagggnatcctgcaacatnaccaagtggttgcagagtttgaagaaatccctgaggagagcngaaagagactccaagaggtgncnttggagnagtttgat

SEQ ID NO: 154595 - DNA, 267 bp, Glycine max
ggagaacaaagtatagagtgaaagaatgggttagagaagcaagatttggatcataggaggcaccggctacatcggcagacatatagtggaagcaagcgcaaaggctggaaatcccacttttgctttggtgagggaatccacactgtctgagacctccaaggcacaactcatgcacaattttgaggctttgggcgttaatttggtccgcggggatctgtacgatcatgagaagttggtgaaagctatcaagcaagtagatgtcgtcat

SEQ ID NO: 154596 - DNA, 263 bp, Glycine max
ctcagcttaacatgctactctcgatcattcatcagtgcatgtgtaaacaccctctctaggctctgcagcaagactagcagttggacagtggctttaaaaacacttattttcattcaaaggctgttatcagatggtgatcctgcatatgagcaagagatattcttctcaactcgccgcggaacacgcctcctaaacatgtctgatttcaggggcaactcaaaatataattcatgggacttctgtgcatttgtgcgcacctatgc

SEQ ID NO: 154597 - DNA, 265 bp, Glycine max
cttcgcgccttattgtacatgaaagtatagcaacagaatttttgaataggattgtgaaatgggtcaaaaacatcaaaatttctgatcccttggaagaaggttgcaggctaggccctattgttagtgaaggacagtatgaaaagatattgaagtttatctcaaatgctaagagtgagggtgcaaccattttgactggtgggtctcgcccagagcatctaaagaagggattctttgttgaaccaactgtcataactgatgtaactac

SEQ ID NO: 154598 - DNA, 274 bp, Glycine max
atgatagtaaccccctttttccctctccatacccttttgctttctttatccaataataagaacttcccacgagtggctttaactggtctggtctggtctggtcggacacacaaaaatattagtatggagaaggtgagttttgtgaagaatggagagcttagattgcctccggggtttcgtttccacccgactgatgattacgcggttttgcagtacttgaagcgcaaggtcttctcctgccctctgccagcctctatcattcctgaggttgatg

SEQ ID NO: 154599 - DNA, 266 bp, Glycine max
cgtcgctccgcaccagtttcagcgcacgtatatcttgttgtttggagcgatccgagaaaaactctgtaaacatgttggtttaccaggacctccttacaggtgatgagcttctctctgactccttccgttacaaggaaattgagaatggaatgctgtgggaagttgaggggaagtgggttgttaaaggagcagttgatgtagacattggtgcaaacccttctgctgagggtggaggagaagatgagggagttgatgatgcagctgtt

SEQ ID NO: 154600 - DNA, 264 bp, Glycine max
gacaggttcaaaccggagcaaaaaaacttgttacgatggtttcttccgacaaggatccacgagaggaagtccttcaagcatggtacatggatgatagtgatgaagatcaaagactcccccaccacaaagaacccaaggagtttgtctcgttggaccaacttgctgaacttggagtccttagctggaaattagatgctgataaccatgaaaatggtccagagctgaagaagattcgtgaagagcgtggctacacctacatggatg

SEQ ID NO: 154601 - DNA, 263 bp, Glycine max
ggatgcacgtcttgaacgcaatttcaaggagatggataagttctaccaagaagccattgatgaacacatgaattctaagaaaaagactccagaggaagaggatttagttgatgtcttacttcaactgaaagagaacaacacgtttcccatagatctcaccaatgataacatcaaagcagtgctcttgaacttacttgtaggagctacaggtacaactgaagtcacaacaatctgggccatgactgaactaataaaaaatccaa

SEQ ID NO: 154602 - DNA, 256 bp, Glycine max
  unsure (1)..(256): unsure at all n locations
aaagtctttgactttgaagggaaagcctcattttgctgacttcagtttggtgccttatgattggggtggctttgtgcatccatgggttgaggcactggccatgagcagggttggtttggaggagcttaggctcaagaggatggtggtctcggatgagagcctggagctactttctcgttctttcacacactacagcggtctagtncttgttagctgtgaaggggtctgtancgatggccttgctgctatagctgca

SEQ ID NO: 154603 - DNA, 153 bp, Glycine max
cttttagctccttatcgtcgtggaggacaaataggacgtttcggcgcagctggagtgggtaaaacggaactgattatggaattgatcaataacattgccaaagctcatggaggtgtatctgtatttggcggagtaggtgaacgtactcgtgag

SEQ ID NO: 154604 - DNA, 269 bp, Glycine max
  unsure (1)..(269): unsure at all n locations
acaaaagataaaaaatgggttcttctctacgganctgtctgatttggtgatcacttgcttctgcttcgttcgccgccaacccaagagcaccaattgatgttccatttggcagaaactatgttcctacctgggcctttgatcacatcaaatacctcaatggtggttctgagattcagcttcatcttggtaaatacacaggtactggcttccaatcagattggtcctacttgtttggtcacttcagcatgtacataagattggttgctggt

SEQ ID NO: 154605 - DNA, 243 bp, Glycine max
ccgtcatgggactcagtctcatatcattgtcatggactccattggtgcccgctgacttctcatctgcggtcactgctgcactctgctttaatcgctggagatctagttgttgttgattgtgtttcatccgtatgtgtcctacctgattctgcttcgaagacaagaccttgggtgttagggttcaggcttgttcttactgtcaataagctggacatgtgcttccttgaactcgaagtcgatgga

SEQ ID NO: 154606 - DNA, 263 bp, Glycine max
cattcgaagagctcttaaccttggtgtcaatgttaagatgattactggggatcagcttgccattggaaaggaaacaggccgaaggcttggaatgggaacaaacatgtacccttcatcggcattgcttggccaagacaaggatgcttctatttcagctcttccagttgatgagttgattgagaaggctgatggatttgcaggagtatttcctgaacacaaatatgaaattgttaagaggctgcaagagaggaagcatatatgtg

SEQ ID NO: 154607 - DNA, 264 bp, Glycine max
gcgcaatgggaatgagtatcttatcattctcattgactcccctagggcacgttgacttctcatctgaggttactgctggactccgtattactgatggagctctagttgtggtcgattgtgtggaaggagtttgtgtccaaactgggaactgtgctaagagaagcccttggagaaaggattaggcctgttctgactgtcaataagatggacaggtgcttccttgaactccaggttgatggagaggaggcttaccagacattccag

SEQ ID NO: 154608 - DNA, 267 bp, Glycine max
ctcttcttctcttgcggctagggttttagcgcagtgtcttcgagatttaaggtagatgggtaaggaaaaggttcacatcagtattgtggtcattggccatgtcgactctgggaaatccactaccactggtcatctgatttacaagcttggaggcattgacaagcgtgttattgagaggtttgagaaggaagctgctgagatgaccaagaggtctttcaagtatgcctgggtgctggacaaacttaaggctgagcgtgaaagaggaat

SEQ ID NO: 154609 - DNA, 268 bp, Glycine max
ctttaccataccattacaataattatcaaacctaaccagtagaaatggtgaccgtggccgaaatccgcaacgctcagcgttcccatggacccgccaccatcttggccttcggcaccgccacgccgtccaactgcgtctcccaagccgattaccctgactactacttccgccttaccaacagcgcacacatgactgatctcaaagaaaagttcaagcgcatgtgtgaaaagtccatgataaagaagcgatacatgcacctgacggagga

SEQ ID NO: 154610 - DNA, 240 bp, Glycine max
cgacattcattcatctatggctacccttattgctcccagcaaccactctccccaagaagacgctgaggctctcagaaaggcttttgaaggatgggggactgatgagaaaactgtcatagtaatattgggtcatagaactgtttatcagaggcagcaaatcagaagagtctatgaggaaattttccaggaggatcttgtgaaacgcctagagtctgagatcaaaggagactttgagaaagc

SEQ ID NO: 154611 - DNA, 238 bp, Glycine max
cagaagctttcaaaaggtttggaagcaaactgactggaattgaaggaaaaatcaatgcaaggcacagtgatccaagtctgagaaaccggactgggccagttcagctgccatacactttgctccatcgttcaagtgaggaagggttgactttcaaaggaattcccaacagtatctctatctaattaaaaagagtttgtggtttccttatctatgttgtacttctgaataacatagactt

SEQ ID NO: 154612 - DNA, 234 bp, Glycine max
tgagaaattactaaatgatgagttttacattgggcttagacaaaagagggcaactgggcaggaatattctgaacttttgcacgagttcatgactgctgtcaagcaaaactacggagaaaaagttcttgttcagtttgaagattttgcaaaccacaatgcttttgagttgcttgcaaaatatggcacaactcatcttgttttcaacgatgatattcaggggactgcatctgttgt

SEQ ID NO: 154613 - DNA, 237 bp, Glycine max
cgaaatttaagtgaggagctagagaatgatgatgaagtctgctatgtgtgcagtggtggttgtagcacttcttcttctggcggaggtggggcccatggctgaggctgtgacatgcaccccaacagagttgagtccgtgtcttccagcaatcacttccggtgctaaaccttccaatgcttgttgcacgaagctgaagcagcaaaaaccatgcttatgtggctacctcaaaaacgctag

SEQ ID NO: 154614 - DNA, 235 bp, Glycine max
cagaaacagtgtgatgaaaatgaaggtccttgttttcttcgttgctacaattttggtagcatggcaatgccatgcgtacgatatgttccctctccgaatgaacactggctatggtgcccgtactccggaggtgaaatgcgcaagttggaggcttgctgacgaagcacacaacatctttggctttgagcccattcctgaagagtgcgttgaagcaacaaaggaatacatccatggc

SEQ ID NO: 154615 - DNA, 223 bp, Glycine max
acttaggggaacaatcacagcatctggtgatcttgttcctttgtcctacattgctggtttgctaactggtagaccaaactccaaggctgttggaccctctggtgagattctgaatgccaaagaagcctttgaattggccaacatcggtgctgagttctttgagttgcaacctaaggaaggccttgcccttgtgaatggcactgctgttggttctggcttggcc

SEQ ID NO: 154616 - DNA, 234 bp, Glycine max
ctttctctgaactgttcaccgaggatgagattaaggatgccttggctgagtcatatcagaacatggatgaagagattgattttgagtccttcctaagggtacatttaaatctgcaatcccgagcaatagctaaagatggtggttcaaaaagttcttcttcatttctgaaggcagctacaacaactgttcatcatgcaattaatgaatctgagaaagcttcttatgttgcacata

SEQ ID NO: 154617 - DNA, 232 bp, Glycine max
cggctttacagtgtttctcttccttcttcttcttcttcttcttcttcttcgttgaatcgcgattgttctgtgcgagagaaagaagagagagatcgaaaatggcgttggctttcgacgagttcggaaggccgttcataatcctgaaggagcaggagcagaagagcagactccgaggattggacgctcagaaagccaacatctccgccggcaaagccgtggctcgcatcctccg

SEQ ID NO: 154618 - DNA, 235 bp, Glycine max
ctggtggaaagaacttgtccaagtgggtcatggtgatttgaaagataagccatggtggcaaaagatgcaaacttgtgaagagttgattgaagcctcggccaccctcatatggatcgcttcagcccttcatgcagctgttaactttggacagtatccatatggaggtttaatcttgaacaggccaaccattagcaggagattcatgcctgagaaagggtctgctgagtatgctgct

SEQ ID NO: 154619 - DNA, 234 bp, Glycine max
gtgaattatttaatgcgcgaaaatgggcagtgaggagaatagtgtgtgatccacttctttcatcgcttcggatcttcaatctcatctccgatctcaaaatgcccgctgtttatggagctcgcttgaccaccttcgaagactccgagaaggagagtgaatacggttacgttcgcaaggtttcaggacccgtcgtcgttgcggatggcatggctggtgctgctatgtatgaactcg

SEQ ID NO: 154620 - DNA, 235 bp, Glycine max
acaattcaacttaagagatcaatatggccaccaccactacccagcctccctctaatatctgttttttccttctgttgttgcttctagcacactttcatttgggcataagccaacttgagctgaattactactctaaaagctgcccaaaagctgaagagatcatcaaggaacaagtcacacaactatataacaagcatggaaacactgccgtttcgtgggtcagaaatctcttcca

SEQ ID NO: 154621 - DNA, 237 bp, Glycine max
cacccttactggcaaaacaatcacgctagaggtggagtcctccgacacaatcgataacgtgaaagccaagattcaagataaggaagggattcctccggatcaacaacgtttgatcttcgccggaaaacaactcgaagacggcagaaccctcgccgattacaatatccagaaagaatcgactctgcatttggtgcttcgtctccgcggagggatgcagatcttcgtgaaaaccctaac

SEQ ID NO: 154622 - DNA, 153 bp, Glycine max
  unsure (1)..(153): unsure at all n locations
aggttttgcatttcatttgacgaagagtgagagagtcttanctgtcgtctctgatctctgatcgcatcttcattccgaaaatggctgtttcggctatcactggagcgaggctaactctagggatgtctctttcctcttccacacnacanangg

SEQ ID NO: 154623 - DNA, 235 bp, Glycine max
cgcaggattacagaagagtcagattgatgagattgttcttgttggtggaagcacaaggattccaaaggtacaacagcttttgaaggactactttgatggcaaggagccaaacaagggtgtcaaccctgatgaagcagttgcctatggtgctgcagtgcaaggaagcatgttgagtggagagggtggtgaagaaaccaaagacatccttctcctggatgtggctcccctcactctc

SEQ ID NO: 154624 - DNA, 229 bp, Glycine max
ctctcaaatctcttcgttccttcgattcgttccatttcttccaaaatggccaaagacccagttcgcgttctcgtcactggagctgcagggcaaattgggtatgctcttgtccctatgattgctgagggagtgatgttgggtcctgaccagcccgtgatcctccacatgcttgacattcctccggcagcagagtcattgaatggggttaaaatggaattggtggatgctg

SEQ ID NO: 154625 - DNA, 229 bp, Glycine max
caccgtagtaattctagagctaatacgtgcaacaaaccccgacttctggaagggatgcatttattagataaaaggtcaacacaggctctgcctcttgctttgatgattcatgataactcgtcggatcgcacggcctttgtgccggcgacgcatcattcaaatttctgccctatcaactttcgatggtaggatagtggcctaccatggtggtgacgggtgacggagaatt

SEQ ID NO: 154626 - DNA, 232 bp, Glycine max
caacgaatgcagtgtcttgccgctttcacaagtttggtgatgaccaaaagaatctggtcttccaaggtgatgccacgtcttcttccaggggcatagaactcacaaagttagacggtggaggaaaaccagtgggtggcagtgtggggagagtgttatactcttctccagtgcacctttgggaaagctctacagtggtcgcaagctttgaaaccgacttcaccttttccatctc

SEQ ID NO: 154627 - DNA, 235 bp, Glycine max
cgatgatatttctatagttaaagagctgcctaaagagttcagctggagcacaagagagtactatggcttggctattcgggaaacccgaatcaaggctgcgcctgtgcatgcatcagcccattggtatctggagaatgttttgcctgttctacagagttatggtattgctgcaatctctccattttctcacagactgagttttgacaacttgcctatggatattcaacacctacgc

SEQ ID NO: 154628 - DNA, 228 bp, Glycine max
cggggctaccgctgagtttaagcatatcaataagcggaggaaaagaaactaacaaggattcccttagtaacggcgagcgaaccgggaaaagcccaccatgaaaatcggtcgccctcggcgtccgaattgtagtctggagaagcgtcctcagtggcggaccgggcccaagtcccctggaagggggcgccagagagggtgagagccccgtcgtgcccggaccctgtcgca

SEQ ID NO: 154629 - DNA, 223 bp, Glycine max
ccttggtgaaatcaccaacagtgcattcgagccatcatctatgatggccaagtgtgctccccgccatggcaaatacatggcgtgctgtctcatgtacagaggtgacgtagtgcctaaagatgttaatgcagctgactggaattatcaagaccaagcgcactattcaatttgttgactggtgccccaccgggttcaagtctggaatcaattaccagcctccgac

SEQ ID NO: 154630 - DNA, 228 bp, Glycine max
cagtatctgttccatttcctgtgaaacaatcgcaggagacaaagctttcccacttggatattgttggtagacctgttgttgtgctggagaagaacaatgttgtacctgagcataatgagcattttcaggtctactataagttcaacagtctttctatgctcagggagcctttgatgttgatttctggctttttatttctgtttgttgcgtgcattgtctacacgcatg

SEQ ID NO: 154631 - DNA, 230 bp, Glycine max
cgccatttgggagttaggttctgcacgctctgcttccagcgagtgttctttcttcgtttcaacaccttaatttgcacacgctgcttcttcagcttgagaaatggcacaagaaacctttctattcacatctgaatctgtaaacgagggtcaccccgacaagctgtgcgaccagatctctgatgcagtgctcgatgcgtgccttgaacaggaccctgacagcaaggttgcct

SEQ ID NO: 154632 - DNA, 230 bp, Glycine max
atggtatacaacataggatttactcttggcaggatggagtttcaggaactaattgtctaattccagcaggttggaattgtacatatgagtttcaagttaaagatcagatagggagtttattctacttcccttccctaaatttcctgagggctgcaggagtatatggaggaattatcataaaaaaccgaccagtgattcctgttccttttggattaccagatggagatatt

SEQ ID NO: 154633 - DNA, 224 bp, Glycine max
agataaaatgggttcttcttcgtctatgtggacggtgtgtgtgattttggcatcactggccttcgcagtatgctgtgccaactcacgcaggccagtggatgtacaatttggccgaaagtacgtgcccacatgggcctttgattacatcaaatatgtcaattgtggttctgacattcagcttcatcttgacaagtacactggtactggcttccagtccaaagggt

SEQ ID NO: 154634 - DNA, 231 bp, Glycine max
ctgttgcacctctgattgcacttgcacggtctgaagcagaggatgttcatgaaactgccgcaggagcactatggaatctggctttcaatgctagcaatgctctaagaatagtagaggaaggtggagtatccgcacttgttgatctctgctcagcatcagtttcaaaaatggcacgattcatggctgcgttggcattggcttacatgtttgacgggagaatggatgaatatg

SEQ ID NO: 154635 - DNA, 228 bp, Glycine max
gtgcaaaagagcgtcgtagtcgcaaccctaatcagaagaagcgcagcttcaagcgagtgacagccaccagccatgggtcgtatgcacagccgcggtaagggtatatcctcttctgctttgccctacaaaaggacacctcctagctggctcaagatctcttcgcaagatgtcgaagaaaatatctgcaagtttgcgaagaaaggtttgaccccgtctcagattggtgtc

SEQ ID NO: 154636 - DNA, 223 bp, Glycine max
cacaggttctggcatgggaacactgttgatatcaaaaattagggaggaatacccagacagaatgatgctcactttctctgttttcccatctccaaaagtttctgatacagttgtggagccatacaatgccactttgtctgtacaccaactggttgaaaatgcagatgagtgcatggttcttgacaatgaagcactttatgacatttgctttaggacattgaaa

SEQ ID NO: 154637 - DNA, 224 bp, Glycine max
atgatgttggccatagaagccaatattgcaaatttgacaacgagctccttacactcttcacctcttccttgtatcttgctgcattagtagcttctttctttgcttccaccactacaaggatagatggacgcaaggcctccatgttcttaggaggcttgtttttccttgtgggggcattattaaacggcttcgccgtcaacattgaaatgctgatcataggccgc

SEQ ID NO: 154638 - DNA, 204 bp, Glycine max
  unsure (1)..(204): unsure at all n locations
cccgtagtggtggaggacaaggagggggtgtaggatatggtggtgatcatggagctggatatggtggcggtggtggtggtggtgcgggttatggtggtggtgtagagcatggtagtggaggtggttatggtgaaggtgaaggaggtggagctggaggaggatatggagctcttggggcacatggntgntggttttgaggaggcg

SEQ ID NO: 154639 - DNA, 229 bp, Glycine max
gggaaagctgtgccctcagcttcagcatgttgaattgagtggactcgagggagtgacagatgcagggcttcttccactccttgagagttataaggctggtttggttaaagtgaaccttagtggttgcacaaacgttaccaatcaagtagtttcgtccttggccaatctgcatggttggactcttgagaatctaaaccttgatggttgcaaaaacatcagtgatgctagc

SEQ ID NO: 154640 - DNA, 227 bp, Glycine max
gagctatgatatcgaatttggcatttgtattccgtaatatcttttccaaaaagggcatgaagggaaagtctgtcagtggaatgaattactatgcttgtttatctattttgtcccttgcaattctcacacccttcgcaattgctgtggaaggaccacagatgtgggctgctggatggcaaacagctatgtgtcatattggtccccaattcatatggtgggtagctgct

SEQ ID NO: 154641 - DNA, 223 bp, Glycine max
ctggtgtgacatgttgtcttcgattccctggtcaactcaactcagatcttcgcaaactcgccgtgaatctcattcccttccctcgtctgcacttcttcatggtgggatttgccccactcacttcccgcggttcccaacagtacagggctctcactgtccctgaattgacccaacaaatgtgggatgctaagaacatgatgtgtgcagctgatcctcgccacgg

SEQ ID NO: 154642 - DNA, 224 bp, Glycine max
gcctggaaaaaaagttagcatgtatattgctaggttgagaaattctaaaccaggagttcctcttatatctccacctcctcatcatgatatttattctatcgaggaccttgctcagttgatctttgatcttcatcaggtgaaccctaaggccaaggtgtctgtaaaactggtggctgaagctggaattggcactgttgcatctggggttgcaaagggcaatgctg

SEQ ID NO: 154643 - DNA, 227 bp, Glycine max
aacaataattcagaaatgttactgcaaacattagctatccctacaatactccttgtgatattcatatgggtggtacaaccaaagcaacgtcatgggaagattgcaccaggtcccaaggcgttgccaattattggtaacctccacatgctagggaaactcccgcaccgcacccttcaaacctttgcaagaaaatatggacccataatgtccttgaagctagggcaagt

SEQ ID NO: 154644 - DNA, 226 bp, Glycine max
ctctctcccttagtcaaagggactcgttgttcttctcccaggttatttagaaaagcaaaatggtgaagatttgctgcattggtgctggatatgtggggggtcctactatggcagtcattgcacttaagtgcccatccattgaagttgctgttgttgatatctctaaatcccgcattgcagcctggaacagtgaccagcttcctatctatgaacctggccttgatgg

SEQ ID NO: 154645 - DNA, 225 bp, Glycine max
tttaagagtgagatagtagagagagagagaaacacaactgctttgccaaaccttaatttcagggcacttccaagctaacaggaatatatgttgttccctttttgtgttgtttgattcagcgatttctggttttcgttttttttctttctttgttacaaggagagttcgatgtctttaagttgaataacttgttgggacatatttgactcggtgcttttcttttgg

SEQ ID NO: 154646 - DNA, 209 bp, Glycine max
aagagggggtcagagtgagaaagagaaagagagaattcgtaaaccctaatttcggaaagatcggcgatgactccctccaaggatcgcgagaacttcgtctacatcgccaaactcgccgagcaggccgagcgttacgaagagatggtggaatcaatgaagaacgttgcgaatctcgacgttgaactgacggtggaggagcggaatttgct

SEQ ID NO: 154647 - DNA, 262 bp, Glycine max
ctttggtggccacagcaacaataacaatggcagcctcactacaagctgcagctaccttcatgcaacccaccaaggtgggcatggccactcgcaacctcaaatctacacaatgcatttctaaggcttttggcttggaacccgctgcagctaaactcatttgctcccttaagcccgatctcaaagattttgctcaaaaatgtgtcgacgccaccaaaattgcaggattcgcccttgggcactcagctctcggtgtttctggagc

SEQ ID NO: 154648 - DNA, 115 bp, Glycine max
ggcgatctggtaaggagcttgagaaggagcccaaatttttgaagaatggtgatgctggtatggttaagatggatccagccaagcccatggtggttgaaactttctctgagtatcc

SEQ ID NO: 154649 - DNA, 262 bp, Glycine max
cgaaactcttgattaccataaccatgtcaatggcaacaacatcccctcacaccgccctcttccaaaaccgcaccaaccctttcactctctcctccttcaaacccacatccatcaaatgcgccacccaactccatacccaagccccgcccctcacccactcccaagatcgcgtcttcaacttcgccgccggtcccgccaccctcccggaaaacgtcctcctccgtgcccaatccgagctctacaactggcgcggatccggcat

SEQ ID NO: 154650 - DNA, 265 bp, Glycine max
ctacaaaggaaggactgaagatgataggttggttgctgtgaaacgcttcaacaagtctgcttggcctgatcctcgacagttcctagaggaagcaagggcagtggggcagctgaggaatgagcggttggctaacttggttggttgttgctgtgaaggggaagagagattgcttgttgctgagtttatgccaaatgaaactctctccaaacatctctttcactgggagagccagccaatgaaatgggcaatgaggctgagagtggct

SEQ ID NO: 154651 - DNA, 266 bp, Glycine max
ggccttactttcagaggaattcccaacagcatctctatctaatgagagtgtgtggtgtgtggtgtgtggttttctttccttccaacgtacctctcattgacaaataaacgtgcaaacttatgtgtgcataattttcttatgtatgcttaagttttgtaattggatgctatctagtttttcatatctaatagggtgttgtgtcagtttttatgtatagtattgtgctcctatcatgttcacccgtatcatgttcacccgtatgtaag

SEQ ID NO: 154652 - DNA, 267 bp, Glycine max
ctttccctctctaactgtgctgatggtcttatcgacgtcatccagggctccactgccatcaccatctcaaattgccacatgaccaaacataacgatgtcatgctgttttgtgctagtgactcatacagcggagacaagataatgcagataacagtggcattcaaccacttcgggcaaggactggttcagaggatgccaaggtgcagatggggtttcgtgcatgtcctcaacaatgactacacccactggatgatgtacgcaattggt

SEQ ID NO: 154653 - DNA, 264 bp, Glycine max
gaaggagaccctcattgaccttacagttatagaaatcttgtcaaggcacgcatctgatgagttctaccttgggcagagagatggtggtgactactggacttctgatgccggtccattagaggcatttaagaggtttggaaagaagcttgaagagattgaaaagaagcttatagagaagaacaaagatgagacattgagaaaccgctatgggccagctaaaatgccttacactctgctctatccttctagtgaggagggattgac

SEQ ID NO: 154654 - DNA, 264 bp, Glycine max
gtttgttgtgagctataagctagtttatcgtgaggagaatatgaagttgtttgttttctttgttgctgcagtagttttggtagcatggccatgccatggcgcaggctaccaaaggttccctctccgaatgaaaactggctatggtgagcgttcttcggaggtaaaatgcgcaagttttaggcttgctgtggaagcacacaacatccgagcctttaaaaccattcctgaagagtgcgctgaaccaacaaaggactacattaatgg

SEQ ID NO: 154655 - DNA, 265 bp, Glycine max
tgtgaatcagcaccacattcacctgagctttttgtgacgattccaaagcatggcttcccttgcagcatccactgctgctgcttcccttggcatgtcagaaatgcttggaaaccccatcaacctcagtggtgccacaaggccagctccatctgcctctagccctgcctccttcaagactgtggctcttttctccaaaaagaaggctgcacctccaaaaaaagctgcagctgctgctcctgccaatgatgagcttgccaagtggtat

SEQ ID NO: 154656 - DNA, 262 bp, Glycine max
ctctctctcaccaaagccttcctagaacgaaaaaaaaaagaagagcaattttccctcaccaaagaagaagaagcaaacaatggccgatcaacttaccgatgaacagatctccgagttcaaggaagccttcagcttgtttgacaaggacggcgatggttgcatcacaaccaaggagcttggaactgttatgcgttcattggggcaaaacccaactgaggcagagctccaggacatgatcaatgaagtggatgctgatgggaat

SEQ ID NO: 154657 - DNA, 223 bp, Glycine max
ctagactcttccgtttctcttctctgtctaaggggtgccctgagatcacattgaacaatggtgaaagctgtgtgccgtctttggagcagtgagggtgtcactggaactattcacttcggtcaggagggaaatggtcgaaacaccgtgactctatgccttgctggtcttaagcctggtctccatggtttccatgtccatgccttgggggacactaccaatggtg

SEQ ID NO: 154658 - DNA, 263 bp, Glycine max
cgtgtttcatttgtgaaactaacaacaacacaaggccatcatcatggcagctgcttcgccaatggcaagccaactcaagtccaccttcactaggactcttgtagctcccaagggcctctctgcctcttcaccacttcacctcgtgccttctagaaggcaatttagcttcactgttaaggccatccaatcagagaagccaacctatcaagtgattcagccaatcaacggtgacccattcattggaagcctggaaaccccagtta

SEQ ID NO: 154659 - DNA, 262 bp, Glycine max
  unsure (1)..(262): unsure at all n locations
agaatccacacaaactcagggtgaangagagagagagagagagagagagagagagagagagaatacgagtgtggtgtatcgcggtgcatggtggcgcttgtgtcgactctaatctcccactcgagcgccaagaagaagcgaaacaacttctcacgcgctgtctcaatcttggaatctctgctctaaattctaatcttcccgccatatatgtcgtcgaacttgtggtgagggaattggaaacggatccgctgttcaagtcggg

SEQ ID NO: 154660 - DNA, 265 bp, Glycine max
ggggaagaaacatttaatttgggttgataatagtttatgttaagatatcactactgctatatatatgttgccatagccaagttagccttataaagggaaactcacttgccttatttttggttttgagattgagctaaaggccaactcaaccatcgaatttgttggtgattgaaagagaaggaagaagaagcaggaaatggaagcagtgagagctggtcgagaaggagcaataggtctaggtcaaggtgatggcgtacaagggaca

SEQ ID NO: 154661 - DNA, 260 bp, Glycine max
ccggtgcacagatcttctcagagggaggccttgactacttgggcaacccaaacctgatccatgctcagagcatccttgctatctgggctgttcaggttgtgctcatggggtttgttgaaggttacagagttggtggtggaccacttggtgaaggacttgacccaatctaccctggtggtgcttttgaccctcttggtctggctgatgaccctgatgcattcgctgagttgaaggtcaaggaactcaagaacggtcgcttg

SEQ ID NO: 154662 - DNA, 251 bp, Glycine max
cagaggggcagtagccgagattccgtgagttgcaaaaatgaagacgattctttccaccgagaccatgaaataagcggacggcgtgagcatcaaagttcatgccaaggtcatcgaagttgagggcccccgcggaaaattggtgcgagacttcaagcatttgaatctcgattttcagctcattactgacgagaacggtataagaaagctgaaaatcgacgcgtggtttggttctcggaaaacatccgccgcca

SEQ ID NO: 154663 - DNA, 265 bp, Glycine max
gcagggataaggattgcttgagcaagtggttttctccatgtgagaaattgggtctctctgctgagcacggttacttcactaggtggaccaaggattctccttgggagacttgcggattgacgaccgattttgaatggaaaatgattgcagaacctgtgatggcgctttatactgaagcaactgatggttccttcattgaacataaagaaagtgcaatggtttggcaccatcaagaagcagatccttattttggatcatgccaagc

SEQ ID NO: 154664 - DNA, 265 bp, Glycine max
cgtcctcgtcaccggcgctgcggcttcgtcggctcccacgtctccctctcgttaaaacgacgcggagacggcgtcgtcggactcgacaacttcaacgactactacgatcggtctctgaaaaaagcccgcaagtccctcctcgccaagcatgacgtcttcatcgtcgatggcgacctcaacgacgccaagctcttagcgaagctcttcgatgtggtcgctttcatccacgttatgcacctcgcggcgcaggccggggttcgctacg

SEQ ID NO: 154665 - DNA, 260 bp, Glycine max
cttcaacctcaccaaaggaactaagaatttcattgaggctagagaaagtggtgatcaatatgtcaaagaatccaaaagttttctttgatattctaattggaaagatgaaagctggacgagtagtgatggagttgtttgccgatgcaaccccaaaaacagctgaaaacttcagggctctctgcactggggaaaaggggattggacgatctgggaaacctttacactacaaaggttctgtatttcatcgtattattccagaa

SEQ ID NO: 154666 - DNA, 258 bp, Glycine max
ggaactttctattcagctgcaagagaccccattttttattctcatcattcaaacattgataggatgtggtccatatggaaaacacttggtgggaaaagaagggattttactgattcagattggttagaatctgcgtgtctcttctacgatgtgaacaagaaccttgtgcgtgtgaaggtcaaggattctcttgacactagaagactacggtgatattaccaagatgttgacattccatggttaaattctaacgccacg

SEQ ID NO: 154667 - DNA, 262 bp, Glycine max
ataataacaacaataacgcaagtaatggaaattctaagagtagcttcagcggtgaacttgtccctgaagaaaatttcttgggtatatgcagtagagaattattagccagaggttgtgaactcctcaaacgcacacgcaaaggtgatcttcattggaaggttgtatctgtgtatgtaaacaggatgaatcaggttatattgaaaatgaagagcaggcacgttgctgggaccatcacaaaaaagacaaagaatgtggtgcttga

SEQ ID NO: 154668 - DNA, 263 bp, Glycine max
ggcaattcgaattgcagtgtttacataggcaatctggatgagagggtgacagacagggtcttgtatgatatattaattcaagcaggacgagtggtagacttgcacattcctaaagataaggaatcagagaaaccaaaaggttttgcctttgcagaatatgaaactgaagagattgcagactatgctgtccggcttttttcaggcctcataacactgtacaacagaacacttaagtttgcgatatctgggagagacaaaactac

SEQ ID NO: 154669 - DNA, 265 bp, Glycine max
ctcagattgcaattgcctcttctcttctcccagaatcggtgtaggttacaggtttaagggttttgttttcatttaggtcactaatccgatatcatgaagctcgatacgactagtctcgaatcgtttcccacactgattgcacctcaaaacgacgtcgccggagaactctccgccgctccgttctttgaccttccgaattccaatgacttcgatgggttcttgaaagacgctattcagatggtgaagcccgcgaagggtactacaa

SEQ ID NO: 154670 - DNA, 263 bp, Glycine max
gggacatcaagcgccatctattgcctcgatctcattagaaaggttcctctattccagaactcggatgatcgtattcttgacaacatctgtgacagggttaaactcctagtcttctctaaagatgaaaagataatcagagaaggtgatcctgtaccaaggatggtgttcatcgtccgagggcgcataaaacgctaccaaagccttatcaaaggcatggtatcctcaagcatccttgagccaggagggtttttgggtgacgagct

SEQ ID NO: 154671 - DNA, 235 bp, Glycine max
cgcactcaagaacatgctgtgacagcgctcctgaatctttccatatacgagaataacaaaggaagtattgtttcttcaggagcagttccaggtatagttcatgtgctgaagaagggaagcatggaagctcgggaaaatgcagctgcaacacttttcagcctttcagttatagatgaaaacaaggttacaattgggtctttaggagccataccaccactggtgacactgctaagtg

SEQ ID NO: 154672 - DNA, 257 bp, Glycine max
atacccgtttgaattctctactgttgaaatgccgtatgaatcatacaatggaatcaatgttaggcttaggtacattttgaaagtgacaattagtcgaaattatgtcaacaacattgtggaatacatggattttggtgtacgcaattatgctccagctccacctattaataacagcattaagatggaagtaggaattgaagaatgcttacacatagagtttgaatacggcaagagcaagtatcatctgaaggatgtca

SEQ ID NO: 154673 - DNA, 258 bp, Glycine max
aagatagtagaagatggcagacactgaggatattcaacctcttgtttgtgacaatggaacaggaatggttaaggctggatttgctggagatgatgccccacgtgctgtgtttcccagcattgtaggtcgtcctcgtcacactggtgtgatggttggcatgggccaaaaagatgcatatgttggtgatgaggcacaatctaagaggggtattttgactctcaagtaccccattgaacatggaattgtgagcaattggga

SEQ ID NO: 154674 - DNA, 260 bp, Glycine max
gcttacaaaaagtatatattggtttctctcattcgtcatggacagttctcaaccagtcttcctaagtattcttcttcgactgctcaaaggaacctgaagaacttttgtcagccttacgtcgaattggctaatagttatggcactggacaaattgaagaactagaggcatatgccagggcaaatgcagagaagtttgaatctgacaacaaccttggactggttaatcaggttgtatcatccatgtataagcggaatattca

SEQ ID NO: 154675 - DNA, 260 bp, Glycine max
gctcactgaatgcagtagccaatgatggaggatggatatatcttggaactaacaaaactatggcaaaatcaagtatcactggctacagtcagtggtccctctcaaaggatcatcttcaggtgggtgatacagtgcgctctagaaagctttccaattcatgcgatcctcaaaacatggaggtcccagaaggaaatgttgttggtttagaacgcaatgtagatcatggatttgttctagtgaggctccatggtgttcatgac

SEQ ID NO: 154676 - DNA, 256 bp, Glycine max
cacagttagtacaaaaaagggttacttcagcttccacatatcttgaagaattgatcaatgggcaagtctgtagttgagaagctactttggatggcaattgtgtgcttggtgctgggtgtaatttccattactcccaaggcccaagcagcagtgacatgcaaccaggtggtgagcaacctcaccccatgcatttcttatgtgctcaatggtggcaaaaccgtgcctggcccttgctgcaatgggatcaagaccctct

SEQ ID NO: 154677 - DNA, 256 bp, Glycine max
gaaaatgtggaagagaacgggttttgaagaagaagcagttcaattgatcaactcagatttcagggacctaagtctagctgctaatagactcgcccatcatgccatcaaacttggtggcattggctttggagcctcttttttcggattgtttgctgccattgctgctatttatctgttgattttggatcgtacaaactggaaaacaaatattctcacagcactactcattccatacattttcttcagcttgccttca

SEQ ID NO: 154678 - DNA, 255 bp, Glycine max
gccgcgcacggcggtgaaaagacggtgtccaacgctgaaccttccggtagcgatcctcagaagtctctggagttggcgaacgagctgatggaaaaaggaaacaaggcaattaaggagaacgattttggagaagcagctgataacttcagccgtgctctcgaaatcagagtggcacattatggtgaacttgctcctgagtgtgtgcacacatattacaaatatgggtgtgcacttttatacaaggctcaggaggaa

SEQ ID NO: 154679 - DNA, 247 bp, Glycine max
cttaagagatcaatatggccaccaccactacccagcctccctctaatatctgttttttccttctgttgttgcttctagcacactttcatttgggcataagccaacttgagctgaattactactctaaaagctgcccaaaagctgaagagatcatcaaggaacaagtcacacaactatataacaagcatggaaacactgccgtttcgtgggtcagaaatctcttccacgattgcgtggttaagtcatg

SEQ ID NO: 154680 - DNA, 254 bp, Glycine max
ggaaccaacaacaaagagcagagagaaagagaggaccattccaaccctaatttctctgctaaaccctagttgtttggcatttcctctcttctccctcgtaaatcttctcccattccctccggtagctttccagatccaaataaatcatggttttctgggtttttggctacggttcactggtgtggaaccctggattcgattacgacgagaagattattggtttcatcaaggactacagacgcgtgtttgattta

SEQ ID NO: 154681 - DNA, 251 bp, Glycine max
tgagtttcttgttaccattaccaaccctcttgttgtgtcactttgttgtgttaatttattccctccaatcaaaggccgatgaatttgatttcgatgagtccttgttcaatgcaaaaaacgcttccagtggcagaaaacttgcaggaagatgcaacttgttccgtgggaaatgggtttatgacccttcataccctctctatgacccttctacatgtcccttcatagatccacaattcaactgccaaaagtac

SEQ ID NO: 154682 - DNA, 252 bp, Glycine max
ttaattcgttaacaatttgcactcctttcaatcattaaaagatggcagatggtgaggatatacaacctcttgtttgtgataatggaactggaatggtcaaggctggatttgctggagatgatgctccaagggctgtgttccctagcattgagggtcgtccacgccacactggtgtaatggttggaatggggcaaaaggacgcatatgttggtgatgaggctcaatccaagaggggtattttaacactgaaat

SEQ ID NO: 154683 - DNA, 229 bp, Glycine max
tatttattagcacccctcacattaccttgtgtcaccaactaatttgactcctttaccataccattacaataattatcaaacctaaccagtaaaaatggtgaccgtggaggaaatccgcaacgctcagcgttcccatggacccgccaccatcttggccttcggcaccgccacgccgtccaactgcgtctcccaagccgattaccctgactactacttccacacaacatac

SEQ ID NO: 154684 - DNA, 248 bp, Glycine max
tcttcttcttctttttcatcaatcatcaccagtggttcttttccttctgagaagatcgaattgtgttttgcaaaaatgggagttccagagaaagaccctctttcccaattgagtttgcctcctggttttcggttttaccccaccgacgaggagcttctcgttcagtatctgtgccgcaaggtcgctggccaccatttctctcttccaatcattgccgaaattgacttgtacaagttcgacccatgggt

SEQ ID NO: 154685 - DNA, 246 bp, Glycine max
gcatcctgattgtgtgatgctggtttatccaagtggggttggtgggtttgatgtgaattggaaggagttaagtgaagctatattgggatttgataagttggactggaaagggaagcctaattcccttagcaaagagcatgtgtgttgggaagttatttataggactgctgaggctgtgaagaagcctttgacattgggggaaagattcttggttgagccatttcagaggagtggtgtttgtgggga

SEQ ID NO: 154686 - DNA, 253 bp, Glycine max
cgttagggcactcaacattttacactcttttcttcttctcgttgttgcttcggtgttgaatcatggatcagaaagtcgatttcagtgctccgcattccatgggaaccactatcatcggcgttacttacaacggcggtgtcgttctcggagccgactctcgaaccagcactggagtgtatgttgccaaccgagcatcggacaaaatcacacagctcactgataatgtttacgtgtgtcgctctggatcggctgc

SEQ ID NO: 154687 - DNA, 249 bp, Glycine max
aggattctcaaatactcaactcattagcccttatcttgcccttattcctcttcatgattctgatcctaaaactagggagaaaactcaagagatctgaattgtctctaaacatataccgaggaccatggaaactgcctattataggaaatttacaccagcttgttacatcgacaccacaccgaaaattaagagacctggccaaaatatacggacccatgatgcatctccaacttggggagatcttcacaa

SEQ ID NO: 154688 - DNA, 251 bp, Glycine max
ggaattaggaatattcgacaggtagagtttcttcaatggctcctaaagttgataagaagaatgatccaaaggcccaggccttgaagactgctaaggcagttaagtcaggtgctacctttaagaagaaggtaaagaagatccgaacttctgtcactttccacaggccgaagaccttgaagaaggacaggaaccccaagtaccctcgcattagcgccccgccgaggaacaagcttgatcattatcagatcctg

SEQ ID NO: 154689 - DNA, 252 bp, Glycine max
agagaaaagcgcgctatatacaagaacttgagcgcaaggttcagactcttcagacggaagccacaactctttctgcccaattgacattataccagagggacacatctggccttagtactgaaaatacagagcttaagctccgtctgcaagccatggagcaacaagcacagcttcgcgatgctcttaatgaagcattgaagaaggaagttgagagacttaaggttgctaccggtgaggggatgagccacactg

SEQ ID NO: 154690 - DNA, 247 bp, Glycine max
attggttacgtacacatgccaacttggaaccatttatattggcggctcataggcaattaagtgctatgcatccaattttcaagttgttggacccccacatgaggtacaccttggagatcaatgccttggctagacagagtttgatcaatgctgatggaatcattgaaaattgctttactcctggtcgctatgccatggagattagttctgctgcctacaagaacttttggcgctttgacatggatag

SEQ ID NO: 154691 - DNA, 250 bp, Glycine max
atactgtttctaagcataatcaaatcaaccatggctaccctcattgctccaatcaccttttcgcctggtttagatgcagaagctcttagaaaagcgttccaaggatgggggactgatgagatgaccgttatagcaatatttgttcacacatatattcatcagaagcggcaaatcatacagatttatgaggaaatttaccaagaggacctcatcaaacgcctagagtctgagctctctggtgactttgaga

SEQ ID NO: 154692 - DNA, 248 bp, Glycine max
atctatctcttgtttcaatttcaacaacggttactccattttcgttttgagtttcaatcaagccatcatcatgtctaccgcatcgcaacccaaggccaagaaaacggcgtcgtccaagaagcccctctcccaccctcccttcgccgtgatgatagcagaggcgattgcgagtctgaaagagagaaccggttcgagccaatacgcgataaccaaatacatcgaagggaagcacaaggagttgcctgcaa

SEQ ID NO: 154693 - DNA, 246 bp, Glycine max
ccggagcttctctttatagcggtaaacccttgtcggattcgccgcttcctcttgtttacgctgggaacgcgagtaactcttctgtagggtatctatgtttgcaagattctctgattcctgagaaagtttcagggaaaattgttatatgtgagagaggtgggaatccgagagtggaaaagggtttggtggttaagcttgctggaggtgctggaatgatattggcgaatagtgaagcctacggagaag

SEQ ID NO: 154694 - DNA, 247 bp, Glycine max
aagaagatgcaggatatttatggagcttctggttactttttggagaaggattctgtgaaaaaggagaaacatttgcaatctttgaaattgactgaggtgactgtaagtgaccagcttgaaggttttcgagcatcaaaagagcatttcaaaggattgagattccccactatttcttcagttggctcaaatgcagctataattcactattttccaaaggcagaaacatgtgctgaacttgatccagaca

SEQ ID NO: 154695 - DNA, 246 bp, Glycine max
atccttcagaacaaggtagacttgattcaagaaaatgtcgcaatcaatcagcatgaggcaatttcaaagtttatacaaggaactgttgctgatggtgcaccagtagtacctatttcagcacagttgaagtataatattgatgttgtgtgcgaatatattgtgaagaagatcccaatccctgaaaggaactttgtttctccacctaacatgattgttattcggtcatttgatgtcaataaacctggt

SEQ ID NO: 154696 - DNA, 251 bp, Glycine max
ccctcgagcgaatcggctcgagcgccgctgatgaggctgcacttcgtcgtgcctgtgctgcgaaggttcacatgtgcaataagctagctagtaggcatgtgagggttggtcttgcaagtccaagtgatgtgccacggtgtgacatatgtgagaatgcaccagctttcttctattgcgagacagatggaagttccctttgtttgcagtgtgatatgattgttcatgttggtggtaaaagaacgcatggaaga

SEQ ID NO: 154697 - DNA, 246 bp, Glycine max
  unsure (1)..(246): unsure at all n locations
acgaagtcgantttcctcactgctcaatccgagcaagagcgccaaagaaggtcaaatatcaacttctgggatgtttttagatccaaagaaatcagactggcattcctcgtcggtgccggacttctggcttttcagcagttcacgggtattaacacagtcatgtactacagcccgacaattgtccaaatggcagggttccatgctaatgaattggctcttcttctatcccttatagttgccggcatg

SEQ ID NO: 154698 - DNA, 247 bp, Glycine max
ctttgaagccaccctcttctaacttctccatttcacaaggaagaagatcagagaacatttagaacaaaaaagagagtttgagaaatggggaggggtaagattgagatcaagaggatagagaactcaagcaacaggcaagttacatactcaaagagaaagaatgggatcctaaagaaggccaaggaaatcactgttctatgtgatgctcaagtttcgcttatcatctttgctgcatctggaaagatgc

SEQ ID NO: 154699 - DNA, 245 bp, Glycine max
ggtcgttattgcaggaacttaagagtcttgtttttagaggaaagctcacttgttgagaatgatggtgactggctccatgagcttgctttgaataatacagttcttgagacactgaatttttacttgactgatattgccaacgtcagaatccaggaccttgaacttatagccagaaattgccccaacttaaactctgtgaaaattactgattgtgaagtattagatctggtgaacttctttcgata

SEQ ID NO: 154700 - DNA, 243 bp, Glycine max
ggactcactgtgtcgtggaaccttttgtaattgcaacacataggcaacttagttccatgcatccaatttatagattattacatcctcatttgagatataccatgcagattaattcccttgcacgtgaggcacttattagtgcaaatggggtcattgaaatttcattccttactaataaatattcaatggaattaagctctgtggcatacgatcaactttggcaatttgattcgcaagcacttc

SEQ ID NO: 154701 - DNA, 249 bp, Glycine max
tttcttcctcagtagtgtcatttacgcttctcttctctgcagcaactatgcctaaccctaaggtcttcttcgacatgaccatcggcggtcaatctgctggccgcatcgtgatggagctctacgccgacgtcactccccgcaccgccgagaacttccgcgcgctttgcaccggcgagaagggcgtagggcggagcggcaagcccctccactacaagggctcgtccttccaccgcgtgatcccgagtttca

SEQ ID NO: 154702 - DNA, 241 bp, Glycine max
attattgtaaactaatagggatgaaaaaatcttaacttgtacccctttattggcagctgaagtatccagcaccaggggctccacacttcgtacggcttctgaaggagctactcttaggatcagggtttagccatgtggatgaagataagaaacgtgggcttgaccatggtgcatgggtgccactcttgtggatgtacccagaggcagacatcccagtgtgtcaactctctatttcatcaaa

SEQ ID NO: 154703 - DNA, 242 bp, Glycine max
gcggattcatcttcggtcattttattttgtataataaaagaaagataataaagagaataatcatattaaatattaaatagaaaaaatggcccgatcatttatcaaaggccaatcttcggtagaagagaaggttcctttggaaaacttatttctatttcagtataccgggtctctttctttcatttcaaaaaatttatagaatttcgattttgaaatgaaagaaaagtgtggggataaatata

SEQ ID NO: 154704 - DNA, 243 bp, Glycine max
gtaagttcgaattgcggaagcaccattcacgataaatcatgttctagtttttatcgaggaataaaggcaagctctatttggagtcaagtgaaacatctatcttcctgtccaagttctttgaataaaagtctgaatgtgtcatctctgcactacaatatttgtgattctgaccaagttggttctatttatttgatggccatcttgcacgtcctgatcttattgtgttcaagtgacagacaaatc

SEQ ID NO: 154705 - DNA, 243 bp, Glycine max
ctttcagctgtggagtgattctggtgaagcatgcccagaaggaactgttccaatcagaagaactacagaggaggatattctcagagcaagctctatccaaagatttggaagaaaaccaagacctgtacggagagactctactggcagtggtcatgagcatgcagttgtttttgtaaatggggatcaatactatggagcaaaagctagcataaacgtgtgggcaccccgtgtaactgatgaatt

SEQ ID NO: 154706 - DNA, 240 bp, Glycine max
aaacaaacaaacaaacaaaatgtcttctccaagcaagcggcgagaaatggacttgatgaaactgatgatgagtgactacaaggtggagatgattaatgatggaatgcaagagttttatgtgcacttccatggacccaatgagagtccttatcatggaggtgtatggaaagtaagagttgagctgccagatgcttatccttataaatctccttccataggctttatcaataagatctatca

SEQ ID NO: 154707 - DNA, 240 bp, Glycine max
taagaactctactcagtagagagcaccctcatatggcagagaaatatgaacgctttctgcttgaatcttacattgaagacaataagagagttaaatggtgccccagcacacctcattgtgggaatgcaatacgggtcgaggatgatgaactgtgtgaggtagaatgttcatgtggtgtacaattttgttttagttgtttgtcagaagcacactccccttgttcatgtctgatgtgggagc

SEQ ID NO: 154708 - DNA, 238 bp, Glycine max
cccaaattcattttaatcctaattctgcacttcttgatcattcgatttttctcctcaagatgcagatattcgtaaaaactttgaccggcaagaccatcacccttgaggtggaatcctccgacaccattgacaacgtaaaagctaagattcaagacaaggaagggatcccacctgaccagcagagacttatctttgcgggtaaacaacttgaggatggtcgcacccttgccgattacaa

SEQ ID NO: 154709 - DNA, 259 bp, Glycine max
tagttaagaccgctgggcttctaggtgatggatttggttccacgcctgaaatgtgtaagaagaacctgatatgggtggtgactaagatgcaggttgtggttgataaatatcctacatggggtgatgttgttcaagtagacacgtgggtttctgcatcagggaagaatggtatgcgtcgtgattggattgtgcgtgacgccaaaactggtgaaatcttgacaagagcctccagtgtttgggtcatgatgaataaagtgac

SEQ ID NO: 154710 - DNA, 254 bp, Glycine max
agctagaagcaataagatgacaatgaaagtgcttgttttgtttgttgctacagttttggtagcatatgaatgccatggctcagactaccagaagttccctctccaaatgaaaactgggtttggtgggcaatacagcaatgaggtggcatgtgccagttggaggcttggcgtggaagcaaacaacgtagtcaagtggcaaactgttcctgcagcttgcggagagtacatagctgactacgttctaggagaccaat

SEQ ID NO: 154711 - DNA, 258 bp, Glycine max
  unsure (1)..(258): unsure at all n locations
gccatgcagatcagcacacctgaaggcaatggaagttgccagggaagcaggatgcttgctctcttatgacccaaacctgcggctacccttgtggccctccgccgaggaagcacgtcagcaaatactcagcatatgggacaaggctgatgnaatcaaggtcagtgatgtggaactggaattccnaaccggaagtgacaaaattgatgatgcatctgctctntccctgtggcaccccaatttgaagttgctccttgtcac

SEQ ID NO: 154712 - DNA, 259 bp, Glycine max
aagatggctggtattaagagaagattatgtagtgattcagatattcatgctcttcacaaagaattggacagcagttcatgtcctatctgcatggaccatccacataatgctgttctactcctttgcagctctcatgacaacggctgcagatcttacatttgtgatacaagttatagacattcaaattgcctggaccgattcaaaaaaatgagggccaattctaaggagaaccacaatttacccagttctttagtagaca

SEQ ID NO: 154713 - DNA, 266 bp, Glycine max
cacgtgtgcaagattgcctaccagctccttccaatgtagtggtgcttaccatctgaaaattttaatgaggttgtcttagatgaaaccaaagatgtcttggttgagttttatgcaccctggtgtggacattgcaaaagtcttgctcctacttacgagaaagttgccacagcatttaaattggaggaagatgtagtaattgcaaatctggatgctgataaatataaggatctggctgaaaagtatgatgtgagtggacttcctacctt

SEQ ID NO: 154714 - DNA, 260 bp, Glycine max
agtttcttttcgtgaaacaaaagaccacaacagattaggttttgtgatgtcgggcatggagaggcttcagaggatgttcgcaggtgcaggtggagcgctgggccatcccccaccggattcccccaccctcgattcctccgagcaggtctacatctcctccctcgcccttctcacaatgctcccacacggaagagctggggtacccatggaagtgatgggtctgatgttgggggagctcgtggatgagtacaccgttcgcg

SEQ ID NO: 154715 - DNA, 258 bp, Glycine max
aggagacagttgagagaatcgatcaggttatgaagagtgttctcatcaccttggatccgagaattgatgactatgttccaattctaagtccgtttttctcaaagcaaagaaagaaagccttggaggttcgtagagaacaagttgagttcttagttccaattatagaacaaagaagaagagcaatccaaaacccgggttcagatcacaccgccacaacgttttcctacctagacacactttttgatctcaaagttgaag

SEQ ID NO: 154716 - DNA, 259 bp, Glycine max
attgacacccttggacctggtgctgtaaattttatcatagatcatgcagaagtagattttgtgttcgtccaagataagaaggttaaagagctttcaaatcctgaatgtaaatcctcaaagcgactgcaagccatggtgtgcttcactacattaacagaggaagagaaagctaaagccacagcaattggaatttagccatattcgtggcatgaattcttgcacttgggaaaagcgaacccaaaaagtacttttccacctc

SEQ ID NO: 154717 - DNA, 260 bp, Glycine max
cacacacaactcgcatctcagtcagcatgtcttaatttacttggtgtcaacggtgccaacaaagaatctccgggtgcaaattctaggctacctggccaccattgtagccggttcagtcctcgccggggagctatcgctcatgtctgctattgcagctggacaaccttgttaagagccacatgaaatacaacagatctagcagggatatatctacaactgtccaatgaactggccacagtacacttaaacttgtgtcagag

SEQ ID NO: 154718 - DNA, 267 bp, Glycine max
aaaaatctctacagaaatccaccacaccaccaaaccaccaaccaaccatatggaggtgctaagggtgcaaaccatagcttccaaatccaaagatgctgccatcccagccatgtttgttagggcagagacagagcaaccaggcatcacaaccgttcaaggggtgaaccttgaggtgccaattattgattttagtgacccagatgaagggaaagtggtgcatgagattttggaggcaagtagggactggggcatgttccaaattgtgaa

SEQ ID NO: 154719 - DNA, 257 bp, Glycine max
cgagcaaaactgaaagcaaaggctaactcggagtgcaacacaaccacaatctcatcgttccaatcattatcggcacttgtttggagatgcataactcgtgcgcggcgcttgccgtatgatcaaagaacaagttgcaagttgtccgcaaacaacagaacaagaatggaaccaccactgcctcaggagtactttggaaactcaatttatacactgaatgcaggaaccgccacctcagggaaattgcttgagaatggtat

SEQ ID NO: 154720 - DNA, 261 bp, Glycine max
atctttcattaccaacgtcacaaccacaacccctttgtattctattccaattacaaatgcccttgttctctgtgtctctgtttattctcatttcacaactcatcaatcccctctctctctctcccacacgcaaaacctaagcatggctcagaaggcccacaaaaacgacactgagtttaaggtccccgaacccatcatcaacccctgcaccaccaccaccaccaccaccacctcgatttccgaaccttctagattcttcga

SEQ ID NO: 154721 - DNA, 256 bp, Glycine max
gtttgcagtcactgctttgtttagatcagaaccagatcgtgttctgttcttccattggcaaacatggcaactcaaatgagcaagaagagaaagtttgaggcggatggagtgttcttcgccgaactgaacgaggttctgacacgtgagttggcggaggacggttactccggcgtggaggttagggttacgccgatgcgcaccgagattatcatcagagccaccagaacccaagccgttctcggtgagaagggaagga

SEQ ID NO: 154722 - DNA, 255 bp, Glycine max
caatcccacacgcttcttactcatctcataacttttctgctccccgttgagaaagatttgaatccacaggaaaaataacgctaatggctccaagagacagccgagccaccgcgctcattgggcccggcccaagcctatcaccggcccacaaagagatccgctacagaggcgtcaggaaacgcccctggggccgctacgccgccgagatccgcgatcccggcaagaaaacccgcgtctggctcggcactttcgaca

SEQ ID NO: 154723 - DNA, 256 bp, Glycine max
gacggagcaaataaagcacagaatagttgaagtgaatggcataaaaatgcatgttgcagagaaaggagagggtccagtggtgttgttcctccacggcttccctgagctctggtactcatggcgccaccagattctctctctcagctccctcggctaccgcgccgtcgctcccgatctccgtggctacggtgacaccgaggcaccaccttcaatcagcagctacaactgcttccacatagtgggtgatctcgttgcg

SEQ ID NO: 154724 - DNA, 256 bp, Glycine max
agcgcaccaacagccaagactctgacttacctggcccaggagaaaaccccagaatcgagcttcgttcgggacgacgaggagcgtcccaaggttgcctacaacgaattcagcgacgagatcccagtgatttctcttgccggaatcgacgaggtggatggacgcagaagagagatttgtgagaagatcgtggaggcttgcgagaattggggtatattccaggttgttgatcacggtgtggatcaacaactcgtggccg

SEQ ID NO: 154725 - DNA, 252 bp, Glycine max
  unsure (1)..(252): unsure at all n locations
acaggcanggacgggtggtaccctcntggccacggagacgtnttcccatncattagtgaatagtggaaagcttgatgtgctatnatcacagggnaaggagtatgtgtttgttgccaattcagacaacctgggtgctgnagttgacttgaaaatctnaaatcatttgattgagcacaagaatgaatactgtatggaggtcatcccaagacattggctgacgtgaaaggtggcatctgatttcttatgaaggaa

SEQ ID NO: 154726 - DNA, 252 bp, Glycine max
taaggtaaaccaagattgaagccgcccttaccagccaatgctgggttgtatggatgtcctacccactgtcacaaatgtggaaactgttgctgtttctccaaccattctaaggcgtgggcctgaatggtttgccagttttggtaggaagaacaatgctgggacaaagttgttttgtgtgtcggggcatgtgaacaagccttgcactgttgaggaggaaatgagtactccactgaaggagttgatagagaggca

SEQ ID NO: 154727 - DNA, 254 bp, Glycine max
tactattctcctcattgcttcatttttaaacctagctccatctccctccactcaccataccaccacaaccacaagccaatgctgccaacaccaacttctgtgtaaatgttagcaacaatggctacattagtgctaatgaccccttgaactggggtgcggcggcggaggctatggctgggagccacctcgacgaggtcaagcgcatgctagaggagtaccggaggcccgtcgtcaagctcggtggagagaccctg

SEQ ID NO: 154728 - DNA, 254 bp, Glycine max
atcaactcaagtaaggattttgtctttgagaaaatcgtatcttacacccaccagcaaacactttgagtgagagaagagaaattaagagagatactcaaattagattcaaaagagatggccatcaaccatgaaacttgggctttcattttcggtcttctaggcaacgtgatctcatttatggtgttcctcgctccattaccaaattcccactacatctacaagaaaaaatctacggatgggtttcaatcactacc

SEQ ID NO: 154729 - DNA, 253 bp, Glycine max
gaaagataaagcattccatagcctcccatcaaaaatcgaagaatactatcttctctgctctctttctactttgtgccttcaccacctcatacctaccttcaaccaccgcggtggtcgataccgacggtgatattcttcagaatcctggcacatactttatcttgtccgtttttcgacccggcggcggagtagaattcgccgccactggaaacgaaacttgccctctcactgtcgtgcagactcttcgggaggg

SEQ ID NO: 154730 - DNA, 249 bp, Glycine max
ttcatcttctggttttggatcattcagcgccacacagacatacatggctcttgagtcagctcctgattcagctgacatcagaggagttcacactcatggtggaggctatgttcagtataatatctatggaaacctctttgaggtctctaggaagtatgtccctcctattcgccctgtgggacaaggagcatatggaattgtttgtgctgctgtaaatgcagagacgcatgaagaagttgccactaagaa

SEQ ID NO: 154731 - DNA, 253 bp, Glycine max
agcaaagatgacaggtgggatgtttggaaggaaggggcaaaagataaaggggacagtggtgttgatgccaaagaatgtgttggacttcaacgccataacctccgtcggaaaaggcagtgctaaggacaccgccaccgatttgttgggcaaaggcttggacgcattaggtcatgcagttgatgctctcactgccatcgctggccatagcatctctcttgcagcttatcagtgctactcagactgatggtagtgg

SEQ ID NO: 154732 - DNA, 278 bp, Glycine max
gcacgcacgctcggaactcggatcgagagaatcccacgcgaggagaaagatggaggggaacgagcaggatgtgtcgttgggagcgaacaagttccccgagagacagccgattgggacggcggcgcagagccaagacgacggcaaggactaccaggagccggcgccggcgccgctggttgacccgacggagtttacgtcatggtcgctttacagaccagggacagcagagtttgtggccacttttctgtttctctacatgaccgtcttaaccgttatgg

SEQ ID NO: 154733 - DNA, 251 bp, Glycine max
gaaaacattcttgtggggtaggtactctttggaaatgtctgctgttatttacaaggactgggttttcactgatcaagcattgcctaatgatcacaccaagagaggagttgcggttaaggatccatctgctccccatggagttcggcttttgattgaggactatccttatgcttctgatgggctagagatatgggatgccatcaagtcctgggtgcatgaatatgtctcattctactacaagtcagatgcag

SEQ ID NO: 154734 - DNA, 252 bp, Glycine max
atacagcagagcaccaagacgcacttaaaccaattgtggaaattggcttacccggacagggagcttccttcacttaaatcagacctttggaacgaaatgggatggcaaggttctgacccttcaacagattttaggggtggaggatttatttcattagagaatctcatcttctttgcgatgaagtatcctgattcattccagcgattattgcataaacaagatggaaccacagctgagtgggaatacccactt

SEQ ID NO: 154735 - DNA, 234 bp, Glycine max
ttcgacggcgacggcatgctccacgcgcttcgcatctaccatggcaacaaacccaccgctctgcagccgctacgttaaaacctacaaatacaccatggaaaacgacgccggtttccctctcatccccaacgtgttctccggcttcaactccatcgtggcctccgcggcacgtggctccctgtccgctgcacgtttcttaacggggcacttcaaccccgctacggcattggcctg

SEQ ID NO: 154736 - DNA, 246 bp, Glycine max
gccgcttgtaagctctttcgtcgagtgcgcgatcatgacaggactcgaggaagaagccccggctaactccgtgccagcagccgcggtaacacggggggggcaagtgttcttcggaatgactgggcgtaaagggcacgtaggcggtgaatcgggttgaaagtgaaagtcgccacaaactggtggaatgctgtcgaaaccaattcacttgagtgagacagaggagagtggaatttcgtgtgtaggggt

SEQ ID NO: 154737 - DNA, 255 bp, Glycine max
atgctgagacaaactgaaccggatcctgtagttgaggatgactaccagtgatgaagaaattgatgtggatgaactcgagaagaggatgtggagggacaaaatgcgtctcaagcgattgaaagaacaaaccaagtccaaggaagggactgatgcagcaaagcaaaggcaatcccaagagcaggcaaggaggaaaaagatgtcaagagcccaagatggaatactgaagtacatgctgaagatgatggaggtttgcaa

SEQ ID NO: 154738 - DNA, 249 bp, Glycine max
accatcttgtccatctatcccacaactaatttttgattttacttgtttatttatcttcttcctcccttgtttgtttgtttctttgtttctttggcttgacaagaagaagatgatgatgatggacaagggggtgttggatgatgtgataagaaggcttctggaagggaaaggagggaaacaggtgcagctctctgagtccgagatccgtcaactctgcgtcaacgccagacaaatcttcctctctcagcc

SEQ ID NO: 154739 - DNA, 249 bp, Glycine max
attagctgaaccctcacctcaatcttgcgtgctagctagctttattccaattcctacagaaccaaattattctgctagctagctagtacgtcaaataaaatacaataatcaaatatggcattcagcgggacccaacagaaatgcaaggcttgcgacaaaactgttcactttgtcgaaggttcatctgccgatggagctgcttatcacaagaactgcttcagatgcagccactgcaatggccttcttgcg

SEQ ID NO: 154740 - DNA, 251 bp, Glycine max
aatatactgatcataaatcacatagctagttgtttaaagtgagagaaaaagaaagaagaaaatggcaaactttccagttgttgacatggggaaacttaacaccgaagagagagcagcagccatggagattataaaagatgcctgtgagaactggggtttctttgagttggtgaaccatgggatatccattgagttgatggacactgtggagaggctcacaaaagagcactacaagaagactatggagcaaa

SEQ ID NO: 154741 - DNA, 250 bp, Glycine max
aacgattcaagatatttcaacaggacaacctgggacgccgtttgattacggtgccggacacgtcgatcccgtggccgctcttgatcctggtctcgtctacgatgccaacgtggacgattaccttagggtttttgtgcgcactaaactacctcgtcatttcaaatcaagcttgctgcgacgagggactatacgtgtgacccgaagaaggactacagagtggaggacttcaactacccttcttttgcggtta

SEQ ID NO: 154742 - DNA, 247 bp, Glycine max
caagaaatagagagagaacttcaagtgagggtgagagtgacacaaatctagagagagcactagtactctaaaagtctattatattcttcaaaatatgaccatgcatcgcgagtattgggcttttgtcttcggcgttatgggcaacatcatctcctttggagtgttccttgctccattgccaaccttttaccaaatctacaagaagaaatccactgaaggtttccagtcacttccttatgttgttgca

SEQ ID NO: 154743 - DNA, 221 bp, Glycine max
aaaaaaagtatcggatatctcaaaggtttatgcttcagtgaagagaaatggcagctgaggcaaatctttgatagcaaaagcagcaggtggtctttgcaggggatgacagctctcgttacaggtggttccaaaggaatcggatatgctatcgtggaggagttggcacaacttggagccactgtacacacttgcgctcgcaacgaagctgaactcaataaatc

SEQ ID NO: 154744 - DNA, 261 bp, Glycine max
acttcgatcatacacttagttgcttccaattaagatggttctgctagagaagctctgggatgatgttgtggctggccctcaacctgagcgtggccttggcaagctcagaaaactcaccaccctcaaaactattgtgaaggagaaagtagcaagctgcagaagacgttgtcgatgccgtcgacaccaacaaccccgatgactccgacgactccaacgacaccgggatcggcccgtaaagctgacaacgtttggaggagcgtc

SEQ ID NO: 154745 - DNA, 261 bp, Glycine max
catcctgatgtattcaacatgatgcttcagatcctggaagatggaagattaacagacagcaaaggaagaactgtggacttcaagaacacgcttcttataatgacatcaaatgttggaagcagtgtgattgagaaggaggccgtaaaataggatttgaccttgattatgatgagaaggatagcagttacaaccgaatcaagagcttggtgactgaggaactgaagcaatacttcaggccagagttcttgaataggttggatg

SEQ ID NO: 154746 - DNA, 257 bp, Glycine max
gtcttgatgttatcaatcaaacctggagtcccatgtttgatcttgtcaatgtgtttgaggtgtttctaccacaacttcttctgtatcccaatccatcagaccccttgaacggtgaagctgcagctttaatgatcgtgatcgagccacttatgaacaaagggttaaagagtactgtgagaagtatgctaaacctgaagacataggagctgccacagaagagaactccagtgatgaagagctaagtgaagatgaatatg

SEQ ID NO: 154747 - DNA, 258 bp, Glycine max
catttctggaacatccatgtcatgccctcatgtaagtggcttagccgcaattctcaaaggagcacaccctcagtggagccctgccgccatcaggtccgcactcatgacaacagcgtacacgagttataaaaacgtgaaacgattcaagatatttcaacaggacaacctgggacgccgtttgattacggtgccggacacgtcgatcccgtggccgctcttgatcctggtctcgtctacgatgccaacgtggacgattac

SEQ ID NO: 154748 - DNA, 261 bp, Glycine max
ctaatcttcatattcatcaaactcatcaaaatgaatctgtaccactcctccaccaccaccaccaccaccaccatcttcaccgtcatattcctcctccttgcaatattattcactctcacaccccacaaggccaacgtgccacgtgtcaccctgaggaagaagcgggcctgttgggcttcaaatccggtatccgatccgacccgtccggcctgctcagtaactggatatcgggtacggactgctgcacatggaccggagtag

SEQ ID NO: 154749 - DNA, 261 bp, Glycine max
tgcttaagcagataaaggaaatgtgaacgtgcaggaaggagccaatgatgaagtaaatgaaagacgaagaattaaaacaccagctgatacacttcccctttaccttcacataaatttctctgtgccattttattagatacaaattgatactattctgtatcaaatttcagtcagatattggctgtgtacatagggttatattattgatgcactgtatttgtattcaaattccaattccaaatggcgaacatatttgattgc

SEQ ID NO: 154750 - DNA, 258 bp, Glycine max
gatttcgattggcgagacaaaggagccgtcactaacgtcaaggaccaaggggcgtgtggttcgtgttggtctttcagtacgacgggagcgttggaaggagctcattatctggccactggtgagctcgtgagcttagcgagcaacagcttgtggattgcgatcacgtgtgtgatccagaagaatatggagcgtgtgactcaggctgtaatggtgggttgatgaacaacgcatttgagtacatacttcagtctgggggag

SEQ ID NO: 154751 - DNA, 259 bp, Glycine max
atccttttgctgagcacatagcctactttgtgttatttgccattccattatacacaactgtggttgccagaacagcttctatagcatcatatgctggttatctcgcatacattgacttcatgaacaatttggtcactgcaatttcgagtgcatcccaaaggccattttcacagcatttcccttcctaaaatatctcatgtatacaccatcgttccattcactgcatcatacccagtttcggacaaattactcactcttc

SEQ ID NO: 154752 - DNA, 259 bp, Glycine max
gataattagaggggttttctctttgagagaatcgtatcttacaacttttcgtgaccacttttagtgagggaagagaagctaagagagagactccaattagattcaagagagatggccatcagccatgaaactgggctttcattttcggtcttctaggcaacgtgatctcctttatggtgttccttgctccattaccaactttttaccaaatctacaagaaaaaatcatccgaagggtttcaatcactaccttatgttgt

SEQ ID NO: 154753 - DNA, 259 bp, Glycine max
cgcaaagtagcaaacttccctggttatggctatggagaacgccgggaatttagaagcggccatagaacaattgctgaatgcggagaagcaagcgaggctcgccggcgacgtcgccgccaccagaaacgccgtactgaaattttacggatgtgcttcgaagcgcgtgcctggaaaaccctcaatgaccagattgttctcttgtccaaacgccgtggccagcttaagcaggctgtgacagcaatggtccagcaggctatgc

SEQ ID NO: 154754 - DNA, 258 bp, Glycine max
aacactcataacacaaagcacaaagcaaagctcatccttgagttaaaaaatggcagcagcttcttccatggctctctcatccccatccttggctggcaaggccgtgaagctgggcccatcagccccagaagtggaagggtgagcatgaggaagaccgtcaccaagcaggtctcctcaggaagcccatggtacggcccagaccgagtcaagtacttgggcccattctctggcgagcccccgtcctacctaaccggtgag

SEQ ID NO: 154755 - DNA, 258 bp, Glycine max
cttcttcttctcttcttcttcaagattgcgacgacgatccaagtgatagacactcgttgcgatggaacttgtagctgaatccgagcgaactctgtacccatacgtgactggatcctctgtagtcgctatcaatacaaagatgggattctaatggccgctgacatgggaggttcgtatggatctaccctgcggtataagagtgttgagcgtatcaagcctattggaaagcattctcttcttggtgctagcggggagata

SEQ ID NO: 154756 - DNA, 112 bp, Glycine max
accttcctccagtatatcactggcagtccctcgtgagtgcggcatgcaccttttcgtttgtttcggagccgttttggcggggcgtactaaacccactacgttccacacaaca

SEQ ID NO: 154757 - DNA, 253 bp, Glycine max
tggatgtgctcctaatcgtgctacatggaacaccatgcttgctgtatgtagcgaggagggtaagcacaattatgttaacaaggtcttgagggaaatgaaaaactgtggatttgagcctgataaagacacatcaatacattgattagtgcatatgctcggtgcggatctgaagttgattctgcaaaaatgtatggggaaatggttaaatcaggctttactccatgtgtaacaacttataatgctcttctaaatg

SEQ ID NO: 154758 - DNA, 256 bp, Glycine max
ttcgatttgttgtggattggatgatggaaaaaccagcaagcccctttcattgaaagggcgcagtgaactgtaattgtgaaaaggttggaagatctggccaaagaaggtgatagccctgtagattcgttccatggttcgatccttgcccagtacaacgcggcgtgttcgaattctgatcgcttttacgcgagaaagggggaccaccctctaagcctaagtattcctcaatgaccgatagcgtacaagtaccgtgagg

SEQ ID NO: 154759 - DNA, 258 bp, Glycine max
ctcagattggtgaatctcaacccagtattttcttcacagataggtcaggacagcattataaagaatgcctgtccatggcagttgataatcttcctgttcttgatgggaagactccagtccaagtgtaccaggtttctgtgagagcttcaagtcttcattctctccattcatgggctctacaatcacgagcatttccatgggtttaggaccagatggtgagctacgttatccatctcaccactggctgccgagtaatgg

SEQ ID NO: 154760 - DNA, 255 bp, Glycine max
cttcaattcaatcttcaaggtcctctcagagttccacaagttgcttaagcttgacaggaaaaatgggttcccttccattttcatgggagtctaccctggctcattttatggaagactgttcccaaacagttcttgctctttgtccactcctccttcagtcttcagcggctttcaagggttcctccatcagtctatgctgagcacaaaaggccattgaacaaagggtgtgtttacatttgtgaatcaagccctgaa

SEQ ID NO: 154761 - DNA, 248 bp, Glycine max
  unsure (1)..(248): unsure at all n locations
acgagatttttngtcaaaatggtagtggtaagttgagtctagggcttcgcaaagtgaagccttaccttgctatattgtcccttcaatttggctactcagggatgtatatcatcactatggtttccttcagcatggaatgtgtcattggatactctcagtgtatcgtcatgtagttgccgctattataatagtcccttttgcacttgtccttgatagaaaaattagaccaaagatgactcttcccatct

SEQ ID NO: 154762 - DNA, 193 bp, Glycine max
agataggcttcacttcaacacttcaagcagccttgggctcatgagcatgagcctgttggcagtctcctagaagctgttaaggtaatcaagcctacagttttgattggatcatcaggagtgggaaaaacattacaaaggaagacattgaggctgtgacttctatcaatgaaaaacctcttgttttggccctctc

SEQ ID NO: 154763 - DNA, 255 bp, Glycine max
caaacaaccacaagtgttcttcctctgtacacaaactctattcctagttcagagtaccgtccttttaccttgcgtacacatcaatgaagaaaaaaaatggaaggagctgggtattgtgggagtttctttagaggtgcaagccttacatagccatggtttctctgcaattcggatttgcgggtatgaacataatcactaaggtttccctcaaccgtgggatgagccactatgtgcttgtggtttatagacacgcct

SEQ ID NO: 154764 - DNA, 253 bp, Glycine max
aagcagtgcaatgttgccaacaagcaccatgatcaggacccttgaattttcctccccttgtctatgatcgaggaagaaaatctgtaatatattatgcaaaaaataattaaggtcttttcctttaaatggctggttcaatgaaccgagaccactgcaggttcatggggatgggaggattaagaggctatgttttttaatcttccgatgttactgttgttttttttttaatttcaataaggatattatatatgta

SEQ ID NO: 154765 - DNA, 254 bp, Glycine max
tacagatgctgctagaagcgcttctgatattgtcctcactgaacctggtctgagtgtcattattagtgcagtgctcaccagcagggcgattttccagaggatgaagaactatactatctatgctgtgtaatcaccattcgtattgtgtttggtttcttgtttattgcgttgatctggaagtttgattttgcacccttcatggttttgattattgccatactcaatgatggtaccattatgactatatccaagga

SEQ ID NO: 154766 - DNA, 255 bp, Glycine max
ctccaaggaagtcccctaatcagaaccagagatggacaccaaacccaccgagatcagcagcggcaagatgttcggaggttacaacaagagattcaagcatttcagccttaccctgggatgctccatgaattccacatctacttccctccatctccttctccctctcacaaattccctgtgctgtactttctctctggcctcacttgcaccgacgagaacttcatattcaagtcgggtgctcagcgtgccgcttcc

SEQ ID NO: 154767 - DNA, 253 bp, Glycine max
ctttgtcaatgggtgtgatgcgtccatattgttagaccagggtggtaacatcacacaaagtgagaaaaatgcagttcctaacttcaattccgttcggggctttgatattgttgatgacatcaagagtccctcgaaagctcttgccctggagtcgtatcttgtgctgatattcttgcacttgcagcagaatcttctgtgtccttgtcaggaggtccttcatggaacgtactactcggaagaagggatggtctaa

SEQ ID NO: 154768 - DNA, 252 bp, Glycine max
gtggaaagaaggattccatgttacctcaatgactactgctggcagtcgctggggtgttgttatgtccaggaatgctgggtattctgatcaggttgtggagcttgactttttgtatcccagtgaaggatccatcgtcgatgggagaatggttaccggattacttctatggctgctactagtgatcaggcagccttcatactgagcataccaaaacgcaaattacttgatgaaactcaggagacactgcgtaca

SEQ ID NO: 154769 - DNA, 250 bp, Glycine max
caccaaagaaagaggtgaagtcaaatggtccttagttctgggagtgttgatgcttgagtcttgacggaacgaacggaaaaggggatctcaatggacaacaccaagccccttatcgaactggaactcacgatgatggcagaatcagaagaaccgggaatgtgtggactgctagcatacacattataacagtggttgtaggggcaggggtgctgtctttggcatgggttatggcacaactaggatggttagc

SEQ ID NO: 154770 - DNA, 251 bp, Glycine max
cagaaagcaagctcatcctagagttttaaaaatggcagcagcctcctccatggctctctcttccccatccttggctggcaaggccgtgaagctgggcccatcagcccccgaagtcgggagggtcagctgaggaagaccgtcaccaagcaggcctcctccggaagcccatggtacggcccagaccgcgtcaagtacttgggcccattctctggcgagcccccgtcctacctcactggcgagttcccaggtga

SEQ ID NO: 154771 - DNA, 252 bp, Glycine max
gtctcaaacctcttcgttccttcgattcattccatttcttccaaaatggccaaagacccagttcgcgttctcgtcactggagccgcagggcaaattggatatgctcttgtccctatgattgctagggagtgatgctgggtcctgaccagcccgtgatcctccacatgcttgacattcctccagcagcagagtcgttgaatggggttaaaatggaattggtggatgctgcattccctcttcttaaaggtgttg

SEQ ID NO: 154772 - DNA, 249 bp, Glycine max
catccctccaagctatggaaaaatgtggcagctcaactttctgtctcttgcagggaatgatttgagaggcttcataccaagtgagcttgggaatctcactaacctgactcatctttacttgggatatacaatcagtttgatggtggaatccctcctcagtttggtaagctgaccaatttggttcatctagacattgcaaactgtggcttgacaggtccaattcctattgagttgggaaacctctacaag

SEQ ID NO: 154773 - DNA, 248 bp, Glycine max
tatgtatcctctatctctgctccattagcaataccacttgtgtatcctaggatgatggctatccatgatcttgactcaaaggaagatgatgactctgttattcctccctttcttcctctttctagtaacacatcagtgatgatggaatatatcttcttgagaatggtcatgattgtttgatatatgttggagactctgtgaatccagacatcgtgcagaaactgtttggtgttgctacagttgacaaa

SEQ ID NO: 154774 - DNA, 253 bp, Glycine max
cttagggcttccattaccaacaccaacaccatcaccatcaccatctatggcttgctcaagcgcccaaatacacggcctcggaaccccttccttttcccgaaccctatttttaggtcagaggctaaatccaaggccgcctttatcaaggtcaagtccgcacccactcccaggaggctccgccctctcagagtcgttaatgagaaagtcgtcggtatcgatttgggaaccaccaactccgccgtggccgccatgg

SEQ ID NO: 154775 - DNA, 252 bp, Glycine max
gctccgcaattatcatgggcaaggtcaagatcggaatcaacggatttggaagaattggccgtttggtagccagagtggctctgcagagagacgatgttgaactcgttgccgttaacgaccctttcataccaccgattacatgacatacatgtttaaatacgacagtgttcatggacactggaagcatcacgatgtcaccgttaaggatgagaagacccttctcttcggtgacaagccagtcactatttttgg

SEQ ID NO: 154776 - DNA, 250 bp, Glycine max
gcaaaggagagggaccttggttacttcctcatcttcccttatatgatggtgaggatgctgcatgaccaagtttggatcacactctctcgccatcgaactgccaaaggcaaaaacagaattgttgacagggcattgagtttgaacaagttgatcgagaaagcaattgggatgaccagatcttgttcaatgggatcatattttatataggttatatgttagttccagagagttctcacatgcccttgtggag

SEQ ID NO: 154777 - DNA, 253 bp, Glycine max
gcgaagagaagagaaaaattaagatggaggggaaggagcaggatgtgtcgctgggagcgaacaagttcccggagagacagccgattgggacggcggcgcagagccaagacgacggcaaggactaccagagccggcgccggcgccactggttgacccgacggagtttacgtcatggtccttttacagagcagggatagcagagtttgtggccacttttctgtttctatacatcactgtcttaaccgtcatggga

SEQ ID NO: 154778 - DNA, 250 bp, Glycine max
gtgaccaagtactttgtcagcagtggctttgcattcatccatgcaaactctgtggctgatataatagctgttgaggccgtgccggtagaccgaattgatgtgaatctagtccagaagggtctccagagttcactcagaaactgaactcagccacaactgatttggagaaagctgaagctcagattggggttgatgtccatagcgctctcaactctgctctttcaggctaataataagtactgtagtgttg

SEQ ID NO: 154779 - DNA, 249 bp, Glycine max
gtggagctgagatcattacatcagacgctgttgtgtcattcagggcgactgtcctggagagatcatgccgcactgtgatgagcaaatcacccaacaagcacaatcgtctgtacatggaagcaagccattggaggaaggtcttgccgaggccattgacgatggcaagattggaccaagggatgaccccaagattcgctccaagatcttgtcagaagagtctggttgggacaaggatctcgccaagaaaat

SEQ ID NO: 154780 - DNA, 255 bp, Glycine max
ttctagggttgatattcttgtgcaaattcttgggtctgaggaatttgtggagcgtgatgcagtacataaggctcttatgtctttgctgaggcaggatgtaaaagcttctttgacggctttgtttaagcacttggcagtgttgatgagccaagcacggatgatgtcattcgtgagaaagttataaactttgttagagataaggttttccctatcaaagctgaattgttgaaaccccaggaggaaatggaaagacac

SEQ ID NO: 154781 - DNA, 252 bp, Glycine max
cgaatatctagatcaagatggttcactttcttgagaagagtattccattaccaaaacggaccaagatccaatctcggctccaaccctttcaattccagcacttggatgatgctggagttgattgcttgttggtccaaatagcaagcacaacattcactttggccatttcgaagagtgtgaagccaatttggcctatgagagtgtggatagcaggttatgatattggttgtgtccttaatcttctgctacttt

SEQ ID NO: 154782 - DNA, 252 bp, Glycine max
catgaaaatgggttcttctttgtggactttgtgtctaattttggcttcactagcctcttctgcattctgtgcctttccacggaggccagtggatgttccattcggcagaaactacgttcccacttggcttttgatcacatcaaatacttcaatggaggttctgagattcaacttcatcttgacaagtacactggtactggcttccagtccaaagggtcatacttgtttggtcacttcagcatgaacataaag

SEQ ID NO: 154783 - DNA, 251 bp, Glycine max
cggctcgagcggctcgagcttcgttccttcgattcgttccatttcttccaaaatggccaaagacccagttagcgttctcgtgactggagctgcagggcaaattgggtatgctcttgtccctatgattgctaggggagtgatgttgggtcctgaccagcccgtgatcctccacatgcttgacattcctccggcagcagagtcattgaatggggttaaaatggaattggtggatgctgcattccctttcttaa

SEQ ID NO: 154784 - DNA, 253 bp, Glycine max
ccctcatctccaatctgcaaatccaactaacatgggaagccagcaagccgccgtgtcgttcctgacgaacctggcccgcgccgctttcgggctgggcgcctccgcgaccctattgagctcctccctctacaccgtcgatggcgggcagcgcgccgtcctcttcgaccgtttccggggcatcctcgacgagaccgtcggcgaggggacccacttcctcatcccgtgggtccagaaaccctacatcttcgacatc

SEQ ID NO: 154785 - DNA, 258 bp, Glycine max
cggcatcagagagacagatagaaagtgcaacttcctctgttttgctcacctgtttaagccttatcataagcttagaatggcacacaaggaattttccattgccctagtgactctcattgttctctttgtcaacacgaacctccaaggtgccacggctgactatggtggtggttggcagagtgctcatgccactttctatggtgggggtgatgcttctggcacaatgggtggagcatgtgggtatggaaattgtatagc

SEQ ID NO: 154786 - DNA, 249 bp, Glycine max
aaagaaggacgatgatcatttttcaccagtggattcttacttcaccgaaaataaagatgtggtgctgagatgttctgaatctccccaagcctctttaagggaaatctctgtgaaggttcttggtcttttaggtggaggccagccaaacagctctatgataaattcagagaaggctgtgaaaactgagaatgctactgttgctgagttgcctgacttgatagacactggtgattcaaatgattaccatgg

SEQ ID NO: 154787 - DNA, 249 bp, Glycine max
tcacaaccctggctttgtagccttagtcttagcagggacggcttttgtcttagatttgaagagagccagggttgtgaatgtacgacaaaagccgctcctgctaagactaaggttacaaagccaaagcaaaaggttgaagatggtatctttggcacttctggaggatttggttttactaagcagaacgagctctttgtgggtcgtgttgctatgcttggttttgcagcatcattgttgggtgaggaataa

SEQ ID NO: 154788 - DNA, 248 bp, Glycine max
aaggaacatctttcgacgtatgcgagtaaccaccctgcgcagttcattcttgggtactgctccacctacatcttcatgcaaactttcatgatgcctgggacaatcttcatgtccctcttggctggggcgctttttggagttgtacgaggaatcctattggttgttttcaacgccactgcgggtgcatcttcctgtttctttttgtctaagttaattgggaggcctttggtttcttggttgtgcctgaa

SEQ ID NO: 154789 - DNA, 247 bp, Glycine max
atcaaaatgaatctgtaccactcctccaccaccaccaccaccaccaccatcttcaccgtcatattcctcctccttgcaatattattcactctcacaccccacaaggccaacggtgccacgtgtcaccctgaggaagaagcgggcctgttgggcttcaaatccggtatccgatccgacccgtccggcctgctcagtaactggatatcgggtacggactgctgcacatggaccggagtagaagccacta

SEQ ID NO: 154790 - DNA, 249 bp, Glycine max
gggagaattaggtttttagggtttacaccgagcagccacacctcccgcagcagccatggttctcaaaactgaactatgccgattcagtggtgccaagatctacccaggaaagggcatcatatttgttcgtggtgattctcaggttttcctgtttgcaaactcaaaatgtaagaggtatttccacaatcgcctgaagccttcaaagctcacctggactgcaatgtacagaaagcaacacaaaaggacatt

SEQ ID NO: 154791 - DNA, 249 bp, Glycine max
cagcaatgggtggggagcgcaacaaggttttcactttggccgaggtctctcagcacaacaatgccaaagactgttggcttgtcattcatggcaaggtttataatgtaacaaagtttttggaagatcaccctggtggggatgaggtcctgttgtcttccacagggaaagatgcaaccaatgattttgaggatattggtcacagcaccagtgccgtagccatgatggatgagttctatgttgagacattga

SEQ ID NO: 154792 - DNA, 226 bp, Glycine max
tagagagtgaggtcagtgagggatcggtgttcacttgatctcatcataatcggcagcgtcaattgaagaagatgccgatcagaaacatcgccgtcggaaggccttaagaggcgtctcagccgaagacgtttaaggcggctttatctgagtacatctcgagcttcatcgtcgtgttctccggctcaagcttcggcatcgccgacaacgagctcaactgcaacggcgc

SEQ ID NO: 154793 - DNA, 248 bp, Glycine max
ctaggtttgaatttgggtgtttccgtttcaatggatgacggcgagcttgatttctccaaccatgaagtgttttcgagtcccaacatgggtgagcttcccagcagcggttcaatggacagtttcttcgacgagcttctcaaggacacgcacgcctgcacccacacccacacctgtaaccctcccggccccgatttctcccacactcacacgtgctaccatgtccacaccaaaatcgtcccgcccctgag

SEQ ID NO: 154794 - DNA, 248 bp, Glycine max
cttcaggcagttcaagaacgaggataagccaatggggagggtgatgaaaggggtgcaatacttcatcccaatctttgagtggctccccacttacaatttctgcctcttttgctctgacttgatcgctggactaaccatctcaagccttgccatccctcaaggcattagctatgccaaacttgctgaccttccttccctcattggcctttattccatctttgtcccacctttgatctatgtgtttttgg

SEQ ID NO: 154795 - DNA, 243 bp, Glycine max
atcaaagtttcttctttctctgctctttgccttctctgacacatttggtgccttgtagagcgtgttttggcaggaaggtggtatggcgaaggacgttgaggttgctgagcgtggctccttctctgggaaggactaccaggaccctccaccagcaccactcattgatgctgaggagctcacaaagtggtccttttacagggctctcattgctgaattcattgccactttgctcttccctacatt

SEQ ID NO: 154796 - DNA, 244 bp, Glycine max
gttgactatgattgctcgtgttactgatggtcttcctctagctgaaggtctggatgatggtcgtgatcttaaagatgcggaattttacaaactgcaagtcaaggctttgtttaagaatctctcaagaggacattatgaagcatcaaggatgtcagttgaaactggcccttatgtttttcattatattatagaaggacgggtctgttacttgacaatgtgtgatcgtgcataccctagaaactag

SEQ ID NO: 154797 - DNA, 245 bp, Glycine max
gatatatatacgtggtaccctagagtgccattctgtagtttatttctgctcaccaaggcttatcacatcacaatttgtgcattgcctcgtgtcctttttcttctttgcttgccaaaaatcttacacacacaggtatctatcaaatgggttctcaccagcaagaaccatggctattggagaatgggaaaccgagggtgttgaccaaggagaataggcatggccgttctgcacacagatgtcctcca

SEQ ID NO: 154798 - DNA, 241 bp, Glycine max
caactgcgtcatctccggcacagtcgacttcatcttcggcacctcctccaccgtgatccagcagtccgttatcatcgtgaggaagcccctggacaaccagttcaacacagtcaccgccgacggaacatcccagaagaacatggctacaggaatcgtgatccagggttgcaacatcgtcccagaagccgaacttttccctacaaggttccaagtgaagtcataccttggaaggccaggaagc

SEQ ID NO: 154799 - DNA, 245 bp, Glycine max
ggagctcttctccattggttcttcatctgcatgcacacacttgcatagttttggaaaccaagaatttttgaagggtagcatcaacaagaagttctggaaatggagatcaccaatgtcagcgagtatgaagctattgcaaagcagaagttgccaaagatggtgtttgactactacgcatctggtgcagaggaccagtggactctgcaggagaacagaaatgccttttccagaatttttttcggcca

SEQ ID NO: 154800 - DNA, 243 bp, Glycine max
ctcagcactgccattcttcaatcacactaatggctgtcaccttctcagatcttcacaccgaagagggcatcaaatccctcgatcaattcctttctgggaaaacctatatctctggggatcaattgacaaaggatgatatcaaagtgtatgcagctgttgtggaaaagccaggagactcttttcctaatgctgctaagtggtacgatgccgtctcttctcaacttgctccaagctccctgggca

SEQ ID NO: 154801 - DNA, 242 bp, Glycine max
gagaaaaggaacatattagaaccagcaggtgcacttgcactagctggagctgaggcatactgcaagcatcatggggtccaggggaaagatattgtagtaataaccagtggagcaaacatgaattttgataaacttcgggttgtaactgaactcgctaacgttggccgtaaacaagaggctgtgctggcaactgttttgccagaggagccgggcagtttcaaacagttttgtgattggtgggg

SEQ ID NO: 154802 - DNA, 242 bp, Glycine max
ggcgaggatggcaaacacaaacagcgacaccaaagaagaaagcaaaaaaatggatgaaagagagacaatacctctcctcacctcatacaagatgggaaattttaatctatcccacaggattgtgttggcaccgttaacacgatcaaggtcttacaacttcgttcctcagccgcatgctgctctgtattattctcaaagaactactaagggtggcttcttgatcggggaagctatggtgtatc

SEQ ID NO: 154803 - DNA, 244 bp, Glycine max
gttcggattgcggcgacgtgagcggttcgctgcccgcgacgttgtgagaagtccactgaaccttatcatttggaggaaggagaagatggagagaaaaggaagaagaagaagaaggaaaagaaagggctgaaagagaagatcgaggagaaaatagagggtgatcatcatcatcacaaggatgaggacacaagtgtccctgttgagaaagttgaggttgttgaaacagcacatgctgaggaaaaga

SEQ ID NO: 154804 - DNA, 277 bp, Glycine max
aagagaaagaaatttgtttctctctaaagagtctccgctgaactttttggtttattgaagatgtcgttactctccgatcttatcaaccttaacctctccgacatcaccgataaggtgatcgagccgagtacatatgggttggtggatctggcatggatatgaggagcaaagcaaggactctctcgggactggttaatgacccttccaagcttcccaagtggaactatgatggttccagcactggtcaagctcctggacaagatagtgaagtgatctt

SEQ ID NO: 154805 - DNA, 274 bp, Glycine max
gaatgatgttggtaaaaacagggcagcagcttctgttagtaagctgcaggagctcaacaatgcagtgattgtacaaagcttgactactcagctgactaaagaacacctttccaatttccaagctgttgtttttactgatatcagtcttgagaaagcctttgagttcaatgattactgccacagtcatcagcctcctattgcctttattaaaactgaagttagaggcctttttggttctgtgttctgtgattttgggcctgagtttactgttgtt

SEQ ID NO: 154806 - DNA, 272 bp, Glycine max
gtttgttttgagtatttgtttgaatcaagaaacgatgtcactgttatgccatgtggacatacgatccataagagctgcctgaatgaaatgagagaacatttccagtatgcatgccctctctgctcaaagtcagtctgtgacatgtcaaaggtttgggagaaatttgaccttgagattgctgctacacgaatgcctgagcaatatcaaaataaaatggtttggatcctgtgcaatgactgtggtaaaacttctcacgttcagttccattttgt

SEQ ID NO: 154807 - DNA, 276 bp, Glycine max
tctatactataggtctcgcccaatacctactctccgctcccaagagcacgcaccaccactattgcacttcttcctcgttctccctctttttcttcttcttcgctaaacccttttttctatctcactaacacaacaatgggagacgagaagaagggcaagcctgctgcttccggcgtgtggtccaccatcaagcctttcgtcaatggtggagcctccggcatgctcgccacctgcgtcattcaacccatcgatatgatcaaggtgaggattcaactt

SEQ ID NO: 154808 - DNA, 270 bp, Glycine max
  unsure (1)..(270): unsure at all n locations
ggagttgcaagcatgaatgttactcttggagttcctcgtgtcaaagaaataatgaatgganacaaaaaaatcagtacaccaattatcactgctatacttgagagggatgacaatgcaaatactgcaagaattgtgaaaggtcgaatagaaaaaacaaatttaggccacgttgcaaagagtataaaagttgatatgacttcaagatcagcatcagttgttatcacccttgacatgaaaagaatccaggatgcacatctaaatatagatgct

SEQ ID NO: 154809 - DNA, 285 bp, Glycine max
tcggctcgagtgcatctttagctgagatggtgtgtgaggacctgccaaaggaagtgtgtgctttctcattagcttcatcagggaagaggtgtttgttggagaccgagaaggtggccgacggttgcgtcgagtaccaatgccggacgtcggaagtggtggtggagagaatggcagagtacatagagacagaccaatgtgtggaggcatgtggggttgataggaactctgttggaatttcatctgatgccttctttgagcctcaattcactggcaagctttgctctc

SEQ ID NO: 154810 - DNA, 273 bp, Glycine max
agacaattcaacttaagagatcaatatggccaccaccactacccagcctccctctaatatctgttttttccttctgttgttgcttctagcacactttcatttgggcataagccaacttgagctgaattactactctaaaagctgcccaaaagctgaagagatcatcaaggaacaagtcacacaactatataacaagcatggaaacactgccgtttcgtgggtcagaaatctcttccacgattgcgtggttaagtcatgcgatgcatcattact

SEQ ID NO: 154811 - DNA, 267 bp, Glycine max
gttgaaaacacaaaagataaaaaatgggttcttctctgtggacctgtctgattttgttatcacttgcttctgcttccttcgccgccaacccaagagcaccaattgatgtgccatttggcagaaactatgtgcctacctgggcctttgatcacatcaaatacctcaatggtggttctgagattcagcttcatcttgatgctgctcagtggcaaaaactctcctgggttcgccagaaatacaccatctacaactactgtgctgactgca

SEQ ID NO: 154812 - DNA, 269 bp, Glycine max
tccatcttcttctcttttcacgtcattatcctaaacttgcagattttcacatcccaagcaacatgaaggggaggttcatgtttctgtcggtgctcctttgtgccacctttcatgtctccttctccattactgacggcttagtagcaaacggcaacttcgagctgggtccgaagccctccgccctgaaaggaactgtggtgattggtggcagccactcgatcccagaatgggagatctctggcttcgtggagtacataaagtccggccag

SEQ ID NO: 154813 - DNA, 267 bp, Glycine max
gagattcttcgttacatatattaccaccagaacaaagatggaggttggggactacacatagaaggtcacagtatcatgttttgcactacactcaattatatatgcatgcgaattcttggagaaggacctaatggaggtcataacaatgcttgtgctaaagcaagaaagtggattcatgatcatggtggtgcaacacatataccttcatgggggaaattttggctttcggtacttggtatagttgattggtgtggaagcaacccaatg

SEQ ID NO: 154814 - DNA, 267 bp, Glycine max
cgttgatgctgatacaactgataggaagattcaaaagaaggtgcgagaagcacaattagcacaatacaactacatcttggttgttggagaggaggaagctaatacaggacaggtgagtgtacgagttagagacttggcagaacataaggttatgagtattgagaagctacttgaacatttcagagacaaagctgcagctttcgaatgatactttgcatgtgaaaactgtcgaagaaaattttcagccccaaataccttagttttaca

SEQ ID NO: 154815 - DNA, 269 bp, Glycine max
tgtgtcacatcgcttatttctggattccttggaatgaaaattgcaacttatgccaatgcaagaaccaccctggaggcaagaaagggtgttggaaaggctttcattacggcttttagatctggtgcagttatgggttttctccttgctgcaaatggtcttttggttctttacattgccatcaacttgttcaagatttactatggtgatgactggggtggtctttttgaggccatcactggttatggtcttggtgggtcttctatggcttt

SEQ ID NO: 154816 - DNA, 269 bp, Glycine max
gatttctctgctgaagagcttggtgccaagattaaggactatgggattgtttctcctgagactaagaactctctctctgatccctaccctttcaatttgatgtttcagacttccattggtccctccggcttcagccctggctttatgagacccgagactgcccagggcattttcgtcaattttaaggatttgtattattacaatggcaacaagcttcctttcgctgctgcgcagattggccaagcgtttaggaatgagatatctccacg

SEQ ID NO: 154817 - DNA, 264 bp, Glycine max
atcatgatcagtgtgaagcaattagagaagccagaatactgggctccattggatccaggaagaagagcagtgatagtcatctccaggcaaccaagcagcttgaacatgagcttatcaattggacattccaattctctggctggataagtgcccagaaaggttatgttagagcattgaataattggctgttgaaatgtctcctgtatgaacctgaagaaactccggatggcatagtccccttttcccctggtaggattggggctc

SEQ ID NO: 154818 - DNA, 268 bp, Glycine max
cagcaatgggtggggagcgcaacaaggttttcactttggccgaggtctctcagcacaacaatgccaaagactgttggcttgtcattcatggcaaggtttataatgtaacaaagtttttggaagatcaccctggtggggatgaggtcctgttgtcttccacagggaaagatgcaaccaatgattttgaggatattggtcacagcaccagtgccgtagccatgatggatgagttctatgttggagacattgatacatcaaccatccccag

SEQ ID NO: 154819 - DNA, 267 bp, Glycine max
cggagtgctgattccaatcctggccgttcatcacgatcaagcgatatgggggaaggatgcgaacgagttcaatccggggcggttcagagaaggggtgtcaagagcgggcaagcatccattgggcttcataccgtttggagtaggtgtgcggacatgcatcggacaaaacctggcgctgctacaaaccaaactcgcccttgcaatcatactccagcgttttactttctgcttggcccctacttatcagcacgccccaaccgtcctcat

SEQ ID NO: 154820 - DNA, 251 bp, Glycine max
tcttaacacaattaacaaagatatatcatatcatatcaactccaaatgatgaaaaatattgggttgtttcttcttgtggtggtggctacttttgtggtggcagccacagctggtagcttttaccaagactttgaaataacatggggtggtgaccgtgccaaaatctatgaaaatggaaatcttctaaccttctccctagaaagagcttctggtcctggcttcggttccaaaaaggattacttgtccggaaa

SEQ ID NO: 154821 - DNA, 265 bp, Glycine max
ctgaaatctgaagctaacttaagggaaatgagatggccaatggcaacactagtcatcgcttcaagctcttgcttttccttctaactctgcactcttcattcgctgagattttcttcgaagagagattcgaagatggatggaagagccgttgggtgctatccgattggaaaaggagtgaaggaaaagcgggtaccttcaagcacacagcaggaaaatggtctggggatcctgatgacaaaggtcttcagacatataatgacgccaa

SEQ ID NO: 154822 - DNA, 256 bp, Glycine max
agcatattgatgctcttactgacaggattggaaggaatgttgtccttgaacttgttagcactgagattgatccaaagaccaaatctgcaaagaaaagtaatgaagcagtgctgaaggattggtcaaagaagtccaatcttaaggcagagagagttaattacacggctgaattcataattgactctagttttggggagccaggagctattactgtgacaaacaaacaccagaaagagttcttcttggatagcataac

SEQ ID NO: 154823 - DNA, 262 bp, Glycine max
gggacacattgacctattaagtactgatcattcaccaactgtgcctgaactcaagcttatggaggagggtgacttcttaaaagcttgggggggcatatcatctttgcagtttaatcttccagtgacgtggtcatatgggaagaaatatggacttactctggaacaattgtctttattgtggagcaagaaacctgcaacactggcggggttagaatcaaaggggaccattgcagttggaaaccatgcagatattgtagtttgg

SEQ ID NO: 154824 - DNA, 268 bp, Glycine max
gcgattttgtttaccttccaagagatgaagcatttggtcacttgaagtcatcagattttctcgcttatggaatcaaatctgtatcccaagatgtcttgcctgtcttgactgatgcattcgatggaaatattttgagccttgagtttgataattttgctgaagtgcacaaactctatgaaggtggagttacactacctacaaactttcttagcaagatcgcccctataccagtgatcaaggaaatttttcgaactgatggcgaacagtt

SEQ ID NO: 154825 - DNA, 262 bp, Glycine max
cgaatatcttgttgtttggagcgatccgagaaaaactctgtaaacatgttggtttaccaggacctccttacaggtgatgagcttctctctgactccttccgttacaaggaaattgagaatggaatgctgtgggaagttgaggggaagtgggttgttaaaggagcagttgatgtagacattggtgcaaacccttctgctgagggtggaggagaagatgagggagttgatgatgcagctgttaaggttgttgacattgttgaca

SEQ ID NO: 154826 - DNA, 260 bp, Glycine max
cattttcttcgtagccaaacactctgaaattctcagttatgtcgtggcaagcgtatgtggatgatcacctactgtgtgaaatcgaaggtaaccacctcactcacgccgctatcatcggccaagacggaagcgtttgggctcagagcaccaacttccctcagttcaaacctgaggaaataactgccatcaataatgactttaatgagcctggatcacttgctccactggattgtatatcggtggcaccaaatacatggtca

SEQ ID NO: 154827 - DNA, 257 bp, Glycine max
cacagaaaaaatgggttcttcttcttctatgtggacggtgtgtgtgattttggcatcactggcctctgcagcactctgtgccaacccacgcaggccagtggatgtacaatttggccgaaactacgtgcccacatgggcctttgatcacatcaaatatttcaatggtggttctgacattcagcttcatcttgacaagtacactggtactggcttccagtccaaagggtcttacttgtttggtcacttcagcatgtaca

SEQ ID NO: 154828 - DNA, 260 bp, Glycine max
gtttagcaataaccaaaccctctctactcttttttcttctccttctcttcgctagggttttagcttcttcctcttcacttcgttcttcttcgcctctacaatgagcttcgactaggacacattcaacgtcgccgatctcacttctgctctcaacgaggactatagagcagaccttgtcaatgctcttaagagcaagatacagagtttggctggacaacactcggatattctagagtctctgtcgcccaatgtccgaaagc

SEQ ID NO: 154829 - DNA, 259 bp, Glycine max
ggatgatcagagattctgagacacattatggtttcaggactaagagtgatggtgatggcatttccatctttggtagcagcaatgtttggattgaccatgtttccatgagaaattgtagtgatggactcattgatgccatcatgggatccactgctattaccatctccaacagccatttcacagaccacaatgaggtgatgttgtttggtgccagtgacagttattctgatgataagatcatgcaaatcaccttggcatt

SEQ ID NO: 154830 - DNA, 260 bp, Glycine max
ctcaaaatacagaggatgattggcttgagactgagaaaaaagttatcattatccaccgtcttcatcagattcttgagcctttcatgctcaggcgtcgtgttgaagatgttgagggttcactaccaccaaaggtctctatagttttacgatgtaagatgtcagctgtccagagtgccatttatgactgggtcaaatcaactggtacccttcgtcttgatcctgagggtgagaacagtaagattcaaaagaatcctcattac

SEQ ID NO: 154831 - DNA, 266 bp, Glycine max
tccaccccgaccagaaatcaaacatgaaacccttgagactctctgtttctgaccttccaatgttgtcatgtcactacatccaaaagggcgtgttactcaccgccccgccctcctcttttgacgacttaatactttcttttaaacacactctttctatcgcgctctctcactttcccgctctcgcgggaaggtttgagaccgattccaacggttacgttaatattgtatgcaacgacgctggcgttgatattattcatgctaaagca

SEQ ID NO: 154832 - DNA, 265 bp, Glycine max
cacctagacaattggctcagaagaaaagaaaagcaaccaaaaatggttctcacatccactgccacacacccagatgaagaagaccagagcctaaactatacttttgcttccagatatgtgcgtgaacctattccaaagttcaagatgccggagaaatccataccaaaagatgctgcttatcagataataaacgatgagttgatgttggatggtgcaccaaggctcaacttggcctcgtttgtgcaaacttggatggagcctgagt

SEQ ID NO: 154833 - DNA, 259 bp, Glycine max
gcaatggaagcaatcacagagggagtgaacaacatcaacatctccgattcttacaagaagaatcgcattcaggtctccaacaccaaaaagcccctcttcttctacgtcaatctcgccaagaggtatatgcaacagcataatgaagttgagctctcagcactaggaatggctattgctacggtggttactgttgctgaaatcttgaaaaacaatgagcttgctgttgaaaagaaaatcacaacatcaacagttgacatca

SEQ ID NO: 154834 - DNA, 259 bp, Glycine max
acaacacatgggtgtgtagtagaattgcagtgaaattggaaaaatactcaaacatggagcgctatgatgacctcaaagatattggttcaggaaattttgctgtggccaagcttgttagagacaactacaccaatgagctttttgctgtcaagtttattgagagaggccagaagattgatgagcatgtccagagggaaatcatgaaccacagatcattgaagcaccccaacattattagattcgaagaggtcctgttgac

SEQ ID NO: 154835 - DNA, 254 bp, Glycine max
ctcagatcgcttattccagtgctccgcggcgcacgtgtggtgcggtgtgctgtcagatgaccatggaggagaagcctctctctgagaaccaaatgctcgtgtatgtgcctcctcatccgttgatcaagcactgggtttcagttttgaggaatgagcaaactccttgtcccatcttcagaaatgcaatggctgagttgggaaggctactaatgtatgaagcttcaagagattggttgccaactgtttctggagag

SEQ ID NO: 154836 - DNA, 258 bp, Glycine max
cgctctttcagctttgactttggtggaaactaaagactagtcaaaatggtgaagttcacagctgaagagctgcgtcgcattatggactataagcataatatccgtaatatgtctgtcattgctcatgttgatcacggaaaatcaaccctgactgattctcttgtggctgctgctggtattattgctcaagaagttgcaggtgatgtccgtatgactgatacccgtgcagatgaagctgagcgtggtattacaatcaag

SEQ ID NO: 154837 - DNA, 258 bp, Glycine max
ctcttcttctcttgcggctagggttttagcgcagttcttctagatttaaggaagatgggtaaggaaaaggttcacatcagtattgtggtcattggccatgtcgactctgggaaatccactaccactggtcacctgatttacaagcttggaggcattgacaagcgtgttattgagaggtttgagaaggaagctgctgagatgaacaagaggtctttcaagtatgcctgggtgctggacaaacttaaggctgagcgtgaa

SEQ ID NO: 154838 - DNA, 267 bp, Glycine max
gaagatgggaaggggtaaggtacagctgaagaggatagagaacaagatcaatcgccaggtaactttctccaaaaggagaagtgggttgctcaagaaagctcatgagatctctgtactctgtgatgctgaggtagctttgattgtcttctctcacaaaggaaagctctttgagtatgctactgattcatgcatggagaagatactggaacgccacgaaaggtatgcctatgcagagaggcagctagtagcaaatgattctgaaacaca

SEQ ID NO: 154839 - DNA, 251 bp, Glycine max
gtttggtcttgttaggttacctctgtgacatttgtgttgttagttcgtagttgcggctgacacccagaaagaaagaaagcaggaaaaaaacaaaaaggcgcagatgggtagcacaggtttctcatggaaattggcggatcatccaaagcttccaaagggtaagactgtggctgtggtggtgttggatggttggggagaggccacacccaatgagtacaactgcatccacaaggctgaaacaccctgcatgg

SEQ ID NO: 154840 - DNA, 248 bp, Glycine max
tcgtgatccagggttgcaacatcgtcccagaagccgaacttttccctacaaggttccaagtgaagtcataccttgtagggccatggacgcaattctcaaggacggttgtgatggaatccaccgtgggtgacttccttcaccccgaaggatggtgcccatgggccggtgaacacttcgaagacaccttgtactatgctgaatacaacaacgatggacctggtgccaacgttaacggaaggatcaagtgg

SEQ ID NO: 154841 - DNA, 251 bp, Glycine max
ctcacttgccttatttttggttttgagattgagctaaaggccaactcaaccatcgaatttgttggtgattgaaagagaaggaagaagaagcaggaaatggaagcagtgagagctggtcgagaaggagcaataggtctaggtcaaggtgatggcgtagcaaggacagcactgagactgaactcaccaaaatccgtctcctcagggcaattgttgaaacccgtgatccctcttccaaggtaaaccacactatt

SEQ ID NO: 154842 - DNA, 245 bp, Glycine max
ctcagataccaaaatggctatcaccgggtgcacaaaatatgataaggagaattcttgatcctaaccccgaaacacggataacaatggctgggattaaagaagacccatggttcaagaagggttatattccagcaaatcctgaggatgaggatgtacatgttgacaatgaagccttttcctcccatgaagaaccaaatgaagcagaacagaggaattcaggatcaccaaccctaatccgtgcattt

SEQ ID NO: 154843 - DNA, 246 bp, Glycine max
gtctcacacacccttctactctcgaaacccccaagatctcttttggtgctaaggatgttgatgtgacggaatggaaaggggccattctggcagtgggtgttacggaaaaagatttggctagagatgctaactcgaagtttgagaatgtgattttgagcaagattgactcaaagttgggtggtttattagctgaagcctcttctgaagaggatttctctggcaaagttggtcagtcaactgttctta

SEQ ID NO: 154844 - DNA, 250 bp, Glycine max
gatgggtgcagaagcaaatggcggcgagaagcaattgaaatttctgatctacggtcgcagcggttggattggtggtctactgggtaagctctgcgaagagcgcgggatccaatatgagtacggcaccggcagattggagaaccgctcgtcgttggaggcggacatagcggctgtgaagcccagccacgtgttcaacgccgcgggtgtcacgggtagacccaatgtggactggtgcgaatctcacaaagtt

SEQ ID NO: 154845 - DNA, 251 bp, Glycine max
ctatctctcaccaacttccgctacttcctactccaaccactttcttttttcccgcagtcatgggcaaggtcaagatcggaatcaacggatttggaagaattggccgtttggtggccagggtggctctgcagagagacgatgttgaactcgttgccgttaacgatcctttcattaccaccgattacatgacatacatgtttaaatacgacagtgttcacgggcactggaagcatcacgatgtcaccgttaag

SEQ ID NO: 154846 - DNA, 244 bp, Glycine max
gaagggtcaaaagaacccccatcggggagtgaaatagaacatgaaaccgtaagctcccaagcagtgggaggaggctcgggactctgaccgcgtgcctgttgaagaatgagccggcgactcataggcagtggcttggttaagggaaaccaccggagccgtagcgaaagcgagtcttcacagggcaattgtcactgcttatggacccgaacctgggtgatctatccatgaccaggatgaagcttgg

SEQ ID NO: 154847 - DNA, 242 bp, Glycine max
gaggccgctcgtcaccctgatgccaccactgtagttacaggcatagttggttgtgcaggattaaagccaacagttgcagcaattgaagcagggaaagacatagcattggccaacaaagagacaatgattgcgggagccccttttgttcttcctcttgctcacaaacataacataaaaattcttcccgctgattcggaacattctgcaatttttcagtctatccaggggttgccactgggtgc

SEQ ID NO: 154848 - DNA, 244 bp, Glycine max
accaaagctctctcatatctcatacagactacagtaatattttatttgcactactactactactttatttaagcagaagcaggcgagtgaggaagagcgaagagtgaagagaatggctcccaagggtttaacctttctggctgtgttaatatgcgtttcagcactgtcactgagtccttctgttgcgggggaagggcaaaataatggccttgttatgaacttctacaaggaatcatgccctcag

SEQ ID NO: 154849 - DNA, 245 bp, Glycine max
cttctcttgcggctagggttttagcgcacatcttctagatttacggaagatgggtaaggaaaaggttcacatcagtattgtggtcattggccatgtcgactctgggaaatccactaccactggtcacctgatttacaagcttggaggcattgacaagcgtgttattgagaggtttgagaaggaagctgctgagatgaacaagaggtctttcaagtatgcctgggtgctggacaaacttaaggctg

SEQ ID NO: 154850 - DNA, 245 bp, Glycine max
tctttccccaatttgtgagtgttactgttgaatcgattggattggcattaggttgatctgaaatacgcaattgacatggcgagcgcgatggtagaggacgcgaacttcgaagatgaccaactagccaatatgaccaccgacgacatcgtcagagcttctcgtcttctcgacaacgagattcgcatcctcaaggaagagttgcagaggaccaatttggaattggaatcgtacaaggacaagatcaa

SEQ ID NO: 154851 - DNA, 236 bp, Glycine max
gtttgttccagcgttggaaacgtgcgctcggattaaaataaccgacccgaacccgaaatgggatatggaaacaatgcccggtgctagagtcatgagtgacatggttttactcccgaacggcgacgttttgattgttaatggagcagccgtagggactgcgggctgggaattgggccgtaacccgctactgagtccgtttctttataaaccaaataatcgggtcgggtcgagatttg

SEQ ID NO: 154852 - DNA, 242 bp, Glycine max
ttctttctctcttctctctctgtccgaagatggcttcacgcaggttcgtatcttctctgattcgatcctcccttcgtagatctcaatcgaaaccctcgatttccgcatccgcatcgaggttcacgtcatccaaccgtgcctctccgcacggttacttgctgaaccgcgtcgccgaatacgctaccgcggcggcggctgctaccgctcctccctctgctccgcctccgggcaagaaggaggtt

SEQ ID NO: 154853 - DNA, 244 bp, Glycine max
atcagactagagagagtaagagtaagagaagagatggaaagagtagcatcagtatctcggccactgaaaatatacttcctcccattcttctcaccggggcacctaatccctctggtccagctggctcgcttggtggcggcacgaggccagcacgtgaccatcatcaccacccccgccaacgctcaactcttcgaccagaacatcgacaaggacaccgcctccggccaccacatccgcgtccaca

SEQ ID NO: 154854 - DNA, 241 bp, Glycine max
gaaacagacacgtggtgggttggaataaaatttgccatgtttacgacaagttctgtaggcatgttggtgcctccatagcagtggctttgtttggaagcgttgtgacagtcttgctcatttggctttcagcttacagcattcatagccgagtccccaagtagatggaaggaacatggatcatgcattctgcatatttatgcatacatcttcatttattgtttataaagttagtgtgctcagt

SEQ ID NO: 154855 - DNA, 241 bp, Glycine max
gagaaattgagtttctgagataaccacttttctctttgattcatcaatggcaaccgcgaggaccgtgaaggatgtttcgcctcacgatttcgtgaaggcttacgcctcccatctcaagcgttccggcaagatggagcttcctgagtggactgatattgtaaaaacagcaaaatttaaggaattggctccatatgatcctgactggtattatgttagggctgcctcaatggcaagaaagatt

SEQ ID NO: 154856 - DNA, 243 bp, Glycine max
ttccactccccccaatagccgctattctactcgcaagcaaatcagaacaagagaagagaatggcaggagcagaggggctaaacagagaacagtacgtgtaccttgcgaactgtcggagcaggcggagcggtacgaagagatggtggagttcatgcagaaggtggtggtggggtggacgccggcgtcggagctcacggtggaggagcgcaacctcctctcggtggcctacaagaacgtgatcgg

SEQ ID NO: 154857 - DNA, 246 bp, Glycine max
ctcgttttttctcagaaccttctgaggttaaagcaaaaaacaaagagagagagagagagaaaatgatgaagccatcgatgctcagatctctccactccgccgccacccgcggcgcctctcatctcttccgccgtgggtacgcctccgagccggtgccggagcgcaaggtagccgttctcggcgccgccggctgggatcgggcagcctctctcccttctcatgaagctcaatcccctcgtttcgagc

SEQ ID NO: 154858 - DNA, 247 bp, Glycine max
gtgctaaatccctagtaagccgccatggtgaagtactcaagggagcctgacaatccaaccaagtcttgcaaggctagaggcgccgaccttcgggttcattttaagaacactagggacactgcctttgcaatcaggaagttgcccttggttaaagctaaaaggtacttggaagatgttcttgcgcacaagcaggccattccgttcagacgtttctgtcgtggtgttggaaggacagctcaagcaaaga

SEQ ID NO: 154859 - DNA, 244 bp, Glycine max
cggtgaagaactacgaaagcaccgaccagaacttcaacaacaacaacagcataatcggaaacgcgagtgagggagcgtcggatatggctttgggtgattcgatccagccggacatcgatgaggatctccacagtcggcaactcgtcgtgtatgggcgagagaccatgcggaggctctttggttccaacgttcttgtctcctggatgcagggtcttggcgttgagattgctaagaatctcattct

SEQ ID NO: 154860 - DNA, 239 bp, Glycine max
ttctgctacttcctactccaaccgcacttctgctccgcaattatcatgggcaaggtcaagatcggaatcaacggatttggaagaattggccgtttggtagccagagtggctctgcagagagacgatgttgaactcgttgccgttaacgaccctttcatcaccaccgattacatgacatacatgtttaaatacgacagtgttcatggacactggaagcatcacgatgtcaccgttaagga

SEQ ID NO: 154861 - DNA, 239 bp, Glycine max
cacactcgttcatatatctctctgctcttctcttctcttctacctctcaagtttttgaagtataaagatggcagagacattcctattcacctcggagtcagtgaacgagggacaccctgataagctctgcgaccaaatctccgatgctgtcctcgacgcttgcctcgaacaggacccagacagcaaggttgcctgcgaaacatgcaccaagaccaacttggtcatggtcttcggagaga

SEQ ID NO: 154862 - DNA, 240 bp, Glycine max
ggagagttttgatcaggcgatacagagagatgatgtcaaggcaattgttgttacaggtgcaaagggaaaattttctggaggttttgatatttctgcatttggtggtattcaagaggcaaaagagcgtccaaaacctggttggatatcagtagaaatcatcactgatactattgaagcggctaggaaaccatcagtcgctgccattgatggccttgccttgggtggaggattagaagttgc

SEQ ID NO: 154863 - DNA, 232 bp, Glycine max
  unsure (1)..(232): unsure at all n locations
cttgcagtaatggcttcaatgaataaccaaaaagaaattgagctctttgagggccaatctcttctgtacatgcagctatatgggcacctaagacctatgtgtcttaagtgggctgttcaactaggtattccagacatcatacaaatttatgccaaacccatttctctttctgacttggtctctactcttcaaattccaccagctaacgctgtcacngtgcagcggttcatgc

SEQ ID NO: 154864 - DNA, 241 bp, Glycine max
ctccaatcctgatgatattgtgattgttgttggtgcaacaaataagccacaagaattagatgatgcagttcttaggagactggtaaagagaatatacgtacctttaccagatgaaaatgttcggaagcttctgctgaaacacaaactcaagggtcaagcattctccttactaagtagagatcttgagaggcttgtaaaggagattgaacgatattctggcagtgatctgcaagcctggtgt

SEQ ID NO: 154865 - DNA, 237 bp, Glycine max
ttcatctgcatgcacacagttgcatagttttggaaaccaagaattcctgaagaagggtagcatcaacaagcagttctgaaaatggagatcaccaatgtcagtgagtatgaggctattgcaaagcagaagttgccaaagatggcgtttgactactacgcatctggtgcagaggaccagtggactctgcaagagaacagaaatgccttttccagaattttgtttcggccacgtattctt

SEQ ID NO: 154866 - DNA, 236 bp, Glycine max
gttgatgataaataccagtactcctgtgagaacaaggtcaacactgttcatggatggatcagtgttgatgctgctgatgcaccacccgtgggtttctggatgataacgcccagcagcgagtttcgtaatgctgggcccatcaagcaggaccttacttcccatgatggccccatcaccctctcgatgtttgtgagtactcactatgctggcaaggaggtaaccatggcatttcaaga

SEQ ID NO: 154867 - DNA, 242 bp, Glycine max
caggttcagcagtgaccagaaagttttctttgacgcctttgaggcttcaatgattaagatgggtaacattggtgtgctcactgggaagaaaggagaaatcagaaaacattgtaactttgttaacaagaaatctgttgacgttgatattgctagtgtggcctcagaagaatcatcaacagagggtatggttacctcaatctaaatggattaggatgaatagttttcacttaaaatggtgtgat

SEQ ID NO: 154868 - DNA, 242 bp, Glycine max
gccagagtcgctctgcaaagagacgatgtggagctcgttgccgttaacgaccctttcattaccaccgattacatgacatacatgtttaaatacgacagtgttcacggacactggaagcatcacgatgtcaccgttaaggacgagaagacccttctcttcggtgacaagccagtcactgtttttggacacaggaaccctgaagagatcccatgggggtcaactggagctgatatcattgttga

SEQ ID NO: 154869 - DNA, 273 bp, Glycine max
atccaatttccctatctctctctgtctctatatctgtatggctgaattttgggaatagaaaaaccctaagcaaagcaaagcggtaaggatggggaacacggagaagctgatgaaccagatcatggaattgaaattcacttcgaaatcgctgcagcgtcaatcgcgtaagtgcgagaaggaggagaaatcggagaagctgaaggtgaagaaggcgatcgagaaaggcaacatggacggcgctcgaatctacgcggagaacgcgatccgtaagcg

SEQ ID NO: 154870 - DNA, 268 bp, Glycine max
  unsure (1)..(268): unsure at all n locations
gcctcatagctcctttctcatttcacacacacnaagantnntgagacatcatgaagattccaagttccaagcaactggttgtgggatttgcacttggaaatgaaggataggcaacgttggagagctgaagaggatgctttactacgcgcatatgtcaaacagtatggtcctagggaatggaatctggtgtctcagcgcatgaacacacctcttaacagggatgccaagtcatgcttagaaaggtggaagaactacctcaagcccggca

SEQ ID NO: 154871 - DNA, 264 bp, Glycine max
attcaattcctctcatggtcatgcaagctattttgggttcttggaataagacagcaggaggtggaaaacacatgggttcggagttagcacatcgaattggcatcaatgaagttgctgagagcattatggctttcaacaccaattacaaggacacgggtctttttggtgtttatgctgttgccaagcctgatagcttggatgatttgtcttatgctataatgtatgagacaaccaagttggcttatcgcgtttcagaagatgatg

SEQ ID NO: 154872 - DNA, 210 bp, Glycine max
acaaaatgatgaaggtgaggatgatgaaggaacataagacaaagaaaaaggataagaaggagaaagagaaggatcacaaaaaggaaaagaaggataaagaggagggtgagaaagaggatagcaaggttgaagtttctgttagggatattgatatagaagaaatagaaaaagaaggtgaaaaagaagataaaggaaaggatggtgggaagg

SEQ ID NO: 154873 - DNA, 270 bp, Glycine max
attcgatctcctcatctccaagaatggtgccaaacagaattcatgttacctgtgcattagtacatgagaaaatgcacaccggaaggattcacaaaggagtgtgtacaacatggatgaagaattctgtaccattggagaaaagccaggactgcagttgggctactatttttgttaggacctccaactttagactcccttctgataataaagtgcctataatcatgattggtcctggcactggattggctcctttcagaggtttcttgcagg

SEQ ID NO: 154874 - DNA, 268 bp, Glycine max
gtttcttacaagcctctactatactgcttcaccttctgctctagaaaattcagtgctgaaacatggcttcggctactctctctgtagccaaaccagcccttcaggcaaatgggaaaggcttctctgaattctctggcctccgaagctcatcaggcttccttcccttttctagaaaatcttcagaggatttccattctgtcattgccttccaaacctatgcagttggaagcagtggaggatacaagaagggtgtgacagaagcaaaact

SEQ ID NO: 154875 - DNA, 206 bp, Glycine max
ctcttcctcaccgattgctagaatggaatttcgatgctcagtcatctcttttaccattctcttctctcttgctcttgcaggagagagccatgtccatgcatcgctacctgaggaagattattgggaagctgtttggccaaacactcccattcccactgcactgcgagagcttctaaagcctctccctgcaggtgttgaaatcgatg

SEQ ID NO: 154876 - DNA, 267 bp, Glycine max
acaatggcttctgtgcctcaaccaaaaatctcccttctaaccttattcttcttctcgtccttcaccatcattgcgcatgcaattgttcctcaaaacgaaaccttcaaatttgagaactcaggtgaacttggaccctacatcgttgagtacggtgcagattacagaatgataagcatcttcaactctccattccaagttggtttctacaacaccaccccaaatgccttcactctagctttgcgtgtagggctccaacgctcggagcag

SEQ ID NO: 154877 - DNA, 267 bp, Glycine max
caaaacggcgccatgcctaccgtcagtgtggggcgggatcgctgtttgcggctctaggaaagacttacacgcaagaggaattccaagacttgtgcttcagtttcgggatcgagcttgacgacgtcacgacggagaaggcaattgtgagaaaagagaagcatttggaggaagaagaagctgatgaggacgaagaagttatctacaaaatcgaagttcctgccaacagatatgacctcctgtgccttgataggcttgctcaagccctcc

SEQ ID NO: 154878 - DNA, 265 bp, Glycine max
atttggaaacagctagcaactatggctctcatgcagcttactagctctcctgttgccttattgctccgtttcatagtaatatttgctctatgttacagaacaatggctttggtgaagttgccaccaaacgcttcatcagttccggcggttttagcgtttggagattcgatcgtggactcaggcaacaacaacaacataaaaacactgattaagtgcaacttcccaccttatggaaaagattttcagggaggatacccaactggtc

SEQ ID NO: 154879 - DNA, 261 bp, Glycine max
tggattttcaacttcaaagtttgctatcccaaagctactggattggtatttgctgaactttgcaaaagacttggagtcattgctggattggatccgtctccagttaccaagtgaattggggaaagaagcccttaaattccttgaggaaagaaaaaccgagcccttatcacaatttgtacaaattatgccatatgagttcagctttagatacttgatatgcacatagattgcctcccttttggccattgcaattttgtatac

SEQ ID NO: 154880 - DNA, 268 bp, Glycine max
aacaaaagcaaagaaccctagacagtcacagaaccattccatagaaatgtcaggtgttggccctctttctcaagattgggaacccgtcgtcctccgcaagaaggctcccactgccgccgccaagaaggatgagaaagccgtcaacgccgcccgccgctccggcgccgaaatcgaaaccctaaaaaaatataatgctgggacaaataaagcagcatctagcagcacttcattgaacactaagaggctggatgatgatactgagagtcta

SEQ ID NO: 154881 - DNA, 255 bp, Glycine max
gcagaaagcaagctcatcctagagttttaaaaatggcagcagcctcctccatggctctctcttccccatccttggctggcaaggccgtgaagctgggcccatcagcccccgaagtcgggagggtcagcatgaggaagaccgtcaccaagcaggcctcctccggaagcccatggtacggcccagaccgcgtcaagtacttgggcccattctctggcgagcccccgtcctacctcactggcgagttcccagtgacta

SEQ ID NO: 154882 - DNA, 79 bp, Glycine max
gaatttgcttgcaactcatgggtttacaacttcaggagttacaaaaagaatcgcattttctttgtcaatgatacatatc

SEQ ID NO: 154883 - DNA, 262 bp, Glycine max
gttttgtcgagctcaccggtgttcctgttgctagcactttgatgggtcttggtgcttatcccattgctgatgataattctcttcagatgcttgggatgcatgggactgtttatgctaattatgctgtggatagggctgatcttttgcttgcgtttggggtgaggtttgatgaccgtgtcaccgggaagcttgaggcttttgcgagccgggctaagattgttcacattgatattgattcagctgagattgggaagaacaagca

SEQ ID NO: 154884 - DNA, 267 bp, Glycine max
cttcttcaaaaacacacaagcacactacactttgtctctgttctgtgtgtgcgagaaatggcgatggcaatggcgcttcgcaggctttcatcttcaattgacaagcctctgcgccctctcttcaatgccggttccctctactacaagtcgtacttgcctgatgaagctgtttacgacaaggagcgacccggagttacatggccgaagcagttgaatgctccacttgaggtcgtggatcctgagattgctgatattattgagcttgag

SEQ ID NO: 154885 - DNA, 263 bp, Glycine max
ggcttgctgtggaagcacacaacatctttggctttgagaccattcctgaagagtgcgttgaagcaacaaaggaatacatccatggcgaacaatatagatcagactccaaaacagttaaccaacaagcttacttttatgccagagacctcgaagtccatcccaaggacacatttgtgttcagtatagatggcaccgtactctctaatattccatactacaaaaaacatggatatggggtggagaaatttaactcgaccttgtat

SEQ ID NO: 154886 - DNA, 263 bp, Glycine max
caaaatctgcttctcatgatgcctttgctgtattaattcatctcaaagctccacattcagggagaaaacaaaataatgatgcaaacagtactgaatcatcacctctggttgagaactctcgtgcctcagttgaccttgttacagttcttgatgtgagtggtagcatggctggtactaagctagcgttgctaaaacgagctatgggttttgtcattcagaatcttggtccatcagaccggctgtctgtcattgccttctcctcc

SEQ ID NO: 154887 - DNA, 257 bp, Glycine max
taataataaccccctttttccctctccatacccttttgctttctttatccaataataagaacttcccacgagtggctttaactggtctggtctggtctggtcggacacacaaaaatattagtatggagaaggtgagttttgtgaagaatggagagcttagattgcctccggggtttcgtttccacccgactgatgaggagctggttttgcagtactagaagcgcaaggtcttctcctgccctctgccagcctctatc

SEQ ID NO: 154888 - DNA, 254 bp, Glycine max
aattactgagggggagaaatgggagaaccctaaggatcctgatgaagtattggttaagtatgaagttcatctagaaaatggaaagcttttagcaaagtctgatggggaggagttcacagtcagagagggtcattattgtcctgcattgtcaaaggctgttaaaaccatgaagaagggagagaaagtgcttttgacagttaagccacaatatggatttggtgagaaggggaagccagaacaaggggatgaaagtg

SEQ ID NO: 154889 - DNA, 254 bp, Glycine max
cgcgactaagaggagcgtgggaacgttgaaggagggtgatttgaaagggaagagggtgttcgtgagggtcgatctgaacgtgcctttggatgacaaccttaacatcaccgatgacactagagtccgtgctgctgttcccaccatcaagtacttaactggtcatggagccaaagtgatcctttctagccacttgggacgtcctaaaggtgtaacacctaaatacagtttgaagcctcttgtgccaaggctgtctc

SEQ ID NO: 154890 - DNA, 258 bp, Glycine max
aacagggacaattggcaagcgtttggccagcatcagtgtagagaatgttgaatccaacaggtgtgctcttagggagctgcttttcaccgctcccggtgctcttaaatatctcagtggtgtcatcctctttgaggaaactctctaccagagcacagctgcaggcaagccctttgtggaagtcttgaaggaggctggtgtgcttcctggcatcaaggttgacaagggcacagttgagcttgctggcactaatggagaaac

SEQ ID NO: 154891 - DNA, 126 bp, Glycine max
  unsure (1)..(126): unsure at all n locations
ccgaatttcattttcagaagcctctttgggaatcaaatccgaagcatgatgcattangcgagcattgtctcggctccgtcctacgcgttcccttttctctctggctccgcttccacacaacatacg

SEQ ID NO: 154892 - DNA, 260 bp, Glycine max
gggagctaaggttacatggtcagagaacagtgtcactgtttctggaccaccacgagatttttctggtcgaaaagtcttgcgaggcattgatgtcaatatgaacaagatgccagatgttgccatgacacttgctgttgttgcactatttgctaatggtcccactgctataagagatgtggcaagttggagagttaaagagactgagaggatgatagcaatctgcacagaactcagaaagctaggagcaacagttgaagaag

SEQ ID NO: 154893 - DNA, 263 bp, Glycine max
ctagaagaggagaccgtgtttggcaactcgcatttggctctggcttcaagtgcaacagtgtggtttggcgcgccatgcgccgagtcaccaagccttctaggaacccttggcttgattgcatcaacagatatcctgcacctctcaacaactgaagcagaatttgacggcactagtgttatgaatcttattatcagtgagggtatggttaggatcaataagggtagtactaatttggtcttcaaaaatgttacatctgttttctg

SEQ ID NO: 154894 - DNA, 262 bp, Glycine max
atcgctcaatgcttcaccttttccgcatatgctgcaaggtttgaaatcacaaaccgatgcacatacactgtctgggctgcgtctgtgcctgttggcggtggcgtgcaattaaacccgggccagtcatggtccgtggacgtgcctgcaggaacgaaaggggcccgcgtttggtcccgaaccggctgcaacttcgacggttcgggcctctatggatgccagaccggtgactgctggggtgtcctcgactgcaaagcttacggtg

SEQ ID NO: 154895 - DNA, 263 bp, Glycine max
cacaaagcacaaagcaaagctcatccttgagttaaaaaatggcagcagcttcttcctcggctctctcatccccatccttggctggcaaggccgtgaagctgggcccatcagccccagaagtgggaagggtgagcatgaggaagaccggcaccaagcaggtctcctcaggaagcccatggtacggcccagaccgagtcaagtacttgggcccattctctggcgagcccccgtcctacctaaccggtgagttcccaggcgactac

SEQ ID NO: 154896 - DNA, 262 bp, Glycine max
  unsure (1)..(262): unsure at all n locations
ctcacagatggaaccggaaganaccnccgcngccgccgacggaagcttcgacgaggggctgctcgggctannnnnnnnnnnnnnnnnnnnnnnnnnnnnagtaaagggtccgtggtcgccggaggaggacgccattctaagccgtctggtgggcaagttcggcgcganaaattggagcctcattgcgcgcggaatcagcggaagatccggcaagtcatgccggctccggtggtgcaaccagcttgaccccgccgtcaagcgc

SEQ ID NO: 154897 - DNA, 265 bp, Glycine max
gtctcaagcaaccatggcaatggcaacccaagcctctctcttaaccccacccctctccggtctcaaagccagcgaccgcgcctccctgccatggaagcaaaactccagcctctccttctccagcccgaagcccctcaagttctccagaacaatcagagcagcagccgccgacgagaccacagaggcaccagcaaaagtagaggctgcaccggtcgggttcaccccaccagaacttgacccaaacaccccttccccgatcttcggg

SEQ ID NO: 154898 - DNA, 256 bp, Glycine max
gggccatgctcggagccttgggctgcgtcttcccggagttgctgtcccgcaacggggtgaagttcggagaagccgtgtggttcaaggccgggtcccagatcttcagcgagggtgggctcgactacttgggcaacccaagcctgatccacgcccagagcatcctcgccatctgggccacacaagttatcctaatgggtgccgttgaaggttaccgtattgctggtggccccctcggtgaggtcactgacccaatcta

SEQ ID NO: 154899 - DNA, 256 bp, Glycine max
caggacccctgcctcctcccgccgccgtcaaagccggcgcgttggctctcttctctctcctcggaatcccactcgcgattacttacagcataccctttgctctagcatcaatattctccagcacctcaggggcaggccaaggtttgtctctgggagtgctcaatcttgcaattgtcataccacagatggtggtgtctgtgataagtggaccatgggatgctctatttggaggtggtaacttgccagcgttcgtggt

SEQ ID NO: 154900 - DNA, 258 bp, Glycine max
ctttgttctttctggagggaaggacaagtgtgtggttttatggaatgttcatgatcatatttcaactttagcagtagaaacagcatccaatgttaaacagggctctaaaactgggggcaataatacaaaagctacagaaagcccttgtattgaaccaaggggcatttaccagggtcatgaggacactgttgaagacgtgcaattttgcccatcaagtgcgctggagttctgtagtgtaggtgatgattctcgccttat

SEQ ID NO: 154901 - DNA, 267 bp, Glycine max
caacgaggagttgaaaacaattgggtccaacctttggaaggaagagccaaagtgtctagaatggcttaactcaaaagaaccaaattcagtggtttatgtgaactttgggagcattatggtcatgactagtgaccaattgacagagttagcttggggacttgcaaatagtaacaaaaactttttgtgggtcattaggcccgatcttgtggcagggggaattaattgtgcgttacccaatgaatttgtgaaagagaccaaagatagagg

SEQ ID NO: 154902 - DNA, 270 bp, Glycine max
acagactacagaggcttccttggcagatcagagggagagagagagtgtgaaagttggaatggcgaaaaaggcagtgttgatcggaataaactacccaggaacaaaggcggagctgagaggatgcataaacgacgtgtggagaatgcatcgctgcctgatcgagcgatacggtttctccgaagacgacatcaccgttttgatcgacacggacgagtcctacacggagcccaccgggaagaacatccggtcagcgctgaccaggctggtccg

SEQ ID NO: 154903 - DNA, 282 bp, Glycine max
gtcatagtggtttatatatgcggtgtgactgagctgaaggaggaatttaaggggaccgtctaatggaagtcgggggaaggttgtcttactatttgatgataatcccttgtctaaaattggtgtgagatttgataaacccatacctgatggagttgatcttggtggtgcctgtgagggaggtcaaggatttttctgcaatgtcaccgatcttcgtttggaaagcagtgctgtagaagaactggacaaattacttattcattcattgtttgaggttgtttttag

SEQ ID NO: 154904 - DNA, 274 bp, Glycine max
  unsure (1)..(274): unsure at all n locations
gctcccaccacattctccaccacgacttcgactctanctatggccacccccctgttctcgccacctacacccctccctcccattgccacttcaacaccttctccaaaatcgtgctccagtggaacgccacgtgcaaaggaagacaatttgaccgcatttttggtgtgtggcttggtggggttgagcttctcagaagctgcactgcagagccaagagccactggcattgtatggagtgttgaaaaggacatcacaaggtaccgttctttgttgtt

SEQ ID NO: 154905 - DNA, 267 bp, Glycine max
ctcaccctcctcttcacacattttctgtgcgctctaacaaacattctcgttcacactttcagattgtgtgaagatgggggcgggtggccgaactgatgttcctcctgccaacaggaagtcagaggttgaccctttgaagcgggtgccatttgaaaaacctccatttagtctcagccaaatcaagaaggtcattccacctcactgtttccagcgttctgttttccgctcattctcctatgttgtttacgacctcaccatagccttctg

SEQ ID NO: 154906 - DNA, 270 bp, Glycine max
aatcaatccctcatctcattgctgagatctgcaagctggctatggactacgaaccctacgacagtagcggaactgatgatgaccttccaccaacccatcaaaagagaatttccaggggaggaggaggacgtctcgctgggaatgggagatctgctgttggttcaattccttacccaaggatgtatggtgaaattgtgaattggagacccaaattcatcagcttgagcaagaagcatacagttcagttctaagagcctttaaagctcaagc

SEQ ID NO: 154907 - DNA, 268 bp, Glycine max
gtatgcacaaggcgtacctgaagcccgatccaaggaacgagatactcgtgtcggccggtgcacttggaagcccacaacttctaatgttgagtggaattgggccggaagagcaccttaaagcccacaacatcagaataacattggatcagccattagtaggacaaggcatgtcagataaccccatgaacgccatcttcgtcccatctcctgtccccgtagagatcgctctgattgaggtggtgggcatcaccacttctggcacctacat

SEQ ID NO: 154908 - DNA, 267 bp, Glycine max
gggagtgagtcactcttcctgcagaacccagatctgtagacaatatgggaggcactggtttgctacatttgatatgccttgtcattgctttagtaagtgtgtcgcttgtgcaagcagaagatgcgtataagtatttcacatggacggtgacttatgggactctttatcccttggctagtccccagcaggttattcttatcaatggtcagtttcctgggcctagacttgacttggtaactaatgaaaatgtaattctcaaccttatca

SEQ ID NO: 154909 - DNA, 267 bp, Glycine max
ctcttatctctctcttacacaccgaagcactgctactactactactttctctctagatatgggttctggtgctgtgcaactgtttctgatcttggggctcttggctagctcatgcttagcccaagcaccaggtgctgcaccgtcacaaccacccactacaaccccatcaccaccaccacccagatcagcacctgcaccagcacccaccacaccagcaaccccaccaccagcaaccccaccaccagcagcaactccaccaccagcagc

SEQ ID NO: 154910 - DNA, 279 bp, Glycine max
aagaagtgttttctggatcaaccgttaagaagggtgagatagaagcagtggtgattgccactggagtgcacaccttttttggcaaagctgctcatctggttgatagcaccaaccaagttggtcacttccagaaagtgcttacagtaattggtaacttctgcatttgctccatcgcggttggaataatcattgagctcatagtcatgtacccaatacagcaccgcaagtacagagatgggattgacaatctgttggttctcttgattggaggaattccaa

SEQ ID NO: 154911 - DNA, 276 bp, Glycine max
acttactgctgaaattgataagctgagagctgaagttgagaaggctgaaaagagtcttgatcatgcgattcctggtgatgtgagaagagggttgaattcagttaggaagatctgcagggagtataacatttctggagttcatggtccaattattgagttgctgaattgtgatgaaaagtttttcactgctgttgaagttactgcaggaaacagcttatttcatgtggttgttgaaaatgatgacaagtcaacccagataattagacatcttaattc

SEQ ID NO: 154912 - DNA, 276 bp, Glycine max
gtaggcacaaggcgtacctgaagcccgatccaaggaacgagataatcgtttcggccggtgcacttggaagcccacaacttctaatgttgagtggaattgggccggaagagcaccttaaagcccacaacatcagaataacattggatcagccattagtaggacaaggaatgtcagataaccccatgaacgccatctttgtcccatctcctgtccccgtagagatctctctgattgaggtggtgggcatcaccacttttggcacctacattgaagctg

SEQ ID NO: 154913 - DNA, 274 bp, Glycine max
caaaggttgctgtaggtagatgtgtattgcagtagtgctaagtgctaatacgtgcagtgaacaatggattctgcatcagcatctctgctcaagtcttcacttgttcttgacaagtctgagtgggtgaagggacaaacccttcgtcaaccttctgcatcagttgtgagatgcaagctcaccaccccatcaggcctcagcatcagagctggttcctatgctgatgagctcggaaagatcgcgacaacagtggcttcaccatggaagggtatgttgg

SEQ ID NO: 154914 - DNA, 271 bp, Glycine max
cactaactaaagccgagcagcgagagagagaaaccctagcaaaaatgccggctggtcacggtttgagatcccgcaccagagattccttctctcgtcccttcaggaagaagggtaccatcgccctcaccacatacctcagaacctaccacgtcggcgattatgtcgacgtcaaggttaacggcgccgtccacaagggaatgcctcacaagttctaccatggccgcaccggtcgcgtctggaatgtcaccaaacgtgctgttggggtcgaagt

SEQ ID NO: 154915 - DNA, 269 bp, Glycine max
atcggcgcggcacccacacacacagttcgtcggaatgggaagggtgattcgcgctcagcgtaagggtgctgggtcggtgttcaagtctcacactcaccaccgcaagggtccggcgaggttccgcagcctcgacttcggcgagcgcaacggctacctcaagggcgtcgtcaccgacatcatccacgaccccggtcgcggcgcccctctcgccaaggtggcattccgccaccccttccgctacaagaagcaaacggagctcttcgtcgccg

SEQ ID NO: 154916 - DNA, 247 bp, Glycine max
ttcggctcgagtcgaatgacatcaattcgtaggtgtatgaatatgtctcatgctactacaagtcagatgtagcaattcaacaagatgccgagcttcaagcttggtggaaagaacttgtccaagtgggtcatggtgatttgaaagataagccatggtggcaaaagatgcaaactcgtgaagagttgattgaagcctcggctaccctcgtatggatcgcttcagcccttcatgcggctgttaactttgg

SEQ ID NO: 154917 - DNA, 267 bp, Glycine max
atttttgttggttcgagtgagcgagggaagatgtactctagagattcatggggtggtccgttggagataaacgcgacggactcggcaacggaggacgagcggagccggaacctgcaggacgtggacagggcggcgctgtcgcgtcccttggacgagacgcagcagagctggctcctaggccccggcgagcagaagaagaagaagtacgtcgatctcggctgcatcatcgtcagccgcaagatcttcaagtggaccctcggcaccctc

SEQ ID NO: 154918 - DNA, 278 bp, Glycine max
tgatgtgaaggaggagggagaggaggaggaggatgaagaagaggaggaggggttgaaggaagaggtggatgcaaatggggacgtgaagatgggtgagattgatgaggggcaggttcaggagttggaggagcaccgcattgagttgagtctcgggcaagataataatgttgagagggttgaagttgagaaggagcagggtggagaggagcagatgatggatgtgggttttgagcagtctaaggaggaggatatgcctggaatgtggcttttggatcaga

SEQ ID NO: 154919 - DNA, 275 bp, Glycine max
aaccttcgatcttaatcccacggggcaacgttccatctgttgaacttcttcttttatatgtactctgtgatttcgctacaccctcactccgcttcgccaccctatgggggacaacaacagcaacaacgatgccttcatgcgcaaccaaaacgccgccgttcaggcccgcaccaaagcgcagaaccgttccaacgtccttcagctcaaactcgatggacagagtcacccaaccggtctaacagcgaacctgttgaagctcttcgagcctaggcctc

SEQ ID NO: 154920 - DNA, 272 bp, Glycine max
caaagaaaaaaaaaaacccttagccaacacaaccatcatggccacctctgctattcagcaatcagcattcactggtcaaactgctctgaagcagctcaatgagttcgtccgcaagaccggtggcgccggcaaaggtcgcactaacatgcgccgcaccgtcaagagtgctcctcagagcatttggtatggccctgaccgtcccaagtacttgggtccattctcggagcagattccatcatacctgaccggagaattccctggtgactacggat

SEQ ID NO: 154921 - DNA, 270 bp, Glycine max
atcaccctcgcctccggtgcccgccacgctattctccggttaccctccgaagcttccaggttcttcaaagcacctgctaatgccgatcaaaacgatgagggcaccaggtgggccgttttagttgccggttccaatggctactggaattacaggcaccagtctgatgtttgccatgcatatcaactactgaggaaaggtggtgtgaaagaggaaaatattgttgtatttatgtatgatgacattgctttcaatgaagagaacccacggcct

SEQ ID NO: 154922 - DNA, 268 bp, Glycine max
gttcgaagtccaaaacgtgtgcagataaagtttgaggaaggcataattggcactccacagcttacggactcattagagataccggaaaatgtggaatttctgggtcaaaagattgaccttacacttttcaaaggcatccttacctctgtccaagacacagccacatcggtagtgaaaacaatgtcaagtaggcctcccttgaagatcccaatttccaacagcaatgctcagtcctggttactcttcacatacctcgacgaagaattgc

SEQ ID NO: 154923 - DNA, 267 bp, Glycine max
aaacaaagaaaaaaaaaaacccttagccaacacaaccatcatggccacctctgctattcagcaatcagcattcactggtcaaactgctctgaagcagctcaatgagttcgtccgcaagaccggtggcgccggcaaaggtcgcactaacatgcgctgcaccgtcaagagtgctcctcagagcatttggtatggccctgaccgtcccaagtacttgggtccattctcggagcagattccatcatacctgaccggagaattccctggtga

SEQ ID NO: 154924 - DNA, 262 bp, Glycine max
attaattgcaagaatggcacttcgttgcttggtgatgtccctttctgttctcttcactcttggtcttgcgagagaaagccatgccagagacgaagatttttggcatgctgtttggccaaacactcccattccaagttcattgcgagatcttctaaagcctggccctgcaagtgttgaaatcgatgatcaccctatgcaaattgaagaaacacagtacccgaaaaccttcttctataaagaagaccttcatccaggcaaaaca

SEQ ID NO: 154925 - DNA, 272 bp, Glycine max
cacagttagtacaaaaaagggttacttcatgctccacatatcttgaagaattgatcaatgggcaagtctgtagttgagaagctactttggatggcaattgtgtgcttggtgctgggtgtaatttccattactcccaaggcccaagcagcagtgacatgcaaccaggtggtgagcaacctcaccccatgcatttcttatgtgctcaatggtggcaaaaccgtgcctggcccttgctgcaatgggatcaagaccctctttaacctcgctcactc

SEQ ID NO: 154926 - DNA, 265 bp, Glycine max
gtttcaatcgaaaccaaaacaaaaacatgggcagaaaattcttcgtcggtggcaactggaaatgcaatgggaccactgaggaggtaaagaagattgttactactttgaatgaggctaaagtccctggagaagatgtcgtagaagttgttgtgagccctccttttgtgttccttcctgttgtaaaaagtttgctgcgccctgatttccatgtttcggcacaaaactgttgggttcgcaaaggtggtgcttataccggtgaggttag

SEQ ID NO: 154927 - DNA, 259 bp, Glycine max
gcgaaatcaggaagcggcggtggtggaatagaggtagccgcaactggcaaagaaagttgcgctctcactgtagtgcaatctctgaacgaggactccatggggctaccattgaagctttcaagcccatccatcactacgtctcacttcaccgaatacgcttcgttgagcatcgagttcacttcggcgccggcgccgtgttcgtccgcttcggagtggaccgttgtcaagggattacccgaaggacgcgccgttaaactta

SEQ ID NO: 154928 - DNA, 261 bp, Glycine max
aaagcaaggaagagaaagaaatttgtttctctctaaagagtctccgctgaactttttggtttcttgaagatgtcgttactctccgatcttatcaaccttaacctctccgacatcaccgataaggtgatcgccgagtacatatgggttggtggatctggcatggatatgaggagcaaagcaaggactctctcgggactggttaatgacccttccaagcttcccaagtggaactatgatggttccagcactggtcaagctcct

SEQ ID NO: 154929 - DNA, 259 bp, Glycine max
gtttgctgaagagcttgaacttgaaactcttccaccctcttaccctccccctcaccctgttcactcccccgcaccagcacctcttcacgcaccagcaaatgctcctgccccacaccaacagcagcaccagcaccaccctccagcaccagcaccagcacgagcacctgttccttcaccttctgaccacaattaccctcctacccctgctgctgctaagcctcctagtcaccaccatcagcatcaccctcctgctcctgtt

SEQ ID NO: 154930 - DNA, 261 bp, Glycine max
ctcactcgcaagcaaaaagaaagaatcccaggcgaggagaaagatggaggggaaggagcaggatgtgtcgttgggagcgaacaagttccccgagagacagccgattgggacggcggcgcagagccaagacgacggcaaggactaccaggagccggcgccggcgccgctggttgacccgacggagtttacgtcatggtcgttttacagagcagggatagcagagtttgtggccacttttctgtttctctacatcaccgtctt

SEQ ID NO: 154931 - DNA, 261 bp, Glycine max
  unsure (1)..(261): unsure at all n locations
cttcccctatggcttctcactccttgctcttagccctcctcctcatccgcggcgtggcaccgcgcgatggggtggcgcgtccgacgccgacgacatcctgatccgtcaggtggtgccagatgttggcgaaccgnaacaggaggacaacctgctgaacgccgagcaccacttcgcgagcttcaaggacaagttcgccaagacctacgccaccaaggaggagcacgatcatcgcttcggcgtcttcaagtccaacctccgcag

SEQ ID NO: 154932 - DNA, 259 bp, Glycine max
aagaatacttgttcggaaaaattgacatgcagctcaagctcgtgcctggtaactctgctggaacagtcactgcctattatttatcttctctggggcctactcatgacgaaatagacttcgagtttttgggtaacttgagtggtgatccttatactctccacacgaacgtattcagccaagggaaagggaacagagaacaacagttccatctatggttcgaccccaccaaggacttccacacatactccgtcccatggaa

SEQ ID NO: 154933 - DNA, 263 bp, Glycine max
accgatcttaacctctgagaagacgtgtcggtagctgaagcattttataagcctccactttcctgaactagttttaacatacaatctttcaagtacacctccccagcttccatttaagaatggagatcactagaataggccaatggttaagtcttctgatatgtgtactactattactgcagacagaaggggttcctgtgggaatcacttttgttgaaaatgcagtggcaaaaggggctgtttgtttggatgggagtcctcca

SEQ ID NO: 154934 - DNA, 258 bp, Glycine max
gataataatgccaaagaaagaagtcagaaaatgtcctttttcaactggtggaacagtggtttgtgtagtggaatcattctaggagtgactgtgattgtgtatgttcaagaccatgtcaattggggggttgctgatatcgtcctcacaggggtcatggctgtctcattgctcatattcttgattggaaggtcttcttatcgttacaggacaccaattgggagccccttgactcctatgttgcaagttattgttgctgct

SEQ ID NO: 154935 - DNA, 260 bp, Glycine max
ttacaaattgtcatacttgttgttggaactagaggcgacgtacaaccttttctggccattgcaaagagacttcaggagtatggtcatcatgttaggctggcaactcatgataattttaaaacatttgtgaagtcagctaatgtagatttctatcctctgggtggtgatcctcgtattttggctggatacatggcaaggaataaaggtttaatcccttctggaccggctgaaatatctgtccaaagaaagcagctgaaggc

SEQ ID NO: 154936 - DNA, 276 bp, Glycine max
attatgaagaaagtgcaagaagaaattagaggcttaagtggtacgaaagatttcttggatgaagatgatattcaaaagttttcctacttaagggcagtgataaaagagacacttagattgcacttaccagcaccactacttataccaagagaaacaaataaaaaatgcatgttagatggctcacgaaattccagccaagacattattatatgtgaatgcttgggcaattcatagagatcctaaggcttggaaagatccagaagagtttatacctga

SEQ ID NO: 154937 - DNA, 263 bp, Glycine max
cggcgggagtaactatgactctcttaaggtagccaaatgcctcgtcatctaattagtgacgcgcatgaatggattaacgagattcccactgtccctgtctactatccagcgaaaccacagccaagggaacgggcttggcggaatcagcggggaaagaagaccctgttgagcacaactctagtccgactttgtgaaataacttgagaggtgtaggataagtgggagctggaaacagcgaaagtgaaataccactacttttaacg

SEQ ID NO: 154938 - DNA, 264 bp, Glycine max
gcgttgtgaaaatattgatggattccttgctggtgtcatgagtaaaaagtcgctgtctactgatgctcatttatcaagatcatcaaaattggaggacaaggacaaagagcacaagcgcgatatggatggagctaaagagaaggaaagatacagggagaaatacatgggaaaatcaattcaagaacttgaccttagtgactgtaaacgttgcactcccagctaccgacttctgcctgcagattatccaattcctacagctagtca

SEQ ID NO: 154939 - DNA, 270 bp, Glycine max
atgctcaagcaagggataacttggagcgtgttcttgagtgcctagaccaggagaagtgtgaaacttttgaagattgtatcacttgggctcggctaaagtttgaggattattttgttaaccgggtgaagcagttgatctatacttttcctgaagatgctgcaactagtactggagctcctttctggtctgcaccaaaaagattccctcgtccactacaattctcagcctctgatttgggtcatctaaattttgtgtcgtcagcttctattt

SEQ ID NO: 154940 - DNA, 269 bp, Glycine max
gaaaccctagctagccacaatgcagatattcgtgaaaaccctaacggggaagacgataaccctagaggtagagtcttcggacacgatcgacaatgtgaaggcgaagatccaggacaaggagggcatcccgccggatcagcagcgcctgatcttcgccggaaagcagctggaggacgggcgcacccttgccgactacaacatccagaaggagtccaccctccacctcgtcctccgcctccgcggcggcgccaagaagcgcaagaagaaga

SEQ ID NO: 154941 - DNA, 267 bp, Glycine max
agctcatggagattactgctttcttcaaataactagaagtggtattggtgcttatgatgatgatggacatgtcactaggactgggtatttgcagaatgctgtagctcatatcattactgctgttattggttctggtgttctttctcttgcatggagcacttcccaattaggatggattggagggccattttccttgccttgttgtgcaattgtcacctatatgtcttcattcctcctgactgactgctacagaactcctgatcctgt

SEQ ID NO: 154942 - DNA, 275 bp, Glycine max
ctctaattctcttagccattattgttatgatttcaataccatcaagccactgcagtatattgcttccagaaaatgaaaagcttatagagaacacttgcaggaagacccccaactacaacgtttgcctttagtctctgaaggcaagccctgggagctccagtgctgacgtcacagggctagctcaaatcatggtgaaagagatgaaggcaaaagcaaactatgcattgaagagaatccaggagctgcagagggtgggagcagggcctaataagcaa

SEQ ID NO: 154943 - DNA, 271 bp, Glycine max
aattagttcattctctttgcgcagttccctacctctcctttcaagatgcagatcttcgtcaagaccctcaccggaaagaccatcacccttgaggtggaaagctctgacaccatcgacaacgtcaaggccaagatccaggacaaggaaggaattcccccggatcagcaacgtctcatcttcgccggaaagcagctcgaggacggccgtaccctcgccgactacaacatccagaaggagtcaacccttcaccttgtccttcgtctccgtggtg

SEQ ID NO: 154944 - DNA, 271 bp, Glycine max
cgggcttcacaacaatgaaaggcttccaatccgatttatcctccgccgttcgcctcaacattggaggcaagaaattttgcaccaccaccgatactctcactcagcgcgaacccgattcaatgcttgccgctatgttcagtggccgccacacgctgtgccaagatcctgacaaggggtatgtgtttgttgatagggatggtaaacactttcggcacattctcaattggttaagggatggtgtggtgcctactctcgaggagtctcagtactc

SEQ ID NO: 154945 - DNA, 282 bp, Glycine max
attatgaagaaagtgcaagaagaaattagaggcttaagtggtaagaaagatttcttggatgaagatgatattcaaaagttttcctacttaagggcagtgataaaagagacacttagattgcacttaccagcaccactacttataccaagagaaacaaataaaaaatgcatgttagatggctacgaaattccagccaagacattattatatgtgaatgcttgggcaattcatagagatcctaaggcttggaaagatccagaagagtttatacctgagaggttt

SEQ ID NO: 154946 - DNA, 282 bp, Glycine max
ctcgagctctacgaaccccgcggactacaagcttctagaagaagttggttatggagccaccggcaccgtctacagagcgatctatctccccttcaaccaactggtggccatcaagtcctttaatctcgatcgctgcaacgtcaatctcgacgacctgcgcagggaggcccaaaccatgagcctcatcgaccaccccaacgtggtgagggcgctctgcttcttcgccgtggaccggagcctctgggtggtcatgcccttcatggaccagggctcctgcctcca

SEQ ID NO: 154947 - DNA, 264 bp, Glycine max
cagctattgaggaaatggcagggatggatgtcctatgcagtgacaaaactgggactctcaccttaaataagttgagtgttgacaggaacttgattgaggtgtttgctaagggtgttgagaaagagtatgttatccttcttgcagcaagagcttctaggactgaaaatcaagatgccatagatgctgcaattgttggcatgcttgctgacccaaaggaggcacgtagtggtgttagggaggtacatttccttccattcaatcctg

SEQ ID NO: 154948 - DNA, 262 bp, Glycine max
ctttatttacaacaacaatggcttctgtgcctcaaccaaaaatctcccttctaaccttattcttcttctcgtccttcaccatcattgcgcatgcaattgttcctcaaaacgaaaccttcaaatttgagaactcaggtgaacttggaccctacatcgttgagtacggtgcagatacaagaatgataagcatcttcaactctccattccaagttggtttctacaacaccaccccaaatgccttcactctagctttgcgtgtagg

SEQ ID NO: 154949 - DNA, 258 bp, Glycine max
attttcccaaaaatgagaaatatttgcctttgtttaccgccggtgatgattcggagatagttgacaggagaaatgggctgcgcaaacagattgaagataggttgattgcagctgctgcaagtggcaaggatttagaagagactggcagtgaggatgatggtcttttggatctgagtgatgatgattttttccttgctgggagttctagtgacgaagcagatgcggatgatgaatggacagacaaaagtgcaagagagc

SEQ ID NO: 154950 - DNA, 263 bp, Glycine max
caccaccgcaatgtttgcattatacctgtctcagcacacggaacaaatcctgctagtgcagctatgtgtggaatgaaaattgtctctgttggaactgatgccaagggaaacattaatatagaagagctgaggaaggctgctgaaacacacaaggataacttatctgcacttatggtaacatatccttcaacccacggtgtttatgaggaaggtattgacgaaatttgcaatattattcatgataatggaggccaagtatatat

SEQ ID NO: 154951 - DNA, 264 bp, Glycine max
taggcgcttcacaagatcctagagtctgagatcaaaggagactttgagaaagccgtgtaccgatggatactggaacctgcagatcgtgatgctgttttggccaatgttgccatcaagagtggcaaaaactacaatgtcatagtcgcaatttccacaatgacattgtagaaattgccactatcctctccccggaagagcttttggcggttagacgcgcctatctcaaccgctacaagcactccttggaagaagatgttgcagctc

SEQ ID NO: 154952 - DNA, 265 bp, Glycine max
gttaccctttcttttcttttttcttttttctctttcctcattctacttaaaactcccaccagtgatggcaggtttggctccagagggaacacaattcgatggtcgccaatatgatgctaagatgagtgaattgctttccactgatgggcaagatttcttcacctcttatgatgaagtgtatgacagctttgatgcaatgggattgcaagagaatcttctgcgaggcatatatgcttatggttttgagaggccttctgctatacag

SEQ ID NO: 154953 - DNA, 267 bp, Glycine max
catacctctataataacaaaacaacacttggagactaacttgggtgggctcaccgttgagcaggctatccagagcaagaagttgttcatcttagatcaccatgactatctcattccatatttgaggaaaataaatgcaactaccacaaagacttacgctcaaagaaccatatttttcttgaaaagtgatggaaccttgacgccattggccattgagttaagtaagccgcatcctcagggtgaaggatatggtcctgttagcgaatct

SEQ ID NO: 154954 - DNA, 275 bp, Glycine max
ctcttcctcaccgattgctagaatggaatttcgatgctcagtcatctcttttaccattctcttctctcttgctcttgcaggagagagccatgtccatgcatcgctacctgaggaagattattgggaagctgtttggccaaacactcccattcccactgcactgcgagagcttctaaagcctctccctgcaggtgttgctatcgatgaactccctaagcaaattgatgatacacagtacccaaaaacattcttctataaagaagaccttcatccag

SEQ ID NO: 154955 - DNA, 260 bp, Glycine max
cgatatcactatcaggcattttggaagttaagccagtggacattactcacacagaccaaataaaggaataccaacatggcacattggtctcagcaaacagcattggtgtttaccatgaccatttctacatattccatcttgattttgacattgatggtgtggaaaattcctttgtgaagaccagtctcaagactctacaagtcacagacaacagttccaagagaaagagctattggacaactagtaatgaagttgttaag

SEQ ID NO: 154956 - DNA, 262 bp, Glycine max
atgatcatatattcattcagttctatacaaaatcctcaaaaactcttcctctctgccatgaccatggaatacagaaccttagaactcaacatcatatccgcaaaggacatcaagaatgttaatctcttctccaagatggacgtatacgccgccgtttcgctctccggtgaccctctccaccctcagggcgccaccacccacgtccacaaagacgccggcagcaaccccacgtggaactaccccgtgaaattctctgtcaacg

SEQ ID NO: 154957 - DNA, 261 bp, Glycine max
tgaaagtgagtatgctgcctggaccctagtcaacgggtatgcactaaaccatgttattatatccactcatcggctgaaaactcatttgaaggagataaaaaaactaaatcagtttattaaggatagtggattcagattgaattctgaaggaggagtgctgaaagtgagccctgatggtcttctccagcaaagctcaactgtagcagattcaatttctttcaaattttctgatggtataactgaatcagttccatgctcata

SEQ ID NO: 154958 - DNA, 269 bp, Glycine max
ccgggcaatgggttttctccccagaaatcccaaccgatgttattgttgcagttggagaatccactttttctctccataagtttattctggcggctaagagtaactacatcagaaaagtgataatggaatcagaggagagtgacctaacaagaatagagatttccaacatacctggaggacaagaagcttttgagaaagccgcgaaattctgttacggcgttaacttcgagatcaccgttcacaacgtggcggcgctgcactgcgccgcc

SEQ ID NO: 154959 - DNA, 259 bp, Glycine max
atcttaaggtatctcaagggtaccttgtctcatggtttacttcttcagcctgcttctactgtgaaacccttggctttttatgcattctgtgatgctaattgggcatctgatgtggatgataggtgttccacctcaggggctgccttctttcttggcccaaacttgatatgcatggtggtctcgcaaggagaaggtgacagccaggtccaatactgaagctgaatatctcagcttggctcaaacttctactaaattgaca

SEQ ID NO: 154960 - DNA, 260 bp, Glycine max
cgacgtcatccagggctccactgccatcaccatctcagattgccacatgaccaaacataacgatgtcatgctgtttggtgctagtgactcatacagcggagacaagataatgcagataacagtggcattcaaccacttcgggcaaggactggttcagaggatgccaaggtgcagatggggtagcgtgcatgtcctcaacaatgactacacccactggatgatgtacgcaattggtggaagctcagggccaacaattctga

SEQ ID NO: 154961 - DNA, 261 bp, Glycine max
caccacaattcacaaccgaaacagtttccatctctctcacaaaatgacaacaatatcaaattgctcccttctcttcctcttcctcttcctctccaccctccacatagcttccaccctctcaacccccaccaacttcatcaagtcctcctgcagcaccacccagtacccagccctctgcatccagtccctctccgtctacgcctccaccatccagcaagacccccacgagctcgtccagacagccctctccctctccctcaa

SEQ ID NO: 154962 - DNA, 262 bp, Glycine max
cttaacaacagcacaaagcgggttactgtctgttcaagctaccatctctctctctctttcttagtgcctccttgccagaagttaaaatggcccaagaaactttcctattcacatctgaatcagtgaacgaggggcaccctgacaagctctgcgaccagatctccgatgctgtgctcgatgcatgcttggagcaggaccctgacagcaaggttgcctgtgaaacctgcaccaagaccaacatggtgatggttttcggagagat

SEQ ID NO: 154963 - DNA, 267 bp, Glycine max
gaagaagatgccgatcagaaacatcgacgtcggaaggcctgaagaggcgactcaccccgacacgttgaaggcggctttggctgatctcatctcaaccttcatcttcgtgttcgccggctcaggctccggcatcgcctacaacaagctcaccgacaacggtgctgccacccctgccggcctcatctccgcctccatcgcccatgcattcgccctcttcgtcgccgtctccgtcggcgccaacatctccggcggccacgtcaaccccgc

SEQ ID NO: 154964 - DNA, 275 bp, Glycine max
agctcgaccgaatcggctcgaggcataatcaaatcaaccatggcacacccttattgctcccaccaccttttcacctggtttacgatgctgaagctcttagaaaagctttccaaggatgggggaccgatgagaaaaccgttattgcaatactgggtcatagaaatgttcatcagatgcaacttatcagaaaggtttatgaggaaatttaccaagaggacctcattaaacgcctggagtctgagctctctggtgactttgagagagctgtgtaccgt

SEQ ID NO: 154965 - DNA, 268 bp, Glycine max
gtgtacagttacggtattgttttacttgagttgctaactggaaggaaagctgttgacaatgaatccaacctccaccatctgattttgtccaaggcagcaaccaatgcagtgatggaaacagttgatccagacattactgccacatgcaaggacctaggagctgtaaaaaaggtttatcagcttgctctattatgcacaaagaggcagccagctgataggccgacaatgcacgaagtgacacgtgtactcggaagccttgtgctgtcaa

SEQ ID NO: 154966 - DNA, 264 bp, Glycine max
tccatacatagccacttctaactcactcactcttgttgccttcatggccaagccagtgtccattgaggtatggaacccaagtggccaatacagagttgtcagcaccaaaccaatgcctggaactcgttggatcaatcttctcattcaaaatgatgttcgccttgaaatatgtaccgagaagaaaacgattttgtcagttgaagacatcattgctttgattggtgataagtgcgatggagttattggacagttgactgaagactg

SEQ ID NO: 154967 - DNA, 255 bp, Glycine max
cccaatcttctctccacgcccttcttgggtaaccgtctgaagtgcagcaatggcagatggattgcattcgcagcatccatcggtagttcagaagttatctggacagtcttatcttgtgtccaggcttgctcctaatcactccagaaactgttctaccactggtagtatattcaatggaggtttgcagtcttcaggtttggttccagtcacggcacacgcgccggctgagaaaggggtgtctggatttttgttgga

SEQ ID NO: 154968 - DNA, 256 bp, Glycine max
ctggcagccaacatctatagtcagttacaaccatctgggaaacaatgatggtatgaatctttcggctccacaaactttccgttccaaggtaatctccaagagcaacgttgttgatgatatggtcaacagcaatgccatcctctatgagcctggtgaacatccagaccatgttgttgttattaaggtaaattttgtttcacccatttttctgtttctttctcttgtcagggctttgattattctatctgctttgttg

SEQ ID NO: 154969 - DNA, 266 bp, Glycine max
ctctggcaaagcacctgttagaccaaaagttcatttatcatgtagcccgggacagaaaatctcatcaatcaaatttgctagctttggtactccagcaggttcttgtggaaacttccatgaaggaagctgtcatgctcacaagtcttatgatgcctttgaaaggaattgtgttggacagaactggtgcacagtaacagtgtcacctgaaaattttggaggagatccatgtccaaatgtcttgaagaaactctcagtggaagctattt

SEQ ID NO: 154970 - DNA, 259 bp, Glycine max
cctgtattaatttttctctccctgagattaccaagctctgcaactttgcttctcaacatggagtatcgtctcctacccatttttactttactcaatcttgcactggtggcaatccatgctgctttacctcctgaagtttactggaagtcggtgcttcctactacgccaatgccaaaagccatcactgatatcctttaccccgattgggtggaagagaaaagtacctcagtgaatgttggaggcaagggcgtaaacgtgc

SEQ ID NO: 154971 - DNA, 260 bp, Glycine max
aaaatatggacaaaaaatggctaaggggaatccatgccctcgagcataatacagatgcactatggcagttggttgcccagttcgcaaacaagttcaacgttgtgctgatgatagaacaattttggtgacaacatatgaaggcacacataaccatccactgccaccagctgcagtggttgatgccatggccatagcagcaggtggcagtggatggttatggcatcaaccactgcagctgctgctaccatgttgctgtctgg

SEQ ID NO: 154972 - DNA, 257 bp, Glycine max
gttgacagagatgatcagggcactctgcttcagattttcaccaagcctgttggggacaggccaacgatattcatagagataattcagaggatcgggtgcatggtggaggatgaggaagggaaggtgtaccagaagggtgcatgtgggggttttgggaaaggcaatttttctgagcttttcaaatccattgaagaatatgagaagactttggaagctaaaagaaccgcgtaagcacattggaagaacacaaatactcc

SEQ ID NO: 154973 - DNA, 255 bp, Glycine max
gcgagcccccgtcctacctcactggcgagttcccaggtgactacggctgggacactgctgggctttcggccgacccagaaaccttcgccagaaaccgtgagctcgaagtgatccactccaggtgggccatgctcagggccttgggctgcgtcttccccgaactgttgtcccgcaacggggtcaagtttggagaagctgtgtggttcaaggccgggtcccagatcttcagcgagggtgggctggactacttgggca

SEQ ID NO: 154974 - DNA, 252 bp, Glycine max
gaaagacttactagagtttttacacaaaaaattcatgatttgattggaactcacacagatgtgccagcacctgatatgggaacaggaccacaggatcttggtggatctctcggtagagacgcggctacaggacgaggagtcctctttgcaacagaggctttgcttaatgagtatgggaagagtgtatctggacaacggtttgtcatacagggttttggaaatgtagggtcatgggctgcccaattaattagt

SEQ ID NO: 154975 - DNA, 254 bp, Glycine max
tactactcacactcactgcagatctcaatccatggctaccattgttagcatcaaggccagccagatctttgacagtcgtggcaatccaaccgtcgaggtggatttgacatgctccgatggtacttttgctagagctgctgttccaagtggtgcatccactgggatttatgaggcccttgaattgagagatggaggatctgactaccttggaaagggtgtatcaaaggctgttgacaatgtgaacaccattattg

SEQ ID NO: 154976 - DNA, 250 bp, Glycine max
agaagagtagcctgagccagtaccagaaccaccaaaattggttcgtatggcaaatttgtgtgttgtgggtggtcatgcagtgaatggggttgcagagatacatagtgaaatagtaaaagatgatgttttcaatgcattttataagtagtggcccgagaagttccaaaacaaaacaaatggtatgacaccaaggagatggatcaggttctgcaatccagatctgagtaaaataataaccgagtggataggt

SEQ ID NO: 154977 - DNA, 254 bp, Glycine max
cttcaattcattctagttctggattccgactagccgcgttgactcggttccgttattcattctcgcggatctaatattaaggaatagcttaagggcacattacaatgaaggcattgattctggttgggggatttggaacaaggctgaggccactgacactcagtttccctaagcctcttgttgattttgctaacaagcctatgattttgcatcagatagaagcccttaaggccattggagtgactgaggtagtg

SEQ ID NO: 154978 - DNA, 256 bp, Glycine max
ctcttctggatgaattgcttgttgtcatttcttttgatggatcttatgtcaattacagacatttggctattatttgtgataccatgacttatcgagggcatttgatggcaattacacgtctaggtatcaaacgtaatgatactgggccaatgatgagatgctcatttgaagaaacagttgatattctgcttgatgccgcagtatatgctgagcatgattacttgaggggagtcactgaaaacataatgttaggtca

SEQ ID NO: 154979 - DNA, 258 bp, Glycine max
caagcaccgcgcgcaggagtatgtcagccacgacaacgcagcagcgcttctggctgctggccttgctcgcacctttgacagaatgccttatctgctgtctctgtcttcctttgtggctgacgatgttgccgctgctgttcctgctgctcaagatctgggggagcagtggtcttattaatggatgtgcttcaattcaaatagtctcgcactagtcatcattccctttgtttctgttgcttgcttggttgttcttcttct

SEQ ID NO: 154980 - DNA, 256 bp, Glycine max
gtttctcctcgttgttcttcgctttcctgttttcaatttcgattctttcgttaatttaataagatgtttgggagggcaccgcagaagagcgataatatgaggtactacgaaatcctcggcgtctccaagaacgcttcgcaggatgatctgaagaaggcttacaagaaagccgccattaagaatcaccccgacaagggcggtgatcccgagaagtttaataagctggcgcaacttatgaggttctgagtgaccctga

SEQ ID NO: 154981 - DNA, 254 bp, Glycine max
gagctattgggagctaggaaggcataccattccctctttgaccactccattgaagaagatgttgcctctcacatccatggcattgaaagaaagctattggttgccctactaagtgcctatagatacgaaggaacaaaggttaaagatgacactgcaaaatcagaagccaaaatcctttccaatgcaattaagaatgctcataagaagcctattaatgaggatgatgaagtgataaggatattggcaacaagaag

SEQ ID NO: 154982 - DNA, 249 bp, Glycine max
gtttcgggtacggaaaaggtttggaaaatgtttcaagctatcggtgacattgcctttgcttatgctttttctaatgtcctaattgagatccaggacacactgaaatcaagcccacctgagaacaaagtcatgaagagagcaagtttgattggcattatgactacaacattgttttatgtactatgtgggtgcttaggctatgctgcatttggaaatgatgcaccatctaatttcctcacaggattcggc

SEQ ID NO: 154983 - DNA, 251 bp, Glycine max
ggccttctaattggaggaaaaagaggattcattttcatgactttatgttgaatgtacatagcatgctacaaaagcataaggggttgtcagatccacttgatgtggttgcaggagagatttctgatgatgcaattttattatgtcttgacgaatttatggtaacagatgtagcagatgcattggtactaaatcgcttgtttagacatttgttcaacaaaggcatacatctagtggccacatcaaatcgtgct

SEQ ID NO: 154984 - DNA, 258 bp, Glycine max
  unsure (1)..(258): unsure at all n locations
accgaggccaatcaagcaaaggttaaggagattttgtctcactatccacacaacatacgattctcngntacaattcctcntttagatcttgtccagnagnagnatgaattttggctacctgtttctgcaatggatgcggtagctaagattgtagaggttcctcccatacgggtgtatgaggttgccacattttactccatgttcaatcgagctacggttgggaagtaccatctgttggtttgtggaacaacaccttgt

SEQ ID NO: 154985 - DNA, 249 bp, Glycine max
cgagtacagcggcaagtaccaggctgcgggtgaattgggtcacgttaaggatctcataaaatgggggaccgattaccttctcaagaacttcaacagcaccgccgacaccatcacccagctgggcatgcaggttggatccggggacacctcccaagggagcgccactcccaacgaccactactgctggatgcgtcccgaggacatcgactacgaccgccccacccagacctgcaccacatgctccgattt

SEQ ID NO: 154986 - DNA, 253 bp, Glycine max
ctctaataagggttcctctttccttctctagcacaatttacaatctcaatggctggaatttgctgtggtgttgttggagaaggtgacactccggctccactcaagcccactcctcgcccctccaggcgccggagtttggacatcttacctttaaaatatatcgccgacatgcccatgccgccgccggaggctttacggaagcgtcccaagctcaacctcagggactgcgataacgcaattgaaaattgcgacg

SEQ ID NO: 154987 - DNA, 256 bp, Glycine max
gttccagatgatgaagacagagaattgttgcaggaaatcataaacaattctaagttaagtgaaggatatctcacccttgctcgtgatattgaagtcatggagcccaagtcccctgaggatatatacaaggcacatttgcttgatggccgggctagtgctggtgcaagtgttgattcagctagacagaaccttgctgcaacttttgttaatgcatttgtaaatgctggctttggtcaggataaattaatgactgttc

SEQ ID NO: 154988 - DNA, 256 bp, Glycine max
ctctattttgcgttcattctgttttccagttgaagtctttccctagccaatggccactgatcgtttgacccgggttcacagtctccgtgagaggcttgatgaaaccctcactgccaacaggaacgaaattttggcccttctgtcaaggatcgaagctaagggcaaggggatcctgcaacaccaccaggtcattgctgagtttgaggaaatccctgaggagaacaggcagaagcttactgatggtgcctttggagaa

SEQ ID NO: 154989 - DNA, 255 bp, Glycine max
cctcaagccactctaaagaaaatggcggtgcctctactctcgaagaagatcgtgaagaagagggtgaagaagttcaagaggcctcagagtgacaggaaaatttctgtcaagacaaactggcgcagaccaaagggtatcgattcccgtgttaggagaaagttcaagggatgcactttgatgccaaacattggttatggttcagacaagaagacccgccactatctccctaatggttttaagaaatttgttgttcac

SEQ ID NO: 154990 - DNA, 251 bp, Glycine max
gtaaaactcttcaccaaaaagggcttcaacatcgaagaaatggtgatcctactcggtgcacattctatcggcatggctcattgtgacttgttcatccaaagggcatacaacttccaaaacacagggaaacacgaccctacccttaccgtcgaagcggttgaggaattcaaaaaggcatgccccaatgttaatacacctaagtacaggaacccccctgtcaactttgatgcaacaccaactgtgcttgataa

SEQ ID NO: 154991 - DNA, 248 bp, Glycine max
tgttgatatagcagccaaagaactaatagcaattgcttcccctggacaagttacacaggtacagcttgaccgagccaaaaaatccacaaagtctgcagttctaatgaatctggaatctagaatgattgcatcagaagatatagggaggcagattttgacttatggagaaaggaagcctgtggaacagttcttgaaggctgtagatgaaatcacgttgaatgatatcactaaaattgctcaaaagatta

SEQ ID NO: 154992 - DNA, 208 bp, Glycine max
gtgtggttaaaagttaagaagtagcaaagatgtttccattcgggcacaagggtcaaaagataaaggggactatggaggttatgcagaagaatgtgttggatatcaacagcatcaccagtgttgacgggatcgtcggcaccggcttagacttcttaggcagtgcactcgatacagttacttttttagcctcctccatctccacacaaca

SEQ ID NO: 154993 - DNA, 242 bp, Glycine max
agttttggggttagattaggtctacctacccaaaacaaaacttcaatttctgtttcagttcgcggagatcaatattttatctaggtccatcgtcgatagtcgatacgagtcaccaaaggcaatgtttttgtgggattggttttatgggattctagcgtcgctcgggctgtggcagaaggaggccaagatcttattcttgggcctcgataacgctggcaaaactaccttgcttcacatgctca

SEQ ID NO: 154994 - DNA, 131 bp, Glycine max
agatagtttcggtggagcatagcaatttgttggtctgctaccattgtttgatcctcgcaggcatgatagtgctgaaaccattcgaagagctcttaaccttgcgtgtcaatgttgaagatgattcactgggt

SEQ ID NO: 154995 - DNA, 246 bp, Glycine max
actcgagccgaatcggctcgagttcagttgaagaaggaatccatcactgcaatgctagcaaacttggacttcagggatgtgacttcacaaaggatgtcaacaaagcaataatgatcagtgatgcaatggaaacgggaacagttcagataaattccgccccggctcgtgggccagatcattttccctttcagggtataaaggacagtggcattggatctcaagggattaccaacagcataaacatga

SEQ ID NO: 154996 - DNA, 241 bp, Glycine max
ttgggatcataaaatttgaacattggattctcttcagtaagagccaagttagcatcataaaatgattttattgttccaatgtcttcccaatagtcattgaaaaaatacgcttggacattgttttccctcactgctgcaggaatgatttcagatccaaagtcattggatgtaggatatctccatttcagaagcttgagtaaaacatctgtcttgaatacataaacccccatagatgcaatat

SEQ ID NO: 154997 - DNA, 244 bp, Glycine max
gctcgagactagttctaggaaagaagaaataaagtggttgagaaaattcatcaatcagcaattaaaataaccaaaacacgaggtgtcaagctctctgatttccgtgtcatcaatcaggatccaccagccatttctgatgaagcagtcatcaaggcagtagagactgcaacaaaagaactaaacttgacaagcaagttgatgattagtagagcctatcatgattcattgtttatggccaggttgt

SEQ ID NO: 154998 - DNA, 251 bp, Glycine max
attcaatttggagtggacgaaagctatacatgctggttccaaaagccaaggaatcttcccaagtcacgattaaagcaaatacagtttatggtgcattgcgcggattagagacattcagccagttgtgttctttcgattatacaactaaaacagtaaaaatatacaaggcaccttggtccatccaagataaacctagatttgcatatcgtgggcttatgctggatacatcaaggcactatttacctattgat

SEQ ID NO: 154999 - DNA, 252 bp, Glycine max
tgttgatcgagataactagaaacagtgtgatgaaaatgaaggtccttgttttcttcgttgctacaatttcagtagcatgacaatgccatgcgtacgatatgttccctctccgaatgaacactggctatggtgcccgtactccggaggtgaaatgcgcaagttggaggcttgctgtggaagcacacaacatctttggctttgagaccattcctgaagagtgcgctgaagcaacaaaggaatacatccatggcg

SEQ ID NO: 155000 - DNA, 255 bp, Glycine max
cagagaaatccataccagtaacgaacaaagatggcgaaaatcctacacctgcaaaagctgaagttcctgacaacgagtttcacaagcgcataagaccagaggttatccctgcaaatgagataggggttacatttgcagatattggtgcgttggatgagattaaagaatcacttcaagagctggtaatgcttccccttagaaggccagacctcttcaaaggtgggcttctgaagccatgtagaggtatattgcttt

SEQ ID NO: 155001 - DNA, 258 bp, Glycine max
acacaattccaattcctctggatctcgtctcgatacgatcgatctcgaacatgagcactggggagctcctcaacatcgaacctctcgaactcaagttcccctttgagctgaagaagcagatctcatgttctcttcaattgtccaataagaccgatagctatgtggccttcaaggtgaaaacaaccaatccgaagaagtactgtgttcgtccgaacactggtattgtcacgccacgatctacgtgtgatgttatcgtta

SEQ ID NO: 155002 - DNA, 258 bp, Glycine max
gcacaagattgcaaaatgaagttcaacattgcaaatcccaccactgggcgccagaagaagctggaaatcgatgacgacctgaagcttcgagcattttgggacaagaggatctcccaggaggttcttggtgatgctctgggtgaggagtttaaaggatatgttttcaaaatcaccggtgggtgtgacaaacaaggattccctatgaagcagggagtgctgacccctggtcgtgttcgacttttgctccatagaggaact

SEQ ID NO: 155003 - DNA, 248 bp, Glycine max
acaaggcattctgaggccatggacttcagagattggtgcgagaatgagtgtgttaggcttattgggacaaaagatacgagtttccttgagttttgcttgaagcaatccagatcagaagctgagatgcttcttatagaaaaccttggatcatatgatcctgaccacgaattcattgataaattcctcaattacaaggagttgttaccatcagatgttttggacatagcttttcagagtagtaggaatga

SEQ ID NO: 155004 - DNA, 247 bp, Glycine max
gcgaacaccatggatgtggggaggtctgtgttggttcagaccgagccccgaacgaggttgcctcccggcacctgggggaccatgggggttggtcttggttattgtattgctgccgcggttgcttcgcccgagcggcttgtggttgcggttgaaggggattctggatttgggtttagtgctatggaagttgagacgttggttcggtaccagctgcctgtggtcgtgattgttttcaacaatggtggtg

SEQ ID NO: 155005 - DNA, 170 bp, Glycine max
aacctcttcgttccttcgattcattccatttcttccacaatggcaacagacacagttcgcgttctcgtcactggagccgcagggcaaattggatatgctccacgtccctatgattgctaggggagtgatgctgggtcctgaccagcccgtgatcctccacatgcttgaca

SEQ ID NO: 155006 - DNA, 248 bp, Glycine max
acagtattcttttttattgtgtttttcttctgcagagaagagtccccccctaccccccgctggcgaaggcttgattccctgcttcaatcgcattatcgttgagaaaatcgtccctcactccaagacaagcgccggcattctcctccctgagaagtcctcccagcttaattccggtaaggtgatagcggttgggcctggatcacgtgaccaggcagggaacttgattccggtgtccgtgaaggaaggtg

SEQ ID NO: 155007 - DNA, 233 bp, Glycine max
ctgaaatgggttctttacaagaaagaatcagttctaccacacaacggccacccccttctattcacacagtttatgtacccgcacacgatttaaccgatcctgcgcctgctacgacatttgcatctttagatgctactactgcactatcaagaggattagcggccaaaggcatctatccagcagtagatcatttagattcaacctcaactatgctccaacctcgaatcgttggc

SEQ ID NO: 155008 - DNA, 245 bp, Glycine max
gtcacttaatgttgagatacccacatatccaccctccacccccccacaccgtacaacatgggaacgttacacagtagaagatgcatatgaaattgtcaacttcgacaaaatgagacgcataaatgtccacgcaccagtggatgtccctggtcatgcagaatcatggggtgctggatatcctgatgtttggccatcaccttactgtagggagccacttgatgtttcaaagaactttacttttgatg

SEQ ID NO: 155009 - DNA, 247 bp, Glycine max
ctgcaaagggcttctccagcctagtttgttctcagatcttcttcttccatggaccagtacgccaccgcggcgcagataggcgagggaacatacggcgtcgtttacaaggctcgcgaccgcgccaccaatgagacaatcgctctgaagaagattcgcctcgagcaggaggacgaaggcgttcccagcaccgccattagcgagatttctcttctcaaagagatgcagcataggaacattgttaggttgc

SEQ ID NO: 155010 - DNA, 251 bp, Glycine max
cataaacgccgcccaaaaccatttatagggttttattttctttgccaagaaaatgagagagtgcatttcaatccacattggtcaggcccacatccaggtcggaaacgcctgctgggaactctattgccttgaacacggcattcagcccgatgggcagatgccgagtgacaagaccgttggaggaggagacgacgccttcaacacattctccagctacaccggcgccggaaagcacgtgcctcgcgccgtct

SEQ ID NO: 155011 - DNA, 235 bp, Glycine max
gccccatcaaccaggttatttctgctcggaagggagagtttgaaactggatacgagagaggtggacaaactcgtgaacatgtccagcttgcaaaaacgctgggtgtgtctaagcttcttgttgtcgtcaataaaatggatgagcctacagtgcaatggtcgaaagaaaggttctctgactttctcactccacacaacatacgagtttgcgaaatggggatatgctgagatacctg

SEQ ID NO: 155012 - DNA, 272 bp, Glycine max
  unsure (1)..(272): unsure at all n locations
cgcgccttcagattggtcagttggaagcaaagcacaaagccttagacagactctacgatgttatgaaagaggatgagaagaatgttttggctgtttttggtaggagcaatatttctgctttagtccaattgctcacagcaacatatcccangataagggagaagacagttaccgttatatgctctctcgtggagtcagtgagttgtgcaaagtggctaatttcggaaggagttctgccacctctcataaggcttgtcgaatctggtagtgct

SEQ ID NO: 155013 - DNA, 264 bp, Glycine max
cgcgaagagtcgagggttgccgttgatttggaatctgtggcgacgcacgagataggtcacgtgcttgggttgggtcactcttcggtgaaggaagcggtcatgtacccgagcctcagccccaggagaaagaaggttgacttgagaattgatgacgtggcaggagtccaagctctttacggctctaacccaaactttacttttagttctttgttgcagtctcagaattcattaaacgctgccgttgggttggaaacggtttctata

SEQ ID NO: 155014 - DNA, 259 bp, Glycine max
aggctcataaatcttttttatgggtttcagggtcactactactctgtctctgctctccctgttttggctcttgtccctgcaccaagcaagagctgcaaagttccacaatgtgagtggcttgagagggaaaaagccagttgtagcaaatgggtgcaatttgttcctgggaagttgggtggttgacacgtcttatcctctctatgactcttcaacatgccccttcattgatcccgagtttgattgccaaaagtatggaaga

SEQ ID NO: 155015 - DNA, 270 bp, Glycine max
cttttagcaagttaacaacacttttgtcttcgttccattatctagttctcaattctcttcaccctttgcctttgaaagaaatgggtagtcttgaagcggaaagaacaacagtaggattggcagcaagagacccttcagggattctctccccatacacctacaatcttagaaacacaggccctgatgatgtttacattaaagttcactactgtggaatttgccattctgatctccaccagattacccatgatcttggcatgtccaactatc

SEQ ID NO: 155016 - DNA, 264 bp, Glycine max
  unsure (1)..(264): unsure at all n locations
attccgaagtccaaataagtttctatgtctcagttccagacagtgtaagatctccgngtgnnatcttagctattctagcttctgttgtgggaagctaagcaatcatcagtggaacattttctatcataaaccagagctaatctctgggttgcttcccaagagttaaggttgttcatacatctgacaagatacatggtcaggtctacatccctgaaattaattggttactcatgatcctctgcattgctgtgaccattggattta

SEQ ID NO: 155017 - DNA, 265 bp, Glycine max
ggcttatggtggatacctaggcacccagagattaggaagggcgtagtaagcgacgaaatgcttcggggagttgaaaataagcgtagatccggggattcccgatataggtcaacctttcgaactgctgctgaatccacgggcaggcaagagacaacctggtgaactgaaacatcttagtagccagaggaaaagaaagcaaaagcgattcccgtagtagcggcgagcgaaatgggagcagcctaaaccgtgaaaacggggttgtggg

SEQ ID NO: 155018 - DNA, 272 bp, Glycine max
acgcctcttttgctggtcattggccccaactatcattcaagcatatttatggccagagagcactggttcctggttctattatcatcgatggtggttctggctattgcaaatttggttggagcaaatacgcatatccatcagggcgttcagcaacatttttggaatttggtaatattgagtcaccaatgtatactaggcttcgacatttttttgcaactatttataacaggatgcaggtgaaaccaaataaacaaccagttattgtttctgtg

SEQ ID NO: 155019 - DNA, 271 bp, Glycine max
cgacaaacagatagtgtgggagagagaagagcggaagagaaaatgacgaccaggttcaagaagaacaggaagaagagaggtcacgtcagcgccggacacggccgtatcggaaagcaccgcaagcatcccggaggtcgcggtaacgccggtggcatgcatcaccaccgtatcctcttcgacaagtaccatcctggtttcttcgggaaggtaggcatgcgctacttccacaaacttcgcaacacattctacaatccgatcatcaacatcgaca

SEQ ID NO: 155020 - DNA, 268 bp, Glycine max
cgcgattatagtcttcgctaggcgtggttgttgcatgagccatgttgtgaagcgattgctgctgggtcttggggtgaaccctgcggtgcacgaggtggaggagagtgatgaagtgggtgttgttagagaattggaagcaattgtgggtgccaataatggagggaataagatgcaatttccagcagtttttattggtggcaaattgtttgggggattggataaggtaatggctactcatatttcaggggaattggttccaattctcaaa

SEQ ID NO: 155021 - DNA, 268 bp, Glycine max
cgtcaagtgtttctgtttctgttttaatggagataaccaaacttggcaagagatttcaaggtaaggtagctattgtgacagcttccacccttggaattggctttagcatagcagagaggcttggcttggagggtgcatctgttgtcatctcttctcgcaaacagcaaaatgttgatgaggctgctggtaaactgagagctaaaggaatcgaagtattggcggttgtttgccacgtttcaaatgcccaacaaaggaaaaatttgataga

SEQ ID NO: 155022 - DNA, 267 bp, Glycine max
tgaagaacttattcaagctacaaatgtgaaccatgatcttgaactacttacaccaccaggctctgatggagaatatacaaaatcatggttcacatatgaagaacttattcaagctacaaatgggttttcagcacaaaatttgttgtgagaaggtggatttggctgtgtttataaaggtttgctgatagatggaagagaagtagctgtgaaacagctcaaaattggtggtgggcaaggggaacgcgaattcagggcagaagttgagat

SEQ ID NO: 155023 - DNA, 266 bp, Glycine max
gtttacatcaaaatgaagaaacccaatgctgcgatccgtgatgctaatgctgctttggagattaatcctgattctgctaaaggatacaagtcacgtggcgtagacgagcaatgcttggtcaatgggaagaagctgcaaaggatcttcatgtggcttcaaagttagactatgatgaggaaataaatgctgtacttaaaaaggtggaaccaaatgctcacaagattgaggaacaccgtcggaagtatgaaaggctgcacaaagaaaga

SEQ ID NO: 155024 - DNA, 266 bp, Glycine max
ctcacggaggcagcagtaccaccgtgcaccacgtggctcacgagtctcaccaccacaccccccattccgctttctcctcccacaacaacgcaccctccaccactgttcattccctgagccaccaggttaacaccggtggtctctcgaccaaacccactgtcagggttttcaccaaagctaatcccaatttctctctcaccattcgtcgcggccaagtcattctcgctccctccgatcccaccaatgagtaccagcattggtataag

SEQ ID NO: 155025 - DNA, 264 bp, Glycine max
gcttggacgagtgaattagattcatcatcaagatgtcgtctctgatagcagaagatgtgaagagcagatcacaggtgtaccacggggtcgaaatgtgccaagtgaagtccaaggagcttctcatggaaatcgccctccccaacggccttcttcccctcaaggacatggacgagtgcggctacgacagacaaaccggcttcgtctggctcaaacaaaagaagagttacacccacaagttcgacaagatcggaaagcttgtctcct

SEQ ID NO: 155026 - DNA, 262 bp, Glycine max
caaaccgttcatgcttaatcaagttgggaacaacaaaaaaaatcaaaacaatgtttctgggtttcggtttcatttcatcaagatgatctgtttatctttttttttttaattttaatttaaagtctttgtattttgtatgtaaagatgtaaaattatgattattaggtggtgcatgtgttgcgtcatgggccaatgttatcctctgcttttaagttggaagaggcccagctcacgtgtgatgtacggctgtgattgtgtaatt

SEQ ID NO: 155027 - DNA, 261 bp, Glycine max
cttcattgtagatctattgggcaaatggaaggagtctgaatatggaggtggtcagtctgttcctgttggtggtattgcatactacatcactgcaccttccagcttagctgatatggcagccaatcctttccatgcattattctaccttgtgtttatgttgtcagcctgtgccttgttctctaaaacttggattgaagtctctggttcatctgctagagatgttgcaaagcagctgaaggaacaacaaatggtaatgcctgg

SEQ ID NO: 155028 - DNA, 264 bp, Glycine max
tttggtttgagcaatgcaggatttcaggtgagcaagtatatgccatttggaccagtggagactgttatgccatatctcctaagaagggctgaagagaatagaggaatgttggctgcttcgggctttgacaggcaactgatgaggaaggagttgggaaggagactaaaagctgctgtcttttaattttttatacttttatgggacgagttaatgagatgtaataatgtcttttaggcaacacaggattaggatactctttgtaca

SEQ ID NO: 155029 - DNA, 266 bp, Glycine max
gttaagactagagcatcactgaactaacaaagcaaccctatgtcgaaggtggtttgtgtcaccggagccagcggcgccatcggatcatgggtggtcctactcctcctccagcgtggttacaccgtccatgccaccgtccaattcttctaggatgaaaatgagacgaaacatttggaggaaatggaaggagcaaagagtcatctccattttttagaaatggatcttcttgacatcgactccattgccgctgccataaagggttgttc

SEQ ID NO: 155030 - DNA, 269 bp, Glycine max
gatggcaaagctatttttgaaacaggcaaagcaatacgcagatgcaagaccaagctatcctccacaactcttccatcttcattgcttccaagactccctctcactacctcgcttgggacgtcggctctgggagcggccaagctgccaaatctttagctgcaatatacaagaatgtgatagccacagatgctagtgacaatcaacttgattttgcagccaagctcccaaatgtgagataccaacacaccccttcaaccatgtcgacggcc

SEQ ID NO: 155031 - DNA, 265 bp, Glycine max
caaattgcaggtacatatgcacaacttgggggataggaatggatattaaagatgatgtaaaaagggaggaggtgacaacacttgtgaaagaaatgataatcggagaaagggggaaggaaatgagacaaaagtgtctggagtggaaaaagaaagcaatagaagccactgatatgggaggatcatcatataatgatttccatcgattagtgaaggaggttcttcacaatgatgttgtttgagtctttcaatatattgggggtccgaa

SEQ ID NO: 155032 - DNA, 263 bp, Glycine max
ctcgagccgctcaaatttgctatgtaggattatgggaagtgtccaattactggagaaccacttactatggatgacattgtaccaatcaagacaggcaagatagtgaaacccagacctgttcaggcagctagcatccctggcatgcttggaatgttccaaaatgaatgggatggattgatgctatctaattttgcattggagcaacaattgcacacagcaagacaggcgctgagtcatgctctgtatcagcatgatgccgcttg

SEQ ID NO: 155033 - DNA, 260 bp, Glycine max
ctttaatcacgcactatcagtacaacaactcactcactaagctaaccaatttcatcaagcctgccatggcttcctcgtgtgcttcctctgacattgcagctgttgccatctccacaccaagttcccatctgaatggatcactcttgggaagcacaaaagcttcttttcttagtgggaggaaactgaaggtgaacagttttacagcaccagttggagcacgagccagcactacagtgcccccagttgctgagcctgatagg

SEQ ID NO: 155034 - DNA, 258 bp, Glycine max
atggcttgtagactcaaagggtttgattgttggttcaagaaaggcttcacttcaacacttcaagcagccttgggctcatgagcatgagcctgtaggcagtctcttagaagctgttaaggtaatcaagcctacagttttgattgggtcatcaggagtgggaaaaacatttacaaaggaagtaattgaggctgtgacttctataaatgaaaaacctcttgtcctggctctctccaatccaacttcacagtgtgagtgtac

SEQ ID NO: 155035 - DNA, 259 bp, Glycine max
ctttttccttccacttttctctttggacttggttcttctgcttaccaggcagaaggagcagcaagtgtagatgggagaggaccaagcatatgggacacctacactagacagcatactgaaaagatttgggatcatagcaccggtgacctgggagctgatttttatcatcgatacaagggtgacataaaaatagcgaaagaaattgggctggactctttcagattctctatctcatggtcaagaatattcccaaagggca

SEQ ID NO: 155036 - DNA, 261 bp, Glycine max
ctcatccaaaagttgacccatttactggggagatgtttacatttggctatgcgcatacaccaccatatatcacatacagtctaatttcaaaggatggttatatgcatgatcctgtacccataacagtatcagatcccatcatgatgcacgactttgccatcacagagaattatgcaatatttttggatcttcctttgatttttaggctttaggaaatggtgaagaataagacactgatattctcatttgattcaaccaaga

SEQ ID NO: 155037 - DNA, 260 bp, Glycine max
  unsure (1)..(260): unsure at all n locations
ggctttggccaagttgccaccaaacgcttcatccgttccagcagttttagctgttcgagattccatcgtggacccacgcaacatccacctcctaanaacattgatccagtgcaacttcccaccttatggaaaggatcttcagggaggctacccaacgggtcgattttgcaatggaaaaattcctactgacttaatagttgaacaattgggtattaaggagtatttgcctgcatatttggatccgaatctcaaatctagtg

SEQ ID NO: 155038 - DNA, 258 bp, Glycine max
caaggatgagtaaacaagacatgatgaaaagtcagaattgccttctcaaggtcaatatccactgcgatggctgtgaacagaaagtaaagaaaatcctgcagaaaattgatggggtgtattctgtgaacatagatgcggagcgagggaaggtgatggtgtcagggcatgtagatccagctaaactgataaaaaagctgaagaggtcagggaagcatgccgaactttggggtggccagagaggcatgatgtacaaccaaa

SEQ ID NO: 155039 - DNA, 255 bp, Glycine max
ctgaattgtaggggttgaatgatgattgcgaacattttgagtcttttccacctggtcacttgtattctagcaaagagagagcgttccgcagatggtacaatcctccatggttctcttctgctattccatctgccccttatgatcctcttgctttgaggcatgcctttgagaaggctgtggtaaaaaggttgatgactgatgtgcactttggtgttttgctctctggaggtttggactcttcattggttgcagccg

SEQ ID NO: 155040 - DNA, 256 bp, Glycine max
caaggatgtgtaaacaagacatgatgaaaagtcagatttgccttctcaaggtcaatatccactgcgatggctgtgaacagaaagtaaagaaaatcctgcagaaaatttctggggtgtattctgtgaacatagatgcggagcgagggaaggtgatggtgtcagggcatgtagatccagctaaactgataaaaaagctgaagaggtcagggacgcatttcgaactttggggtggccagagaggcatgatgtacaacca

SEQ ID NO: 155041 - DNA, 253 bp, Glycine max
attccttccctcattcttatttttttcgtctcttcactttcactctctctctctctctcagtcatcatcatgggagcagtgattctcccagatctcggcaccgagattttgattccggtctgcgccatcattggaatagggttcgccctcttccagtgggtcctcgtctccaaggttaagctctccgctgccagagacgcttccactaacgcctccggcaaaaatggctacaacgattacctcatcgaagaag

SEQ ID NO: 155042 - DNA, 262 bp, Glycine max
cagtaattggtgtggattcgaaaaagatgaaggtttggagatgggtggtgagtttgatgttagtggggttactgcccgtgtcaacaatgggtcgattcgtggtggagaagaacagcctgagagtgacatcgccggaaaaataagagggacacacgacagtgccattggcaacttcggaatacctcaatacggtggtagcatggccgggaacgtaatttaccctaaggataacaaaaagggttgcaaagagttcgatgagttc

SEQ ID NO: 155043 - DNA, 257 bp, Glycine max
cgagataactagaaacagtgtgatgaaaatgaaggtccttgttttcttcgttgctacaattttggtagcatggcaatgccatgcgtacgatatcgttccctctccgaatgaacactggctatggtgcccgtactcggaggtgaaatgcgcaagttggaggcttgctgtggaagcacacaacatctttggctttgagaccattcctgaagagtgcgttgaagcaacaaaggaatgaatccatggcgaacaatatagat

SEQ ID NO: 155044 - DNA, 259 bp, Glycine max
cgcgaagagtcgagggttgccgttgatttggaatctgtggcgacgcacgagataggtcacgtgcttgggttgggtcactcttcggtgaaggaagcggtcatgtacccgagctacagccccaggagaaagaaggttgcttgagaattgatgacgtggcaggagtccaagctctttacggctctaacccaaactttacttttagttctttgttgcagtctcagaattcattaaacgctgccgttgggttggaaacggtttc

SEQ ID NO: 155045 - DNA, 258 bp, Glycine max
atctcttctctcttccttttcagatcacacgcacacagttaagctcttcaaatctatatcttctcagcgattcttgcttcaagttccagaaatgggtgtggcacaaaacattcctgatgcggaggagggaaccttgagattggaatggaatacagaactgtttctggagttgctgggccattggtcattcttgataaagttaagggacccaagtttcaagagattgttaacattcgcttaggagatggtactactcgg

SEQ ID NO: 155046 - DNA, 259 bp, Glycine max
gtcagtttcgggggaagagatccagcagcaatggtgtacgtcaaggctcagaaatcaaaagcctacttcaagagatatcaagtcaagttcaagagaagaagagagggaaaaaccgattaccgtgccaggattcggtgattaatcaggacaagaacaaatataacactccgaaataccgatttgtggttcgctttagcaacaaggacattgttgcacaaataatatctgctagcattgccggcgatttagttcttgctac

SEQ ID NO: 155047 - DNA, 257 bp, Glycine max
tcttttaatgggtattttggttccaagactaagctcgaaaacaattcgtcaggctgtgggtgttgtgggttgtgtcattatgcctcacaatgtattcctgcattctgctttggtgcaatcaaggaaggttgatctaaaaagataggtcgggtgcaggaggctctcaactactattcaattgaatcggcggcggcacttgcagtctccttcatgatcaatctatttgtcacaacagtttttgctaagggtttttatgg

SEQ ID NO: 155048 - DNA, 255 bp, Glycine max
agaaaatcctcaattttctgagcagccaaacactctctctctgtctctcgaaaattctcagtttgcagagaaaatctgaatcatgtcgtggcaagcgtatgtcgacgatcaccttctgtgtgacatcgaaggaaccacctcactcacgctgctatcatcggccaagacggcagcgtttgggctcagagtaccgacttccctcagttcaaacctgaggagataactgccatcatgaatgactttaatgagcctgga

SEQ ID NO: 155049 - DNA, 252 bp, Glycine max
ggagtctcggagctgccatcatctacaacagagaccatgcatgggatgaccaatggattttctgggttggacctttcattggagctgcccttgctgctgtgtatcaccagatagtcatccgagccatcctttcaagacaagggcttaggctccttgtttttgtatgtgcttgcttgtattagttgtaatttatgtatctggagtcttcttcatttggaaattcatgtgaatctttttgttttaatccattgt

SEQ ID NO: 155050 - DNA, 255 bp, Glycine max
  unsure (1)..(255): unsure at all n locations
tacttttcttcccttctttccagaacaacaccacaccacatacaacacaaaaaaaagntnnannaatggcgggttacagagaggaggaggatttcgattaactcttcaaggtggtcctgatcggcgattcggcgtgggcaagtcccaacctcctctctcgcttcaccaagaacgagttcaacttggagtccaagtccaccattggcgtcgagttcgccacccgcaccttgaacgtcgattccaaagtcatcaagg

SEQ ID NO: 155051 - DNA, 247 bp, Glycine max
gaggaggcacaccttcaggagcagtcatggttctcaaaaccgagctgtgccgattcagcggtgccaagatctacccagggaaaggcatcagatttgttcgtggtgattctcaggttttcctgtttgctactcaaaatgtaagaggtatttccacaacaggttgaagccgtcaaagctcacgtggactgcaatgtaccgaaagcagcataagaaggatattgctcaagaagctgtgaagaagagaaga

SEQ ID NO: 155052 - DNA, 248 bp, Glycine max
aaaataaattatggtgtgttgtgtatgttgtgcaagacctggaacttcacctttctacgtacgtgtgctgttaggatgcagtgtgctttgatgatgctttgatgaatatgcagtgtgcttttttaatctattattttcttttattctcttttcataaggactttagttcttccaccgtgcttgattgttgtctcgattataactaaatttccgttatttaagaacaatagttgacattgtggaaaaac

SEQ ID NO: 155053 - DNA, 127 bp, Glycine max
ttgaagttttgaagaagaagcatgcttctggaacttataaaagcctagtattttatctagaggcatgtgaatctgggagtatctttgaaggtcttcttccagaaggtctgaatatgcacacaacata

SEQ ID NO: 155054 - DNA, 246 bp, Glycine max
cccaaattgaaagttcctttcatacttaggacgcctgacatgtcagccatgcaccatgacacaagttctgatctgaaagtggttggaaacaagttaaaggatatattagagatctcaaacacatccttaaaatgaggaagatcgttgttgaactgtgtgacattgttgctactcgcggagtcggcttgctgctgctggtattttgggcatccttaagaaaataggaagagacacagttaaggttgg

SEQ ID NO: 155055 - DNA, 247 bp, Glycine max
atcatccgcagctgctgttattcgcaccgcaaacaaacagtgagccatggacgtcggaaagaacaagcgcatctccaaagggaaaaagggtggcaagaagaaggcagctgatccctttgccaagaggattggtatgacattaaggccccttctctttttcaagtgaaaaatgttggcaaaaccctcgtctctcgtacgcagggtaccaagattgcttctgaaggacttaaacatagagtgtttgagg

SEQ ID NO: 155056 - DNA, 243 bp, Glycine max
caagattaccaccacaaagcaatgggcggtatactttctgcgcttcttggcggcgacgcggcggcggcggcgtcttcgccggagagttctacttctagagtctcctccttccactcgtcgccggctggcagctctacttcaacgagatcaaagataccgataagctcgttgtgatagatttctcggcgtcgtggtgcggtccttgcaaattcatagagccagcgattcacgccatggccgaca

SEQ ID NO: 155057 - DNA, 243 bp, Glycine max
gcacccagccgcagcagcaagtgatcgaagcgaaaagagagtaatcagcagagaaattcatcgtcgtagttatgggtaaagttcacggatcacttgcacgtgccggtaaggttagaggccaaacccaaaagtggccaagcaggataagaagaagaagccacgtggccgcgctcacaagaggatgcagtataatcgccgattcgtcaccgccgtggtgggattcggcaagaagaggggacctaa

SEQ ID NO: 155058 - DNA, 245 bp, Glycine max
cagagttgaggcttggtcttcccggattccaatcgcctgaaagggaaccggatcttttctctttaagctcaccaaagcttgatgagaagccactcttccctttgcttcctactaaagacgggattgctcgtcggggcagaaagctgttgtttctggcaacaaaagaggttttgctgataccatggatgggttttctcaggggaagtttgctggtaatacagggatgaacgcggtgctatcaccta

SEQ ID NO: 155059 - DNA, 246 bp, Glycine max
tacaaggctctactctactgcttcaccttctgctctagaaaattcagtggtgatacatggcttcggctactctctctgtagccaaaccagcccttcaggcaaatgggaaaggcttctctgaatctctggcctccgcagctcatcaggcttccttcccttttctagaaaatcttcagaggatttccattctgtcattgccttccagacctatgcagtctaaagcagtggaggatacaagaagggtgt

SEQ ID NO: 155060 - DNA, 246 bp, Glycine max
gtggagttagagctgtccatcatttgcagtgacattatgataattttagatgagcatcttattccatccactaatattgctgagtccacagtgttttattactagatgaaaggagactattacggtatttggcagaatttaaagctggcaatgaaaagaaagaggtggcagatcagtcacttaaagcatatcagacagcttctaccactgctgagagtgaactacaacctacacatcctattcgtt

SEQ ID NO: 155061 - DNA, 244 bp, Glycine max
ggttcagcttcaacttcaaattctcagtgaaaccaattcagctgagtccaaatcccaaatccgaatcaaaatccgaagtgagatttgcgatggagaggcttcagcgaatgtttgcaggtgcagtggagcgctagggcaccctcccccagattccccaactctcgattcctccgagcaggtctacatctcctcactcgatctcctcaagatgcttaagcacggaagggctggggttcccatggag

SEQ ID NO: 155062 - DNA, 239 bp, Glycine max
  unsure (1)..(239): unsure at all n locations
ctctaaaccctaaacaactctttctcttcttccttcgctcgttgttctccctcgcgtagatcgacaatggcggagacagagacgtttgctttccaggctgagatcaaccagctcctcagtctatcatcaacaccttctactccaacaaggactagttcantcgtgaactcatcagcaacgctccgatgctttggacaaaatcgatttgagatttgacagataagagcagctcgtgctca

SEQ ID NO: 155063 - DNA, 264 bp, Glycine max
cagcttgatcacaccgcgtttcggagagagacgtcgcaatggggaggaggcctgcaaggtgttatcggcagataaaaaacaagccataccccaaatcacgcttttgccgtggtgttcctgatcctaagatcagaatttatgatgttggtatgaagaagaaaggtgttgatgagtttcccttctgtgttcatctggttagctgggaaaaagaaaatgtttcaagtgaagcattggaagctgctagaattgcatgcaacaaatata

SEQ ID NO: 155064 - DNA, 267 bp, Glycine max
ccaccattgagattgattccttgtatgagggtattgacttctacacaaccatcacccgtgcccgtttcgaagagcttaacatggacctattcaggaagtgcatggagcccgtggagaagtgtttgcgggatgctaagatggacaagagcaccgtccatgatgttgttcttgtcggtggttctactaggattcccaaggttcaacagttgttgcaggacttcttcaacggaaaggagctttgcaagagcattaacccagatgaagctg

SEQ ID NO: 155065 - DNA, 268 bp, Glycine max
gccgggccttcaggttggaaacgcctgctgggagctttactgcctcgaacacggcattcagcctgatgggcagatgccaagtgacaagaccgttggtggaggtgatgatgctttcaacaccttcttcagtgaaactggggcaggaaagcacgtgccccgtgcgatttttgtagatcttgagcccactgtgattgatgaggttaggactgggacataccgccaactattccatcctgagcagctccttagtggaaaggaggatgcagca

SEQ ID NO: 155066 - DNA, 266 bp, Glycine max
ccaaggttcaatcttgccatcatcaatggcctcagcaagaccttcctccaatggtcttgctgaggccattgatgatagtaagattggaccaagggatgacccagatggttcgttccaagatcttgtctgaagagttcggttgggacaaagatcttgccaagaaaatctggtgctttggccctgagacccttggacccaacatggtggttgatatgtgcaagggagtccagtatttgaatgaaatcaaggattctgtggttgctgga

SEQ ID NO: 155067 - DNA, 267 bp, Glycine max
aattccatgtgcatgacagcttccctagaggcagtaatgcttctttcatagctctaattatcaaaactaaacatcctgagtcatttgatgactacagaccaatctccttgattggatgtatgtacaaggtgatagctaagttattagcaaatagattgagacaagtgatatctggtcttattgatgagaggcagacaactttcataaaaaacagacacatcctgcatgacatactacgtcttaatgaggtgattgaggaagcttgta

SEQ ID NO: 155068 - DNA, 264 bp, Glycine max
ctctcgatctgcactgcaacttccttgtctgacagatcccgtgttccggagaaaggaaaaggcaagaaagatgtcggggcaaacgcagcgtctgaacgtggtccccaccgtgacgatgctgggagtggtcaaggcgcgtctagtcggcgccacgcgcggtcacgcgctcctgaagaagaagagcgacgcgctcacggtgcagttccgccagatcctgaagaagatcgtgtccacgaaagaatctatgggcgacatcatgaaaac

SEQ ID NO: 155069 - DNA, 264 bp, Glycine max
caccctctccctagacagagcctctggctctggctttcgttccaaaaaagaatacttgttcggaaaaattgacatgcagctcaagctcgtgcctggtaactctgctggaacagtcactgcctattatttatcttctctggggcctactcatgacgaaatagacttcgagtttttgggtaacttgagtggtgatccttatactctccacacgaacgtataaccacaagggaaagggaacagagaacaacagttccatctatggtt

SEQ ID NO: 155070 - DNA, 265 bp, Glycine max
aaaatttagaaacaaaaacatgttggtgaaggtgtacggtccaacctatggagcccccaagagggtgctggtgtgtctgattgagaaggaaattgagtttgaaacagtacatattgatctcttcaagggagagaataaggaacctgagttcctaaagctgcagccatttggatcacttcctgttattcaagatggtgattatactctctatgaatctcgtgcaataatcagatactttgcagagaagtataaagaccaagggaca

SEQ ID NO: 155071 - DNA, 267 bp, Glycine max
ggttgattggtcccattgattccgaagaaaaagaaaagatgtttgagccacaacagctatacactcgcgcgaagaccgaggaattcgacctcgaatcaggagaaaccctctacccagggctgagcgtcggcgagaaccagctccgatggggtttcatccgcaaggtctacggcatcctctccgcgcagatcgtcctcaccaccctcgtctccgtcaccaccgttttctatactccaatcaatgacctcctcaagggcaattccaccc

SEQ ID NO: 155072 - DNA, 236 bp, Glycine max
gttaggtttgtctcatcccaacagtttcgcgcgtcgtttttcagcttccgaggtccttgtgaagagcttggatttatatgggaagttggatggtcatgaagggtgtgtgaatgcagtggaatttaactccaccggtgacattcttgtttctggttctgatgaccgacaaattatgttttggaattgggaatccaaaactaaattgtttgcatacccttctggccacacagacaaca

SEQ ID NO: 155073 - DNA, 263 bp, Glycine max
ctcgatcttctcttccacggggctcaagatagaagacatgctcatcacttcagggaagttcagcagtgtactcttctgtctatcaaaacagttgggtgcagtgaagattgttcctattgtcctcaatcctctaagtatgatacaggagtcaaaggccaacgccttatgaacaaggaagctgttctccaggctgcaaagaaggcaaaagaggctgggagcactcgcttttgtatgggtgctgcgtggagggatacactaggaag

SEQ ID NO: 155074 - DNA, 256 bp, Glycine max
gattcttgtaactagtatccttgcgtcaggggcttatgctgatgactcggataattcagatgcgttgatatatacagggcacggtgggaatgtgatgaacactgataaagaacctgaagatcagaggcttgagcggggcaatcttgctctgaagaacagtattgaggaaaagaacagtgttaaggtgatacgtggctctgaatcaatggatggaaagtgcaggatatatgtttatgatggactgtatgaggttgag

SEQ ID NO: 155075 - DNA, 262 bp, Glycine max
aagaaaaaaaaaaacccttagccaacacaaccatcatggccacctctgctattcagcaatcagcattcactggtcaaactgctctgaagcagctcaatgagttcgtccgcaagaccggtggcgccggcaaaggtcgcactaacatgcgccgcaccgtcaagagtgctcctcagagcatttggtatggccctgaccgtcccaagtacttgggtccattctcggagcagattccatcatacctgaccggagaattccctggtga

SEQ ID NO: 155076 - DNA, 263 bp, Glycine max
ctcgagccgattcggctcgagggctaatctctcactcttgttcatcggtctcctcctatactccgctgccgtctgccaccgtcgaacgaatctacgatgaagacaaccttctgatccgtcaagtggtgccggacgcggaggaccaccacctgctcaacgcggagcaccacttctccgccttcaagacaaagttcgccaagacctacgccacgcaggaggagcactaccaccgcttccgtatcttcaagaacaacttgctccgc

SEQ ID NO: 155077 - DNA, 261 bp, Glycine max
ggaaatatcaatatgctgcttgacaatgtaacgagcactagcactagcactaacactagcaaatatcctctattgagaagaaggcgtaggttgattgttatagcacttgatttgtatgacaataatggagctccggagaagaaaatgattgagatggtgcaaaagataattaaagctgtgcaactagaccctcaaactgctagagttacagggtttgctttatcaactgctatgccagtgatagaaacagtagagttccta

SEQ ID NO: 155078 - DNA, 260 bp, Glycine max
gcagcgacggaagaagacttcgacatccgcggcggcgatgaaatggatctcggcgaagacgaggtcggcgaggagagggagatcggctctggcggcctcaagatcgagctcctcaaggaaggtcaaggctgggaaacccccgaagtcggtgacgaagtccaagttcattacacggggactttgctcgacgggactaagttcgattcgagccgcgacatggattctcccttcagcttcacgctcggacaagggaaagtaat

SEQ ID NO: 155079 - DNA, 262 bp, Glycine max
cattcacctgaggcttccaaagcaatggcttcccttgcagcatccactgctgctgcttcccttggcatgtcagaaatgcttggaaaccccatcaacttcagtggtgccacaaggccagctccatctgcttctagtcctgcctccttcaagactgtggctcttttctccaaaaagaaggctacaccaacacctccaaaaaaagctgctgctgctgctcctgccaatgatgagcttgccaagtggtatggtcctgacagaagga

SEQ ID NO: 155080 - DNA, 264 bp, Glycine max
atttaaagaaaccttggactccccagccagaagaagaaccaacatggcacccacaatctataatttttcgtattctaaaaggttttcagagtcattcaattcttcaacatcaaaaaaggagtcatccagttccaacatccttgctttccactccatagctcaatggaatgctcattataaagccaccaaagaaactaacaagctgatggtacttgatttcacagccacatggtgtggaccttgcaaactcatggaccctgttat

SEQ ID NO: 155081 - DNA, 263 bp, Glycine max
  unsure (1)..(263): unsure at all n locations
caagcgacgccgtttgggtcctcttccacctcgcctacgacaagacnangccttacctccgcctggcgccactcggcgatcctccaccagggtcaactcgcccgtgactcaccgcagagctgccccgcccctgaccccaacctctactacaaggcagtcatcggaatcgtcagccatcccggcgacggcgcctccggccgcctcagcaacgccaccggcgcctcctacatcgccgcctcctatgtcaaattcgttgaggccgc

SEQ ID NO: 155082 - DNA, 89 bp, Glycine max
tgacttcggaattcccggtgcattttatatgaagaacttcatgcaaaacgagttcgacctcaagtctttaattctcgaagacattccaa

SEQ ID NO: 155083 - DNA, 258 bp, Glycine max
gaaaagacgaattggaggttttaagaggagatggaacagggaagagaaaggactttgacagaatctatgattatgatgtctataatgatttgggcaatccagatggtggtgatcctcgcccaatccttggtgggtctagcatctatccctaccctcgcagtgttagaacaggaagagaaaggaccatgacagatcccaacagtgagaaaccgggcgatgtttatgttccaagagatgaaaattttggtcacttgaagt

SEQ ID NO: 155084 - DNA, 260 bp, Glycine max
tgtggagtcaatttaccttgcaatcttcctactttatgccccaaggaagcctaggcttacaaccatcaagcttcttctcttactgaatgtgtttgggtttggagccatgcttctatcaactctctacctgtcaaagggagcaaagcgtcttgctatcataggatggatttgccttgttttcaacatcagtgtctttgctgcgcctctcttcattattaggcgtgtcataaagacgaggagcgtggaatacatgccattta

SEQ ID NO: 155085 - DNA, 262 bp, Glycine max
  unsure (1)..(262): unsure at all n locations
tattggtatcttctacaatatcctaaagtgtttttctcgttcttcatcaccatgtctttgctttcagacctcatcaacctcaatctctcagaatccacagaaaagatcatagcaaaantacatatgggttggtggatctggtatggacctcagaagcaaagccagggctcttcctgggccagtgagtgaccctgcaaaacttctgaagtggaactatgatgggtctagcacagatcaagctccaggggatgacagtgaagtc

SEQ ID NO: 155086 - DNA, 256 bp, Glycine max
gcagatttgataaggtaccacagttgatttgttcattataaaaacaaaactcttgcaaaatttattttccactaatactcaaatattgattttcttttcagaacatacttgcagcaggtacagataccactgcagccacatcagtttgggctatgacagccctagtaaaaaaccctagagtaatgaagaaagttcaagaagaagttagaaatgtggggggaacaaaagatttcttagatgaagatgatattcaaaa

SEQ ID NO: 155087 - DNA, 254 bp, Glycine max
gtcaaaggaataacagaatatgtctcttatgctgcaattgagaatttggtgcttggtcaagcctccaggcatggctttattagattcaagtcaagtacgccaagcaacatattaaagggggcgccagatttctgtactgtgtatgtgatttctaagggcagaatctcttcagttcggagtgctgctcgaacagccccacatgcctccccattgctgaggcacatacagattctacatgacgagaatgcacgtga

SEQ ID NO: 155088 - DNA, 244 bp, Glycine max
  unsure (1)..(244): unsure at all n locations
cacacttcctctctcttcctctccgtcttccatagtcaatttggccgtcaatngcggcctccgaagctctcaacggcacaatcaccacctccatcatgcacgcgttcggcaacgtcctcgcgttcttcatacttctcatgatcggcgttctcgccttctcgatccgtctcttctccgttataaagtatgagagtgttattcacgagtttgatccttatttcaactatagagtcactcagttttt

SEQ ID NO: 155089 - DNA, 252 bp, Glycine max
aggagaaagagaaggtggaggagaggtacactcattggaagtctctggttcccgttctctacgattggctcgccaaccacaacctcgtctggccttctctttcttgcagatggggtcctcagctagagcaagccacttacaagaaccgccaccgtctctatctttccgaacagactgatggcagtgttcccaatacccttgttattgccaactgcgaggttgttaaacccagggttgctgctgctgagcaca

SEQ ID NO: 155090 - DNA, 255 bp, Glycine max
caacttaagagatcaatatggccaccaccactacccagcctccctctaatatctgttttttccttctgttgttgcttctagcacactttcatttgggcataagccaacttgagctgaattactactctaaaagctgcccaaaagctgaagagatcatcaaggaacaagtcacacaactatataacaagcatggaaacactgccgtttcgtgggtcagaaatctcttccacgattgcgtggttaagtcatgcgatg

SEQ ID NO: 155091 - DNA, 275 bp, Glycine max
tgtgatatctttggggagagaggaattttacttggtgctgttcatggagttgtggaatccttgtttaggagatacactgataatggaatgaacgaagatctggcctataagaatactgttgagtctataacagggattatatctaaaaccatctcaactaagggcatgctagctgtatacaatgctttatctgaagatagaaaagggaatttgagaaggcttatagtgcttcttattatccttgcatggaaattctgtatgagtgctatgaggat

SEQ ID NO: 155092 - DNA, 270 bp, Glycine max
gttagcttaatcggaatcgccgtcgggaaaaggactattccggcgccggagatgctacggcgggtgaacaatcgaggtgacggcggcgtggttgtggattccggcacgacgttcacgatgttgccggcggggttttataactcggtggtggacgagtttgaccgccgagtcgggcgagacaacaagcgcgcgcgtagattgaagagaaaacgggactcgcgccgtgctattatttgaactccgtggcggacgtaccagctctgacgctgc

SEQ ID NO: 155093 - DNA, 269 bp, Glycine max
atccaacaacattcgatcttgatgatgattcatcaactacatcatgtccaaattacttcaaatggatccatgaagatctaaaaccatggaagagtaaaggaatcacaagagacatggttgaaagaggcaaaaacgtttcccattttaggcttgtaattgtaaatggaaaagcttatgttgaaaagtatgacaaatgtatcagacaagagatgtgttcacaatatggggaattttacaacttctaaggttatacccgggaaagataccag

SEQ ID NO: 155094 - DNA, 269 bp, Glycine max
gaaagagggaacaagaagttgacggtagcagaatggtggtctccagtacaaatccccacaataaggagatagctatcaggaggaggattgctagcatatttaataaacgtgaagatgatttcccatctttgagagaatataatgattacttggaggaagtagaggacatgacatttaacttgattgaaggaataatgtttcagatattgaagcaaaaattgccaaataccaggaagaaaatgcagaacaaataatgattaatcgagctc

SEQ ID NO: 155095 - DNA, 268 bp, Glycine max
atcaaaacaaccttctttctttcaggttcttgatcagtgtcaaaaccaaaagggtggttgcaaattgcaatggctaagcatgatgttgagggtggttccttcgctgcaaaggactaccatgatcctcctccagcaccattgattgatgctgaggaactcacacagtggtccttctacagggctttgattgctgagttcattgccacaatgctcttcctttacatcacagtgctcactgtgattggttacaagagccagagtgatgtaa

SEQ ID NO: 155096 - DNA, 265 bp, Glycine max
atatatgtaaaaataaattggggatcaaacagactctctaaactcttccaaaacactctagaattccccacttatttccacaactcactctatatatcagagacactctagaggcttactcacaggaaataaaagatctagccatagttattataggccttatgggaaaagctttgaagattcaagaaagggaaataagagaattatttgaagatggaatacaactaatgaggatgaactattaccctccatgccctgaaccaga

SEQ ID NO: 155097 - DNA, 267 bp, Glycine max
gcaatggaggcgattaggaagagtaggattcttatattggaggaactggttacatagggaagtatatggtgaaggcaagcgtcacgttaggccatccaacttttgtctacactcgccctcttgatgcacaaactccttcctctaaggcacagctttgcaaggagttcaactctatgggggtcacacttgtcctggagaacttgagcatgaccagattctggcagtgattaaacaagtagacattgtgatatgttctcttccataccc

SEQ ID NO: 155098 - DNA, 270 bp, Glycine max
cagagaaatccataccagtaacgaagtcagatggcgaaaatcctacacctgcaaaagctgaagttcctgacaacgagtttgaggacagcgcataagaccagaggttatccctgcaaatgagataggggttacatttgcagatattggtgcgttggatgagattaaagaatcacttcaagagctggtaatgcttcccttagaaggccagacctcttcaaaggtgggcttctgaagccatgtagaggtatattgctttttgggcctcctggt

SEQ ID NO: 155099 - DNA, 270 bp, Glycine max
gtggagtatgaattgtggaccaacagcaatgacgagtgtggagttaaatgtgatatgttgatggaatttgtgaaagattttaagggtgcggcacagatattggagaaaggtggttatactcaatttacaccccattatataacttggtactgtcctcaggcatttacattgagcaaacagtgcaagtcccagtgcataaatcatggaagatattgtgctccggatcctgagcaagatttcagcactggttatgatgggaaagatgtggtt

SEQ ID NO: 155100 - DNA, 263 bp, Glycine max
cagaaggaatctactttgcacttggtgttgcgacttcgtggtggcatgcaaatcttcgtgaagactttgacgggaaagaccataactttggaggttgaaagctctgacaccattgataatgtgaaggcaaagatacaggacaaggaaggtattccaccagaccagcagaggcttatttttgcagggaagcactggaagatgggcgtaccctggctgattataatatccagaaggaatccactctgcatttggtgttgaggctt

SEQ ID NO: 155101 - DNA, 266 bp, Glycine max
gattacccatagatagagagcgcggcataacctaaacttacccttcttctctctgtgtgtgtgcgcatcaaacgcaaccagaagcagccatggccactgcaagaactgtgaaggacgtttctcctcatgagttcgtcaaagcttactcttctcacctcaagcgatctggcaagatggagctgccagagtggctgatattgtgaaaactgcaagatttaaggagttggctccttatgatcctgactggtactatgtcagagctgctt

SEQ ID NO: 155102 - DNA, 266 bp, Glycine max
ttctaattctgcaacaagttccaaaccttcaaatctcactgccccaaaaatcctttcttttttaaatagccatttgacttcagcctctacagcagagtcccagatctctgcattccaattcccatggcccgtcgctatgacagtaaccccttcgatgaggaagaagttaaccccttctataatcctggaaggttcccgctgccactaattcaaggctttcacctctgaagccagaacctgttgattataattatggctttggtgcg

SEQ ID NO: 155103 - DNA, 264 bp, Glycine max
gacagataaagattcaaaaaagaattgatattattcaagttataatatatatgggatttccaaagtttttaatagagggtaagtctcaaaaaatcgaagaattacagacgaatacgcaaaaaaactgaattgtgtgaatcgaaaaccaaacattgctattgtaaaagttgcaaatgcttataagcacccaatattattggagaatttatagctggacaattaaagaatagagtttcgtttcgtaaagcaatgaaaaaagctatt

SEQ ID NO: 155104 - DNA, 264 bp, Glycine max
ctcgagcctaagacattgaaagtgcatattgggaacttgtagtgaaggatatccaagatgcctgcagactatttgaaccaatctatgatcaaacagatggtggtgatgggtatgtttctgttgaagtatctcctaggctcgctgatgacactgagggaaccattgaagctgcaaaatggcttcataaagggttgatcgccccaatgtgtatattaagattcctgctacagaggcatgtgtgccttcaattaaggaagttattgc

SEQ ID NO: 155105 - DNA, 262 bp, Glycine max
cgaggatccattggagggcaagtctggtgccagcagccgcggtaattccagctccaatagcgtatatttaagttgttgcagttaaaaagctcgtagttggaccttgggttgggtcgatcggtccgcctccggtgtgcaccggtcggctcgtcccttctgccggcgatgcgctcctgtccttaactggccggtcgtgcctccggtgctgttactttgaagaaattagagtgctcaaagcaagcctacgctctgtatacattag

SEQ ID NO: 155106 - DNA, 261 bp, Glycine max
gatccgaggagttaccctttcttttcttttttcttttttctctttcctcattctacttaaaactcccaccagtgatggcaggtttggctccagagggaacacaattcgatggtcgccaatatgatgctaagatgagtgaattgctttccactgatgggcaagaactcttcacctcttatgatgaagtgatgacagctttgatgcaatgggattgcaagagaatcttctgcgaggcatatatgcttatggttttgagaggcc

SEQ ID NO: 155107 - DNA, 262 bp, Glycine max
tctctttgcaactgcatccgttgtttacaatgaaggctactctgaagggaaagtacgacgtcgacaaaaacggcgctgcctttgccaacatcgccgtcaacgccggcgacgtcaagttccgagcctccgtaacggaagccactttcattaacggccccagcctcaccggcttggccctcgctgtcgaaaacccggttccttcatcgtcgactacaacgttcccaaaaaggactttcggtttcactttatgaacacggttagg

SEQ ID NO: 155108 - DNA, 260 bp, Glycine max
cgtgactcacatgtgcggcgcgccggtggtgctcaacatgttaaccaacgcgaactccccgttggagaaaccggttcagatcctcaccgccggatcgccgcctcctgcggcggtgctcttcagaacagaggctttggggtttgtcgtgagtcacgggtatggtttgactgagaccggagaattggtgtgtcatgcgcgtggaagggggagtggaacaagttgccggcgacggagagcgctcggctgaaggcgaggcaagg

SEQ ID NO: 155109 - DNA, 262 bp, Glycine max
attttgataggacgaccctttggtgtttggatcttcaagaaagagagacccttgggatttcgtcaccatgagtctcttcggtcttggaaacagaaaccaaaaaacatttcgtccaaaaaagagtgctccatctggaagtaagggtgctcaacttcaaaaacacatcgatgccacgttgggtagtgggaacttgagggaggctgttaaactgcctcccggtgaagatattaatgaatggctagctgtaaacaccgtggacttc

SEQ ID NO: 155110 - DNA, 259 bp, Glycine max
cggttgtggagccttacaatgctactttgtccgttcaccaactagtggagaatgcagatgagtgcatggttcttgacaatgaagcactctatgacatttgcttcaggaccttaaaactcaccactcctagttttggtgatctgaaccacctgatatctgcaacaatgagtggagtgacctgttgctgaggttccctggacaactgaactccgacctgaggaagctagcagtgaacctgatcccattcccacgtctccac

SEQ ID NO: 155111 - DNA, 262 bp, Glycine max
ccaagtgaaaaagcaactaagcatagtgtgtaagaaagggagaaaaacaagtgctgtgtagagagaaaaatggctaggtggtgcatgatcttggtggttcttgctcttgccgtggttgcaagtgccagaaacatgcccaatgacgctggtttggaggaccagaagaacttccttgggtatgggttttcggagttggcaacaatggccttccctttggtggagtgggttctgggtttgatggtaatatgggtgggccttctgg

SEQ ID NO: 155112 - DNA, 147 bp, Glycine max
aggcacttctcatgatcattttctgccttcatcaagtgctggaatgttttatgcagtgcctgaaaattatgtacaccagccttctaattctaattatgacagacaagcattttctgctgctgatgggggatttattgatcttacaat

SEQ ID NO: 155113 - DNA, 259 bp, Glycine max
gctagaagcaataagatgaaaatgaaagtgcttgttttgtttgttgctacagttttggtagcatatgaatgccatggctcagactaccagaagttccctctccaaatgaaaactgggtttggtgggcaatacagcaatgaggtggcatgtgccagttggaggcttggcgtggaagcaaacaacgtgtcaagtggcaaactgttcctgcagcttgcggagagtacatagctgactacgttctaggagaccaatatagatc

SEQ ID NO: 155114 - DNA, 258 bp, Glycine max
aagaggggcagctagaatcagagaccttttcaatgcagcaaggaaatttgcaccatcaatcatattcattgacgaacttgatgcagttggaggcaagcgtggaagaagtttcaatgatgaacgtgaccagacgttaaatcagttgctgacagaaatggatggatttgaatccgagatgagagtggtgtcattgcagcaactaaccggccagaagccttggatccagctctatgtcgccctggtcgtttctcaagaaaa

SEQ ID NO: 155115 - DNA, 260 bp, Glycine max
  unsure (1)..(260): unsure at all n locations
catgatattcgtggcagggacacccttctataggcacaaagtgcctgcagggagtaccttcactagaatggctagggtcgttgtggctgctttgaggaaatcaaaagttcctgttcctagtgactctaaagaactatatgagtttgacaaggaagagtatgcaaagaaagggagctacagaattgacacactccaacattaataantcttgacaaggcatgtgtgaaaacagattcgaacactagtccatggacgctatg

SEQ ID NO: 155116 - DNA, 257 bp, Glycine max
gggagattgagactcctgaaagcctttttatctttccttctttgacttcaggtcttaaacggccattaccatctggtcttttggaaaatgagtggggaactttgttaagaagaccctttataagagttccagaaaatggaaccattgagctctcaaactcaattccaaatctctactcagaacactgatgagaatgcttttgaaaccccagctgattaacaataatggagcttttttatctgccatgcaacaagaat

SEQ ID NO: 155117 - DNA, 111 bp, Glycine max
tatcgagataactcgaaacagtgtgatgcgaatgaagtgtcttgttttcttcgttgctgacaattttgtggagcatcggcaatgtccatagcgtacgagtatgttcccctc

SEQ ID NO: 155118 - DNA, 246 bp, Glycine max
ctgccagtagtcatatgcttgtgtcaaagattaagccatgcatgtgtaagtatgaactaattcagactgtgaaactgcgaatggctcattaaatcagttatagtttgtttgatggtatctactactcggataaccgtagtaattctagagctaatacgtgccacaaaccccgacttctggaagggatgcatttattagataaaaggtcaacacaggctctgcctgatgctttgatgattcatgata

SEQ ID NO: 155119 - DNA, 249 bp, Glycine max
ccaaatccatgatgcctatgttaagctacagatcggtaaccagattttgaagacaagacctgttcaatcaaggaccatgattctgcgttgggatcaagagctgatgtttgttgctgctgaaccctttgaggaacctctgattgtttcagtggaaaatcgagttggtcccaacaaagacgagaccattggagctgttattattcctgtagaccaaactgacaagcgagatgatgatagacttatccacac

SEQ ID NO: 155120 - DNA, 247 bp, Glycine max
gctgtatcttggcgcagtgaagggataaactacaagaaaaatgaggttttcttggttgaggtggagagtgttaacatacttgtcaatagcaatggacaaataattaggtctgatgttgttggggcattgaagatgagaacatatctgagtggtatgcctgagtgtaaacttggattaaatgatagagtattattagaggcacaaggtagaacaaccaagggaaaatcaattgacttggaagacatca

SEQ ID NO: 155121 - DNA, 248 bp, Glycine max
ctgtgatattcagctcggattgaaccctcttgacatgatctccggtggctcccccgtcggctccgtcgcctccaaggtcccaaggatcggaatcctccctcgtgatgctaaggatgagtcgatgatgaagtggtttgaggtgccggggttcaacatcattcacgcgataaacgcgtgggaggaggacgagggaagaacggtggtgctggtggcgccgaatattctttcgatggagcacgcgctggaga

SEQ ID NO: 155122 - DNA, 247 bp, Glycine max
gcacgcttaagctcaccactccaagctttggggagctgaaccatctaatttcagccaccatgagtggtgtgacatgttgtcttcgtttccctgggcaactcaactcagatcttcgcaaacttgctgtgaatctcattcccttccctcgtctgcactttttcatggtgggttttgccccactcacatctcgtggttcccaacagtacagagctcttactgtacccgaattgacccaacaaatgtggga

SEQ ID NO: 155123 - DNA, 237 bp, Glycine max
ggaaggtgttgatatgacatatttgaaaaatgttatcttaaagctgcttgagactggtgaagttgaggtattgctaccagttattggaatgctgcttcagtttagtccagaagagatacagaagtgtcaacaggcgtatcacaactccacagatgttccaccaccaaatcctgcaagcgatacttcaggatctggcctatcgcttttctcaagattcacattttcttaatggcataa

SEQ ID NO: 155124 - DNA, 248 bp, Glycine max
cgagttataaaaacggtgaaacgattcaagatatttcaacaggacaacctgggacgccgtttgattacggtgccggacacgtcgatcccgtggccgctcttgatcctggtctcgtctacgatgccaacgtggacgattacttagggtttttctgcgcactaaactactcgtcatttcaaatcaagcttgctgcgaggagggactatacgtgtgacccgaagaaggattacagagtggaggattttaat

SEQ ID NO: 155125 - DNA, 246 bp, Glycine max
agaaggcaagatgtcgaagagaggacgcggtggttcggcggggaacaagttccggatgtcgctgggtctgccggtggcggcgacggtgaactgcgccgacaatacgggggcgaagaacctctacatcatatcggtgaaagggatcaaagggcgtttgaaccgtctcccctcggcttgcgttggcgacatggtgatggccaccgtgaagaaggggaaacccgatctgaggaagaaggttttgccagc

SEQ ID NO: 155126 - DNA, 242 bp, Glycine max
ccaacatcttgcttgatgagaatttcacagccaaggtttctgattttggtctttcaaaggatgcaccaatggggcagggtcatgttagcactgctgtgaagggtagctttggttatcttgaccctgagtacttcaggaggcagcaactgactgaaaagtctgatgtgtactcatttggggtggttctgcttgaggcactctgtgcaagaccagccatcaaccctcagttgccccgcgaacaa

SEQ ID NO: 155127 - DNA, 248 bp, Glycine max
  unsure (1)..(248): unsure at all n locations
ttcacagctgatctatttgccatgaaccacacagatttcattntcnaccagtaccttccaggagattgctggaagcaaggacactgttggacagtatgagtctcacacagcctttacccttcctggactctaccgtgttgtgcacggcattgatgtctttgatccaaaattcaacattgtctcccctggagctgatcaaaccatttacttcccccccaccgaaactagccgtaggttgacctccttcc

SEQ ID NO: 155128 - DNA, 242 bp, Glycine max
gtatggattgcacacttatttttaaagtaagtagatttggtgctggctactttataggctgtgatcaacatcctaggtgcaagtacattgctaaaacattatacggtacagaggaggaagaggatgcatctcagccaaacagtagagtagaggaaccaaaactcctaggtgttactagtggttcatatgagaaggttcttttgaaaagtgggccttatggagtttatgttcagctcggagaa

SEQ ID NO: 155129 - DNA, 241 bp, Glycine max
cactttctctctctctctctctcacccagatcttgtagcaatggcgagcgctcccactccacgcgaagagttcgtgtacatggcgaagctggcggagccggccgagcgctacgaggagatggtgtcagttcatggagaaggtctccgcctccgccgagagcgaggagctgaccgtggaggagcgtaacctcctctccgtcgcctacaagaacgtgatcggcgctcgccgcgcctcctggcg

SEQ ID NO: 155130 - DNA, 233 bp, Glycine max
ggcatgtaggaatcgacagatgtcttagagttttctaccacaataattatgttatatgtgtcaatttcaatcctgtcaatgataattttttcatcagtggttcaattgatggaaaagtgcgtctatgggaagttgttcactgtagggttagtgattacattgatatcagagagatagtcacagctgtgtgcttccgacctgatggaaagggcacaattgtgggtaccatggca

SEQ ID NO: 155131 - DNA, 236 bp, Glycine max
ttgaaaaaactgttatgaagcttgttgttgatgctgagacagataaggttctcggagcctcaatgtgtggacctgatgcacctgaaattatgcagggtattgctgttgcgttgaagtgtggagctaccaaggcacagtttgatagcacggtgggaatacacccatcggctgcagaagaatttgtaaccatgcggtcagtgacaaggcgcgtagctggaactggaagtgtcaaaccc

SEQ ID NO: 155132 - DNA, 248 bp, Glycine max
gagagagtagagaaaaacaatgtcagggctgaaggaattgctgaagaaagggttaggtttaggcgacatggcgttcaacgccggcggcggagccgatatcctggttccccggccacatggccgccgctacacgtgccatccgccaccgcctcaaactcgctgacctcgtcatcgaagttcgcgacgctcgcattcccctctcctccgccaacgccgacctcccgccacacctctccgctaaacgacgc

SEQ ID NO: 155133 - DNA, 237 bp, Glycine max
tatcgatcctttagtccttcggaatttgaagctagaggtgtcagaaaagttaccacagggataactggcttgtggcagccaagcgttcatagcgacgttgctttttgatccttcgatgtcggctcttcctatcattgtgaagcagaattcaccaagtgttggattgttcacccaccaatagggaacgtgagctgggtttagaccgtcgtgagacaggttagttttaccctactgatg

SEQ ID NO: 155134 - DNA, 234 bp, Glycine max
ctagaactagaactagggtttcatctttgccatcagaaacaacaatgatttacgacgttaactctccccttttccgatccttcctcagccagaagggaggctcctccgataagaggaaaacggatgaacagaagccaaaagagcagaaacccaaagccagcgagaacaaacctataatgacagagtgacaacaaatttgctgcattcagttgtagaatgataataggtggtaga

SEQ ID NO: 155135 - DNA, 247 bp, Glycine max
caaaacagcgttgaggggacaatcaagcagacaatcgagaaggccttttgggatggtatcatggaaactgtggagggggaccagcccaactatgactggattgttcaacttatgggggaggttagggatgaaatttgtgagatggctccaaaaagctggaaggaggatatttttgctgccatcgatttagaaattctttcacaggtgctgaaatcagtttgcagaagctctcagctccagcgaatga

SEQ ID NO: 155136 - DNA, 251 bp, Glycine max
gccagcgagtgagtgagcgagccaggtagggttttcggtgttcccctctttgtgttcgttcgcgacgatggggtccatccccgatccaggcgagttgagcgagttgactcagccgagcttcgacgagttccagcgccaaacctctctcatgaccagctgcaccctcctctggaaggagctctccgaccacttctcctccctcgagcaagacctcaaccacaaatccgaagccctcaagcgcaagattcaca

SEQ ID NO: 155137 - DNA, 251 bp, Glycine max
gaaagattcccaaaacacgtttgctatgctgacaaccttcaatgaagttgatatgactaatttgatgaagctcctttctgattataaggatgcttttgtttcaaagcatggagtcaaattggggcttatgtctggctttgtgaaagctgctgttaatgcactccaacatcagccgattgtcaatgcagtcattgatggtgatgatattatatacagagattatatagatatcagcatagctgttggtactt

SEQ ID NO: 155138 - DNA, 258 bp, Glycine max
ccaacttggtcccatatcccagaatccatttcatgctttcctcctatgctccagttatctctgctgagaaggcctaccatgaacagctttcagtggctgaaattaccaacagtgctttcgagccatcgtccatgatggccaagtgtgaccctcgccacggaaagtacatggcatgttgcctgatgtaccgtggtgacgttgtgcccaaagatgtgaatgctgctgttgccaccatcaagaccaagaggacaattcagt

SEQ ID NO: 155139 - DNA, 255 bp, Glycine max
cttgatccttctttttctccttgaactcaaacatggcagatgaggtggttctgctagatttctggccaagtccatttgggatgagggtcaggattgcacttgctgaaaagggtaccaaatatgagtacaaagaagaggacttgaggaacaagagtcctcttctcctccaaatgaacccggttcacaagaagattccggttctcatccacaatggcaaacccatttgtgaatccctcattgctgttcagtacattg

SEQ ID NO: 155140 - DNA, 254 bp, Glycine max
ctaagatagatctcgagatgggtcgtggcaagattgagataaagttgattgagaaccccaccaacaggcaagtcacctactccaagcgaaggaatggtatcttcaagaaagctcatgaactcagtgttctctgtgatgccaaggtttcactcatcatgttctctaaaaacaacaagatgcatgaatacattagccctggcctcacgacaaaaaagatcattgatcagtatcagaagactttgggggatattgat

SEQ ID NO: 155141 - DNA, 253 bp, Glycine max
attctctttcagtttttggcattgaagaatctgagatcggaaaattcacctctccaacccccaatcccatcgttgcaaatgatccgattcattctgttgcagaacaggcagggcaagacccgtcttgccaaatactacgttcctctcgaggattccgagaagcacaaggtggaatacgaggttcaccgcctcgtcgtaaacagagaccctaaatacacaaatttcgtcgagtttcgtacgcacaagataatat

SEQ ID NO: 155142 - DNA, 254 bp, Glycine max
atccaacaacattcgatctttatgatgattcatcaactacatcatgtccatattacttcaaatggatccatgaagatctaaaaccatggaagagtaaaggaatcacaagagacatggttgaaagaggcaaaaacgtttcccattttaggcttgtaattgtaaatggaaaagcttatgttgaaaagtatgacaaagtgtatcagacaagagatgtgttcacaatatggggaattttacaacttctaaggttatac

SEQ ID NO: 155143 - DNA, 257 bp, Glycine max
gaaagaaagaaactgcaacttcctctgttttgctcccctgtttaggccttttcataagcttagaatgacacacaagtcattttccattgctctagtgactctcattgctgttctctttgtcaacatgaacatccaaggtgccactgctgactatggtagttggcagagtgctcatgccactttttatggcgggggtgatgcttctggcacaatgggtggagcatgtgggtatggaaatttgtatagccagggctatg

SEQ ID NO: 155144 - DNA, 262 bp, Glycine max
caagcgacgccgtttgggtcctcttccacctcgccttcttctcccaatgccttccctccgcctgggcccactcggcgatcctcctcccgggtcaactcgcccgtgactcaccgcagagctgccccgcccctgaccccaacctctactacaagccagtcatcggaatcgtcagccatcccggcgacggcgcctccggccgcctcagcaacgccaccggcgcctcctacatcgccgcctcctatgtcaaattcgttgaggccgc

SEQ ID NO: 155145 - DNA, 252 bp, Glycine max
gtagaagccaggctgagccatcttctgattcagccaaagtccaagaactgagtgtgtatgagatcaatgagagagatcgtggaagccctgcttatcttagattgcgccagaaaactgtcaattcccttggtgatctagtccccttcagcaacaagttgtattctggcatgtttgcaaaagagggtggggataacagctggaatctgtgtcttgatccaaaacaaagccgagaagaagggagataggtatgag

SEQ ID NO: 155146 - DNA, 250 bp, Glycine max
gaaagtgagaggagagagaaagtagcagatcctccatggcctccaccaaggaacgtgaacacttcgtctacgtcgccaagctcgccgaacaagccgaacgctatgaagaaatggtggaagcaatgaagaatgtggcgaactaaacgtggaattgacggtagaggagcggaaccttctgtcggttgggtacaagaacgtggtgggtgcccgtcaggcttcgtggaggattctttcctcgattgaacagaaa

SEQ ID NO: 155147 - DNA, 250 bp, Glycine max
ctcttgctgagaagatgatgatgtttatgcttgcttccttcttgcattcttttgagtggagattgcctagtggcacagagcttgaattttcaggcaaatttggtgttgttgtcaagaaaatgaaaccattagttgttattccgaagcctagactatctaaaccagaactctatcaatgatgttgtaatagtgaaatgcatgcttattacaacttatataataagatttgttacttgcttcggctgagtta

SEQ ID NO: 155148 - DNA, 252 bp, Glycine max
tacctcgagccgaatcggctcgagcggctcgaggttaaggatccatacgctccccatggagtacggcttttgattgaggactatccttatgcttctgatgggctagagatatgggatgccatcaagtcctgggtgcatgaatatgtctcattctactacaagtcagatgcagcaattcaacaagatcccgagctccaagcttggtggaaagaacttgtccaagtgggtcatggtgatttgaaagataagcca

SEQ ID NO: 155149 - DNA, 251 bp, Glycine max
cttagagatgaagaatgtgatagacaagccgtgaaaagggccttggcttttgttgtagcctggtccttagatcacttggtttttggtgagtaccctccttagatgcactctattctcgggagtcagttgccaagattctctcctgaggagaagagtctcataaaaggcagcatagacttcattggcatcaataactatggaactctctatgccaaggactgctccctcactgcttgtcctcttggaacaga

SEQ ID NO: 155150 - DNA, 252 bp, Glycine max
gagcgcagcgtacagaccgactacacgctgcgatgtgaccgcaattctcgttttatatggtcttccaaggttgcttactggatcaatcctagctcatgagatgatgcatgcatggctgcggcttaaaggttatcggactctaagtcaagatgttgaagaaggtatctgtcaggttttggctcatatgtggttggaatctgaactttcttctgcatcaggcagcaactttgtatcagcctcatcctcatctgc

SEQ ID NO: 155151 - DNA, 252 bp, Glycine max
aggaattcatggaagccttggctgctggtgctgatgttagtatgattggacagtttggtgtggggttctactctgcatatcttgttgctgagaaggtcattgttacaaccaaacacaatgatgatgaacagtatgtttgggagtctcaagctggaggttctttcactgtcaccagggataacactggtgaggttcttggcaggggtactaagatcactctctacctcaaggaagatcagcttgagtaccttg

SEQ ID NO: 155152 - DNA, 253 bp, Glycine max
gctagaagcaataagatgaaaatgaaagtgcttgttttgtgtgttgctacagttttggtagcatatgaatgcccatggtcagactaccaaaagttccctcttcaaatgtgaaactgggtttggtgggcaatacagcaatgaggtggcatgtgccagtttgaaggttggcctggaagcaaacaacgtagtcaagtggcaaactgttcctgcagcttgcggagagtacatagctgactacgttctaggagaccaa

SEQ ID NO: 155153 - DNA, 250 bp, Glycine max
caaaaaggaaaagaaaaccaatatgaagttcactataatcacaatatttttctctttatttctacttgactttggttttgcacaacagggggatcttgacatatcaagatttggaggaaaaccaaatacaaatataggccaggctttcttaagtgcctggactcaagcatgtgcatcaccaactgctgtcaaaattgtgattccagctggcacataccaaatgggtgcagctgatgtcaaaggtccttgc

SEQ ID NO: 155154 - DNA, 250 bp, Glycine max
tggatcttcaagaaagagagacccttgggatttcgtcaccatgagtctcttcggtcttggaaacagaaaccaaaaaacatttcgtccaaaaaagagcgctccatctggaagtaagggtgctcaacttcaaaaacacatagatgccacgttgggtagtgggaacttgagggaggctgttaaactgccccctggtgaagatattaatgagtggctagctgtaaacactgtggacttctttaatcaagtgaat

SEQ ID NO: 155155 - DNA, 250 bp, Glycine max
caagttggtttatgttcttccaaaaggcatgaatctaagagtgctggaattgaaatggtgactgaaaaggagcagggagagttgacggcaagagataatcctttgtgttcttcttgtcagatgcttgttctttggatccagaatcaactaaaacaaaaggcaacgaaggacagagtattcaactatgtgaatcaactgtgtgagagcctaccaagtccatctggagagtcagtgataagctgtaatagtc

SEQ ID NO: 155156 - DNA, 251 bp, Glycine max
tgattatcttgatgctgctgatacacctggatggtattgtggacctaatttcttttcaactgatgtgctccgtaattttgccaagacccagattgattacatccttggaaataacccaaggaatatgagctatgttgtaggttttggtaatcattacccaaaacatgttcaccatagaggagcatctataccgaagaacaagatcaagtatagctgtaagggtggatggaaatggagggacacttctaagc

SEQ ID NO: 155157 - DNA, 254 bp, Glycine max
gaagaaaccatatcatgggttcagaaaattgtatagataagacgcactttgtggcggtgcatggggcatgccatggagcatggtgacggtataagctcaagccacgcttggaatctgctggccacaaggtcacagtgcttgaccttgcagcttctggagccaacatgaagaaaattgaagatgttgacactttttcacagtatactgagcctttgttgtttctattggacacaattccctcaaatgaaaaggta

SEQ ID NO: 155158 - DNA, 276 bp, Glycine max
ctaccatccagcgatctgaaagtgtaaattccttctttgacaaatatgttcataagaagacctctgtccaagattttgtcaaacagtatgaagcaatcttgcaagacaggtatgaagaggaagcaaaagcagattctgatacatggaataaagtggcaaccttaaaaactccttctcctttggagaagagtgttgcagggattttcacacatgctgtattcaagaagattcaagctgaggttattggtgcagttgcttgtcatcctaaagctgaca

SEQ ID NO: 155159 - DNA, 273 bp, Glycine max
ccaagttcaaggggctgatgtgagcaaagtgagtaacaacagtgttagatctcagtcacaacaccggagccattctatttctagctctgatcatcatcacttagcaaaccctgcacttggatctgtccgttcgcttggagacaccattttattgattgttgccctttgtgcacattctgtgtttgagggcttagcaattggagttgctgagaccaaagcaaatgcatggaaagccttatggacaatctgtctgcacaagatatttgcagccat

SEQ ID NO: 155160 - DNA, 268 bp, Glycine max
gtaatagtcgatggttcttcagattttggtttgaagcccaaaattagttttagtgatatggggactgcatcatctatgttaactcaatacgacatcgaggaagttcaggaacactgcaataatgtattttcccagcaggaaattgtgtccttgtatcaaaggttttgtcaacttgaccgcaatgccaagggatttatttccgcagatgagttcttgtctgttcccgaatttgccatgaatccactttctcagaggctgctaaagatgg

SEQ ID NO: 155161 - DNA, 270 bp, Glycine max
atgcgttcttgctctcaacaacaatcacacaccgccatcgaagccttcgttcttttcttcttcgttctcctttttgctctcgttcgagggttctttcgtggggaacactgcagatttcaccacccgggtcttattcatccgtgcccatgtccgaagttctcggctttcccggagttgacgatttttgccctatgggatcaatatacgccaaccccaaggaagcaagtttcttcttgtcccttggccctcaagttgatgtatactttcctc

SEQ ID NO: 155162 - DNA, 270 bp, Glycine max
  unsure (1)..(270): unsure at all n locations
gtgaaccttctagaactataatagacttatattccatggctccgccgctcgaacacaacggcgtttccaccagcggtgactctctgagatctattccgacgccgtttctcaccaaaaccttccaactcgtcgacgatcacaccatcgaccatgtgatttcgtggaacgattctggatcgtccttcatcgtctggaacaccacggtttcgccaaggntttgttccnaaatatttcaagngcnncaactnctccagcttcgttngcnaatca

SEQ ID NO: 155163 - DNA, 274 bp, Glycine max
atgaagagacttaacagctcagattcttccactgccctcatgacaatttttccatcatcatcaacagaggaacatagtccgaggaacagccaccacatgtatggcagggagttccgatcgatgttggacggactcgacgaggaagggtgtgttgaagaaccggggcatcaatctgagaagaagcgtcgactaagtgtggaacaagtgaaggctttggagaagaactttgaggttgaaaacaagcttgaacctgagaggaaggtcaagcttgccc

SEQ ID NO: 155164 - DNA, 275 bp, Glycine max
gcataaccatgtggcggagactcttctcttcttcaaacctcaaagccctacacacaacactctctccttctcgtccccgactcgccgcccagactctcctcgcccgccacttcaccgcccaatcaggtgcttcttccctcaaaaagagggttgaagatgtcgtgccaattgctaccggccacgagcgtgaggagattcaggccgatctcgagggaagggatattcttgaaataaaccatcccgtaggtccttttggcacaaaggaagcacctgct

SEQ ID NO: 155165 - DNA, 271 bp, Glycine max
ctggcgactcagatcctctctcgcatcttccccaaaaccctatcccccttcctctcccgttctctctccaccgccccctctcctccctccctctccgcgctctccttcctccgccgcatctccgttgccgccaacccctccctccaccgcgccctcctccccaactctccctccctccgcgccctctccacacgcgccactacctcctccctcaacgaccccacccctaactggtccaaccgtcccccgaaagacaccatcttgctcgacg

SEQ ID NO: 155166 - DNA, 270 bp, Glycine max
caaaaatggcacctgcaacactgtctctgtctctcctcctcctgttctcactcagcatcgccgtaaccgttagatcgagcgactacgactacgattgtgtgtacactgcatacgttagaaccggttcggtgttgaagggcggaacggactctaagatcgggctgaagctgtacgacaagtacggctactacatctacattaaaaacctcgaagcatggggcggcttgatgggcaagggctacgactacttcgagcgcggcaacctcgaca

SEQ ID NO: 155167 - DNA, 273 bp, Glycine max
cactccctcctcttcacacattttcttagctctctccaacaatccctctcgttcacactttcagattgtgtgaagatgggggctggtggccgaactgctgttcctcctgccaacaggaagtcagaggctgaccctttgaagcgggtaccatttgaaaaacctcagtttagtctcagccagattaagaaggccattccacctcactgtttccagcgctctgttctccgctcattctcctatgttgtttatgacctcaccatagccttctgcctc

SEQ ID NO: 155168 - DNA, 267 bp, Glycine max
ggggctattgctggtgcttattcaagggcatacaaggaaacttttacactgacatatgtgactggtagaactgttggaattggagcttatcttgctaggcttgggatgagatgcatacaaaggcttgatcagcccataattcttactggtttttcagcattaaacaaacttcttggtcgggaggtttacagctctcacatgcaacttggtggacctaaaatcatggcaactaatggagtcgttcatcttacagtttccgatgatctt

SEQ ID NO: 155169 - DNA, 270 bp, Glycine max
agctcatggaagctgtggatgactacattcccatccctcagcgccaaactgaacttccctttttgctggccattgaggatgttttcaccatcaccggtcgtggaactctcgccaccggaagggttgagagaggtactattagggttggagagactgttgatattgttggtgtgaaggagactaggaacaccactgtgactggggtggaaatgtttcagaagattctggatgaggctttggctggggacaatgtgggcttgttgcttaggg

SEQ ID NO: 155170 - DNA, 271 bp, Glycine max
gagctattgtatgactatgaggtcaaaatcaaccaagctgttttccctggactgcaagggggccctcacaaccacactattactggtttagctgttgcattgaagcaggccacaactccttaatatagagcatatcaggaacaagttctcagcaacagtttcaaatttgcacaggctctaagcgagaggggctatgagctggtttctgggggaactgagaatcacctggttttggtgaatctgaagaataagggtattgatggctccagag

SEQ ID NO: 155171 - DNA, 168 bp, Glycine max
gtcctgaagcactggatcttattgatcgattattgacagaagatcctaatcaaagactaggatccaaaggggcatcagaggtaaagcaacatgttttcttcaaggatataaactgggagacacttgccaggcagaaagctgcatttgttcctgcttctgagagtgctc

SEQ ID NO: 155172 - DNA, 272 bp, Glycine max
ttcgtcctttcaggctttccctgatgctttgtttcaccaattgctcctggcgatggctcatcctgaccatgaaacacgagttggagcacacagcatcttttctttagtgcttatgccatctccattttctccccagttagaccaaaaaacaaaggggtatcagaaggtaccaagcgaaagcttctccattcagcatgaaagctttttaggagcagaacagatcaatgggaaacctatggaaggacaggcagtagttggtgttagtgggaaat

SEQ ID NO: 155173 - DNA, 267 bp, Glycine max
ttgaagatgatcaaaggttgctagtatatgaatttatgcctcggggaagcctggaaaatcacttgtttaggaggtccctacctcttccatggtccattaagatcaaaattgcactaggagctgcaaagggtcttgcttttcttcacgaggaagctgaacgaccagtaatatatagggatttcaaaacttccaatatactattggatgcagaatacaatgctaagctctcagactttggacttgcaaaagatggtccagagggtgata

SEQ ID NO: 155174 - DNA, 272 bp, Glycine max
tttgactctctctctctcttctttaaacacccctttcttgtccgctccatcgcctcttcaccacactttctctctcactcacagcacggtggtgacgaccatggttagagacgatctatgcatcaccgttcccagcttcttccgctgccctatctccctcgacgtcatgaaatcccctgtcagcctctgcaccggcgttacctacgaccgttccagcatccaacgctggctcgacaacggcaacaacacctgtcccgccaccatgcaggttc

SEQ ID NO: 155175 - DNA, 268 bp, Glycine max
ctttgctctctgtgaggcttcaatttccaattagggtttcgcttagagtaaccaattaccatgggagtcttcacctttgtcgttcgcaaatccggcgccgaatggagcgccaagcaacattccggcgacatcgaggcctccgccgactccacctacgatctccaaaggaagctcgtgcaagccgctctcgccgttgattcctccggtggagtccagtcctccttctctcccgtgtctcctacctccgctgtgttccaggtgatagtgg

SEQ ID NO: 155176 - DNA, 166 bp, Glycine max
aagaaaaaaaaaaacccttagccaacacaaccatcatggtcacctctgctattcatcaatcagcattcactggtcaaactgctctgaagcagctcaatgagttcgtccgcaagaccggtggcgccggcaaaggtcgcactaacatgcgccgcaccgtcaagagtgc

SEQ ID NO: 155177 - DNA, 269 bp, Glycine max
gctgtgactcattgtaatgatccctatgttgatgactattatcacctagcttgtctttctaaaaaaactggtgctaagttgaaaaaatcattttgcccaacccaaataaaggaacttccttctcgagcccgctccaatacagactctcatggttttcttcaggtggatgctttagggagggtttcattcctggctattcgccggcctcatgctctgcttgaagttgatccgtcaaacagtggtatctctgagcgaaatatttctgagaa

SEQ ID NO: 155178 - DNA, 269 bp, Glycine max
ctgcaattcactctgtacaattcttcgttcgttctctgcagttatatcctttttgagcttcaatggcggacgctgaaaccttcgctttccaggctgagatcaaccagcttctaagtctcatcatcaacacattctacagcaacaaggagattttcttgcgtgaactcatcagcaatgcttctgatgctttggataagattcgattcgagagcttaaccgacaagagcaagctcgatgctcagccagagctcttcattcgtcttgtgcct

SEQ ID NO: 155179 - DNA, 268 bp, Glycine max
cgccgagaaagagagagagacccaggtttacttggccaagcttgccgagcaggccgagagatacgaagaaatggttgagtgtatgaagaaagtagcaaaacttgatcttgatctaactgtggaagaaaggaacctcctctcagtgggatacaaaaatgtgattggtgcacgaagggcctcttggcgcatcatgtcctcaattgagcagaaggaagagtctaagggaaatgagcacaatgttaaactgatcaagagttactgccaaaaa

SEQ ID NO: 155180 - DNA, 267 bp, Glycine max
cttttgagccttgagttcgataattttgctgaagtgcgcaaactctatgaaggtggagttacattgcctacaaactttcttagcaagatcactcctataccaataattaaggaactttttcgaactgatggcgaacagttcctcaagtatccaccacctaaagtgatgcaggtcgacaagtctgcatggatgactgatgaagaatttgcaagagaaacaattgctggtttgaatccaaatgtcatcaagattattgaggagttccca

SEQ ID NO: 155181 - DNA, 268 bp, Glycine max
cccaagagttgaagaagaatcagagttcagaatccatggcaggtgctatagtaaagtacggaatcataggagtaggaatgatgggtagagagcatcttgtgaatttgtaccatcttcgcacccaaggcgtggcagttgttgctattgctgaccctcatcttccctctcaacaactcgctcttgacttagcacactcctttacttggcctctcaaggttttctcaggtcaccaggagctgttggacagtggactatgtgatgttttggt

SEQ ID NO: 155182 - DNA, 265 bp, Glycine max
  unsure (1)..(265): unsure at all n locations
tctgaatagaaatggcttcggagactgagacgttcgcttttcaggccgagatcaagcagctcctcagtctaataatcaacacgttctacagaatataggagatgtntcttcgtgagctgatcagaaatgcatctgaagctttggataagattcgatttgagagtcttagagagaagatcaagattgatgctagcagggggttgttcattcacattattcctgacaagacgaacaagacattgtctatcattgacagtggtattgg

SEQ ID NO: 155183 - DNA, 266 bp, Glycine max
gagaattaggcaataagctaaagatgtctgacgattgcaaaggtaagagctcatggcctgagcttgttggagtgcaagggacagtggcagaggctacaattgagagagagaatcctttggtgaatgctatcattgtgcctgaaggaaacagggtcatcactgattaccgctgtgatagggtttgggtttggatcaacaaagatggaattgtcaaggaagttccacacattggatagaaacttttccctctagctagggttcaaata

SEQ ID NO: 155184 - DNA, 268 bp, Glycine max
cgtcatcgaactacccacgttctgctccttcgcagatcatttcgcgtttagcttccacgaaagatggcagacaatgaggatggaggggataagacatctcgtgggaatgaatgggaggttgtatctctcacagcatcaacatatgcagctgctcctggtcctgatgaagttgagatgaaggatgatgggaaagaagatgtatatgggcaggatgaaggagaaacgtcacatgctttattcatgtctagacactttgtctttccaccca

SEQ ID NO: 155185 - DNA, 267 bp, Glycine max
gttgaaaatactttcattgtaattatgctatcaaagagtaagagcccatccggtgaaggatctactacttcaactgctccatcaaccaaggccccacagacaagtacagttcctgcttcaacccctccagcgtcagtagttcctcaagcttctgctcctgctcctgctcctgctcctgctgcaactggggcactgcctgcatcagttactgcacctatatcttcaccttctcctgctccagccccaactcctgctcctatatcttca

SEQ ID NO: 155186 - DNA, 266 bp, Glycine max
gaagagcatttggctgtcaagcacttctcagttgagggacagttggactttaaggctatcctctttgttcctaagagggcaccttttgacctctttgacacaaggaagaagcctaacaatattaagctttatgtccgccgtgtctttatcatggacaactgtgaggagttgattcctgagtatttgggctttgtcaagggtattgtggattccgaagatctaccactcaacatttcaagcgaaatgttgcaacagaacaagatctt

SEQ ID NO: 155187 - DNA, 265 bp, Glycine max
gagaatccgaggcgaagagaagagaaaaattaagatggaggggaaggagcaggatgtgtcgctgggagcgaacaagttcccggagagacagccgattgggacggcggcgcagagccaagacgacggcaaggactaccaggagccggcgccggcgccactggttgacccgacggagtttacgtcatggtccttttacagagcagggatagcagagtttgtggccacttttctgtttctatacatcactgtcttaaccgtcatggga

SEQ ID NO: 155188 - DNA, 261 bp, Glycine max
caaaaacctctatggctattcttgcttctcctcactctcctctcaagctcccaagccaacaaattcaacgttggtggaagcaaagggtgggttccaaacccttccgagagttacaacaattgggctggaagaaaccgattccaaatcaatgacacaatagttttcaagtacaataagggttcggattcggtgttggaagtgaagaaggaagattacgacaagtgcaacaagaccaacccaatcaaaaagtttgaaaacggt

SEQ ID NO: 155189 - DNA, 255 bp, Glycine max
gttcttgggaaacagaaccgggcaaccttatattttgcaaacaaatgtgttcaccggtggcaagggtgacagagaacaaagaatctacctctggtttgaccctacaagagaatatcacagatactcagtgctatggaacatgtaccagattgttttctatgtggatgactacccaataagggtgttcaagaacagcaatgacttgggagtgaagttcccatttaaccaaccaatgcagatatacaacagtttgtg

SEQ ID NO: 155190 - DNA, 257 bp, Glycine max
agcagtggcactccgcgtgcaaggtgatcgttcagtgttctttgattgcgctatgcgtggttaccaagacacattgtatgcccacgcccatcgtcagttctaccgcaactgcgaaatctctggaacaattgacttcatcttcggctactccaccaccttgatccagaactcaaagatcttggtgaggaaacccatgccaaatcaacagaatatagtggtggctgatggcacaggccagaagaacatgcccactggag

SEQ ID NO: 155191 - DNA, 161 bp, Glycine max
  unsure (1)..(161): unsure at all n locations
caggattgtctgaggatttgatttccaagtatttgacagaaacantatactgttcatctgagcaaagttcaagaagaagaagcttgttgtatatgtcctcctcatggaagggtgtcatcatcagatgcaaatgcttttaatcacgaggcaagtcatttcct

SEQ ID NO: 155192 - DNA, 261 bp, Glycine max
  unsure (1)..(261): unsure at all n locations
ttggatttgtttctaaatctggtgggatgtccaatgaactatacaacactattgcccgcgtaactgatgggatttatgaaggcattgctattggaggagatgttttccctggttccacactttatgcgaaccccttacggtttaacaacatgccacaggttaaaatgatggtagtacttggggaacttggtgggcgtgatgagtattccttagtggaggctgnanaacacggagaagtatccaaaccggttgttgcctggg

SEQ ID NO: 155193 - DNA, 260 bp, Glycine max
gttgtgttgtgttgaagtagcaagctagcaaagatgtttggcatcttaggaggcaataaggggcacaagatcaagggtactgtggtgttgatgagcaagaatgtgttggacttcaacgaaatagtgtccactactcagggtggtttggttggtgctgccaccggcatcttcggtgctgccaccggtattgttggtggagttgtcgatggtgctactgccatcttcagtcgcaacattgccatccagttgatcagtgccac

SEQ ID NO: 155194 - DNA, 257 bp, Glycine max
ttgcattcagttagactttgatagtttgattagctctaataaggttaaggaccagagagagtaagagaaataatgagaaaaacacaagatgggttattggaagtctaaggttcttcccaagatcaagaaggttttcgagaagaatagcaccaagaaagctgctgctgctgaggccaccaagtcctttgatgagtcaaaggaggaatacaacaaagccttagtagaaaagaagactgaacttcaaaccaaagttgttg

SEQ ID NO: 155195 - DNA, 257 bp, Glycine max
attgttttcttcatatcttccttgtcactgcccgtgtgtcgccgccatggccaccgtcaccacccaagcctccgccgcaattttccggccatgtacctcgaaatcgaggtttttgaccggctcttccggtaaacttaaccgggaagtgactatgcggccaatggggtgccctccttctgcctctttcaaggttgaagccaagaacggagagtggttacctggcttggcctccccaacttacctcaatggcactcttc

SEQ ID NO: 155196 - DNA, 262 bp, Glycine max
gtttttctttttttcatttgcattgcaaagcaaaaaccttgcaaattgcaatggcttccaacaaggttattgccaccatcttggttctttctctccttgcctactcaacatcattcaccaatgcatgtggcacatgccacccaaaacctactccttctccccctcctccatcagggaagtgccccaaggacacattgaagctaggggtgtgtgctgatgttctaggacttgttaatgttgttgttggttcccctgtctctag

SEQ ID NO: 155197 - DNA, 259 bp, Glycine max
ggtggcttgatggtgatgagttcattgtgtcttccatgcttgaaattgctaatatcgcccaagaaggaaagactgcattagaagaaaaggactactccaaatttgcagctctcatgaatcgaaattttgacctgcgaaggttaatgtttggagatgatgccctcggtgatttgaacctaaaaatggtagaggttgccagaaaggttggagctgcgtcaaaatttaccggtagcggaggagctgttgttgcattttgtcc

SEQ ID NO: 155198 - DNA, 255 bp, Glycine max
cgcgtcgctgctccgtaccagtttcactgcataaatttgagagaaaactctgcaaacatgttggtttatcaggacctccttacaggtgatgagcttctctcggactccttccgttacaatgaaattgagaatggaatgctgtgggaagttgaggggaagtgggttgttaagggagcagttgatgttgacattggtgcaaacccttctgctgagggtggagaagatgagggagtcgatgacgcagctgttaaggtt

SEQ ID NO: 155199 - DNA, 262 bp, Glycine max
gtggagtagggtttttttgcgtttgagagaagcatgagcaggagtttgggaattccggtgaagctgctccacgaggcttcggggcacgtggtgacggtggagctcaagagcggagaactctacagaggcagcatgatcgagtgcgaggacaactggaactgccaactcgagagcatcacctacactgccaaggcatggcaaaacatcgcaacttgagcatgtgtctattcgaggaagcacagtcaggtttatggtcatccca

SEQ ID NO: 155200 - DNA, 254 bp, Glycine max
ctctcacacacactttctctctctctctctctcacccagatcttgtagcaatggcgagcgctcccactccacgcgaagagttcgtgtacatggcgaactggcggagcaggccgagcgctacgaggagatggtggagttcatggagaaggtctccgcctccgccgagagcgaggagctgaccgtggaggagcgtaacctcctctccgtcgcctacaagaacgtgatcggcgctcgccgcgcctcctggcgcatca

SEQ ID NO: 155201 - DNA, 257 bp, Glycine max
cgcagagcgatggccctcacagctttgcggtcacgcgtgccgtgccggggtcatcctgtggagatgttcttcgagtgatgcagcaccagcccgagctcatgttcgagacactcaagctccgcgcgcaggagtatgtcagccacgacaacgcagcagcgcttctggctgctggccttgatcgcacctttgacagaatgccttatctgctgtctctgtcttcctttgtggctgacgatgttgctcctgctgttcctgct

SEQ ID NO: 155202 - DNA, 259 bp, Glycine max
gtgatggtcttggtgctgagattgttggcactttcatccttgtttacaccgttttctccgccaccgatgccaaacgtagcgccagagactcccacgtccccattttggcacccttgccaattgggttcgctgtgttcttggttcacttggcaaccatccccatcaccggaactggtatcaaccctgctcgtagtcttggtgctgctatcatcttcaacaaggaccttggttgggatgaacactggatcttctgggtggg

SEQ ID NO: 155203 - DNA, 254 bp, Glycine max
gggttttccaattcacagagcaacacaacgaaccaacaatggcgcagctcagccgcagtcgcagccgcagcacgggcaagcagcgctggagcaggtgcagtgcttcggtcgcaagaagaccgccgtggccgtgacctactgcaagcgcgggcgcggtctcatcaagatcaacggctgccccattgagctcgtggagccggagatcctccgcttcaaggccttcgagcctatcctcctgttgggtaagagccgct

SEQ ID NO: 155204 - DNA, 254 bp, Glycine max
cgagcctgcaaccgagaagagagaggattttgggaagttgcagtacggatgcgagcactataagagacgatgcaaaattcgagcaccatgctgcaatcagatttttccatgtcgtcactgccacaacgacgccgcgaactcatctagcaaccccgcagatcgtcatgaacttgttagacgcgatgttcagcaagttatatgctctgtctgtgatactgaacaggaggttgccaaggtgtgttctagctgtggcg

SEQ ID NO: 155205 - DNA, 254 bp, Glycine max
gcgtgacaaaagcaaaaggaaagaatatcaacaaggtaaagtagattccttactagacatggcgttgaaggacacattctacatatctcatggatcaccaactttgtccatagatgaatccattcaggccaggaagttccttcagtcatggaagaaggacgtgtttcctcaaagaccctcttcaattcttgtcatctctggtcattgggaaaccgcagttcccacggtcaacgtcgttgactccatcaacgaca

SEQ ID NO: 155206 - DNA, 256 bp, Glycine max
gatctttgatgggcacaatggtatatctgctgctatttttgcgaaggaaagcatactaagtaatgttttgagtgcaataccacaagatatcagtagggatgagtggcttcaagctctgcctcgtgctctagttgttggttttgtaaaaactgacatagagtttcagaaaaaaggggaaacttcaggaacaacagctacatttgttctggttgatggatggactgttactgttgcatctgttggggattcccgttgc

SEQ ID NO: 155207 - DNA, 254 bp, Glycine max
tattctttcgcaccttgcagaatcaattttctctctcaatcgtctttactggctcgtaccaagcaaaccgctcgcaaatccaccggtgggaaggctcctaggaagcaactcgccaccaaggctgcaagaaaatctgcacctaccaccggtggagtcaagaagcctcatcgctatcgtcctggaactgttgctcttcgtgagatccgaaaataccaaaagagcacagagcttctgatccgcaagctcccctttca

SEQ ID NO: 155208 - DNA, 255 bp, Glycine max
cataaatctagctccaattcctaatcacctggttaatttcttcacatagagctatcaagatccaacgttaacatgaagaatgttttagtaaggtcagctgcgcgagctctgcttgagcggcggtgggcggagctactaccgccagctctcaacggcggcgatcgtggaacagatacaccagcacggtggcggcgcgtttggaagcttccacttgcggaggatgtccactcttccagaggtaaaggatcagcactc

SEQ ID NO: 155209 - DNA, 255 bp, Glycine max
  unsure (1)..(255): unsure at all n locations
caacttctgctcttccaactcctacaacgctattctcagnactcatgggcaaggtcaagatcggaatcaacggatttggaagaattggccgtttggtactcagagtcgctctgcaaagagacgatgttgaactcgttgccgttaacgaccctttcattaccaccgattacatgacataaatgtttaaatacgacagtgttcacggacactggaagcatcacgatgtcaccgttaaggacgagaagacccttctct

SEQ ID NO: 155210 - DNA, 248 bp, Glycine max
atcacaaccaaggagcttggaactgttatgcgttcattggggcaaaacccaactgaggcagagctccaggacatgatcaatgaagtggatgctgatgggaatggtaccatcgacttccctgagttcctaaatctcatggccaggaagatgaaggacactgattctgaggaggagctgaaagaggcattccgggttttcgacaaggaccagaatgggttcatctctgctgctgagctccgccatgtgat

SEQ ID NO: 155211 - DNA, 261 bp, Glycine max
gtaacaattcctcaatacttatttcttcttggacttaaatatacgtctgccacattctcatgtgcgttcctcaacatggtgcctgtatttacgttcattatggcagtgccatttgggtaagttaaacaaaaggatattaaattgattgtggaatacaagaacaataatttttatcctttgggttgaaattttactaggatagagaaggtgaacgtgcaaagcaagagtggtaaagccaaagtcatgggaacttttgtgtgc

SEQ ID NO: 155212 - DNA, 258 bp, Glycine max
ttcaactttcaagtgttcaaatgggggcaatttcaacaccccttgtgttggttcttctattttgctgcctggtttctgtttcacaagcagaatacttgaagtacaaagacccaaaacggccactgaatgttagaatcaaggacttgttgaagcgaatgaccctggaggagaagataggccaaatggtgcagattgaacgaagtggtgccacccctcaagtgatgaagaagtacttcattgggagtgtgctgagtgggg

SEQ ID NO: 155213 - DNA, 254 bp, Glycine max
gatggcaaagctatttttgaaacaggcaaagcaatacgcagatgcaagaccaagctatcctccacaactcttccaattcattgcttccaagactccctctcactacctcgcttgggacgtcggcactgggagcggccaagctgccaaatctttagctgcaatatacaagaatgtgatagccacagatgctagtgacaaacaacttgaatttgcagccaagctcccaaatgtgagataccaacacaccccttcaa

SEQ ID NO: 155214 - DNA, 252 bp, Glycine max
caaggtgttgaagatgcctttgagctccttcatgaaatgaatgaacgtgtcaggacagggatctgggttggggattgttttatctacagcaattcttcttggaggcttaactattgtgttggtggtgaggttactacaatgtttcatttggaccgtcctatgtacttgttgggatatcttgccagccaaagtaaggtctatttgatagacaaagaattcaatgttgtgggatacacactacttttaagtttg

SEQ ID NO: 155215 - DNA, 255 bp, Glycine max
ctgagaaaaaaaaatggatgtagagaaagccttccacatgactggaggagctggcaaaactagctatgccaagaattcctcactacagaagaagcaatctgataaagtgaagcacataatcatacaaacagttgaggagctctaccttgcaaccactccaaagagcataggcattgctgatttgggctgctcctctggaccaaacaccctatcaatcatcaaagatatctttcaggccatccaaggcataagcca

SEQ ID NO: 155216 - DNA, 257 bp, Glycine max
aaatgcccactttttttcttccaacgctcctcctccttctcatagccttcgccacctctgtctccggccgccgtgacctcgtcggagactttctccggctgccctccgaaactgataacgacgacaacttcaagggcacccggtgggccgtcctcctcgccggttccaatggttactggaattacagacatcaggctgatatttgtcacgcctatcaaatattgaggcaaggtggtctgatagatgacaatattatt

SEQ ID NO: 155217 - DNA, 256 bp, Glycine max
cagatgaccaagtggaattcatcacaggaatacatgacggtgtttcaacagacgataaatctaaatgggaatgtgtgaggaaaggactttgctgtatatgctgcgaaagcaatattgattctttgttgtacagatgtgggcacatgtgcacatgttcaaaatgtgctaatgatttgctccaaagtagaagaaagtgtccaatgtgtcaagcaccagtggtggaagtgagttgagcttattctatacaatagttttg

SEQ ID NO: 155218 - DNA, 253 bp, Glycine max
gccaagcttctcttagcattggatctgaaaggacaattggaggccaagaacccatccaccaagtgcaagtaagcctccaagtcatgacaacacgccatgtcagcatcgggcttaagatatggcgacatcttggtgtgcacacgcagctctgttcccacgtgcgagtatgctaagggcgtgttctcctccaacacacccccaccaacgttccgtattttctgttcaagctcttcgctcacgaagatccctggaa

SEQ ID NO: 155219 - DNA, 252 bp, Glycine max
atttgttctccgtcatctcgcgtcgttagttcattgaactcactgcattgagtggatttggtccaagttgagtttagaaatggatggccatcatcagaagcaaaaaaacaagtacagtataattgttcctacatataatgagcgtctcaacattggtctcattgtttacctcatcttcaagcaccttggggatgctgattttgaaattattattgtggatgatggcagtcctgatggtactcaggatgttgt

SEQ ID NO: 155220 - DNA, 254 bp, Glycine max
ctgagggccttccatggcttccgcttgtgcttcctctgcaattacagctgttgccatctctacgccgagttccgggcagaagaatggatcaggaggttgttttcttagtggaaggaaattgagggtgaaaaaggagagagcagcaattggaggacgatcgatgggcactacagtgtgcgcatttgctgagcctgacagacctctatggttcccaggcagcacccctcctccatggcttgatggcactctacctg

SEQ ID NO: 155221 - DNA, 252 bp, Glycine max
tggcgtccatggccactttcttcacccaaacctccttcccctcccactctctctccaaaaccttcgatacccatttcgccccatccccgaaagtcaacgtatttgcgaacttcccggcgaggaggcacgtgggggttcgagtttcgaacgcgctgatcgaaccagacggagggaagctggtggagcttgtggtgagggataattcagaaagagacttgaagaagggtgaggctctttcgttgccgaggatca

SEQ ID NO: 155222 - DNA, 251 bp, Glycine max
gtctgaacctcaaggagaccgagctttgcctcggtttgcctggtgggggaggcggcggcggcggcggtggtgaggtggaaactccaagggccactgggaagagagggtatctctgagactgttgatctgaaacttaatcttcattccaaggaagatctgaatgagaatctgaagaatgtctcaaaggagaagaccctccttaaggatcctgccaagccaccggctaaggctcaagtggttgttggccacca

SEQ ID NO: 155223 - DNA, 258 bp, Glycine max
cttctctggttgattcggatctagagtcttcagtttctcctcgttgttcttcgctttcctgttttcaatttcgattctttcgttaatttaataagatgtttgggagggcaccgaagaagagcgataatacgaggtactacgaaatcctcggcgtctccaagaacgcttcgcaggatgatctgaagaaggcttacaagaaagccgccattaagaatcaccccgacaagggcggtgatcccgagaagtttaaagagctgg

SEQ ID NO: 155224 - DNA, 253 bp, Glycine max
aggtggtctcagtgtggtttatcatcaacttgacgtagtagactattcatccatcaaccagtttgttgagtggttgcgggaaaattgtggtggtttagatattctggtaaataatgctggtgttaattttaatcttgggtctgataactcagtcgaaaatgctcgtaaagttattgaaacaaattattatggcaccaagcgtatgactgaagctattatttcattgatgaagccatcccttgttggtgcgcgt

SEQ ID NO: 155225 - DNA, 252 bp, Glycine max
gttgggattgcagagagaagggtggttagtgttagaataggctgagtgtggatggggaaagaggaggaagagatgaggggtgagattgaggaacgactgattaatgaagagtacaagatatggaagaagaacagtcctttcttgtatgatctggtcattacgcatgccctcgagtggccttccctcactgtggagtggcttcctgaccgccatgaaccacctggcaaagactactccctccagaaggtcatc

SEQ ID NO: 155226 - DNA, 249 bp, Glycine max
tccgttctgattataaggatgcttttgttgaaaagcatggagtcaaattggggcttatgtctggctttgtcaaagctgctgtcaatgcactccaacatcagccgattgtcaatgcagtcattgatggtgatgatattatatacagagattatatagatatcagcatagctgttggtactccaaagggccttgttgtaccggttatccgcaatgctgataccatgaactttgctgatatagaaaagcaga

SEQ ID NO: 155227 - DNA, 250 bp, Glycine max
accctctatattccattacaaagaaccagtttggaatatatttttattccttctttgtttcttcactttcttccatacacataaccatgtcttctcagaccgttgtcctcaaagttggtatgtcatgtcaagggtgtgctggagctgtaaacagggttttggaaaaaatggaaggtgttgagtcatttgacattgatctgaaggagcagaaggtgacagtgaaaggaaatgtgcagccggacgaagttct

SEQ ID NO: 155228 - DNA, 249 bp, Glycine max
agctgatctagtactactatcaatggccggacaaggagatggtcctgctatcggaatcgatctcggcaccacctactccttcgtcggagtgtggcagcacgaccgtgtcgaaatcatcgccaatgaccagggtaacagaaccacgccgtcttacgtcgctttcactgattccgagcgtttgatcggtgacgccgccaagaaccaggtcgccatgaaccccgtcaacaccgtcttcgatgttaagcgttt

SEQ ID NO: 155229 - DNA, 257 bp, Glycine max
ctggttttctgctatgactatgaagagtgtgggaagtgctgctctgaagatggttgaagaagtacgcaggcaattcaacaccattccagggttgatggagggaactgctaagcctgactatgccacatgtgttaagatctccactgatgcttccattaaagaaatgattccacctggtgctcttgtcatgcttacaccgcttgttgttggaatcctttttggtgttgaaacactttctggtgtcctagctggatctt

SEQ ID NO: 155230 - DNA, 253 bp, Glycine max
atagcccaagccctatacaaccaaaccctaacacacacccatttgattcagtttccatggctagcctcaaggttgcatttttggctgcagtgctctgcatggttgtggtgagtgcacccatggcacatgcagctatcacgtgcgggcaggtgacgaatagcctgatcaattgcatcggttacctccagaacggaggaacgccgccgtcgggatgctgcaacggagtgaagagcctcaatgccgccgccaagac

SEQ ID NO: 155231 - DNA, 250 bp, Glycine max
gctgattgttgtgttcttgtatatgatgttaattcaatgaaatcatttgacaaccttaataactggagggaggaatttctgattcaagcaagtccttccgatccagagaattttccttttgttgtcataggaaacaaaatagatattgatggtggaaacagcagagtggtgtcagaaaagaaggctcgggcttggtgtgcatcaaaaggaaatattccatattttgagacatctgccaaagaaggtatta

SEQ ID NO: 155232 - DNA, 249 bp, Glycine max
caataacatagcatagagtgagaagtgagaagagaaaaatggcaatctccatacccagtagacaacttttcatagatggagagtggaaagtccctcttctcaacaatcggtttccgatcatcaaccccgctactgagacatcatagggcatattccagccgctactaaggaagatgttgaccttgcggtggatcgtgctaaaagagccttttcccataacaaaggcaaagattggtcttcagctcctgg

SEQ ID NO: 155233 - DNA, 248 bp, Glycine max
gaaaaagttggtgtgctgcttctcaatctaggaggaccagagacattgaatgacgttcaaccttttctgtttaatctttttgcagatcctgatatcattcgtcttccaaggttgtttcggtttctccagcgaccattggcaaaattgatttctgtacttcggtctcctaaatccaaggaagggtatgctgctattggtggtggctctcctttacgcaaaattacagatgaccaggcactcgcaattaa

SEQ ID NO: 155234 - DNA, 244 bp, Glycine max
gacagtctcaccgatgaccagtagagggtgaaagttggtgcaaactgcaccatttcttaataaatgctgctcatatggtgctggctgcaacaagttaatgaatggaatagtgaaaactgcaccagtgtgagtgatcttgatacattaccatatcagctggttgtacatcatctagaattatggccatacttcttagggacaagttttggtaattttaaggagataccgtgttaatggtgactaa

SEQ ID NO: 155235 - DNA, 248 bp, Glycine max
catcagctcaatggaggaaccttaggcgagtttgtgcaacaaaaatattctctccacaattgcttgactccactcaaatccttcgccaacaaaaggttaaagatttattggattttgtgaaagaacgatgcaagaaaggtggggttgtggatattggagaggttgtctttacaacaatccttaattccatttcaaccactttcttctctatggatttgtctgattctacatctgaaaagtctcatgag

SEQ ID NO: 155236 - DNA, 248 bp, Glycine max
cttcttcccaaccactactaggctgtcattgcagatctcaattgcatcgctgtccatggctaccatcgttcgcatcaaggcccgccagatcttcgacagtcgtggcaatccaactgtcgaggtggatttgacttgctccgatggtacttttgccagagctgctgttccaagtggtgcatccactgggatttatgaggcccttgaattgagagatggaggatctgactaccttggaaagggtgtatcaa

SEQ ID NO: 155237 - DNA, 273 bp, Glycine max
tcggcattcggctcgagttcaaggctgattaccctccttatgggagggactttgctaaccaccaacctactgggaggttttgcaatggcaaattagctactgattttactgctgacacttacggttttaagacctatgctccagcatatcttagcccacaggcatcagggaaaaacctccttattggagcaaactttgcttctgctgcatctggttatgatgaaaatgctgctactttgaatcatgcgattccgttgtcccaacagttaagtt

SEQ ID NO: 155238 - DNA, 254 bp, Glycine max
aacacaaagcacaaagcaaagctcatccttgagttaaaaaatggcagcagcttcttccatggctctctcatccccatccttggctggcaaggccgtgaagctgggcccatcagccccagaagtgggaagggtgagcatgaggaagaccgtcaccaagcaggtctcctcaggaagcccatggtacggcccagaccgagtcaagtacttgggcccattctctggcgagcccccgtcctacctaaccggtgagttcc

SEQ ID NO: 155239 - DNA, 248 bp, Glycine max
cacaaaacttgctatagcagtaagctataactcatttgaggctctgtgagaattgagaaatggctaaagatgttgaggttcaagagcaaggaggagagtactctgccaaagactaccatgaccctcctccagcacctttgttcgacccagaggagctcacacagtggtccttctatagagccctcatcgctgagttcatagcaacccttctcttcctttatgtcactgtgctcaccattattggctac

SEQ ID NO: 155240 - DNA, 249 bp, Glycine max
ctcgagccgaatcggctcgaggttaaagaagagagaagaaaaatacgaaagttcgatccatggcccgttttcttcaagcgagagtggaaacgcaactggcccttcctcgttggattcgcagtcaccggagctctaatcaccaaactttcccttggccttaccgaggaagatgctaagaattccaaattcgttaaggcgcacaaaaggtgatttctgaatcgtgacatctgcctggctttgcactttatg

SEQ ID NO: 155241 - DNA, 248 bp, Glycine max
ccaaaggccaatgaccaatatttgcctccttttgttattgttgacgagagtgggaaacctgttggtccgatagttgatggtgatgctgttgttacattcaacttccgagctgatcgtatgacaatgattgctaaagctcttgagtatgaaaattttgacaaatttgatagagttcgttacccaaaaatccgctatgctggaatgcttgaatatgatggtgaattgaaacttccaagtcattaccttgt

SEQ ID NO: 155242 - DNA, 245 bp, Glycine max
ataaagtccgtgaaacaacagctttcatggttccattggtggctggtgatggaaccaaaactcaggcacttgctgtttgccactcagatacttctggaatgaatcatcacatgcttcatgaactcatgggagttgatcctggaactaaccctgtttgccatttccttggaagcaaggccattttatgggtacccaatttatctatggacactgcctatcagactaacgttgttgtttaattagtc

SEQ ID NO: 155243 - DNA, 247 bp, Glycine max
atcacatcacaatttgtgcattgcctcgtgtcgcttttcttctttgcttgccaaaaatcttacacacaccggtctcatggggcatgggttctcaccagcaagaaccatggctattggagaatgggcaaccgagggtgttgaccaaggagaataggcatggccgttctgcacaaagcatgtcctccacgtctttgcgcaagaagtctagccgaactcttgtctccaagcttccatgtgccacactcag

SEQ ID NO: 155244 - DNA, 245 bp, Glycine max
ctccctcagaagcgaagaagaagccacagagaaccagtctcctactctctctcacccacaagaaaaatggcatctcacatcgttggatacccccgcatgggtcccaagagagagctcaagttcgctctcgagtctttctgggatggcaagagcagcgccgaggatttgcagaaggtggctgctgatctcaggtcatccatctggaagcagatggctggtgctgggatcaagtacatccccagcaa

SEQ ID NO: 155245 - DNA, 253 bp, Glycine max
aggtaaggtaggttaacactcttcttcatcgtcgtcgcaatgggacgtgtgatccgtgcgcacgtaagggagcaggctcggtcttcaagtcccacacgcaccaccgcaagggccctgcacgcttccggagcctggacttcggggagcgcaacggctacctcaagggcgtggtcaccgacgtcatccatgaccctggccgcggcgcgccgctcgccaaggtcgccttccgccaccctttcagatacaagaagca

SEQ ID NO: 155246 - DNA, 250 bp, Glycine max
ccgatggctaatctctcactcttgttcttcggtctcctcctattctccgctgccgtagccaccgtcgaacgaatcgacgatgaagacaaccttctgatccgtcaagtggtgccggacgcggaggaccaccacctgctcaacgcggagcaccacttctccgccttcaagacaaagttcgccaagagctacgccacgcaggaggagcacgaccaccgcttccgtatcttcaagaacaacttgctccgcgcca

SEQ ID NO: 155247 - DNA, 249 bp, Glycine max
cgttcgtatcgaagaagaagaagatggggaaacagattgtgccggtgaaatcagtgatctacgcgctctcccctttccagcagaagataatgccgggtctctggaaggacttgcccacaaagattcaccacaaggtctccgagaattggatcagcgccactctcttgcttggtcccctcgtcggaacctacacgtatgttcagaactacctggaaaaggagaagctgtctcacaggtactgaactcatg

SEQ ID NO: 155248 - DNA, 248 bp, Glycine max
caacgatcagcgcggttcaggtggagttcctggagtttccagcggtggttacttcaccagcctccggcaagacctatttcctcggcggcgcaggggagagaggattgacgattgaggggaagttcataaagttcacaggcataggagtatacttggaggataaggcggtgccatcactcgccgctaagtggaagggtaaaacttcagaggagttagttcacaccctccacttctacagggatatcatt

SEQ ID NO: 155249 - DNA, 245 bp, Glycine max
ggagtgctgggggtgagattgcgcccaccactaggcactataggagtgtctccatggatagtttcattgggaagttgaatttcgatgaggagtcgcccaagctgcctccttcccccgggcagagaagtgctctgatgtcgcctgctggtggaattgatgggaattcggcggccttcagcttggagtttggaaatggggagttcagtgggcctgaactgaagaaaattatggccaatgaaaagctt

SEQ ID NO: 155250 - DNA, 238 bp, Glycine max
aaaagcaataaaaaatggggataggggtactatttgttgggtttttcttgctatcttgtgttgtgtgtgtgcagggtgtggagccaaaagcctcacccacttgtacatttccggctgtttacaactttggggactcaaactcagacactggaggcatatcagcttcatttgtgccaattcctgcaccttatggcgacggcttctttcacaagccttctggaatggactgtgatggccg

SEQ ID NO: 155251 - DNA, 243 bp, Glycine max
ctgccaccttgagcaatctatgactttttctatttgtagtctgaaatacaacccagctagtggtgaagactcagaaatgcactttgtccgcttgctggatgaccagacttttgagctcatatcaatgagtatggttgcttcataattagctgctccttctcagatgacaataatgtgtattactgtgttggaactgcatatggactgccagaggaaaatgaaccaaccagagtaagttgagaa

SEQ ID NO: 155252 - DNA, 244 bp, Glycine max
gcaaagagagtgagaaaagaaggaagaagaagaagaagcgatggcaaatgaactacccgtcaaagcttttggttgggctgcttcagacacttctggcacccttgccccttttcatttctccagaagggaaaatggcgtcgatgacgtcactctcaagattctcttctgcggggtttgccactctgatctccacactctcaaaaacgactggggtttcaccacctaccctgtcgttcctgggcat

SEQ ID NO: 155253 - DNA, 240 bp, Glycine max
gctactctggctgttgctcagaatatgcgggatctttacaggctggttcttgttgacactcctctggctccatacttctctgagtgtactacatcagaggacttggatgatatgaacattgaaataatgaggaacactctttacaaggcataccttgaagacttctctagattttgtcagaaacttggtggtgccacagctgagataatgtctgaccttctagcttttgaggctgataga

SEQ ID NO: 155254 - DNA, 273 bp, Glycine max
catctgtacttatattctgtttatgtacgttcctgccaaaagcaaacacacctcctatagacactgaaaagccaaggacagagagtgcaatttcaactgtgggttctcttccccacccaactagtacacgttttattgcttatgaagagcttaaagaagcaacaaacaattttgaagcagcgagcatacttggagaaggagggtttggtagagtttttaaaggtgtcttaaatgacggtactcctgtagcaattaagaggcttaccagtggag

SEQ ID NO: 155255 - DNA, 264 bp, Glycine max
ctttttaaatctgaaggggataaaaaggttatccaccagttggtttccctatacaaccaagattctactgcttcggtaccagaaggcacaaatcctgttgatgtagcagctcttgtaaaatattatcttgctagccttcctgagccactaaccacattagagctttataatgagattagaagtgctcgatccagtatctgttccatgagaaacatactcaagaggctttccagtgtaacctacatgactctggagtttataaca

SEQ ID NO: 155256 - DNA, 252 bp, Glycine max
cacgctgtggtgaaggagcttctaagaaagcaccctccaacacactttgtgctaacacatgctgtgactgagcccaccactttgggagggtatgacataccaattgatgcaaatgttgaggtgtacacaccagccattgctgaggaccccaaaaattggttaaaccctgagaagtttgaccctgagagattcatctctgggggtgaggaagcagacataactggggtcacaggggtgaagatgatgccattt

SEQ ID NO: 155257 - DNA, 254 bp, Glycine max
catagccgcgcacctgcccaagagaactgacaacgacatcaagaactactggaacaccaacatcaagaaaggactcatcggaaagggcttagatccccttacctacaaaccaataaaatccaacacttttcaagcctatggtggtaatttccttgacccttccattgacaccaccaatatgaaccatgtggctcaatcggagagtgctcaaatcgaagccgaagcaagagaatctatgttgcatttggatctct

SEQ ID NO: 155258 - DNA, 252 bp, Glycine max
  unsure (1)..(252): unsure at all n locations
tgaaccttcnagaactataatagacttatattccatggctcngncgctcncaacacaacgncgtttccaccagcggtgantctctgagatctattccgacgccgtttcncaccaaaaccttccaactcgtcgacgatcacaccatcgaccatgtgattncgtggaagattctggatcncccttcatcgtctggancaccacngctttngccaaggattgnntcctananaattnaaggggaacaacntctcc

SEQ ID NO: 155259 - DNA, 215 bp, Glycine max
gatcacatggcaatgaagaagttcttgatgtgttgttctgtccctttcttaggtgcttagagtggacaatagcttggattttcacgacaaggatttggagtccgaggaaagcctgtgggacttgtacgagagatggatgagtcaccactcggattcgtgaagctcttgtgacaagtacaagcggtttaacgtgttcagagcgcgtgtgatgcatg

SEQ ID NO: 155260 - DNA, 207 bp, Glycine max
cggctcgagtgctgtaacttgttccatagcagcgatcggaatcgatcttatcgctgggggtaagaggcacagaggaatagaaccgtagcactatcgactgacatcgacctcaaagtacttgtgaagctctatgcggtcattgttcgcaggactggcagcaatttcaatgctgttataatcaagcgcttgttcatgagcaacgttaac

SEQ ID NO: 155261 - DNA, 264 bp, Glycine max
tctctctctctctctctctctctctctgtgtgttgcgttttgtgaaatcttattcgacatggcgtcacgggacaacaagaaggcgtcgagcagccgagccggcagaattcgcaccctctccgatctgaaccgtccctccgccgattccgacagcgactccgatggccctcaggagtactacaccgcaggcgaaaagagtggaatgcttgtccaggatccttcaaagggaaatgatgtggatgaaattttcaatcaagctaggca

SEQ ID NO: 155262 - DNA, 262 bp, Glycine max
gtcggttcttccttctcaaatattcttgagatccccattttctccgaagcaaagccatggctaagggtcctggtctctactctgacatcggcaagaaagctagggatctgctgttcaaggactaccacagtgaccagaagttcaccatcaccacctactcaccgactggagtggctattacagcatcaggaaccaggaaaagtgaactgtttctggctgatgtcaacacccagttgaagaacaaaaacatcactactgatat

SEQ ID NO: 155263 - DNA, 258 bp, Glycine max
tttgtggtgctagaagtttctatttctgggcattcagaagattgcaggaaaagttatcagcttttgttccatattgaacagggtgtctgatctagaatggagatcactagaataggccaatggttaagtcttctgatatgtgtactactattactgcagacagaaggggttcctgtgggaatcacttttgttgaaaatgcagtggcaaaaggggctgtttgtttggatgggagtcctccagcttaccacttccacaca

SEQ ID NO: 155264 - DNA, 253 bp, Glycine max
caacacttccgaaccttgcattgtatctacccacttctcaaccaacaatggcaatggcaacccaagcctctctcttcaccctactcctctccggtctcaaacccagcgaccgagccaccgcgccatggaaacaatcctccaccctctccttctccacctcgaagcccctcaagttctcgcgaacaatcagagcagcagccaccgaccagaccacagaggcaccggttgggttcaccccaccggaactggaccc

SEQ ID NO: 155265 - DNA, 249 bp, Glycine max
atcggataaaagggccatggagtcctgaagaggacgaagcgttacggaggttggttcagacttacggccctaggaactggtccgttataagcaaatccattccgggtcggtctgggaaatcgtgccgcttccggtggtgcaaccagctgtctccggaggtggagcgccggcctttcacggcggaggaagacgaggcgatcctgaaggctcacgccaggttcgggaacaagtgggccaccatcgcgcgct

SEQ ID NO: 155266 - DNA, 251 bp, Glycine max
tctcgagcgaatcggctcgagtacaaattctctgtgttgtgtagtgtacttgtgttaatacgtgttgttgttgtaggaaatttaagtgaagagagaatgatgatgaagtctgctatgtgtgcattggtgcttgtggcactggttgtggttgaagtggggcccatggctgaggctgcggtgacttgcaacccaacacagttgactccttgtcttccggcaattaattcaggttctgcaccttcgagtgcttg

SEQ ID NO: 155267 - DNA, 251 bp, Glycine max
atcatccgcagctgcttttattcgctccgcaaacagtgagccatggccgtcggaaagaacaagcgcatctccaaggggaagaagggtggcaagaagaaggcagctgatccctttgccaagaaggattggtatgacattaaggctccttctgtttttcaagtgaaaaatgttggcaaaaccctcgtctctcgtactcagggtaccaagattgcttctgaaggactcaagcatagagtgtttgaggtctcctt

SEQ ID NO: 155268 - DNA, 265 bp, Glycine max
aaagaaaaaaaaaaacccttagccaacacaaccatcatggccacctctgctattcagcaatcagcattcactggtcaaactgctctgaagcagctcaatgagttcgtccgcaagaccggtggcgccggcaaaggtcgcactaacatgcgccgcaccgtcaagagtgctcctcagagcatttggtatggccctgaccgtcccaagtacttgggtccattctcggagcagattccatcatacctgaccggagaattccctggtgact

SEQ ID NO: 155269 - DNA, 258 bp, Glycine max
aatggcaccgaagcagaccaaggctgagaagaagatcgcttacgatgcgaagctgtgcgacctaatggaggagtacggccagatcctcgttgtgaactccgataacgtgggatcgaaccagctccagaacattcgcaagggtctccgtggcgactccgtcgtcctcatggggaagaacaccatgatgaagcgctcagtcaggatgcacgctgagaaaaccggaaacaacgcctatctcaaccttatcccgctccttgt

SEQ ID NO: 155270 - DNA, 250 bp, Glycine max
ctggcatcacacattttataatgaacttcgtgttgctcctgaagtgcacccagtgcttctcactgaggctcctctcaacccataggccaacagagaaaagatgacccaaatcatgtttgagaccttcaatgtgcctgccatgtatgtggccatccaggctgttctctccctgtatgccagtggtcgcacaactggtattgtgttggactctggtgatggtgtgagtcacactgtaccaatctatgagggg

SEQ ID NO: 155271 - DNA, 249 bp, Glycine max
gccagagcttcttccaaccttcaccacgggagtagttatggcttatgccctagagtacaatgatgagaaaggtatatgctttctgacggatcttcttgttgttggtgagaaccaacaaacttttgaccttgaaggagacagtggaagtctcatcatgttaaaaggtgacaatggtgagaaaccgcgaccaattgggataatatggggaggaactgctaacagaggccgccttaagttaaaagttgggca

SEQ ID NO: 155272 - DNA, 247 bp, Glycine max
cggctcgagtgctgttccaagtcccatagcagcgatgggaatcgatcttaaggctgggggtaagagcaaaaagaccaaaagaacagcaccaaaatccaatgacatctacctcaaattacttgtcaagctttatgggttccttgttcgaaggactggcagcaatttcaatgctgttatactcaagcgcttgttcatgagcaaggttaacaagcctccaatttctttgtcaaggttaattaagtataca

SEQ ID NO: 155273 - DNA, 259 bp, Glycine max
attcatttcaatggcaactcacggtcaagtcattacctgcaaagctgcggtggcctgggaacccaacaagcccttaactgtccaagacgttcaggtggctccgcctcaggccggcgaggtccgtgtccaaatcctcttcaccgctctctgccacaccgatgcttacacttggggcggcaaggatcccgaaggtctcttcccctgtattcttggccatgaagctgcagggattgtggagagtgttggagaaggtgttact

SEQ ID NO: 155274 - DNA, 253 bp, Glycine max
ccttggtgttggagatcgtgatgaccttcggtctggtgtacacggtctacgcaactgccattgaccccaagaagggtaatttgggaattattgctcccatcgccattggtttcattgtcggcgctaacattttgttgggtggggccttctctggagcggccatgaaccccgctgtgacatttgggcctgctgtcgtgagctggacctggaccaaccactggatctactgggccgggcctctcatcggtggtgg

SEQ ID NO: 155275 - DNA, 244 bp, Glycine max
attaaggagttctcggatgtacagtcacagatccaacaaatatgtggagagatagctggaaacttgaaccttaatgacgtgtcacctgcagttgatgagtctgacctgtccctgaagaagttggatgaatatcaatctgagctccaagaacttcagaaggacaagagtgagaggttgcacaaggttcttgaatttgtgagtactgtgcatgatctatgtgctgtccttggtatggacttcttca

SEQ ID NO: 155276 - DNA, 238 bp, Glycine max
attgacgcttgctggagatgcaataaagcactgggccaatgaccggttcaggctagccaagtgcggcaaagggttctgaagacgggccaccggcgggctcggtggtcccatctatgtcgtcaccgataattccgatgacgacatggtgaaccctaagccgggaactatccgtcacgctgtcacccaaaaaggcgccttgtggatcatcttcggacacagcatgatcatcagtttgaag

SEQ ID NO: 155277 - DNA, 248 bp, Glycine max
gagaaatagtgacatacttttcgtacccaaaaagagagagggactattcaaggtggccagacacgccagaagggtggagatcggtgactgaggaatacagcgacaaagtaatgggtctagcttgcaagctcatggaggtgttgtccgaagcaatggggttagagaaagagggtttaagcaaagcatgtgttgacatggaccagaaggtggtggttaattactaccccaaatgccctcaacctgacctc

SEQ ID NO: 155278 - DNA, 259 bp, Glycine max
ctgaagcagggtgttactactgtcttgaagtctgttttttgtggagcaccaatggctttattcatggcagttcttggtgttgttgccttggtgctctgtttttgctctgctctcttgaagtggaatgaattgaggtataggaggaaaggtttgcctcaaggcacaatggggtggcctgtttttggggagacaactgagtttcttaagcaaggtccaagcttcatgaagaacaagagggcaaggtatggcagttttttca

SEQ ID NO: 155279 - DNA, 247 bp, Glycine max
aaactttctgtcgcacaaataactctaaactaagcacttccatacacaaattttctcacccagaagacatatctccatttcatttcgagtaaaagtaaaacacagttcctgatccatggcatctcgccgccgcatgttgttgaaggtcataatcctcggagacaacggggttggtacaacatcactgatgaatcagtatgtgaatcgtaaatttagtaatcagtataaggcaaccatcggcgcagat

SEQ ID NO: 155280 - DNA, 245 bp, Glycine max
aattagtactctcgttaattttcttgctaattgctaattgggcacaatggaaacgcttcatgctgtgtgcatcccatacccagcacaaggccacataaacccaatgctcaagctagcaaaactccttcatgttagaggcttccacatcacctttgttaccacagaatacaaccacaaacgccttctcaaatcaagaggttctgattccctcagtagtgtcccatcatttcaatttgacaacatcc

SEQ ID NO: 155281 - DNA, 246 bp, Glycine max
aaaaatgccaccaatgttgaacaggctttcatggccatggctgctgaaattaaaatcagaatggcaagccagccagtgaacaatgcgaggcctccaacagttcaaattcgaggacagccagtgcatcagaaggctggttgctcgctcgacttagagagatacgcatatttggggtctcagacgttcatgcgtctcagtggcatctaaaactagcttttcacattgctggcatatcaagattgttcg

SEQ ID NO: 155282 - DNA, 244 bp, Glycine max
aacagtatctccatgtgaatcacttcggtctttatctatcagtaattgccctggatttggcaatgcctccctctctgtattgggaaagctgtgccctcagcttcagcatgttgaattgagtggactcgagggagtgacagatgcagggcttgcttcactccttgagagttccgaggctaatgatggttaaagtgaaccttatcggttgcacaaacgttaccaataaagtagtctcgtccttggc

SEQ ID NO: 155283 - DNA, 242 bp, Glycine max
caactcttcaaaagggagaagaaaaggaaagaaaactctcaaaaaactattatagcaatggcagaacaaaaccaaaaccaaacaactgaagctggaaggcaccaagaggttggtcacaagagccttctccagagtgatgctctttaccagtatattctggcgacaagtgtctacccaagagaacctgaatccatgaaagacctgagagtgttgacagcaaaacacccatggaacatcatgac

SEQ ID NO: 155284 - DNA, 242 bp, Glycine max
cacttttctactttgagtcttcttgatccttctttttctccttgaactcaaacatggtagatgaggtggttctgctagatttctggccaagtccatttgggatgagggtcaggattgcacttgctgaaaagggtatcaaatatgagtacaaagaagaggacttgaggaacaagagtcctcttctcctccaaatgaacccggttcacaagaagattccggttctcatccacaatggcaaaccc

SEQ ID NO: 155285 - DNA, 245 bp, Glycine max
gaaggaaccacaagtggacagcccagtccccatctcctcgttctcggatgaggacgaggagatcgtacaagccgtagtgtcgtgctccatcccatcctactcactcgagtcgcggctcggcgacacacgccgggccacggccatcacgcatgaggtggtgcagaggctgacttcccgatccctgtcaggtttacccctggaaggtttcaactacgactcaatattggggcagtgctgtgagatgc

SEQ ID NO: 155286 - DNA, 246 bp, Glycine max
caaaaacatctgaagcactagccttgctgcaggaggaggcatctgaattacggaaactagccaatactcagaaaattgaaaataatgaactaaagactaagtgggaagatgagaaggcacaactagaaaagtctaggaatgatgctgagaagaaatacaatgaaatcaatgaacagaataaaatactacatagccaacttgaggcttttcatattcaatgggccgagaaggagcgtaatgctgctg

SEQ ID NO: 155287 - DNA, 248 bp, Glycine max
caatatattccattctctctgtgtatttccctacctctcccttcaagatgcagatgctcgtcaagaccctcaccggcaagaccatcacccttgaggtggaaagctctgacaccatcgacaacgtcaaggccaagatccaggacaaggaaggaatccccccggaccagcaacgtctcattttcgccggaaagcaacttgaggacggccgtacccttgctgactacaacattcagaaggagagtactctt

SEQ ID NO: 155288 - DNA, 253 bp, Glycine max
gtttgttccagcgttggaaacgtgcgctcggattaaaataaccgacccgaacccgaaatgggatatggaaacaatgcccggtgctagagtcatgagtgacatggttttactcccgaacggcgacgttttgattgttaatggagcagccgtagggactgcgggctgggaattgggccgtaacccgctactgagtccgtttctttataaaccaaataatcgggtcgggtcgagatttgaggttcaaacatcgtct

SEQ ID NO: 155289 - DNA, 241 bp, Glycine max
cccaaagttcatattaagagagacagagagagagagatcgaagggaaaaaagcatcagagatcatgaaacccaacttttcctttgtatctaagcttttgatactgcaatatctatcagttttatgcatttctcaggagtttgatttcttctactttgttcagcagtggccaggagcatactgtgacacaaagcagagctgctgctatcctaagactgggaaacctgctgctgatttcagca

SEQ ID NO: 155290 - DNA, 245 bp, Glycine max
gtatgttatgagatgtatttttggtgatccacggaaagcaccacctcctcttgagaaactcagtcccgaagcaactgtttcctttctctggaaaggagagggttcatttgttgaggagcttcttcagtgcataactcctcatgttgaagaaggcatcttgaatgatctcaagtttaaaattcatgctcatgatccttcaaattctggagatattcaaaaagagcttcgaaagtctctgttatggt

SEQ ID NO: 155291 - DNA, 245 bp, Glycine max
gagaatcttgagaggttcaaagagtcagaactcattcactgcagatgggccatgcttgctgttccagggattttggttccagaggcattgggcttcggcaactgggtaaaggctcaggaatgggcagcagttcctgggggccaagcaacctacctaggcaatccagttccatggggcaccctacccaccattctggccattgaattccttgctatttcctttgtggagcaccaaaggagcatgga

SEQ ID NO: 155292 - DNA, 245 bp, Glycine max
gaagttcaaaaacagtgtaacaaaaagaaaaagaaaaaaaatatgaagttcgctataatcacaatattgttctctttatttcttcttgattttggttttgcacaacagggggatcttgacatatcaagatttggagtaccaccaaatacaaatataggccaggctttcttaagtgcctggactcaagcatgtgcatcaccaactgctgtcaaaattgtgattccagctggcacataccaaatggg

SEQ ID NO: 155293 - DNA, 233 bp, Glycine max
gaaaccttcgccaagaaccgtgaactcgaagtgatccactccaggtgggccatgctcggagccttgggctgcgtcttcccggagttgctgtcccgcaacggggtgaagttcggagaagccgtgtggttcaaggccgggtcccagatcttcagcgagggtgggctcgactacttgggcaacccaagcctgatccacgcccagagcatcctcgccatctgggccacacccattag

SEQ ID NO: 155294 - DNA, 238 bp, Glycine max
cataaatattccgttttgcgtttctctgcctaaaaggattgaaagatgggtcaagcactaggttgctatcaagttgatcagtcaaatgtggctatcaaggagcattttggaaaatttgatgatgtcctagaacctggatgtcattgcctgccttggtgtcttgggtaccagattgctggtagtttgtcactgcgtgtgcagcaacttgatgttcgatgtgagacgaaaaccaaggaca

SEQ ID NO: 155295 - DNA, 241 bp, Glycine max
tatagcccaagccctatacaaccaaaccctaacacacacccatttgattcagtttccatggctagcctcaaggttgcatttttggctgcagtgctctgcatggttgtggtgagtgcacccatggcacatgcagctatcacgtgcgggcaggtgacgaatagcctgatcaattgcatcggttacctccagaacggaggaacgccgccgtcgggatgctgcaacggagtgaagagcctcaatg

SEQ ID NO: 155296 - DNA, 240 bp, Glycine max
caacaagcaggtttctttaccaactgctactcttgatggacccataccacctgtaggagccttgagtagcgctctcagtagattacaatcaaataggcctcttagagaattgagagaggttgccaagggagttcctaaacgaattggaggtcctatgcatgaattggctgcaaaagttgacgagtatgctcgtggcatgatcagtggttctggatcatcactttttgaagagcttggact

SEQ ID NO: 155297 - DNA, 235 bp, Glycine max
cttcaacttaagagatcaatatggccaccaccactacccagcctccctctaatatctgttttttccttctgttgttgcttctagcacactttcatttgggcataagccaacttgagctgaattactactctaaaagctgcccaaaagctgaagagatcatcaaggaacaagtcacacaactatataacaagcatggaaacactgccgtttcgtgggtcagaaatctcttccacga

SEQ ID NO: 155298 - DNA, 234 bp, Glycine max
ctctccttctcgctctttcagctttgacttttgttggaaactaaggcctaatcaaaatggtgaagttcacagctgaagagctacgtcgtattatggactataagcataatatccgtaatatgtctgtcattgctcatgttgatcacggaaaatcaaccctcactgattctcttgtggctgctgctggtattattgctcaagaagttgccggtgatgtccgtatgactgataccc

SEQ ID NO: 155299 - DNA, 237 bp, Glycine max
gatgcagcctatgatggcagcctactaccccaacaacgtcactactgatcacattcagcagtatctggatgagaacaagtccttaattctgaagattgttgaaagccagaattcaggcaagcttagcgagttcgccgagaaccaagcaaggcttcagagaaatctcatgtacttagctgcaatagctgattctcaaccccaaccacccaccatgcctggtcagtaccctccgagtgg

SEQ ID NO: 155300 - DNA, 240 bp, Glycine max
ctcagttgtgcatgcatcctcgttacatgcatggtgctgctactagctctgaattaaaggtctatgcatatgctgcggctcaagtgaagaaagccatagatgtgacacattatttggggggagaaaattatgttttctggggtggtcgtgaaggttatcaatctcttttgaacacagatatggagcgagagcttaatcatttggctaggttttttgaagctgctgttgcatacaaaaaga

SEQ ID NO: 155301 - DNA, 236 bp, Glycine max
gaaaccttcgccaagaaccgtgaactcgaagtgatccactccaggtgggccatgctcggagccttgggctgcgtcttcccggagttgctgtcccgcaacggggtgaagttcggagaagccgtgtggttcaaggccgggtcccagatcttcagcgagggtgggctcgactacttgggcaacccaagcctgatccacgcccagagcatcctcgccatctgggccacacccattaggat

SEQ ID NO: 155302 - DNA, 202 bp, Glycine max
agctcctcgaaaatgctggcacgcctcgccgcgagtcgcttcaacgagatccgtcagattttccgtcagccttctagggctttctcaaccgctctgaactaccaccttgacacaccgcacaacaaccctaaccttccatgggaattcaccgaggccaatcaagcaaaggttaaggagattttgtctcactatccatacaact

SEQ ID NO: 155303 - DNA, 267 bp, Glycine max
ctcgatcagtggctggcagctacgacaacgaagctgttgctatatttgctttgatattcactttctacctctatattaagacgctcaatacagggtccctcttttatgccactttgaattccatagcatacttttacatggtttgctcatggggagggtacacttttatcattaatcttattccaatgcatgttctcttgtgcatagtaactggtcgctattcttctcgactgtacattgcatatgcacctcttgttgtattgggaa

SEQ ID NO: 155304 - DNA, 249 bp, Glycine max
  unsure (1)..(249): unsure at all n locations
caaatattttttcacttgctctccatcttttttcagttcatcagnggccaggtaggccatgggangggctccatgttgtgacaaatccaatgtgaaaagagggccttggtctcctgatgaagatgccaccctcaaaaactacnttgagaaacatggcacaggtggtaactggatagctctccccaaaaaagcaggccttaagcgttgtgggaagagctgtcgtctaagatggctaaactatctcaggcc

SEQ ID NO: 155305 - DNA, 247 bp, Glycine max
aaatggcaagaatatcaaattggtctcttgtcttcctcctcatctctacactactccacatagagcccagcctctcaagcccaagcccaagcccaagcccaagcccgttcataaaatcctcctgcagcagcacccagtacccagccctctgcgtctcatccctctccgtctacgccttcagcatccaacaggaccctcaccaactcgttcagacagcactctccctctccctgaaccgcacccaagc

SEQ ID NO: 155306 - DNA, 255 bp, Glycine max
ctaacctacctctttttcttctctctcaacaacttcaccttcttcctcctcgatcatgtctcacttcaagggcaagtaccatgatgagcttatcgccaatgctgcgtacattggcactcctggaaagggtattcttgctgctgatgagtcaacagggacaattggcaagcgtttggccagcatcagtgtagagaacattaaatccaacaggcgagctcttagggagctgcttttcactgctcctggtgttcttca

SEQ ID NO: 155307 - DNA, 262 bp, Glycine max
ctgcccctctttttggacccaaggtcggcttcggccggtcgatccgggcggaagacattgtcaggtggggactttggctggggcggcacatctgttacaagataacgcaggtgtgctaagatgagctcaacgagaacagaaatctcgtgtggaataaaacggtaaaagctcgtttgattctgatttccagtacgaatacgaaccgtgatagcgtggcctatcgatcctttagtccttcggaatttgaagctagaggtgtcag

SEQ ID NO: 155308 - DNA, 248 bp, Glycine max
ctcgatcaatggctggcagctacgacaacgaagctgttgctatatttgctttgatattcaccttctacctctatattaagacgctcaatacagggtccctcttttatgccactttgaattccatagcatacttttacatggtttgctcatggggagggtacacttttatcattaatcttattccaatgcatgttctcttgtgcatagtaactggtcgctattcttctcgactgtacattgcatatgca

SEQ ID NO: 155309 - DNA, 266 bp, Glycine max
cagatctatgatatattccagttgcttccatctaagattcaagtgggagttttctctgctacaatgcctcccgaggcacttgaggtcacaaggaagttcatgaacaaacctgtgaggatccttgtgaagcgtgatgagctcaccttggagggtatcaaggaatttcatgtcaatgttgagaaagaggaatggaagcttgacacactgtgtgatctttatgagacattggcaattactcagagtgtcatttttgtgaacaccagaag

SEQ ID NO: 155310 - DNA, 246 bp, Glycine max
tgcggttattatcagcactgggataaacccaaaggctaagtcttactatctctttgatggctatgcccacttgtcctctggcctcgcctgtggcctcgctggcctctctgctggaatggccattgggattgttggtgatgctggtgtcagggctaatgcccagcagccgaagctgtttgttggtatgattcttatcttgattttcgctgaagctcttgctctgtatggcctcattgtgggtatcat

SEQ ID NO: 155311 - DNA, 258 bp, Glycine max
cacctattgaagctccagccttgtctttagatgagcttaaggagaagactgacaactttggttcaaaggcattaataggtgaaggatcgtatggtcgggtgtattctgcaaccttaaacaatgggaaagcagtggctgtgaaaaagcttgatgtttcatctgaacccgaatcaaataatgagtttttgacccaggtttccatggtctcaagattgaaggatgacaattttgttgagttgcatggttactgtgttgaag

SEQ ID NO: 155312 - DNA, 260 bp, Glycine max
ctgagatcaacatgttgcggaggcttctctcttctcacctcaaaaccctagccgccaccgctttttcttccactccccgatctgcttccgccgccgccagattcgccgctctctctcgctcctcccgctacttctcaacccagtccgaggatgctactgccatcaaaaagaaggttatggatgtaatgccaatcgctactggtcacgagcgcgaggagcttcaggctgagctcgagggaaggaatattcttgaaatagac

SEQ ID NO: 155313 - DNA, 259 bp, Glycine max
ctcaaggagatggctctgggaagaggcagtgcagtggttctactactttgcttcttgctgcttcactctcagatggctcgtgctgccacctacacagttggagattctgggggttggacctttaacactgttgcctggcccaaaggaaagctctttcgggctggtgacacacttgctttcaattatagccctgggactcacaatgtggtggccgtgaacaaggctggatatgatcgctgcaagactccaagaggagcca

SEQ ID NO: 155314 - DNA, 260 bp, Glycine max
gagtgatcggtgttcacttgatctcatcataatcgtcagcgtcaattgtagaagctgccgatcagaaacatcgccgtcggactgcctgaagaggcgtctctccccgtcacgttgacggcggctttggctgagttcatctcaaccttcatcttcgtgttcgccggctcaggctccggcatcgcctacaacaagctcagcgacaacggcgctgccagccctgccggcctcatctccgcctccatcggccatgcattcgccct

SEQ ID NO: 155315 - DNA, 253 bp, Glycine max
gatgcagcctatgatggcagcctactaccccaacaacgtcactactgatcacattcagcagtatctggatgacaacaagtccttaattctgaagattgttgaaagccagaattcaggcaagcttagcgagtgtgccgagaaccaagcaaggcttcagagaaatctcatgtacttagctgcaatagctgattctcaaccccaaccacccaccatgcctggtcagtaccctccgagtgggatgatgcagcaggga

SEQ ID NO: 155316 - DNA, 252 bp, Glycine max
gcggatgttatccaattggggggttaaatcatttgaaggcgagggaaagatagttggtccaaaggaagttgaggtgacacaattggatggcactaaattgtcctacacagcaaagcacgtattgattgcaactggcagcagggctcaacgtccaaatattccaggacaggtgttgggtataacatcagacgaggcactaagtttagagcgtcttccaaaacatgctgtggttcttggaggaggttatattgc

SEQ ID NO: 155317 - DNA, 250 bp, Glycine max
tttttatgtcattaaagggagcaatggaaatcttaagacttccttttgtgctgatcaatcaaggtcttctcaggcaaatgatgtccgcaagcaaatcgttggcagcgctgttccagttcttaaaggcgaaaagttttccttgcggatactggtggaccattctattgttgaaagctttgctcaaggtggaaggacggttgtgacatctcgggtttatccaacaaaggcaatctatggagctgctaggttg

SEQ ID NO: 155318 - DNA, 262 bp, Glycine max
aaaagatcccaacagtgagaagccgagcgattttgtttaccttccaagagatgaagcatttggtcacttgaagtcatcagattttctcgcttttggaatcaaatctgcatcccaagatgtcttgcctgtcttgactgatgcattcgatggaaatattttgagccttgagtttgataattttgctgaagtgcgcaaactctatgaaggtggagttacactacctacaaactttcttagcaagatcgcccctataccagtgatc

SEQ ID NO: 155319 - DNA, 266 bp, Glycine max
gctcgaaattgtgccctccctctttctagctatttccctctcttaacacaattaacaaagatatatcatatcatatcaactccaaatgatgataaatattgggttgtttcttcttgtggtggtggctacttttgtggtggcagccacagctggtagcttttaccaagactttgaaataacatggggtggttagcgtgccaaaatctatgaaaatggaaatcttctcaccctctccctagacagagactctggctctggctttcgtt

SEQ ID NO: 155320 - DNA, 258 bp, Glycine max
gatcaacaaggtttactactcttgcttggtgaaggctatgcctaaatcgaatattccttcagagcctgagcggaatctggaccagatcatatataaaataaagcttcctggaccagcgattttgggtgagggtaagcccgaaaatcagaatcatgccataattttcacacgtggagagggcttgcaaacaatagatatgaaccaggataactacatggaagaagctttgaaaatgagaaatttgttgcaagaatttct

SEQ ID NO: 155321 - DNA, 255 bp, Glycine max
gttttcaacaatagaaggacatatgaaaatggcctatttccataatacctgctttctggtttttatgcttatcgcatcactgttggtccccggcaaaatacggtgactacggtcccgaagaagaaaaacttctatcaaaaactataggcattcaaggcattgtctattgcaaatctgcctctaaactcaccccacttgaaggggccttgacaaggatagcatgcgaggctgttgatgaatatgggtttgaaacga

SEQ ID NO: 155322 - DNA, 245 bp, Glycine max
atcttgtacaagctaggatcaatccagaagatgcgtatgctggtacttacactcattgtgaaatccacccatcactgattttcggtgtatgtgcttccatcataccatttccttatcacaatcagtccccacgtaatacttaataatccgcaatgggaaagcaagcaatgggaatatatgttaccaactaccagtttcgaatggataccttggcctatgttttatattatccacaaaagccactg

SEQ ID NO: 155323 - DNA, 248 bp, Glycine max
atcatcaattataagcatgggtttgtggaacacaacgaatgcagtgtcttgccgctttcacaagttttgtgatgacctaaagaatctggtcttccaaggtgatgccacgtcttcttccaggggcatagaactcacaaagttagacggtggaggaaaaccagtgggtggcagtgtggggagagtgttatactcttctccagtgcacctttgggaaagctctacagtggtcgcaagctttgaaaccgact

SEQ ID NO: 155324 - DNA, 253 bp, Glycine max
tgggattggagggattgacgctgcgtctcttcctcttctctttcgatccatccctcattcctaatcctccaatccaaccacctcagcctcacactcacatatacacatatctgaacgcgtatcgtccctcctatggcttcaaagcgcatcctcaaggagctcaaggacttgcagaaagacccaccaacttcttgcagcgctggtccagtagctgaggacatgttccattggcaagcaacaataatgggtcctg

SEQ ID NO: 155325 - DNA, 248 bp, Glycine max
  unsure (1)..(248): unsure at all n locations
ccttgtttggggtttgcatttttcctggttgaaaaagggaagaacttgaactaattggttaagtnnnnnnnnnnnnnnnnnnnnnngggtataatattttatatcagttatnaaaggaaagaaaganagaaacgaagatgggaaggggtaaggtacagctgaagaggatagagaacaagatcaatcgccaggtaactttctccanncggagaagtgggttgctcaagaaagctcatgagatctctgta

SEQ ID NO: 155326 - DNA, 262 bp, Glycine max
  unsure (1)..(262): unsure at all n locations
caaagatcccaacagtgagaagtcgagcgattttgtttaccttccaagagatgaagcatttggtcacttgaagtcatcagattttctcgcttttggaatcaaatctggacnccaagatgtcttgcctgtcttgactgatgcattcgatggaaatattttgagccttgagtttgataattttgctgaagtgcgcgaactctatgaaggtggagttacactacctacgaactttcttagcaagatcgcccctataccagtgatc

SEQ ID NO: 155327 - DNA, 264 bp, Glycine max
caccaacagccaagactctgacttacctggcccaggagactaccctagaatcgagcttcgttcgggacgaggaggtgcgtcccaaggttgcctacaacgaattcagcgacgagatcccagtgatttctcttgccggaatcgacgaggtggatggacgcagaagagagatttgtgagaagatcgtggaggcttgcgagaattggggtatattccaggttgttgatcacggtgtggatcaacaactcgtggccgagatgacccgtc

SEQ ID NO: 155328 - DNA, 256 bp, Glycine max
attgtgccctccctctttctagctatttccctctcttaacacaattaacaaagatatatcatatcatatcaactccaaatgatgaaaaatattgggttgtttcttcttgtggtggtggctacttttgtggtggcagccacagctggtagcttttaccaagactttgaaataacatggggtggtgagcgtgccaaaatctatgaaaatggaaatcttctcaccctctccctagacagagctctggctctggctttcg

SEQ ID NO: 155329 - DNA, 262 bp, Glycine max
ggaagagaagaattaacatgaaaattcagtgtgacgtgtgtgagagagctccagcaacagtgatttgttgcgcggatgaggctgctttgtgtgccaaatgtgacgttgaagttcatgctgcaaacaagcttgcaagcaagcaccaaagacttcttcttcaatgtctatcaagcaagcttcccacatgtgacatttgccaagacaagccagcattcatattttgtgttgaagacagagcactcttctgtcagattgtgatgaa

SEQ ID NO: 155330 - DNA, 263 bp, Glycine max
agaataaccatgatgaaatcgactttgagtttttggggaacattagaggcaaagactggaggattcagaccaatgtttatggcaatggtagcaccaacattggcagagaggaaagatatggtctctggtttgaccctgcagatgatttccatcagtacactattgtctggacagactctcagatcatattttatgtggacaatgttcctattagagaagtgacgcgaacagaatctatgggaggagatttccttctaagccaa

SEQ ID NO: 155331 - DNA, 184 bp, Glycine max
caaacttgtagaagccatggagaggagtataccagtggttagggaggcttggttgattgacagtattgaaaagcaagaaccacaacctttggaagcttatgatcttgtctgcggatcgttctgtggatggcaagggtatcccctgggacaaacaagatcctggggaagaggctatcgaatcact

SEQ ID NO: 155332 - DNA, 253 bp, Glycine max
tcgttctttcactcaaacacacacccttgattatatcactttctcttgttctcttaccgtagaacattgcatttactcctatctctcactctggatcttcaacttcttcctgattttgctgatttgggggattgagttggaaggggaaacatggctgcttcttctgcatctctttctggtgcttctgcttcggatcttctgaggagttcaaccagcggtttcaatggtgttcctttgagaccatggggaaggg

SEQ ID NO: 155333 - DNA, 254 bp, Glycine max
gagggtctccttcttgccagtaatagtcttcaaaaggtttggaaagaagcttcaagagactgaacaaaagcttatacagaagaacaaggacgagacgttgagaaaccgcagtgggccggctaaaatgccttacactttgctctatccttctagtgaggagggattgactttcagaggaattcccaacagtatctccatctaggggctctatggttgttgcagtactttccctggttttcaataaagtgaataga

SEQ ID NO: 155334 - DNA, 254 bp, Glycine max
ctttaagtttccttaaggtccatgatgcgggtcacatggttccgatggatcagccgaaggattcgttagaaatgctgaagaggtggactcagggaaccctttcagaatctgcagctgatgcggagaaattggttgcggagttgtaatcactttcgttattgcaattagtccagaaaagggatacaaaagtattatgcaataaagagaagggaattaaagtgatcagcatgtgttattaattaaaagtgagattg

SEQ ID NO: 155335 - DNA, 255 bp, Glycine max
actggctatgggctggttttctttgcccagctcatgcttgctgacatgaataaagaacttaaaggattaagatgtgctgtgagtggttctggaaagattgcaatgcatgtcttagagaagctaattgcttatggtgctcttcccatttcagtatcagattctagaggatatttggttgatgaggatggatttgactacatgaaaatatcatttttgagagacatcaaagctcaacaaagaagttacgagactatt

SEQ ID NO: 155336 - DNA, 257 bp, Glycine max
tttttatgtcattaaagggagcaatggaaatcttaagacttccttttgtgctgatcaatcaaggtcttctcaggcaaatgatgtccgcaagcaaatcgttggcagcgctgttccagttcttaaaggcgaaaagttttccttgcggatactggtggaccattctattgttgaaagctttgctcaaggtggaaggacggttgtgacatctcgggtttatccaacaaaggcaatctatggagctgctagttgttcttgtt

SEQ ID NO: 155337 - DNA, 250 bp, Glycine max
gaaaatgagtccaaaaataacacctatagatacggagcaagatcttatgaatttaatgggagctatttttgctgctgttttctttcttggaggctccaacacttccactgttcaacccatagttgcaattgaaagaacagtcttctaccgtgaaagagcagctggaatgtactcagctctaccttatgcaattgctcaggtggcaatagaatgtatttatgttgcaatccagacatttacttcagtctta

SEQ ID NO: 155338 - DNA, 250 bp, Glycine max
ggtggatttcccagtggaaaatacctctttgctggagtggttaatggaaggaacatctataccaatgaccttgctgcttctctcactacattgcagggtcttgagggcattgtaggcaaagataagcttgttgtgtccacctcctcctcccttcttcacactgctgttgatcttgttaacgagaccaagttggatgacgagatcaagtcatggctagcatttgctgcacaaaaaattgtgaagttaacgc

SEQ ID NO: 155339 - DNA, 122 bp, Glycine max
gcagctcaagctcgttgctggcaactctgctggcactgtcactgcttactacttgtcatcccaagggccaacacatgatgagattgatttcgagtttttgggaaacctaagtggggaccctt

SEQ ID NO: 155340 - DNA, 262 bp, Glycine max
ctcataacacaaagcacaaagcaaagctcatccttgagttaaaaaatggcagcagcttcttccatggctctctcatccccatccttggctggcaaggccgtgaagctgggcccatcagccccagaagtgggaagggtgagcatgaggaagaccgtcaccaagcaggtctcctcaggaagcccatggtacggcccagaccgagtcaagtactcgggcccattctctggcgagcccccgtcctacctaaccgggagttcccagg

SEQ ID NO: 155341 - DNA, 257 bp, Glycine max
cacagatcagaagtgttcaagtttggattttgtgcttctggaagttaaaatggcccaagaaactttcctattcacatctaaatcagtgaacgaggggcaccctgacaagctctgtgaccagatctccgatgctgtgctcgatgcatgcttggagcaggaccctgacagcaaggttgcctgtgaaacctgcattgagaccaacatggtgatggttttcggagagatcacaaccaaggccaacgtggactatgagaaga

SEQ ID NO: 155342 - DNA, 249 bp, Glycine max
cgttacttaattccttcgttcatcacttctactttctttcttttcctctcgcaagtcttagtgcttggcgattgattaccccagaaggactttgtttgttacaagaaaccaagggcaagtttcatgtctgaattcgacacaaacatcccaactgcttttgatccctttgctgatgcaaatgctgaggactcaggtgctgggacgaaagagtatgttcatgttcgtgtacaacagcgcacggaaggaaaa

SEQ ID NO: 155343 - DNA, 254 bp, Glycine max
ggaatgtatgattccctgaagccagtagttttggttggtgggttgcaggatagtttctttgctagtttccttttcggatggggaatcacaattggtgctggtttggcttcttaccccattgacactgttcgtagaaggatgatgatgacttctggagaggctgtgaagtacaagagctctttgcatgcattccaaacaatcgtcgcaaatgagggtgccaagtcactcttcaaaggtgctgggcaaacatattg

SEQ ID NO: 155344 - DNA, 249 bp, Glycine max
gcaagatggaagtgcttcccacttcttccatagagcaatcaccgattacaacaccgaaacccgaaagcgccgaaaaatactagggcaagattttggtgatgtccgctggcacaagactggaagaactaaaccagttgtctttaatgggattcaaaaaggctgtaaaaagattatggttttgtatgttagcaatgtaaggggaggaagagctgagaaaactaattgggttatgcatcatatcacctagga

SEQ ID NO: 155345 - DNA, 248 bp, Glycine max
gcgagagagagaaagaaatggcgaccaacattgggatcatggatgcggcttacttcgtcggcagatctgagattctttcttggatcaactcaactctgcaactcaatctctccaaagtcgaagaggcttgttcaggcgccgttcattgtcagcttctcgatgccgctcatccagggatcgtgcctatgcacaaggtcaatttcgacgccaagagcgagtacgagatgattcagaacacaaggtccttc

SEQ ID NO: 155346 - DNA, 249 bp, Glycine max
gattgagcaggctgcctacgtcaaatccatcgacaacaatcatatgttagaaataggactcgaagggttctatggtgaaacaatgccagagaaaaaacaattcaatcctgggtaccaacttattggcactgatttcatttctaacaacctagttcaccaagttgattttgctaccatgcatctctaccctgaacaatggttgccaggctcaaacgaagctgctcagggtgcatttgttacaaatggtta

SEQ ID NO: 155347 - DNA, 257 bp, Glycine max
gcaaacatagcggtccctatcttgaaatagtcaattcctccatcccagcagcatgtcaacatgtctcagaagttgcagcataccgtctcatattccttgactccaattcagtcttctatggcagcctctatgttggtgacgtagccaactctcgcattaggccagcgctgaggatcctcaagcaaaacatcacgctgatgactacacttgtggcagatagagctcaagcacttgcaatgaaggaatgatgaaggcat

SEQ ID NO: 155348 - DNA, 253 bp, Glycine max
cttgctgaggccattgatgatggcaagagtggaccaagggatgaccccaaggttcgttccaagatcgtgtctgaagagttcggttgggacaaggatcttgccaagagaatctggtgctttggccctgagacccttggacccaacatggtggttgatatgtgcaagggagtccagtatttgaatgaaatcaaggattctgtggttgctggattccagtgggcatcaaaagaaggtgctttggtgaagaaaacat

SEQ ID NO: 155349 - DNA, 253 bp, Glycine max
attctaactctgaaaggttgcaagttcaacttaaaggagctggcaagactccttacagtcgctttgccgatggccttgccgtcctccgcagcagcgtcacggagttcctttgcagtgaggcaatgcaccaccttggtataccaacaactcgtgcactttctcttgttaccaccggcaacctcgtcacccgtgacatgttttatgacggcaatccaaaggaagaacctggcgcaattgtttgcgagttgcccaa

SEQ ID NO: 155350 - DNA, 245 bp, Glycine max
caagccagagcttgatattatttccaatgctagctgcacaaccaactgccttgctccacttgctaaggttattaatgacaggtttggcattgctgagggtttgatgaccactgttcattccatcactgccacccagaagactgttgatgggccatctaccaaagactggagaggtggaagagctgcttcatttaacatcattcctagcagcactggagctgccaaggctgttggaaagtccttcc

SEQ ID NO: 155351 - DNA, 248 bp, Glycine max
  unsure (1)..(248): unsure at all n locations
tctctnctnaaatgtttagaggcttcctnggccctctgtagcatttgtaatncatcctcctgaagatgcagttgtntncagtttgtggncatgttttctgnaaccaatgcatctgtgaacatcttaccggcgatgacaatcagtgccctgctgcaaattgcaaaagtcgactgagcacatctatggtattttcaaaaaccacactgnacagttgtctttctgaccagagttgtgatattcacccagtc

SEQ ID NO: 155352 - DNA, 246 bp, Glycine max
ttctttgccagcagggaatctcaatgaggaagaatgggtaactgtgtatggattttcccccggtgatactaacatggtgttaagggagtttgaaaaatgcggtgaaattttgaaacatgttcctggtcctagagatgctaactgggtgcacattttgtatcagaatcgatctgatgcccataaagctctcaacaagaatggaatgcaaattaatggagtactaattgttggtgtaaactgttggat

SEQ ID NO: 155353 - DNA, 254 bp, Glycine max
agcaaaggcagtgctaggaaagtattatcgtgagcctcagaaatctgggccattgccacttcatctaataaagtacttgctccacagcataagtcaggatcacttcgttagcgactctggcgacattgtgtactaccagactgattcccagctccacaaagattcttggacccagtccaactaaagtttttgatgctacatttacctatttcactcttaaatactatttcctatgtaatatgaatttagaatat

SEQ ID NO: 155354 - DNA, 250 bp, Glycine max
tgtcaccggcgcttccggttacattgcatcctgtatagtcaaaatcctcctcaatcgcggctataccgttaaggccaccgttcgcgacacaagtgatccgtataaaataaaccacttggttggcctcgacggtgctaaggagaggctgcacctctacaaggcgaatcttcttgaagaaggttcctttaactctgtcgttcaaggttgccatgctgtgtttcacactgcttctccctatttcacaatgtca

SEQ ID NO: 155355 - DNA, 245 bp, Glycine max
gtaacagctatcggttctatcttggggtagaacttctaaaatgtgaaggcagtgagtccattctcaagtctctttggcatcactcggatgcagttttgtgctgctctttaaaggcattacccgttttcacgtttgcaaatcaagctggacttgacatgcttgagacaactttggttgcacttcaagacatcactctggaaaagatttttgatgacaatggaaagaaaactctggcactgagttcc

SEQ ID NO: 155356 - DNA, 242 bp, Glycine max
aaaatgggaggtgcctgatggaacaattccggtccgaagagaaaaaggatgacatgttaagggcaagctctgttcagcattttggaaagaagaaggataggagcttccctcagccaaaacctgcaaaacctctacctgacatcatcagtcagagtggccaccagcatgccatagcgtatgtggagggagataagtattatggagccaaggcaaccataaacgtctgggaccaaaaattcaac

SEQ ID NO: 155357 - DNA, 246 bp, Glycine max
cactcctcctcttctcacggccagggttttagggcagcttctttctttgagattaagtttcagtagtaatgggtaaggaaaaggttcacattaacatcgtggccattggccatgtcgactctgggaagtcaaccaccaccagtcaccttatctacaagctcggaggtattgacaagcgtgtcatcgagagattcgagagtgggaagctgctgagatgaataagaggtctttcaagttgcctgggtg

SEQ ID NO: 155358 - DNA, 254 bp, Glycine max
ggatgtctctgttgttgacctcacagtgaggctggagaaagaagcttcctacgatgaaattaaaaatgctatcaaggaggaatcagagggcaagttgaagggaattcttggttacactgaagatgatgtggtctccactgactttatcggcgatagcagatcaagtatttttgatgcaaaggctaaaattgcattgaataagaactttgtgaagcttgtttcttggtacgacaacgagtgggatacagctcacg

SEQ ID NO: 155359 - DNA, 164 bp, Glycine max
ggcttatggtggatacctaggcactcagagacgaggaagggcgtagtaagcgactaaatgcttcggggagttgaaaataagcgtagatccggggattcccgatataggtcaacctatcgaactgctgcccaccctggaaacggctcagccggaggtagggtcca

SEQ ID NO: 155360 - DNA, 249 bp, Glycine max
gtcactttacccaatcctaacactttcttctctctgttttccttcttcctcgcatcaatggatccggacggcgttctcctcggcatgtgcaaccctctcctcgacatctctgccgtcgtcgacgacgctttcttgcaaaaatacggtatcaagttgaacgatgcgattctcgccgaggataaacacaaacctatgtatgaagaattggctaacaatcctaatgtggagtacattgctgaggtgctactc

SEQ ID NO: 155361 - DNA, 243 bp, Glycine max
ctgatattgatcgtcgaatatcagagcatgtccttcgtatgcatcgatttcgttctgctgttgatggaggtgaggcagcacttgatgggagctcaagatatggaagagaagatgaagctgatatggactcatctgtctttgtcaaatataacagaatgttacatgggaagaaaactggaagaggtcaaaaacgtgatacgcttacaattaagtttcttaaaaaatttatccactagctaagca

SEQ ID NO: 155362 - DNA, 243 bp, Glycine max
ctgatattaatcgtcgaatatcagagcatgtccttcgtatgcatcgatttcgttctgctgttgatggaggttaggcagcacttgatgggagctcaagatatggaagagaagatgaagctgatatggactcatctgtctttgtcaaatataacagaatgttacatgggaagaaaactggaagaggtcaaaaacgtgatacgcttacaattaagtttcttaaaaaattcatcactatgctaagca

SEQ ID NO: 155363 - DNA, 245 bp, Glycine max
cttcaaaaactttgcagagctacggaaaaagttactgccattttcattggcccttttcagttttggagaagtaaatggcctgttgacaagagatgattttcagagagcagcatcacatgtatgtggcatatctctctcggacactgtggttgaaattgttttccatttgtttgatgcaaatcgggatggaaacctaagttttgacgagtttgtcagagtgctacacaagcgcgaagggacattgc

SEQ ID NO: 155364 - DNA, 259 bp, Glycine max
gtgatatcatttcatttcagagggattaattattgttttatttttaagtgtggagtgctgtgcaggtcaaggcccttttacttgttcgtccggttgttcccatcttctctctcgtaccaatcaaatcacacttttgtgttgtgttgggaaaccctaaaccccgttttcggtgagatcgagatcgatcgaacatggatgaggagtacgatgtgatcgtgttgggcacgggtctcaaggagtgcattctcagcggtcttct

SEQ ID NO: 155365 - DNA, 253 bp, Glycine max
gcaaactctatgaaggtggagttacactacctacaaagtttcttagcaagatcgcccctataccagtggtcaaggaaatttttcgaactgatggcgaacagttcctcaagtatccaccacttaacgtggttcaggtggataagtctgcatgggtgactgatgaagaatttgctagagaaacgattgctggtgttaatccagatgtcattaagattcttgaggagttcccaccacgtagcaacgtagattctcc

SEQ ID NO: 155366 - DNA, 259 bp, Glycine max
gagaggtggatccagacgcgttggcaaaggcattcgtggagcactactacagcaccttcgacaccaacaggaacggcttagcgaatctctaccaggagggttccatgctcactttcgaagggcagaagatccaaggcgcttccaacatcgttgccaagctcacctccctccctttccagcagtgccaccactcaatctccaccgtcgactgccagccctccggcgtcaacgccggcatgctcgtcttcgtcagcggaaa

SEQ ID NO: 155367 - DNA, 148 bp, Glycine max
gggtgatgcaggatggaactccatggccagggaacaacactcgcgatcatccaggagtgattcaggtatatttaggaagtgccggtgcgctagacgtggaaggcaacgccgcacccccacttgtgtatatttcacgtgaaaaacgtcc

SEQ ID NO: 155368 - DNA, 250 bp, Glycine max
tgagaacaagaagctgattctggcaatattggacaatcaaaatcttggagaacttgcagaatgtgcccagtaccaagctcagcttcaaaagaatttgatgtatttagctgcaattgctgatgcccagcctcaaacaccagccatgcctccacagatggcaccacaccctgccatgcaaccaggattctatatgcaacatcctcaggctgcagcagcagcaatggctcagcagcagcagcaaggaatgttc

SEQ ID NO: 155369 - DNA, 260 bp, Glycine max
ggaattctgctcgacgcgtgctgtgccggggcttgctcagcggaaacaggctatgtggggccatcccgagctcggtttctcagatttaccgtctggcagatctggatctgtctcgtaaccagatttctgggcccattccggagtcgctgggtaaaatggcggttttatcgacactaaacttggatatgaataaactctctgggcccattccggtgagtctgtttagttccggaatcagtgacttaaacctgagccggaac

SEQ ID NO: 155370 - DNA, 252 bp, Glycine max
cagtcatgcgatgcatcattactgttagcgacggtgagcgatgtggtgtcggagcagacatcggatagaagttttgggatgagaaacttcaagtacgtaaacactgtcaaagcagcggttgagaaagaatgccccttcacagtgtcatgcgctgacattgttgctctttctgccagaggtgccattgctttgttgggaggaccaagcattgaagatgggacagggagaaaggacagcaaagaaagctatgca

SEQ ID NO: 155371 - DNA, 218 bp, Glycine max
cttaatttctctctgccttgctcatttacacacctctccaacctatcactttcagctttatttgaatccctctctctcctttccaaatggccagcgttgaggttgcacatcaaacaccaacaacagttccagaaaatgaaacaaccgaggtaatcaagacccaggaaacaaccccggaaccagtaccagccactgaggctcctgcaacagaacaagca

SEQ ID NO: 155372 - DNA, 249 bp, Glycine max
caaaatcttcatattcatcaaactcatcaaaatgagtctgtaccactcctccaccaccaccaccaccaccaccatcttcaccgtcatattcctcctccttgcaatactattcactctcacaccccacaaggccaacggtgccacgtgtcaccctgaggaagaagcgggcctgttgggcttcaaatccggtatccgatccgacccgtccggcctgctcagtaactggatatcgggtacggactgctgcac

SEQ ID NO: 155373 - DNA, 242 bp, Glycine max
cctgaatggatgaattttgagagtgatttggaggccaaggagaaggaacttgccaatgggagattggctatgttggcattcttgggattcatagttcaacacaacgtgacaggtacaggaccatttgagaacctcttgcagcacctctctgacccgtggcacaacaccatcatcaatacaattcgtggctactaagtttgtatccagtggacatggataagcctgtgtccttctcgtgtaat

SEQ ID NO: 155374 - DNA, 245 bp, Glycine max
cccaatcgtagccgtcgcactttgcgttttctgcgtcatgtgcgattccccgacaatggccacccaaatgagcaagaagagaaagttcgtagctgatggagtgtacttcgctgaactgaacgaggttctgacaagggagttagccgaggacggatactccggcgtggaagttagggttacgccgatgcgcaccgaaatcatcatcagagccaccagaacccaagccgttctcggtgagaagggaa

SEQ ID NO: 155375 - DNA, 251 bp, Glycine max
aagagatcgcagacacagagcagaatggcttctacccaatgtttcttgcaacaccatgctcttaccacccctgccagtgccagatccccatcactacgcatcttggttagcaccaagcctaaccagcttgtttgcaaggcacagaaacgacagacaccacaagaggatattgatgtcagcccaatctctcgccgtttagctctaactgtgctcattggtgctgctgctgttggctccaaagtccaacctgc

SEQ ID NO: 155376 - DNA, 251 bp, Glycine max
  unsure (1)..(251): unsure at all n locations
cactgtgttcctgtttttgttcttcgatggcngcaacctcaacatcactggcttctcaactctacattggcctgcgccgcccctgcctcaagctcgattctttcaattctcaatctttctctctcttcgaccctaatcttcgcctntccctctctccacccaaaccctcacgcgccgtcatcgccatggccggcaccgggaagttctttgttggtggcaatggaagtgtaacggaaaaaagatcaatcagc

SEQ ID NO: 155377 - DNA, 246 bp, Glycine max
agacaattcaacttaagaggtcaatatggccaccaccactacccatcctccctctaatatctgttttttccttctgttgttgcttctagcacactttcatttgggcataagccaacttgagctgagttactactctaaaagctgcccaaaagctgaagagatcatcaaggaacaagtcacacaactgtatgacaagcatggaaacactgccgtttcgtgggtcagaaatctcttccacgattgcgt

SEQ ID NO: 155378 - DNA, 171 bp, Glycine max
gtgtaattatcagagttggggagcctggtaagggcgagtggaatttttggtgccattgtttgccatttgtaatttaacttgccagtcctttcatgtacagaaataaaaggaaattccgtgtgggactttgatttcaaataatctctatcgaatttgaactagttggaattg

SEQ ID NO: 155379 - DNA, 244 bp, Glycine max
ccctgattaaaggttatctctaaggtcctaaacaatcctctttcaaaaacataccgagataagtgtggaaatgacgacaccatcattggtagagtctctagttcttcaactccatgagatctcagctgtcaaatttggcaacttcaagctcaatctggcatcttctcaccaatctacatagagctccgcctcatcatatcttacccttctctcctccaacagatctctccgaaccttatttctt

SEQ ID NO: 155380 - DNA, 250 bp, Glycine max
gaacaagcagcattagcaaccaagcaagagaatggcgacgacagcagccttgtgcggcactatgatgagcagctccttcctgaggagaaaagcagtggtcacaagcctgaaggcattccccaatgctaacgcagtgtttggtgtaaagggtggacgtggaggtggtgtgactgccatggctagcttcaaggtgaagctgataaccccagagggagagaaagagtttgaatgcccagatgatgtatacatt

SEQ ID NO: 155381 - DNA, 277 bp, Glycine max
tgagcagccaaacactctctctctgtctctcgaaaattctcagtttgcagagaaaatctgaatcatgtcgtggcaagcgtatgtcgacgatcaccttctgtgtgacatcgaaggtaaccacctcactcacgctgctatcatcggccaagacggcagcgtttgggctcagagtaccgacttccctcagttcaaacctgaggagataactgccatcatgaatgactttaatgagcctggatcacttgctccaactggattgtatctcggtggcacaaat

SEQ ID NO: 155382 - DNA, 208 bp, Glycine max
gtggcaccatttgaggcatgttatgattcaaccagcattagaaattcctcaactggactagttgtgccaactattgatctagtgctgcgaggtggagtgcagtggactatttatggagccaattcaatggttatggcaaagaaaaatgtagcatgtcttgcaattgttgatggagggacagagcctagaatgtcgttcgttagagctt

SEQ ID NO: 155383 - DNA, 271 bp, Glycine max
aatggatcctcattctgtggtggacctgactgaggataaagatgttgatgttgagttcatgtacactgcaaaatggaaggaaacagatacatcttttgagaagagaatggataaatactctcagtcttcttctttgccacatcacttggagattcactggttctcaatcataaactcctgtgtaacagttcttcttttgactggttttctggcaaccattctcatgcgtgtattgaagaatgactttatgaagtatgctcaagatgaggaa

SEQ ID NO: 155384 - DNA, 270 bp, Glycine max
gatctgccaaacgctacatggtcaactctgaagacttatgggaaacccccggtctcacgtggcggacaatcagttacctttgtgggtacaagcttagtaatttttggtggagaagatgcaaagagaactctattgaatgatttacatattcttgatttggaaaccatgacatgggatgaaattgatgctgttggggtgcctccttctccaaggtctgatcatgctgcggctgttcatgtggagcgatacttgcttatctttggtgggggt

SEQ ID NO: 155385 - DNA, 215 bp, Glycine max
gtgctgttcttatcattgattcgaccactggtggttttgaagctggtatttccaaggatggacagactcgtgaacatgctctgctttcattcacccttggtgtgaaacagatgatttgctgctgtaacaaaatggatgctactacacccaagtattccaaggccaggtatgctgaaattgtgaaggaagtctctgcctacttgaagacagtagga

SEQ ID NO: 155386 - DNA, 266 bp, Glycine max
caaataaccaaacttatcctatgtctgacttctacctttgtttcaacaccaagttcagacacaaagcagcgaggtttttcataacaaaggagaatgaaggctttttcagttaaagttgaggaaggaagggaaggtaaaaatggtaacctttctgttggtccagtataccgtaacctcctctcagaaaatgaatttcctccaatggatcctgatttcagtaccacttgggatattttctgtgtgtctgtcaaaaatcatcccaataa

SEQ ID NO: 155387 - DNA, 268 bp, Glycine max
gaggccttcaatttcacccttcacacgtggtggtggttttgttcttcttctcttcccctttctttttcttcttctgagcttgtttaagctctttctatttgattccattaacatatattattacaatgtgtggtattcttgctgttcttggttgttctgatgactctcgagccaaaagggtccgcgtgcttgagctctctcgcagattgaagcaccgtggccctgactggagtgggctccatcaacatggtgactgctttttagcaca

SEQ ID NO: 155388 - DNA, 269 bp, Glycine max
gggtaagggtaagcattcaaaaccttcttgttataaatattgaacaccacattcaaagcccaccaggttgctgtcgccccaaagactgatcctgagttttggaagtctttgttccctgttgctgttgcacatacaattggacatgtagcggcaacagttagcatgtcaaaagttgcggtatcattcacacacattatcaagagtggtgaacctgcttttagtgttctggtttcaagattacttttgggtgagagctttcctgtgccagt

SEQ ID NO: 155389 - DNA, 271 bp, Glycine max
tgccacaccatggcctcaaccaacgccctctcttcagcttccattctacgctctcccaaccgccagtctctgaccagaagagcgaaccacaacggaagagtaaattaccgtcaaccgaatagccgtttctccgtcaaagcctccgccaaagagattgcctttgaccagcattttccgctctgctatgcaggccggcattgacaagctcgccgacgccgtcgggctcactcttgggcccagggggaggaatgttgtgttggatgagtttgga

SEQ ID NO: 155390 - DNA, 266 bp, Glycine max
tgaacttgtttctcaagtctattggtcttagagagtattcaaggtacattagtttcaaccacccttatagtcatgagaggccccttctaggccaccttaagtttttcccttgggtggtgaatgaagggtactttaaggcttggagacaaggcagaacaggttaccctttggtagatgctggcatgagagagttgtgggcaactggttggttgcatgatcgaatacgtgttgtggtttcaagtttctttgtgaaggtgctgcagctt

SEQ ID NO: 155391 - DNA, 269 bp, Glycine max
agagcgagcagtttcagacacagagagaggggtttgggattggagggattgacgctgcgtctcttcctcttctctttcgatccatccctcattcctaatcctccaatccaaccacctcagcctcacactcacatatacacatatctgaacgcgtatcgtccctcctatggcttcaaagcgcatcctcaaggagctcaaggacttgcagaaagacccaccaacttcttgcagcgctggtccagtagctgaggacatgttccattggcaag

SEQ ID NO: 155392 - DNA, 269 bp, Glycine max
gtcaaacataacaggatgcatcagattcatggggtttgtctgtgagcttcctaagcataatcttgctgccgatagttggcaatgcagctgaacatgcaggagcaattatatttgccttcaagaacaagctggtgagaactgagagagtgataatattatcatattggccaagcaataaatttatttaattaaaatgttaatttagttaaactaaagtaattccttgaacacaggacatctcattgggtgttgcattaggttcagcaact

SEQ ID NO: 155393 - DNA, 249 bp, Glycine max
tcgcggtgttcttggttcacttggcaaccatccctatcaccggcactggtatcaaccctgctcgtagtcttggtgctgctatcatcttcaacaaggaccttggttgggatgatcactggatcttctgggtgggacctttcattggtgctgcacttgcagcactctaccaccaggtcgtaatcagggccattcccttcaagtccaagtgattcaatcacaccgttcatgcttaatcaagttggggacaac

SEQ ID NO: 155394 - DNA, 259 bp, Glycine max
gttcagaacctatacgattcccttgatgtgcatgttgggcaatcagttgcagtggtagtaaccttgaatcagcctccaaaggactgctacattgttgcctcaacaagatttaccgagacacctctcactacaactgcagtactacactatgcagactctttttcctctgcattaggacccgtgcctgctccccccgttgataaatatgactttgattggtccatgaagcaagctagaacctacagatggaatctgagag

SEQ ID NO: 155395 - DNA, 266 bp, Glycine max
attctcttcactttaaagttacatagtttttcattgttttacttaatctacaatggctgcttcaacaatgactctctcttcatcatcattggctggccaagctatcaagcttgccccctccacccctgagcttggtgttggaagggttagcatgaggaaaacagcctccaagactgtttcctcaggaagcccatggtacggcccagaccgtgtcaagtacttgggcccattctctggtgagcccccatcctatctcactggtgaat

SEQ ID NO: 155396 - DNA, 263 bp, Glycine max
atcacttgtggatgcacacaagccattgatgtttcagtggtgatgcttgctcgccccggtgcaaacatcattcttccaagaccaggtttcccactctatgaacttagcgcttcatttagaggagttgaagtgaggcattatgatctgcttccagagaaaggttgggaggttgatctagatgctgttgaagctcttgctgatcagaacactgttgctttggtgattataaatcctgggaatccttgtgggaatgtgtacagtta

SEQ ID NO: 155397 - DNA, 264 bp, Glycine max
cgtgatgcagtatggtgatgtagggcttagcagagatgttctcttccattatttgggtacagatcctgctaatgataatttcacttttgtggatgaaaactccttatggtcaccttcaaaaccagtcaaccaacgtgatgctgatctcatccatttttgggataagttccgcaaagctcctgagggttctctcaggaaaaatacagctcagaaacaagttttggaagcaatgtctcacagaatgcatgtagacaacagtgtaaa

SEQ ID NO: 155398 - DNA, 268 bp, Glycine max
ctgccggaaacacgactgccgctattgggaagggatttgccattggttctgctgcccttgtatcactggccctctttggtgcctttgtgagccgagctgctattacaactgttgatgtgttgactccaaaggttttcattggtttgattgtgggtgcaatgcttccttactggttttctgctatgactatgaagagtgtgggaagtgctgctctgaagatggttgaagaagtacgcaggcaattcaacaccattccagggttgatgga

SEQ ID NO: 155399 - DNA, 269 bp, Glycine max
acaaggcagaaagcaagctcatcctagagttttaaaaatggcagcagcctcctccatggctctctcttccccatccttggctggcaaggccgtgaagctgggcccatcagcccccgaagtcgggagggtcagcatgaggaagaccgtcaccaagcaggcctcctccggaagcccatggtacggcccagaccgcgtcaagtacttgggcccattctctggcgagcccccgtcctacctcactggcgagttcccaggtgactacggctggg

SEQ ID NO: 155400 - DNA, 265 bp, Glycine max
cttctcttaaaagagcctttgctttttctttaggcctttccgaattaagtacttgtttcattttctctcgaagcaagaaaaatgttcatcgagagtttcaaggttgagagtcctaacgtgaagtacacagagactgagattcagtccgtgtacaactatgaaaccactgaacttgttcacgagaacaagaatggcacttatcagtgggttgtcaagcccaaaactgtcaaatatgaatttgaaaccaacacccatgtccctaaac

SEQ ID NO: 155401 - DNA, 265 bp, Glycine max
aataacccacgcaaaaaccttaaattgcccattaaaactgaaaccccttttgttttttgccttagattacaactgcaaaagggtcacagcttctcgggtttgtttccttttgagaccacattcaattttttgatgtgaatcctcacaacaatgtctgggttggaggaattgagaaaaaagcttgcacctttatttgatgccgagaaggggttctcatcaagttcaacgttggacccttgtgattcttacacattctcggatggtg

SEQ ID NO: 155402 - DNA, 225 bp, Glycine max
atttcaagggctgaaacatactatctttaactgtattctccctttgtttcctcaccagttgattcaggttgcaaacatggcttttccagacccatccatgtcagtttctccacagaggaagatgggaagggggaagattgagatcaagaggattgagaacactaccaatcgccaagtcacattctgcaagcgcaggaacggcttgctcaagaaagcatatgaatt

SEQ ID NO: 155403 - DNA, 268 bp, Glycine max
ctcgagccgaatcggctcgagaatcaatcttctgagagtgtttgcgttgaaagtagcaaagatgtttcctttcgggcaaaagggtcaaaagataaaggggactatggtggttatgcagaagaatgtgttggatatcaacagcatcaccagtgttggagggatcgttgaccaaggcttagggctcataggcagtgcagtcgatgcacttacttttgcagccaccaaaatctccatccagttgattagtgctaccaaggctgatggtggg

SEQ ID NO: 155404 - DNA, 266 bp, Glycine max
catcttcttcccaaccactactactctctcactgcagatctcaattgcatcgctgtccatggctaccatcgttagcatcaaggcccgccagatcttcgacagtcgtggcaatccaactgtcgaggtggatttgacttgctccgatggtacttttgccagagctgctgttccaagtggtgcatccactgggatttatgaggcccttgaattgagagatggaggatctgactaccttggaaagggtgtatcaaaggctgttgacaatg

SEQ ID NO: 155405 - DNA, 268 bp, Glycine max
cttcccctatggctcgtcactccttgctcttagccctcctcctcatcgccgccgtggccaccgccgcgatggcggtggccgcgtaccgacgccgacgacatcctgatccgtcaggtggtgccagatgttggcgaagcgaagaggaggacaacctgctgaacgccgagcaccacttcgcgagcttcaaggccaagttcgccaagacctacgccaccaaggaggagcacgatcatcgcttcggcgtcttcaactccaacctccgcagagc

SEQ ID NO: 155406 - DNA, 260 bp, Glycine max
ggttttgatgcaagctatgtatggagttaaggtggagactgtatttatttgcagggtgtttactgcagcattctctggctcgtcaaagaagttatcagacttgaatgtggccgacatacattcatgggctccagattttagaaggttgcaggatcttgtaaatgaggaaattagagttagattttctggtggtaaatttactgtattgaatgagttggaagcggttgatgcctctgtgaagatattatatcctactatcc

SEQ ID NO: 155407 - DNA, 263 bp, Glycine max
aggtaagctaggacatcacttttttcataaaggcctgcttctccaggcatttgtacatccttcttacaataagcttggaggaggctgttatcagcgattggagtttcttggagatgctgtcttggattatttgattacttcatatctattctcagcttatcccaaactaaagcctggtcaattgacagatttgagatcattgtctgttaacaacaaggcatttgcttgtctagcggtagatcgcagttttgataattttcttt

SEQ ID NO: 155408 - DNA, 263 bp, Glycine max
gacaaaatttaataatgtctatgtgaaaaacttatcagagtcaaccacggatgaagagttgatgataaattttggagaatatggtaccattactagtgctttaataatgagagatgctgatggtaaatcaaggtgttttggctttgtcaattttgaaaacccagacgatgctgccaaagctgttgagggacttaatgggaagaaatttgatgataaggaatggtatgttggaaaagcccagaaaaaatctgagcgtgaacaag

SEQ ID NO: 155409 - DNA, 263 bp, Glycine max
tctctccccatcttttattgaattgattccaaatacaaacatggcactgaagaagttcttgtgggttgttctgtccctttctttggtccttggagtggccaatagctttgattttcacgacaaggatttggagtccgaggaaagcctgtgggacttgtacgagagatggaggagtcaccacacggtttcgcgaaccttggtgacaagcacaagcggtttaacgtgttcaaagcgaatgtgatgcatgtccataacaccaacaa

SEQ ID NO: 155410 - DNA, 197 bp, Glycine max
ttaaggctggtgtctatgacgagtacatcaccgttcccaagagttcaaagaacattctcatgtacggtgatggccctgctaagaccatcatcaccggtcgcaagaacttcgtcgatggtgtcaagaccatgcaaactgccactttcgccaacactgcagaagggttcattgccaaggcaatgacattccagaacact

SEQ ID NO: 155411 - DNA, 256 bp, Glycine max
tagtgacactgtttggtagcattcatgagatgctccccgagacaggagcaggaggaagcatgcgaagactctgtttccaaattttggaagcatgttcagcacagctgagccgcatgttaaaaatgaacagtgggatgaagagagcttacaaagggaaggtgaggactacatgtcagatgcagctgatggggactctgatgataatttgcatagtcctttaatctcacgtcaaacaacaagccttgaaaaagacttg

SEQ ID NO: 155412 - DNA, 258 bp, Glycine max
cttcaatctcatctccgatctcaaaatgcccgctgtttatggagctcgcttgaccaccttcgaagactccgagaaggagagtgaatacggttacgttcgcaaggtttcaggacccgtcgtcgttgcggatggcatggctggtgctgctatgtatgaactcgtgcgtgttggtcatgataatctctgtggtgaaattattcgtctcgaaggggattctgctaccatccaagtttatgaggaaactgctggtttgatggt

SEQ ID NO: 155413 - DNA, 258 bp, Glycine max
gctaggatggttcgtgaactatttcagatggctcgttcaaagaaggcatgcattgtgttttttgatgaagttgatgcaattggaggtgcacgatttgatgatggcgttggtggtgacaatgaggttcagcgcaccatgcttgaaattgtgaatcagcttgatgggtttgatgctcggggaaacatcaaagttttgatggcaactaattggcctgacactctagatccagcactactgcggcctgggcgattggaccgt

SEQ ID NO: 155414 - DNA, 260 bp, Glycine max
ctccacctggccgcacaggccggcgtccgctacgccatgcagaacccccaatcctacgtcaccgccaacatcgctggcttcgtcaaccttctcgaggctgccaaatccgccaacccccaacccgccattgtctgggcttcgtccagctccgtctacggcctcaacacccaaaaccctttctccgagctccaccgcaccgaccagcccgccagcctctacgccgccaccaagaaggccggcgaggaaatcgcccacaccta

SEQ ID NO: 155415 - DNA, 260 bp, Glycine max
ggatcaacacgtatcccagctgttcaggagcttgtaaagaagttgactggcaaggacccaaatgtcactgtcaatccagatgaagtggttgcccttggagctgcagttcaggctggtgtcttggctggagatgtcagtgatattgtgctgttggatgtcactccattatctttgggtctggaaactctaggtggtgtgatgacaaaaattattccaagaaacactactcttcccacctcaaagtccgaggttttctcaac

SEQ ID NO: 155416 - DNA, 273 bp, Glycine max
ttctgcagttggtgactgcttatatctataatagatgacttgaactatccggaaaaggcagacacatactatattggtaatgcaccatatgtattctcagcgtgttggaaggtttgtgcataccttctgatgtttgaagagtttggactgcttcacttgcatccttaatttcataaacatcgttcagatcccaagatgaacagctcaaatatcttttcttcaataatatgtggaaggttgtgaagcctcttttgcaataaagaaccaggagaa

SEQ ID NO: 155417 - DNA, 267 bp, Glycine max
ttttccctcgttgaaatgaaaatgggttcttctttgtggactttgtgtctaattttggcttcactagcctcttctgcattctgtgcctttccacggaggccagtggatgttccattcggcagaactacgttcccacttgggcttttgatcacattcaatacttcaatggaaggtctgagattcaacttcatcttgacaagtacactggtactggcttccagtccaaagggtcatacttgtttggtcacttcagcatgaacataaaga

SEQ ID NO: 155418 - DNA, 270 bp, Glycine max
  unsure (1)..(270): unsure at all n locations
gtggttgcntcatctatgtnatgcacatcaggaantgcagtcatagngcagaagctgctcagtgtgctgttgctgttgctngtgttgtaatgcnggcccttggngccagaaacgatggtgtttgagcaaagacnacgtttctgctttacggaanattgatcctatggttagcaatganattacgtctgaagcatctgctgcggaggttgagggatatggtgcttcaaaactgcctcttgnactcggntgtgaaatacttgcagcttgctt

SEQ ID NO: 155419 - DNA, 265 bp, Glycine max
tgttaatggcaactcttggcttgcaagcagttcgtcctcctccattaacgtccacttccgacccaacacctctttttgatggcaccaccaggttgtacatcagttattcctgtccctatgccaacgagtatggataactaggaactacaaggggcttcaagacaagatcaaattggtccctattgatcttcaagacaggccagcttggtataaggagaaagtctaccctgaaaataaggtgccatccttggagcacaatggcaag

SEQ ID NO: 155420 - DNA, 267 bp, Glycine max
ctcacttgccttatttttggtcttgagattgagctaaaggccaactcaaccatcgaatttgttggtgattgaaagagaaggaagaagaagcaggaaatggaagcagtgagagctggtcgaaaggagcaataggtctaggtcaaggtgatggcgtagctaaggacagcactgagactgaactcaccagaatccgtctcctcagggcaattgttgagacccgtgatccctcttccaaggaagaggatgattttatgattagaagattcc

SEQ ID NO: 155421 - DNA, 259 bp, Glycine max
aagatggcttcctttgtatccttcctagtgctgcttcttgcagcccttatcctcatgcctcaagggcttgctacttactacaaaccaattaagaagccaccagtgtacaagcctccagttacaagccaccagtgtacaaaccaccggtttataagccaaaaccaccggtttacaagccgaaaccaccggtttacaagccaccatataagaagccaccatacaagaaaccactatatggagagtatctccagtagaggac

SEQ ID NO: 155422 - DNA, 265 bp, Glycine max
aagcattgtctggccacaaggatgaggccttcttctctggtaatgctgctgctctggcttcaaggaagtcttctccaagagtgaccaacgaggctgttcagaaggctgctgctgcattgagggttcagatcatcgccgtgcaacaaatgtcagtgccagactggattctcaacaaaagaagctcaaccttccaatcctgccaaccaccactattggatccttccctcagactgtagaactgaggagggtacgccgtgaattcaag

SEQ ID NO: 155423 - DNA, 267 bp, Glycine max
aaacaatggctcaaccctcaccggtggtgttattgctaaccgagagggtatttcatgggcaacaaaggacaagattcaacaagccaattactttgggtcgctgacccaggcatcagctattgagttgggtctttccaaggggaggaaatatatgccccattcaagagcctgcttccaatggtaaaccctgatgatgttgtgtttgggggatgggatatcagtaacttgaacctggcagatgccatggccagggccaaggtgtttgat

SEQ ID NO: 155424 - DNA, 267 bp, Glycine max
ctggcgaggaaggagaatccaaagtaaccgagcaccataccagacacaagactgccaaatccaacgcaaataagaacaacagagaaacctctgcggacacttccaaaggctccgaggttaaaatcagaaaccagactacattcatgtccgagcgcgtcgtggacaagccacggatagtcatagcttagctgaaagagtaaggagggagaagattagcgagagaatgaagtatttgcaagatttaataccgggttgcaacaaagttgc

SEQ ID NO: 155425 - DNA, 260 bp, Glycine max
cgcaatcgcaatccagcgaatatgaaggtcgtcgctgcatacttgctcgcagtgttgggagggaatccttccccttctgccgatgacatcaaacacatcctcggcgcagttggagctgggctgagaatgagttgattgagttgctcttgactgaagtcaagggaaaagacttcaatgagctaattgctagtggaagtgaaaagatgtctgcagtgtctggtggcggtgcagcggttgccgttgctgctgcaccagctgga

SEQ ID NO: 155426 - DNA, 260 bp, Glycine max
ggcgctcgtcgcgttctaccagaagtacgttgatgaacagagtaagaaggagatcaaggacattctggtgaggtacgatcgtaccttgctcgtcgcggatcccaggcgctgcgagccaagaagtttggtgggcgtggcgcacgtgcgaggttccagaagtcttaccgttgaaggagaatggtggtgtttttgtgtttttttgtttttggttcggttcatgttttatgctgtggaaaaaatgaaaacttttgttggtggtt

SEQ ID NO: 155427 - DNA, 257 bp, Glycine max
gtctcgtttcaaatattaattttaggttcttcgttacgcgttgtgttgcgttgtgcgtgagaaagtgcgcgtggtgaaaaagcatggcttctcagctcctgagacgaaccttcggagtcgtttccttgcaaaccctagggccttctcctccgctgcttccactccgatccgcgccactcttttccccggcgacggcatcggccccgagatcgccgattccgtcaaacagatattccaagcagctgatgtcccaatag

SEQ ID NO: 155428 - DNA, 240 bp, Glycine max
agctgatggaatactaatatggtctgcaatagaagactgggttcgaacctatgtgaaccattactaccctcactcaagccttatatgcaatgacaaagagctacaatcttggtactcgagtcaatcaatgtaggccatgcggatcttaggcacgaaaattggtggccaacattgaacaatagtgaggatcttgtgtccattctttccacattgatttggacttgatctgcacaacatgct

SEQ ID NO: 155429 - DNA, 263 bp, Glycine max
cgctgctgccgaaacccttcccgatccctaaggtaagtgagtaatcggtggttgagaatggtggagaaggcgaagggtaggaaggaggaggtggttaccagagagtacaccattaactccacaagcgcctccatggctgcacatttaagaagaaagctcctaaagctattaaggagataaggaaatttgcccaaaaggccatggggaccaatgatgtgagggtggatgtgaagttgaacaagtttgtctggagccagggaatc

SEQ ID NO: 155430 - DNA, 261 bp, Glycine max
ccagcaccagcacctgcacctgcagcagcagcagcaccagcacctgcaccagcaccagcaccagcaccagctgataagcaaattccagctggaattcctggaagtctcaaaaacaataccatcgcgctgatgggcaaaactgtggcaactttctcactgatcggccatctaccaaggttcatgctgccccgggtggtggatcttccttgcattacctctttggtggtcctccagggaactgattcatacctaccatgtgat

SEQ ID NO: 155431 - DNA, 261 bp, Glycine max
ggaaatgggtgtgaagatgtattctgacatggtcactcttcaaactatggacagcatattctatgaagtgcagtcgcaaggtagactttccttctacctcacccaaatgggggaaaagcagttaacattgcatctgctgctgcactttctcctgatgacatcatattgcctcagtaccgagagcctggagttctattgtggcgtggttttacactgcagcaatttgttcatcagtgctttggaaacacacatgattttgga

SEQ ID NO: 155432 - DNA, 237 bp, Glycine max
aaagaaaaaaaaaaacccttagccaacacaaccatcatggccacctctgctattcagcaatcagcattcactggtcaaactgctctgaagcagctcaatgagttcgtccgcaagccggtggcgccggcaaaggtcgcactaacatgcgccgcaccgtcaagagtgctcctcagagcatttggtatggccctgaccgtcccaagtacttgggtccattctcggagcacgttccatcat

SEQ ID NO: 155433 - DNA, 256 bp, Glycine max
aatttaaagaaatcaacacacacaaacacaacaacatatggaggtgctaagggtgcaaaccatagcttccaaatccaaagatgctgccatcccagccatgtttgttagggcagagcagagcaaccaggcatcacaaccgttcaaggggtgaaccttgaggtgccaattattgattttagtgacccagatgaagggaaagtggtgcatgagattttggaggcaagtagggactggggcatgttccaaattgtgaacc

SEQ ID NO: 155434 - DNA, 255 bp, Glycine max
ttggcattgagtgtgaaacaggctaataaatgtgagtggttcaccgccgcaacttccaatgtgcgagcacttactcgtctcactgtcttgctatatttgggtgagaacacagagatagtggagttcaacgagatggagcaaataaagcacagaacagttgaagtgaatggcataaaaatgcatgttgcagagaaaggagagggtccagtggtgttgttcctccacggcttccctgagctctggtactcatggcgc

SEQ ID NO: 155435 - DNA, 266 bp, Glycine max
caaggatggtgttcatcgtccgatggcgcataaaacgcaaccaaagccttagcaaaggcatggtagcctcaagcatccttgagccaggagggtttttgggtgacgagctgctttcatgtgccttcgcaggccgtttatcgatagacttccggcctcctcggctacatttgtgtgtcttgaatcatcagaagcctttggccttgatgccaatcacttgaggtacatcactgatcacttccggtacaaatttgcgaacgagaggctga

SEQ ID NO: 155436 - DNA, 264 bp, Glycine max
gttgttatgctaggaggaaggatacttgagatattgtccataaatcttgggcttagagaggattttctcctaaatgcatttggtggggaaaatgaccttggtgcttgcttaaggggaatttctaccctaaatgcccacaacctgacctcactcttggcttgtcccctcactcagaccctggtggcatgaccattcttctccctgatgaaaatgtgtcaggacttcaagtacgcagaggagaagattggatcactgttaagccag

SEQ ID NO: 155437 - DNA, 255 bp, Glycine max
gttgatcgagataactagaaacagtgtgatgaaaatgaaggtccttgttttcttcgttgctacaattttggtagcatggcaatgccatgcgtacgatatgttccctctccgaagaacactggctatggtgcccgtactccggaggtgaaatgcgcaagttggaggcttgctgtggaagcacacaacatctttggctttgagaccattcctgaagagtgcgttgaagcaacaaaggaatacatccatggcgaacaa

SEQ ID NO: 155438 - DNA, 257 bp, Glycine max
ggaaaacaaagtatagagtgaaagaatgggtgagaaaagcaagattttgatcataggaggcaccggctacatcggcaaacatatagtggaagcaagcgcaaaggctggaaatccacttttgctttggtgagggaatccacactctctgacccctccaaggcacaactcatccacaattttgaggctttgggcgttaatttggtccgcggggatctgtacgatcatgagaagttggtgaaagctatcaagcaagtaga

SEQ ID NO: 155439 - DNA, 255 bp, Glycine max
ctctcgttgtagcgtaggcagcagttgaatttggaaaacaagatctctcaccgcaagttcgaccacccgagacacggttcccttggctttctcccaaggaagcgagcttctgtcatcgcggaaaggtgaaggctttcccaaaagacaatcctagtcaaccatgcaggttgactgcctttgtgggctacaaagctggaatgacccacattgttagagaggttgagaaacctggatcaaagcttcacaagaaagaga

SEQ ID NO: 155440 - DNA, 276 bp, Glycine max
cgcaatcatattaagccagtgccaccttcaacttctcaattgtgctctctctctgcctagccttctttctactgctactcaccaaggcaaactcaaccaacaccgtttctttcaccgtcagcaagtttccccacgccaacaaaaccttatcttccaaggagatgctgctatctcaccctccggggtgttacgactcaccaaggttgacagcaacgacgtgccaacgacgggatccctaggacgtgccctttatgctgccccaatccagatttggga

SEQ ID NO: 155441 - DNA, 256 bp, Glycine max
ggagaagagaacggaggagaagagcaatagctgcgaaaatatactctggacttcgagctcaggggaacttcaacttgccaaagcactgcgacaacaacgaagttctgaaactctctgcgcagaagctggttggtgcgtggaagaagacggaaccacttatcgcaagggttgcaagccacctctggccaatggtgcagggagctccatgagaaacattaccttttcttcttctcaaaatccaagtcctctgtcttcg

SEQ ID NO: 155442 - DNA, 254 bp, Glycine max
cagttcttcacaccaatcatgtaccgctttgcaacctccctcgcctccaaagctagaattgctaggagcagcactcaacagattggaagtagggtcagttggaacaggaatatgctgccaaagacattaagtttggtgtggaggcccgggctttgatgcttaagggtgttgaagagctcgccgatgccgtcaaagtaaccatgggccctaaggggcgtaatgtggttattgagcaaagttttggagcacccaaa

SEQ ID NO: 155443 - DNA, 252 bp, Glycine max
ggaaagggtgtgagaagagaatggagagtaaagaggaagatgttaacgttggagcaaacaagttctcagaaaggcaaccaattggtacagcagctcagggtggtggtgacaggactacaaggaggcacccccagctcctttgtttgaacctggtgagctcaaatcatggtccttctacagagctggaattgctgagtttgtggcaactttcttgttcctctacattaccatcttaactgtcatgggtgtcaa

SEQ ID NO: 155444 - DNA, 254 bp, Glycine max
agaacagtgtaacaaaaagaagaagaaaaacaatatgaagttcactataatcacaatatttttctctttatttctacttgactttggttttgcacaacagggggatcttgcatatcaagatttggaggaaaaccaaatacaaatataggccaggctttcttaagtgcctggactcaagcatgtgcatcaccaactgctgtcaaaattgtgattccagctggcacataccaaatgggtgcagttgatgtcaaagg

SEQ ID NO: 155445 - DNA, 255 bp, Glycine max
ataaagttctctctgcttctctctcttagactcaaaaccctattgcgtgctttgcaatcgaccccgattatggccaacagtaacctccctcgaagaatcatcactgacaccagcgtttgctcagtgagccagcacctggaattagtgcgtccccttcggaagacaatatgcggtatttcaatgtgatgatccttggcccaactcagtcgccttatgaagggggagttttcaagttgcgaattattcgtgccagaa

SEQ ID NO: 155446 - DNA, 261 bp, Glycine max
ctcactgggatggggtgcagtgctagtctcatttccttggacatcataaggtacattttcaagtcacaaaagaacaagattgctcttttggtgacttccgagtctctaagtccaaactggtacaatggcaacgacagatcaatgtttctcgccaactgtttgttcaggacgggtggatgtgtcattctcttgacaaacaaaaggtccttgaagcaaagggccatgttcaagttgaagtgcttggtgaggactcatcatggt

SEQ ID NO: 155447 - DNA, 260 bp, Glycine max
agatgatcaagtatctgattcttcttctgatgaaagaacacgatcgagcacgcctcaggacaataacactgaagctggaacaagagatggagcgagaaataacaatggtaataaaagcgagttgggtagggaagagagtccagactcagaatcacaaggttggggtcccaataagcttcagaaagtgaacccttccaatcctatggatcaatccactgcagaagccacaatgagaaaagctcgtgtctcagttcgtgccc

SEQ ID NO: 155448 - DNA, 260 bp, Glycine max
gatagctagaagcaataagatgaaaatgaaagtgcttgttttgtttgttgctacagttttggtagcatatgaatgccatggctcagactaccagaagttccctctccaaatgaaaactgggtttggtgggcaatacagcaatgaggtggcatgtgccagttggaggcttggcgtggaagcaaacaacgtagtcaagtggcaaactgttcctgcagcttgcggagagtacatagctgactacgttctaggagaccaatata

SEQ ID NO: 155449 - DNA, 260 bp, Glycine max
attttatgagatgggtactagggtgcagctaagaagctcaaaaagattcaatttcaaggtttgtagtggaagttatgatgatggttatgtgattggtgaagaggaagcaagggatatttcagggttagaggagcctgtaacaaccaaggttctgattccaggtctgcctgatgattcaaaaggtgaatctggtgctccaataagtagttgtttttggggatggaaacctaaactcaatgtgcactatgagaaggccgggt

SEQ ID NO: 155450 - DNA, 260 bp, Glycine max
gtccgcggcaagatatccaagtccattcgacaggccttggaccagcccctgaattacgccagaatatacctggccgataccataccagaaaacgtgaaacgtgtgatatattaggactctgacctggtggtggttgacgacatagccaagctttatggtgttgatatgaaaggaaaagtcgtggctgcgccggaatattgtcatgcaaacttcacgctgtatttcacggataatttttggtcggacccggttcttgccaa

SEQ ID NO: 155451 - DNA, 261 bp, Glycine max
cgcacattcgtcccggcaagggaaaaatgcgtaaccgccgctacatctctcgccggggaccacttgtggtgtacggaaccgaaggtgcgaaggccgttaaggccttccgtaacgtccccggcgtcgaggtcgccaacgtcgagaggctgaaccttctgaagctggcccccggtgggcacctcgggaggtttgtaatttggaccaagagcgctttcgagaagttggattcaatttacgggtcttttgataagccctctgaga

SEQ ID NO: 155452 - DNA, 263 bp, Glycine max
gatggcctcacaggtttgcaaagctgcttccagagccgcgaggtcccttctctccgcttccagagcctcccatggacgtgcggttggggctgctacggctgtttcattgagctgcaaagtgcctcttttctacggaaagaacggttctggaagtggttccgcttcatcatcatcatcatcatggatttcaggagcacttgctcttcctgccgcagcttacatgttccaagatcaggaggtgcgcgcagctgagctggagcgca

SEQ ID NO: 155453 - DNA, 266 bp, Glycine max
  unsure (1)..(266): unsure at all n locations
gacattgtgaccaccacgactcacaagagcttgcggggcccacgtgcggggatgatcttttaccggaagggccccaagccgccgaagaaggggcagccggagaacgcggtttatgatttcgaggacaagattaacttcgcggtgttcccttcgctgcagggtgggccccacaaccaccagatcggtgctctcgccgtggcgctgaagcaggccgcgtcgcccgggtttaaggcctacgcgaagangttaaggcgaacgccgttgcg

SEQ ID NO: 155454 - DNA, 257 bp, Glycine max
ttctcgttctggtttatagatctttgcgaaggaggtttacagcgctcaaccaaagatgcagaacgaggaaggacagatcactgagctttacattcctaggaagtgctccgccacaaacagattgattaccgctaaggaccatgcttcggttcagatcaacattgggcatgtggatgagaatggcgtctacaatggccatttctccacttttgccctctgcggattcatccgtgctcagggtgatgctgacagtgctc

SEQ ID NO: 155455 - DNA, 253 bp, Glycine max
ctcttcttctcttgcggctacggttttagcgcagttcttctagatttaaggaagatgggtaacgaaaaggttcacatcagtattgtggtcattggccatgtcgactctgggaaatccactaccactggtcacctgatttacaagcttggaggcattgacaagcgtgttattgagaggtttgagaaggaagctgctgagatgaacaagaggtctttcgagtatgcctgggtgctggacaaacttaaggctgagc

SEQ ID NO: 155456 - DNA, 255 bp, Glycine max
gaaagagaagcattagcaaaagcaagaagaactagtctaagcagaaatggcctcttcagtgatggcatctgtggccctcaaacctgcccctttcactgttgagaagtcctcagttagaggccttccctccctctcaaggaactcctcttcattcagagttgtggccagtggtggcaagaagatcaagactgacaagccttatggaattaatggtggcatggctttgagggaaggagttgatgcatctggcaggaa

SEQ ID NO: 155457 - DNA, 256 bp, Glycine max
ctttttcttctttgcttgccaaaaatcttacacacacaggtatctagaaaatgggttctcaccagcaagaaccatggctattggagaatgggaaaccgagggtgttgaccaaggagaataggcatggccgttctgcacacagcatgtcctccacgtctttgcgcaagaagtctagccgaactcttgtctccaagcttccatgtgccacactcagaagcatccttttaaatttgcaagaggttattcttggtaccaa

SEQ ID NO: 155458 - DNA, 261 bp, Glycine max
gttcttgaggacatgagtgatgtaaaggaattggttcctgagctattttacctacctgaggtcctcacaaatgaaaattcaattgattttggcacaacacaaatgggaggaaagcttgatactgtaaagcttcctgcttgggctgaaaatccaattgattttattcacaagcaccggaaggctctagagagcgagtatgtatctgctcatttgcatgagtggattgacctcatatttgggtataagcaacgaggcaaggaa

SEQ ID NO: 155459 - DNA, 259 bp, Glycine max
ccgccattttccgatcatcaaatcaaatcctctttatttatttattttggcttaatttacaaaaaaaaataataacaaatggttctatgagactcacgaatacgcatgcgatggatctagaaggtggaacaactcgtcgaaactccgttaagagagagtcgtggagaacggttgtgcatctggcgtaccagagtttaggagtggtgtacggtgatttgagcatttcgccgttgtacgttttcagaagcacgtttgcgga

SEQ ID NO: 155460 - DNA, 258 bp, Glycine max
cactgttgtgccatgtacatggtcagcatcagaaactttgaagatgaagccagacggggttcttttcagcaatggccctggagatccgtctgctgttccttatgccgttgaaacagtgaagaatattatcggaaaggtgcctgtttttggaatttgcatgggccatcaattgctaggccaggctttaggaggtaaaaccttcaagatgaaatttggtcaccatggaggaaatcaccctgttcgtaaccttcgaagtgg

SEQ ID NO: 155461 - DNA, 256 bp, Glycine max
cttcttcccaaccactactactcactcactgcagatctcaattgcatcgctgtccatggctaccatcgttagcatcaaggcccgccagatcttcgacagtcgtggcaatccaactgtcgaggtggatttgacttgctccgatggtacttttgccagagctgctgttccaagtggtgcatccactgggatttatgaggcccttgaattgagagatggaggatctgactaccttggaaagggtgtatcaaaggctgtt

SEQ ID NO: 155462 - DNA, 261 bp, Glycine max
tgtgaagatctcaaagtgaagtacaacgaagagatggcaaagagaaagaaactcttcaatgaagttcaagaggctaaagggaacattagggttttctgtcgatgtcgtccattgaataaggctgaaatctcagctggatgcaatacaattgtggattttgatgcagcaaaggatggttgccttggaattttgacaagtggctccaccaaaaagtcattcagatttgacagagtttatacaccaaaagatgatcaagttgat

SEQ ID NO: 155463 - DNA, 264 bp, Glycine max
aattagttcattctctttgcgcagttccctacctctcctttcaagatgcagatcttcgtcaagaccctcaccggaaagaccatcacccttgaggtggaaagctctgacaccatcgacaacgtcaaggccaagatccaggacaaggaaggaattcccccggatcagcaacgtctcatcttcgccggaaagcagctcgaggacggccgtaccctcgccgactacaacatccagaaggagtcaacccttcaccttgtccttcgtctc

SEQ ID NO: 155464 - DNA, 254 bp, Glycine max
attcaaggtcctgtttatgtgggtactggatgtgtctttaatagaacagctttgtatggctacgagcctcctattaaacccaagcataaaaagcctgggttgcttcttcactctgtggtggtaaccgaaagaagagatcaaaatctagcaagaaaggctcagacaagaaaaaatctagcgagaatgttgacccaactgtgcccatctttagtcttgaggatatagaagagggggtggaaggtgctggatttgat

SEQ ID NO: 155465 - DNA, 255 bp, Glycine max
gccaactagaggaccctaagactcagagatcaggctggcagcttgtatttgttgaccgggagaatgatgttcttcttcttggtgatgatccttggcaggagtttgtgaacaatgtgtggtacataaaaatactatctccactagaagtgcaacaaatgggcaaaggtcttagtccttctacttctgccccaggtaacaaactttctactcctgccaactcttgtgataattatgtgagtcaacaagagttgagaa

SEQ ID NO: 155466 - DNA, 252 bp, Glycine max
cccgaccaccggcttgcaacgcgcagtgggtggcttcgggggtttaaggatcttcagccgtctgttgatcccagtgccctatgctgatcccgccgatgagtactgggtgctcatcggtgactggttcggcaagagccacactgccttgaaacaaacattggacagcggacgcagcattggcaggcccagtggggtccacatcaacggcaagcgcggcgggctcgaggccctctacaccatggagcccggaaa

SEQ ID NO: 155467 - DNA, 257 bp, Glycine max
gcaaaatgaaaggcagtggaaatgtgccaaaacaagtggcactgtgatttgtgaccacaacaaatgcatagttcattttatggttcagaccaatcaacccgtagactccttataagtgcgcagaagttcaagtgtagagaatgagtcagcctaagattaaacgccgagttggtaaatacgaggtggggaggaccattggtgaaggtacatttgcaaaggtgaaatttgcaaggaactctgagacaggagagcccgtg

SEQ ID NO: 155468 - DNA, 258 bp, Glycine max
cttccatattcatattattcgcttccctactgtgccccatcaaagatacaggatagtgcagaaaatcttggggaagtacttcgtggtgaccgcattgagaattctctctatgtgtttaaaatgcgcgagccacaaatgtgcaatattctgtgtaatcttaaacttgatgctaaaactgctaaggagttcaaagagaagatcagtgatgagtatcgggtgaacatgatcctagataaccttcctctagtttttcccttg

SEQ ID NO: 155469 - DNA, 255 bp, Glycine max
atccaattgaaattttaaaaatgactgggataaacttaagaattcaattattgaaattgaataagtaaacaatttaattggattggtcgaatggtatcaaaaaaatggagtactaactcccatttcttatttattattgaattaaccgatcaacttgctttgttatcgaacatttctttttgatttcaaaaattttccggaaaaaatttgaatctatttttatatgcgaatcaatcctactacttctggtcctga

SEQ ID NO: 155470 - DNA, 258 bp, Glycine max
cgccctccaagcataaaatttgcaggattagacatttccagcaacacttgaagtggtcaatcaatggccatgaagccctcaacttccacaagtgggtctggagagaagattagaaagccttatactattaccaaatctagggagagctggtctgaggaagagcacgacaagtttctcgaagctcttcaactatttgagcagtgattggaagaaaattgaagattttgttggttcaaaatcagttattcagattagaag

SEQ ID NO: 155471 - DNA, 259 bp, Glycine max
atctcctcccccaccataccattacacatcaccacctcctccttccccagctcctgctcccaagtacatttacaaatcacctccacctccggtttatatctatgcttccccacctccacctatctacaagttagctcaaattgtgaaagcaccattcatgatgaatcatgttctagttttcatcgaggaataaaggcaagctctattttgagccaagtgaaacatctatcttcctgtctaagttctttgaataaaagtc

SEQ ID NO: 155472 - DNA, 255 bp, Glycine max
gcgcatgatgcctttgtcggcaactggaagcctagcaagaatgatactatggagaatcgtcttcctggatttggcactacaatgaacattctctatggggatggtgtttgtggacaaggtgatgtggactcgatgaacaatatcgtttcccattaccagtattatcttgaccttctaggtgttggtcgagaacaggctgggccccatgaaatccttacatgcgctgagcaggttcctttcaacccatcttccaaa

SEQ ID NO: 155473 - DNA, 261 bp, Glycine max
cttttcttcaagcttggtttcggaaaaaaaaaaacttaaaagagacaaaaaaaaaaacccctagaagcgaagaagctgaaaaaaggctccaaagatggatttcaaaaactcttctcttctatgcctagctcttttccttgcatgctcttcggctattcgtgcatttggcatcacacaattgctaggtcaatatccagagttttccacattcaacaaatacctaaccgaaaccaagcttgcagaccaattaaacagccgcaa

SEQ ID NO: 155474 - DNA, 253 bp, Glycine max
gagattctggagcctaacacgtgcattaggggttgctgcaccagcccctctattccccttcatctccctccctcttcttatacccttctctctcctattgcccgagggtctgagagtgttgtttatgaagggactttggatggcacgagggttgctgtgaagaaacccatcttgtcaacttcagaagacattaataagtttcataaagaattgcaattgttgtgcaagttagatcatccaggaatagcaacac

SEQ ID NO: 155475 - DNA, 252 bp, Glycine max
cttgctttagccatcactaacactcagtctctgaattggggctgagggtttcgagtaacgtttatttttcacgagtttaagatatcatgggtaaagagaaggttcacattaacattgtggtcattggccatgttgactctgggaagtcaaccaccactggccacttgatttacaagcttggaggtattgacaagcgtgttattgagaggtttgagaaagaagctgctgagatgaacaagaggtcattcaaat

SEQ ID NO: 155476 - DNA, 254 bp, Glycine max
atattttgcaaacaaatgtgttcaccggtggcaagggtgacagagaacaaagaatctacctctggtttgaccctacaagagaatatcacagatactcagtgctatggaacatgtaccagattgttttctatgtggatgactacccaataagggtgttcaagaacagcaatgacttgggagtgaagttcccatttaaccaaccaatgaagatatacaacagtttgtggaatgctgatgactgggccacaaggggt

SEQ ID NO: 155477 - DNA, 253 bp, Glycine max
gacgaatgtgatggacacgcttaacatgcttggccttgcgaaaagaattggggctaggtttctgcttactagtactagttaggtttacggtgatccgttggagcatcctcagaaagagacttactggggaaatgtgaatccaattggtgagaggagttgttacgatgaagggaaaaggattgtggagacgttggccatggattatcatcggggtgctggtgttgaggtcaaacatatgagaggcaatccatcc

SEQ ID NO: 155478 - DNA, 253 bp, Glycine max
aaggcagacaaagatctcgatttcttgcagttgggtcatatgacaagaccatccgcatcttatcacttgatcctgatgattgtatgcaggctctaagtgtacaaagcgtttcttcagctccagagtctcttctttttcttgaagttcaagcatctgttggcggtgaggatggtgcagatcatcctgctagccttttcttgaacgccggcttacagaatggtgtcatgtttagaactgtggtggatatggttac

SEQ ID NO: 155479 - DNA, 256 bp, Glycine max
agagagcctgctgctccttcacaggctcctccagctgctgaggctgaacatgttcctgaggctccaaaggatgtggctgaggagaaatctgtaattccagtgccttcttctgatgacaaacctgatgagtccaaggctcttgtcttagttgagaagactcaagaagttgccgaagtgaaaccaactgagggctctgtcaaccgagatgcagtgcttgcaagagttgcaactgagaagagattgtcactaatcaaag

SEQ ID NO: 155480 - DNA, 250 bp, Glycine max
ctctgactcttccaaagtcgcttatgttcttcaaggtagtggagtggctggaatagtgttgcctgaatcagaagagaaggttgttgcaataaagaagggtgatgccttggcactcccctttggtgttgtgacctggtggtataacaaggaagaaactgagttggttgttctgttccttggggacacttccaaggctcacaaggctggtgaattcactgacttttttctgactggttccaatggaatcttc

SEQ ID NO: 155481 - DNA, 250 bp, Glycine max
ctcttttgctgcatcagaggagttgtaaattaagagcatggctgcacaagctcttgtatcatcatcttctcttaccttctcagcggaggctgcaagacaaagtcttggaccaagatcactccaatctccatttggcttctccagaaaagcctcctttcttgttaaggcagctgctaccccccctgtcaagcaaggatcagacagacctttgtggtttgcatcaaagcaaagtctttcttacttggatggc

SEQ ID NO: 155482 - DNA, 249 bp, Glycine max
tggaaatatttggtccagaggcttctgggaaaacaactcttgctttgcatatgattgcggaagcacaaaagctaggaggctactgtgcctttgttgatgctgagcatgcacttgataagacacttgcagagtcaattggtgtagatactaagaacttgcttctctcacaacccgattgtggtgaacaagcacttagccttgtggataccttaatccggagtggttcagttgatgcaattgttgttgata

SEQ ID NO: 155483 - DNA, 254 bp, Glycine max
cccttttcctaacctcaccggcgggtgctcgtactgctactgtcatgcctagaagggcggcggtcatcgtgtcggcggcgacggcggagacgccgaagaagaagggcgaatcgaaagggttcgtggaagagatgaggttcgtggcgatgaggctgcacacgagggaccaggccagggagggcgagaaggaggtcaagcagcccgaggagaaagccgttaccaagtgggacccatccgtcgaagggtacctgaaa

SEQ ID NO: 155484 - DNA, 252 bp, Glycine max
agagtcctgagagtgatggtgcgcagaaagatcttcagtgcacaagaatcagagacaggagaaaccctcttcggcttgacacgagcctcgaagtggatccttcgcgacacgaaaatgaccctagcacccatgttgctgctggagaaccacccaattcacctgaaccctgcgcactacatcagtgagattattagagaaggcacaaaaaatggcactgctttctttaagtgccatggacatgagcaatttgag

SEQ ID NO: 155485 - DNA, 250 bp, Glycine max
aacttaagagatcaatatggccaccaccactacccagcctccctctaatatctgttttttccttctgttgttgcttctagcacactttcatttgggcataagccaacttgagctgaattactactctaaaagctgcccaaaagctgaagagatcatcaaggaacaagtcacacaactatataacaagcatggaaacactgccgtttcgtgggtcagaaatctcttccacgattgcgtggttaagtcatgc

SEQ ID NO: 155486 - DNA, 250 bp, Glycine max
agaagcttgtctctgccaccaaggaagggctcaagcttgacgagagtgaagatgagaagaagaagcaagaagagttgatggagaagtttgacaacctctgcaaggtgatcaaggatgttttgggtgacaaggttgagaaggttgtggtctctgaccgcgttgtagattcaccatgctgtcttgtgactggcgaatacggttggaccgcaaacatggaaaggataatgaaggcccaagctctaagggacaa

SEQ ID NO: 155487 - DNA, 249 bp, Glycine max
gttcttctttctactcacaacaacatctgaatcagaaacaacaatggccaacactaacttggaagatgttccctctctggatctcatgactgagctccttcgtcgtctcaagtgctcttccaaacctgacaagcgtcttattctcattggcccaccttgatctggaaaaggcacccagtcaccaatcataaaagatgagtactgcttatgccacttagctactggtgatatgttaagagcagctgtagc

SEQ ID NO: 155488 - DNA, 254 bp, Glycine max
cctttgccgctgttgttgttgctgcaccaccgaacaacttcccctgtaaatcgcgtttcgtttgtgcaaggttttaaaagatggctgatgctgaggacattcaacctcttgttgttgataatggaactggaatggtcaaggctggttttgcaggtgatgatgctcctagggccgtgttccccagcattattgggagaccacgccatactggtgtaatggttgggatgggtcagaaggatgcttacgtgggtgat

SEQ ID NO: 155489 - DNA, 256 bp, Glycine max
tgagcagccaaacactctctctctgtctcgcgaaaattctcagttggcagactgtatccgagtcacctcgaggtaagcgtatgtctacgatcatctgctgtgtgacatcgaaggtaatcactacactcacgctgctatcatcggccaagacggcagcgtttggcgcccagagtaccgacttccctcagttcaaacctgaggagataactgccatcatgaatgactttaatgagcctggatcacttgctccaactgg

SEQ ID NO: 155490 - DNA, 262 bp, Glycine max
ctcttgttcagtcaaggcaggttgaccgcagcaagaaaggccgggttcaagaagctcttaattattactctatagagtccacccttgcccttgtagtctcctttatcataaatatatttgtaacaacagtgtttgctaaggggttttatggttctgaacttgcaaacagcattggccttgtaaatgctggacagtatcttgaggagacatatgggggtggactatttccaattttatacatatggggtattggattattagc

SEQ ID NO: 155491 - DNA, 260 bp, Glycine max
gcttcttcaactggctccaacactatgatatcgaagattgtacgcatggttgaggatgctccatcacgtgaagcacctgtacaaaggcttgcagattcaatagcagggccatttgtatacagtgtaatgactttgtcagcagcaacatttgcattttggtattttgtaggatcacacatatttcctgatgttttgctcaacgatattgctggcccagaaggagatcctttgttgttgagtttaaaactatccgtagatgt

SEQ ID NO: 155492 - DNA, 258 bp, Glycine max
gccgtcgtcgctgtttttgtgtgtcgcttcttcgtaggtgcagctgcaatggtgaagggacgccaaggagaacgtgtcagactctacgtgaggggtacaatccttggatacaaaaggtccaagtcaaaccagtatccaaatacatccctgatccaaattgagggtgtgaatgccaaagaagaagtagcatggtatgctggcaagaaaatggcctatatctacaaggctaaggtgaagaagaatggaagccattaccgc

SEQ ID NO: 155493 - DNA, 254 bp, Glycine max
atttctacatccctggctctgttccgtcgatgacgatggcgtttagggtgcgaaaccctgacctccgctttctcattcttctctctctcttgtccatcacttccgccaaggtcttcttcgaggagcgtttcgatgacggatggggaaatcgttgggttaaatcagattggaaaaaagatgagaacctggctggggagtggaaccacacctctggccaatggaatggagacgctaacgacaaaggtattcaaacc

SEQ ID NO: 155494 - DNA, 252 bp, Glycine max
ggagatgggtattgtgggagtttctttcagaggtgcaagccttacatagccatggtttctctgcaattcggatttgcgggtatgaacataatcactaaggtttccctcaaccgtgggatgagccactatgtgcttgtggtttatagacacgcctttgctactgcagctattgctctttttgctattgttctagagaggaaagtgaggcccaagatgacatttctcatgttcatgcaaatatttgtgttgggt

SEQ ID NO: 155495 - DNA, 260 bp, Glycine max
atagattattatgtatcgattgaatcaatgactattcatgattccataattgaatcaattacatactggatccaagctaaaggaatgttatggtaaaacttcgtttgaaacgatgtggtaaaaagcaacgtgcgacttgaaagacatgattagattagctgtggattcttacatccgccattttttctagtatatagaaatgaacatgctcttgactcgacatcgtttgttctgttccactagaacttattgttttgggg

SEQ ID NO: 155496 - DNA, 261 bp, Glycine max
gagaaaacaatgcgcttgtgggaagttttatggacacattatccgtctgagcatttgcacctgtatgtatgtgtggcaatcttgaaacgatatcgtggtaaaataattggagagcaaatggacttcgacacccttttgaagtttattaatgagttaagtggtcacatcgatcttgatgcaaccctcagagatgcagaggctctatgtatatgtgccggtgagaacggtgctgctcgtataccccctggaaccccaccgtcg

SEQ ID NO: 155497 - DNA, 255 bp, Glycine max
caaaaacctaaactcactcagtcctacgatacgattctcttccgcctcccttcccttcaactccacggcgcagatccgaggagtttgggaaaccctaattcattcctctttgcttcttctatctctattcctctaacaccagtgatggcaggtttggctccagaaggatcgcagtttgatgctcggcaatatgattctaagatgaatgaattgctttccgccgatggacaagaatttttcacttcatatgacgaa

SEQ ID NO: 155498 - DNA, 253 bp, Glycine max
  unsure (1)..(253): unsure at all n locations
attggattngcattaggttnctctgaaatacgcaattgacatggcgagcgcgatggtagangacgcgaacttcgaagatgaccaactagccaatatgaccaccgacgacatcgtcngagcttctcgtcttctcgacaacgagattcgcatcctcaaggaagagttgcagaggaccaatttggaattggaatcgtacaaggacaagatcaaggagaatcaggagaagattaagctcaataagcagttgccctac

SEQ ID NO: 155499 - DNA, 252 bp, Glycine max
gccagtagtcatatgcttgtctcaaagattaagccatgcatgtgtaagtatgaactaattcagactgtgaaactgcgaatggctcattaaatcagttatagtttgtttgatggtatctactactcggataaccgtagtaattctagagctaatacgtgcaacaaaccccgacttctggaagggatgcatttattagataaaaggtcaacacaggctctgcctgttgctttgatgattcatgataactcgtcg

SEQ ID NO: 155500 - DNA, 250 bp, Glycine max
cttagctgaaccctcacctcaatcttgcgtgctagctagctttattccaattcctacagaaccaaattattctgctagctagctagtacgtcaaataaaataaaataatcaaatatggcattcagcgggacccaacagaaatgcaaggcttgcgacaaaactgttcactttgtcgaaggtttatctgccgatggagctgcttatcacaagaactgcttcagatgcagccattgcaatggccttcttgcga

SEQ ID NO: 155501 - DNA, 258 bp, Glycine max
ctcattctttcgggtgatttctttcttggggcggtagttgcatgtacactgacaaaacttgtcttaaggttggaagaggttcagacttcaaaagccgaagttaacaaggcaactacacaggccttgttgatcattgtctccatgctgcagctgggtcaatcttcaattcttccacatccaattgataatgattcttttgacaggattgtcctctgcattagattgttgtgcaataccggtgatgagataagaaaaata

SEQ ID NO: 155502 - DNA, 261 bp, Glycine max
gcaagaaatcaaagcttggtttcacagtctacccctctcctcaggtgtccacctctgttgttgagccatacaacagtgtcctctccacccattctctcttggagcacaccgatgttgctgtcctcttggacaatgaagccatttatgacatctgcagacgctctctcgacattgagcgtcccacctacaccaacctcaaccgccttgtttctcaggtgatttcatctttgactgcttccttgaggtttgatggtgccctga

SEQ ID NO: 155503 - DNA, 261 bp, Glycine max
ggtgagaccaaggtgttcagccctgaggaaatcagtgccatgattctgactaagatgaaggaaactgcggaagcattccttggaaagaaaattaatgatgccgtggtcactgtcccagcttacttcaatgatgctcagaggcaggccaccaaggatgctggtgtcattgctggtctcaatgttgctagaattatcaatgaacccactgctgctgccattgcctatggattggacaagaaaggtggcgagaagaacattcta

SEQ ID NO: 155504 - DNA, 259 bp, Glycine max
agacaattcaacttaagagatcaatatggccaccaccactacccagcctccctctaatatctgttttttccttctgttgttgcttctagcacactttcatttgggcataagccaacttgagctgaattactactctaaaagctgcccaaaagctgaagagatcatcaaggaacaagtcacacaactatataacaagcatggaaacactgccgtttcgtgggtcagaaatctcttccacgattgcgtggttaagtcatgc

SEQ ID NO: 155505 - DNA, 258 bp, Glycine max
gagagtagtgtgtggttgaaagttaagaagtagcaaagatgtttccattcgggcacaagggtcaaaagataaaggggactatggtggttatgcagaagaatgtgttggatatcaacagcatcaccagtgttgacgggatcgtcggcaccggcttagacttcttaggcagtgcactcgatacagttacttttttagcctcctccatctccatccaacttattagtgctaccaaggctgatggtgggaaaggaaaagttg

SEQ ID NO: 155506 - DNA, 258 bp, Glycine max
gttggcaacagattgaaaataaagcaaaggatgctactgaatgtttggtacaagaaggagcacagtttgctactaggttgactggtattaaagagaatactaaatttcaaaagaaattacagaacaatgagcagatgtcaggtctgaagcatctagtacatggagcaaagcagcatcacaatgtgaaaaatgtatatgtatggcatgcactagctggttattggggtggagtgaagccagcagcaaccggcatggaac

SEQ ID NO: 155507 - DNA, 257 bp, Glycine max
gaggagtagtactagtgataaggtgatcataatagagcataatataagagagtgaaaactcatggaggttggcctcaacaagaaggagaacatggggtttgaggaaactgagctaaggcttggactgcctggaaacgtaggaggcactggcactgaagaagtgctcatcaggaagagaggtttctctgagactgaaactgaaactgaggaggatgagtctgctaccactgtggatttgatgcttaatctttcttcta

SEQ ID NO: 155508 - DNA, 254 bp, Glycine max
attcttccccctccacccacccagcatatctctctattcctatttattagcacccctcacattaccttgtgtcaccaactactttgactcctttaccataccattacaataattatcaaacctaaccagtaaaaatggtgaccgtggaggaaatccgcaacgctcagcgttcccatggacccgccaccatcttggccttcggcaccgccacgccgtccaactgcgtctcccaagccgattaccctgactactac

SEQ ID NO: 155509 - DNA, 258 bp, Glycine max
attgggtgatggtaacaaaaatataactgtccaaaatgtgaactgtggacctggtcatggcattagtgttggaagccttgggaggtacgataatgaagaggccgttgaaggtcttctagttaagaattgcactttgaacaatagcgataacggtctgaggattaagacttggcctagcacgccattaacaattacagttactgatatgcattttgaagatattaccatggaaaatgtttcgaaccctgtgatcataga

SEQ ID NO: 155510 - DNA, 258 bp, Glycine max
cttcaagagattgaacaaaagcttatacagaagaacaaggacgagacgttgagaaaccgcagtgggccggctaaaatgccttacactttgctctatccttctagtgaggagggattgactttcagaggaattcccaacagtatctccatctaggggctctatggttgttgcagtactttccctggttttcaataaaagtgaatagaaggaatatgattccttcatctacctatgtatggttaagttatgtatttgggg

SEQ ID NO: 155511 - DNA, 258 bp, Glycine max
cccagttcatccacatccaccccatgtcgcagaccctcatccaaagcctccagtgcatccccatccaccttatgtcccaaaaccaccagttgtgccagttacaccaccatatgttccaaaaccaccaattgtgaaccctccctatgtcccaaaaccgcctgttgtgccagttacaccaccttatatccctaaaccaccagttgtgacaccaccatatgtccctaaaccaccagtggtgccagttacaccaccatatgt

SEQ ID NO: 155512 - DNA, 255 bp, Glycine max
agcttttccctcgttgaaatgaaaatgggttcttctttgtggactttgtgtctaattttggcttcactagcctcttctgcattctgtgcctttccacggaggccagtggatgttccattcggcagaaactacgttcccacttgggcttttgatcacatcaaatacttcaatggaggttctgagattcaacttcatcttgacaagtacactggtactggcttccagtccaaagggtcatacttgtttggtcacttc

SEQ ID NO: 155513 - DNA, 254 bp, Glycine max
caacaacacccccccttccaacatgggcggtatctgccttgaggaaatcaaaaacgaaaacgtcgatctggaaaaaattccagtagaggaagtgtttgagtcgctgaaatgttcaacagcaggtctaacatcagacgaaggagccaacaggcttcaagtttttggaccaaacaaattggaagagaaaaaggagagcaaacttttgaagtttttgggtttcatgtggaaccccttatcatgggtcatggaagctg

SEQ ID NO: 155514 - DNA, 251 bp, Glycine max
ctgcactcgatcaaacacaaaatggaaaagaatgtggggattctcgccattgacatctacttccctcccgcttgcgttcagcaggaagcattggagactcatgatggtgccagtaaagggaagtataccattggacttggccaagactgcatgtcattctgtaccgaagtagaagatgtcatctcaatgagtttgacagtggttacttctcttcttgagaagtatgggattgatcctaaacaaatcggtcg

SEQ ID NO: 155515 - DNA, 247 bp, Glycine max
attctccgtcgccacgacaacaatggctccaaagaaaggtgcgaaaggtggagttgtagcagcaaagaagaaggttcaggagaaggtaacgaaccctttgttcgagaagcgtccgaagcagttcgggatcggaggcgcgctgccgccgaagcgggacctgacgcgcttcgtgaagtggccgaagaacgtccaaatccaacgcaagaagcgcatcctcaagcagaggctcaaggtccctccggctctc

SEQ ID NO: 155516 - DNA, 208 bp, Glycine max
ggagactaccctctttcggccaccataatgtctgagtattctaataagatgactcgaggtgcctttatagctgcagtgtttgccatgcagggttttggaattttggcaggaggtgtgtttgctattatcatagcatctgtgttcaagtccaagtttgattctacaccatatacgaatcaaacgttgggttcgactgttccacacaaca

SEQ ID NO: 155517 - DNA, 255 bp, Glycine max
caaggatggtgttcatcgtccgagggcgcataaaacgcaaccaaagccttagcaaaggcatggtagcctcaagcatccttgagccaggagggtttttgggtgacgagctgctttcatggtgccttcgcaggccgtttatcgatagacttccggcctcctcggctacatttgtgtgtcttgaatcatcagaagcctttggccttgatgccaatcacttgaggtacatcactgatcacttccggtacaaatttgcga

SEQ ID NO: 155518 - DNA, 254 bp, Glycine max
ctaagattgctttcttagggacccatttgcaggttcaaccttctcctgttgtagcggcttttagctccagaggaccaaatgcactcaccccaaagattctcaaaccggatctaatagcaccaggagtcaacattttagccggttggaccggtgcggttggaccaactgggttgactgttgacacccgccatgtcagcttcaacataatttctggaacatccatgtcatgccctcatgtaagtggcttagccgca

SEQ ID NO: 155519 - DNA, 251 bp, Glycine max
aacaaggcttacctagctcgtccatggaagaattactctaggaccattatcatggacacgtacattgatgatttgattgacgctgatgggtatttgccatggcaaggactagagggtccttctggtatggatacttgcttctatgccgagtaccacaacattggccccggttcagacaaatccaagcgtgtgaaatgggctgggatttggaacctcaattcaaaagcagcacgttggttctcaccatctaa

SEQ ID NO: 155520 - DNA, 248 bp, Glycine max
cccaaattaccggggtggcattgttttctgggcagatttggttggggctaatcatatatttaccagcctaaaaaaatgggcacaattatatggtaacttctataaaccctcaaggtatttggaagaaagagcactcaaaggaattcctctgagtgcacctgcttcatctactccaaagtcaatggcgcgtctatgagaaagccaattgttcagcatgttggatgttctacaataaaaaaatgtaacaa

SEQ ID NO: 155521 - DNA, 253 bp, Glycine max
cttccaggttgtgaatgaacctacagatgctcactgtcctgttgtggagatgtctacacgttcaaaacttagttgcttgagttggaataaatatgctaagaatcaaatagctagtagtgattatgaaggaattgtgactgtttgggatgtaaccactcgaaagagtttaatggaatatgaagagcatgaaaagcgtgcatggagtgttgatttttcaagaacagatccctctatgcttgtatctggtagcgat

SEQ ID NO: 155522 - DNA, 252 bp, Glycine max
gctctcctgaccccaattttacattggatgcgcatcaaaaaggagtgaattgtgttgattactttacaggtggtgacaagccttatctaataactggttctgatgatcacactgccaaggtatgggattatcaaaccaaaagttgtgtccagactctagaaggtcacacacacaatgtatctgctgtatgctttcatcctgaactacctataatcattactggctctgaggatggcacagtgcgcatttggc

SEQ ID NO: 155523 - DNA, 253 bp, Glycine max
ccatcgctggacgtgagacaagacgtagtggtgatggaggtgccgaagctgggaaaacaagccgcaacgaaagcgattaaggagtggggtcaaccaaagtcaaagatcacacaccttgtgttctgcaccacttcaggcgtggacatgcccggagcagattaccagctcacgaagcttctcggcctgaggccctccgtgaagcgcctcatgatgtatcagcagggctgcttcgccggcggcaccgtactccgcc

SEQ ID NO: 155524 - DNA, 252 bp, Glycine max; identical to SEQ ID NO: 119091

SEQ ID NO: 155525 - DNA, 250 bp, Glycine max
aaaatcaagcgttacatgacaatgatggattcaatgacaaacgaagagttggatagttcaaaccccaagctcatgaatgagtcacgaatgatgcggatagctcgaggtgcaggtcgtcaaattagggaagtgatggagatgttggaagagtacaaacgtcttgcaaagatatggagcaaaatgaaagggcttaaaataccaaaaaaaggtgatatgagtgccctatcccgaaatatgaatgcccaacaca

SEQ ID NO: 155526 - DNA, 229 bp, Glycine max
tccacattgccttgacaaatggagagatgcaagagagtgtatttatgtggagccagatcaaagtaccgagagcaaaggtgacattttggtacaacaataagttgtgatgattaatgtagccgaggcttctttgaactttcccttgtgactgtttagtatcatggttgcttattgggaataattttgttgaaaaaaaaaacaaaacaaaaaagaaaaaaatataaagaaa

SEQ ID NO: 155527 - DNA, 236 bp, Glycine max
aagagctgatggttttgatctcaaggttgtgacagcagatcttaaggacattgattacaagtctggggatgtttgtggtgtgcttgtgcagtaccctggcactgagggagaggttttggactatggagagtttgtgaagaaggctcatgctcatgaggtgaaggttgttatggcaagtgatttgttggcactgactgtgttgaagcctcctggggagtttggggcagatattgttg

SEQ ID NO: 155528 - DNA, 234 bp, Glycine max
tagctgtgaagggttctccactgatggccttgctgctttagctgcaaattgcaggtttcttagggagctggatctgcaagaaaatgaggttgaagatcacaaaggccagtggctaagttgctttcctgacaactgcacatcacttgtttctcttaattttgcttgccttaaaggagaggttagtttgggagcactagagagacttgtggccagatctccttacctgaagagttt

SEQ ID NO: 155529 - DNA, 233 bp, Glycine max
gtttgccacttaggggaacaatcacagcatctggtgatcttgttcctttgtcctacattgctggtttgctaactggtagaccaaactccaaggctgttggaccctctggtgagattctgaatgccaaagaagcctttgaattggccaacatcggtgctgagttctttgagttgcaacctaaggaaggccttgcccttgtgaatggcactgctgttggttctggcttggcctca

SEQ ID NO: 155530 - DNA, 256 bp, Glycine max
agcaaatggccaagctaattgccttttcaggaattttgaataacagggaaatgtttaatccagatttctacaactggaacagaatcaaggttaggtattgtgatggttcatcatttactggtgatgtggaagcagtgaatccagtgactaagttgcacttcagaggaggtaggattttcaatgctgtcatggaggatttactagcagtaggtgtggataatgaacgaaatgcgattatcgctggatgttcagctgg

SEQ ID NO: 155531 - DNA, 249 bp, Glycine max
cgttattctctctccgagcttcactctcttttcgcctctgctaaagggagaaaaatggggtactcctcctttctgggtcgtgttctctttgcctccctcttcatcctctccgcatggcagatgtttaatgaatttgatgccaatggtggacccatctcgaaagagttgattcccaaactcagtgtggtgaagaataatttatcctctaaattgggggtagcgctaccagatattgatgcccggcaattc

SEQ ID NO: 155532 - DNA, 243 bp, Glycine max
tgccaacctgcacactcttcactcgatcatacagacaatggcaaagaatcgtggggatccttgccattgacatctacttccctcccgcttgcgttcagcaggaagcattggagtctcatgatggtgccagtaaagggatgtataccattggtcttggacaagattgcatgtcattctgtaccgaagtagaagatgtcatctcaatgagtttgacagtggttacttctcttcttgagaaatatg

SEQ ID NO: 155533 - DNA, 243 bp, Glycine max
ggaaggagtcgaggccggaattcaatcccttgcaggcggcggcacgccgaacgagttcgtcataatcgacgacggctggcagtcggtgggcggtgacgacaagaactcaaattcgttgcagaggctaactggaataaaagagaacgcgaagttccagaagaaggaggagccagaattagggattaagaacatcgtggagatagcgaagaagaagcattcggtgaaaaacgtgtacgtatggca

SEQ ID NO: 155534 - DNA, 233 bp, Glycine max
gaacttcatggccatggccatacttgtgatcactatgattgtgaacatctgcatacagtttgtcactggtgttatttatttgttctgggtggaacatgctgtcatcatgctcatcatgctaattttgttgatgaccatggcctcctcagccataagtcttccaaagatgaaacactactttgagctgaagtataagatgaatgaagaggcacttaaagagggttccaaaacta

SEQ ID NO: 155535 - DNA, 249 bp, Glycine max
acggtataccgttcaagatcgttcctcggtcactgcatacggtattatagagaaaacatttttctgcggcatgtacgcattggatatgtctgctgttgtttacaaggactgggttttcactgatcaagcactgcccaatgatcttgtcaagagaggagttgccgttaaggatccatctgctccccatggagttcggcttttgattgaggactatccttatgcttctgatgggctagagatatgggatgc

SEQ ID NO: 155536 - DNA, 192 bp, Glycine max
aaatctttaatgaatttaatgctcgaaagccagatgaattcaacatattcaaaggagtcacaagaaactacccctttatgggtatcattggattaacggttgtgcttcagattgtcatcattgaatttcttggcaagtttacatcaacagtgaggcttaattggaagcattggctcatctctgtcgttattg

SEQ ID NO: 155537 - DNA, 258 bp, Glycine max
catgaaagcttggacatactctgagtatggaaaatccaaggaagttctcaagtttaatcagagtgtggctttgcctgaggtgaaggaagaccaggtcctcatcaaggtcgctgctgcttcccttaaccccattgatcataagagaatggaaggctatttcaagaacagcgactcccctttacctactgctccgggttatgatgttgctggagtggtggttaaagtgggaagtgaagtgaagaaatttaaggttgggga

SEQ ID NO: 155538 - DNA, 235 bp, Glycine max
ctcttcttcctttctctctctcctcggtgtccttctttcccacttcccctcctccgcatgccccttcttcttcctcccttccccttctctggataaggaaagacggagcaaagcgtaagatcaggcaggatgagtaaaaaacaaagagagcaaaatcactttgtcctggtgcatggtataggccatggtgcctggtgttggtacaagcttaagccactgttggaatccgccggcc

SEQ ID NO: 155539 - DNA, 231 bp, Glycine max
acgatatctgcggtggctagaattagaaatgctcttgcgtatgctacacatacatttttcaacaaggaagggtttctatatcgtgcacacccccattgttaccacaagtgattgcgagggtgcgggtgagatgtttcaggtgaccactttgctgagtgaggcggagagattggagaaggagttgttgcagaatccacctccgtcggaagcggatgtggaggcggctagggt

SEQ ID NO: 155540 - DNA, 232 bp, Glycine max
gtccgaaccattgccatggatgccaccgaaggggtcgttagagggtggcgcgtcctcaacactggctcccctattatcgttccagttggtagggctacccttggccgtatcataaatgtcattggagagcctattgatgacaagggagaaatcaataccgagcattatttgcccattcatagagaagctcctgcttttgttgagcaagaaaccgcacagcagattcttgtta

SEQ ID NO: 155541 - DNA, 234 bp, Glycine max
ggcagctggcgttttacactggagatactgttgggggtcttttaaatgctacatttggaaatgcaacagaactgatcatctcaatatatgcactgaaaagtggaatgacacgcgttgtccagctctctttgctgggttcaattttgtccaatatgttactggtgcttgggtgtgcattcttatgtggtgggattgttaatcacgagaaggagcaagtgtttaactaggcagcta

SEQ ID NO: 155542 - DNA, 245 bp, Glycine max
ggttatgtgctttaccagcattttgggtagggttattgtacgatgaagtttctctacaaagtgttttggatatgacagctgattggactccagaagaaagacaaatgctaaggaataaggttcctgtaactggtttgaagacaccattccgagacggtttgctgaagcatgttgctgaagatgttctaaagttggcaaaggatggcttggaaagaagaggcttcaaggaatcaggatttttgaat

SEQ ID NO: 155543 - DNA, 241 bp, Glycine max
atcacaaccattgctgcaggcttgtaaaaagcttgtagatttgtctgtttcacgaggctctttggatgatacaagtgtcatgctaatcaaattggagcactatatttaaagttaccttagtacgactaaggtttcaagattattgcagttgagatcgcattgaggtcaagattgcgttgcagtttgtgatttttgaacaaccttggtggtgcctgatgatggatagagagtagctgattct

SEQ ID NO: 155544 - DNA, 233 bp, Glycine max
gcattctgctatttaattccactacgtacacgcacattctcctcaaagacaacaatggcaccaacagccaagactctgacttacctggcccaggagaaaaccctagaatcgagcttcgttcgggacgaggaggagcgtcccaaggttgcctacaacgaattcagcgacgagatcccagtgatttctcttgccggaatcgacgaggtggatggacgcagaagagagatttgtga

SEQ ID NO: 155545 - DNA, 237 bp, Glycine max
cgtgaagcagcgtcgtcgtcgtcgtcgcttccgggcggtgcgagattgaaggtcttcgtcgtgttctgtgcgatgtacggacacgtggaggggctggcaaaaaggttgaagaaaggcgtggacggtgtggagggtgtggaaggggttctgtatagggttccggagacattgccgattgaggtgctgaatcagatgagggcgccgcccaaggacgacgccataccggagattacggcg

SEQ ID NO: 155546 - DNA, 253 bp, Glycine max
cttatgacagctatgaaaaactttcctctgctgttgatgagctctttaggggcctccttgcagagatgaagttatctcatattggctcttcccaatgctgttctggtcaaagagattcctgtgctggtggaattcaaaacaaggaacaggaagagaaatccaataagggtttattggttggaagtggggaatatactcttgtttatgaggataatgaaggagacaggatgcttgttggagatgtgccgtggca

SEQ ID NO: 155547 - DNA, 244 bp, Glycine max
gaagaagaagaagatggagaagtatcagatctggagcaggagaatagcgttggcagcgtttgcgtttgctctgctgttccaatcggcctcagcagacgacgtcgttgtgctctctgaagataacttcgagaaggaagttggtcaggacagaggagctctcgttgagttctatgctccttggtgtggacactgcaaaaagcttgctccagaatatgaaaagcttggtagcagcttcaagaaagcc

SEQ ID NO: 155548 - DNA, 239 bp, Glycine max
ggccccaagagaggtgctaaggtgaagattcttaggaaggaatcttactggtacaaaggcaccggttcagtggttgctgttgatcaggaccccaacactcgctaccctgttgtggttcgattcaacaaagtcaactatgccaatgtatcaacaaacaactatgctttggatgagatcgtggaagtcgaatgaatccaacttaattgtaattttgatacttgtcatgctatcgcagttac

SEQ ID NO: 155549 - DNA, 231 bp, Glycine max
gtcaaaggttggacttgttgtgtatgattctcaagtgcctattggtgccactccggagtatatggctggtttctacatgctgcaaagtgcaagctcttttctgcctgttatggctttggctcctcaagagaaggaacgtgtcattgatatggcagctgcacctggtggtaaaacaacttacattgctgctctaatgaagaatactggaataatatttgcaaatgaaatgaa

SEQ ID NO: 155550 - DNA, 229 bp, Glycine max
cttttattaagactccaagcacccgggtagaatcattcacagtggtggaccccactaaacgtgctggtacagagttgaaatacgggccatatgaaaatcatcccccgtattcatattctcctgtacttattcattttgaaaataacaatgcatttgctgttgttgaggagctagaacgtgaaattgaaatatctcactggggaagcattcaagtcactgagcaatatag

SEQ ID NO: 155551 - DNA, 229 bp, Glycine max
gcaaatccttggtcaatgcagacggtattatagagaaaacatttttgtggggtaggtacgctttggaaatgtctgctgttgtttacaaggactgggttttcactgatcaagcactgcccaatgatcttgtcaagagaggagttgccgttaaggatccatctgcttcccatggagttcggcttatgattgaggctttccctataaggcgcaagtgtataactaggcagct

SEQ ID NO: 155552 - DNA, 243 bp, Glycine max
gggaagtggtgtgcgacgagcacggcatagatccgacggggaagtacgtcggaaactcagatctacaactcgagcgcgtgaacgtgtactacaacgaagcttcctgcgggcggtttgtcccacgcgcagtgctgatggacctggagcccggaaccatggacagcgtgcggactgggccgtacgggcagatattccggcccgacaacttcgtgttcgggcagtccggcgcgggcaacaactggg

SEQ ID NO: 155553 - DNA, 238 bp, Glycine max
agttaacataccttcaagctgtggtcaaagaaactttaagattatacccttcagttcctctctcatcacctcgtgaattcatagaggattgcactttaggtggctacaatgtcaaaaaaggaactcgtctaattacaaatatttggaagatccacacagatcttagtgtttggtcaaatccattagagttcaaaccagaaaggtttctaaccacccataaagacattgatgttagggg

SEQ ID NO: 155554 - DNA, 235 bp, Glycine max
ttcttctccttgctttgaccttttgccggttgttgtgttgcattggtgcaaatggcgttcttcagaagcgtttctgcactttctcgacttcgctctcgcgtgggccagcaatctaatcttgcgaattcagttagatggctccaaactccgagctccattaacactgatctttattctgagttgaaggaactagttccagagtatcaggaacgtgttaagaagctgaagaaagatc

SEQ ID NO: 155555 - DNA, 229 bp, Glycine max
cagaacagttgaagtgaatggcataaaaatgcatgttgcagagaaaggagagggtccagtggtgttgttcctccacggcttccctgagctctggtactcatggcgccatcagattctctctctcagctccctcggctaccgcgccgtcgctcccgatctccgtggctacggtgacaccgaagcaccaccttcaatcagcagctacaactgcttccacatagtgggtgat

SEQ ID NO: 155556 - DNA, 273 bp, Glycine max
caatagcaagtcggtcgctcagacacgcacagatctgatctgatctgatctatctgaagccgaaaacgccgacggtgatgatgaagatggggtgttcacgttgctccttcttcctcttcctcatcctcttagtggcgctcttcccctcgtcgctctccgagatccgcttctccgagatccgaaacgacgatcgccgcatcatccccttcgatcagtttggattcacccacaagggtcgccttgagctcagcgtttccaaaatctcactctcca

SEQ ID NO: 155557 - DNA, 203 bp, Glycine max
ctctgtgacatttgtgctgctagttcatatatttgcggctgacaccgacaaggaaagcaggaaaaaaacaaaaaggagcagatgggtagctcaggtttctcatggaaattggcggatcatccaaagcttccagagggtaagactgtggctgttgtggtattcgatggttggggagaggccacacccactgagtacaactgcat

SEQ ID NO: 155558 - DNA, 256 bp, Glycine max
attgattgaaacctacaggtaggattctcatatgttatattactggagagtacagttactggctatcttcttcactgtagaggatggagatcaacttacctttaccccaaaagaccttgtttcttgggatgtgcccccactgactccatggaaggcatgcttcagttggtgaaatggagttctgaacttttcttgctaggaatatccaaatacagccctttcacttatgggatttcaagaattcctattccacaca

SEQ ID NO: 155559 - DNA, 262 bp, Glycine max
caaaatcaaattttgattttgccaaggttgctgctgtttctggcagtggccaacagcatggtagtgtgtattggaagaatggcagttctcagatattgtcatcattggatcctaagaagccattgttggatcagcttgaaaatgctttttccattaaggaatcctcaatttggatggacagtagcaccactgctgagtgtagggctatagagaaggcttttgggggagccttggagttggctcgtgtcacgggatcacgtgc

SEQ ID NO: 155560 - DNA, 259 bp, Glycine max
gcgtcttactggcatctacaagaatattttgaacaatgctggggtcaagctgattgaaggccatgggaagattatagatcctcacacagttgatgttaatggaaagctatattcagccaaacacattttagttaccgttggaggtcgccccttcattcctgatattcctgggaatgaatatgcaatagattcagatgctgcccttgatttaccaacaaaacctgagaaaatagccattgtgggtggtggttacattgcc

SEQ ID NO: 155561 - DNA, 260 bp, Glycine max
aaggaagagaagtttaaggtagaggtacacaagaataaccaaggggggttccatctaaatcagatggaaccagatcattcctaattctgatctgaagtttggtcaccctagcaatattgttcttatctatgtctagtgcttacccctttctctgtgccttggcaaataagtagttttacaatgtgtgtatccctttattaactgggaagctaccggtgatgttacattagtaactttgtaacgtaaatattactttagta

SEQ ID NO: 155562 - DNA, 259 bp, Glycine max
ctttagagaggaaacctagtggagaaaacaaccttgctaacggacaccattttgtcaagccacccatgttccagaggggggttctcagaaccaattgcatagactgcttagatcgcacaaatgttgcacaatatgcatatgggttggctgctcttggccaccagcttcatgctctgggaattattgaccaccccaaaattgaccttgatgatcctctaagtgatggtttgatgggattttatgagcggatgggtgacac

SEQ ID NO: 155563 - DNA, 216 bp, Glycine max
  unsure (1)..(216): unsure at all n locations
cagtatgtaatttctgtatgtatgcatgacatatacaagtggtaaatccaagtaaattctacagtgntcacggacactggacgcatcacgatgtctccgttacggacgagaggacccttctcttcggtgacaaggcagtcactgtttttggacacagaaaccctgaagagatcccatgggggtcaactggagctgacatcattgttgagtccaccg

SEQ ID NO: 155564 - DNA, 263 bp, Glycine max
tggcgatggtgttagtcacactgtgccaatctatgagggctatgcactccctcatgccattcttcgtttggatcttgctggccgtgatctgactgactctttgatgaagatcctcactgagagagggtacatgttcaccacctctgccgagcgggaaattgttcgtgacatgaaggagaagcttgcttatgttgccttggattatgagcaagaacttgagactgcaaagagcagttcttcagttgagaaaaactacgagcttc

SEQ ID NO: 155565 - DNA, 260 bp, Glycine max
agcaaattaattagcttcaccatggactcattgttacttctaaaagaaattgccacttccattttgatcttcttgatcacttgtctctccattcaaacattcctcccaagctatcgcccgacactcccaccggggccaaaagggtggccagttgtgggtgcactccctctcatgggaagcatgcctcatgtcaccttagcaaagatggcaaaaaaatatggacctataatgtacctccaaatgggcactaacaacatggt

SEQ ID NO: 155566 - DNA, 260 bp, Glycine max
atagcaatctcatctcattcatttcaatggcaactcaaggtcaagtcattacctgcaaagctgcggtggcctgggaacccaacaagcccctaactgtccaagacgttcaggtggctccgcctcaggccggcgaggtccgtgtacaaatcctcttcaccgctctctgccacaccgatgcttacacttggggcggcaaggatcccgaaggtctcttcccctgtattcttggccatgaagctgcagggattgtggagagtgtt

SEQ ID NO: 155567 - DNA, 255 bp, Glycine max
cggcaccgtttttcggcttccttggcgccgcagctgccctcgtcttctcctgtctgggagctgcctatggcacagcgaagagtggcgtgggcgtggcttccatgggtgtaatgagacctgagctggtgatgaagtcgattgttcctgttgtcatggctggagttttgggcatttatggccttattattgctgttattatcagtaccggtattaatccaaaggccaaatcctattacctctttgatggttatgcac

SEQ ID NO: 155568 - DNA, 254 bp, Glycine max
tcacacccaaagagaaaagaaaaaaaaaacaacagtggtacgtgatgccaccgaagttcgatccctcgcaggtggtggacgtgttcgtccgagtcaccggcggcgaggtcggcgcggcgagttctctcgccccgaagatcggtcccttgggactctccccaaagaagatcggagaggatattgcgaaggaaaccgcgaaggactggaagggcctccgcgtgacggtgaagctaaccgtgcagaaccggcaggcg

SEQ ID NO: 155569 - DNA, 268 bp, Glycine max
tgcaagtgaaaccaccccttctcagaaaaaggctagagggcgccctcctggctctggaaggaagcaacagctagctgctttaggtgaatggatgaatagttcagcagggttggccttttcacctcatgttatcactattggagttggggaggacattgtggcaaaattattgtcattatcacagcagagaccaagggctctgtgtatcatgtcgggcactgggacagtatcttcagtcactctgcggcagcctgcttctaccaatgcc

SEQ ID NO: 155570 - DNA, 257 bp, Glycine max
gcctgattaacaacaggtgctcgggaagctgctttcagaaacatcaagacaattgctgaatgcttggctgatgaacttattaatgccgctaaaggttcatccaacagttatgctatcaagaaaaaggatgaaattgagacagttgccaaggctaatcgttaaaccaacaaaggatacagtattggtgaccagaaagattttgtttcgacctttgaacttcattttcaaatattgtgtactagttttgatggctttag

SEQ ID NO: 155571 - DNA, 254 bp, Glycine max
atcgagccgctcgagccgattcggctcgagtgttctccttctcagaaatcaagagcctcacctggggaactcaaggatcaaattgggccaaacatgaccaagggtgtgctaccgaacaatcacctgattgcagttaaagacctgaatgcatccatagaagaaaggaagttccggagtgctgttatgaagttgggcaacatccaccacaagaaccttgtgaagctggaaggttattgttgcgagtttaaccatag

SEQ ID NO: 155572 - DNA, 259 bp, Glycine max
ggagccaatgaactcagtgaagggtacagcacaggtgttggattgggtgctgagattattggaaccttcgttttggtctacactgtcttctctgcaactgaccccaagaggaatgctagagattctcatgtgccggttttggcaccacttccaattggctttgctgtgttcatggttcacttggcaaccatcccagtaacaggcactggcattaaccctgctaggagcctaggagctgctgtcatgtacaaccaacaga

SEQ ID NO: 155573 - DNA, 255 bp, Glycine max
ctcgagccgcgctgtggttatcatcttcttcttcctctttcttagatctcttctttctctacgccgcacgccgaaaccatggccggaaaaggagagggtcctgctatcggaatcgatctcggaaccacctactcttgcgtcggtgtgtggcaacatgaccgcgttgaaatcatcgccaacgaccaagggaacagaaccacgccgtcttacgtcggattcactgacaccgagcgtctcatcggtgatgcggccaag

SEQ ID NO: 155574 - DNA, 258 bp, Glycine max
ctccgctcaacaactataagattatcttcttcttcttcttctcttcaattcttctccaatcccaaccgcaccctcttccgtccctttcttcacacttccttcaaaccacttccttcgtctttctctttccgaacagatcacactatggccacctcaaacgccaaatcagtccatgatttcaccgttaaagatgccaagggaaatgatattaaccttggtgactacaaaggaaaggtccttatcattgtcaatgttgcc

SEQ ID NO: 155575 - DNA, 253 bp, Glycine max
gccttctttctttttttcaatttccaaatcacgaaactcaagaagatggagaaagcgatcaacagacagaagattttgcttcatcatctcaacccttcatcatccacccaccccaacgaatcatcctccctccatgcttcagcatgtgtggcgggggatagcgctgcttatcaaaggacatcgacattcggggacgatgttgtgatcgtggctgcttatcggactgctcattgcaaagctaaacgaggtggtt

SEQ ID NO: 155576 - DNA, 254 bp, Glycine max
gaaagagaagcattagcaaaagcaagaagaactagtctaagcagaaatggcctcttcagtgatggcatctgtggccctcaaacctgcccctttcactgttgagaagtcctcagttagaggccttccctccctctcaaggaactcctcttcattcagagttgtggccagtggtggcaagaagatcaagactgacaagccttatggaattaatggtggcatggctttgagggaaggagttgatgcatctggcagga

SEQ ID NO: 155577 - DNA, 256 bp, Glycine max
gaagattttcaggtgtctgagggatctggtgatgaagcagaagcttctgcaccaccttcttttccagaacttgaattgaaaattaaggacttcattgagtcccttgggggtgcagtcttccctaagctgaattggagtgccccgaaagattcagcttggataagcacctctggtacccttcgatgcatcagtttcagtgagattgcacttttatttcgagcatctgactcattggtccatgatttgtgccatgctt

SEQ ID NO: 155578 - DNA, 255 bp, Glycine max
gcagagctcaaaaccctagagaggaggaagagagagcgtgcaagttccggccaccaccgaccatgacattcaagcgcaggaatggaggtcgcaacaaacacggccgcggccacgtcaaattcatccggacctccaactgtggcaaatgctgtcccaaggacaaggccatcaagaggtttctggtgaggaacattgttgaacaggctgcagtcagagatgtgcaggaagcttgtgtctatgaacaatatactcttc

SEQ ID NO: 155579 - DNA, 254 bp, Glycine max
aaggttttcagccatcctgatgttgttgctgaagtgccatggtacggtattgaacaagaatacaccttgttgcagaaagatatccaatggcctcttgggtggcctgttggtggtttccctggacctcagggtccatactactgtggtgttggcgctgacaaggcttttggccgtgacattgttgacgcacactacaaagcctgtatttatgctggcatcaacatcagtggaattaatggagaagtgatgcccgg

SEQ ID NO: 155580 - DNA, 249 bp, Glycine max
acaaattgtggtcaggttcatatatatggcgaatacactgtatataaggctaggacgaccaactctggacccaccagcagactaaacggataagggtctttactacttcctttcaaaccttgaccagaacatagcacatccagttcgaacggtttacttttataataagtctgcatgtagagggaacgaggaagcagcacaagtaataaaggatgctttgtcgaaggttcttgttcactattaccctat

SEQ ID NO: 155581 - DNA, 228 bp, Glycine max
ttcgtttctgaaattctcccgagatggacgagaacgtgctcgacgatattatccggacgctcatcgcggcgaagaacggtacgacgaagcaggtgctgcttaccgaggcggaaattcgtcaactctctgcttcctccaaagagatctttctcagtcaacctaatcttctcgaactcgaggctcctattaagatttgtggagatgtacatcgccaatactcagatcttt

SEQ ID NO: 155582 - DNA, 247 bp, Glycine max
ttcacattttagaagaataccccctcttttgctgcatcagaggagttgtaaattaagagcatggctgcacaagctcttgtatcatcatcttctcttaccttctcagcggaggctgcaagacaaagtcttggaccaagatcactccaatctccatttggcttctccagaaaagcctcctttcttgttaaggcagctgtaagccctcctgtcaagcaaggatcagacagacctttgtggtttgcatcaa

SEQ ID NO: 155583 - DNA, 249 bp, Glycine max
cacttaagccactgtgtggaactaacaacaacacaaggccatcatcatggcagctgcttctcctatggcaagccaactcaagtccaccttcactaaaactcttgtagctcccaagggcctctctgcctcttcaccactccacctcctgccttctaagaggcaatttagcttcactgttagggccatccaatcagaaaagccaacctatcaagtgattcaaccaatcaacggtgatcccttcattggaag

SEQ ID NO: 155584 - DNA, 254 bp, Glycine max
ggagagcccattgcaactctgcgtttgctgcactatgaaggtcaagtttcggatcccttgaaaggattatatggagctggagctcatactgactatggtttaattacactgttagcaacagatgatgtctcgggtcttcaaatatgcaaagatagggatgctaaacctcagaaatgggaggatgtagcaccattgaagggagcattcatagtgaatcttggtgacatgctggagcgctggagcaactgcgtttt

SEQ ID NO: 155585 - DNA, 256 bp, Glycine max
tgtgccctccctctttctagctatttccctctcttaacacaattaacaaccctatatcatatcatatcaactccaaatgatgaaaaatattgggttgtttcttcttgtggtggtggctacttttgtggtggcagccacagctggtagcttttaccaagactttgaaataacatggggtggtgagcgttgcccaaaatctatgaaaatggaaatcttctcaccctctccctagacagagcctctggctctggctttc

SEQ ID NO: 155586 - DNA, 259 bp, Glycine max
ctcgttgattcggatctagagtcttttttcactcttcagttctcgttgttgttcttcgctttcctgaaactagggttttcaatttcgattcattcgttaataattaaagatgtttgggagggcaccgaagaagagcgataatacgaggtactacgaaatcctcggcgtctcgtagaacgcttcgcaggatgatctgaagaaggcttacaagacagccgccatcatgtatcaccctgactaaggcggtgatcccgagaag

SEQ ID NO: 155587 - DNA, 257 bp, Glycine max
gcagacttaacaacagcacaaagcgggttactgtctgttcaagctaccatctctctctctctttcttagtgcctccttgccagaagttaaaatggcccaagaaactttcctattcacatctgaatcagtgaacgaggggcaccctgacaagctctgtgaccagatctccgatgctgtgctcgatgcatgcttggagcaggaccctgacagcaaggttgcctgtgaaacctgcaccaagaccaacatggtgatggttt

SEQ ID NO: 155588 - DNA, 251 bp, Glycine max
caagaagttctggaaatggagatcaccaatgtcagcgagtatgaagctattgcaaagcagaagttgccaaagatggtgtttgactactacgcatctggtgcagaggaccagtggactctgcaggagaacagaaatgccttttccagaattttgtttcggccacgtattcttattgatgtgagcaagatagacatcacaactactgtcctgggcttcaaaatatccatgccaatcatgcttgccccaacagc

SEQ ID NO: 155589 - DNA, 245 bp, Glycine max
cttctttattccttttgtaatttcattcattcttaatctttgtgaaaactaatgttcatcgagaattttaaggttgagtgtcctaatgtgaagtacaccgagactgagattcagtccgtgtacaactacgaaaccaccgaacttgttcacgagaacaggaatggcacctatcagtggattgtcaaacccaaatctgtcaaatacgaatttaaaaccaacatccatgttcctaaattaggggtaat

SEQ ID NO: 155590 - DNA, 249 bp, Glycine max
atttcttaaaaaaatatggtaaaacaggaggagaatttgagacaatagacccaagaaccggagaggtgattgcaaggattgcagagggaaccaaagaagacattgaccttgccgtcaaagcgtctcgtctggctttcgaccatggtccatggcctcgtatgcctgccgtagaaagagcaagaattatgatgaaatgggctgacctaattgaccaacacgtagaagaaattgcagcactggatgccattg

SEQ ID NO: 155591 - DNA, 249 bp, Glycine max
gtagtgtgtggttgaaagttaagaagtagcaaagatgtttccattcgggcacaagggtcaaaagataaaggggactatggtggttatgcagaagaatgtgttggatatcaacagcatcaccagtgttgacgggatcgtcggcaccggcttagacttcttaggcagtgcactcgatacagttacttttttagcctcctccatctccatccaacttattagtgctaccaaggctgatggtgggaaaggaaa

SEQ ID NO: 155592 - DNA, 256 bp, Glycine max
ggaaaattcaacctccatggagttttgggagagattgttgaactgataaaaccaatagcatccgtgaaaaagttacctatcaccttaattctgtctcctgatctgcctactcatgccattggtgatgaaaagcggcttacacaaactcttttgaatgtcgtgggtaatgctgtcaaattcactaaggagggctatgtttctgtaagagtatcagttgcaaaaccagaatcttcacaggattggcgacctccagagt

SEQ ID NO: 155593 - DNA, 255 bp, Glycine max
gcaactgcgattttggatcggaacctcttcagcggcgtagcaatgggacactccaacgtttgcaattctcatccaaaaaactacggtcctggttctcgcacttgccgagtgtgtgggaatccacatggattgatcaggaagtatggccttatgtgctgcaggcagtgcttccgtagcaatgccaaggaaattggcttcatcaagtatcgctaaaagagctgttgtcacctacggaccaatattatgttctggcac

SEQ ID NO: 155594 - DNA, 247 bp, Glycine max
gaaagaagaaaacaatggctgttgccaacaatgtgctttgcattgctttcattatcactttaacgtgggcagttgaagctcgaattccggggatttactctggtggtgcatggcaaagtgctcacgccaccttctacggaggatccgacgcttccggcaccatggggggaacgtgtgggtatgggaacctgtacagccaggggtacggtgtgaacacggcggcattgagcacggcactcttcaacag

SEQ ID NO: 155595 - DNA, 248 bp, Glycine max
agaaaaaatgggttcttcttcttctatgtggacggcctgtgtgatttcggcatcactggcctctgcagcactctgtgccaacccacgcaggccagtggatgtacaatttggccgaaactacgtgcccacatgggcctttgatcacatcaaatatttcaatggtggttctgacattcagcttcatcttgacaagtacactggtactggcttccagtccaaagggtcttacttgtttggtcacctcagca

SEQ ID NO: 155596 - DNA, 248 bp, Glycine max
cccaaaaccctaggtagagagctcttcctcactctcattcgcaatggccgcagcagcacgtcctctcgtcaccgtgcaggccctcgacagtgacatggccaccgacgcctccgccaccgtccctatccctgacgtcatgaagtcctccatccgcccggacatcgtcaacttcgtacactccaacatctccaagaacagccgacaaccctatgcagtcagccgccgcgctggccaccagacttccgccg

SEQ ID NO: 155597 - DNA, 250 bp, Glycine max
aatacactggcctttcagatgcatatctttctgttctgaaggcacttttacatgcttctgttgctcgaaaccgtaaacttattgtggactgggctccagctggggatcttgaagaagctacttataatgaggatcctgaggcgcataaagctgctttgagtcttttaaagggtgctaatggggttctagttccaggaggttttggtgatagaggagtgcaagggaaaattcttgctgctaagtatgctcg

SEQ ID NO: 155598 - DNA, 251 bp, Glycine max
cgcgaaaaagacaaaggggtttgtatgtgaatctgatcatctagagttgagaatggaaggagggaaacgaggcacgattctggtcaccaacgacgacggaatcgatgctcctggcttaagggcattggttcactccatcgtcaacgccaaccttttcaacgttctagtgtgcgctcctgatagcgagaaatcagctgttagccacagcatcacttggctccatccagtagctgttaagcaagtacagatcg

SEQ ID NO: 155599 - DNA, 258 bp, Glycine max
gcgtcgcctccttcaagattctgagcttccgtcatgggttgatcaacatagactccttaatgaaaatgccggtccattcaaacgcaagcctaatgttactgtagccatagatgatagtggagatttcaaaagcatcaatgaggcattgaagcaagtgcctgagaaaaaccgaaagccatttgtgatctacatcaaggagggcgtttaccaagagtatgttgaagttacaaaaaaaatgacccatgtggtgtttattgg

SEQ ID NO: 155600 - DNA, 255 bp, Glycine max
agtcttagtaacatcaagacttggcctgaggacattataccctagcagcctgttggtcgcttggtcctgaataagaacatagataatttctttgctgagaatgaacaacttgcattttgccctgccattgtggttcctggtgtatactactcagatgataagatgcttcaaaccaggatattctcttatgctgattcacaaaggcacagacttggaccaaactatctgcaacttcctgctaatgctcccaagtgt

SEQ ID NO: 155601 - DNA, 250 bp, Glycine max
gaggaagatgattcagcttctgttcacggtgatattttcggaggcttcgatgatagcgttgctgctgttcaagacccctttgaggaagctcgtgataatgggcttggatcggttgtctcgatgtactggaccacttgataggtgaagaacgtctctgggaacgttctcgttgtgttgttgtatacagtgtagagcatgtagaatattcagaagcttgggatccaagacggtactgttgttaaccccatcg

SEQ ID NO: 155602 - DNA, 250 bp, Glycine max
attctctttgcgcagttccctacctctcctttcaagatgcagatcttcgtcaagaccctcaccggaaagaccatcacccttgaggtggaaagctctgacaccatcgacaacgtcaaggccaagatccaggacaaggaaggaattcccccggatcagcaacgtctcatcttcgccggaaagcagctcgaggacggccgtaccctcgccgactacaacatccagaaggagtcaactcttcaccttgtccttc

SEQ ID NO: 155603 - DNA, 247 bp, Glycine max
ccttggcctagccagctagcgcttcttctctcgcattccgtggagatctagtgctgccaaacctcgctgaaaattagggtttcgtttcggaggtagacgaagatgttcggaagggcaccgaagaaaagcgacagcatcaggtactacgaaatcctcggcgtttcgaagaacgcttcgccggatgatttaaagaaggcttacaagaaagccgccattgagaaccaccctgataaaggcggtgatcctg

SEQ ID NO: 155604 - DNA, 244 bp, Glycine max
aaaagagcactgaccaaaccattttattttatttttgaatcaagggtgagggccttccatggcttccgcttgtgcttcctctgcaattacagctgttgccatctctacgccgagttccgggcagaagaatggatcaggaggttgttttcttagtggaaggaaattgagggtgaaaaaggagagagcagcaattggaggacgatcgatgggcactacagtgtgcgcagttgctgagcctgacaga

SEQ ID NO: 155605 - DNA, 248 bp, Glycine max
gcaggatgccgctgatgctgctagaagtgctatggttagtgtgataggactggactcagagaaggtccaacaattgtgtgatgcagccaatcaggaagttcctgaagctgagaaggttcagattgccaattacctgtgcccaggaaactatgctgtctctgggggattaaaaggagttgaagtgctagaatccaaggcaaagtctttcaaggctcgaatgacggtgcgcctagctgttgctggtgctt

SEQ ID NO: 155606 - DNA, 246 bp, Glycine max
ttcttccccctccacccacccagcatatctctctattcctatttattagcacccctcacattaccttgtgtcaccaactactttgactcctttaccataccattacaataattatcaaacctaaccagtaaaaatggtgaccgtggaggaaatccgcaacgctcagcgttcccatggacccgccaccatcttggccttcggcaccgccacgccgtccaactgcgtctcccaagccgattaccctga

SEQ ID NO: 155607 - DNA, 248 bp, Glycine max
ggaagagagagggagattctttgtttgctaccttctctcggaaaaatggttacgttcaggtttcaccagtaccaggtggttgggagggctcttcccacggaagcagatcagcaccccaagatctaccgaatgaagctctgggccaccaacgaggttcgcgccaagtccaagttctggtattttctgaggaaactgaaaaaggtgaagaagagcaatggccaagtgcttgccatcaacgagatttttga

SEQ ID NO: 155608 - DNA, 257 bp, Glycine max
gttgaaacacaaagaagaaaaaatgggttcctctttgtggacttgtctgattttgttatcacttgcttctgcttccttcgccgccaacccaagaacaccaattgatgtgccatttggcagaaactatgtgcctacttgggcctttgatcacatcaaatacctcaatggtggttctgagattcagcttcatcttgataagtacactggtactggcttccaatccaaaggatcctacctgtttggtcacttcagcatgt

SEQ ID NO: 155609 - DNA, 253 bp, Glycine max
cctctctctctttctctttctctctcatccagatcttgcaaaaagcaaaagacccaatggcatcgagcgcgcccactccaggcgaagagttcgtgtacatggcgacctgtcgaaacaggccagtcgctacgcggagatggtggagttcttggagacggtctccgcctccgccgaaaccgaggacctgaccgtggagaagcgaaacttcctctccgtcgcctaaaagaacgtaatcgctgctctctgcgcctcc

SEQ ID NO: 155610 - DNA, 244 bp, Glycine max
ggtttcgagatcaaggactctctgctagggacatggttgctttatctggagctcacacatttggcaaagcaaggtgtactagtttcagagatcgcatatacaatcaaaccaacattgatagaacatttgcattggccaggcagaggaggtgtcctaggactaatggcacaggtgacaacaatctagcaaatctagacttcagaactccaaatcattttgacaacaactacttcaaaaaccttct

SEQ ID NO: 155611 - DNA, 241 bp, Glycine max
gtgaagcagtgtagggggaagaatctcttcttcagcactgatgtcgagaagcatgttgctgaggctgacattgtgcttgtctcggtgaacacaccgacaaagactcagggtcttggagccggtaaggcggctgatctcacatattgggagagtgctgccaggatgattgctgatgtatcaaaatcggacaagatcgtggttgagaaatcgaccgtgcctatgaaaacagctgaggcaattg

SEQ ID NO: 155612 - DNA, 254 bp, Glycine max
ctttcgcttttgcttcctaggtttttttttttgtgtcgatggcgggaaaaggagggaaggggcttgtggccgggaaaaccacggcagcgaacaaggacaaagacaaggataagaagaggcccgtctctcgttcatcccgtgctgggatccagtttcctgtgggacgtatccacaggcagttgaagcaaagggtgcaagcaaatggacgtgtgggggcgactgctgctgtgtacttggcctccattctggaatat

SEQ ID NO: 155613 - DNA, 256 bp, Glycine max
agaatcactcccttatccatttccacaccacatcatagttcacaaccaacgctctctcttcagcctccattctacgctctctcaactggcagactctgacgcgaagatcgaaccataatggaagagtaaattaccggataccgaataaccgtttctccgtgaaagcctccgccaaagagattgcctttgaccagcattcccgctctgctatgcaggccggtattgacaagctcgccgacgctgttgggctcactct

SEQ ID NO: 155614 - DNA, 250 bp, Glycine max
caccactaccgacattttatagagtttgtaagaagaaatcaaccgaagggttccaatcaattccatatgtggctgcactcttcagtgcaatgctttggatcttttatgcctatgtgaagaccggagaaatgcttcttatcaccatcaatgcattcggttgcgtgattgagaccatttaccttgccgtatttatcacttactgccccaagaaagctaggatgtcgacattgaggatgattgttttgttaaa

SEQ ID NO: 155615 - DNA, 245 bp, Glycine max
ttttgaaatttgcacgagctcaggttcaaaaacgggctcctaatctccaacatcctttggtttgcattgatgttattgaagcaggagtagttgctggtccccgtgcaggactctggaaggaagttgaagcatctgaaggacttataaagtcagatactagcaaaagcttaattcacgtatttttttctcagagaggaacatccaaggtacctggggttacagattgtggtttggttccaagacac

SEQ ID NO: 155616 - DNA, 238 bp, Glycine max
gatggccagcatcttctcgaagacgagcttcaacttctctgcgaatatgtaaaagagatccttattgaggagtccaatgtgcagcctgtcaatagtccagtgactgtttgtggtgatattcatggtcaattccatgatctaatgaaacttttccagactgggggtcatgtgcctgaaacaaattatatttttatgggagactttgttgatcgaggttacaatagtcttgaagttttca

SEQ ID NO: 155617 - DNA, 244 bp, Glycine max
aaaattagcctcacaaaagcaaagatcaaacaaaccaaggacgagaacacgatgttgcttgaacttgcacttggtttattggttttggctctgtttctgcacttgcgtcccacacccactgcaaaatcaaaagcacttcgccatctcccaaacccaccaagcccaaagcctcgtcttcccttcataggacaccttcatctcttaaaagacaaacttctccactacgcactcatcgacctctcca

SEQ ID NO: 155618 - DNA, 246 bp, Glycine max
taagcactcggttgcagaacagaacaaacttctttcactctttcgcttctgaatcttcaacaatggtgctcgaggcgacgatgatctgtatcgacaattctgaatggatgcgtaacggagattactctccttctcgatttcaagctcaagcagacgctgtcaatctcatatgcggtgctaaaacgcagtctaatccggaaaatacagtgggagttctcacaatggctgggaaaggcgttcgtgttt

SEQ ID NO: 155619 - DNA, 252 bp, Glycine max
gagacaattcaacttaagagatcaatatggccaccaccactacccagcctccctctaatatctgttttttccttctgttgttgcttctagcacactttcatttgggcataagccaacttgagctgaattactactctaaaagctgcccaaaagctgaagagatcatcaaggaacaagtcacacaactatataacaagcatggaaacactgccgtttcgtgggtcagaaatctcttccacgattgcgtggtta

SEQ ID NO: 155620 - DNA, 247 bp, Glycine max
gtggtgccttatcgctgtggttatcatcttcttcttcctctttcttagatctcttctttctctacgccgcacgccgaaaccatggccggaaaaggagagggtcctgctatcggaatcgatctcggaaccacctactcttgcgtcggtgtgtggcaacatgaccgcgttgaaatcatcgccaacgaccaagggaacagaaccacgccgtcttacgtcggattcactgacaccgagcgtctcatcggtg

SEQ ID NO: 155621 - DNA, 246 bp, Glycine max
ccagcagcttggttccaacgcaggaacctcaagctgcggttattcaagcggaaaatcgaatctttgggaggaagaaggaggcatggacgagcttcttgcagtggtgggttacaaggtgaggtcatcggacatggcggaagtggcgcagttcctggagcgtcttgaggaagccatgggaaatgtccaagatgacctcacggacctttcaaacgacgccgttcattacaacccttccgacatctccaa

SEQ ID NO: 155622 - DNA, 240 bp, Glycine max
cttggcaagagagtcatttcactgctgagggcgatgtcgagttcaaggcagtcctgtttgtaccacctaaggcacctcaagatttatacgagagctattataacgcaaacaaatccaacctgaagttgtatgttagacgtgtgttcatttcagatgaatttaatgaactgttgcctaagtacctaaactttttgctgggtcttgttgattctgacacattgccacttaatgtatcgcgag

SEQ ID NO: 155623 - DNA, 244 bp, Glycine max
ctcctgaatatgatgcgttagctaagaaccctgagaaggagtacttgaagactattactggcaagaaagagaccctcattgaccttacaattatagaaattttatcaaggcacgcatctgatgagttctaccttgggcagagagatggcggtgactactggacttctgatgccgggccattagaggcctttaagaggtttggaaagaatcttgacgagattgagaagaagcttataggagaaga

SEQ ID NO: 155624 - DNA, 241 bp, Glycine max
tcctaacctaaaccctactcattctccatacctcaacgaagctgttaaagagacggcaacactttgctgtccgccttgaccgagcagagcttcgtcttggccctcgattttgccctaaagtactctcagtcacaacagacaccgtcgtcgtcgtcgtcgtcatcaatggcaccgaagcagaccaaggctgagaagaagatcgcttacgatgcgaactgtgcgacctaatggaggagtacgg

SEQ ID NO: 155625 - DNA, 242 bp, Glycine max
gtgaggagcaagatgatttatgcaagctccaaagacagattcaagagggagctggatggaattcaagtagagttgcaagcaactgatcctactgagatgggtcttgatgtgttcaaaagccgtgccaactaaaatgattatataaaatagtaggctttctggtgggagcagcacccctgaagccttagttactcatatggaaaatatcctagtttgtgggatggtcaacttgggtagttatg

SEQ ID NO: 155626 - DNA, 246 bp, Glycine max
cgaagagtataaaaaagaaattcttcgttacatgtactatcaccagaatgaagatggaggatggggactacacattgagggtcacagcgacatgttttgtactgcactaaactatatatgtatgcgagttcttggagaaggccctaatggaggtcatgacaatgcttgtgctagagcaagaaaatggattcatgatcatggtggtgtaacacacataccatcatggggaaaaacttggctttcgat

SEQ ID NO: 155627 - DNA, 262 bp, Glycine max
caaacactaacaacaatgctgataaaaaacaaaatgcggcctaggtcaagtacatattgcgtggggatgacaaccggacaacgctcatgataaaaaatattcccaataagtatacttcaaagatgcttcttgttgccatagatgagcaatgtcgaggaacttatgattttctgtatttgccaattgatttcaagaacaaatgtaatgttggctatgcattcatcaatatgattgatcctggacaaattattccattccacca

SEQ ID NO: 155628 - DNA, 260 bp, Glycine max
gattgattcaatgagagcttcttccccaactcgtgccaaatcagaaagccaagaaaaaagatcttggattctttatcacccttcagctctgaacacgtttgagcaaatagtatgtagtgccaaaggaaagcaagtcgtagtttttcttgactacgatggaactctctccccaattgttgcagatccggataaagctttcatgactagaaagatgagagcaacgctaaagggcatagcaaggcattttcccacagcaatag

SEQ ID NO: 155629 - DNA, 267 bp, Glycine max
caggagcattttacatcaaaaattttatgcaatctgaatttttcctcgtgagtgtcactcttgaagacattccaaatcatggaaccattcactttgtttgcaactcatgggtttacaatgcaaaaagttacaaaatggatcgcattttctttgctaataagacatatcttccaaatgaaactccaactccactagtgaagtacagaaaagaagaattggaaaatctaagaggagatggaaaaggagagcgcaaggactatgatagga

SEQ ID NO: 155630 - DNA, 266 bp, Glycine max
cgctctctctctccttctcgctctttcagctttgacttttgttggaaactaaggcctaatcaaaatggtgaagttcacagctgaagagctacgtcgtattatggactataagcataatatccgtaatatgtctgtcattgctcatgttgatcacggaaaatcaaccctcactgattctcttgtggctgctgctggtattattgctcaagaagttgccggtgatgtccgtatgactgatacccgtgcagatgaagctgagcgtggta

SEQ ID NO: 155631 - DNA, 259 bp, Glycine max
gttcattctctttgcgcagttccctacctctcctttcaagatgcagatcttcgtcaagaccctcaccggaaagaccatcacccttgaggtggaaagctctgacaccatcgacaacgtcaaggccaagatccaggacaaggaaggaattcccccggatcagcaacgtctcatcttcgccggaaagcagctcgaggacggccgtaccctcgccgactacaacatccagaaggagtcaacccttcaccttgtccttcgtctc

SEQ ID NO: 155632 - DNA, 261 bp, Glycine max
cagcgactgagtcgcggtctcttcccaactcggaactcagtccattccgcatttatcttcaaaccaaatttcttctgaagaaggagatttgaattcagaattgagtgagaagaagagaatagaaatgggctccgaattgattttcagaggccacgaggctcagcccgtggacgactcgtactcgccgaagccccacaagccctggttcaccgtgactcgcccgattcactacatgctccgcgagcagcgactcgtcttcgt

SEQ ID NO: 155633 - DNA, 245 bp, Glycine max
ggaaaaggcgtcttcataaacgccgcccaagacttctcatacccttttattcattccattcgtttctagggttcttcttttctttgccgagaaaatgagagagtgcatttcgatccacattggccaggccgttatccaggttggacacgcctgctgggaactctattgccttgaacacggcattcagcccgatggacagatgccgagtgacaagaccgttggcggaggagacgacgtctcaacac

SEQ ID NO: 155634 - DNA, 259 bp, Glycine max
ctcagtgaaagagaatccgaggcgaagagaagagaaaaattaagatggaggggaaggagcaggaagtgtcgctgggagcgaacaagttcccggagagacagccgattgggacggcggcgcagagccaagacgacggcaaggactaccaggagccggcgccggcgccactggttgacccgacggagtttacgtcatggtccttttacagagcagggatagcagagtttgtggccacttttctgtttctatacatcactgt

SEQ ID NO: 155635 - DNA, 258 bp, Glycine max
ggtttttgaagactgctgcctatggacactttggaagagaagaccctgacttcacatgggaagtggtcaaacccctcaagtgggagaaggcctaagtaattcattccactgctctatgctggaagttttttgagcgttgcccttataatatgtctaatatccataactttccacgtctcttactctgtgtgtttctctcctcttcctcctattttgttatttgtatgttcttttgtaattttttacgtgatcaactaa

SEQ ID NO: 155636 - DNA, 258 bp, Glycine max
ggattagagggtcgccacgtttagcaataaccaaaccctctctatccttttttcttctccttctcttcgctagggttttagcttcttcctcttcacttcgttctttttcgtctctacaatgagcaacgacaaggacacattcaacgtcgccgatctcacttctgctctcaacgaggacaatagagcagaccttgtcaatgctctaagagcaagatacagagtttggctggacaacactcggatattctagagtctctg

SEQ ID NO: 155637 - DNA, 266 bp, Glycine max
agctcttcagttttcacgtcttacattgttttgagtctagtgatggcactagcaattagcggtttcaatttcaaaggggcagaggcagcacgtgccttctttgtgtttggtgattctctcgttgacaatggcaacaacaactacttagccaccacagctagagcagacgctccaccttatggcattgattatccaactcgcagacccactggccgtttctctaatggcctcaatattcctgattttatcagtcaagaacttgggtc

SEQ ID NO: 155638 - DNA, 212 bp, Glycine max
gcattgccaatggatgggcctcaagtgtctggtgtccacgtacaatggagtcaggaggcgcatctcgtggcccattagcagagacgaggtttggatcagtaatgtgctccatacgcgtctagtcgaggatagaggaggtcgtgattggctgtcagtgaagagggctgaatttggatttcctggtggaggtactcaatgtatacatggtgcag

SEQ ID NO: 155639 - DNA, 258 bp, Glycine max
aagaagttcaaccttccaatcctcccaaccaccacaattggatccttccctcagactgttgaactgaggagggtgcgtcgtgaatacaaggctaacaagatctcagaggaggagtatgttagttcaattaaagaggaaatccgcaaagttgttgaactccaagagaatcttgatatcgatgtcctggtacacggggagcctgagaggaatgacatggtggagtactttggtgagcagttgtcaggctttgcctttacc

SEQ ID NO: 155640 - DNA, 267 bp, Glycine max
aagaagttcaaccttccaatcctcccaaccaccacaattggatccttccctcagactgttgaactgaggagggtgcgtcgtgaatacaaggctaacaagatctcagaggaggagtatgttagttcaattaaagaggaaatccgcaaagttgttgaactccaagagaatcttcatatcgatgtcctggtacacggtgagcctgagaggaatgacatggtggagtactttggtgagcagttgtcaggctttgcctttaccgttaatggc

SEQ ID NO: 155641 - DNA, 227 bp, Glycine max
ttctattccatcatcaatggagaacaccgagggatccggatctgcgacgaacggggtgctggctccgccgcgcaaggtggcattgataaccggaattaccggacaagacggttcgtacctgacggaattcctcctggacaaggggtacgaggtgcacggcctgatccgccgctcgtcgaacttcaacacgcagcgcatcgttcacatatacgtggatccacacaaca

SEQ ID NO: 155642 - DNA, 258 bp, Glycine max
tgtgattatccaattaaagcagttcacaaggctgcaatgcttgcatatcattgcttgaaccgcaacccgaaagcaaggcctctaatgcgagatattgtggattcattggagcctttgcaggcacacacagaggtccctattggaaaaacattgaccataatcagtgaggttcctgaatctggtttgaaaatgaaagatgatgcaatatgacttaaatgagggtggtgttgtaggcttatcagtttcacttcttgttag

SEQ ID NO: 155643 - DNA, 257 bp, Glycine max
gaaatttgtttctctctaaagagtctccgctgaactttttggtttcttgaagatgtcgttactctccgatcttatcaaccttaacctctccgacatcaccgataaggtgatcgccgagtacatatgggttggtggatctggcatggatatgaggagcaaagcaaggactctctcgggactggttaatgacccttccaagcttcccaagtggaactatgatggttccagcactggtcaagctcctggacaagatagtg

SEQ ID NO: 155644 - DNA, 261 bp, Glycine max
ggaatgtatgattccctgaagccagtagttttggttggtgggttgcaggatagtttctttgctagtttccttttgggatggggaatcacaattggtgctggtttggcttcttaccccattgacactgttcgtagaaggatgatgatgacttctggagaggctgtgaagtacaagagctctttgcatgcattccaaacaatcgtcgcaaatgagggtgccaagtcactcttcaaaggtgctggtgcaaacatattgcgtgct

SEQ ID NO: 155645 - DNA, 262 bp, Glycine max
gtgaatgcgtatccgtttttcgcttacgctgcaaactctgataaaatctctttagactacgcgctattcaaggaaaaccccggcgtggttgattccggtaatggtttaaaatacacgaacttattcgacgctcaaatcgacgccgttttcgctgccatgtcagcactcaaatacgacgacgttaagatcgcggtttcggaaacgggttggccttctgctggggactctaacgagattggagccagccccgacaatgcggcgt

SEQ ID NO: 155646 - DNA, 255 bp, Glycine max
ctacctctcccttcaagatgcagatcttcgtcaagaccctcaccggcaagaccatcacccttgaggtggaaagctctgacaccatcgacaacgtcaaggccaagatccaggacaaggaaggaatccccccggaccagcaacgtctcattttcgccggaaagcaacttgaggacggccgtacccttgctgactacaacattcagaaggagagtactcttcacctcgtcctccgtctccgtggtggcatgcagatct

SEQ ID NO: 155647 - DNA, 255 bp, Glycine max
cacacactagctctcttgttttctttcttcttcaacataacatgcagtctccaattgcctcatgaatcatcattagtcagggtttatcctctaagaaaataaacatactatagcaatgagtgcgtccaggttcatcaagtgtgtcactgtgggtgacggtgccgttggcaagacttgcatgctcatctcctacaccagcaacacttttcctacggactacgtgccaactgtctttgacaatttcagtgcagatgt

SEQ ID NO: 155648 - DNA, 256 bp, Glycine max
cgaggataagaaaccagaggggtatgatgacatcccaaaagagctcccagatcctgaagccaagaagcctgaagattgggatgatgaggaagatggtgagtggacaccccctaccattgccaaccctgattacaagggcccatggaaggcaaagaaaatcaagaaccccaactataaaggaaaatggaaggcaccattgattgataacccagatttcaaggatgaccccgacctatatgttttccccaacttgaag

SEQ ID NO: 155649 - DNA, 251 bp, Glycine max
gtgaaagtgagaaaaaataaaaatcaaagagcataatgtcagggatcattcacaagattggggagacccttcatgtgggagggcacaagaaggaggaggagcataagggtgagcaccatgctggagaatacaaaggggagcaccatggtgaacccagtagtgagtacaaaggagagcatcatggtgaacacaaagctggagagtaccatggtgagcacaagccagagcacaaagaggggttcctagacaaa

SEQ ID NO: 155650 - DNA, 255 bp, Glycine max
ctggtgaatgcgtagaaaaggaaaataaagaaattagcgtgaaaaatgttgggtgtgttcagcagctccatagtgtcgccgccggaggagctcgttgccgccggcagccgtacaccgtcgccgaagatgacggcggcggcgctgcggaagtggttcgaggagaagaacccctccgcagtgtcggtggaggtcggagagcatgtccagcacgcttatacccaccagaacgagtcgccgtttcagcccagatccttt

SEQ ID NO: 155651 - DNA, 257 bp, Glycine max
gttctgaacgacttttcaagagaatcaaaccatggcagtgaaagtatacggtccccactgtgcttccaccaagcgtgtgctgtcttgtctggttgagaaggaagtcgaatttgaggttgtccctgatgatgtcactaagggggagcagaaggatcctgagtacctcaaactacagccatttggagttgttcctgtcatcatagatggagattataccttatatgaatctcgtgctataatgaggtattatgcagaaa

SEQ ID NO: 155652 - DNA, 259 bp, Glycine max
atcacttgtggatgcacacaagccattgatgtttcagtggtgatgcttgctcgccccggtgcaaacatcattcttccaagaccaggtttcccactctatgaacttagcgcttcatttagaggagttgaagtgaggcattatgatctgcttccagagaaaggttgggaggttgatctagatgctgttgaagctcttgctgatcagaacactgttgctttggtgattataaatcctgggaatccttgtgggaatgtgtaca

SEQ ID NO: 155653 - DNA, 254 bp, Glycine max
caagaagcacaatttctctttctctctttttttgtgtgtccaaaatggctcctagttctgctcacaacaatgggttctatgtgcttatgctagttgggatagtggttagcactatggttgctacctgtgctggtagcttctaccaagactttgatctaacatggggtggtgaccgtgctaagatattcaatggtggccagcttctatcactttccctagacaaagtctctggctctggcttcaaatcaaagaaa

SEQ ID NO: 155654 - DNA, 255 bp, Glycine max
aatcttcatattcatcaaactcatcaaaatgaatctgtaccactcctccaccaccaccaccaccaccaccatcttcaccgtcatattcctcctccttgcaatattattcactctcacaccccacaaggccaacggtgccacgtgtcaccctgagcaagaagcgggcctgttgggcttcaaatccggtatccgatccgacccgtccggcctgctcagtaactggatatcgggtacggactgctgcacatggaccgg

SEQ ID NO: 155655 - DNA, 249 bp, Glycine max
tctggctctctaagaaacatggctgaagagggtcaggttgtcggcgtccacaccgttgatgcgttgaaccagcaactgcagaatggaaaagactcccaaaaattgattgtggtggattttactgcttcctggtgtggtccatgccgttttattgccccagttctggcagagattgctaggcatactcctcaagtgatcttcctcaaggtggatgtggatgaagtgaggcctgttgctgaggaatattcc

SEQ ID NO: 155656 - DNA, 252 bp, Glycine max
ctctcttgaacattcatggatccagtgagcgtgtggggtaacacgcccttggcgacggtggatcccgagatccatgacctcatcgagaaggagaagcaccgccaatgccgcggcatcgagctcatcgcctccgagaacttcacctccttcgcagtcatcgaggccctcggcagcggcctcaccaacaaatactccgaggccatgcccggcaaccgctactacggcggcaacgaattcatcgaccagatcgaa

SEQ ID NO: 155657 - DNA, 289 bp, Glycine max
  unsure (1)..(289): unsure at all n locations
tcgcacgcacgctttcgtgatctcggtcttcggtaccccttgttcttctcccaccaactttaccgtgggcnncctcgatcatgtctcacttcaanggcaagtaccatcatgagcttattgccaatgctgcttacattggcactcctggaaagggtattctggctgctgatgagtcaacagggacaattggcaagcgtttggccagcatcagtgtagagaatgttgaatccaacaggcgtgctcttagggagctgcttttcaccgctcccggtgctcttaaatatctcag

SEQ ID NO: 155658 - DNA, 262 bp, Glycine max
agaaaatctctggcttatggtggtttgtcgcgtggccttcatgaaggtgcaaaagtgattgagaagcatgctgcacaactctgtgttcttgcagaagactgtgaccagcctgactatgttaaactggttaaggccctttgtgcagagcacaatgttagcctgctgacagttccgagtgcaaagacccttggagaatgggctggtttgtgcaagattgattccgaaggaaaagcaaggaaggttactggttgctcctgtgtgg

SEQ ID NO: 155659 - DNA, 214 bp, Glycine max
ctctagcattattccataattgaatcaatttcatactggatccaagctaaaggaatgttatggtaaaacttcgtttgaaacgatagtggtaaaaatcaacgttcgactttaaagacatgattagattagctgtggattcttacatccgccattttttctagtatatagagatgaacatgctcttgactcgacatcgtttgttctgttccacaca

SEQ ID NO: 155660 - DNA, 256 bp, Glycine max
agaaaatctctggcttatggtggtttgtcgcgtggccttcatgaaggtgcaaaagtgattgagaagcatgctgcacaactctgtgttcttgcagaagactgtgaccagcctgactatgttaaactggttaaggccctttgtgcagagcacaatgttagcctgctgacagttccgagtgcaaagacccttggagaatgggctggtttgtgcaagattgattccgaaggaaaagcaaggaaggttactggttgctcct

SEQ ID NO: 155661 - DNA, 256 bp, Glycine max
gatttggacattttgctatcgcaactccagatgtttacaaattggttgaagacatccgggctaagggtggaaatgtcaccagggagcctggtccagttaagggtgggaaatctgttattgccttcgtgaaggatcctgatggttatgcttttgagctcattcaaagaccttcaacccctgaaccattgtgccaagtaatgcttcgcgttggtgatttagagcgctcaattaagttttatgaaaaggctttgggttt

SEQ ID NO: 155662 - DNA, 259 bp, Glycine max
atttctacgagaatggagtttacactagtgacatttgcggtacacttcccaggatgtgaaccatgccgtccttgctgtggggtatggagttgaaaatggcgtcccatattggctcataaaaaattcatggggagaaagttggggtgagaatggctacttcaaaatggaattggggaagaacatgtgtggtgttgcaacttgtgcgtcttatccagttgtggcataaattgcataagaatatggtccctggtgactacca

SEQ ID NO: 155663 - DNA, 260 bp, Glycine max
caccgattgctagaatggaatttcgatgctcagtcatctcttttaccattctcttctctcttgctcttgcaggagagagccatgtccatgcatcgctacctgaggaagattattgggaagctgtttggccaaacactcccattcccactgcactgcgagagcttctaaagcctctccctgcaggtgttgaaatcgatgaactccctaagcaaattgatgatacacagtacccaaaaacattcttctataaagaagacctt

SEQ ID NO: 155664 - DNA, 260 bp, Glycine max
gaaccaccactaccttatccatttccactcctcaccaagccacaccatggcctcaaccaacgccctctcttcagcttccattctacgctctcccaaccgccagtctctgaccagaagagcgaaccacaacggaagagtaaattaccgtcaaccgaatagccgtttctccgtcaaagcctccgccaaagagattgcctttgaccagcattcccgctctgctatgcaggccggcattgacaagctcgccgacgccgtcgggc

SEQ ID NO: 155665 - DNA, 141 bp, Glycine max
gtcatgggcactgtcaagatcggaatcaacggatttggacgaattggccgtttggtggccagggtggctctgcagagagacgatgttgaactcgttgccgttaacgatcctttcattaccaccgattacatgacatacatg

SEQ ID NO: 155666 - DNA, 254 bp, Glycine max
tttggaattcacgaagaaatgttgaaggacagtgtgagaaccaagacatatcaaaatgttatttatcagaacaaatttttattcaagaataaagtagttcttgatgttggtgctgggactgggattttatcactattttgtgccaaagcaggggcagaacacgtctatgcggttgagtgctcccatatggctgacatggcgaaggagattgttgaagctaacggttactctaatgttgtaacagttttgaaggg

SEQ ID NO: 155667 - DNA, 253 bp, Glycine max
gagaattagtgcatgtgaagattccagcaggcaagcgatgtgggtttgtccaattcgcagacaggagctgtgccgaagaggcacttcgggtgttgaatgggaccctgttgggtggtcaaaatgttcgtctttcatggggccgcagtccttcaaacaaacaggctcaggcagatccaaaccagtggaatggtggtgctggttctggtggtggatactatgggtatgctgcacaaggttatgaaaattatgggta

SEQ ID NO: 155668 - DNA, 258 bp, Glycine max
caccatcaataaggtgactggtgcttttggacacacgccatggctcttgggtgccaacttgaaccattatcaccttgagaggttttactggttgatgtgtgtacttagtggactcaacttcgttcattttctcttctgggccaattcctacaaatacagatgttcaaccaaaccgggatatactagctagaacgtacaaacctacctgcatttatgaatctatttggatataaaagtagaagtgcttttttgagagtt

SEQ ID NO: 155669 - DNA, 253 bp, Glycine max
ttctcacactcattccgtgctctaaatctcaaattctagggttagggttcccaatttctccgccaatcagaagatgacttccaccggtggttctaccaagggcggaaggggcaagcccaaagcctccaaatccgtttcaagatcgcagaaagctggtctccaattccccgttggaagaatcgctcgattccttaaggctgggaaatacgctgagcgtgttggtgctggtgctcctgtgtacctctctgcagtg

SEQ ID NO: 155670 - DNA, 194 bp, Glycine max
ctgaaaatggatcgagaatggggatcgaagccggggagcggaggtgcggcgtcggcgcagaacgaagccatagaccggcgagagcgtctccggcgactggctctggagaccatagacttggcgaaggatccctatttcatgcgcaaccacctcggaagctacgaatgcaaactctgtctcactctccacaacaa

SEQ ID NO: 155671 - DNA, 245 bp, Glycine max
cgctctgtttctgtctctgtatttgcggctgaggattccgaacgagcgaccttcttcgattctcgcaaagttttagtcatcatggctaaggaaaagactcacatcaacattgtcgtcattggacatatcgactctgggaagtcaactaccactggtcattttatcaacaagcttggaggtattgacaagcgtgtgattgagaggttcgagaaggaggctgctgagatgaacaagaggtcattcaa

SEQ ID NO: 155672 - DNA, 251 bp, Glycine max
atcgtgtctgattcgtttggaactgtacaagacccagcttcaagagctggcccagcggagtgcttcaacctgccttcctacacgtgtattcggcaaggtcccgatcacgcgccaaggttcaaggccaccgtcaactttaacggcgagatcttcgagacccctcactactgctccactctccgtcaggccgaacactccgccgccgaagccgctctcaattccctctcccaccgtggcccctcccattccct

SEQ ID NO: 155673 - DNA, 256 bp, Glycine max
ggctttcagagctgaatatgaattcccagaatggatttctccgcaggccaagaatcttatttcgaatctcctcgttgctgatcctggcaagaggtattccattcctgatataatgagggatccttggtttcaagttgggttcatgaggccaatcgcgttttctattaaggagtcttacgttgaagacaacattgatttcgacgatgtggagaacaaccaggaggaggaggttacaatgaggaaacctgccaggccg

SEQ ID NO: 155674 - DNA, 250 bp, Glycine max
cgttgattccatatcgattcgcatttgcgtacacccctgaccccttgatttctctcagttccgttctgcatcatagagtatggccagccacgatcttcgattcttcgagttgaacacaggcgctaagataccttccgttggtttgggaacgtggctcgctgaacctggcgttgttgctcgcgccttggccactgcaataaacgttggatatcggcatatagattgtgcgcaaatttatggcaatgaaaag

SEQ ID NO: 155675 - DNA, 250 bp, Glycine max
ctcataacacaaagcacaaagcaaagctcatccttgagttaaaaaatggcagcagcttcttccatggctctctcatccccatccttggctggcaaggccgtgaagctgggcccatcagccccagaagtgggaagggtgagcatgaggaagaccgtcaccaagcaggtctcctcaggaagcccatggtacggcccagaccgagtcaagtacttgggcccattctctggcgagcccccgtcctacctaaccg

SEQ ID NO: 155676 - DNA, 250 bp, Glycine max
gttcagagattactagtatttgactacatggccaatggaaatttgagggactgtttagatggagtttctggaaaacatatcgattgggccactcgtgttatgattgcaataggagctgcaaggggcttggagtatctccatgaagcagctgctccaagaattcttcatagagatgtcaaatcaactaacattcttctggatgaaaattggcaagcaaaaataactgatcttggcatggctaaaaacttga

SEQ ID NO: 155677 - DNA, 249 bp, Glycine max
gagaaagatgtcgaagcgtggtcgtggtggttcggcggggaacaagttccgcatgtcgctgggtcttccagtggcggcgacggtgaactgcgccgacaacacgggggcgaagaacctctacatcatttcggtgaaagggatcaaaggccgtttgaaccgtcttccctcggcctgcgttggcgacatggtgatggccaccgtgaagaagggaaaacccgatctgaggaagaaggtcttgccagctgtcat

SEQ ID NO: 155678 - DNA, 247 bp, Glycine max
catttccctccccccactcccaccgccaacgccaaacaaaccctaaatctctctcgtcttcttcttcttcttcctccttcaaccatgagagagatcctgcacgttcagggaggccaatgcggtaaccaaatcggttccaagttctgggaggtgatatgcgacgagcacggcatcgatcctaccggaaagtacaacgacgaaggcaacagcggcatccaactcgagaggatcaatgtctattacaatg

SEQ ID NO: 155679 - DNA, 248 bp, Glycine max
  unsure (1)..(248): unsure at all n locations
tctttgcgcagttccctacctctcctttcaagatgcagatcttcgtcaagaccctcaccggaaagaccatcacccttgaggtggaaagctctgacaccatcgacaacgtcaaggccaagatccaggacaaggaaggaattcccccggatcagcaacgtctcatcttcgccggaaagcagctcgaggacggccgtaccctcgccgactacaacatccagaaggagtcaactcttcnnacttgtcttcgt

SEQ ID NO: 155680 - DNA, 270 bp, Glycine max
tgcagagtgcagagccttctctcctctattttggcttccaacctttttgctccattcattctcaacaacaaaccaatctctatattttgcttagacaatgagggggagcttgtggcaacttgggcaatcgatcactcgccgtcttgcccatggagataagaaggctgttgctcgccgatgttttgcctcagaagctgagctgaaaaagacagtgtttcatgacttccatgttgctcatggtgggaagatggttccatttgctggatggag

SEQ ID NO: 155681 - DNA, 269 bp, Glycine max
ccttcccatggccgttgggttcatgttgttgtacacaaagttgtccaatgttttgtcaaagcaagctcttttctacaccgtgattcttctattcattgctttctttggggctttcgggtttgtgttgtaccctctcagcaattatattcaccctgaggcatttgcggacaagcttctcaacatcctcggacctaggttccttgggccccttgcgataatgagaatttggagcttctgtttgttttatgtcatggctgagttgtggggga

SEQ ID NO: 155682 - DNA, 267 bp, Glycine max
gtgaggaacaagcaagtgcttctaaaggactatgttaccggttttcccaaagaatccgacatgaatattgtcgaaagtaccataacattgaagcttccacaaggttccaatgatgtcttgctcaaaaatttgtacttgtcttgtgatccgtatatgaggaatctcatgaacaagcccgaaggccctcccaatagtcgtgcttacactcctggctctccattaataggatatggtgtgtctaaagtcctggaatctgggcacccagat

SEQ ID NO: 155683 - DNA, 261 bp, Glycine max
cggctcgagaattataagcatgggtttgtggaacacaacgaatgcagtgtcttgccgctttcacaagtttggtgatgaccaaaagaatctggtcttccaaggtgatgccacgtcttcttccaggggcatagaactcacaaagttagacggtggaggaaaaccagtgggtggcagtgtggggagagtgttatactcttctccagtgcacctttgggaaagctctacagtggtcgcaagctttgaaaccgacttcaccttttc

SEQ ID NO: 155684 - DNA, 259 bp, Glycine max
ggccggtgtcgaaaagtttgtacagaaggatcaaccgggtattagcagagctcttgtggctggagcttgtatggcttattgattggtgggcaggagttaaggtccaaatattcacagatcatgaaacctttcgtttaatgggtaaagagcatgcacttgtgataagcaatcacagaagtgatattgattggcttgttggatgggtttcagctcagcgttcaggttgtcttggcagcactctagctgtgatgaagaaatc

SEQ ID NO: 155685 - DNA, 272 bp, Glycine max
ggaattctgctcgagtccgggttcacgtttcacaatcactttttgctcttctctcactcactcactcttcttcttcctcttcgtgtggttttttttctcgaactcgaacgaagatgcgtgagattcttcacatccagggaggtcaatgcgggaaccagatcggagccaagttctgggaggtggtgtgcgcggacaccgggatcgattcaacggggaggtaccaaggggacaacgagttgcaactcgagcgagtcaacgtctactacaatgaa

SEQ ID NO: 155686 - DNA, 252 bp, Glycine max
caactgtttatttgtcagcaggaactgcaacagctttgattcttataggaggggagaccatgaaactgttcttccaaatagtttgtggtcccacttgtacttcaaatcctttaaccacagtggaatggtacttggttttcacttctctatccattgtcctgtctcagcttccaaacctcaattcaattgcaggactctcactcatcggggcagtgacagccataacttactccaccatggtttgggtactct

SEQ ID NO: 155687 - DNA, 253 bp, Glycine max
ttcgattctcttctctgcaactatgcctaaccctaaggtcttcttcgacatgaccatcggcggtcaacctgccggccgcatcgtgatggagctctacgccgacgtgactccgagcaccgccgagaacttccgcgcgctctgcaccggcgagaagggcgccgggcggagcggcaagcccctccactacaaaggctcgtccttccaccgcgtgatcccgaacttcatgtgccagggcggcgacttcaccgccgga

SEQ ID NO: 155688 - DNA, 251 bp, Glycine max
cttactctagactcttccttttctcttctctgtctaaggggtgccctgagatcacattgaacaatggtgaaggctgtggccgttcttggcagcagtgagggtgtcactggaactattcacttcgttcaggagggaagtggtccaaccaccgtaactggatctcttgctggtcttaagcctggtctccatggtttccatgtccatgccttgggggacactaccaatggttgcctctcaactggatcacattt

SEQ ID NO: 155689 - DNA, 273 bp, Glycine max
ggatattctgaaatcccatccaatcgaaggctgtgaagtgtgtgatgcactctatccttctttctgcttgaacccataattccatgactcggcgttgctcccactgcagcaacaacggccacaattcccggacatgcccttcgcgtgggggcggaggtgtgaagcttttcggggtcaggctgacggatggatcaatcattaagaagagcgccagcatgggcaacctaaacctctcctccgccgccgcacatcaccattccattcatctccttc

SEQ ID NO: 155690 - DNA, 258 bp, Glycine max
ggctttgatttcgcttccgaagcgacaagcagcacccactctctcttctcggaccttccaaacatggaacgcatcgttggcggcaagtacaagctcgggcgcaagatcggaagtggatccttcggcgaaatctacctcgcgacgcatattgataccttcgagatcgtcgccgtcaagatcgagaatagtaaaacaaaacatccccaactgctttacgaggcaaagctctacaatattcttcaaggaggaagtggcatt

SEQ ID NO: 155691 - DNA, 252 bp, Glycine max
  unsure (1)..(252): unsure at all n locations
gaaaaaacgcacagctccagcgcagaggagcaggatccgacccggcgccacctggatcccccacccgggttaactgctgaagagttcgaggacctcaaaccctccgtgctggagcaccacacctactctgtcacacccacccgccaaagctcctccctcctcgcgcaggcnatccacgcgccaccacacgcggtgtggtccgtcgtgcgctgcttcgacaacccacaggcctacaagcacttcatcaagagc

SEQ ID NO: 155692 - DNA, 251 bp, Glycine max
gttttgaatcacaatggcagaggatgatggttacacaaaagatggaacagtagattactgtggaaatccagctaataaaaaggaaactggaacctggaaagcctgcccctttatcttaggaaatgaatgttgtgaaagattggcttattatgggatgagcacaaacctggtgctttattttaagaagcggctacatcagcatagtgctattgcttccaagaatgtctctaattggagtggaacttgctata

SEQ ID NO: 155693 - DNA, 253 bp, Glycine max
ggaattgttgtaactttttgattcctagattctctaaaattcgaaattctaatgtcgttaggggaaagagattgtttgtgtgtgagtgagtatggctggaaaaggcgagggtcctgctatcggaatcgatttgggaacgacgtactcttgcgtcggcgtgtggcaacacgatcgtgttgaaatcatagccaacgatcagggtaacagaactaccccatcctacgtggctttcaccgagcacagaacggttgat

SEQ ID NO: 155694 - DNA, 258 bp, Glycine max
tggttgacaatgcatgatgccccatcatctgctccacctgctggaagtcagcaaaatggggtgaatgttgctgagttaatagttggccgtggctttggaactgtcattagacatcgtgactttgaagagagatctaactattatgatgctcttcttgctgctgaatcacgtgcaatttctggaaggaaaggcacccactctgccaaggatcctccagtgatgcatataactgatttgaccacggcatcggctaagaaa

SEQ ID NO: 155695 - DNA, 257 bp, Glycine max
ggatgaagctcgttgcgccgagaagtatagagagatatgggccgagtatcgtaaacttgttccatggagaatattgccttacgtttattaggatgaaaaaaaaaagggcttcaccatgaattcttcatcccttctctctctccagattaacagaagcaagctcatcctagagttttaaaaatggcagcagcctcctccatggctctctcttccccatccttggctggcaaggccgtgaagctgggcccatcagcccc

SEQ ID NO: 155696 - DNA, 254 bp, Glycine max
tagagagagacgcttcgcaaatctcaatcgaatctcagaaaaatgagagaaatcatcagcattcacataggtcaggccgggatccaggtcggaaactcctgctgggaactctactgcctcgaacatggcatccagcccgacggcatgatgccttctgactccaccttcggtgtagcccacgacgccttcaacaccttcttcagcgaaaccggatctggcaagcacgtcccccgtgctgtcttcgtcgacctcga

SEQ ID NO: 155697 - DNA, 248 bp, Glycine max
ctccttttagcaagttaacaacacttttgtcttcgttccattatctagttctcaattctcttcaccctttgcctctgaaagaaatgggtagtcttgaagcggaaagaacaacagtaggattggcagcaagagacccttcagggattctctccccatacacctacaatctaagaaacacaggccctgatgatgtttacattaaagttcactactgtggaatttgccattctgatctccaccagattaaa

SEQ ID NO: 155698 - DNA, 249 bp, Glycine max
gttcatctgcacttgtagtggaaaagcactttttcttaatttggtgatggaatatgttccagactcgatacatagactctggaacatattccatcaccaaattaagaaaaagttccagagtctatgtatcgagtctcaaagttctatagtaatactaatcagagcatgccacttatttatgtaaaactttacatgcgccagattttcagggggctggcttatatccacactgttcctggaggttgccac

SEQ ID NO: 155699 - DNA, 248 bp, Glycine max
cttttccgtgattggaatattggacaggccaagtccacagttgctgcttcagctgctgcagctataaatgctagttttaatattgaagctctacaaaatcgagttggtactgaaactgagaatgtgtttaatgataccttctgggaaaacttgagtgtcgttgtaaatgcactggacaatgttaatgcaagactatatgttgatcagagatgcttgtatttccaaaagcctcttcttgagtctggaac

SEQ ID NO: 155700 - DNA, 250 bp, Glycine max
cctgcacagactcaggggatttcgatttccaagaccatgcagttggaaagttctattcaaacccctggttccagtactttaaccgaaacccctagttctattcacgcgattccgcagaaccagagcgtcttctccagagaattgaacttttctgagtatggtttcgacccaaagactgggaacaatcagaatcaccattctctgaagccggaatccggcgagattctcagcttcggcgagagcaagagaa

SEQ ID NO: 155701 - DNA, 250 bp, Glycine max
gtcaccaacaacgaggagttgaaaacaattgggtccaacctttggaaggaagagccaaagtgtctagaatggcttaactcaaaagaaccaaattcagtggtttatgtgaactttgggagcattatggtcatgactagtgaccaattgacagagttagcttggggacttgcaaatagtaacaaaaactttttgtgggtcattaggcccgatcttgtggcagggggaattaattgtgcgttacccaatgaat

SEQ ID NO: 155702 - DNA, 266 bp, Glycine max
ctcccctttgccgctgttgttgttgctgcaccaccgaacaacttcccctgtaaatcgcgtttcgtttgtgcaaggttttaaaagatggctgatgctgaggacattcaacctcttgttgttgataatggaactggaatggtcaaggctggttttgcaggtgatgatgctcctagggccgtgttccccagcattattgggagaccacgccatactggtgtaatggttgggatgggtcagaaggatgcttacgtgggtgatgaagccca

SEQ ID NO: 155703 - DNA, 264 bp, Glycine max
gcagcagggagctctgccgcctccaacaagacagagttcagaacacaaaccctcgaaccgaacgtttttgagggttgatagagcacgatggttcagtacaattttaagaagattaccgtggtgccaaatgggaaggatgtggtcgacattatcctctctcgcacccagcgtcagacaccaaccgttgtgcacaaaggatatgcgatttcacggctgcgccaattctacatgcgcaaagtgaagtatacgcagcagaattttcac

SEQ ID NO: 155704 - DNA, 261 bp, Glycine max
caaaaatgtcgaagttaatcttcgtgttccttgcactaattcctcttctctgcacctccttctcgccagagaaaccctcagatcggcgcatcctcgttttgctcgatgacttcgccatcaaatcctctcactctctcttcttcaactccctcaaatctcgcggcttcgatctccaattccacctcgccgacgaccccaaaattgcgctccagagatacggccagtacctctacgacgccctaattctcttttcccccacca

SEQ ID NO: 155705 - DNA, 252 bp, Glycine max
  unsure (1)..(252): unsure at all n locations
cagatagatacacacactctctcttttccactccctctttcgccgccaaaacanaccaaacccacacttcactctcactctcatccaattncnaatnntcgttgttggtgcactgaatgatcgagtaccggatgaacctgtggaccgacgacaactcctccgtcatggaggcctncatgagctcctccgacctctcctccctctggctccccacgccgcaatccgccgcctctactaccactcctggactgg

SEQ ID NO: 155706 - DNA, 247 bp, Glycine max
gctgttcagagttgtgatgcttcactgttgctggactccacaagaaggagcttgtctgagaaggaaacagatagaagctttgggttgagaaatttcaggtacattgagaccatcaaagaagctttggaaagagaatgccctggagttgtttcatgtgctgatatcctcgttctctctgccagagatggcattgtttcgctaggaggtccccatatccctcttaagactggaagaagggatggtagaa

SEQ ID NO: 155707 - DNA, 245 bp, Glycine max
ttcagcttttccctcgttgaaatgaaaatgggttcttctttgtggactttgtgtctaattttggcttcactagcctcttctgcattctgtgcctttccacggaggccagtggatgttccattcggcagaaactacgttcccacttgggcttttgatcacatcaaatacttcaatggaggttctgagattcaacttcatcttgacaagtacactggtactggcttccagtccaaagggtcatactt

SEQ ID NO: 155708 - DNA, 246 bp, Glycine max
gcatttgctaatggattgcagactattaacaatgatgatttggaggagatccgtgagcttggttctggaacctatggagctgtttatcatgggaaatggaaaggttctgacgttgccattaagagaataaaagccagttgttttgctggaaggccatctgaaagagcaagattgatcacagatttctggaaggaggcgttgatgttgagttcattgcatcatccaaatgttgtctccttttatggc

SEQ ID NO: 155709 - DNA, 260 bp, Glycine max
gaacaactttacagcaccagttggagcacgatccagcactacagtttgcgcagttgctgagcctgataggcctctgtggttcccaggcagcacccctcctccatggctagatggcagtttgccaggagattttggctttgatcctctaggtcttgcatctgatcctgagagcctgagatggaatgtccaagcagagcttgtgcactgcagatgggccatgttgggagctgctggcatgttcatcccagaattcctcacaa

SEQ ID NO: 155710 - DNA, 263 bp, Glycine max
accgcggctatgtcagaaatccttggaaaccccgttaacctcagatgcgcaaccaggtctgctccatcaccaactacacctgccaccttcaagaccgtcgcacttttctccaagaagaagccagctccacctccaaagaaaaagcctgccgctgtatcccccgccaatgaggaactcgccaagtggtatggtcctgacagaaggatcttcttgcctgagggtctcttggaccgatctgagatccccgagtacttgaccggaga

SEQ ID NO: 155711 - DNA, 263 bp, Glycine max
atcaagatctctctctctgtaatcgaaaatgagcaagggaccgggtctctttaccgatatcggcaaaaaatccaaagatcttttgactaaggactacaactccgatcagaaactcaccatttcctcatacagcatctccggagtggccctcacttcaacatctgtcaagaaaggaggactctccactggggatgtggcagcactgtacaagtataagaacactattattgatgttaaactggacaccgcatcaactatctcca

SEQ ID NO: 155712 - DNA, 245 bp, Glycine max
aagaaagccccgaaagttgaaactgctcctgctaaagagaagcccaaaacacctcctgccactctgaagtctcccactgagccccagcttcctcctaaagagagagacagacgagttcctatgacaaggcttcggaaacgagttgctacacggctgaaagattcccaaaacacatttgctatgctgactaccttcaatgaagttgatatgactaatttgatgaagctccgttctgattataagga

SEQ ID NO: 155713 - DNA, 244 bp, Glycine max
gtcttggtttaataatgtctgggaccattcgagtgcatgatgacctgcttctggctgcctctgaggctttggctgcacaagtgagccaagagaactttgataagggactcatatacccaccattcaccaacataagaaagatttcagcacacatagctgccaatgttgctgctaaggcttatgagcttggcttggccactcgccttcctcaacctaaagatttggtgaagtttgcagagagctg

SEQ ID NO: 155714 - DNA, 245 bp, Glycine max
ggcaaacggacggcgggcgcacgcgtcgcttctagcccggattctgacttagaggcgttcagtcataatccaacgcacggtagcttcgcgccactggcttttcaaccaagcgcgatgaccaattgtgcgaatcaacggttcctctcgtactaggttgaattactattgcgacactgtcatcagtagggtaaaactaacctgtctcacgacggtctaaccccagctcacgttccctattggtgggt

SEQ ID NO: 155715 - DNA, 247 bp, Glycine max
caaggaagtcccctaatcagaaccagagatggacaccaaacccaccgagatcagcagcggcaagatgttcggaggttacaacaagagattcaagcatttcagccttaccctgggatgctccatgaacttccacatctacttccctccatctccttctccctctcacaaattccctgtgctgtactttctctctggcctcacttgcaccgacgagaacttcatattcaagtcgggtgctcagcgtgcc

SEQ ID NO: 155716 - DNA, 255 bp, Glycine max
acgctcaggcggttttgcgacagcatcttctgttggcgtatgttgaggagattggacgtgatgctaggcgtggtgtagaggggagggctaggatgaagttcggcgccttaggagcttgtgccttggctggtacagggcttcctattgatcgattcatgacttctgaagcgttaggatttacggctcccttgatgaatagtatagatgcagtttcagaccgagatttggtgctggagtttctttctgctaatgcca

SEQ ID NO: 155717 - DNA, 264 bp, Glycine max
cgtacacgcacattctcctcaaagacaacaatggcaccaacagccaagactctgacttacctggcccaggagaaaaccctagaatcgagcttcgttcgggacgaggaggagcgtcccaaggttgcctacaacgaattcagcgacgagatcccagtgatttctcttgccggaatcgacgaggtggatggacgcagaagagagatttgtgagaagatcgtggaggcttgcgagaattggggtatattccaggttgttgatcacggt

SEQ ID NO: 155718 - DNA, 260 bp, Glycine max
ggttatcatttctccatttccattttctctctcacttttcaagaatcgtaagctatgggaaagtcttacccaactgtgagtgctgattaccagaaggccgttgagaaggcgaagaagaagctcagaggcttcatcgctgagaagagatgcgctcctctaatgctccgtttggcatggcactctgctggaacctttgacaagggcacgaagaccggtggacccttcggaaccatcaagcaccctgccgaactggctcacag

SEQ ID NO: 155719 - DNA, 251 bp, Glycine max
caacatgataaacatggacgacacatgcgaacttgttgccaacaataatgttggttttccaactgatgcagctaataacggtatccataaaccttctttgttgggtgccaataagaccacccttggccaccacgttgcacggcgtctagttgaaatcggtatcaaagacgtattcaccgtccctggagatttcaaccttatccttcttgattacttagtagcggaacctgagcttaacctcataggttgct

SEQ ID NO: 155720 - DNA, 251 bp, Glycine max
gaaatacttgctgaaattagagatgcggttttttcatttattcgtaaaatggaacctaggcgattaatggataccatgcttgtttcccgtgttagaatcttgtatataagatctttgcttgctagatcaccagagttgcaatccattaaggtattgccagttgagtgcttcttgaaaaggccaacactggacccagtagaagttccagccgagcaagcagtcctggaagatcttccatgcaatatgttgat

SEQ ID NO: 155721 - DNA, 252 bp, Glycine max
cctaaccctagaagaagaaaaaaaccacaaccaccaccatctagggtttttctttttctcatggctagtttgtcaactaggattttcttcatcatgtcccttgtgtgcctggctctcggtccaatggcacaaggggaaatgacatgtggccaggttgtgagcaacctgaccccatgcatctcctatgtggtgtatggtggaaccaatgttcctgaacagtgctgcaatgggataagaaatctctatggcatg

SEQ ID NO: 155722 - DNA, 253 bp, Glycine max
gcattgactcatctttttgatttggatcaccatggaacataaattagcaacaactgaaggacaacccataagatgtaaagcggcggtttgtcgcaaagctggtgagccactgggtattgaggagatcatggtggcgccaccaatgcctggtgaagctcgcattcgtattatatgctcctctctctgtcgaactgatatcagtttccggaacatgcaggggcctccggcgaatttcccaacaattctgggtcat

SEQ ID NO: 155723 - DNA, 253 bp, Glycine max
acgattgttgcaattgtggttccaattacggtcgctgtgcttatatttatagtcggaatgtgtttcttgagtagaagagcaaggacgaagcagcagggttctgtaaaggaaggaaaaactgcgtatgacatccccaccgtggactccttgcaattcgatttcagcacaattgaagcggccacaaacaagttctctgccgataacaagttgggggaaggtggatttggtgaggtttacaagggcactctttcaa

SEQ ID NO: 155724 - DNA, 251 bp, Glycine max
gaacgaatcgaaaaaagaaagatcatggcgatggcaaacttggctcgacggaagggttacgccgtcgttttgtcgtcgaggtcgtcgctttgtctgacaaggtggagggggttcgcgtccggatctgacgaaaacgacgtcgtggtcatcggcggcggtcccggcggctacgtggcggccattaaagcggcgcactgggtctgaaaaccacttgcatcgaaaaacgtggcactctcggcgtcacctgcctc

SEQ ID NO: 155725 - DNA, 250 bp, Glycine max
cgctcttcgttatcttttctcagactccgcggcgtagatccgaggagttcgggaaatcctaactcatcatctcaactcaagtcatggctggacttgcacctgagggatcacagttcgatgctcgtcactatgattctaaaatgagtgacttactttcatctgatggacaggacttcttcacatcctatgacgaggtttatgatagttttgacgctatgggtttgcaggaaaatcttctcaggggaattta

SEQ ID NO: 155726 - DNA, 251 bp, Glycine max
aattcgcagagcaactcaacacaacgaaccaaaccaacaatgtcgcagccgcagcctcagtcgcagccgcaacacgggccagcggcgctggagcaggtgcagtgcttcggtcgcaagaagacggcggtggccgtgacctactgcaagcgcgggcgcggcctcatcaagatcaacggctgccccatcgagctcgtcgagccggagatcctccgctttaaggccttcgagcccatcctcctgttgggaaagag

SEQ ID NO: 155727 - DNA, 251 bp, Glycine max
ccgccgccgtatatcgtaaaatcttctcctactgcctccccgccacctccagctccaccggccgcctctccttcggcaccaccaccacttcctacgtcaagtacacccccttctccaccatctcccgcggctcctccttctacggcctcgacatcaccggcatctccgtgggcggcgccaaactcccagtctcctcctccaccttctccaccggcggtgcaatcatcgactccggcaccgtgatcacccgc

SEQ ID NO: 155728 - DNA, 241 bp, Glycine max
ggaagaggaagaagaagatgatcaacaacaacaacaacaacaagcaacacagcaacaccaactgaaacatcatcatcagaatcatcatcatcatctacgaccctaaattttttcactttctctctctctctctctctctctccctccctctctctgtctgtgtctgtgtctgtgtctgtgtcttttttttttttttttttaagtggggggaggggggggacataaagaatttgaaggaaac

SEQ ID NO: 155729 - DNA, 249 bp, Glycine max
atttcgcatcttctccttctcattccaactccaaaatacacacacacgatggaaaccttcctcttcacctcagaatcttgaaacgagggccaccccgacaagatctgtgaccaggtttctgatgccatcctcgatgcttgcttggagcaagacccagagagcaaggttgcctgcgagacctgtacaaaaaccaacatggtcatggtctttggggagatcacaaccaaggccaaggtgaactacgagaaa

SEQ ID NO: 155730 - DNA, 246 bp, Glycine max
gtgcaatttcgtcctctaacactcttccaaatcatggctagctcactgcttgtgagggttgccagctgcatggttgtggtgtggatgtttagttttgggcacataattcccttggcagaagctgaaattccatgtggcagggtgcaaatcactgtggctccatgcatagggtacctaaggggtcctggtggaggtgtccctgcaccatgctgcaatggggttaagagcataaacaaccaagccaaa

SEQ ID NO: 155731 - DNA, 246 bp, Glycine max
agtttgcagagggagaggctccggttcaatcaagcaatgaaaccatacatgctctccttcagtgcgtgccttatttgtctcaccaaaactgtactcgatgcttggagtacgctatgtccaggatttcatattggtgtgatggaaaaacaggtggttggtatctaggacgaagctgttctttaagatatgagacctacctcttctttgagctcatattccacgatgcaccagcaccacagccttccc

SEQ ID NO: 155732 - DNA, 245 bp, Glycine max
agttctctcacacactcattcggtgctccgaatctcagattctagggttagggttcccaatttctccaccgatcagaaaatgagttcaactggtggttctaccaagggcggaaggggcaagcccaaagcctccaaatccgtttcaagatcgcagaaagctggtctccaattccccgttggaagaatcgctcgattccttaaggctgggaaatacgccgagcgtgttggtgctggtgctcctgtgt

SEQ ID NO: 155733 - DNA, 242 bp, Glycine max
atagttttgcattgttttacttaatctacaatggctgcttcaacaatggctctctcttcatcatcattggctggccaagctatcaagcttgccccctccacccctgagcttggtgttggaagggttagcatgaggaaaacagcctccaaaactgtttcctcaggaagcccatggtacggcccagaccgtgtcaagtacttgggcccattctctcgtgagcccccatcctatctcactggtga

SEQ ID NO: 155734 - DNA, 245 bp, Glycine max
agtgaaagagaatccgaggcgaagagaagagaaaaattaagatggaggggaaggagcaggatgtgtcgctgggagcgaacaagttcccggagagacatccgattgggacggcggcgcagagccaagacgacggcaaggactaccaggagccggcgccggcgccactggttgacccgacggagtttacgtcatggtccttttacagagcagggatagcagagtttgtggccacttttctgtttcta

SEQ ID NO: 155735 - DNA, 245 bp, Glycine max
caattcacaaccgaaacagtttccatctctctcacaaaatgacaacaatatcaaattgctcccttctcttcctcttcctcttcctctccaccctccacatagcttccaccctctcaacccccaccaacttcatcaagtcctcctgcagcaccacccagtacccagccctctgcatccagtccctctccgtctacgcctccaccatccagcaagacccccacgagctcgtccagacagccctctcc

SEQ ID NO: 155736 - DNA, 244 bp, Glycine max
caccgcagctatgtcagagatgcttggaaaccccgtgagcctgagaggcgccaccaggtctgctccatcaccgtctacacctgttactttcaagaccgttgcgcttttctccaagaagaaggcagcaccacctcctccaaagaaaaagcctgctgctgtatcccccgccaatgaggaactcgccaagtggtatggtcctgacagaaggatcttcttgcctgagggtctcttggaccgatcagag

SEQ ID NO: 155737 - DNA, 242 bp, Glycine max
gaggaatcctgcaagaatccaaaggaagacatgaagacaaaaatttcaagagtttatatgaggacagaagcatctgatacaagccttattgtgaaagatggatatcaatggaggaaatatggacaaaaggtgaccagagataacccttctccaagagcatatttcaagtgctcttttgctccaagctgcccggtcaaaaagaaggtgcaaagaagtgtggatgatcaatctgttctggttgc

SEQ ID NO: 155738 - DNA, 241 bp, Glycine max
ggcatggcactctgctggaacctttgacaagggcacgaagaccggtggacccttcggaaccatcaagcaccctgccgaactggctcacagcgctaacaacggtcttgacatcgctgttaggcttttggagccactcaaggcggagttccctattttgagctacgccgatttctaccagttggctggcgttgttgccgttgaggtcacgggtggacctgaagttccattccaccctggaaga

SEQ ID NO: 155739 - DNA, 242 bp, Glycine max
ccgccgccgtatatcgtagaatcttctcctactgcctccccgccacctccagctccaccggccgcctctccttcggcaccaccaccacttcctacgtcaagtacacccccttctccaccatctcccgcggctcctccttctacggcctcgacatcaccggcatctccgtgggcggcgccaaactcccagtctcctcctccaccttctccaccggcggtgcaatcatcgactccggcaccgtg

SEQ ID NO: 155740 - DNA, 156 bp, Glycine max
ccggaaagttcgatttgaccgtttccgtcgccggagattccctcacgttacacaccggtgttgattcgtcgaggattgcggacaccattctggattcctctccgctttcgatttattcagtcgacagcgttcttcttccgcaggaactgttcgcga

SEQ ID NO: 155741 - DNA, 240 bp, Glycine max
cagatatcttgctagggttttaggaaaagacactgtctcgcgagtgggcacaggttacagcaatggctttctttggtagaattgggaatttattaagacagacagcaagcaggcaggttagttcagaattgcgatcatccccttcgttttttcaggctatacgcagtatgtcatctgctccaagcacaaagctgtttatcggaggtgtttcatattctactgacgagcaaagtttgaggg

SEQ ID NO: 155742 - DNA, 299 bp, Glycine max
  unsure (1)..(299): unsure at all n locations
gtgttttcggagttattcggagtgtttgggttncacgtagaccacntggttntgcntttattgactttgatgaccgcagagatgcacaggatgctatccgngaatnggatggnatgnttngaagnatgatgttgttggaatgtantaganttnagatcaannttanaatgtgcatatatntgnatatttgctacattctntctnatctgctaatntgntattgttttaacccccanngtnttttccggntgatatgttgaagggttttcctcaactagctagttaagtctctttgtggg

SEQ ID NO: 155743 - DNA, 268 bp, Glycine max
gaaaggctctggggtgaaaacttttttgatccagccacaaagaaatggaccagcaagaatagtggttctgctacctgcaagcgtgggtttgttcagttctgttatgagcccatcaagcagattattaacacttgtatgaatgatcagaaggataagctgtggcctatgctgcaaaagcttggggtcaccatgaaatctgaggagaaggacctcatgggtaaagcattgatgaagcgtgtcatacaaacctggcttgcagcaagtagtg

SEQ ID NO: 155744 - DNA, 294 bp, Glycine max
cactgccatgttcttcgaatcccgatccctcctcttcccgctccttttctctctcttccttgcttccgccttcgcttcagagtcagatcacaagtatcaacatgatgaacaagttaacctttgggtgaacaaagttggtccttataacaatccacaagaaacatacaactattacagcctcccattttgtcatccatctagtagtgctagtgctgcacacaaatggggtggtcttggtgaggtcctgggtggcaatgagctcatcgatagccaacttgaaattaagttccaaag

SEQ ID NO: 155745 - DNA, 293 bp, Glycine max
catcaaaaaacacacacgacacactcccatacacacacgttgtctcgcacacattccttcattccgcagcagcaaacatctttaccttaaacgacaacaatggccgatgccgaggatattcaacccctcgtttgcgataatggaaccggaatggtcaaggctggttttgccggagatgatgcgccgagggcggtgttccccagcattgtggggcgtccacgtcacacgggagtgatggttgggatggggcagaaggatgcgtatgttggggacgaggctcaatccaagagggg

SEQ ID NO: 155746 - DNA, 293 bp, Glycine max
gccaattgccatttcaatccccagtttcttctacaacgtcctcttacgagcagatcccaattctccttcccagtttcaaaccctaattccctcattcccatggcctcagaagagcccactgtcgcggtggaacccgctcccgaacctgccaccgccgagcctcccccggaggagaaggaggagcccaaacctgaagccaaggctaagaaaaccaaggaacccaaacctaaaaaggtttccagaccacgcaaccctcccactcatccttcctacgaggagatgattagagacgc

SEQ ID NO: 155747 - DNA, 290 bp, Glycine max
aaccctgactgattctcttgtggctgctgctggtattattgctcaagaagttgcaggtgatgtccgtatgactgatacccgtgcagatgaagctgagcgtggtattacaatcaagtctacgggtatctcactctactatgaaatgactgatgaagctctcaagagttttaagggagagcgcaatgggaatgagtatcttattaatctcattgactcccctgggcacgttgacttctcttctgaggttactgctgcacttcgtattaccgatggagctcttgttgtggttg

SEQ ID NO: 155748 - DNA, 287 bp, Glycine max
gttcagcacaccggtggaggaagaggaaacggtcgagttttgttgggatttgatcactgcaatatcaatagccaatgttcatagattccacatattctggcccatcttccatgagtaccttctttcagttgctcagtttcccatgttctccccaatcccatttgtagaaaaaggtattttaggccttctcaaggtctgtctcaagctcttttctgcaccaagagacgaaaaacaagccgaggaacttattttcaagtccgtaaacttaatgtggaagcttgatatag

SEQ ID NO: 155749 - DNA, 295 bp, Glycine max
gaagttacaaagaaaatgacccatgtggtgtttattggtgaagggggaaaaaagacacgaatatctggtaacaaaaacttcatagatggaacgaacacatatagaactgccactgtcgctattcaatgagatcactttgtggccatcaatatggggtttgagaattctgctggacctcataagcatcaaacggtggcattgagagtccaagcagacaagtccatcttttacaattgctcaatggatgggtatcaagacacactttatgcacacaccatgcgtcaattctatagag

SEQ ID NO: 155750 - DNA, 288 bp, Glycine max
  unsure (1)..(288): unsure at all n locations
atgggagttacacagtgcacaatcgcgcatgcacttgagaagacaaaatatccagattcagatttatattggaagaaatttgaggataaataccacttttcatggccaatttactgctgancntaatagccatgantnatgctgatttaatcatcacnngtnnataccnggggattgnnggaccgaaaatnanggtnggccnngnnnngaanccngctggtttncccttcctgggtcccnaangggtgttcnangcnntgnagttttgnancccaggtcaatngnggc

SEQ ID NO: 155751 - DNA, 292 bp, Glycine max
ctcacagtacttttgcttctctcgaagatgtctctacgagtgctgaaccctaacgccgaagtgctgaacaaatcggcggcacttcacatgaacatcaatgccgccaagggtttgcaagatgtcctcaaaaccaacctcggtcccaaaggaaccatcaaaatgctcgttggtggtgctgacgatatcaagcttaccaaagatggcaacactctcttgaaagagatgcaaatccaaaacccgacggcgattatgattgctagaacggctgtggcgcaggatgatgctagtggtg

SEQ ID NO: 155752 - DNA, 290 bp, Glycine max
gagccagaagctggtcccaaccaaagatcacaaccccatcaagcgtggcttccggtcactggcttactttgtggaggacaattggaaacggatttgggttattctcctctggctttcaatttgtgctgcccttttcacttggaagttcattcaatacaagcaccgtgccgtgttcgacgtcatgggctattgtgtcacttcagccaaaggtgctgctgaaaccctcaagttcaacatggccttaatcctgttacccgtttgcagaaacaccataacttggctcagaagta

SEQ ID NO: 155753 - DNA, 278 bp, Glycine max
ctcattctactacaagtcagatgaggaacttcaaaaagaccccgagctccaagcttggtggaaagaacttgtagaggtgggtcatggggatttgaaggataagccatggtggcaaaagatgcaaactcgtgaagagttggttgaagcttccgctaccctcatatggattgcttcagctcttcatgctgctgttaactttggacagtatccatatggaggtttaatcctgaataggccaactattagcaggagattcatgcctgagaaagggtctcctg

SEQ ID NO: 155754 - DNA, 287 bp, Glycine max
gaaacgcttgcaagctaggatacatatttgtggaatgactggggatggagtgaacgatgcacctgccctcaagaaggcagacattggtatagctgttgctgatgctactgatgcagcccggagtgcatctgatattgttctaacagaacctggacttagtgttattattagtgctgttttgacaagccgagccatcttccagagaatgaaaaattatacaatttatgcagtatcaattacaattcgtattgtgcttggttttatgttgctggctctcatttggaagt

SEQ ID NO: 155755 - DNA, 291 bp, Glycine max
gggtttttgagtgcggtgcggcgatcctagcactctcttctgcagctttcgccgacagcttcattcaccatggctgagcaaaccgagaaggcttttttgaaacaaccaaaagtgtttctcagctcgaagaaaactgggaagggaaagagacccggaaagggtgggaaccgcttttggaaatccattgggcttggatttaagactcccagggaagccatcgaaggaacctacattgacaagaagtgccccttcactggcaatgtttccatccgtggccgtatcttggctgga

SEQ ID NO: 155756 - DNA, 297 bp, Glycine max
catccaccatggggttactacttagctatgctctgaacattactagtttgcttaccggtgtgctgaggctggcaagtttggctgagaatagtttaaacgcagttgaacggattggcacttacattgatttgccctcggaggctccctctatcatcgatgataatcgccctcctcctggctggccttcctcaggctcaatcagattcgaagatgttgttcttcgctacagagctgaacttcctcctgtgttgcatggcttgtctttcaccattttcccaagcgataaggttggcattg

SEQ ID NO: 155757 - DNA, 284 bp, Glycine max
ttctcgaccgattcggctcactctcagttccgttctgcatcatagagtatggccagccacgatcttcgattcttcgagttgaacacaggcgctaagataccttccgttggtttgggaacgtggctcgctgaacctggcgttgttgctcgcgccttggccactgcaataaacgttggatatcggcatatagattgtgcgcaaatttatggcaatgaaaaggagattggtgctgccttgaagaagttatttgctgatggtgtagttaagcgtgaagatatgtttat

SEQ ID NO: 155758 - DNA, 269 bp, Glycine max
gttcgctataatcacaatattgttctctatatttcgtcttgactttggttttgcacaacagggggatcttgacatatcaagatttggaggaaaaccaaatacaaatataggctatgctttcttaagtgccttgactcaagcatgtgcatcaccaactactgtctaaattgtgattccagctggcacataccatatgggtgctattgatgtcaaaggtccttgcaaggctcctattgaggttcaagttgatagaacaattcagcaactgc

SEQ ID NO: 155759 - DNA, 283 bp, Glycine max
aaactttcttagcaagatcactcctataccaataattaaggaactttttcgaactgatggcgaacagttcctcaagtatccaccacctaaagtgatgcaggtcgacaagtctgcatggatgactgatgaagaatttgcaagagaaacaattgctggtttgaatccaaatgtcatcaagattattgaggagttcccactaagtagcaagctagatactcaagcctatggtgatcatacctgtataataacagaagagcatttggagcctaacttaggtggtctc

SEQ ID NO: 155760 - DNA, 282 bp, Glycine max
gaaggtacgtggtttatgtcaaagaaggagtgtacgatgagaccgtgacagtgacaaagaaaatggtaaatttaaccatgtacggtgacggacagcaaaagagtatcgtcactggaaacaaaaatttcgtggatggagtcaggaccttccaaactgcatcatttgttgtacttggagagggattcttggggaaagacatgggattcagaaacacagccggtgcagagaagcaccaagcagtggccgcaagagtgcaagccgaccgagccatattcttcaact

SEQ ID NO: 155761 - DNA, 281 bp, Glycine max
ctccactacgattcgctcttccagaagcttccagaaaactccagatggcgcgtacaaagcaaacagcccgtaagtcgaccggcggcaaggctccccggaagcagctggcgactaaggccgcccgcaagtctgctccggcgaccggcggagtgaagaagccacacaggttcaggccaggaaccgtggccctgagggagctcaggaagtaccagaagagcacggagcttctgatccgaaagcttccgtttcagcgtttggttcgtgaaatcgctcaggacttc

SEQ ID NO: 155762 - DNA, 278 bp, Glycine max
catttacacacctctccaacctttcactttcagctttatttgaatccctctctctcctttccaaatggccagcgttgaggttgcacatcaaacaccaacaacagttccagaaaatgaaacaaccgaggtaatcaagacccaggaaacaaccccggaaccagtaccagccactgaggctcctgcaacagaacaagcagcagctgaggttcctgctcaagaagaacaacaagcaactgaggttcctgccccagaatcaaccaccgaagcaccaaaggaag

SEQ ID NO: 155763 - DNA, 281 bp, Glycine max
cacttgccttatttttggttttgagattgagctaaaggccaactcaaccatcgaatttgttggtgattgaaagagaaggaagaagaagcaggaaatggaagcagtgagagctggtcgagaaggagcaataggtctaggtcaaggtgatggcgtagcaaggacagcactgagactgaactcaccaaaatccgtctcctcagggcaattgttgaaacccgtgatccctcttccaaggtaaaccacactattcttgtgcctcaacctctataggtcaattagtc

SEQ ID NO: 155764 - DNA, 282 bp, Glycine max
caataatgagtttgatagcttcgaggacgtgcgttgtctctttgatggcggagtttatctccctacagatgtactcagcaaaattagccccataccggtgctcaaagaaatcttccgcactgatggtgagctagccctcaagtttccaccacctcatgtcatcaaagttcgtgagtctgaatggatgactgatgaagaatttggaagagagatgcttgctggtgttaatcctggcatgattcaacgccttcaagagttccctccaaagagcaagctagatcc

SEQ ID NO: 155765 - DNA, 285 bp, Glycine max
cctctctctatctctcacacacactttctctctctctctctctcacccagatcttgtagcaatggcgagcgctcccactccacgcgaagagttcgtgtacatggcgaactgtgcggagcaggccgagcgctacgaggagatggtggagttcatggagaaggtctccgcctccgccgagagcgaggagctgaccgtggaggagcgtaacctcctctccgtcgcctacaagaacgtgatcggcgctcgccgcgcctcctggcgcatcatctcctcaatcgagcagaa

SEQ ID NO: 155766 - DNA, 274 bp, Glycine max
ctttagggatgaaaattaagactgacacacctgtggcaaagaaggctagagaaggagtgatggagtttttattgatgaatcatccattagattgcccaatttgtgatcagggtggagaatgtgatcttcaggatcagtcaatggcatttggctctgatcgtggacggttcactgaagtgaagagatctgtggttgataaaaatcttggacctctggtgaagactgtgatgactcggtgcattcaatgtacaagatgtgttagatttgcaacaga

SEQ ID NO: 155767 - DNA, 280 bp, Glycine max
gaattagggttttccaattcacagagcaacgcaacgaaccatcaatggcgcagctcagccgcagtcgcagccgcagcacgggcaagcagcgctggagcaggtgcagtgcttcggtcgctagacgaccgccgtggccgtgacctactgcaagcgcgggcgcggtctcatcaagatcaacggctgccccattgagctcgtggagccggagatcctccgcttccaaggccttcgagcctatcctcctgttgggtaagagccgcttcgccggcgtcgacatgcg

SEQ ID NO: 155768 - DNA, 277 bp, Glycine max
aataattggcagatggcacttcgttgcttggtgatgtccctttctgttctcttcactcttggtcttgcgagagaaagccatgccagagacgaagatttttggcatgctgtttggccaaacactcccattccaagttcattgcgagatcttctaaagcctggccctgcaagtgttgaaatcgatgatcaccctatgcaatttgaagaaacacagtacccgaaaaccttcttctatagagaagacttcatccaggcaaaacattgaggtacaattcagc

SEQ ID NO: 155769 - DNA, 274 bp, Glycine max
tttgctattgctgttactattgttgttgtggctgttcctgaaggtttacctttagctgtaacattaagccttgcttttgcaatgaaaaagatgatgaatgataaggcacttgttcgtcacttggctgcttgtgagacaatgggatctgccactactatctgcagtgacaagactggcacactaactactaaccatatgactgttgtaaaagcttatatatgtgggaagattaaagaagtaaatggttctaaggtctactctgatttctcatctg

SEQ ID NO: 155770 - DNA, 281 bp, Glycine max
ctagatgaggacaagaagaagaaagatttgaggaatgaatcactccaattggcttcaaaggaacaaaagatagctgatgagaatgtcttgaggcttgttgaagagcaaaagcgagagcgagaggaggcctataacaagatacttcagttggaaaaacagttagatgccaaacaaaagttggtaatggaaattgaagagttaaaagggaaattgcaagttatgaagcatcttggagatgaagatgacgcagctgttcagaatgcaatagaggagatgaatgt

SEQ ID NO: 155771 - DNA, 268 bp, Glycine max
cagagagaagcgtcttaataaacgctcttctctgaaaaacctgatttcttctcttcttctcttctctttcgtttcgatcttcgatctctgaaaatgagagagtgcatttcaatccacatcggtcaggccggtattcaggtcggaaacgcctgctgggagctctactgcctcgaacacggcattcagcctgatgggcagatgccaagtgataagactgttggtggaggtgatgatgctttcaacaccttcttcagtgaaactggggctg

SEQ ID NO: 155772 - DNA, 263 bp, Glycine max
  unsure (1)..(263): unsure at all n locations
ctgctttacattacattacctctctctcactcacaggtctgctcttgtcctgctttaccatccagttatgtaaggaannaaaaattacctgaggtggttcaatcgctatggaatcctgcaattggattgacccacaagtgccagctgatgacttattgatgaaataccaatatctctctgataactacaatgcccttgcttatatctcaatccctagggagcttatctactatgttaagaaatcagcagtatttccatataga

SEQ ID NO: 155773 - DNA, 256 bp, Glycine max
gctcgagtgcaaagcgcaaattaaagcgcaaaaaccattctccttcggtgctcttgaaaacatgggaaaacagagcacagaattctctgccctcaactgcatcgacctctccaaccctgacatcaaccaatccgtcaatttactcaaacaggatgtttggattccggttttttctacgttgtcaatcatggaataagccaggaattcatggaagaggtttttgcacagagcaagaaattcttctctcttcctcaca

SEQ ID NO: 155774 - DNA, 272 bp, Glycine max
cttggcatcgcttctcctctctcccaagaaagaatcatcaatggcgattgaacacgaagacgatctcaaagacgagaagaaccctcgacctctcgacgaggatgacatcgccctcctcaagacctacggtttgggaccttactcacaagcataaaaaaggcggagaaggaaatcaaagatatggccaagaaagtgaatgacttatgtggtataaaggagtctgatactggtttagctgcaccaagccagtgggatcttgtttctgataagca

SEQ ID NO: 155775 - DNA, 274 bp, Glycine max
gttatcctaatgggtgccgttgaaggttaccgtattgctggtggccccctcggtgaggtcactgacccaatctacccaggtggcagcttcgacccattgggccttgctgatgacccagaggcttttgctgagcttaaggtgaagaactcaagaacggacgattggccatgttctctatgtttggcttctttgttcaggccattgtcaccggaaagggtccattggagaacctcgccgatcaccttgctgaccctgtcaacaacaacgcctgggc

SEQ ID NO: 155776 - DNA, 278 bp, Glycine max
tgtgaagcgtggtggggagggtgagaatcctgaagattatgttgatcccgagactccatcgggtgagaagaagcgtatggctcggcaaatggccaagcaatatagtccaactgccgtggagaaatcgtggtatgagtggtgggaggatcacagtattttgtggcagatgctaacagctccaaaccaccttttgtcattgttttgccccctccgaatgtgactggtgctctccatataggtcatgctctaacagccgcaatagaggatacaatgattcg

SEQ ID NO: 155777 - DNA, 279 bp, Glycine max
ttcccatgctggtagcctcacaaatttggcaaagtgcccctcttcaactcttcaaattcttggtgcggagaaggctttgttcagggcattaaaaacaagaggaaacactcccaaatatggtttgatattccactcttcttttattggcgggcatctgccaaaaataagggcagaatggctcgatatcttgcaaacaaatgctcaattgcatcacggattgactgctttgctgaaaggggtactactgtttttggggagaaactgcgtgagcaagttgag

SEQ ID NO: 155778 - DNA, 280 bp, Glycine max
attagttcattctctttgcgcagttccctacctctcctttcaagatgcagatcttcgtcaagaccctcaccggaaagaccatcacccttgaggtggaaagctctgacaccatcgacaacgtcaaggccaagatccaggacaaggaagaattcccccggatcagcaacgtctcatcttcgccggaaagcagctcgaggacggccgtaccctcgccgactacaacatccagaaggagtcaacccttcaccttgtccttcgtctccgtggtggcatgcagatc

SEQ ID NO: 155779 - DNA, 273 bp, Glycine max
gactctcacacagctcctgagaatcaagaccaatactcttctagaagcaatgcagattaaaagagaagataacatacaaatactcaaaaattttcttcagcatttcaagcaggttaaggatctgagtatcaaagatttgatggggagaacgtagaagaagaggaccctaacatggctgtgaacttgctaactgtggcaagcactggcaatgctgcttttcttgaggagcttctaagagcaggtttggatcctgacattggagactccaaaggg

SEQ ID NO: 155780 - DNA, 271 bp, Glycine max
tcagaattctctaaaagagatctttttctgctctttgaagaaagaagggtctttgcttgattttggagatgtctctgctctcagatctcatcaaccttaacctctccgataccaccgagaaggtgatcgcagagtacatatggtcggtggatcaggaatggacctgaggagcaaagcaaggactctcccaggaccagttagcgacccttcagagcttcccaagtggaactatgatggttccagcacaggtcaagctcctggtgaagacagt

SEQ ID NO: 155781 - DNA, 279 bp, Glycine max
ctttattctcccaattcaaaactctcactccgttagaagcaccaaatcctgatggcaccaaaggcagagaagaagccagcggagaagaagcccgcagaggagaagaagtccacggtgggagacaaggctccggcggagaagaagcaaaggccggaaagaagcttccgaaggagggaggcgccggcggcgaagggaagaagaagaagagaaacaagaagagcgtggagacatacaagatctacatcttcaaggttctgaagcaggttcaccctgacattg

SEQ ID NO: 155782 - DNA, 276 bp, Glycine max
agacgacaacggcaacgtcaaactcgactgccccgccattggcaaacagttcgctgccgaggaaatttctgcccaggttctgaggaagcttgttgatgatgcttccaagtttttgaacgataaggttaccaaggccgttgttacgggcctgcttacttcaatgactcccaaaggactgccaccaaggatgctggtcggattgctggtctagaggttcttcgtattatcaatgaaccaaccgctgcatccttagcctatggctttgaaaagaaaaac

SEQ ID NO: 155783 - DNA, 270 bp, Glycine max
ctcgaatgctgcattgcagtttcctgtgatgcccacatgcaaagctaccatggatttgtctgctactgcaacatctgcctcacccgtctttgttgctgctccagcagagaaaggccattttcttttagactttctcatggaggtgtttcagcagctgtctccaaaactgctgctgctcccattgaacgtgttaagcttttgatccagaaccaggatgagatgatcaaaactggtaggctttctgagccctacaaaggtattggtgattgt

SEQ ID NO: 155784 - DNA, 268 bp, Glycine max
ggcttccctccctcctttgaagaaacaaattagaagagtgtgttgtgttgtgttgaagtagcaagctagcaaagatgtttggcatcttaggaggcaataaggggcacaagatcaagggtactgtggtgttgatgagcaaaatgtgttggacttcaacgaaatagtgtccactactcagggtggtttggttggtgctgccaccggcatcttcggtgctgccaccggtattgttggtggagttgtcgatggtgctactgccatcttcagt

SEQ ID NO: 155785 - DNA, 274 bp, Glycine max
gatccggctcgacatcgctactcctctctcccaagaaagaatcatcactggcgattcaacacgacgacgatctcaaagacgagaagaaaccgcgacctctcgacgaagatgacatcgccctcctcaagacctacggtttcggaccttactcccaagcataaaacaggctaagaaggaaatcaaagatatggccaagaaagtgaatgacttatgtggtataaaggagtctgatactggtttagctgcaccaagccagtgggatcttgtttctgat

SEQ ID NO: 155786 - DNA, 268 bp, Glycine max
  unsure (1)..(268): unsure at all n locations
ccttggagtgcaatttcctggatcaactcttccaaaccatggctaatcatctactggtgaaggattcttccttggttgtgatgtgcatggttttgggtatgcccttggcggatgcagctctttcatgtccttaagtgcaatcattgtagcaccatgccttggtgactagagaggccttggtggtggagttttccctctaccatgttgcaatggggttaggacctanacaactaggccagaccaccccagatcgtcaaggggcttgtag

SEQ ID NO: 155787 - DNA, 273 bp, Glycine max
ctagcattgtgatgttgattgcatatgtagtctacattgtctttcaactgtggacacacaggcagttatttgaagccgaagatgagggtgaggatggtgaggacggtgaagaagaacaagctgtgattggattatggagtgcattgcttggttggtagggatgactgtgttcattgctgtgttgtctgaatatgtggtggatacaattgaggatgcatcagattcgtggggtttgtctgtgagctttctcagcataatcttgctaccaatagt

SEQ ID NO: 155788 - DNA, 265 bp, Glycine max
aatctccatactgtctgatgctggtcttggaatggctatgttcagcttgggtctgttcatggctcttcaacctaagataattgcatgtgggaactctgttgcaacatttgccatggctgttcggttcctcacaggtccgccgtcatggcagcagcttccatcgctgttggcctacgtggcaccctcttgcgtatagctattgttcaggctgcactaccacaagggattgttccatttgtgtttgccaaggagtacaacgtccatc

SEQ ID NO: 155789 - DNA, 268 bp, Glycine max
ccacatcactctttctttcaaatctagggtttcctccttctgcaaccatcaatgtccgcaatcgcggctccccaacacagatcctcggagacagagtcctacgtggacaataagcgcaaggaggatatccgccatgcaacatcgtggccgcacgctcagtcgccaacgcggttcgcaccagtctgggccctaagggcatggacaagatgatctccacctcctccgacgagatcatcatcaccaacgacggcgccaccatcctcaacaa

SEQ ID NO: 155790 - DNA, 279 bp, Glycine max
agacgacaacggcaacgtcaaactcgactgccccgccattggcaaacagttcgctgccgaggaaatttctgcccaggttctgaggaagcttgttgatgatgcttccaagtttttgaacgataaggttaccaaggccgttgtcacgggcatgcttacttcaatgactcccagaggactggtatcaaggatgctggtcggattgctggtctagaggttcttcgtattatcaatgaaccaaccgctgcatccttagcctatggctttgaaaagaagaacaac

SEQ ID NO: 155791 - DNA, 263 bp, Glycine max
caaccttattcaatgactggttttggttctttaacggaaaacctgttggtttgatctccaagaaatcttctatctcatgtaaatcaacaggagcaaataatactttctaaagagctctctgggctacaaccagaacagctcgccatgctcggcgtcgccaaggaccttggcgacgccgtcggcttcatgacgggcctgctctgcgagattttgcccatctggggcgcgcttctcgtcggcgctgctttgaacgtcgtgggata

SEQ ID NO: 155792 - DNA, 264 bp, Glycine max
tgcagtcttacccgcataagatactcaccggtaggagggacaagatgcataccatgaggcagacaaatggcttgtctggcttcaccaaacgttccgagagtgaatttgattgttttggcactggtcacagctccacactatttcagccagacttggaatggctgttgggagagatctgaagggaagaaagaataacgtggttgctgttataggtgatggtgccatgacagcaggccaagcttatgaagccatgaacaatgctgg

SEQ ID NO: 155793 - DNA, 261 bp, Glycine max
  unsure (1)..(261): unsure at all n locations
tncgagcgaatcggctcaccctctttctctttctctgcacaacctgcacactctgcactcgatcaaacagaaactggcaaagaatgtggggatccttgccattgacatctacttccctcccgcttgcgttcagaggaagcattggagactcatgatggtgccagtaaagggaagtataccattggtcttggacaagattgcatgtcattctgtaccgaagtagaagatgtcatctcaatgagtttgacagtggttacttct

SEQ ID NO: 155794 - DNA, 268 bp, Glycine max
ctgaaccaaatcatcacacacacatactactcagcaacaattcttctacaatggatctcctcactctggaaaagaccctcataggtctcttcctcgctgcggtggtcgccatcgccgtctccaccctccgcggccgcaattcaagctcccaccgggcccactccccgtcccaatcttcggcaactggctccaagtcggcgacgacctcaaccaccgcaacctcaccgatttggccaaaaaattcggtgacatcttcctcctccgcatg

SEQ ID NO: 155795 - DNA, 269 bp, Glycine max
aaaacagcatcgaacccgtcgtagcagaaaaacttgtcaccatggtttcttccgacaaggatccacgagaggatgtccttcaagcctggtacatggatgatagtgatgaagatcaaagactcccccaccacaaagaaccaaggagtttgtctcgttggaccaacttgctgaacttggagtccttagctggaaactagatgctgataaccatgaaaatgatccagagctgaagaagattcgtgaagagcgtggttacacctacatggatg

SEQ ID NO: 155796 - DNA, 213 bp, Glycine max
ggagttcggcttgagggtatgtgggaacttttaccacacatgcatacatcgcgtagattgtgttctggtttttttatggatggcaaattctacgtgattggtggaatgtcgagttcagctgtttcattaagttgtggagaggagtagatctcaagacaaagagttggcggataatagaggggatgtatccatatgttaacgtgggtgttcagg

SEQ ID NO: 155797 - DNA, 228 bp, Glycine max
ccctgcagacccctctgaccctctccttgtggattggatcaaataccctggaaaccccgttttggtgccaccaccaggcattggtactaaggactttcgcgacccgacaaccgcgtggctcacctccgaaagaagttgcgaatcaccataggatccaagctcaacaaaacaggcaatgcaatgggttaatgaaactgagacttcaagagctatgagctccaggagggt

SEQ ID NO: 155798 - DNA, 233 bp, Glycine max
ctggtttgtctctagatggaagccttgttagtgaaattgaaggtgaaagcgcagtcgacaggctaaaaagacaagttgaccatgacaggaaacttatgaatgctttgtataaagagctggaggaagaaaaaatgcttctgcagttgctgcaaatcaagcattagccatgatcacaaggctgcaggaagaaaaggcaacattacatatggaagccttgcaatacttaagaatga

SEQ ID NO: 155799 - DNA, 260 bp, Glycine max
cggctcgaggttttattatgatgtgccctcaattgttcatcaactacaagctcaaatctgttgctcatctaccttggaggcaaatgacttacaagtttctcaacaccataattgatgacctttttgccttttcattaaaatgccaacactccatcggctttctgtcttccgtgatgatcttatctttgtcatatacttataccagaggtggatttataaagtggacaagaaacgtgttaacgaatttggttttggaggtg

SEQ ID NO: 155800 - DNA, 277 bp, Glycine max
tagtgacactgtttggtagcattcatgagaagctccccgagacaggagcaggaggaagcatgcgaacactctgtttccaaattttggaagcatgttcagcacagctgagccgcatgttaaacatgaacagtgggatgaagagagcttacaaagggaaggtgaggactacatgtcagatgcagctgatggggactctgatgataatttgcatagtcctttaatctcacgtcaaacaacaagccttgaaaaagacttgcctccccctccttcccatggc

SEQ ID NO: 155801 - DNA, 280 bp, Glycine max
aacaacttctgctacttcctactccaaccgcacttctgctccgcaattatcatgggcaaggtcaagatcggaatcaacggatttggaagaattggccgtttggtagccagagtggctctgcagagagacgatgttgaactcgttgccgttaacgaccctttcatcaccaccgattacatgacatacatgtttaaatacgacagtgttcatggacactggaagcatcacgatgtcaccgttaaggacgagaagacccttctcttcggtgacaagccagtca

SEQ ID NO: 155802 - DNA, 280 bp, Glycine max
aaagccttagccttccctacaactccaaacagaaagacatcgacatccatggctgcctccgtctccactgtcggagctgtcaacagagctcttttgaacctgaatggttctggagctggagcttcagctcccagttcagccttctttgggaccagcttgaagaaggttattgcctcaagggtcaccaacagcaaggtttccggtggaagcttcaagattgttgctgtagaagagaagaaagagattgaagagacccagcagaccgacaaggacagatggt

SEQ ID NO: 155803 - DNA, 277 bp, Glycine max
gaagaatgttctgctggagttttatgctccctggtgtggtcattgcaaacagttggctccaatattggacgaagttgctaggtcatatcaaagtgatgctgatgttgttattgcaaaactggatgcaactgccaacgatatcccaagtgaaacctttgatgtccaaggttatccaaccgtgtacttcaggtcatcaagtggaaagtgctcacaatacgaagggggtaggaccaaggaagacatcatagaattcatcgaaaagaaccgggacaaacct

SEQ ID NO: 155804 - DNA, 280 bp, Glycine max
ggaaagctgaaaggcattgttggagagagcagaacaaactacatcctatccaatagtctttatcttgtggtggcaggtagtgacgacattgccaacacctattttgttgctcacgccagaatattacagtatgacattccttcttacaccgaccttatggtcaactcagcctctaattttgtaaaggaactgtataatctgggagctcgtagagtttcagtactgggtgcaccaccgattggatgcgtgccatcacagagaactctggctggagggctaa

SEQ ID NO: 155805 - DNA, 278 bp, Glycine max
agagattataacatatctgttaaaggtgtgacggatctttcttttcatgctaatcaaaagcttggtggagatcataagtggggtcttgcatctttgactgaaaaacttctatcaaaacagcttaaaaagcccaacaaaataagactgggaaattgggaggctcctgttttgtcaaaggagcaactagagtatgctgcaacagatgcttttgcttcttggtgtctttatcaggcgattaaagatctcccggacgcccagaaagtcactgacagaagtgg

SEQ ID NO: 155806 - DNA, 277 bp, Glycine max
gggaaaggtgattttccaatggattgtccccttcatgacagtctgcttcgcgttcattacaagggtactgttctcaatgaagaaaagagggtattctatgatacaagggtagacaatgatggtcagccattggagttctgttctggagaagggcttgtaccagagggatttgaaatgagtgttcgtttgatgcttcctggagagatagctcttgtcacatgccctcctgactatgcttatgataagtttccgaggccattaaatgtccctgagggtg

SEQ ID NO: 155807 - DNA, 278 bp, Glycine max
agattcgtgatttaccatttaccacaccaaaaccaatcggatcgtttcctctgcggagtcagaaatccatggatccctacaagaatcggccatcaagcgccttcaattctcccttctggactactaattccggtgctcccatctggaacaacaactcatcgctgactgttggatctagaggtccaattctgctggaagattaccatctggtggagaagcttgcaaactttgacagggaacggatccccgaacgtgttgtccatgctcgtggagctagc

SEQ ID NO: 155808 - DNA, 233 bp, Glycine max
atttctctctgtcctgcgcacatttacacacctctcaaatctttcacttacagctttatttgaatccctctctctcctttccaaatggccagcgttgaggttgcacatcaaacaccaacaacagttccagaaaatgaaacaaccgaagtaatcaagacccaggaaacaaccccggaaccagtaccagccactgaggctcctgcaacagaacaagcagcagctgaggttcctgc

SEQ ID NO: 155809 - DNA, 276 bp, Glycine max
ctcgagccgcttctcaatcgcaaattttctcccccaaatcgtagatctacggttaaattgcgtgtagtgtggtaagatgggaggaggatttagagtgcttcacttagttaggccatttctctcgtttcttcctgaagttcaaactgctgacaggaaagtgccatttagagagaaggtcatatacactgtgatctctcttttcattttcctggtttgtagtcagctccctctatatgggatacactcaacaacaggtgctgatccattctattggat

SEQ ID NO: 155810 - DNA, 229 bp, Glycine max
ttcagcttttccctcgttgaaatgaaaatgggttcttctttgtggactttgtgtctaattttggcttcactagcctcttctgcattctgtgcctttccacggaggccagtggatgttccattcggcagaaactacgttcccacttgggcttttgatcacatcaaatacttcaatggaggttctgagattcaacttcatcttgacaagtacactgggactggcgtccagt

SEQ ID NO: 155811 - DNA, 275 bp, Glycine max
gcagagatgatgttaaagtggctttagctggtgatattattgctcttgcaggtttgaaagatactattacaggtgaaacattgtgtgaccctgataatccaatcgtgctcgagcggatggacttccctgatcctgttattaaggttgcaattgaaccgaaaactaaagctgatgttgacaagatggcaactggtttaatcaaacttgcacaggaagacccttctttccacttctcccgtgatgaagagataaaccagacagtaattgaaggaatg

SEQ ID NO: 155812 - DNA, 275 bp, Glycine max
agattccacaacagtgggagggagatccaaaaagagagagtggaaaagatggcgcggttgatcacagtggtgtggtgcgcggtggcggtgctattatgcgccgcggccggtgcgtcgtgggtggaggaggcggcgaacccgatacgaatggtgtctggcgtggaggcggaggtggttcgggtgatcggggagtgccggcgtgcgttgaagtttgctaggttcgtgagcaggttcgggaagagttaccaaagcgaggaagagatgaaggagaggta

SEQ ID NO: 155813 - DNA, 236 bp, Glycine max
aacgaccactgaaacttcactttattccttacctgtcaccggggcatgtgatccctctctgcggcattgcaacactcttcgcctcacgcgggcagcacgtgacggtgatcaccactccctactacgcccaaatcctccgcaagtcaagcccctccctccaactccacgtcgttgactttcccgccaaagatgtgggccttcccgacggcgtcgaaatcaagtccgctgtcaccgac

SEQ ID NO: 155814 - DNA, 279 bp, Glycine max
agcttccaaaccctaacactcctcttcctcttcgatcatcacctctccacaatgccgccgaagttcgacccctcccagatagtcgacgtcttcgtccgcgttaccggcggcgaagtcggcgcggcgagttccctggccccgaagatcggtcccctcggtctctcccccaagaagatcggagaagacatcgccaaagaaaccgccaaggactggaagggcctccgcgtcaccgtcaagctcaccgttcagaatcgtcaggcgaaggtcacggtggtcccc

SEQ ID NO: 155815 - DNA, 265 bp, Glycine max
ctgggcccctgcatggtctggccaatcaggaggttctacgatggatcagatcaatagttgcagaatttggaactcctaacataagtactgaacaattggctgactacattaataaaacattgagtagaggccaggttgtgcctggatatggacatggggttttacgccagacagatccaagatacacatgtcagagggagtttgctttgaagcatttgcctaatgatccatatttccagttggtgtctaagataaaagaggttgt

SEQ ID NO: 155816 - DNA, 146 bp, Glycine max
agggttatcatttctccatttccattttctctctcacttttcaagaatcgtcagctatgggaaagtcttacccaactgtgagtgctgattaccagaaggccgttgagaaggcgaagaagaagctcagaggcttcatcgctgagaag

SEQ ID NO: 155817 - DNA, 274 bp, Glycine max
cgaaaatgtggaagagaacgggttttgaagaagaagcagttcaattgatcaactcagatttcagggacctaagtctagctgctaatagactcgcccatcatgccatcaaacttggtggcattggctttggagcctcttttttcggattgtttgctgccattgctgctatttatctgttgattttggatcgtacaaactggaaaacaaatattctcacagcactactcattccatacattttcttcagcttgccttcattaattttcgacgtctt

SEQ ID NO: 155818 - DNA, 275 bp, Glycine max
gagagagagtgagagagtgagtgagatagagagagacgcttcgcaaatctcaatcgaatctcagaaaaatgagagaaatcatcagcattcacataggtcaggccgggatccaggtcggaaactcctgctgggaactctactgcctcgaacatggcatccagcccgacggcatgatgccttctgactccaccttcggtgtagcccacgacgccttcaacaccttcttcagcgaaaccggatctggcaagcacgtcccccgtgctgtcttcgtcgac

SEQ ID NO: 155819 - DNA, 274 bp, Glycine max
gaagtggaagattctcagcagagtctattgcaaaactgaaagcaaaggctaactcggagtgcaacacaaccaaaatctcatcgttccaatcattatcggcacttgtttggagatgcataactcgtgcgcggcgcttgccgtatgatcaaagaacaagttgcaagttgtccgcaacaacagaacaagaatggaaccaccactgcctcaggagtactttggaaactcaatttatacactgaatgcaggaaccgccacctcagggaaattgcttgag

SEQ ID NO: 155820 - DNA, 270 bp, Glycine max
gtcttcataaacgcctttcttctccgtttccgtttcctcgttcgaattcgctttttgatctgcgaaaatgagagagtgcatctcgatccacattggtcaggctggtatccaggtcggaaatgcttgctgggagctctactgcctcgagcacggcatcgggcccgatgggcaaatgccaagtgacaagacagttggcggtggtgatgatgctttcaatactttcttcagcgagactggtgctggaaagcacgtgccacgtgcagtgtttgt

SEQ ID NO: 155821 - DNA, 263 bp, Glycine max
gtagttctttacagaaaccatgaaatcagaaagcatcaatttgttgctgttaccgagtggtctggtgggctgtatgtatctccaaccatagctggaagcaggcctggaagtcttattgccggtgcatgggcagcgatgatatctctagggaaagaaggatacttgaaaaataccaaagaaattatggaagggtcaagaagaatacagcaaggcatagaggagattgctgagttggttattgttggaaaacccgcatgacgata

SEQ ID NO: 155822 - DNA, 259 bp, Glycine max
accaaatccacgttccttacttcccagcgatccagtctccaacgatccctcgttgcccctttcatttccctcgcctccagaaattacgccaacgtgccggggcaaaaggaaaccaaagttaaggtccctctggctttgtttggaggttcaggaaactatgactctgctttgtatattgcatctgtgaaagccaatgcagtggaaaaggttgagactgagcttctgcaatttgttgaggcagtaaagaatagtcccatat

SEQ ID NO: 155823 - DNA, 270 bp, Glycine max
agactacatcattctgtcttgtgttagaagtaatgaacatcagggcattggatttctgaatgatcctaggaggctcaatgttgcttgacacgagcaagatatggcattgttattttgggaaaccctaaagttttgagcaaacagcctctatggaatagtttattgactcactacaaggaacatgagtgcttagttgaagggcctttaaataacttgaagcaaagtatggttcagttccagaaacccaagaagatttacaatgaacgaggc

SEQ ID NO: 155824 - DNA, 268 bp, Glycine max
tgtgattctgtatgatagccgtcactctttacttccaaaaattgaggagggcccaaagacatttgtcaatgccctatctagtaccctgagcaagctccagtccagtaaatctttccggagatttagagaagctgctaggggtgttacgaaacgaattggtaggtctgcatgaattggcagctaaagtggatgaatatgctcgtggtatgatgggtcctctaggtgctactctttttgaagagcttgggttgtactacataggcccagt

SEQ ID NO: 155825 - DNA, 262 bp, Glycine max
ccaaaccaacacctttcaaaatgcaaacatccttaacctttgctgcccccaacgttgtgcctttggcacaaacaaagagtttctcccatgttgccatcttccctaccaatttgaaagccccacgctcttcaactcgttactctccgatcagggttgcaatcgtggagcctgacacttcaactgtggactacaactctgcgttctcagtgtttccagcgaaagcatgcgaaactgttggaggggaagctgcatggcaaaatgt

SEQ ID NO: 155826 - DNA, 270 bp, Glycine max
ctttttaccaaatctacaagaaaaaatctacggatgggtttcaatcactaccttatattgttgcactattcagttcaatgctctggatttattacgcactcgtcaaaaaggatgctagcctccttctcattactattaactcctttggatgtgtgatagagacgatataccttgcaatcttcctaatttacgccccaagcaaaaccaggctttggaccatcaagcttcttctcatgttgaatgtttttggattcggagcaatgcttcttt

SEQ ID NO: 155827 - DNA, 268 bp, Glycine max
gttcgcactctgtctttcccctgtttccgcgtcactgagtcatcgcgattcgcaactcgctcaccggccaattcctccgccgcagctccgtcgccggagcaaggctcatgtcttcttcgtcctcatggttccggagcatcgagcccgctcccaaggatcctatcctcggagtcactgaagctttcctcgccgatcagagtccaaacaaagtcaacgtcggagtgggtgcgtatcgcgatgaccacggaaaacctgtggttttggaatg

SEQ ID NO: 155828 - DNA, 269 bp, Glycine max
caaagttaaggtccctctggctttgtttggaggttcaggaaactatgcctctgctttgtatattgcatctgtgaaagctaatgcagtggcaaaggttgagtctgagcttctgcaatttgttgaggctgtaaagaatagtcccatattttcacagtttataagggacttgtctgtggctaaggatgttagagtaaaagtcatccaggatatttgtggtgaagctaagttttcagacgttacaaagaacttccttgttattgttgctgaga

SEQ ID NO: 155829 - DNA, 274 bp, Glycine max
tttttctctaagtctaaggggtgccctgagatcactttgagcaatggtgaaggctgtggcagttcttggcagcagcgagggtgtcactggaactattttcttcactcaggagggaaatggtccaaccaccgtaactggatctcttgctggtcttaagcctggtctccatggcttccatgtccatgccttgggggacactaccaatggttgcctgtcaactggagcgcatttcaatcctaataacaacgagcacggtgcccctgaggacgagaat

SEQ ID NO: 155830 - DNA, 268 bp, Glycine max
ccctcgttgaaatgaaaatgggtacttctttgtggactttgtgtctaattttggcttcactagcctcttctgcattctgtgcctttccacggatgccagtggaggttccattcggctgaaactacgttcccacttgggcttttgatcacatcagatacttcaatggaggttctgagcttcaacttcatcttgacaagtacactggtactggcttccagtccaaatggtcacacttgtgtggtcacttcagcatgaacatcaagatagt

SEQ ID NO: 155831 - DNA, 269 bp, Glycine max
ctctccttctcgctctttcagctttgacttttgttggaaactaaggcctaatcaaaatggtgaagttcatccctgaagagctacgtcgtattatggactataagcataatatccgtaatatgtctgtcattgctcatgttgatcacggaaaatcaaccctcactgattctcttgtggctgctgctggtattattgctcaagaagttgccggtgatgtccgtatgactgatacccgtgcagatgaagctgagcgtggtattaccatcaag

SEQ ID NO: 155832 - DNA, 159 bp, Glycine max
  unsure (1)..(159): unsure at all n locations
gcagtatctggcaatttgcagaatgaaatggtgcacatctatctttctgaagtacttgattggtatgctgatttaagtgctcaagaaaaatgggatgagaaagatcattccccaacaaggnaaaaattnttgactgccttagagagtatagcaggatac

SEQ ID NO: 155833 - DNA, 266 bp, Glycine max
gaagaagggatacgaggttctttatatggttgatgccattgatgaatatgctgttggtcagctcaaggaatttgagggcaagaagcttgtctctgccaccaaggaagggctcaagcttgacgagagtgaagatgagaagaagaagcaagaagagttgaaggagaagtttgacaacctctgcaaggtgatcaaggatgttttgggtgacaaggttgagaaggttgtggtctctgaccgcgttgtagattcacatgctgtcttgtgac

SEQ ID NO: 155834 - DNA, 266 bp, Glycine max
ctttctccgagaacaaaaaaaaaaacgtcattcgctcttctcttcgaataaaccacaaaaccaacaaacgagaagaggagtgagagaagatggggttgtcgttcacgaagctgttcagcaggttgtttgcgaagaaggaaatgaggattctgatggtaggtctcgatgctgctggtaagacaaccatcttgtacaagctcaagcttggagaaatcgtcaccaccatccccaccatcggatttaatgttgagactgtggagtacaag

SEQ ID NO: 155835 - DNA, 226 bp, Glycine max
cagcaattgttgaagattctcgtcctccatcctcatggcctgagaatgggacaatccaattaattgatctgaaggtacgttacaaggaaaatcttcccgtggtgcttcacggagtatgctgcacatttcctggtgggaagaagatgggataattggtcgtactggagtggcaatctacttgattcaagcattatttcgattggttgaaccgggcagggatatccta

SEQ ID NO: 155836 - DNA, 253 bp, Glycine max
caagaagctaagagaatacaccaaaacccaacatgaaaacccttaacaaagcctcacttattttattccctctcttgttcctttccctattcaagcagtcccatgctgcaggaatcgctatctactggggccaaaacggtggagcaggcaccttagcagaagcttgcaacactagaaactaccaatatgtgaacatagccttcttgtccacttttggcaacggccaaactccacacctcaaccttgcaggtca

SEQ ID NO: 155837 - DNA, 255 bp, Glycine max
gaagagttggctgatataaaagatcaatttgatgctatagatgtagacaaaaatggttcgattagcctggaagagatgagacaggctcttgccaaagatcttccttggaaattgaaagaatcacgtgtactagagatattgcaagcgatagacaacaacactgatggtctagtggatttccgggagtttgtagcggctacattacacgtgcatcaattggaggaagactctgacaagtggcagcaactgtcacag

SEQ ID NO: 155838 - DNA, 254 bp, Glycine max
cacactcattattactatacacaccctctttctcctcctcctccttcttcttcttctccttctatctctttctcattctatctttcaacatgggtggcatcagcctcgaagaaataaacaacgagaacgtcgatctggaacggattccaatagaggaagtgtttgagcagctgaaatgtccaagagcaggtctaacatcagaggaaggggccaatcggatcaaagtctttggaccaaacaaattggaagagaaa

SEQ ID NO: 155839 - DNA, 249 bp, Glycine max
ttcgagggtttccttcacatctctgtaatttccatttccacagttactcttgtgaattagcgagatttgaagcgagtgatggctgcgaaggaagagaatcgaatatttgttggaggtttatcctgggacgttacggagcgtcaactcgagcatgcctttgctcgttacggcaaaattctcgaatgccagatcatgatggaaagggatacaggccgtccacgtggatttgggtttatcacatttgcagac

SEQ ID NO: 155840 - DNA, 151 bp, Glycine max
aagatggcttcctttgtatccttcctagtgctgcttcttgcagcccttatcctcatgcctcaagggcttgctacttactacaaaccaattaagaagccaccagtgtacaagcctccagtgtacaagccaccagtgtacaaaccaccggttt

SEQ ID NO: 155841 - DNA, 246 bp, Glycine max
acataattgagactttggttgatgaatacaaggcctgtgagtccccagattatatcacatggggaatggaggatccaaacaacatgctaacaggagaaggcaatgctacaggatcattggatccaaattcagtagcgtgaaaaaaaccaagtaccacaagggaagcataatcaaggaaagggtttttctgaaagatcaacaaggtttcctttgaagtttttaacttttatggggtgtgagatggtt

SEQ ID NO: 155842 - DNA, 253 bp, Glycine max
tatttccaccaaacccgtttgcgttgttgtttgcgaataaatggcaactaagaggagcgtgggaacgttgaaggagggtgatttgaaggggaagagggtattcgtgagggtcgatctgaacgtgcctttggatgacaaccttaacatcaccgatgacactagagtccgtgctgctgttcccaccatcaagtacttgactggttatggtgctaaagtgatcctttctagccatttgggacgtccaaaaggtgta

SEQ ID NO: 155843 - DNA, 262 bp, Glycine max
gtttttatagtcctcaaagcaaatgacagtggagaaggaggaacgtttgcactatactcgctgatttgcaggtatacaaatgtgagtctgcttccaaatcgtcaacaagccgatgaacaaatctctagtctttaagctcaaactgacctagtcccagacactgcgcaaggtgcctataagtactaaagcgacagctttagaacaggacaccatttttccaagaacctattattgggtgttggttcttctggggagcttccat

SEQ ID NO: 155844 - DNA, 246 bp, Glycine max
attgtatgttgtagtaactcgttctgctgcttttgttgttcggtgtgtgtgtctgttttttctctcacctgaaaatgtcttgctgcggtggtaactgtggttgcggaagctcctgcaagtgcggcaacggctgcggaggctgcaagatgtacccagacttgagctacactgagtcaaccaccaccgagaccttggtcatgggagtggcacctgttaaggctcaatttgagggtgctgaaatgggtt

SEQ ID NO: 155845 - DNA, 235 bp, Glycine max
atcctttggtatatccctatatcttgcttttaagcattcaattgcttccagctgtattatacttgtctaaggaagcaggagatgaaggatataacattgatgctgcccacctatccattgtgctagctgatcatggggtcctttctgaaggtgctggttctgggcaaaagttaggagtgatggatgcttatgcggaagtgtcgaccattatcaggcagtatggatctatgtattt

SEQ ID NO: 155846 - DNA, 249 bp, Glycine max
ggctgcctcttcttatgctatgcaatcaatcctggcaaaccctttgatccgcatttccagcgggtctagggtgaaccaatttggcgttcctgctttgcacatgagaaggaatgttggcctgagagttaggtccatggctaaggaagaacaaccaagtgagcctgcaaccccagttacaccgccacaatcgtaggacccagccaaagcaatctctgttccttcaccaaaggtgagcactaagtttctgtg

SEQ ID NO: 155847 - DNA, 249 bp, Glycine max
tgttgagaagcgtcagatgaccaaggctgtagcaatattggatgaaatgaatgtggcaggtgttggaccaaatgaacacacatatacaactcttatgcaaggttatgcttcactgggtgacactgaaaaggcctttcagtactttacagtgttgaggaatgagggcctggagattgatgtttatacttacgaagcgttattgaagtcatgttgcaaatcaggcagaatgcagagtgcccttgcagtcac

SEQ ID NO: 155848 - DNA, 247 bp, Glycine max
gtaatggattggcatcatttgaacaagatttttcatcaaaaatcctagttacatatcggaaaggctttgatgctattggagatacaaagtataccagtgatgttaattggggttgtatgcttcgaagcagtcagatgctggttgctcaggcattactttttcataaattaggtagatcatggagaaaacctattgacaagccactggataaagaatatattgacgtcttgcaactttttggtgattc

SEQ ID NO: 155849 - DNA, 248 bp, Glycine max
tggcactggagaaagtggctgcgtctttggaacttccctgtaaatatcaaggttttgggtgcatcggtatatatccatattacagcaagctaaaacatgaatcgcaatgtgcacatagaccttacaactgtccatatgctggttcggaatgctctattatgggtgacataccctacctggtggcccatctgaaagatgaccataaagtggacatgcacaatggtagcacttttaatcatcgctacgtc

SEQ ID NO: 155850 - DNA, 254 bp, Glycine max
ccagattagtaccacaaaaatggagaaatagaataactgaatatcgtatagctcaaaataaagatttaaccaaatgcaattcatatgaaaaaagccaattaattctttacaaagaacaacaagtaaacggattaaaaaaggaaattagaaaagaatatggatacgatcttttatcctataatttgatcaattatgcagataagaaaggctcatatatttgtggatatagatccctatttcaagtaaaaaaagac

SEQ ID NO: 155851 - DNA, 250 bp, Glycine max
gattttctttgggaagacgttgagtctgatcgactcaacctcaaccttctcctggttcctgcattgcgttgctctctctctaccttctaattcccaaatttctagggtttggtacagagagaaataggaacataagatgtctcagaacgggaagctgatgccaaatctagaccagcatagcaccaagcttctcaatctcactgttcttcaacgaatcgacccttttgtcgaggaaattctcatcaccgct

SEQ ID NO: 155852 - DNA, 150 bp, Glycine max
gtgaagagaagcaatttgccgcagaagaaatctcgtccatggtgctcatcaagatgcgtgagattggcgaggcttacctaggctccacagtgaagaatgctgttgtcaccgtccctgcttacttcaatgattctcagcgtcaagctacca

SEQ ID NO: 155853 - DNA, 254 bp, Glycine max
cgttcatggatccagtaagcgtgtggggtaacacgcccttggcgacggtggatcccgagatccatgacctcatcgagaaggagaagcgccgtcaatgccgcggaatcgagctcatcgcctccgagaacttcacctccttcgccgtcatcgaggccctcggcagcgctctcacgaacaaatactccgagggcatgccgggcaaccgctactacggcggcagtgaatacatcgaccagatcgaaaacctctgccgc

SEQ ID NO: 155854 - DNA, 250 bp, Glycine max
aagattttgtccaattgaacttgtaaaaatgactgggataaacttaagaatccaattattgaaattgaataagtaaacaatttaattggattggtccaatggtatcaaaaaaatggagtactaactcccatttgttatttattattgagttaaccgatcagcttgctttgttgtcgaacatgtctttttgatttcagagattttccggaaaaaatttgaatctatggctatatgcgaatcaatcctacta

SEQ ID NO: 155855 - DNA, 250 bp, Glycine max
gaaaatgttggtttgtctctctcatatggcttgtcattaaatgccgtgatgttctgggctatatacatgagctgtttcattgaaaacaaaatggtatctgttgagaggatcaaacagttcacaaatattccatcggaagcttcatggaacattaaggatcgcctgcctcctgcaaattggcccggggaaggccatgttgatatcaaagacttgcaggtcagatatcgtccaaacactcctttggttctta

SEQ ID NO: 155856 - DNA, 248 bp, Glycine max
aagaggactgtccatgatgttgtacttgttggtggttccaccagagttcccaaggtgcaacaactcctgcaagatttctttaatgggaaggagctctgcaagagcatcaatcctgatgaggctgtggcatatggtgctgcagttcaagctgctatcttgagtggtgagggtaatgagaaggttcaggatcttctccttcttgatgtcacccctctctctcttgggttggaaactgctggtggggtgat

SEQ ID NO: 155857 - DNA, 245 bp, Glycine max
atcgtatcttcaagtactcaggttgcagcccatcatgctttgtcgtggcacacatatatgtggacagattcattcaacacacagaaatcaaattgacttcactttatgtgcaccggcttctgataacaagcatcatgctagcagcaaagtttatagatgacgcattctacaacaatgcttactatgcaaaagttggaggagtgagcacgtctgaattaaacaggttggagatgagctttctattt

SEQ ID NO: 155858 - DNA, 255 bp, Glycine max
ttgaggatgtaccactccggtgccgttttgcttcgcgatgggcgagttcttctcgctgggagcaaccctcacacgtattacaatttcaccaaagtgttgtttccaacggaactgcggttagaagcgttttctccttggtatcttgagcccggattctctaacgtgcgtcccgcaatagtatctcctgcgtcccaaacaaaactcaagtacggtcagacgttgaggcttcggtttaaggtgagcgcgactttggtt

SEQ ID NO: 155859 - DNA, 254 bp, Glycine max
tgtcgtgacataagcaaaaggaaagaatatcaacaaggtaaagtagattccttactagacatggcgttgaaggacacattctacatatctcatggatcaccaactttgtccatagatgaatccattcaggccaggaagttccttcagtcatggaagaaggacgtgtttcctcaaagacccgcttcaattcttgtcatctctggtcattgggaaaccgcagttcccacggtcaacgtcgttgactccatcaacga

SEQ ID NO: 155860 - DNA, 252 bp, Glycine max
ttagcatcatcctgatttgattatgtgccggaagcagccagggattgccattggacgactgtgcgagatatgtgatggcaagtgtgtgatatgtgactcttatgtgcgtccttgtacacttgtccgagtttgtgatgaatgcaactacggatcatttcagggtcgatgtgtcatatgcggaggagttggaatatctgatgcctactactgcaaggaatgcacacagcaggagaaagatagagatggttgccc

SEQ ID NO: 155861 - DNA, 251 bp, Glycine max
tacgaaacagaaaatgccaggtctcacagcaccttccgattactcccaagaacccccccgccactcttctcttctcatcaacgccaaggaacctttcaatgcggagccaccgcgtgctgcgttggttgcttcctacgtcaccccttccgatttcttctataagaggaaccacggtccaatccccatcgttgagaacatcaacagatattccgtgaacgtgtccggcttggtggagcgtcccaaacagctct

SEQ ID NO: 155862 - DNA, 244 bp, Glycine max
cacacaccttgttttcctttctatagagacacacagagagagccataaacacccttcaatggctaccactaccactaaagtttacattgtttactattctatgtacggacatgttgagaagctagctgaagagattaaaaaaggagctgcttctgttgaaggagtagaagcaaagctatggcaggtacctgaaacactggctcaagaggtccttgggaaaatgggagcactccaaagagtgatg

SEQ ID NO: 155863 - DNA, 253 bp, Glycine max
tgagattttgctgctctttgaagaagggtgtttgcttgattttggagatgtcgctgctctcagatctcatcaaccttaacctctcagacactactgagaaggtgatcgcagagtacatatggatcggtggatcaggaatggacctgaggagcaaagcaaggactctcccaggaccagttagcgacccttcaaagcgtcccaagtggaactatgatggttccagcacaggccaagctcctggagaagacagtga

SEQ ID NO: 155864 - DNA, 253 bp, Glycine max
gtgacaagttgagtatgcaagttaaacaaacaactgcaagggaaataggggcctaactttatatatctgcgtgagtgagtgcgtcatttctttctttctctgcttccctaaccaactgaaccagcagcaacatttgcgcaaatcgaaattgattctctgccacttaacctaaaatggaaatctttccgattcccgccgaatcctacactctcggcttcatcggcgccggaaaaatggccgagtccattgcccg

SEQ ID NO: 155865 - DNA, 248 bp, Glycine max
gtgaaagccaagattcaagataaggaagggattcctccggatcaacaacgtttgatcttcgccggaaaacaactcgaagacggcagaaccctcgccgattacaatatccagaaagaatcgactctgcatttggtgcttcgtctccgcggagggatgcagatcttcgtgaaaaccctaaccggcaaaacgattacgctagaggtagagtcctctgacacaatcgataacgtgaaagcgaagatccagga

SEQ ID NO: 155866 - DNA, 247 bp, Glycine max
tgaagtttgtggggggtgaaactgcagcattgagcagagtatatgaatacttttgggaagaaggacttgctggagggtatatagaagagaccaggaatgtggatatgtggggcctgattattctaccaaattctcaccatggcttgcctcaggagatttgtctcctcgtttcatatatgaagaggtgaagagataggagaatgatagactagcaaatagttctacctactgggttttgttcgagttg

SEQ ID NO: 155867 - DNA, 240 bp, Glycine max
gtttgggtttcacaaacagacacacagtcggttcttccttctcaaatattcttgagatctcccattttctccgaagcaaagccatggctaagggtcctggtctctactctgacatcggcaagaaagctagggatctgctgttcaaggactaccacagtgaccagaagttcaccatcaccacctactcaccgactggagtggctattacagcatcaggaaccaggaaaagtgaactgtttc

SEQ ID NO: 155868 - DNA, 225 bp, Glycine max
tttgattgcacacactggtggacccgcaattttggaccaagtttaggcgaagttaggcctgaagcctgaaaaaatggaagctactagacatgtgctcagcgagtatggtaacatgtcaagtgcatgcgtgctattcatacttggatcaaatgaggaagtaatcaagagaaaatggacttggcacaaccggtgaaggtcttgactggggtgtgctattgggttcgg

SEQ ID NO: 155869 - DNA, 247 bp, Glycine max
tggtggaagggtgcatgcacggggacctggacaatgtctacagaacccttcaacagttggagaaatctgaaaacacgaaaatcgaccttctcctctgctgcggcgatttccaagccgtgaggaacgagcatgacttgaagagcctgaacgtccctctcaaataccgctccatgaaactccttctggaagtactattccggcgccgaagttgccccctaccccgacatcgtcatcggcggcaaccacg

SEQ ID NO: 155870 - DNA, 253 bp, Glycine max
tattcatcaaactcatcaaaatgaatctgtaccactcctccaccaccaccaccaccaccaccatcttcaccgtcatattcctcctccttgcaatattattcactctcacaccccacaaggccaacggtgccacgtgtcaccctgaggaagaagcgggcctgttgggcttcaaatccggtatccgatccgacccgtccggcctgctcagtaactggatatcgggtacggactgctgcacatggaccggagtaga

SEQ ID NO: 155871 - DNA, 242 bp, Glycine max
tggtggaagggtgcatgcacggggacctggacaatgtctacagaacccttcaacagttggagaaatctgaaaacacgaaaatcgaccttctcctctgctgcggcgatttccaagccgtgaggaacgagcatgacttgaagagcctgaacgtccctctcaaataccgctccatgaactccttctggaagtactattccggcgccgaggttgccccctaccccaccatcttcatcggcggcaac

SEQ ID NO: 155872 - DNA, 248 bp, Glycine max
tgaacgaacagttttgggtgatcggaggtgtatcttctcatctttttgccctatttcagggtttactgaaggtcttggctggtgtgaacacaaacttcactgtgacgtcaaaagcagcagatgatggagaattctcagaactctacatcttcaagtggacatcactcttgatccctccaatgaccctactaatcatgaatattgttggggtggttgttggggtctcagatgccatcaacaatggttat

SEQ ID NO: 155873 - DNA, 246 bp, Glycine max
tgtagaaactgcgaaaatggcatcggagtcaggtcaaagtcccaatccttcttggtttacgcccaaaaggcttcttatgatattttgtctcattaacatgctaaactatgtggatcgaggagctatagccagtaacggtgtcaatggaagtcttgcaacttgcactgactctggaatttgtacaggtggcagtggaattcagggggattttaacttgaacattttcaagatggagttctgtcatct

SEQ ID NO: 155874 - DNA, 244 bp, Glycine max
  unsure (1)..(244): unsure at all n locations
atcagaaaaagcttgatgttgttntcaaatgagggtttctncaaactgcttgaggtcaagtgggaggacagggataatagcatcagaggaggaagatgtgccagtggcagtagaagagagttattctggaaactacattgtggngtttgaccccacttgatgggtcngcccaatantgatgctgcagtgtccaactggggtccattttgggatatacagccccangatgagtgncttgctgaca

SEQ ID NO: 155875 - DNA, 165 bp, Glycine max
ggcaagagcagcgccgacgattggcagagggtgtcttctgagcgcagggcatccatcgggaagcagatggctgatgctgggatcaagtacatccccagcaacactttctctcactatgaccaggtgctcgacgccgccgccaccctcggtgccgttccaccaagg

SEQ ID NO: 155876 - DNA, 254 bp, Glycine max
ttcatcatcatcatcatcattcagagagtgcatagaatgagttcttcttctggtcagagcagtggctatgatctttccttcaagatcttgttgatcggtgactctgctgtgggaaaaagtagcctccttgttagcttcatctccaactctgctgaagatattgctcccacaattggtgttgattttaagatcaagatgctcacagtaggtgggaagagattgaaactaactatttgggacactgctgggcagga

SEQ ID NO: 155877 - DNA, 243 bp, Glycine max
ccccaccatcacgttctccttctacgctgccggcgagaacggcgccgtcgagagattctccagctaccgcgacaaggccaacgtcggcgccgactccttcacctcgtacgccaaagccgccaacgccgcagacctcggattctcgaactacggcaagtccttcaacgagggaaccggcacgttcaccacgtacgctaaatcctcggatggcgaaacaaaagtagggttcacttccgacggcgt

SEQ ID NO: 155878 - DNA, 237 bp, Glycine max
attctctgcacttttcagttacaaagcatttcattgttttacaatatacaacactacaatggctgcttcaacaatggctctctcttcatcatcattggctggccaagctatcaagcttgccccctccacccctcagcttggtgttggaagggttagcatgagaaaaacagcctccaagactgtttcctcaggaagcccatggtacggcccagatcgtgtcaagtacgtgggcccatt

SEQ ID NO: 155879 - DNA, 252 bp, Glycine max
ctactttcccttcccaacaacaacaagatgatgccttctgcagaagcttcctccgaaaccatttgtgtcaccggcgctggtggcttcatcgcctcttggatggtcaaactcctcttggaaaaaggctacactgtccgaggaacccgcagaaatccagatgatcccaagaacgggcacttgaaggagtttgaaggagcctccgagaggttaactctgcataaggttgacctccttcatcttgactccgttaga

SEQ ID NO: 155880 - DNA, 242 bp, Glycine max
ctcgcacctcgactcgctcgtgggacaggcactgttcggagatggcgccgcagcgttgatcatcggatcagaccccgacccagcagtggagcggccgatattcgagatgatatcggccgcccagacaatcctgcccgactctgacggtgctatagatgggcacctcgggaggtgggactcacgttccacctcttgaaagatgtgcccgggatcatctcgaagaacattgagaagatcttgtt

SEQ ID NO: 155881 - DNA, 244 bp, Glycine max
gttccatccgcatccgctagctcgcgcaggcaccagcaggtgaggttattgtgatttgaatggagggaagtggaggtggcggtgcttcaccgtctgcaccgttgaagcaatacttacaggaattctcgaagctgtttcagtactatctggataaatccactccccatccccccgacaggtggattgggactttcgtcattgcatccatctacgttttgcgtgttgtttatgtgcaggggtttac

SEQ ID NO: 155882 - DNA, 235 bp, Glycine max
gtcttctcgactctggtgtgtcaccctttaatggcttcacctatgatcatctctatggaacaaaggttggtggaaccattttcgacagatttagacgccgccacacggctgctgaactgcttgcttcagggaaccaggacaaacttactgttttggtctatgccactgtccaaaagattgtgtttgatacaagaggaaagaaaccaaaagccgtgggggttattttccaagatga

SEQ ID NO: 155883 - DNA, 233 bp, Glycine max
gttgttgagccttacaacagtgtcctctccactcattctcttcttgagcacactgatgtggctgtcctgctcgacaatgaagccatttatgacatctgcaggcgttcactggacattgagaggccaacctacaccaaccttaatcgtttagtttctcaggtgatatcatcactgactgcttccctgaggtttgatggagccttgaatgttgatgtcaatgaattccagaccaa

SEQ ID NO: 155884 - DNA, 233 bp, Glycine max
ctaacatttccctttacttgctaaaacatggtccaagaaaagagactagttgacgaggtgtccggttggctcaaaatttatgacgacggttcagtggaccggacatggtccggaccggaccaattcaagttcatggccgaaccggcccctccccatgaacaattcatagacggcgttgccattcgcgacgtcgccgttactcacggtggtggccagagtggccaccatgtccg

SEQ ID NO: 155885 - DNA, 252 bp, Glycine max
ggttgcaggagctgctgctgctggtggtctttctcttgctgatgttgctgctgaagcaaaacatgcatctgaaatagtgggaacaatgggtgttgctttgactgtgtgctcaattcctggtcaagttgcatcagatcgtttggggccaggaaagatggaacttggtcttggaattcatggagaacctggggcagctgtggctgatattcagcccgtaaatgtggtggtttctcatgttctacagcaaatatt

SEQ ID NO: 155886 - DNA, 258 bp, Glycine max
atcttgggcacccacacttctgagaatgagcccaattacctcatgctggcccaggtccaactccctcttgatgatgctgagaatgatgcccgccactatgacgatgatcgccccgacatcggtggctttggctgcgccaatggcaaggtccagatcatccagcagatcaaccatgagggtgaggttaacagggctcgctacatgccccagaaccctttcatcattgccaccaagaccgttagtgctgaggtttatgta

SEQ ID NO: 155887 - DNA, 253 bp, Glycine max
ccatagtgacgaacctcatgttcttgactacagtaaatatcctggtctggaggagcgtcaaaggtttgtttataattatttgagttctgaaggttagtccactaaaatcttactcccacataccactgaaaatacatattattggcagagatctggatttaggtaactgctattgatctattctcagctgaaagaataaacttgctctacaatttggttgatttgtgatatcactccagcttatatttttagt

SEQ ID NO: 155888 - DNA, 258 bp, Glycine max
caagttgtaatatttgtggggtaaaagccatgattcagataattggggcttgctgacataaaggcatgattgaactctccactcctttctatataatcccttccacacgcacttctccatggtcatagtcacaactagagatgacggttcaaaaggaagatttgggcttgagtctaagtttgagcttccctctcctctcctcttctccttccagcccacaaccctcagaaaccctcttggaacgaccctattttcact

SEQ ID NO: 155889 - DNA, 260 bp, Glycine max
actccgtccaatggaatcctgcaagcatcatattctctgtggacgggaccccaataagggagttcaagaatttggagacaaaaggggttccattcccaaagagccaacccatgagaatatactctagtctttggaacgctgaggattgggccacaaggggtgggcttgtgaaaacggattggagcaaggccccattcacagcctcatacagaaacttcaattcccaaacttcttcctccactggccaatcactggacgcc

SEQ ID NO: 155890 - DNA, 262 bp, Glycine max
gaaagaaggaaggagacatttataaaaagctctttcccttcccctaaatccctcacactcattccatttttacctttctctctcgctcgcaaacgcaaataataaaaaacaaggttttagccatggcatcgaagcggatcttgaaggaactcaaggatctccaaaaggatcctcctacctcatgcagcgccggtcctgttgctgaagacatgtttcactggcaagcaacaattatgggtcctccagacagtccttatgctgg

SEQ ID NO: 155891 - DNA, 257 bp, Glycine max
aaataattctcgtagctttgttgctcttataaattctattctggttgacgcttctctcaccatccccatttcgcgttggtgcaaagcatccttcgtttcaatttctctctctcagcgctttctgcaatcgaacctttcatctccaaagggatccacaggccgaaggagaaatggggctgacattcacaaagcttttcagtcggcttttcgcgaagaaggaaatgcgaattctgatggttggtcttgatgctgctggt

SEQ ID NO: 155892 - DNA, 254 bp, Glycine max
ttctttctttatcttctcatttttctcaatacaatttttttctttctttctcaagttttgctacttttctcttcttaaccatagttcacatattatatcatcacatatcatagtgatatcatatcacaatgtgtggcatacttgctgtgcttggttgctctgattcatctcaagccaaaagggtccgcgtccttgagctttctcgcagattgaagcaccgtggtcctgactggagtgggctccaccaatatggt

SEQ ID NO: 155893 - DNA, 253 bp, Glycine max
gggaagtggtagccatgactggggatggtgttaatgatgctcctgccttgaagcttgcagacattggtattgcaatgggcattgcagggacagaggtggcaaaggaagcttcagatatggtgttggcagatgataattttagttcaattgttgctgctgttggtgagggtagatctatctacaataatatgaaggcctttatcaggtatatgatctcttccaatattggcgaggttgcttctatatttttaac

SEQ ID NO: 155894 - DNA, 253 bp, Glycine max
agatggcaaaatttacgtggttaacgactcttccgacaatgacctcgtaaaccctaaaccagggacattgagacatgctgcaattcaaagagagccactgtggatcatttttgatcgaaacatgaacattaaacttcacgcggagctcatgctaacggataataagaccatagatgcacgtggtgccaatgtgcacattagtgagggtgcccaaataacgttgcaatatgtgaaaaacatcatcattcacggt

SEQ ID NO: 155895 - DNA, 252 bp, Glycine max
gaatgagagcatcaaactcttcttcttcgatttccattgcgaacgttactttttcttcttctttctcttcattttcttcgctcttcgatcttcgtccggggactgctccgaataccaccaccaccactcgccgatggccacgatcggaggcttacacgactcccaaggctctcaaaacagcgtcgaaaccgaagccctcgctcgattcgccgtagacgaacacaacaagaagcagaattcgcttctggagtt

SEQ ID NO: 155896 - DNA, 252 bp, Glycine max
cttgactggtacaagggaccaactctccttgaggctcttgaccaaatcaatgagcccaagaggccctcagacaagccactcaggcttccattgcaggatgtctacaaaattggtggtattggtaccgtgccagtgggacgtgttgagactggtgtcgtgaagcccggtatggtggtgacttttggtcccactgggctgacaactgaggttaagtctgttgagatgcaccatgaggctctcacagaggctctt

SEQ ID NO: 155897 - DNA, 256 bp, Glycine max
cactgctgctcactggtcagagaagtacaaccatgtgatcaaggccatgactcaaaagggttatagtttcgtcgggtatctacctttgattcccattgaagagatagccaaggcattcaagcagggagaggcgaacttaaaaggagataatgcagcctctgaggaacaaagattagaatctgcatctgattctgattaaattcagctttacttcttcaaaaaaatttgcttatgagtgaacttgttttgtgggttg

SEQ ID NO: 155898 - DNA, 250 bp, Glycine max
gtgaaagagaatccgaggcgaagagaagagaaaaattaagatggaggggaaggagcaggatgtgtcgctgggagcgaacaagttcccggagagacagccgattgggacggcggcgcagagccaagacgacggcaaggactaccaggagccggcgccggcgccactggttgacccgacggagtttacgtcatggtccttttacagagcagggatagcagagtttgtggccacttttctgtttctatacatc

SEQ ID NO: 155899 - DNA, 252 bp, Glycine max
agagagtggtttcagtgagtgatcggtgttcacttgatccttcataagtcgtcatcatcatcatcatcatcaccgttgattgaagaagatgccgatcagaaacatcgccatcggaaggcctgaagaggctactcaccccgacacgttgaaggcggggttggctgagttcatctccacacttgatcttcgtgttcgccggttcaggttccggcatcgcctacaacaagctcaccgacaacggcgccgccactc

SEQ ID NO: 155900 - DNA, 252 bp, Glycine max
gacaaaggctcgtgaagttctgcaaagagaagatgacctgaatgaaattgtccagcttgtgggcaaggatgctttagctgaaggagataagatcaccttagaaactgcaaagcttttgagagaggattatcttgctcaaaatgcctttacaccatatgataaattttgccccttctacaagtctgtttggatgatgcgcaacattatccatttctacaatttggcaaatcaggcagtagagaggggagctgg

SEQ ID NO: 155901 - DNA, 248 bp, Glycine max
gtgcagtaactccaaatgcttatctgcaattggatcttgagttggtctcgtggaagaccgtgtctgacattaccaaggatagaaaggttctcaagaagactttgaaggaaggggagggatatgaacgaccaaatgatggagctgtagttcaagtgaaactgattggcaagttgcaagatggaactgttttcgttaagaagggctacgttgatgaacagccatttgagttcaaaattgatgaagagcaa

SEQ ID NO: 155902 - DNA, 247 bp, Glycine max
ctttgacagggagtgggtctgggagtaggaatagtagtggaattggggactctcacatcattgaagctggaaatctaaggatatcagttcaggttctgaggaaagtgaccgagaactttgcgcctgagaatgagcttggccgtggtggatttggggttgtttataagggggagttggatgatggtactaaaattgcagtgaaacgaatggaagcaggtgtgattagtagtaaggccttggatgaatt

SEQ ID NO: 155903 - DNA, 251 bp, Glycine max
gctcttcctccctttctcacagcaatggccgccgcagcacgccctctcgtcaccgtgcaggccctcgacggtgacatggcaaccgatgcctccgccaccgttcccatccctgacgtcatgaaggcctctatccgccccgacatcgtcaatttcgtacactcgaacatctccaagaacagccgccagccatacgccgtcagtcgtcgcgctggtcaccagacctccgccgaatcctggggtaccggccgagc

SEQ ID NO: 155904 - DNA, 248 bp, Glycine max
acaatttctggctcaaaaaactccctcttgttgtgtctcactttcatctttctataatgatacccttgttccctgcctaacatgtgcatgtggctgccaaagtaactcatctcagtcagggacttgtgtagatccagatacaccacatttggcatcagttgttgctggctctgggaagaataacttttcacctttggttcaatgtactcatcatatgtgcccagtcagtatccactggcatgttaagc

SEQ ID NO: 155905 - DNA, 243 bp, Glycine max
atttcttttcccctttttctctttgctgactaactcaatcaatttagtgtggcttccgggaacaattcaggaatcatggctagggttttagctcagtctactggtatgcctggcctactgagtgggcgaaggcatgggccgcataaaggatcaggagaaacgaaaagatctgttaaaatgatgagtaccttacgaattcctgctttaagaatgtctagtttctctggattacggacacttaat

SEQ ID NO: 155906 - DNA, 226 bp, Glycine max
aatttaagtgaggagctagagaatgatgatgaagtctgctatgtgtgcagtggtggttgtagcacttcttcttctggcggaggtggggcccatggctgaggctgtgacatgcaccccaacagagttgagtccgtgtcttccagcaatcacttccggtgctaaaccttccaatgcttgttgcacgaagctgaagcagcaaaaaccatgcttatgtggctacttcaaa

SEQ ID NO: 155907 - DNA, 247 bp, Glycine max
gcaattggttggcatcagtgccatgctgatggcatccaaatatgaagaaatttggactcttgaggttgatgaattagtccgcctcacagattatactcatgaacaggttctggtcatggagaaaaccatattgaataagctggaatggaatttgactgtgccaacaacttttgttttcctggttcgtttcatcaaggcatcagtcccagatcaggagttagaaaacatggcacattttctgtctgag

SEQ ID NO: 155908 - DNA, 247 bp, Glycine max
ataatgaccagttctcgagagcgtttggtgaaggcggtgaagcagtttgtggaggttcgctacaaggttttcggcgaccgttatggccaaaacatcatcgacatcctcgactttccgattaaggttgtcttgtctcccttcactctcgccttcgatattgcaggctctgctcctcgcggcttcggcgtcccggaactcatctccaagctctctgccacttccgtcttcgctatagctgctcttggga

SEQ ID NO: 155909 - DNA, 245 bp, Glycine max
gcaattggttggcatcagtgccatgctgatggcatccaaatatgaagaaatttggactcttgaggttgatgaattagtccgcctcacagattatactcatgaacaggttctggtcatggagaaaaccatattgaataagctggaatggaatttgactgtgccaacaacttttgttttcctggttcgtttcatcaaggcatcagtcccagatcaggagttagaaaacatggcacattttctgtctg

SEQ ID NO: 155910 - DNA, 245 bp, Glycine max
ccgttctctactgtccgatctgactcactgagttgctttctctgctcgactcggatgagttagaccggaagatcgcgccgcattaatcgccatgtctgcaccagtgaatattattgtaggttctcatgtctggattgaagatccagcacaagcatggattgatggagaagtttctaaaatcaatggtgaagaagtccatgctcgcaccacagatgggaaagcagttgtcaaaaatatttcaaagg

SEQ ID NO: 155911 - DNA, 235 bp, Glycine max
attggagctagcctgacatgccttgttagccaacgaaggtggttcggttggtaagaatacgatcaaaacacttgtgtaaacatggcttaaggggataagttcttttggttttcagatgtggaatttgctagggagactttggcatgtgtcaacccatatagcatccaattggttaaggaatggcctttaacaagtaaactagacccgcaaatctatggtccacaggaatcaacaa

SEQ ID NO: 155912 - DNA, 238 bp, Glycine max
atcagactccaaaacagttaaccaacaagcttacttttatgccagagacctcgaagtccatcccaaggacacatttgtgttcagtatagatggcaccgtactctctaatattccatactacaaaaaacatggatatggggtggagaaatttaactcgaccttgtatgatgaatgggttaacaagggcaatgcaccggcactgcccgagactcttaagaattacaacaagctggtgtct

SEQ ID NO: 155913 - DNA, 243 bp, Glycine max
cccaattcttccccctccacccacccagcatatctctctattcctatttattagcacccctcacattaccttgtgtcaccaactactttgactcctttaccataccattacaataattatcaaacctaaccagtaaaaatggtgaccgtggaggaaatccgcaacgctcagcgttcccatggacccgccaccatcttggccttcggcaccgccacgccgtccaactgcgtctcccaagccgat

SEQ ID NO: 155914 - DNA, 239 bp, Glycine max
actcattctccatacctcaacgaagatgttaaagagacggcaacactttgctgtccgccttgaccgagcagagcttcgtcatggccctcgattttgccctaaagtactctcagtcacaacagacaccgtcgtcgtcgtcgtcgtcatcaatggcaccgaagcagaccaaggctgagaagaagatcgcttacgatgcgaactgtgcgacctaatggaggagtacggccagatcctcgttg

SEQ ID NO: 155915 - DNA, 245 bp, Glycine max
caagcctaagcctaagcccaagcccgctgcgaaagccaaggatactaaggcaactaaatcgaaggcaccagctaagcccaagccagctgctaagcctaaagccaaagctccagccaaggccaaacccgctgctaaaccaaaggcttctgctgctgccaagcccaagcctgctgccgccaagcccaaagccgctaaaccagctgccaagtccaagcctgctgctaaaacaaaggctgttcctgcca

SEQ ID NO: 155916 - DNA, 241 bp, Glycine max
attactatacacaccctctttctcctcctcctccttcttcttctactccttctttctctttttcattctttctttcaacatgggtggcatcagcctcgaagaaataaaaaacgagaacgtcgatctggaacggattccaatagaggaagtgtttgagcagctgaaatgttcaagagcaggtctaacatcagaggaaggggccaatcggctccaagtctttggaccaaacaaattggaagag

SEQ ID NO: 155917 - DNA, 236 bp, Glycine max
cctttatctcgggacttctaagaagctctccctctccagaaatggcatatgctccaagtgcactggtaagggttctaagtctggtgcttcgatgaagtgtgctggttgtcaaggaactggtatgaaggtttctataagacatcttggcccgtccatgattcagcagatgcagcatgcttgcaatgaatgcaagggtactggagaaaccatcaacgacagagatcgctgcccacagt

SEQ ID NO: 155918 - DNA, 237 bp, Glycine max
  unsure (1)..(237): unsure at all n locations
cgaaacagtggctacagcctctccagcagttaccaagtctacaccagaagggaagncaaacattgaggaagggcagtgttgtgataactggggcttcatctggactaggcctggccactgctaaggctttggctgagacgggaaaatggcatgtaataatggcctgcagggattacctcaaagctgcaagagctgcaaaatccgctggcatggctaaggaaaactacaccatcatgc

SEQ ID NO: 155919 - DNA, 236 bp, Glycine max
gtttaaacctaattctcatttcttcatcgttcgattcttctcctcctaaagatgcagatcttcgtgaaaactttgaccggtaagaccatcacccttgaggtggagtcctccgacaccatcgataacgtgaaagctaagattcaagacaaggaagggatcccacctgaccagcagagacttatctttgcgggtaaacagcttgaggatggtcgaacccttgccgactacaacatcca

SEQ ID NO: 155920 - DNA, 242 bp, Glycine max
agtgcctataatcatgattggtcctggcactggattggctcctttcagaggtttcttgcaggaaagattagctctgaaagaaggaggagctgaactcggcccctcagttttattctttggatgcaggaaccgtcaaatggactacatctatgaagacgagttgagtcacttcgttaatactggcgcacttgatgagctcattcttgccttctctcgagagggacccaccaaggagtatgtac

SEQ ID NO: 155921 - DNA, 242 bp, Glycine max
atcaacaaggagaagctgttttcgttcgtcgccactaacactaatcgtttcttcaatgccttacgagaaggaactcgccgctgcaaagaaagcagtcactctcgctgctcgtctctgccagaaagttcagaaggctcttctgcaatccgatgtgcactcaaagtcagacaaaagtcctgtcacagtggctgattatggttcacaagcattggtcagctttatacttgagagagaacttcctt

SEQ ID NO: 155922 - DNA, 238 bp, Glycine max
gtgacaagagctttggtgggaacaggtggccaagacaagagactttggctttgttgaagatacggtcggatatggacgtggcttttagagacgcaagtgtaaagggtcccttgtgggaagaggtttctaggaaactggcagagcttggctaccacagaaatgccaagaagtgcaaagagaagtttgagaacgtttacaagtaccacaagagaaccaaagaaggtcgaagtgggaaatc

SEQ ID NO: 155923 - DNA, 233 bp, Glycine max
ggattgtcatagtccaggacaaggtttgatgcctgctagttttaaggttaggacagttcctttggacggtgatgattctgcaacagaagaagttttggatcctgactttggagaggcagccattggtcgtgttgctccagttgattcaggattgtggtggattattttattacgagcatacggaaaatgctctggtgatctatcagttcaggagagagttgatgttcaaacag

SEQ ID NO: 155924 - DNA, 238 bp, Glycine max
cttcaatttggaagaaatcactcgaatttgatcgtacaagattcttagatgcaaaattggatttcagtggcaatgacttcaactatttcccctttggatctggaagaagaatttgtgcaggaatagcaatggctgagaagacggttttgcattttcttgccacactcgtacacttatttgattggacagtaccccaaggagaaaagttagaggtatcagagaaatttggaattgttct

SEQ ID NO: 155925 - DNA, 234 bp, Glycine max
aacacaacaacactctctcttctcgctcttggcttttcgctcttcactcactctcattcattcatttccaccgttcatggatcccgtaagcgtgtggggtaacacgcccttggcgacggtggatcccgagatccatgacctcatcgagaaggagaagcgccgtcaatgccgcggaatcgagctcatcgcctccgagaacttcacctccttcgccgttctcgaggccctcggcag

SEQ ID NO: 155926 - DNA, 236 bp, Glycine max
aaagtttcttcctttctctgctctttgccttctctgacacatttggtgccttgtagagcgtgttttggcaggaaggtggtatggcgaaggacgttgaggttgctgagcgtggctccttctctgggaaggactaccaggaccctccaccagcaccactcattgatgctgaggagctcacaaagtggtccttttacagggctctcattgctgaattcattgccactttgctcttcctc

SEQ ID NO: 155927 - DNA, 235 bp, Glycine max
cttgcttccaatacatacctggttggccattctgttacccttgctgctatcataacgacgtgcaacttgtatttaggattcagccagctcttagttaagagcttcacctccgagttccctcacgtcgagaggtacttttggacattggtcaaccagcctaacttccgaaagatattaggtcaggttaagcatactgagtctgttccacccattccatccgctgcaaagaagcctt

SEQ ID NO: 155928 - DNA, 238 bp, Glycine max
gagatcgtcccaatgctccattggtgcttaagggcatcacttgtacttttaaagaaggtagtagagtgggagtcgtaggaaggactggaagtggaaaaagtacactcataagtgctttgtttcgcttagttgatccagcaaaaggttatattcttatagatgggattaacatatgctcaattgggttgaaggatttgagaatgacgctaagcatcatccctcaagaaccaactctttt

SEQ ID NO: 155929 - DNA, 232 bp, Glycine max
aaatcaatagccatgaagatcgttcggagagacctagtacctaatggacctggcagcgttaagatggtggcagtggattcggatgatctctggtttgcgtataacttgatagctcccggagactctgtcatggccgttactgtcaggaaggttctaagagaagctgcttatggcggacgggaagcagaacgcgtcaagctcaaattggaaattaaagtcgaagagctttctg

SEQ ID NO: 155930 - DNA, 234 bp, Glycine max
tttcaaccccatccaatcctcacatgcatgctgtctctgccaaagtgccaagtcacataacatttccattgttaccattctttctttccatcacaaccactaaacaaacctctgatcctcactttctctcacacaaaaacacactcaccatggatcatcgcaaaccattgctacccacttcctctgatgctgctcaattccacacactcgcaaggaccttcttctagttatttg

SEQ ID NO: 155931 - DNA, 237 bp, Glycine max
caagaactctccaaggatcctccttcccacgcaattcatttggtgggaaaatccaagaagagggtggaatttcaagccagggaagatggattatttcaatgcaccaggaagataccatctctttgttccggggccggttaacatcccggaccagatcattcgggccatgaacagtaacaatgaggactaccgttctccagcaattccagctatgaccaaaacactgcttgaggatgt

SEQ ID NO: 155932 - DNA, 237 bp, Glycine max
ggaaaaggcgtcttcataaacgccgcccaaaacttctcatacccttttattcattccattcgtttctagggttttcttttctttgccgagaaaatgagagagtgcatttcgatccacattggccaggccggtatccaggttggaaacgcctgctgggaactctattgccttgaacacggcattcagcccgatggacagatgccgagtgacaagaccgttggcggaggagacgacgcc

SEQ ID NO: 155933 - DNA, 235 bp, Glycine max
gtcttcttcggatcggtggaacttgaccctgccggcgtgaattccgacgctactcgtggcgccgaattgctatagcggtgacgaatatgaaggttttcgttaagactctcaaaggcactcacttcgaaatcgaagtgacgccgcaagacacggtttctgaagtgaaaaaaaatatagaaactgttcagggtgcagatgtctatcctgctgcacagcaaatgctaattcatcaagg

SEQ ID NO: 155934 - DNA, 236 bp, Glycine max
tttcgagacctcagcttgactatccattctggcaagacagtggctcttgttggtgaaagtggaagtggaaaatcgacagtgattgccttgttgcaaagattttataatcctgattcaggccaaatcacacttgatgggatagaaattcgtgagttacagctcaagtggttaaggccgcagatgggtcttgtaagccaagagccagttttgttcaatgaaactatacgtgccaatat

SEQ ID NO: 155935 - DNA, 231 bp, Glycine max
cggagacgcagtgcccgggccaatgcgcgtggcccttccagcagcccatttacggcccacagaacccgcccttggtcgcgcccaacaacgacgtgggcctcgacggaatggtcatcaacgtggctaccctattggctgggaccgttaccaaccctttcgggaatggctacttccaaggacccaaagaggctccgctcgaagccgcttccgcttgcaccggtgtgtacggaa

SEQ ID NO: 155936 - DNA, 233 bp, Glycine max
gaaaattttatcctcgtttcaaccttgaagataccataagtttccaggatttggatgatcatagcaagaatgttctcaaacgattataccatgactactatttctgtcgtcaagagaatctttggaggcaaaatgcattgaagaccctgcctgtacttctaaattcatcagacatgctggcctgtggggaagatttgggtctcattccatcttgtgtccatcctgttatgcaa

SEQ ID NO: 155937 - DNA, 241 bp, Glycine max
cttcccttctccatcatgccaaacgacagcgttctgagtcttttctccttcgttaccctcttcacatgccttctctctgctaattcccacgatgaccatattttcctaccgagtcaactccatgacgatgactcagtgagttgcactgctaccgacccaaaccttaactacaagccggtgatcggaatcctgacccaccccggcgacggtgcctctggccggctcagcaacgccaccgggg

SEQ ID NO: 155938 - DNA, 260 bp, Glycine max
gtgtacatagagagattaggccaagtcgatgccacgaagatgatgcaagtcacaaccatggatcgctacatcaaataccacgtaaaggagtttgagaggacatttgatgttaagtttgcagcttgttcaattgctgcaaagaagcacatagatcaaagttcaactatcctggacgtgcagggagtggggcttaaaagcttcagcaaacatgctagggaacttgttactcgccttcagaagattgacggtgacaactatcc

SEQ ID NO: 155939 - DNA, 258 bp, Glycine max
gttcgttgtcactgcagtcgccaccgacaccagagctgtgggagaactcgcgggaatcgcggtgggagcgactgtgatgctcaatatactcatagcagggccagtatccgggggctcaatgaacccagtaagaacactaggtcctgctgtggcggcaaacaactacaaagccatatgggtctatctagtagctcccatacttggagctttagctggggcaggtacctacactgcagtgaagctgcctgaagaagatga

SEQ ID NO: 155940 - DNA, 154 bp, Glycine max
cgctctgttactgtctctgtgtttgcggctgaggattccgaacgagcgaccttcttcgtttctcgcaaagtttaagtcatcatgggtaaggaaaagactcacatcaacattgtcgtcattggacatgtcgactctgggaagtcaactaacactg

SEQ ID NO: 155941 - DNA, 255 bp, Glycine max
atttcaatacccttgctgggacacgcgccatatctccgttcactgctccaccaagcattgtacaggctatcactgcgctatggacccttgatccacgtcatgatcggttcgaagcacgtggtggttccgtcgtcggcggagacggccaagcagatcctcaaaacctcggaggaggcattctgcaaccgtcccttaatgatagcgagcgagagcctaacctacggcgcggcggactacttcttcatcccctacggc

SEQ ID NO: 155942 - DNA, 260 bp, Glycine max
gcctctgcttccgacacaaatcaatctttctgatcatatattattcttttgtttttttaatttattctccatacacatgcagacactaagttcgaacaagttcaggagcggcatggatttcttccaccgcgcgaaggcggtgcgcctccgcagccaccacgacaagtacctcctcgcggaggaggacgaggagtcggtgacgcaggaccgcaacggctcctccaaaagcgcacggtggacggtagaatacgtggccgaat

SEQ ID NO: 155943 - DNA, 262 bp, Glycine max
aaaggattctacccgccgctcgatgggaattgcgcttcaaggcgtctcgtagggctaatccgcctcacgagggtcaccaacggcacgtgcctttggggggccgaggccccctactgctggtcggcaaacggacggcgggcgcacgcgtcgcttagaacccggattctgacttagaggcgttcagtcataatccaacgcacggtagcttcgcgccactgacttttcaaccaagcgcgatgaccaattgtgcgaatcaacggtt

SEQ ID NO: 155944 - DNA, 263 bp, Glycine max
ttcatagtgaggcgtcagttgagaaaaatgccagagagctaaaagagtacattgaggaaatttattggggttcaaataaacgtgttatgcttcttggacatagcaaaggaggagtagatgcagcagctgctttatctttgtattggtctgatttgaaagataaagttgctgggttggcattagcacaaagtccctatggtggaactcctatagcttcagatcttctgcgagaaggacagcttggtgattatgtaaatttacgg

SEQ ID NO: 155945 - DNA, 253 bp, Glycine max
ggcctggcaggagtcactgctgccacaactacttatccattggatcttgtaagaacacggctggctgcacagacaaattttacctactacagaggtatctggcatgctttacacacaattagcaaggcagagggaatatttggcctttataagggacttggaactacactcttgactgtagggccaagtatagctatcagcttctctgtgtatgaaaccgtgagatcttattggcagtcaaatagatcggatg

SEQ ID NO: 155946 - DNA, 154 bp, Glycine max
gccggaaggacggaggattttctctctcaggtcggcctctccacgctccacagcgccgtcgcggttctcaaatcctgccaaaagattctccccttcgccgccgaggtcaacgtcgttgaccgctgcgttgaggtcatcagctgcaaggcttgca

SEQ ID NO: 155947 - DNA, 161 bp, Glycine max
ttggaatccaaaaatgagagacatcatcagcattcacataggtcaggccgggatccaggttggcaactcctgctgggaactctactgcctggaacatggcatccagcccgatggcatgatgccaagtgactcctccttcggtgtgagcctcacgacgcctt

SEQ ID NO: 155948 - DNA, 258 bp, Glycine max
gccgctggtggagctcgtggcggaacaggggaacggcatggcggagaaggccatggtggtgctgaacagcctggcggggattcaggaagggaaggacgcgattgtggaagaaggcggaattgctgctcttgtggaagctattgaggatgggtctgtgaaagggaaggaattcgcggttttgacccttcttcagctctgtgttgatagtgtcataaacagagggtttcttgttagagagggtgggattcctcctctcgt

SEQ ID NO: 155949 - DNA, 262 bp, Glycine max
gacaggttagttttaccctactgatgacagtgtcgcaatagtaattcaacctagtacgagaggaaccgttgattcgcacaattggtcatcgcgcttggttgaaaagccagtggcgcgaactaccgtgcgttggattatgactgaacgcctctaagtcagaatccgggctagaagcgacgcgtgcgcccgccgtccgtttgccgaccagcagtagggggcctcggccccccaaaggcacgtgccgttggtgaccctcgtgagg

SEQ ID NO: 155950 - DNA, 257 bp, Glycine max
ggcaaagatagtggcagagctccaagctgtgaagcacaacagtggcaagtcctacaatcagttagcggaggagactggactcaccaacgtctatgttgctcagcttctcaggagacaggctcagctcaatccccaaactgcccctctacttcgggcagcgctgcccgacctgccccaagaccttgtttctgagatgatgagaccccctttgaggtcttatgacctaatctcatccaagactccactgtctataggtt

SEQ ID NO: 155951 - DNA, 254 bp, Glycine max
gcccttttgctgaaaggggttttaattgccttgctaatgggagaaaagatagaggttacacaaaatggaggtggaaaactaagaactgtgagattccaaggtttgatgtccgtggaatactcgaacgacttcgtgggaaaagggtggttttcgtcggcgattctttgagtaggacgcaatgggagtccatgatatgtttgctaatgacaggagttgaggataagaagagtgtctatgaaatcaaaggcaacaag

SEQ ID NO: 155952 - DNA, 256 bp, Glycine max
ggcttttgcaatactccccaagtctccggtgcactgcgcttgaagcatgtgcacatcctttctttgatgaacttcgtgaacctaatgctcgcttgccaaatggtcgtccatttccccctctattgaacttcaaacaggaatgatctggagcatcttccgagcttgttaataagttgatacctgaccatgtgaagcggcaaatggggatacagtttatgcatctgggaggatcgtgacgatacagcttacgggacat

SEQ ID NO: 155953 - DNA, 259 bp, Glycine max
gtcttgcaattgaagttgaagtcttgcccttctctcttcaactccaaacacaagacatcatcatccatggctgcctccgtctccactgtcggagctgtcaacagagctcttttgaacctgaatgggtctggacctggggtttcagctcccagttcatccttctttgggagcagcttgaagaaggttattggctcaagggtccccaacacaaagatttcctctggaagcttcaagattgttgctgtagaagagaagaaag

SEQ ID NO: 155954 - DNA, 258 bp, Glycine max
gcggaatttacatccaccaccactaacactaacagtaacagcggtctcaggttgaaagccaaagtagccatagtcaccggaggtgcaagtggcatcggcgaacgacggcgcgtgtgttcgcggagcaaggcgcgcgtatggtggtgctcgcagacatccaagacgagcttgggaatcaggtggctgcgtccattggaacccagcggtgcacctacatccactgcgacgtggcagacgaagaacaagttcaaaacctcg

SEQ ID NO: 155955 - DNA, 263 bp, Glycine max
atcgacgaccacaactccgcggaggaccgaacctacaagctcggactgaaccggttcgctgatctcaccaacgaggaatacagggccaagtacttgggaaccaagatcgatcccaaccggaggctcggaaagaccccgagcaaccgctacgctccacgtgtcggcgacaaattgcctgattccgttgattggaggaaggaaggtgctgttcctcctgtcaaagaccaaggaggctgtgggagctgttgggcattctcagcaat

SEQ ID NO: 155956 - DNA, 252 bp, Glycine max
caaaaagaaagaatcccaggcgaggagaaagatggaggggaaggagcaggatgtgtcgttgggagcgaacaagttccccgagagacagccgattgggacggcggtcgcagagccaagacgacggcaaggactaccaggagccggcgccggcgccgctggttgacccgacggagtttacgtcatggtcgttttacagagcagggatagcagagtttgtggccacttttctgtttctctacatcaccgtcttaa

SEQ ID NO: 155957 - DNA, 254 bp, Glycine max
caaaaaaaccctctctttctctctcttccaaaacctaattttcattttttctcttcaaacaaattttcaaaatgcgtgagatccttcacatccagggtggccaatgcggcaaccagatcggcgccaagttctgggaggtggtttgcgcagacacgggatcgaccccactggaaggtacggttgggactcagagcttcagctcgagaggatcaatgtctactacaacgaagccatctacggccggttcgtgccgc

SEQ ID NO: 155958 - DNA, 252 bp, Glycine max
gagagaaacaaagcagcacccatttggatcctctcttctcttctttgatctccgttaccctttttgttttctcaacagagagagagagagagaatctttcgaagttcgtttgcgtgtgttgtgtggtcagtcaccgatggcagcaccacctgcgagggcacgtgccgattacgattacctcatcaagcttcttcttattggcgatacggtgtgggaaagagttgtctgcttttgcgattttctgatggttcc

SEQ ID NO: 155959 - DNA, 253 bp, Glycine max
ctcttcttctcttgcggctagggttttagcgcagttcttctagatttaaggaagctgggtaaggaaaaggttcacatcagtattgtggtcattggccatgtcgactctgggcaatccactaccactggtcacctgatttacaagcttggaggcattgacaagcgtgttattgagaggtttgagaaggaagctgctgagatgaacaagaggtctttcaagtatgcctgggtgctggacaaacttaaggctgagc

SEQ ID NO: 155960 - DNA, 262 bp, Glycine max
ctagtggcgatcggatccagctacagcatagagatcaaggaaggcaggaaggaagatgttgggtgttataaggcacaagagtattcgccctgccttctccgcaatcagacacttgtcttctgcagctaaagagattactgtcagggaggctctgaactccgcactcgatgaggaaatgtcagctgatcctaaagtgttcttgatgggtgaagaggttggggaatatccaggtgcatacaagatatccaaggggctgctcgac

SEQ ID NO: 155961 - DNA, 259 bp, Glycine max
ctcctactgcctccccgccacctccagctccaccggccgcctctccttcggcaccaccaccacttcctacgtcaagtacacccccttctccaccatctcccgcggctcctccttctacggcctcgacatcaccggcatctccgtgggcggcgccaaactcccagtctcctcctccaccttctccaccggcggtgcaatcatcgactccggcaccgtgatcacccgcctcgcccccaccgcctacaccgccctccgctcc

SEQ ID NO: 155962 - DNA, 256 bp, Glycine max
gcttattatgggatgagcacaaacctggtgctttattttaagaagcggctacatcagcatagtgctattgcttccaagaatgtctctaattggagtggaacttgctatatcacaccattggttggagcatttttggctgattcctaccttggaagatattggacaattgctgttttttcaataatttatgctattggaatgacactgttgacattgtctgcgtcagttcctggcataaaaccaacatgtcatggac

SEQ ID NO: 155963 - DNA, 254 bp, Glycine max
gcgttttctgcgtcatctccgattccccgacaatggccacccaaatgagcaagaagagaaagttcgtagctgatggagtgttcttcgctgaactgaacgaggttctgacaagggagttagccgaggacggatactccggcgtggaagttagggttacgccgatgcgcaccgaaatcatcatcagagccaccagaacccaagccgttctcggtgagaaaggaaggagaatcagggaacttacctcggtggttcag

SEQ ID NO: 155964 - DNA, 250 bp, Glycine max
ctgcaaaggattctacccgccgctcgatgggaattgcgcttcaaggcgtctcgtagggctaatccgcctcacgagggtcaccaacggcacgtgcctttggggggccgaggccccctactgctggtcggcaaacggacggcgggcgcacgcgtcgcttctagcccggattctgacttagaggcgttcagtcataatccaacgcacggtagcttcgcgccactggctgttcaaccaagcgcgatgaccaatt

SEQ ID NO: 155965 - DNA, 247 bp, Glycine max
gtcagttgctgaggagcgagctggacggaagctgggtggacttagggtcctcaattcttactgggtgaatgaggactctacttataaatactttgaggtgattctggtggatgtggctcatgctgctattagaaatgatcccagaatcaattggctcgccaatccagtgcacaagcacagagagctgcgtgggctcacctctgctgggaaaagcaacaggggtttacgtggcagaggacatctgtac

SEQ ID NO: 155966 - DNA, 252 bp, Glycine max
cttttggtttcttctctccttgataacagcatgtgctggaacatgggaagcctcatgagcgttcttctataataaaggaattagcagacaagatagtgcaaatgagtcaacagaagtttgcctccaatgttgtggagaaatgtttgacctttggaggtccttctgaacgccaattactagtgagtcagatgcttggcaccacagatgaaaacgaacctcttcaggcgatgatgaaagatcaatttgcaaatt

SEQ ID NO: 155967 - DNA, 253 bp, Glycine max
cactcattgccactgccatggacctcacagagaaaaacattgaacttctcctccttgatctcaaaccacacatcgttttgttcgatttttccacatattggctaccaaacttggctcgtagtgtaggaataaagtctcttcagtactggattattagccctgcaacagtagggtacatggcatccccagctagacaaagagaagatgacatgagaaaaccaccttcagggttccctgattgttccatcaagct

SEQ ID NO: 155968 - DNA, 260 bp, Glycine max
atcgacgaccacaactccgcggaggaccgaacctacaagctcggactgaaccggttcgctgatctcaccaacgatgaatacagggccaagtacttgggaaccaagatcgatcccaaccggaggctcggaaagaccccgagcaaccgctacgcgccacgtgtcggcgacaaattgcctgattccgttgattggaggaaggaaggtgctgttcctcctatcaaagaccaatgaggctgtgggagctgttgggccttctcagc

SEQ ID NO: 155969 - DNA, 256 bp, Glycine max
ctcggggagtggaatacttgcacagcttggctcagcaaagcttcattcacagggacttaaagccctcaaacatattgttgggtgatgacatgagagccaaggttgcagattttggtttggataaaaatgcgccagatgggaagtattctgttgagacacgcttggctggaacatttggatatcttgcacctgaatatgcagctacgggaagagtgacgaccaaagtagatgtgtacgcatttggagtagttttgat

SEQ ID NO: 155970 - DNA, 247 bp, Glycine max
aatgctactatttcaatccaggttcttcggcaagtaacggataatttcagtgagaagaacattttgggtaggggagggtttggggttgtttataaaggggaattgcatgatggaactcaaattgctgtaaagagaatggaatctgttgcaacagggagtaagggattgaatgagttccaagcagagattgcagttcttagtaaagttcggcacaggcatttggtcgcccttttagggtattgcatta

SEQ ID NO: 155971 - DNA, 261 bp, Glycine max
atccaaacgtcattaagattcgcgaggagttcccaccacgtagcaagctagatacacaagcctacggtgatcatacctgtataataacaaaacaacatttggaacctaacttgggtgggctcactgttgagcaggctatccagtgcaagaagctgttcatcttagatcaccatgactatctcattccatatttgaggaaaataaatgcaactaccacaaagacttatgctaccagaaccatatttttcttgaaaagtgatg

SEQ ID NO: 155972 - DNA, 255 bp, Glycine max
ggatgttacaaagaacttccttgttattgttgctgagaatggaaggcttaaaaacatagacaccattgcaaagagatttgcacagttgtcaatggcatataagggagaagtgcaagcgactgtgaccactgttgttcctcttccccctgaagaggaaaaggcattgaaggagactcttcaggaaataataggttctggagcgaaggttcatcttgaacagaagattgatccaagcatacttggtgggcttgtgct

SEQ ID NO: 155973 - DNA, 266 bp, Glycine max
ccctcaccaaagaagaaccaaaacaatggcggatcaactcaccgatgaacagatctccgagttcaaggaagccttcagcttgttcgataaggacggcgatggttgcatcacaaccaaggagcttggaactgttatgcttcattgggagcaaaacccaactgaggcagaactccaggacatgatcaatgaagtggatgctgatgggaatggtaccattgacttccctgagttcctaaacctcatggctaggacgatgaaggacactg

SEQ ID NO: 155974 - DNA, 264 bp, Glycine max
caagggaaatctcaaagtgtctgattttggattaagtgcattgcaaaaggtagcattgttcctttgaaccttatcctcagttccatcataagtattctcttactgagtcaaatttggatacgttatcagcataacgagtcttaaacacgcggtgtggatccccaggctatgtggcacctgagctgctattgagcaaggggtatgatggagcagctgctgatgtttggtcatgtggggtgatcctttttgaattacttgcaggct

SEQ ID NO: 155975 - DNA, 268 bp, Glycine max
cgtgtttacccaaggccaagggaacagagagcaacaattctacctctggttcgaccccaccagaaacttccacacttactccatcatctggaagccccaacacatgcatattcttggtggataacattcccataagggcttcaagaatggtgagactattggcgttcctttcccaaagaagcaacccatgagaatctattctagcctgtggaacgctgatgactgggccaccagaggtggtttcgtgaaaactgattggtccaatgca

SEQ ID NO: 155976 - DNA, 265 bp, Glycine max
gatcaagcagctgaaccgcaacggccaccaagggcacaaggagtggatcaacgaggtgaacctgttaggtgtcatgaagcaccctaatttggtgaagttggttgggtactgtgccgaagacgatgagagagggattagaggcttttggtttacgagtttatgccgaataagagcttggaggatcatctccttgcaagagtgccatcgacgataatcccttggggaaccaggttgaggatcgcgcaggatgcggcgaggggtttgg

SEQ ID NO: 155977 - DNA, 263 bp, Glycine max
cacaaacgcacactgaattcaaaaacatcgaaagagagaggcatggccgagcaaaccttcatcatgatcaagccagatggcgttcaaagaggccttattggcgagattattagcagatttgagaggaagggtttcacttgaaagggttgaaactcgttactgtggaccgtccttttgctgagaagcactatgctgatttgtctgcaaagcctttctttagtggtttggtggattacattgtctctggccctgttgttgccatg

SEQ ID NO: 155978 - DNA, 261 bp, Glycine max
ctagtggcgatcggatccagctacagcatagagatcaaggaaggaaggaaggaagatgttgggtgttataaggcacaagagtattcgccctgccttctccgcaatcagacacttgtcttctgcagctaaagagtactgtcagggaggctctgaactccgcactcgatgaggaaatgtcagctgatcctaaagtgttcttgatgggtgaagaggttggggaatatcagggtgcatacaagatatccaaggggctgctcgaca

SEQ ID NO: 155979 - DNA, 263 bp, Glycine max
gtttctgtctctgtgtttgcggctgaggattccgaacgagcgaccttcttcgtttctcgcaaagtttaagtcatcatgggtaaggaaaagactcacatcaacattgtcgtcattggacatgtcgactctgggaatcaactaccactggtcatttgatctacaagcttggaggtattgacaagcgtgtgattgagaggttcgagaaggaggctgctgagatgaacaagaggtcattcaagtatgcctgggtgcttgacaagctc

SEQ ID NO: 155980 - DNA, 264 bp, Glycine max
ggcaaatctcataggtccaagaatatctgttgcatgctttttcagcgaaggtcttaaatcatcaccaaaaccctatggacctataaaagaattattgacagaagacaatcctcccaaatacagagaaaccacagttcggagtatgtacggtatttcgaagctaaaggtcttgatggaacctctgcacttcaacacttcaagatttgagttgaattggtgtgtggtttatttagcacaataaatgaatagattagataagttgga

SEQ ID NO: 155981 - DNA, 259 bp, Glycine max
cacctcctcaacctctgcagcgccttcgatccagaaaacatgactaagagaacaaagaaggctggcattgttggaaaatacggtacccgttatggcgccagtctgcgtaagcagattaagaagatggaagttagtcacacagcaagtttttctgtgaattttgtggaaagtatgctgtgaagaggaaagctgtgggaatatggggatgcaaggactgtggtaaagtgaaagctggcggtgcttacactttgaataccgc

SEQ ID NO: 155982 - DNA, 261 bp, Glycine max
accgaatgagagcatcaaactcttcttcttcgatttccattgcgaacgttactttttcttcttctttctcttcattttcttcgctcttcgatcttcgtccggggactgctccgaataccaccaccacgactgccgatggccacgatcggaggcttacacgactcccaaggctctcaaaacagcgtcgaaaccgaagccctcgctcgattcgccgtagacgaacacaacaagaagcagaattcgcttctggagtttgctagg

SEQ ID NO: 155983 - DNA, 260 bp, Glycine max
gagacaatgatgaagccatcgatgctcagatctctccactcctgcgccacccgcggcgcctctcatctcttccgccgtgggtacgcctccgagccggtgccggagcgcaaggtagccgttctcggcgccgccggcgtctcgggcagcctctctcactgctcatgaagctcaatcccctcgtttcgagcctctccctttacgatatcgccggaactcccggcgtcgccgccgatatcacccacataaacaccagatctgag

SEQ ID NO: 155984 - DNA, 267 bp, Glycine max
ctctttaccagttgccacactacaccgagattccccctaaacccgtttgcgttgttgtttgcgaagaaatggcgactaagaggagcgtgggaacgttgaaggagggtgatttgaaagggaagagggtgttcgtgaggtcgatctgaacgtgcctttggatgacaaccttaacatcaccgatgacactagagtccgtgctgctgttcccaccatcaagtacttaactggtcatggagccaaagtgatcctttctagccacttgggacg

SEQ ID NO: 155985 - DNA, 262 bp, Glycine max
gcagttccaggtatagttcatgtgctgaagaagggaagcatggaggctcgggaaaatgcagcagcaacacttttcagcctttcagtaatagatgaaaacaaggttacaattggatctttaggagccataccacctagtgacactgctaagtgagggtaaccaaaggggtaagatagatgctgcaacagcactcttcaatttgtgcatttatcagggcaacaagggaaaggcagtgatggctggcgttattcccacgctgatg

SEQ ID NO: 155986 - DNA, 261 bp, Glycine max
gggtgtcgtgggtttggccaaaggactgagaaaggccaaaagcatgtaccctttggtggttgctgtgttaccagatgttcctgaagaacatcgtgagattctcaaatcccaaggttgcattgtcagggagattgacctgtgtaccctcctgagaaccagacccagttcgccatggcctattatgtcatcaattactccaagctacgtatttgggagttcgtggagtacaagaagacgatatacctagacggtgacatccaa

SEQ ID NO: 155987 - DNA, 160 bp, Glycine max
gaagtatttgtgccaaagcagaagtcctgtatcaagtggtactctaaataccttaacaatcctccaggcagagtcctcactcttgctgtcaccctcacacttggttggccctttatcttggctttaaatgtttcggaaggccttatgatagatttgcttg

SEQ ID NO: 155988 - DNA, 259 bp, Glycine max
tcgcaggatgatctgaagaaggcttacaagaaagccgccatcaagaatcaccctgacaagggcggtgatcccgagaagtttaaagagctggcacaagcatatgaggttctgagtgaccctgagaagcgtgagtatatgatcagtatggtgaagatgcgcttaaggaaggaatgggtggtggcggtggccatgatccgtttgatatcttttcatctttctttggaggtgggagtcctttggatcaggtggcagtagtcga

SEQ ID NO: 155989 - DNA, 260 bp, Glycine max
gggaaagcaagtaaacattcccccgatactaatgcataattatcccaaaatcaaattataaataactccattatctctcactccttaaattctcaacgccgctcccacttctctccctctctattgcagcatgtgtcttcctcccaacacattctggtcaccggtggtgccggtttcattggcacccacaccgtcgttcagcttctcaaagctggcttcagcgtttcaataatcgacaatttcgataactccgtcatgga

SEQ ID NO: 155990 - DNA, 264 bp, Glycine max
ggttggggaagcgaaggagaggatgtggaggctgaagatagcagaaggtggaaatgaggcatacatattcagcacaaacaattttgttgggaggcagacatgggagtttgatcctgaagcagggactccagaggacgagcccaggttgaagcagctcgtaaggatttctaccaccaccgcttcaaggtcaagccctgtgctgacctcctttggcgttttcagattctgagagaaaataacttcagacaaacaatacctagtgtg

SEQ ID NO: 155991 - DNA, 263 bp, Glycine max
ccatgccaccgacactctcactctcactctcactagtgttggtggtgctgtttttcgccgccgtggacgcgcattttccggcgaccggcgagcttccaacgttccgcgaggcgccggcattccgcaacggaaggaatgccgcaaccgcccgcgaagcgactccgtgatccacatcgcgatgacgcttgacgcgacctacctccgaggctccgtcgccggagtgttctccgtgctgcagcacgcgtcgtgtccggagaacgtcg

SEQ ID NO: 155992 - DNA, 264 bp, Glycine max
ggctaatccctcactcttgttcttcagtctcctcctattatccgccaccgtagccaccaccttctccgccttcaagacaaagttcggcaagacctacgccacgcaggaggagcacgaccaccgcttccgtatctcaagaacaacttgctccgcgccaagtcacaccagaaattggatccctccgccgtccacggcgtcaccaggttctccgatctcactccggcggagtttcgccgccagttcctcggcctgaagccgctccgc

SEQ ID NO: 155993 - DNA, 258 bp, Glycine max
tgattatcttgatgctgctgatacacctggatggtattgtggacctaatttcttttcaactgatgtgctccgtaattttgccaagacccagattgattacatccttggaaataacccaaggaaaatgagtatgttgtaggttttggttctcattacccaaaacatgttcaccatagaggagcatctataccgaagaacaagatcaagtatagctgtaagggtggatggaaatggagggacacttctaagcacaaccca

SEQ ID NO: 155994 - DNA, 256 bp, Glycine max
cgggtatgggagctacattggacctcataatcttcacatgggtagacggacgaccaacttccttggccagcaagtcccggcaactgtttggcttcgcttggtagctggactgaatgctcggttgaggactgatggcatggatcaattcgtgcttcactaggtcctgttgttctctggatagatagtcatgcaaacccccaacttgagtttcatggagttaatattgagctatggatagttcccagctacagcttct

SEQ ID NO: 155995 - DNA, 260 bp, Glycine max
cttaaaagttattaagagcttttgcttttctttctgcgcgcctttcccaattaagtagttcttccttttctcaaagcaaaaaaaatgttcatcgagagtttcaaggttgagagtcctaacgtgaagtacacaggactgagattcagtccgtgtacaactatgaaaccactgaacttgttcacgagaacaataatggcacttatcagtgggttgtcaagcccaaaactgtcaaatatgaatttaaaaccaacacccatgtc

SEQ ID NO: 155996 - DNA, 261 bp, Glycine max
gagcaggctcggtcttcaagtcccacacgcaccaccgcaagggccctgcccgcttccggagcctggatttcggagagcgcaacggctacctgaagggtgtcgtcactgacgtcatccacgatcctggccgtgcgcgcctctcgctaaggtcgccttccgccacccgttccgctacaagaagcagaacgagctcttcatcgccgccgagggtctctacaccggccagttcatctactgcggcaagaaggccaccctcgttgt

SEQ ID NO: 155997 - DNA, 258 bp, Glycine max
aatttaagtgaggagctagagaatgatgatgaagtctgctatgtgtgcagtggtggttgtagcacttcttcttctggcggaggtggggcccatggctgaggctgtgacatgcaccccaacagagttgagtcctgtcttccagcaatcacttccggtgctaaaccttccaatgcttgttgcacgaagctgaagcagcaaaaaccatgcttatgtggctacctcaaaaacgctagcttgaagcagtatgttaactctcct

SEQ ID NO: 155998 - DNA, 260 bp, Glycine max
agaatatttgtggcaaagcagaagtcctgtatcaagtggtatcataataccttaacaatcctccaggcagagtcctcaatcttgctgtcaccctcacacttggttggcccttgctcttggctttaaatgtttcggaaggccttatgatagatttgcttgcgactatgacccatatggtcccatttactctgatcgtgaacgacttcaaatatatatatcagatgcaggagtacttgcagtatgctatggcctgttccgtc

SEQ ID NO: 155999 - DNA, 255 bp, Glycine max
gggacacgaaccaaaggtggttattctaacatcatggttgtgcaccagcgttatgtgctccgatttcctgagaacttgcctcttgatgctggtgctcctctgctgtgtgctgggataactgtgtatagccgatgaaatattatgggatgacagagccaggcaaacatttgggagtggcagggcttggtgggttaggtcatgttgcaatcaaacttgctaaggcgtttgggctgaaagttactgtcatcagtagct

SEQ ID NO: 156000 - DNA, 259 bp, Glycine max
gtttgtgggaacattatggagcccagattcgtaatctccgcatcggaggccgaatcccaatcaatctccaaactcctcccttccctcgtttcctcttctcagtccctcgcccgtccttccatctccaacttcccgtcgccgccgtcggactcgccgcctccggccgcatcttcgtgggcgtgaacgtggagttccccggcctccccttccaccacaccatccacgtcgaacagttcctcctcaccaacatggccaacaa

SEQ ID NO: 156001 - DNA, 263 bp, Glycine max
gggcaaccggggaccggttgaaggaaactcaggctatcaacaaaagtctctcctctttgagtgatgtcatattgcgttggcaaagaaacaggagcatgtaccctttaggaattcaaaattgacataccttctcagccatgtcttggtggggattccaaaactttgatgtttgtgaacatctcacctgatccatcttcaactggagagtcactttgctctcttcggtttgctgctggagtgaatgcctgcgagattggtatccc

SEQ ID NO: 156002 - DNA, 262 bp, Glycine max
agatcgtgagaggggcagtagccgagattccgtgagttgcaaaaatgaagacgattctttccaccgagaccatgaacatcccggacggcgtgagcatcaaagttcatgccaaggtcatcgaagttgagggcccgcggaaaattggtgcgagacttcaagcatttgaatctcgattttcagctcattactgacgaaaacggtaaaagaaagctgaaaatcgacgcgtggtttggttctcggaaaacatccgccgccattcgca

SEQ ID NO: 156003 - DNA, 263 bp, Glycine max
  unsure (1)..(263): unsure at all n locations
gtctaggtggatttgacacagcacatgcgggatgctcgtgcttatgatagagcggctattaaattccgaggagtggaggctgacattaacttcaatattgaagactatgaagatgacttgaagcagatgagcatcttaccaagncaagagttcgtccacgtgcttcgccgacaaagcactggatttccgagaggaagctccaaatatagaggtgtcactttgcacaagtgtggaagatgggaggctcgaatgggccaattttt

SEQ ID NO: 156004 - DNA, 260 bp, Glycine max
  unsure (1)..(260): unsure at all n locations
ggtggctacttttgtggtggcagccacagctggtagcttttaccaagactttgaaataacatggggtggtgagcgtgccaaaatctatgaaaatggaaatcttctcaccctctccctagacagagcctctggctggctttcgttccaaaaaagaatacttgttcggaaaaattgacatgcatntcaaagctcgtgcctggtaactctgctggaacagtcactgcctattatttatcttctctggggcctactcatgacga

SEQ ID NO: 156005 - DNA, 251 bp, Glycine max
caatgggtggtttccctcactatggtgttgttaaggatgattttatcatggtcaagggatgctgtgttggtcccagaagagggtcattacattgcgtcaatccctccttaagcagacttctcgtgttgctcttgaggagatcaaactcaagtttatcgatacctcttcaaagtttgggcatggtcgcttccagaccacacaggagaagcagaagttctttggacgcctcaaagcataattatgttaattgg

SEQ ID NO: 156006 - DNA, 252 bp, Glycine max
catttactcaaagcctgttccggggaccactgcggaggagattgccggtggattgacggagatttcagcagtttttgaatctgtggatgagccggaggaggcactgaagctgttgaacagggcgatgaagttgttggaggataagccagggcagcagagcacgattgcagggattgaggcacgaatgggagtgatgtattacatgattgggaggtatgaggactcaaggaactcgtttgagagtgctgtggc

SEQ ID NO: 156007 - DNA, 251 bp, Glycine max
aaaccatctcttcctctctcagctgtctttttaatcccccttttctcattttcccttttgcaattttcactaacagccttctttctatcttagctctcagaaacttcaataacaatgaagaaagttgtgttgaaggtggaagtacatgaagacaaaatcaagcaaaaagctatgaaggttgtctctggcatttcaggggttgagtcagtttctgtggacatgaaagacaagaaattgaccgtaattgggga

SEQ ID NO: 156008 - DNA, 249 bp, Glycine max
ctcgccatcctactcccaatctcagagagcatttgaagctgccaaagcaattaatgacataaatggtctagtgagctattacagcaccatccttatcatatagattcccttctaacaatggcagaatattttgcggtattgggtgaacaacagatgtctgcagatgctattgccaggtgtctatatgcccttgaatgtgcatggcatcccatgttcaatccattgcagggaaattgccggctgaagttc

SEQ ID NO: 156009 - DNA, 127 bp, Glycine max
gtgatctgcaagctacgatgggtaagggaacggggagtttcggtaagagaaggaacaagacccacaccctctgtgtgaggtgtggccgccgcagtttccacctccagaagagtcgttgcgccgcgtg

SEQ ID NO: 156010 - DNA, 251 bp, Glycine max
ggcgcaagtgaggaacaagcaagtgcttctaaaggactatgttaccggttttcccaaagaatccgacatgaatattgtcgaaagtaccataacattgaagcttccacaaggttccaatgatgtcttgctcaaaaatttgtacttgtcttgtgatccgtatatgaggaatctcatgaacaagcccgaaggccctcccaatagtcgtgcttacactcctggctctccattaataggatatggtgtgtctaaag

SEQ ID NO: 156011 - DNA, 249 bp, Glycine max
atctcatgtacggttctgtaataaagatggaattgagaaacaaccatcaattataacccccaaagaaccagatttgtaaacaacatagaggaagaatgaaaggaatatcctatcgagggaatcatatttgcttcggaagatatgctcttcaagcacttgagccagcttggataacatctagacaaatagaagcgggacggcgggcaatgtcacgaaatgttcgccggagtggaccaataatggtacgct

SEQ ID NO: 156012 - DNA, 147 bp, Glycine max
cattacttgaaggcctctgttgcaggattcctaatgcagaaggcgcttgattatctagttagggctgtgtcaaatcccaagagaccatttgctgctattatcggtggatcgaaggtgtcttccaagattggagttattgacatcctt

SEQ ID NO: 156013 - DNA, 247 bp, Glycine max
cgatgtttttgtgcatgatgtggataggaaagtggaggacatgttctctaaggcttttctctgtgaagggtattcaaggagcaagaagggaggatcaggcacttcaacattccaagccacaggtctcgtttgtggaggcctttttgcccagagtagttgaagaacacaatttgctccctttatttcatctcacatgagccatttattattgttatcatcaaaacttatataattactatatgatatg

SEQ ID NO: 156014 - DNA, 246 bp, Glycine max
gatgtttcatgtcatggtgaatgaataccaattgatgcccaatatagagcattacgggataatggttgatcttttggtcgaatgggagagttggataaggccttggatatgattaataacatgcccatgcaagctgggcctcatgtatggggagccttacttggtgtttgtcgcatacatcaaaatattaagataggggagcttgccgctctgaatcttttcctgttagaccctaatcacgcaggg

SEQ ID NO: 156015 - DNA, 247 bp, Glycine max
ctttggactcgaacatgccggcgacttattactggttcacagactggggaatttactctttggactggacaatttttaattttgaaatgattcttcaggcgcatgatcaagcaatcagatccatggtctggagtcacaatgacaattggatggtctctggtgatgatggaggcgcaataaagtattggcagaacaacatgaacaatgttaaagccaacatatctgctcataaagaatcagtccgtga

SEQ ID NO: 156016 - DNA, 249 bp, Glycine max
ggttggctctgcccgacaccggcttcatctcctacggcgaaatgctggagcagggccaactcatcacccaagccgttccattcccgtcattggcgacgccgacaacggctacggcaatgccatgaacctcaagcgaaccgtcaagggtttcattgccgccggtttcgcaggaatcattctggaagaccagattgcgccgaaagcgtgtgggcacacgcgcgggaggaaagtgataccgagagaggaggg

SEQ ID NO: 156017 - DNA, 125 bp, Glycine max
aggccatcaagggccatgaactgagcaacatgagaaccaaatcctccaattgatcctatcttcaactgtaatcaaaacctcatgtgattttgccaggctgcgaatcagggaacgatcatggatca

SEQ ID NO: 156018 - DNA, 125 bp, Glycine max
gggagggagccgtagcagcggaagctctagcttgggtagcgaatcacaatggcgagaggattaaagaagcatctgaagaggcttaatgccccaaagcattggatgcttgacaaactgggtggtgc

SEQ ID NO: 156019 - DNA, 244 bp, Glycine max
gttccgtcctttcggccctgtcagcagagtctatgttgccattgatcagaagactggcatgagcagagggtttggctttgttaactttgtcaacagggaagatgcacaaagagccatcggcaagctcaatggttatggctatgacaatctcatccttagagttgaatgggcaaccccaagagcaaattaaatgttgagtgttttttgcccctttctgtaaaacagtattttgaaggtctatgta

SEQ ID NO: 156020 - DNA, 125 bp, Glycine max
ctcccaagcagtgggaggaggctcgggactctgaccgcgtgcctgttgaagaatgagccggcgactcataggcgtggcttggttaagggaaaccaccggagccgtagcgaaagcgacgtacttca

SEQ ID NO: 156021 - DNA, 245 bp, Glycine max
accgatcagagctgattttcgcggctgttaccggtcaccggagattctatccgaaatcgttttccgatgatgtaaaaactgttaaagtcagtaacgtttccttgggagcaactgagcaagacattaaggagttcttttcattttctggtgatattgaatatgttgaactacggagccatgatgaacgatctcaaattgcttatattaccttcaaggattcacagggagctgagactgcactactg

SEQ ID NO: 156022 - DNA, 246 bp, Glycine max
cgatttcattgcaaacaaccaaatcccagggattgatttcgcaacagtgcattcctaccccgaccaatggatacaagttcaggttatgaggaccaaatctcattcttaggccggtggctgaatgagcacatccaagatgcacagaacacccttcacaagccacttctatttgcggagtttggtatttccacaaagagttatggtcgcaactcaacaccaagggatcggttattcaacacggtatat

SEQ ID NO: 156023 - DNA, 247 bp, Glycine max
gttgatgatagggtcgctctttctgttcaaagctttcgattttactttctgggtctccttcttctgcttctttgattcccccaattcttcagctttcaaaaccctaatctgctgccatgaggaagaagctcgatacccgtttccctgctgctcggataaagaagataatgcaagctgatgaggatgttggaaagatagcactcgctgtgcctgttttagtttctaaagctctagaactatgtttgca

SEQ ID NO: 156024 - DNA, 245 bp, Glycine max
catttctccatttccattttctctctcacttttcaagaatcgtaagctatgggaaagtcttacccaactgtgagtgctgattaccagaaggccgttgagaaggcgaagaagaagctcagaggcttcatcgctgagaagagatgcgctcctctaatgctccgtttggcatggcactctgctggaacctttgacaagggcacgaagaccggtggacccttcggaaccatcaagcaccctgccgaact

SEQ ID NO: 156025 - DNA, 246 bp, Glycine max
ctcgaccgtgttctgcttgtttgagggagcccttgacaatttgggaaacttgagacaacaatatggactggcaagtcagtcaatgaagtattgttggtcattgaggcttatcaaagctttgcgtgaccgagcaccctaccctgctaatcatgttgttggccatctcagtgggagctttgcgtttatagtgtttgacaaatctacttctaccctctttgtggcatctgatcaatatggtaaggtacc

SEQ ID NO: 156026 - DNA, 123 bp, Glycine max
tgaagagcgaagagaatggctcccaagggtttaatctttttggctgtgttatgcttctcagcactgtcactgagtcgttgtcttgcggaggataatggacttgttatgaacttctacaaggaa

SEQ ID NO: 156027 - DNA, 232 bp, Glycine max
cgcgtcgctccgcaccagtttcaccgcacgaatatcacgttgtttggagcgatccgagaaaaactctgtaaaatgttggtttaccaggacctccttacaggtgatgagcttctctctgactccttccgttacaaggaaattgagaatggaatgctgtgggaagttgaggggaagtgggttgttaaaaggagcgttgatatagacaatggtgcaaaccttctgctgaggtgga

SEQ ID NO: 156028 - DNA, 226 bp, Glycine max
attctctctactactgctagctgtgacttgttttgagttcaatcaaatcgcattggtatctgaaatcaggaagatggttagcgtactgacgatcaggcaggcacaaagggcagaaggcccagcaaccatccttgccattggaactgctaacccaccagaccgtggtgatccgagcacctatcctgattactacttcagaatcaccaacagtgatcacatgatcgag

SEQ ID NO: 156029 - DNA, 243 bp, Glycine max
gagagagagagagagagagagagagagagagaaatggcttgcaggcaattgtgggcttcaagagctgcctctacctgaggatctctgtgtttcacagaggcttttctaatgttgttaaagatttgaagtatgctgattctcatgagtgggtgaaagttgatgaaaattctgcaaccgtcggcataactgatcatgcccaagatcatttaggtgatgttgtatatgttgacttgccagaagtgg

SEQ ID NO: 156030 - DNA, 243 bp, Glycine max
gtgaggttgtcattaagcacttcaacaaggaacaggattccaaccaaagcaattttcgggatcctgagagaatgctgattttgaggttcaggagaagttgtctctgctggagtggtttgcaaatgaatacaaacggtttggttgcactcttgagtttgttaccaataaatcacaagaaggttcacagttttgcagaggtttcggtgggatatgtgggatcttgcgttaccagcttgatatgcg

SEQ ID NO: 156031 - DNA, 236 bp, Glycine max
attcatgcaaagtggtgcttagcttaccacaaagaggattttgcttatgagcactgggatgagatacttgacatctgcaaccagtatgatgtggctctatccattggtgatgggctaagacctggatccatctatgatgcaaatgacacagcacaatttgctgagctcttgacacaaggagaactgacccgtagagcttgggaaagggagttcaggtgaatgatgatggacctgga

SEQ ID NO: 156032 - DNA, 242 bp, Glycine max
ctcatgcccaagttcgatattaactccttgcttgctctcattcacaagcacaaagtcactattgcccctgtcgtccctcccattgctctcgccatctccaaatcacccgatctccacaattacgatctgtcttccatcagagtcttcaagtccgggggagctcctctcggtcaggcactcggagacactctcagagctagatttccccaacgacaaacttggccagggttacggcatgactg

SEQ ID NO: 156033 - DNA, 121 bp, Glycine max
tgtggcaagtggactagccagaaggtgcattgtgcaagtgtcttatgccattggtgtgcccgagcctttgtctgtctttgttgacacctatggcaccgggaagatccatgataaggagatt

SEQ ID NO: 156034 - DNA, 244 bp, Glycine max
ccaaaccctagcggcactacacacgttatctctctctctctctctctctctccctctctccttccccaagtgtcgagcgccgatcccgagcaccgagaagaggaggaggcacccgccgtcggcgacgacgaggacaccggagcacacgtcgctcccatcgtcaagctcgaggaggttgctgtcaccaccggcgaggaggacgaagatgcaatcctagatctcaaatcgaagctttaccggttcg

SEQ ID NO: 156035 - DNA, 244 bp, Glycine max
gcgaaaaccaaatcaagatgctgagagtgggcgcaaagaggcttttgggaacgacgtcagttgggcgttagggttccggcgaggctgtaccacgagagggttgtggatcactacgacaacccccggaacgttggatcgttagacaagaacgacccgagcgtggggacgggtttggtgggggcgccggcgtgcgagcacgtgatgaagctccagattaaggtcgacgacaaaaccggaaaaatcg

SEQ ID NO: 156036 - DNA, 242 bp, Glycine max
taaagacacctctaaagaagggtatagttttgaagagatatgcatcaagaaagaagcgtttgagggagagagaagttttgtgcaaaatccttgggaacagtaattggttttgccatttcaaagctgggaaagaacattcaagtactttcaagttcctttgtcaataagcaagagcaatacactgtggaaggagtgcagaatcttggagacaaagcagtgatgtgtcatgggctaaatttcag

SEQ ID NO: 156037 - DNA, 233 bp, Glycine max
gttgtcctccttgagcttttgaccggaagaaaaccagtagacatgtcacgacctcccggtcaagaaatctcgttgcatgggctcgtccattactctcaagcgaagaaggattggaagcaatgatagatccatctctaggacatgatgtgccttctgatagtgtggctaaggttgcagccattgcttcaatgtgtgtacagccagaggtgtcggaccgtcccttcatgggcgag

SEQ ID NO: 156038 - DNA, 241 bp, Glycine max
agcactcatccacacattctccgtcgccacgacaacaatggctccacagaaaggtgcgaaaggtggagtgtagcagcaaagaagaaggttcaggagccggttacgaaccctttgttcgagaagcgtccgaagcagttcgggatcggaggcgcgctgccgccgaagcgggacctgacgcgcttcgtgacatcgccgaagaacgtccaaatcctacgcatgatgcgcatcctcaagcagaggc

SEQ ID NO: 156039 - DNA, 240 bp, Glycine max
tcctaatggacgacgtatagctgtgaaaagattatcgacaaattcatcacaaggttcggttgaattcaaaatgagattttatcaatagcaaaactacagcatagaaatcttgtggagttaataggtttttgtctagaagtgcaagagaagattcttatttatgagtacatgtccaacgggagccttgataactttttatttggtttgattcttgactttaaactcttgaataatatcaaa

SEQ ID NO: 156040 - DNA, 239 bp, Glycine max
ataaagtccggccagaagcagggcgacatgctgctcgtggtccccgagggggcctacgcggtgcgcctcgggaacgaggcctccatcaagcagaggatcaaggtgatcaagggcatgtactactccatcaccttcatggtggcccgcacctgcgcgctagaggagaggctcaacatatccgtcactccagactggggcgtcattcctattcagactttgtataccagcagtggttggga

SEQ ID NO: 156041 - DNA, 239 bp, Glycine max
gccaccgcatgagtatttggcgcgtagcagacgatggtggctaactcggtgtttgaaggagtgggcgcacgttgaagggccgagacttgagccgggttcgtgatgccgtgtggagccagaccgggttcgacggttaacaccgggctcaggtttgggctttcatgggtttactgtaataaaaattattataatatattcaatttaagttaatagaaatgcagacaaatgaatgaacacag

SEQ ID NO: 156042 - DNA, 231 bp, Glycine max
caaattctctgtgttgtgttgtgtacttgtgttaattgtgttgttgttgtaggaaatttaagtgaaggagaatgatgatgaagtctgctatgtgtgcattggtgcttgtggcactggttgtggttgaagtggggcccatggctgaggctgcgagtgacttgcaacccatacacagttgactccttgatacttccgagcaatgtacattcaggggttctgctaccttcgagt

SEQ ID NO: 156043 - DNA, 236 bp, Glycine max
tagcaataaaattacagacgatctcagcacaccaattcataatgtcgcagagatcttagtgcctctgactcctcagattgagggtgagatcttgcagtcatccaatctgaagaactttattttgacataactaacaactggcacaagagatttccgtaaagacagtgtgatacgtagagaaggtgattttggatcagttttcaagggctggattgctaaccactcactggctgctg

SEQ ID NO: 156044 - DNA, 199 bp, Glycine max
ggtgtaactcgttcttcttcttctgttgttctgtgtttgtgtttgattttactctcacctgaaaatgtcttgctgcggtggtaactgtgggtgcggaagctcctgcaagtgcggcaacggcttcggaagctgcaagatgtacccagacttgagctacactgagtcaaccaccaacgagaccttggtcatgggagttgca

SEQ ID NO: 156045 - DNA, 239 bp, Glycine max
ctcattaattgcaagaatggcacttcgttgcttggtgatgtccctttctgttctcttcactcttggtcttgcgagagaaagccatgccagagacgaagatttttggcatgctgtttggccaaacactcccattccaagttcattgcgagatcttctaaagcctggccctgcaagtgttgaaatcgatgatcaccctatgcaaattgaagaaacacagtacccgaaaaccttcttctata

SEQ ID NO: 156046 - DNA, 239 bp, Glycine max
cccaactccaacctctgttcatcgtctaccgcgctttcttttcaaccagaactatgattaagcttttaaagtaaaggaaaagcagagagaacttgcagaaaatgcaagtggcggaccacctgttaagaagcaaagtgctggagagttgcgtcttcacaaagatataagtgagctgaatctaccaaaatcatgtaccatgcaattccccaatggcaaagatgatctgatgaactttgaag

SEQ ID NO: 156047 - DNA, 192 bp, Glycine max
ggacgctattgtcaggctcactagggagattgtgcctggcatgattgtcactggcatggaggttgcgaaattgatggctccccgagaatgggtccgacgtttggggcgatgatgatatcagggcagaaggcggctcatttggcgttgaaggctttgggtaggaacaatgcaattgatggaacgtgtggagtt

SEQ ID NO: 156048 - DNA, 233 bp, Glycine max
tggtgctgttcagttctaagactggtagcagatgctttcaatgcgtatatatatgacattataatgaagccaagggtttgccttatttagaaactcatgctgaaccatatatgaggcagctatcagtaggcgatgtagtcacaggcccacttcagacatttaatggggttgagaaggtttgcaacatagggtttattctcagaactacgggacataatgggtttgccgttata

SEQ ID NO: 156049 - DNA, 240 bp, Glycine max
aggtttatctcggatgcttttctatcttgctcttccaccttcagtatatccatcagtgtgcaagatgatcaagacttgttgcatgaataaatctgatcttggtggatggacacgtgttgttgttgagaaaccttttggtaaggatctagaatctgcagaggaactcagtactgagattggaaagttgtttgaggtaccacagacttatcgtattgatcactacttgggaaaggaactagt

SEQ ID NO: 156050 - DNA, 236 bp, Glycine max
catgaccgcgttgaaatcatcgccaacgaccaagggaacagaaccacgccgtcttacgtcggatcactgacaccgagcgtctcatcggtgatgcggccaagaatcaagtcgccatgaaccccatcaacaccgtcttcgatgccaagaggttgattggtcgtagattcagtgattcctctgttcagagtgatatcaaattgtggcctttcaaggtcattcctggtgctgctgacaac

SEQ ID NO: 156051 - DNA, 237 bp, Glycine max
atcttcattttggagaattgagtgtgaggaaagtttttcaagtgacacgtatgaagcaaatattatggacaaatgaaggcaacagtgctggtgaagagagtgtaaatcttttcctcagggccattggacttagggagtactcacgctatctttgtttcaactttcctttcacccatgagaaagcacttctgggacacttaaagttttttccttggaatcctgatgctgatatcttta

SEQ ID NO: 156052 - DNA, 236 bp, Glycine max
ctcgagcgaatcggctcagggcgaacaaaaaaaccaacaatacttagagcaacagagacatggtttgcttctgtggacggatttcgtcacactgctatggatgctattggcatgtaaaattggttcccctcacggagcgaacagcatctcatcaatgacttctattcgctccgattgatgggtgtcatcgcacaagacatggggtgtggtcttcccattccagtattttatcatct

SEQ ID NO: 156053 - DNA, 234 bp, Glycine max
gagcattgtggcaagtggacttgccagaaggtgcattgtgcaagtgtcttatgccattggtgtgcctgagcctttgtctgtgtttgttgacacctatggcactgggaagatccatgataaggagattctcaacattgtgaaggaaaactttgatttcaggcctggtatgatctccatcaaccttgatctcaagaggggtggaactaacaggtttttgaagactgctgcctatgg

SEQ ID NO: 156054 - DNA, 259 bp, Glycine max
cagatcttcgttaagaccctcaccggcaagactataaccctagaagtcgagagctccgacaccatcgacaacgtcaaggctaagatccaggacaaggagggtatccccccagaccagcagaggctgatcttcgccggcaagcagctcgaggacggacgtacccttgctgactacaacatccagaaggagtcaactctccacttggtgttgcgtcttcgtggtggtatgcagatcttcgtcaagacccttacgggtaaga

SEQ ID NO: 156055 - DNA, 246 bp, Glycine max
cgttgttaatgttgtcgcaacttgtgtctcaatttatggtgttgacaagtggggtaggagagccctgttccttgaaggtggagtccaaatgctcatttgccaggctgtagttgcagctgcaattggagcaaagtttggaactgatgggaacccaggtgatttgccaaagtggtatgcaattgttgtggttctcttcatttgcatgtatgtaacatcatttgccttgtcattggggtccctaggttt

SEQ ID NO: 156056 - DNA, 255 bp, Glycine max
gatggacgcttttgcgccactggggttaagaggttgaagagtattgggatgattgataacgttcctggaatgaaggctttggatatgaatgctgctgaggacgctattgtcaggctcactagggagattatgcctggcatgattgtcactggcatggaggttgcagaaattgatggctccccgagaatgggtccgacgtttggggcgatgatgatatcagggcagaagggcggctcatttggcgttgaaggcttt

SEQ ID NO: 156057 - DNA, 255 bp, Glycine max
cttcaatcacattgcaaaagttcatggatcttctggaagaacatcctaagttgcgattatcacaagctagtattacgcatcaaggaaagaatctgtacatgcaagctccccctgtattggaagaaatgactcgatcaaacctgagtctctctcttttgaatctcatgggtcgattgcccaaggatgttgtgcatgtgaatggtacaacaatcaagaacgaccaaaagttctcctgttcgagaaaattacgtgttg

SEQ ID NO: 156058 - DNA, 248 bp, Glycine max
attgaactcaagttttttctcttctctcggtttcatcgccatggatgaagaagtgcgcaagatcttcagcaagttcgacaagaacggcgacggcaagatctcgtgcgccgagctgaaggagatgatggtggcgctgggatccaaaacgacgtcggaggaggtgaagcgcatgatggcggagcttgatcggaacggcgacggctacattgaccttaatgagttcggcggagttccatgcggcggcggcg

SEQ ID NO: 156059 - DNA, 237 bp, Glycine max
taaagacttagacaaggaagaaatgctacgaggaaggcctggctatgagcacctgaatgatccgcttcacattataattgaagctgaactacctaccagtgttgctgatgtaagattgatgcaagcacaagaaatcatacaagagctacttaaaccagtggatgagtcacaggacctttacaaaaggcaacaactaagagaacttgctatgcttaattccaactcagagaagagagc

SEQ ID NO: 156060 - DNA, 266 bp, Glycine max
tgggatgcaactttgtcccggaggagaaaaagaagcagaagagggccaagaagaagtacagaggcgtgaggcagaggccctggggaaagttggccgcggagattcgtgaccctcgtcgtgctgcccgggtctggctcggcacgttcggaaccgccgaggatgccgcccgggcctacgacaaggccgcgattgagttccgcggcccacgggccaagctcaatttccccttggtggacgagtcgctcactttgcagcagagcgagcca

SEQ ID NO: 156061 - DNA, 263 bp, Glycine max
gaacagagcttggtagattgggcacggccgaagctcaatgacaagagaaagctccttcaaataattgatcctagattggagaatcaatactcagtgagggcagcacaaaaagcatgtagcttggcttattactgtttgagtcaaaatcccaaagcaaggccactaatgagtgatgtggttgagacattggagcccttgcaaagttcaagtgttggtccaggtgaagtctcattatctggatcaaatagtgggagtgctgggcc

SEQ ID NO: 156062 - DNA, 250 bp, Glycine max
ctgttggggtagaaagcagagaagaatgaaggaggagttggtggtgcaagaagggtaccttttcaaagaagagacgaagctcacagtgctcaaaacatccctcttcttcagcggtgatggcttcgctgtctacgattccaagggcaacctcgtcttccgcttcgactcctatggtcccctcgcacgtgacaaggacgagcgtgttctcatggatccccatggccgttctcttctcacccgccgtcgaaag

SEQ ID NO: 156063 - DNA, 256 bp, Glycine max
tagatggctgttaatgactcaacttccccgtatggccttcgattattgattgaggattacccttttgcagttgatgggctagagatttggtttgctatcaaaacatgggttaaggactactgctcctttgactacaaggaggatgacactatcaagaaagatactgaacttcaatcttggtggaaggaaataagggaggtgggtcatggtgacaagaaagatgagccttggtggccaaagatgcagacatgtggag

SEQ ID NO: 156064 - DNA, 256 bp, Glycine max
tgcgctggtgtcgaccctaatctcccactcgagcgccaagaagaagcgaaacaacttctcacgcgctgtctcaatcttggaatctctgctctaaattctaatcttcccgccatagatgtcgtcgaacttgtggtgagggaattggaaacggatccgctgttcaattcgggccgtggatctgccctgacagaaaaaggaacggtggagatggaggctagcatcatggatggtccaaaacgacgatgcggcgccgttt

SEQ ID NO: 156065 - DNA, 238 bp, Glycine max
tacaaattatgcagcagcttattgcactggtctcctgttggcccgaagagtcctcaaaacacttgaaatggatgaggagtatgaaggaaatgttgaggctactggagaggattattcagtggaacctgccgagagcaggaggccattccgtgcactccttgatgttggtcttgttaggactacaacaggaaatcgcgtctttggtgcccttaagggagctctggatgggggtttgata

SEQ ID NO: 156066 - DNA, 247 bp, Glycine max
aatgatgaagagaagaaggaagagaagaaaaaggagaagagagacaaggatggcaaaactgatgcagagaagatcaagaagaaagaagatgatgggaaggatgatgaagagaagaaggaaaagaagagaaagtatgacaaaattgatgcagagaaagtcaaggggaaagaagatgatgggaaagagtaagggacataggaaaagaaggacaaagaaaaaggagacggataatgcgaagagaagaagg

SEQ ID NO: 156067 - DNA, 243 bp, Glycine max
tccatttccattttgttctggttttctttctccatggcctccgccgccgccgtcgccgccgaagacgacgctgtcaacggcttcactcggtcggagatgtactcggaaaacctcgccggcactgtcgacgcctacgaccgacacgtgttcctctgctacaagagctacgtgtcctggccggcacgcatcgaggcatccgacgccgatcccttccccaagcgcgatcgcgccaccgtcaaagcc

SEQ ID NO: 156068 - DNA, 250 bp, Glycine max
atggacagcatcagatctggcccctacggcaagatcttccgccctgacaacttcgtcttcggccagtccggcgccggtaacaattgggccaaaggtcattacacagaatggcgccgagctgatcgactccgttctcgatgtcgttcgcaaagaggctgaaaactgcgattgcctgcacagttttcaagtttgccactctcttggaggaggcacaggttctggcatgggaacactgttgatatcaaaaatt

SEQ ID NO: 156069 - DNA, 250 bp, Glycine max
tcagcccctcaaaccttccgctcgaaggaaatttccaagagcaatgttgttgacgatatggtcaacagcaacgccatcctctatgagcctggtgaacatccggaccatgtggttgtcattaagtatgtaccttacgttggggacagcaagagggccatggatgagtactcttctgagatattcatgggcggaaagaacacaattgtgttgcacaacacttgtgaggattcactgttagctgctcctatta

SEQ ID NO: 156070 - DNA, 239 bp, Glycine max
gtcaattttgttttcggagatctatacgatcaccaaagtttggtgagtgccataaagcaggtcgatgtagtcatttctactttaggacacttgcagctagctgatcaagacaagatcatttctgcaattaaggaaatgttaggaagttctatccatctgagtttggaaatgatgtggaccggactcatgcagtggaaccagccaaatctgcatttcaacaaaggccaaggctcgcagag

SEQ ID NO: 156071 - DNA, 218 bp, Glycine max
cggctcgagcagtctgtgacattcccccaactggcttgaagatggcttcaacattcattggacaatctacctccattcaggaaatgttccgtagagtgagtgagcaattcactgctatgtttaggaggaaggctttcttgcattggtataccggggaaggcatggacgagatggagtttccagaggctgagagcaacatgaacgatctcgtgtccgag

SEQ ID NO: 156072 - DNA, 262 bp, Glycine max
ccttcttctccgcttcctcttcgatcatcgcttcagaatgccgccgaagttcgacccctcccagatcgtcgacgtcttcgtacgcgtcaccggcggtgaggtcggcgcggcgagttccctcgccccgaagatcggtcccctcggcctctcccccaagaagatcggagaagatatcgccaaggaaaccgccaaggactggaagggcctccgcgtcaccgtcaagctcaccgtgcagaaccgtcaggccaaggtcacggtggtc

SEQ ID NO: 156073 - DNA, 249 bp, Glycine max
agacacgagcctcgaagtggatccttcgcgacacgaatatgaccctagcacccatgttgctactggagaagcacccaattcacctgaaccctgcgcactacatcagtgagattattagagaaggcacaaaacatggcactgctttctttaagtgccatggacatgagcaatttgagatgacgggtttggattctgagtataataggttgttcaatgagggcatggtgtgcactgctaaggttgtgtcca

SEQ ID NO: 156074 - DNA, 252 bp, Glycine max
gagtgaggaggttgcggggcttgctagaactgcggtgaatcgggacatctggctagggactgcaaccaaggaggcggtggagacaggtacggcggaggcggtggtggtggtcggaagtataaaggcggcggtggcgagacgtacggtcgtggtggaggatgtcgtggcggcggaggaagctgctacagctgtggaaagtctgggcatttcgccagagattgcccatcaagtgctcgtggaaaatactgttat

SEQ ID NO: 156075 - DNA, 233 bp, Glycine max
  unsure (1)..(233): unsure at all n locations
ctatcttatttcaaatttgttggtagagtggttggaaaagctatatttgatggtcagctcttggatgtccattttactcggtcattctacaagcacgtcctaggggccaaagttacgtatcatgatattgaagccattgatcctgactatttcagaaatttgaaatggatgcttgagaatgatatcagtgaaattttggatcntactttagcacttgatgctgataggaaaag

SEQ ID NO: 156076 - DNA, 229 bp, Glycine max
cttcctggtatgtacaacaaggaagagaacccccgtgtgcccatcatcgtcaccggtaacgatttctcaacactgtatgctccactcatccgtgatgggcgtatggagaagttctactgggcacctacaagggacgatcgtgttggcgtctgcaatggaattttccgcactgacaatgttcctaaggatgacattgtcaagcttgttgacacctaccccggccaatcta

SEQ ID NO: 156077 - DNA, 235 bp, Glycine max
agcctggtccaaacctggctggcagctcagctggctcctctggccactctaggcttacccaggatcttcaactacgtggaggatttcttaatcaggtcaatcccctttccagcatggactgtcaaatccagctacaagaaactctacgaaggtctctcgacagcaggtactgcgattctggacgaaacggacgctgtggggataaagagggacgaagcgtgccacaatcttgtgt

SEQ ID NO: 156078 - DNA, 243 bp, Glycine max
ctgctcctcaaattgcttccttttctagccgtggaccgaaccatcttacatcgcagattctgaaacctgatgttattgctcctggtgttaacattttagcagggtggactgggcgtgtgggtcccacggatttggacattgatcctaggagggtcgagtttaacataatttcggggacttctatgtcgtgccctcatgcgagtggcattgctgcattgcttaggaaggcttatccagagtggt

SEQ ID NO: 156079 - DNA, 242 bp, Glycine max
ggaattgaacactggggtcaggatcatcaacctagctagctagtgtatacaacaacaatatgaggaagcccgaggtttctggaaaaaacaacaacattaataacaagcttagaaaggggttgtggtcacctgaagaagatgacaagctcatgaactacatgctaaacagtggacaaggttgttggagcgatgtagccagaaatgcgggccttcaaaggtgtggcaaaagttgtcgccttcga

SEQ ID NO: 156080 - DNA, 169 bp, Glycine max
gcgaaagagagaattcgtagaccctaatttcggccagatcggcgatgactgcctccaaggatcgcgagatcttcgtctacatcgccaaactcgccgagcacgtcgagcgttacgaagaacattgtggactcaatgaataacgttgcgaatctcgactgctaactgacag

SEQ ID NO: 156081 - DNA, 260 bp, Glycine max
agtgagtctacgtgtttgagagaaaggttgagctatagcctaaagggagagacacataaatagtttctactttctattcatagatagatggctggcccaattatgagacctcagattgtgctatttggctcctccataattcaaatgagcttcgacaatggtggttggggtgctattctagctaacttgtacgctaggaaggcggacatcatcttaagaggatactctggttggaattcaaggcgggctttggaggtttt

SEQ ID NO: 156082 - DNA, 257 bp, Glycine max
tgctgcttctggaaattttcattggaattttgaagatgttgctaaatcaattgtgtgcatgatgatgtctggcccattcttgacaggatatacccagactatgaatgattggtacgaccgagaaattgatgcaataaatgaaccttatagaccaattccttctggggcaatatctgagaatgaggtaatcactcaaatatgggtgttgctgcttggtggtctttctctggctggtatattggacatatgggcagggc

SEQ ID NO: 156083 - DNA, 254 bp, Glycine max
tgaaaatgcaggggaaaatgagggagatccttcacgtgcagggagggcaatgcgggaaccagatcggttccaagttctgggaagtggtgtgcgacgagcacggcatagatccgacggggaagtacgtcggaaactcagatctgcaactcgagcgcgtgaacgtctactacaatgaagcctcgtgcgggcgcttcgtgccacgcgcggtgctgatggacctggagcccggaaccattgacagcgtgcggaccggg

SEQ ID NO: 156084 - DNA, 252 bp, Glycine max
gcactttgtgaggccactggggcaaatgtcacacaagtgtcctatgctgttggcactgacacaaggattggaccaaagttcctgaattctagtgttggacttggtggctcctgcttccagaaggacatcttgaaccttgtctacatctgtgagtgtaatggcctgccagaggtggctgagtactggaaacaagtgatcaagatcaatgattatcagaagagccggttcgtgaaccgtgttgtttcgtcgatg

SEQ ID NO: 156085 - DNA, 248 bp, Glycine max
agggcaagtaccatgatgagcttatcgccaatgctgcgtacattggcactcctggaaagggtattcttgctgctgatgagtcaacagggacaattggcaagcgtttggccagcatcagtgtagagaacattgaatccaacaggcgagctcttagggagctgcttttcactgctcctggtgttcttcaatatctcagtggtgtcatcctctttgaggaaaccctctaccagagcacagctgcaggcaag

SEQ ID NO: 156086 - DNA, 249 bp, Glycine max
gttacacggcaatgctcaacatatatgggagtcagggagatgttgacaaggcgatgaaattgtttgacgagatgtgtaagttgggtgttgaactcaatgtgatggggtttacctgtttgattcagtgcttgggaagggcaatggaatttgatgatttggtgagagtttttgacatttcggttgagagaggaattaagccagatgataggctatgtggttgcttgctatctgttgtgtctctgtctcagg

SEQ ID NO: 156087 - DNA, 247 bp, Glycine max
ccggttcaaaacgaggaaattctagccaagaagtataggattcggttaaggggaattgatgcaccagaaagtgcaatgccatatggaaaggaagctaaaactgaactgaccaagattgttcaaggcaagcctttgaggatccttgtttatgaggaagatcgttatggtcgttctgtaggtgatatctattgtaatggcatttttgtacaggaaatgatgttaaagaaaggtttagcatggcactacg

SEQ ID NO: 156088 - DNA, 242 bp, Glycine max
ctcgagcgaatcggctcgagagtgaacaagaccgaattgttgagggagttgctacaacccggaggctatctcaaattaattgagctgggacttgaagattgtgtggagaaaattgatgctcaactagtgtttggttatgctcttttcaaggatgggaagcacacaagactctcttatcccttggaaaagtttcactcagatgttgctggcagaagctttcacaatgggcggttttattcaga

SEQ ID NO: 156089 - DNA, 244 bp, Glycine max
catagcttcctcttctttcatcacagtttgaaaaaagaaaaaccagaaaagaattccaagcttaaatattggttgaaccagaggcaacaatgggtttgacggtgtcacggctattgagattgttttatgcaaggaaagaaatgaggattctgatggtgggttttgatgctgctgggaaaacaacaatactctacaaactgaaacttggagaaatcgtcactacaatacccacaataggcttcaa

SEQ ID NO: 156090 - DNA, 241 bp, Glycine max
gaataatcgagacacagatcatagtgatcattttttaatttctcagatttatccgacgtcgctgcagatccaccaaccgttatggccgccttcagcggtgatgaaacggcaccgtttttcggcttccttggcgccgcagctgccctcgtcttctcctgtatgggagctgcctatggcacagcgaagagtggcgtgggcgtggcttccatgggtgtaatgagacctgagctggtgatgaagt

SEQ ID NO: 156091 - DNA, 242 bp, Glycine max
aaaaatggacggcgaactaagagtgattgtggatggatttctgtctcattatgatgaagttttcaggctgaaaggggtggctgctaaaacagatgtgtttcatcttattaatggcacatggacttcaccagctgagagatgcttcctctggataggtggttttaaaccatcagagctcatcacaatgttgataccacagttagagcccctggcggagcagcaaattatggtcatatgtgaac

SEQ ID NO: 156092 - DNA, 242 bp, Glycine max
gtcgttgctttaataactccttggaattatcctctgttgatggctacgtggaaggttgctcctgctctggcggccggctgtgctgcaatattgaagccctctgagttggcatctgtgacatgtttggagctcgctgaaatttgcaaagaagtcgggcttcctcctggcgtgttgaacattctcactggattaggacctgaagcgggggctcctttagcagctcatccgcgattagacaagaa

SEQ ID NO: 156093 - DNA, 231 bp, Glycine max
agccaatcagcgtattgcaagaatctctgctcatcttcagcctccaaatttccaggaagggagtgatgttcttcttaagagtgctgagtgcagagcaaagggtggggcacctggattcaaagttgcaattttgggggctgctgggggaattggtcaacccctttctttgctgatgaagatgaacccattggtttcagttcttcatctttatgatgttgtcaacacccctgg

SEQ ID NO: 156094 - DNA, 237 bp, Glycine max
gtaataagaggaaagttgacgaaacagaaggcatatgctgcactgtcactgcttaaaggtgttctggattactcagaatttaaagatgtggacttggtcattgaggctgtaattgaaaatatcagtctcaaacaaactatatttggtgatcttgagaagatttgtcctccacactgcattttagctttcaacacatcaactattgaccttgatgttgttggtaaaacgaccagctct

SEQ ID NO: 156095 - DNA, 247 bp, Glycine max
ctggccttccccttaaagaaacagaaagccaaatgcaataatggtcaagataaaagaggcacactaaagttggtgctgagggactctggcttattaaatgctgatcatcccctccatttcttttcaaaattcaaattgacccttctggccttctcctacttcttctatccattgtttcatttttatttccaaattttcaggtgaaaggaacataggaacttgaggtgatgaaagcaacagaatgtta

SEQ ID NO: 156096 - DNA, 247 bp, Glycine max
gtttaatagtgaaaaagtagcctcacttgcctatgcccgaattcaaggaaaagcttctcttattgctcattttcagaactcaagcctgatgaacgaagacaaacgttgccgtcctattctcttccatacagatggcccaaatgctggtgatccggagccttttcccatgggtgccaatattagactgagacctggaaaatctcgcactgctggcaatgaggagaatcgaagccaagggagcccttca

SEQ ID NO: 156097 - DNA, 245 bp, Glycine max
cgcctttctctctcttctttttactctctctctgtctctctctacgctttctcgttcgagatccctcaagggatccactaactgaaggagaaatggggttgacattcaccaagcttttcagccggcttttcgccaagaaggaaatgcgaattctgatggtgggtctcgatgcagctggtaagaccaccatcctgtacaagctcaaacttggagagatcgttaccacaattcccaccattgggttc

SEQ ID NO: 156098 - DNA, 240 bp, Glycine max
aacacacaaccctgatgcacccgttatgttggaccgtatattgcgcctcttggcttgctacaatatcctctctttttctcttcgcactctccctcatggcaaggttgagaggctctatggtctcgcccctgttgctaagtacttggtcaggaacgaagatggtgtctccattgctgctctcaacctcatgaaccaggacaaaatcctcatggaaagctggtactatttgaaagatgcagt

SEQ ID NO: 156099 - DNA, 237 bp, Glycine max
ggccttatggtcaaagagcggttctgaagtttgctcagtacactggtgctcatgctattgctggaaggcacactcccggtaccttcaccaatcagcttcagacttcgttcagtgagcctcgtctccttatcctcactgatccaagaacagatcaccagcctattaaggaagctgctcttgggaatattcccaccattgctttctgtgacgactgatcgcctatgaggtatgtggaca

SEQ ID NO: 156100 - DNA, 210 bp, Glycine max
aataagtactcagaagaatgctcagatcaagttattctctctcatggtgcaacgaattgcaaagtcagtaacatagtcccaccattgccaaggctttgcaattcgttgccccatgaaagagaataagtactcagaagaatgctcagatcaagttattaaatctcttggtgctgatctgaagaagattaaagactgcgatggagatcccca

SEQ ID NO: 156101 - DNA, 241 bp, Glycine max
ctaaaaatggcactgctttctttaagtgccatggccatgagcaatttgagatgacaggtttggaccctgagtataatagattgttcaatgagggcatggtgtgcactgctagggttgtgtccaaggctgtgatcactgggtacaaagatgggttcaaccagattaagtccttggttgatgttggaggtggcattggagggtctctttctgagattgttagggcttatcctcacatcaatgc

SEQ ID NO: 156102 - DNA, 168 bp, Glycine max
ggatttcggttcgagaccacacaaccctgttgaacccgtaatgttggcccgtatattgcgcctcttggcttgttacaaaatccccccttttccccttggaattctccctcatggcaaggttaaaaggccctatggtctcgcccctgtgcctaattacttggtcaggac

SEQ ID NO: 156103 - DNA, 241 bp, Glycine max
ctaaaattggaattgcttccttaaattgccatggcaatgagcaatttaagttaccaggtttggaccctgagtatattagattgttcattgagggcttgttgtgcactgctagggttgtgtccaaggctgtgatcactgggtacaaagatgggttcaaccagattaagtccttggttgatgttggaggtggcattggagggtctctttctgagattgttagggcttatcctcacatcaatgc

SEQ ID NO: 156104 - DNA, 237 bp, Glycine max
ctgcattttgcattcctgcattggaaaaaattgaccaggataataatgttattcaagttgttatactggtcccaacccgagaattggcattgcaaacttctcaagtgtgcaaagagcttgcaaagcacttgaagattcaagttatggttacaacaggtggtaccagcctgaaagatgatataatgcgcttatatcaaccagttcatttactagttggaactccaggaagaatattag

SEQ ID NO: 156105 - DNA, 232 bp, Glycine max
cgaagagaatggctcccaagggtttaatctttttggctgtgttatgcttctcagcactgtcactgagtcgttgtcttgcggaggataatggacttgttatgaacttctacaaggaatcatgccctcaggctgaagacatcatcaaagaacaagtcaagcttctctacaagcgccacaagaacactgctttctcctggctcagaaacatcttccatgactgtgctgttcagag

SEQ ID NO: 156106 - DNA, 240 bp, Glycine max
gaaaactggaaaagatgatatagatgttgggaaactgagacctacactctttgatgtttttggagaagatgctagtcctaaagtgaagaagttcatgaatgttatttttaacaaactccaacatggaagtggtgaaagtgggggtggaatattggggttggtaggtggtcttgcacaagagtttctcaagcaaaagcttgatgacaatgatgaggtatatgcaaagcctgcattggagac

SEQ ID NO: 156107 - DNA, 251 bp, Glycine max
gttgaacaagggtttctctgtctgcttcttcactttctctcgtttcaatcgaaaccataacaaaaacatgggcagaaaattcttcgtcggtggcaactggaaatgcaatgggaccactgaggaggtaaagaagattgttactactttgaatgaggctaaagtccctggagaagatgtcgtagaagttgttgtgagccctccttttgtgttccttcctgttgtaaaaagtttgctgcgctctgatttccatg

SEQ ID NO: 156108 - DNA, 229 bp, Glycine max
ctctctgccttgctcatttacacacctctacaacctttcactatcagctttgtttgaatccctctctctcctttccaaatggccagcgttgaggttgcacatcaaacaccaacaacagttccagaaaatgaaacaaccgaggtaatcaagacccaggaaacaaccccggaaccagtaccagccactgaggctcctgcaacagaacaaataacagctgaggttcctgctc

SEQ ID NO: 156109 - DNA, 255 bp, Glycine max
aagcatacgggcatatataaaggatccaataacacccaggtttgtgcatgtgagctcagcaggagttacaagacccgaaaagactggaatcgaacggcgggaggctgtttacttagatcgattccaggcctttcggttaaacaaggaactggattatatcctcacatttaaactaaagggcgaggatttacttagagaaagtggcattccctatgcaatcgtgaggccttgtgcattaactgaggagcctgctgg

SEQ ID NO: 156110 - DNA, 255 bp, Glycine max
gcatctggaagttacaaggagatggttatatacgtggaagcttgtgaaagtgggagcgtgtttgagggtataatgcctaaggatctgaatatttatgtcacaactgcatcaaatgcacaagagaatagttggggaacttattgtcctggaatggatccttctccacctccagagtacatcacttgcctaggggatttgtacagcgttgcttggatggaagatagtgaggctcacaatctaaaaagggaatccgtg

SEQ ID NO: 156111 - DNA, 247 bp, Glycine max
gtgttcaccacctctgctgagcgagaaattgtccgtgacatgaaggaaaaacttgcatatgttgccctagattatgagcaagaactcgagactgcaaaaagcagttcatcagttgagaaaagctatgagcttcctgatggacaagttatcacaattggggcagagagattccgttgcccagaagttcttttccagccatctatgattggaatggaagctgctggaattcatgagaccacctacaatt

SEQ ID NO: 156112 - DNA, 254 bp, Glycine max
gacgaaaactccttatggtcaccttcaaaaccagtcaaccaacgtgatgctgatctcatccatttttgggataagttccgcaaagctcctgagggttctctcaggaaaaatgcagctcagaaacaagttttggaagcaatgtctcatagaatgcatgtagacaacagtgtaaaacttattgggaagcttttatttggtattgaaaagggtccagaagtactcaacgctgttagaccggcaggatcggcacttgt

SEQ ID NO: 156113 - DNA, 255 bp, Glycine max
cacagataactacaactccatagatgaggtgactgaggctcttgcacgtgcaggccttgagtcttcaaatcttattcttggtattgatttcactaagagcaatgagaggacaggaaagcattcatttaacagaaaaagtttgcatcacattgggaatggtccaaacccctatgaacaagcaatatcaattattgggaagaccttggctgcatttgatgaggataacttgattccttgttttggatttggggatgc

SEQ ID NO: 156114 - DNA, 257 bp, Glycine max
ccacactcttattgttttcttcatatcttccttgtcactgcccgtgtgtcgccgccatggccaccgtcaccacccaagcctccgccgcaattttccggccatgtacctcgaaatcgaggtttttgaccggctcttccggtaaacttaaccgggaagtgactatgcggccaatggggtgccctccttctgcctctttcaaggttgaagccaagaagggagagtggttacctggcttggcctccccaacttacctcaat

SEQ ID NO: 156115 - DNA, 255 bp, Glycine max
actcaaagttgatcgaaacctcttttacaccatcggtttggccaagaattcttgccccacatgcgtcaatggaactcggctacttgcttccttaaacaatgtctcttttgtgatgcctcaaaccgcgcttctccaagctcactacttcaatatcaagggggtttacagaactgattttcctgataagcctctaactgcttttaactatacaggtgcaccattaacggctaatcttggtacttcagttggcacaag

SEQ ID NO: 156116 - DNA, 255 bp, Glycine max
ctagtgaacacatcagtgatgatggaatatatcttcttgagaatggtcatgattgtttgatatatgttggagactctgtgaatccagacatcgtgcagaaactgtttggtgttgctacagttgacaaagtccctaccctgtttgtattgcagcagtacgacaatccactatcaaagaagttaaatgaagtggtaaatgagatacggcggcaaagatgttcctacttccggttcaagctctgcaggaaaggagatc

SEQ ID NO: 156117 - DNA, 258 bp, Glycine max
gccatggatgagtacacttctgagatattcatgggtggaaagaacacaattgtgttgcacaacacatgtgaggattcactgttagctgctcctattatcttggacttggtccttcttgctgagctcagcactcgaatcgagtttaaagctgaaaatgagggaaaattccactcattccacccagttgcgaccatccttagttacctgaccaaggcccctctggttccaccgggtacaccagtggtgaatgcgttgtca

SEQ ID NO: 156118 - DNA, 259 bp, Glycine max
gtcaggatggccctccaaaggtgactcatctgaatctgatgcaactgttgataatgctaacacttacaacagtaacttgatcagacacgtcctgaacaatacggggactcctaaacatcctggaattgcagttagtacatatatttatgagctttataatgaagacttaagatcaggtccagtctcagaaaagaactgggggctattttatgctaatggagaaccagtgtataccttacacttgactggtgctggtatt

SEQ ID NO: 156119 - DNA, 221 bp, Glycine max
tcgataatacacgtttggctcttgcttcaattggtaaactcatgtttgctcaattctctgagcttgtcaatgattattacaacaatggtttgccttcaaatctcactgccagcagaaaccccagcttggattatggattcaacggatctgacattgccatgggatcttattgtgctggacttcactattatgcggctccggtgacaagccacgatcaatgc

SEQ ID NO: 156120 - DNA, 254 bp, Glycine max
gtggatacaattgaggatgcatcagattcgtggggtttgtctgtgagctttctcagcataatcttgctaccaatagttggaaatgcagctgaacatgcaggagcaatcatatttgctttcaagaacaagctggacatttcattgggtgttgcattgggttcagcaactcagattgccatgtttgtggtcccattatgtgtaatcgttgcttggataatgggtatcgatatggacctgaacttcaacctcctaga

SEQ ID NO: 156121 - DNA, 255 bp, Glycine max
ctttgaccttgcagcttgagattgtaaagttgcaaactttgaagctattagtgtagaagatgagtacgctggatgcaacaagggctgaacttggtcttcttgttttatatttgggcaaggctgaagcaagggacaaaatatgcagggcaatacaatatggttccaaatttttgagtaatggggaacctggtactgctcagaatgtagacaaaacaaccagcttggcacgaaaagtcttccgtctctttaagtttg

SEQ ID NO: 156122 - DNA, 258 bp, Glycine max
ctaaaccctaaacaactctttctcttcttccttcgctcgttgttctccctcgcgtagatcgacaatggcggagacagagacgtttgctttccaggctgagatcaaccagctcctcagtctcatcatcaacaccttctactccaacaaggagattttccttcgtgaactcatcagcaacgcctccgatgctttggacaagattcgatttgagagtttgacagataagagcaagctcgatgctcagccagagttgttcat

SEQ ID NO: 156123 - DNA, 253 bp, Glycine max
ggcttatcatttgcttttggttggactttgctgaatggagagtgcaacaatcagccaatggttagatcttcttgtgtatgtactgctattgctcaaggcagaaggatctatagttccattgattttggtcgagaatgcagaatcaaaaggagctgtttgtttggatggaagtccccaagcttaccactttgataaggggtttggggaaggtattaatagctggattgttcacattgagagaagaagatggtgc

SEQ ID NO: 156124 - DNA, 244 bp, Glycine max
cggctcgaggaatcatcaaatgcttcatcaacttatgggagttgatcctggaactaaccctgtttgccatttccttggaagcaaggccattttatgggtacccaatttatctgtggacactgcctatcagaccaacattgttgcttaattagtccatgcatcttgagcaccatgagaatgagattgtgtataaaataaattatcatgtgctgtgtgttgtgcaagtactaccttctctagctag

SEQ ID NO: 156125 - DNA, 250 bp, Glycine max
ggcaatcattgcgctctgataacatcaggatgtttgtattggatgaggcagatgagatgctctctcgaggtttcaaggatcagatctatgatatttttcagctgctgccacctaagatccaggttggggttttctctgccacaatgcctcctgaagccctggaaatcacaaggaagtttatgaacaaacctgtgaggattctagtaaaacgtgatgagcttaccttggaggggatcaagcaattttttgt

SEQ ID NO: 156126 - DNA, 251 bp, Glycine max
cgcaactacaaagaaagaatcccaggcgaggaaaaagatggatgggaaggagcaggatgtgtcgttgggagcgaacaagttccccgagagacagccgattgggacggcggcgcatagccaagacgacggcaaggactaccaggagccggcgccggcgccgctggttgacccgacggagtttacgtcatggtcgttttacagagcagggatagcagagtttgtggccacttttctgtttctctacatcaccg

SEQ ID NO: 156127 - DNA, 255 bp, Glycine max
gctgattctgtgcttttcccccaaaagaagcaaaaccactgtcactcgaacaagaacaagaagatgaagattaacgtcaagactctcaaggggactcactttgtccttcaagtgaaccctcaagacacggttgctgttgtgaagaagaatatagagacagcgcaaggtgctgatgtttaccctgctgcgcaacaaatgcttattcatcaggggaaggtgcttaacgatgccacaacccttgaggaaaataaagtt

SEQ ID NO: 156128 - DNA, 256 bp, Glycine max
ctctcatattcttcaggagtctactgctaaagagattaatgaaaatcccgaggcaggatgggaggctgctataaatcctcgtttctccaattatacagttgaacaatttaagcgccttcttggagtcaaaccaatgcctaagaaggaacttagaagtacacctgctatatctcacccaaagacgttgaaattgccaaagaattttgatgcgaggacagcttggtcgcagtgtagcactattggaagaattctagat

SEQ ID NO: 156129 - DNA, 252 bp, Glycine max
agcaggggtcctaggagaatgcattgtgtcatggattccattcctgccactgcaattgaacctggaggtgtagcacctacacagactgagttttctcttaacaacatagacatgtttccttcattccccttttttcgatcaaaatcaaatcgtgcggaaaattccatgtctggaccattggttgatcaaaaggatgggatgctagtgttgaaaaacaaggcccctaggtggcatgagcagctgcaatgttgg

SEQ ID NO: 156130 - DNA, 250 bp, Glycine max
gttttcaactattgtagctgttgaaggtattaaccaaatcaagacacataagctagttcccttgtctgagcaagaacttgtagattgtgacactacacaaaatcaaggatgcaatggtgggttaatggaatctgcgttcgagtttatcaagcaatacggtataactacagcaagcaattacccttatgaagcaaaagatggaacttgtgatgcatcaaaggtgaatgaacctgcagtgtcaattgatggc

SEQ ID NO: 156131 - DNA, 251 bp, Glycine max
aagggacatatgcaaaacttcaacctgaaagagtaggattttccgacttgcccaatcataaggctatcctcgaaacatgtcttcggcagcatgctactctatctcaaggtgacattttaactgtaaactatggagaacttgcttacaaattaagggtccttgagttaaaaccttcttcaagcgtatctgttttagaaacagatattgaagttgacatagttgatcctgatacatcttcagaaaagacagat

SEQ ID NO: 156132 - DNA, 248 bp, Glycine max
agaactttcagttttatacagtcgtttctatgggatcttgttgggaggcattctactcatgtacgagttccattattatttgagacctattcttcttcttatgtactctttttggatacctcagataatcaccaacgttattcgcgattcacgcaaaccattgcatcctcattatatcttagggataactgttactcggcttgcaatcccattatatatttttggttgcccaaacaacttcatgcgca

SEQ ID NO: 156133 - DNA, 249 bp, Glycine max
gttgaacaagggtttctctgtctgcttcttcactttctctcgtttcaatcgaaaccaaaacaaaaacatgggcagaaaattcttcgtcggtggcaactggaaatgcaatgggaccactgaggaggtaaagaagattgttactactttgaatgaggctaaagtccctggagaagatgtcgtagaagttgttgtgagccctccttttgtgttccttcctgttgtaaaaagtttgctgcgccctgatttcca

SEQ ID NO: 156134 - DNA, 249 bp, Glycine max
aaaatagtttggttttgtagtaagtgaggtgaggtgccaaaatggtgaagataactcttggtactttcgatgactcttttggtgttgcctctcttaaggcttatttggcagagttccatgcaactctgattttcgtgttcgctggtgttggttcagccatcgcttacaacgagcttacaaaagatgcagccttggatccaacggggctggtggcagtagctgtggcccatgcatttgcactgtttgtag

SEQ ID NO: 156135 - DNA, 251 bp, Glycine max
gttttggatatacttattgagaccagcatgcttgattttcgccatagtgacactccaatggatcccaatatcaagcttcttccgggtcaaggagagccattggaaaacccgtgaagatattgacgacttgtgggtagacttaattacctcactgtcaccaaaccagatatcatgtatgcagttagtgtgttaagtcaatttctgaatgctccttgtgattgccattggaatgctgtcatgcgcattcttcg

SEQ ID NO: 156136 - DNA, 255 bp, Glycine max
ctatgtactagcagtttacccatctgtgccttgtctaaccattgggagaactgcagggtccctgcttgatgccatggttatggtcatagtcaaagttcttagtccagatcaagcttcatgtgcaattgatctcccaattctaggtctatctgattgggactatggctgtcactatttgtcttgaaagatcaaacatgttcaagtacttggggaaattgcatctcttggaaaagtagaggaccagaggacttactt

SEQ ID NO: 156137 - DNA, 244 bp, Glycine max
ctggtgtcatttctgggctcaacgtgatgcgaattatcaacgagcctaccgcggctgccattgcttatgggctcgacaaaaaggccactagctctggggagaagaatgttctcatttttgatctcggtggtgggacttttgatgtctctcttctcaccatcgaggagggtattttcgaggtgaaggccactgctggtgatactcacttgggaggtgaagattttgataacagaatggtgaacca

SEQ ID NO: 156138 - DNA, 248 bp, Glycine max
cgacagggttggctattgatgcctatgggccaatcagtgacaatgcaggaggtattgctgagatggcaggcatgagccatcgtattcgtgagagaactgatgcccttgatgctgctggcaacactactgctgccataggcaagggatttgctattgggtctgctgctttggtgtctttggccctatttggtgcatttgtgagcagagctggaattttgactgttgatgtcttgactcccaaggtcttt

SEQ ID NO: 156139 - DNA, 250 bp, Glycine max
aaatcatattaagccatggccacctccaacttctcaattgttctctctctctccctagccttctttctagtgctactcaccaaggcaaactcaaccaacaccgtttctttcaccgtcagcaagttttccccacgccaacaaaaccttatcttccaaggagatgctgctatctcaccctccggggtgttacgactcaccaaggttgacagcaacgacgtgccaacgacgggatccctaggacgtgcccttt

SEQ ID NO: 156140 - DNA, 248 bp, Glycine max
acttatcattgattcgaccactggtggttttgaagctggtatttccaaggatggacagactcgtgaacatgctctgctttcattcacccttggtgtgaaacagatgatttgctgctgtaacaaaatggatgctactacacccaagtattccaaggccaggtatgatgaaattgtgaaggaagtctcttcctacttgaagaaagtaggatacaaccctgacaagattccttttgttcctatctctggtt

SEQ ID NO: 156141 - DNA, 250 bp, Glycine max
gaatctgtcatcaaagggagccgcaagcttgatcacacaaaccgcttcaagtgtttggataaggcagctgtagagaccgaatctgatcataccaaagacttgtcaaatccttggaggctttgcacagtaacacaagttgaggaactcaaatcagtaatctcattactcccagtttgggcatcattgattgcctttgcaactgtgtacggtcaaatgagcaccatgtttgttctccaaggcaacacaatgg

SEQ ID NO: 156142 - DNA, 251 bp, Glycine max
gggagtttgtcattcttccacttcccatgccaccctagagaagaaatgtataggaaagccaagatgcacggtcactgtatcaaacagtaactttgggcaagacccttgtcctaatgtgttgaagcggttatcagttgaagctgtttgcgctcccaactaattggagaggctgaatgattaaggaagcacccttttacgtgtagtgtgaagtgacttaacaagcacacgaaagaacaataatagtataggta

SEQ ID NO: 156143 - DNA, 254 bp, Glycine max
caagccaagtgaaagtgagaacaaataaaaatcaaagagcataatgtcagggatcattcacaagattggggagacccttcatgtgggagggcacaagaaggaggaggagcataagggtgagcaccatgctggagaatacaaaggggagcaccatggtgaacacagtagtgagtacaaaggagagcatcatggtgaacacaaagctggagagtaccatggtgagcacaagccagagcacaaagaggggtcctagc

SEQ ID NO: 156144 - DNA, 268 bp, Glycine max
ctttgttccagcgaaacaaagctcttgtaaaggagttaagcacacccccgcctggagctactgatttgtatttccccactaggtattctcaatccacattggggcaatttaaatcctgtttttggaagcaatggctgacatactggaggagtccagattataatcttgtcagatattttttcacattggcttgtgccctcatgatagggacagtattttggagaattggcaaaaacagggagagctcagctgacctgacaatgattat

SEQ ID NO: 156145 - DNA, 267 bp, Glycine max
tattagggtttttgagtgcggtgcggcgatcctagcactctcttctgcagctttcgccgacagcttcattcaccatggctgagcaaaccgagaaggcttttttgaaacaaccaaaagtgtttctcagctcgaagaaaactgggaagggaaagagacccggaaagggtgggaaccgcttttggaaatccattgggcttggatttaagactcccagggaagccatcgaaggaacctacattgacaagaagtgccccttcactggcaatg

SEQ ID NO: 156146 - DNA, 264 bp, Glycine max
atcgagccgggaaggtggggtgcttgatgctgatgaacggtggggatgaagcggatttgaatggtgggcccggggccacactcgggaattaccaacagcaagggtttgaggttgagtatgacttggaagagaagcgcgtggggttcgcaaggaggcagtgcgcgttgctttgggagagactcaatcgcgacaaaaactagcgtaaggtatcgtgcactgaacatactagattccctcccctgctttctgtcacgggtcgggttc

SEQ ID NO: 156147 - DNA, 266 bp, Glycine max
tggaaactggagaaattaggcatatgaccctgtaaattagggtttatgattaagttcaattattttaaggtgttgtctgtgtgtggtttaagtttcggtatctgtgttggtttcgtttcgtgttcctgtggttttcgtttttgacctacaattctagttgtgtttatagtcgatcgaatgaaatgatagtaagaaattatcgcatcaaaaaaaaaaaaaaaaaaaaaaaaaaaaaagaaaaaaaaaaaagagaaaaaaagaggggc

SEQ ID NO: 156148 - DNA, 260 bp, Glycine max
gcgattttcgattctcttctctgcaactatgcctaaccctaaggtcttcttcgacatgaccatcggcggtcaacctgccggccgcatcgtgatggagctctacgccgacgtgactccgagcaccgccgagaacttccgcgcgctctgcaccggcgagaagggcgccgggcggagcggcaagcccctccactacaaaggctcgtccttccaccgcgtgatcccgaacttcatgtgccagggcggcgacttcaccgccggaa

SEQ ID NO: 156149 - DNA, 263 bp, Glycine max
taaaactcttgtagctcccaagggcctctctgcctcttcaccactccacctcctgccttctaagaggcaatttagcttcactgttagggccatccaatcagaaaagccaacctatcaagtgattcaaccaatcaacggtgatcccttcattggaagccttgaaaccccagttacatccagccccttgattgcatggtacttatcgaacctccccgcatacaggaccgcagtgagcccactactaagagggatcgaggtgggcc

SEQ ID NO: 156150 - DNA, 264 bp, Glycine max
ggtgatgatgacgaggaggtagaattagatgaattctatgattatagcagcagttatgtggatgatcaaggcaagcagcttgttgcatcttgtgatgcatctaacaatgtagaacttgttggtgggtctgagctcataatcaccacgaaatctggtgaaagagcatcaaccaaaacactaggttcccgtgaatttttgcgttattatcgtcaaaaacctcggccatcactagcaaatatggctatcactgctgcgttggcttca

SEQ ID NO: 156151 - DNA, 263 bp, Glycine max
tatgtctagccgattcggctcagccagaatttaggaaagactatacaagtagcctgttaacatgttttcttttaagtacctattcaccaccattttcttagtgctaacattctttctttatccatcaaatgctcaactgagttcaaccttctactccagcacatgccccaacgtgtcttccattttgcgcagtgttgttcagcaggctctgcaatctgatcctcgaattgctgcgagcctaactcgtcgtcattttcatgagt

SEQ ID NO: 156152 - DNA, 266 bp, Glycine max
tagctatgatgtttccattcttcaatgacttcctaggcctgattggttcactgtcattttggccattaacggtttacttccccatagagatgtacattaagcagtcaaagatgcaaaagttttccttcacttggacatggctcaagatattgagctgggcttgcttgatcgtttctattatctcagctgctggctccatccaaggcctcgctcaagatctcaagaaatatcagcccttcaaagcccagcaataattaaatttgttc

SEQ ID NO: 156153 - DNA, 267 bp, Glycine max
attcgtttgaggagaagaatggcgtgaagcttccgagttacagaggggataacattaacggagactctttcgacgagaagtcgaggattccggatccgcagaggatgattagggcttattgccaagccgcggccacgctgaatcttctcagagcttttgccaccggtggttatgctgctatgcagagggttactcagtggaatttggacttcacggatcacagcgaacagggagataggtaccgagagcttgctaaccgagttgatg

SEQ ID NO: 156154 - DNA, 267 bp, Glycine max
ggcttatggtggatacctaggcacccagagacgaggaagggcgtagtaagcgacgaaatgcttcggggagttgaaaataagcgtagatccggggattcccgatataggtcaacctcttcgaactgctgctgaatccacgggcaggcaagagacaacctggtgaactgaaacatcttagtagccagaggaaaagaaagcaaaagcgattcccgtagtagcggcgagcgaaatgggagcagcctaaaccgtgaaaacggggttgtggga

SEQ ID NO: 156155 - DNA, 264 bp, Glycine max
cgagaagcttcgcgaacgaaaacaaagaaccctagacagatccattccatagccatgtcaggtgttggccctctatctcaggattgggaacccgtcgtcctccgcaagaaggctcccaccgccgccgccaagaaggacgagaaagccgtcaacgccgcccggcgctccggcgcggaaattgaaaccctaaaaaagtataatgctgggacaaataaagcagcatctagcagcacttcattgaacactaagaggctggatgatgat

SEQ ID NO: 156156 - DNA, 263 bp, Glycine max
agctttttctccacttggctttcactgctacgttctttgctggagttttgcaggcatcactcggtctcttcaggttagggtttatcgtggattttgtgtcacatgcaaccatagtagggttcatgggaggagcagctacagtggtttgtctgcaacagttgaaatcaatccttggcctagagcattttacccacgaggccgatctcgtgtcagttatgcgctctgttttttcccaaacgcatgagtggaggtgggaaagcgct

SEQ ID NO: 156157 - DNA, 265 bp, Glycine max
cttcttctcttaaaagagcctttgctttttctttaggcctttccgaattaagtacttgtttcattttctctcgaagcaagaaaaatgttcatcgagagtttcaaggttgagagtcctaacgtgaagtacacagagactgagattcagtccgtgtacaactatgaaaccactgaacttgttcacgagaacaagaatggcacttatcagtgggttgtcaagcccaaaactgtcaaatatgaatttaaaaccaacacccatgtcccta

SEQ ID NO: 156158 - DNA, 265 bp, Glycine max
cttgtctttatgacatttctcaagaacctgacaatggttttgttcttgtacagctagggataatcttgttttcctacagcgttggttcactaaattccctgagtactcaaataacgacttcttcatttcaggggagagctatggaggtcactatgttccacaacttgcacaacttattgttcaaaccaagaccaacttcaatctcaagggaatagcaatagggaatcctcttcttgagtttaatactgatttcaactcaagatct

SEQ ID NO: 156159 - DNA, 263 bp, Glycine max
ggaaaatggaaggcaccattgattgataacccagatttcaaggatgaccccgacctatatgttttccccaacttgaagtacgtgggcattgaattgtggcaggtgaaatctggtactttgtttgacaatgtcttaattactgatgatcctgaatatgccaagcaactggctgaagaaacatggggcaagcacaaggatgttgagaagacagcatttgaagaggctgagaagaagagggaagaggaggaatcaaaggatgaccc

SEQ ID NO: 156160 - DNA, 263 bp, Glycine max
cgagatcgacgccgccccggaggaacgcgcccgcggcatcaccatcaacaccgccaccgtcgagtacgagaccgagaaccgccactacgcccacgtggactgccccggccacgccgactacgtcaagaacatgatcaccggcgccgcccagatggacggcgccatccttgtcgtctccggcgccgacggccccatgccccaaaccaaagaacacatcctcttagcctaacaagtcggtgtccccaacatggtcgtcttcctca

SEQ ID NO: 156161 - DNA, 259 bp, Glycine max
aagcaaatagtttctgggaagcagaattacctccaaattatgacagagttggaattgagaatttcattcgtgcaaagtatgacgagaagagatggattccaagagatgggaattcaaaaacaccttctggattgagggaagagaaaagtccttcacattggcagaggcctgtggagcgaagtggttatgctgctgtttctgaaaataaatttgaggaaaggaagaaaatccaaccatcaaatgcaatttctaccacaag

SEQ ID NO: 156162 - DNA, 260 bp, Glycine max
ttcggtgatgatggaggacccgacaacgttgttgcacagcgactattcgaggctgttcggcgaagacacggacttgtacaaccgcattgtgttgggcgccctattgccgcactctgtgtggggcccactcccgcgcttcctccagacgtggcttcgcaattacctcggcggcgttctcctctacctcctctctgggctcttgtggtgcttctacatttattattggcagcgcaacgttcatctccccaaagatgctattc

SEQ ID NO: 156163 - DNA, 258 bp, Glycine max
ataaaagaccatgtcggtgaaggagtgcgagcaccacaaggggaagaagaggaagatcttccggcgagtgttctggtgcttagtggtgttccttttcatcgtgctggtcacgattcttttgatatgggcaatccttagacccaccaaacccaccttcacgctccaagacgtcaccgtctacggcttcaacgccaccgtggcgaacttcctcacttcgaattttcaggtcacgctcatctcgcgtaacccgaacgaccg

SEQ ID NO: 156164 - DNA, 263 bp, Glycine max
cgcaacattactcagcactgacattcttcaatcacactaatggctgtcaccttctacagatcttcacaccgaagaaggcatcaaatacctcgatcaattcctttctgggaagaactatatctctggggatcaattgacaaaggatgatatcaaagtgtatgcagctgttgtagaaaagccaggagactcttatcataatgctgctaagtggaacgatgacgtcacttctcaacttgctccaagcttcactgggcacgctcaag

SEQ ID NO: 156165 - DNA, 261 bp, Glycine max
gcaattgctaatcttgaatgaatcagcttcttattatcatgccaaagcaacggcgaaaaattatcaactcccaaaagacacgaatttgcagctgaaattttatcaatggcgaaattgagcataggatataatttttttccttggtttactatttttaccattaacccttaattgtcactccccttatgttttgcccgtttagtattgtaaaacaaattatagcaaaatatttttttcaacacttttattgggcagattttt

SEQ ID NO: 156166 - DNA, 258 bp, Glycine max
caaactggaactgatggaagccttatatctgaagagggttccacacataaggcagcagacccgtttgatattgggggtggacacgtggatcccaacaaagcaatggatccaggactaatatatgatatcaccactgaggattatgttcaattcctatgttccatgggtcacagtagtgcatccattagcaaagtgaccaagaccaccacaagttgtaagaaaggaaaacaccaaacactgaacctcaaccttccttcc

SEQ ID NO: 156167 - DNA, 259 bp, Glycine max
gcgatggttgcatcacaacaaaggagcttgggactgttatgcgttcgttgggtcagaatccaacagaggctgagctccaagacatgatcaatgaagtagatgctgatgggaatggcaccattgacttccctgagttcttgaacctcatggctagaaagatgaaggacactgattctgaggaggagctgaaagaggcgttccgagtgtttgacaaggaccagaatgggttcatttctgctgctgagctccgccatgtgat

SEQ ID NO: 156168 - DNA, 257 bp, Glycine max
cgcatatgcagaacttgcacctgctttgtctgatctgaatgttcttgttgagacctactttgctgacatccctgctgaggcgtacaagaccctcacatctctgaatggcgtcactgcatatgggtttgatttggtccgtggaacccatactcttgatttgatcaagggtggatttcccagtggaaaatacctctttgctggagtggttgatggaaggaacatctgggccaatgaccttgctgcttctctcactacat

SEQ ID NO: 156169 - DNA, 256 bp, Glycine max
agtttccacactgcataccttaggtcttccgaattcgaagttaatttgcaagatggctaaggaaaaggctcagatcaacattgtggtggttggtcatgtggaccctgaggaggcaaccaccattaacgagctgaagaagcctgttgtggagaaagaagctccagggcatgccatatgagggcatgcacgtacggcctcggaggggaaccagaaaattatgttaacaaaataatctggaaccctaatgtatcagtgt

SEQ ID NO: 156170 - DNA, 258 bp, Glycine max
gagcgagcgagcgagcagtttcaaagagaggatttgggattgggaaggcgagggattgcgctgcgtctcttcctcttctctttcgattcatccctcattcataatcttccaatccaacaacctcagcctcacactcacacatacacacatctgaacgcgtatcgtccctcccatggcttcaaagcgcatcctcaaggagctcaaggacttgcagaaagacccaccaacttcttgcagcgctggtccagtagctgagga

SEQ ID NO: 156171 - DNA, 259 bp, Glycine max
tggagaagcaccacaagcatcttgagcaccttggggaacttggtgctgcggctgccggtgcttatgccttgcatgagaagcatgaggccaagaaagacccagagcatgctcacaggcacaaggtagaagaggagattgcggcagcagctactgttggtgctggtggttttgtcttgcatgaacaccatgagaaaaaggaagttaagaaagaagatgaggaagctcatggaaagaagcaccaccatctgtttggctgaac

SEQ ID NO: 156172 - DNA, 256 bp, Glycine max
ctcgagccgaatcggctcgagcggctcgagggttgaggaactttacgcaaacaacaaaattccgatattggtttgtaccagacaccttggcttggggtgtgaatcttccagctcatctagtgattatcaaggggacagaatactatgatggaaaagcaaagaggtatgttgattttccaatcactgatattttgcaaatgatgggtcgtgctggacggcctcaatttgatcaacatgggaaagctgtgattcttgt

SEQ ID NO: 156173 - DNA, 254 bp, Glycine max
ctggaattacaggcaccagtctgatgtttgccatgcatatcaactcatgaggaaaggtggtgtgaaagaggaaaatattgttgtatttatgtatgatgacattgctttcaatgaagagaacccacggcctggagtcattattaacagtccacacggaaatgatgtttacaagggagttcctaaggattacgttggtgaagatgttactgttgacaacttttttgctgctatacttggaaataagtcagctctta

SEQ ID NO: 156174 - DNA, 253 bp, Glycine max
tctggattgtggaatttttcgcaccttggtgtggacattgtaaaaaattagctccagagtggaagaaagcatccaataatttgaaagggaaggttaaactgggccatgttgactgtgatgctgaaaagtctctaatgagcaggttcaaagttcaaggattccctacaatcttggtatttggtgctgataaagatagtcctattccttatgaaggcgcaagaactgcctcggctattgaatcatttgcattaga

SEQ ID NO: 156175 - DNA, 253 bp, Glycine max
ggaacatttccttatctatattcacctccatcttaaaacagttcccctagaaacttcgatctgaagatgggtggcattgcatttggacgctttgatgattctttcagtttaacctcaatcaaggcctatattgctgagttccattcaaccttgctctttgtttttgccggtgttggttcagccatagcctatggtaagttgacatcagatgcagcacttgatcctgctgggttactggcagttgctatttgcc

SEQ ID NO: 156176 - DNA, 252 bp, Glycine max
tggcagggacacgtgttcgggctgcaaaccctggtttgcataccgtccgcgaacggcgtcgttgagctggggtccaccgagttaattttccagaacccggatctgatgaacaaggtgaacgttctgttcaatttcagcaacaacaacttcgacatgggttcttcttggcccgccaccagcgccgatcagggcgaaaacgacccttcctcgctctggctcagcgatcccgaagttagggattccattaacact

SEQ ID NO: 156177 - DNA, 251 bp, Glycine max
catcaatgccatcaactttgacttgcctcatgtggttgccactgctcctaagtatgatggaatcacccatgttggaggtgacatgttcgtgtccattccagatgctgatgctatttacatgaagtggattctgcatgactggagcgacgagcactgcgtcaagatcttgaagaactgcaggaaggcaataccagagaaaacagggaaagtgatcatcgttgatcacgtgctgcggcccgaaggcaacgaac

SEQ ID NO: 156178 - DNA, 249 bp, Glycine max
gagaatcccaacacttaaccccaagaatgacatattctttatggttaaggcctttgctgcaggggtgattcttgcaactgggtttgtgcacatacttcctgaggcatatgagagcctaacttcaccttgccttaaggaaaatccttggggcaagtttcccttcactggatttgttgccatgttgtcctccatagggaccttaatggtggactcatttgccacagggttttatcataggcaacattttaa

SEQ ID NO: 156179 - DNA, 250 bp, Glycine max
  unsure (1)..(250): unsure at all n locations
catcacttttgtctgcattacacctgagcctcagatctcatctcttatccacaatactatggtcctgcaggtgaccancatgaaactcaaggttgatcttgagtgtgataaatgctacaagaaggttaagaaacttctcggcaagtatcctcagtgattcgggaccagaagttcgatgagaaggataacattgtgttcatcacagtggtgtgttgcagtccagagaagataagagacaagctttgctaca

SEQ ID NO: 156180 - DNA, 249 bp, Glycine max
agcatctgcagtggcatttgtggctgaacgtcactcccgtgcttgggctgttggttgggattataggctctatgctcctttttacacgggagtagttagttcaggaattgcatactatgttcaagggctggtgatgaaactaagaggccccgtatttgcaacagcctttaatcctctttgcatgatcatggttgctgctttgggctcccttatattaggagaactgctccatctcggaagtatcattgg

SEQ ID NO: 156181 - DNA, 251 bp, Glycine max
caataccacaatattttgtcatgaacaccgcaccagatggtcatggtccagttagaacagatggtggatggtttaatgacattttgaacaccatattctcttctgccccaactgtggctataattgttgggactcttattgacaacacacttgaaggcaaacaaacagctgtggacagaggacttccatggtggggtcctttccagaataggaaaggagatgttagaaacgacgagttctaccgtcttcct

SEQ ID NO: 156182 - DNA, 231 bp, Glycine max
atcaaacgcagcattgggagatagaaagagagagagaaagagagagagatatagacccttagtcttctctatcgtgcgctttcctttgacgcgtctgacccttgctttgtctgcgtcttccttctgtctttctttctttctctgtgtgtcgtaatggctctcccagactcttcttcccgtcgcaactccctgatcccctccttcatctactcctcttcctccaaaacgctc

SEQ ID NO: 156183 - DNA, 252 bp, Glycine max
tagcggagttatatggacaggtgatgaattagtagacggagtgcctgaagacgctgacatgcttcggtcaaagggcaaaagattaatttgtgtcaccaataactcaacaaagtctaggaagcaatatggaaagaagtatgaaacacttggcctgaatgtcagcgaggaggagattttcgcatcatcctttgcagctgctgcatatctgaagtccattgatgtcccaaaagataaaaaggtttatgtcatcgg

SEQ ID NO: 156184 - DNA, 245 bp, Glycine max
gcagacttaacaacagcacaaagcgggttactgtctgttcaagctaccatctctctctctctttcttagtgcctccttgccagaagttaaaatggcccaagaaactttcctattcacatctgaatcagtgaacgaggggcaccctgacaagctctgtgaccagatctccgatgctgtgctcgatgcatgcttggagcaggaccctgacagcaaggttgcctgtgaaacctgcaccaagaccaaca

SEQ ID NO: 156185 - DNA, 246 bp, Glycine max
cgcatatgcagaacttgcacctgcattgtctgatctgaatgttcttgttgagacctactttgctgacatccctgctgaggcgtacaagaccctcacatctctgaatggcgtcactgcatatgggtttgatttggtccgtggaacccatactcttgatttgatcaagggtggatttcccagtggaaaatacctctttgctggagtggttgatggaaggaacatctgggccaatgaccttgctgcttc

SEQ ID NO: 156186 - DNA, 248 bp, Glycine max
ggagaaggaacttcaagccaaggaaactgaattgagaaaaagggaacaggaagtgagacggagagaagaagctgcttcacgagctggaattgttcttgaggagaagaattggccgccttttttcccaataatccatcacgacattgctaatgaaattccaatccatcttcaaaaattgcaatatgttgcatttactacactgttaggattagtgttgtgccttttttggaatgttatagctgttactg

SEQ ID NO: 156187 - DNA, 247 bp, Glycine max
agtggctccagctgaacttgaagcccttcttctcactcatcctaagatctctgatgctgctgttgttccaatgaaggatgaagccgcgggagaggtacctgttgcatttgtggtcatatcaaatggttataccgacacaaccgaggatgaaattaagcagtttatctccaaacaggtggtgttttacaaaagaataaaccgagtattcttcattgatgcaattcccaagtcaccgtcaggcaaaatc

SEQ ID NO: 156188 - DNA, 257 bp, Glycine max
gcttccagagctgtacttctcgtgagcttcaatgttcacgtcgtcaccgtggttagctccacatatgtgccattgaaaccacaccccaaaactccaaaacacccacctgtcccaaagccaccttccccaaagcaagcaagttgccccaaagacactattaagtttggtgtgtgtgctgctgtgttaagtttgatcaacgtgcaacttgggcaaccaccaaagaccccattgtgcaacctcattgagggtctcgctga

SEQ ID NO: 156189 - DNA, 264 bp, Glycine max
tgagatcgttgtcatcggttcctgcatgacccccgcggactccattttcaacgaatgcgaagagagtttgaagagcatcttgtcggagataaggctgaatttgaagacaggcaagtccacgagaaaacccattatctcggaatccgaacaaagcaacttggaagccgggatggtcaacagaaacaagctcgggagaaagacgaagttcgggtacttagcacttgcggagccgtggcctaaggtttcgggttttgccaaggttga

SEQ ID NO: 156190 - DNA, 265 bp, Glycine max
gtcttcttcccgaagatatcaatatttatgcaaccacagcttccaatgcagatgaaagtacttggggaacatattgccctggggagtatcctagtcctccccctgaatattcaacctgcttgggtgatctgtacagtgttgcttggatggaagacagtgacagacacaatttacgaacagaaactctgcatcaacaatataaattggttaaagagaggactatatctggagattcatactatggctctcacgtgatgcagtatgg

SEQ ID NO: 156191 - DNA, 264 bp, Glycine max
atcaatcgtacacaggaaatgcttctaagttataacaatggagtatgaaagatggaccagggaaattactatttatacgaacactacaaaaataccatcaagtggttgaggaactttcattttcctaccctttaccattccttttatctatcttgtttttgtgttttcctttctttgatatgttgagataagagcatgaaggctagcaagatatgtaagattcatttttttttatcccgttttgttgtagaagagatgtgaatt

SEQ ID NO: 156192 - DNA, 264 bp, Glycine max; identical to SEQ ID NO: 110121

SEQ ID NO: 156193 - DNA, 262 bp, Glycine max
ggaagacaaaacattctcactccgaacaaaatgtcgattaacagcgaatctacgccgccaccgctgatcggcaaaatcgggccttacaccgtcttcatgacgccgccgtctacacccaaaccctccgacgaccaccccgtcaccaccaagatcgcacctccgccgcctcagattcccaaagccgttccttcccccaaacccgtctccgaccccgacgattccgtcttcggcttcttcagaaatgccgttaccaaggtccaaa

SEQ ID NO: 156194 - DNA, 262 bp, Glycine max
aaattaaattagtggttaaggttgttggaggagctctaacaagagatggagacacaaaattggttcgaaagagtgaagcctttagcagctgtggtatcaatgcagtttggatatgcagctatggatgttctatccaaggctgcaatgaacaaagggatgagcaactatgtgtttgtcgtttatcgtcatgctgttgcattctttgttatggcccctttggcatggttttttgacaagaaagtaaggccaaagatgacattat

SEQ ID NO: 156195 - DNA, 265 bp, Glycine max
caccaagcaggcctcctccggaagcccatggtacggcccagaccgcgtcaagtacttgggcccattctctggcgagcccccgtcctacctcactggcgagttcccaggtgactacggctgggacactgctgggctttcggccgacccagaaaccttcgccagaaaccgtgagctcgaagtgatccactccaggtgggccatgctcggggccttgggctgcgtcttccccgaactgttgtcccgcaacggggtcaagtttggagaa

SEQ ID NO: 156196 - DNA, 263 bp, Glycine max
  unsure (1)..(263): unsure at all n locations
ctcctcattaagccgccactttctctctctttccttttcgtcttctttttcttcttcgttgggtttgttgccacttagtatgaaagagggtgtgaagagagtgtggagaagatttggtgttgtggccatggcggagtctaagagtactgtgcttgttacgggagcgggtggtcgcacaggacaaatgaganacaaaaaatttagagagaggccaaaccaatatgtggctagaggtctggttagaacagatgatagcaaacaga

SEQ ID NO: 156197 - DNA, 264 bp, Glycine max
tgggttcaacaggtgagactcagattactccaacccatgtatctgatgaagaggcaaaccttttcgccatgcaactagccagtgcctcagtactccctatggttctcaaatcagctcttgagcttgatgagttggaaatcatagccaaggctggccctggtgttcacctttccccctccgacattgcttctcggctcccaacacacaaccctgatgcacccgttatgttggaccgtatattgcgcctcttggcttgctacaata

SEQ ID NO: 156198 - DNA, 262 bp, Glycine max
agaatgagccgttcacaggatccacacccttcccgatctttcttcccttttggaaatccttttcggatgatatcacctaaaggctctcgcatgtctccacaacttcttgcagtgttgcaagcttttgaggcaacattggcagagaggctgaaaaatcttatgcctaaaagcaaggatgaaatcctcaccttgtcttggatgactttagctatgaagtcactttgtgaaagtcacaatgacatacggacccttatgactgccc

SEQ ID NO: 156199 - DNA, 261 bp, Glycine max
gggaaggaagagcctgaaatacctgatgctaaccaattagccattgagtttagtaatcgtcgtagaagcgttagaaccttactgattcttggaaagaggtttctgaagaggggagactggcctttcaggctctgttctccagagaggtgttgcctcaaagcttttcacctcctcatgctttgaagaatacggatcatcaaatggacaacgccaatgataacaagcaaaacatagatgacaaagatgaagatcttgacggca

SEQ ID NO: 156200 - DNA, 261 bp, Glycine max
atgagaatggacaatatttggctgaacatgatattgtcaacaagatccttggcttgctgataggtagccatgaaaccacaagtactgtttgcactttcgttgtcaaataccttgccgagctccctcaaaatatttatgaaaatgtctatcaagaacaaatggcgattgcaaaatccaaagctccaggagagttgttgaattgggatgacatccagaagatgaaatattcatggaatgtagcttgtgaagtaataaggctta

SEQ ID NO: 156201 - DNA, 262 bp, Glycine max
ctacaacatccagaaggagtcaactctccacttggtgttgcgtcttcgtggtggtatgcagattttcgtgaagactcttacgggtaagactattaccctcgaggtggagagctctgacaccattgacaatgtgaaggccaagattcaggacaaggaaggcatcccaccggaccagcagaggctgatttttgctggcaagcagctcgaggatggaaggaccctcgctgactacaacatccagaaggaatcaacccttcacctt

SEQ ID NO: 156202 - DNA, 264 bp, Glycine max
ggaaattcaaatgctagagcaaaatgttctgaatgaatatccacaagttcattcaatttcagcattcaacaatatttacaatggcactggcatttttggtatccaagttacaacaggctcagattttgtatcaaaagccattgatatagctgctaatgagattcttggtgttgctactcctggacaagttgaccaggcacagcttaatcgagccaaacaggctaccaaatctgcaattttgatgaatttggaatcaagaatggt

SEQ ID NO: 156203 - DNA, 266 bp, Glycine max
attccgattcgattgattctcttctctctcacacgaagtagaaacacgaaactcagaatccatggcgacaccagcgacgacgaagcgaaaaccggtgttcgtgaaggtggatcagttaaaacctggcaccaacggccacacactgacggtgaaggtggtcagttccaagccggtgaagacggtgagcacccgcggcggtcgaccgacggtgctagccgcgcgcccgtcgcgcattgccgagtgcctcgtcggcgacgaaaccggaa

SEQ ID NO: 156204 - DNA, 266 bp, Glycine max
agtgaaatggcttccaaggctgcacttctcttgtgtttcaatgttctcttcttcaccgtggttagctccacatatgtgccatgcaacccacgccccaaaactccaaaacacccacctgtcccaaagccaccttccccaaagcaagcaagttgccccaaagacactattaagtttggtgtgtgtgctgatgtgttaggtttgatcaacgtgcaacttgggaagccaccaaagaccccatgctgcaacctcattgagggtctcgctga

SEQ ID NO: 156205 - DNA, 262 bp, Glycine max
ttattctcttaaaagttattaagagcttttgcttttctttctgcgcgcttttcccaattaagtagttcttccttttctcaaagcaaaaaaaatgttcatcgagagtttcaaggttgagagtcctaacgtgaagtacacagagactgagattcagtccgtgtacaactatgaaaccactgaacttgttcacgagaacaataatggcacttatcagtgggttgtcaagcccaaaactgtcaaatatgaatttaaaaccaacacc

SEQ ID NO: 156206 - DNA, 260 bp, Glycine max
aattaaagctgctactaataactttgacccagcaaataagataggtgaagggggctttggaccagtatacaagggtgtactatcagatggtgctgtgattgctgttaagcagctctcctccaaatcaaagcaagggaatcgcgaattcatcaatgaaataggcatgatatctgctttgcagcatccaaatcttgtgaaactttatggctgttgcattgaaggaaaccagttgctgctagtatatgagtacatggagaaca

SEQ ID NO: 156207 - DNA, 259 bp, Glycine max
gaagattctggtgaatgcgttgaaaaggaaaataaagaaattagtctgaaaaatgttgggtgtgttcagcagctccatagtgtcgccgccggaggagctcgttgccgccggcattcgtacaccgtcgccgaagatgacggcggcggcgctgcggaagtggttcgaggagaagaacccctccgcagtgtcggtggaggtcggagagcatgtccagctcgcttatacccaccagaacgagtcgccgtttcagcccagatcc

SEQ ID NO: 156208 - DNA, 263 bp, Glycine max
gacgggtataccctcgccgactacaacatccagaaggaatcaacccttcacctcgtcctccgtctccgtggtggcatgcagatcttcgttaagaccctcaccggcaagactataaccctagaagtcgagagctccgacaccatcgacaacttcaaggctaagatccaggacaaggagggtatccccccagaccagcagaggctgatcttcgccggcaagcagctcgaggacggacgtacccttgctgactacaacatccagaa

SEQ ID NO: 156209 - DNA, 263 bp, Glycine max
aacaaaatttagaaacaaaaacatgttggtgaaattgtacggtccaacctatggagcccccaagagggtgctggtgcgtctgattgagaaggaaattgagtttgaaacagtacatattgatctcttcaagggagagaataaggaacctgagttcctaaagctgcagccatttggatcacttcctgttattcaagatggtgaatatactctctatgaatctcgtgcaaatatcagatacttggcagagaagtataaagaccaag

SEQ ID NO: 156210 - DNA, 128 bp, Glycine max
gttccgcatccaccaaggcatgcatatacggcatccagtacggcgacagttccttctcagttggctacttcagccgcgagcgcctcaccgtgaccgtcaccgacgtcttcgacaacttcctcttcggt

SEQ ID NO: 156211 - DNA, 255 bp, Glycine max
gcacctgtttcatccatgcttaattacatttactgcatgtcttcaagcaagctttttattggaggcctttcatatggagttgacgatcagtctcttaaggatgcattttctggctttagagatgtggttgatgcaaaagttataactgacagagactctggaagatcaaggggatttggatttgtcaacttctccaatgatgagtctgcaagttcggcactctctgcaatggatgggaaggatctagatgggcga

SEQ ID NO: 156212 - DNA, 257 bp, Glycine max
aaagaggttgtctctgttgatggcttcggccttgtttcagggcgcttccattggacttctgatttatttggctattgccattgatcctagccttattgttagtgcatttgtggcaacttctttggcttttgcttgcttctctgcggcagtttagttgcaaggcgtagggagtacctctaccttggtggtttgctttcttctgggctgtccattcttatgtggttgcactttgcttcctctctctttgggggctcaat

SEQ ID NO: 156213 - DNA, 255 bp, Glycine max
tgctatcaagtaatggcagaattctttgattctcctctaatgatattgtgtattattgggtcttatgcaaattttcacaacttgttattcataaatgctactccattttgggattggtccttctcaatttgtcttacataatgttgtctttctcagggaggaatcagagggcaagttgaagggaattcttggttacactgaagatgatgtggtctccaccgactttgtgggcgatacaggtataaattatgttaa

SEQ ID NO: 156214 - DNA, 262 bp, Glycine max
ggtttgctgtgtcatggatatttgatcagaattaaaatggagggcaattctgcgagaaacataccttgatcggttatctcttcggtatgagaaagaaggaaagccatctcagttatctgatatagacgtgttcgttagtacagtggaccctatgaaggaacctccactcagtactgcagacacagttctgtctatccttgctgtggattatccggtggacaaggttgcatgctatgtttcagatgatggtgctgccatgctt

SEQ ID NO: 156215 - DNA, 259 bp, Glycine max
ctcaaggagcatgtgatcaagccggtgatcccggagaagtaccttgatgagaagaccattttccacttgaacccctctggacgttttgtcattggaggtcctcacggtgatgctggtctcaccggccgcaagatcatcatcgatacttacggaggatggggtgctcatggtggtggtgccttctccgggaaggatcccaccaaggttgataggagtggtgcttacattgtgagacaggctgctaagagcattgtggcaa

SEQ ID NO: 156216 - DNA, 258 bp, Glycine max
  unsure (1)..(258): unsure at all n locations
cctttgttcactcttcttctcttgcggctagggttttagcgcagttgtntctagatttaaggaagatgggtaaggaaaaggttcacatcagtattgtggtcattggccatgtcgactctgggaaatccactaccactggtcacgtgatttacaagcctggaggcattgacaagcgtgttattgagaggtttgagaaggaagctgctgagatgaacaagaggtctttcaagtatgcctgggtgctggacaaacttaagg

SEQ ID NO: 156217 - DNA, 258 bp, Glycine max
  unsure (1)..(258): unsure at all n locations
attatcaactctttcaaaagtgagagaagagaaggaaaggaaacaaaacgcacaaaggannattatagcaatggcagaacaaaaccaaaaccagacaactggagatataaagcaccaagaggnaggccacaagagccatctcctgagtgatgctcnnnaccagtatattctggagaccagtgtctacccaagagaagctgtatccatgaaagaactgagagagttgacagcaaaacacccatggaacatcatgacaac

SEQ ID NO: 156218 - DNA, 261 bp, Glycine max
tgcaaaagagcgtcgtagtcgcaaccctaatcagaagaagcgcagttcaagcgagtgacagccaccagccatgggtcgtatgcacagccgcggtaagggtatatcctcttctgctttgccctacaaaaggacacctcctagctggctcaagatctcttcgcaagatgtcgaagaaaatatctgcaagtttgcgaagaaaggtttgaccccgtctcagattggtgtcattctcagagattctcacggtattgctcaggtcaa

SEQ ID NO: 156219 - DNA, 246 bp, Glycine max
  unsure (1)..(246): unsure at all n locations
gtcactcatgtcccgatagagtgatgattgncatgatgtgatgattgccggaaaggtagctgttgtgtgtggctgcngagacgttggcaagggttgtgcttcggcacgtattaaaccgtggctcgtgtcattgtcaccgagattgatcccatttgtgcccttcaggctctaatgttgggtcttcaggttctcaccctggaagatgttgtctccgaggccgacatcttcgtcaccaccacagggaac

SEQ ID NO: 156220 - DNA, 258 bp, Glycine max
ctcattgagaccctcaccgcccttggcccgaggtccgctggtgctcctgcaacatcttctccacccaggaccacgccggcgccgctattgcccgcgacagtgccgccgtcttcgcctggaagggtgagaccctccaggagtactggtggtgcaccgagcgcgccctcgactggggccccggtggtggacccgacctcatcgtcgacgacggtggtgacgctacccttctcatccacgaaggcgtcaaggccgaggagc

SEQ ID NO: 156221 - DNA, 262 bp, Glycine max
cctcgagccgaatcggctcgagtgcattgtatctacccacttcacaaccaacaatggcaatggcaacccaagcctctctcttcaccccacccctctccggtctcaaacccagcgaccgagccaccgcgccatggaaacaatcctccaccctctccttctccacctcgaagcccctcaagttctcgcgaacaatcagagcagcagccaccgaccagaccacagaggcaccggttgggttcaccccaccggaactggacccaaa

SEQ ID NO: 156222 - DNA, 230 bp, Glycine max
tcgtagacagtgtgtgattctaagttataatcttggagtatgtgagatggaccatggatattactatttatacgatcactacaaaaataccatcaagtggttgaggaactttcattttcctaccctttaccattccttttatctatcttgtttttgcgttttcctgtctttgatatgttgagataagagcatgaaggctagcaagatatgtaagattcatttttttttat

SEQ ID NO: 156223 - DNA, 253 bp, Glycine max
  unsure (1)..(253): unsure at all n locations
tggaaaaagcagtatagagtgaaagaatgggtgagaaaagcaagattttgatcataggaggcaccggctacatcggcaaacatatagtggaagcaagcgcaaaggctggaaatcccacttttgctttggtgagggaatccacactctctgaaaaagaaaaagcacaactcatccacagttttgangtctgggggcgttaatttggtccgcggggatctgtacgatcatgagaagttcgagaaagctatcaagc

SEQ ID NO: 156224 - DNA, 257 bp, Glycine max
tgaaattgcagaacgcttacattccaggatggtggttactaacaacaactacaaataagaggctgcaaaaaattgatactgagatacgagcattacttaaaggtgtcatcaacaaacgagagaatgcaatgaaggctggtgaagtcttgaacaatgacttgttgggcatgcttttggaatcaaaacgtatggaactacaagatcatggacagaatagcattattgcaatgactagcctagtggtaattgaggaatgc

SEQ ID NO: 156225 - DNA, 257 bp, Glycine max
ggctctatggtctcgcccctgttgctaagtacttggtcaggaacgaagatggtgtctccattactgctctcaacctcatgaaccaggacaaaatcctcatggaaagctgttactatttgaaagatgcagtccttgaagggggtattccatttaacaaagcatatggaatgacagcctttgaataccatggaacggatccaaggtttaacaaggttttcaacaaggggatggctgatcactctaccattacaatgaag

SEQ ID NO: 156226 - DNA, 260 bp, Glycine max
cttttctaacatggctgctgggactggactctttgcagagattctggatggagatgtgtacaagtactatgctgatggagaatggaagaaatctgcttctgggaaaagtgttgccatcatcatccccactaccagaaagactctatacaaagttcaagcttgttcacaagaggaggttaacaaggtcatggacttggcaaaatctgcccaaaagttatgggcaaagaccccactatggaaacgtgctgaacttcttcaca

SEQ ID NO: 156227 - DNA, 261 bp, Glycine max
aagtagttgagagctaagaaggagaagcaaatggcttcctcaatgatctcttccccagctgttaccactgtcaaccgtgccggtgccggcatggttgctccattcactggcctcaagtccatggctggcttccccaccaggaagaccaacaatgacattacctccattgctagcaacggtggaagagtgcaatgcatgcaggtgtggccaccagttggcaagaagaagtttgagactctttcctacctgccagaccttgat

SEQ ID NO: 156228 - DNA, 265 bp, Glycine max
ctgagatgttgcagtgttgcttccctcctaacctatctgcgcatacatgcaagcatggttacctgcatgctgagtatggtactgcaatcacatgggaccatgcattacagacaagtttgctgtattttgagaacaaaactcacaaccttttcacttgcaactggcactcgtttgtcgcgaactgtctgaatcgactgtgttatggtggatcaatgagttggaatatggtgaatgtaggagctttggtactattcaaggggcactg

SEQ ID NO: 156229 - DNA, 262 bp, Glycine max
ggaacttcagattgctggaggagcttgaacgtggtgaaaaaggaattggagatggcacagttagctatggaatggatgatggtgatgacatttacatgcgctcttggactggcacgattattggcccccataatactgtacatgaaggaagaatttatcaactgaagctgttttgtgataaagactacccagaaaagccccctagtgttcggtttcattcacggatcaacatgacttgtgttaatcatgaaactggagtggt

SEQ ID NO: 156230 - DNA, 260 bp, Glycine max
ctgaacttaatctaaagataatggataaagacaactttagtcaagatgattgtcttggcgtggcaaccattcatctggatccagtgtttgaagcgggtagcattccagaaactgcttacaaggttgtgaaggacgaagaatattgtggagagattaaggtggctctcacttttactgttgagaaatatgaggagcaggattatgctgaacctgaagagagctatggtggatggaaaatccagttggggaattttaaagtg

SEQ ID NO: 156231 - DNA, 252 bp, Glycine max
atttgggggaggtgagtgattctgtttgggaggacttgctgaaccaagacttggttgctggggaccctgaagaggaagttgtgattggtgatttttcacaagttgatgttcctgtggaggatttgattgcggatgctgatgagtggagtgaggatttgcagaaccttgtggatcacatgggttatcttgggtccaaaccgtagtgggaaggaaggattttcattatctagggggttcagataaaactttccc

SEQ ID NO: 156232 - DNA, 260 bp, Glycine max
ggaagatatgacactcaattccattcacttttcaggatcctggacacagcacatcatgatgagtttcatcagcctaactttggtggttcttcaataaaaaaaggtggtccaagggaaccttggcacgacatccattctcgacttgaaggccctattgcttgggatgttttgtgcaactttgagcagagattgaggaagcagggaggaaaggacttacttgttccactgagagaccttgttgatgtcattattcccccatc

SEQ ID NO: 156233 - DNA, 227 bp, Glycine max
atctctcttctcttctgattggaactgctgttgtttgttttgctattatttgtaaaaccatttgtttttaattgagatcgttgcatgtatggtttaatataatcttaggcaagtagcagcaaagatgcttctctgtgacatgttcaattattaatttatatgaattgcgctttaatttgttgaaaaaaaaaaaaagaaaaggggaaaaagaatagggaatttggaga

SEQ ID NO: 156234 - DNA, 257 bp, Glycine max
atcacaatggcttggtcctctaattgaagtgattagattctctaccaagtcaattgagagggagattaactcagtcaatgacaaccctttgattgatgtgtcaaggaacaaggcacttcatggtggtaacttccaaggaactcctattggagtctccatggataatacacgtttggctcttgcttcaattggtaaactcatgttttctcaattctctgagcttgtcaatgattattacaacaatggtttgccttcaa

SEQ ID NO: 156235 - DNA, 254 bp, Glycine max
ctgattctgaggaggagctgaaagaggcattccgggttttcgacaaggaccagaatgggttcatctctgctgctgagctccgccatgtgatgaccaacctcggggagaagctcaccgatgaagaggttgatgagatgattcgcgaggccgatgttgatggcgatggccaaataaactacgaggagttcgttaaggtgatgatggccaagtgatcatcacattatggccacaaaaacctaaatgaagaaatgttg

SEQ ID NO: 156236 - DNA, 249 bp, Glycine max
gcaaggatgcacatctttgtgaggagagggggtcccaactaccagaagggtcttctttgatgcgagcacttggagaggagattggcatccccattgtggtttatggacccgaagccacaatgactggtatatgcaaagaggcaattacagttcattacagccgctgcttaaggtcaacaacaccttcatttatagtattttcatggtgagtctgaagtgaacgttgattcttaatttccttttccattc

SEQ ID NO: 156237 - DNA, 236 bp, Glycine max
ggaagttatgaaaaatggaggggttggcatgattttggcaaatggtgtatttgataattatgaagaatatgttggagctgatattgtgaaaagagctcttagttaccctttgaaattaattgccaaaaacgctggtgtcaacggtagtgttgtcagtgagaaggtattgtccagcgacaatccaagatatggatataatgctgccaccggataatatgaaggattgatgtctgctg

SEQ ID NO: 156238 - DNA, 247 bp, Glycine max
gattatcctaagtctttgggaatagtgctgcaatggcttcaagtcaggaggaggtgacccttttgggagctactggaagcccatttgtgtgcagggttcatattgccctcaagttgaagggagttcaatacatatatgtcgatgaaaatttgaggaacaagagtgtactgcttctcaaatccatcccagttcacaagaaggttccagtgtttattcacagtgagaagcccatagcagagtctcttgt

SEQ ID NO: 156239 - DNA, 254 bp, Glycine max
attgaagcgtggaaaaatgctcgtgacagcacaggttcgacacctgaggattatgcccgtttacgtggccattatgcttacattcacttggtgcagaaaaaaattaacaagaaacaaggagcagctcatgtggtggttgagattccaagcaatatgacagagaacaatacaaacaagaagcaaaatgagttatccactatctttgagattggaaagcctgaagtaaggcgtggccaagggcactgtaagctttg

SEQ ID NO: 156240 - DNA, 236 bp, Glycine max
gccggatctgctaaaatacgcttgatccatatgggcttcctcgaccacttgtgggacgacatcgtcgccggcccaaggccggaaaacggtctcggcaagctccggaaacaccacaccttcactttccgacctagctccggcaatgaagcggagggcgggagcgtgagatcgtacggtgacgaatcgtcggaggaagcgactagagtgacgcgtagtatcatgatcgtgaaaccgcc

SEQ ID NO: 156241 - DNA, 73 bp, Glycine max
gctagaatggaatttcgatgctcagtcatctcttttaccattctcttctctcttgctcttgcaggagagagcc

SEQ ID NO: 156242 - DNA, 249 bp, Glycine max
ggagtcagagaaaccctaggtaagaagaaaagatgccggctggtcatggtttgagatcccgcaccagagattccttctctcgtcctttcaggaagaagggaaccatcgccctcaccacatacctgagaacctaccacgtcggcgactatgttgacgtcaaggttaacggtgccgttcacaagggaatgccccacaaattctaccatggccgcaccggacgcgtctggaatgtcaccaaacgtgctgttg

SEQ ID NO: 156243 - DNA, 246 bp, Glycine max
ggcattggtttctctctctagcttggacgagtgaattagattcatcatcaagatgtcgtctctgatagcagaagatgtgaagagcagatcagaggtgtaccacggggacgaaatgtgccaagtgaagtccaaggagcttctcaaggaaatcgccctccccaacggccttcttcccctcaaggacatggaggagtgcggctacgacagacaaaccggcttcgtctggctcaaacaaaagaagagtta

SEQ ID NO: 156244 - DNA, 240 bp, Glycine max
aagaagaagaagaagcgttctttcggagagttcgaagatgtcgggcgttaccaacaacaacgaggaagacaagaagccaaccgaacagggagcacacatcaaccttaaggttaaggggcaggatgggaatgaagtttttttcaggatcaagagaagcactcaattgaagaagcctatgaatgcttactgtgaccgacagtcggtggatttcaactccattgcttttccggttgatggacg

SEQ ID NO: 156245 - DNA, 242 bp, Glycine max
ctttcgaaagattttatccaattgaaattttaaaaatgactgggataaacttaagaattcaattattgaaattgaataagtaaacaatttaattggattggtcgaatggtatcaaaaaaatggagtactaactcccatttcttatttattattgaattaaccgatcaacttgctttgttatcgaacatttctttttgatttcaaaaattttccggaaaaaatttgaatctatttttatatgc

SEQ ID NO: 156246 - DNA, 244 bp, Glycine max
aggcagaaagcaagctcatcctagagattgaaaaatggcagcagcctcctccatggctctctcttccccatccttggctggcaaggccgtgaagctgggcccatcagcccccgaagtcgggagggtcagcatgaggaagaccgtcaccaagcaggcctcctccggaagcccatggtacggcccagaccgcgtcaagtacttgggcccattctctggcgagcccccgtcctacctcactggcgag

SEQ ID NO: 156247 - DNA, 249 bp, Glycine max
caagaatggcacttcgttgcttggtgatgtccctttctgttctcttcactcttggtcttgcgagagaaagccatgccagagacgaagatttttggcatgctgtttggccaaacactcccattccaagttcattgcgagatcttctaaagcctggccctgcaagtgttgaaatcgatgatcaccctatgcaaattgagaaacacagtacccgaaaacgttcttctataaagaagaccttcatccaggcaa

SEQ ID NO: 156248 - DNA, 240 bp, Glycine max
agattggttatgttggaccacatgatgcctctggtggatgaaagttggcgagtcaaatttgagagagtgagagaggatggtttctccaggctgcaaggtctttgggtccttcgggagatcgtacttcctatcataatgaagctgttgacagcattatgtgtaccctacgttttggccaaaggtgtatttccagtgcttgggtatcccttggtgataaattctgccgtctatcggtttgca

SEQ ID NO: 156249 - DNA, 236 bp, Glycine max
cccaacttgagagctgcattctgcttccgattctcaaactcaaaggagacgagacatggcttatgctgcaatgaaacccactaagcccggcttggaggagtcacaggagcaaatccataagattagaatcaccctttcctctaagaacgtcaagaatctcgagaaggtttgtgctgacctggttcgtggtgccaaggacaagcatctcagggtgaagggacctgttaggatgccaa

SEQ ID NO: 156250 - DNA, 236 bp, Glycine max
cacaaggcggaaagcaagctcatcctagagttttaaaaatggcagcagcctcctccatggctctctcttccccatccttggctggcaaggccgtgaagctgggcccatcagcccccgaagtcgggagggtcagcatgaggaagaccgtcaccaagcaggcctcctccggaagcccatggtacggcccagaccgcgtcaagtacttgggcccattctctggcgagcccccgtcctac

SEQ ID NO: 156251 - DNA, 171 bp, Glycine max
gtgttgatgtacgtatgtagaaggagtgaacgggaaccagagctgtcctcaatgcaacactcgctataagcgccacaaaggttgtcctagagtagctggagacgaagaggacaactttgatgcagatgagtttgatgatgagtgtccggtgaagaatcatcttgaagatct

SEQ ID NO: 156252 - DNA, 232 bp, Glycine max
cgagcatcatggcctcgagagcagtgctattgttggctatgtgtgtgcttccggccatggttgtggccattcgcccagcaaagaaccctttttgcgtgaagggtcgcgtctactgtgacccttgccgtgctggttttgagacctcagcaaccacctacattgccggtgctgagattatgttgcaatgcaagagcagggttagcaacgaggttgtgtacacctttaaggggta

SEQ ID NO: 156253 - DNA, 233 bp, Glycine max
tttgaatctttcaagaatgttccagaacccttcaaaaccctctcttctctctttcttcgatcgcttcgcctgatattctttatggctgagatcaagcaaaaatgagcgtggttggatttgattttggtaatgagagctgtattgttgctgtcgcaagacaaagggggattgacgttgtgctcaacgatgagtcaaagcgtgaaacacctgcaattgtatgctttggtgacaaa

SEQ ID NO: 156254 - DNA, 242 bp, Glycine max
atcgacacctatggaggatgaggtgcacatggtggtggtgccttctctgggaaggatcctaccaaggttgataggagtggtgcctacattgtgaggcaagctgcaaagagcattgttgcaaatggacttgctaggagggcaattgtgcaagtttcctatgccattggtgtgcctgagcccttgtctgtgtttgttgacacttatggcactgggaagatccctgacagggaatcctcagcatt

SEQ ID NO: 156255 - DNA, 236 bp, Glycine max
gtttcaatgggagacaaaggctttatcaagcctttgcttgaaaagcgaggtaaagtacatttcgataaggtgtgtattaaaccaggcaagccatttacatttgcagagattgactttcaatctacagagagcacaattctagcttttgggctacctggaaatcctgtcagctctttagtttgcttccatctctgtgggggtccctgcaatacgctaccctgcagggtggacaaatc

SEQ ID NO: 156256 - DNA, 236 bp, Glycine max
ctcgagccgttcgttccaatcggttacacattcggtgccggcatgtttgagatggagaaagtgacaggtggaagtccatatggtgctggaacttacgccggtgatggctcaagacagccaagtgagcttgagttacaacaagcattccaccaagggaagtacatctgctggcatcacaaagaagctcaagcaagctgcataatgttgccttgccttcatattagatcatactatta

SEQ ID NO: 156257 - DNA, 224 bp, Glycine max
caggatcaagagaagcactcaattgaagaagcttatgaatgcttactgtgaccgacagtcggtggatttcaactccattgcttttctgtttgatggacgccgcctccgagctgagcagactccagatgagttggaaatggaggacggggacgagattgatgccatgcttcaccagacaggaggttctgttgtctgaaggatgtgattacctttgctcctcatta

SEQ ID NO: 156258 - DNA, 232 bp, Glycine max
gttacaccgtccatgccaccttccaagatatcaaggatgaaaatgagacgaaacatttggaggaaatggaaggagcaaagagtcatctccatttttttgaaatggatcttcttgacatcgactccattgccgctgccataaatagttgttccggcgtaatccaccttgcatgtcctaacatcattggtcaagtcgaagatcccgagaaacagatattggaaccggcgataaa

SEQ ID NO: 156259 - DNA, 229 bp, Glycine max
ggtgaatgcgtagaaaaggaaaataaagaaattagcgtgaaaaatgttgggtgtgttcagcagctccatagtgtcgccgccggaggagctcgttgccgccggcagccgtacaccgtcgccgaagatgacggcggcggcgctgcggaagtggttcgaggagaagaacccctccgcagtgtcggtggaggtcggagagcatgtccagctcgcttatacccaccagaacgag

SEQ ID NO: 156260 - DNA, 239 bp, Glycine max
ctttgcaagactgaggctgagttgaaagaagcttggcgtcctggagatcttggttacggaactagagttcctggtgacatgctgattgtcacaattgtcttctgttactctgttattgctcctgtgataatcccatttggtgctctatattttggcctaggatggcttgttttgcgaaatcaggcactcaaagtctatgtaccaacatttgaaagttatggaagaatgtggccacacat

SEQ ID NO: 156261 - DNA, 229 bp, Glycine max
gttctagaaggaagagcaaaggcttcacaagcacacgatcacaagcatcaaccactaatatttggaccggctagccttgtaaatggaaacataacaactgagagagaaagaatggcagctcaggtacttccaacctagtcataggatgccaactatgagcattgaggaagctgggctaaaagaaatggaaataatgaacaaatggcaagagagaaatgtcagactcatg

SEQ ID NO: 156262 - DNA, 227 bp, Glycine max
gatccaagtgatagacactcgtcgcgatggaacgtgtagctgaatccgagcgaactctgtacccatacgtgactggatcctctgtagtcgctatcaaatacaaagatgggattctaatggccgctgacatgggaggttcgtatggatctaccctgcggtacaagagtgttgagcgtatcaagcctattggaaagcattctcttcttggtgctagcggggagataagt

SEQ ID NO: 156263 - DNA, 229 bp, Glycine max
ccccaaccattcagaaatgatctagagagctattctttagaattgggaaaacttagcatcgcaatcattaaacttatttcaaaagctcttgagatcaacactaatgaattgctagagttatttgaagatttaagtcagtcaatgaggaagaattgctaccctccatgtccccaaccagaacatgtcattggccttaatcctcattctgatgctggtgctctcaccatcc

SEQ ID NO: 156264 - DNA, 226 bp, Glycine max
accaactgaagaaattgctgacagaatcaacaagatgctggcagtgctcgagaagaacatcttgtgagtgaaccctgactgtgggctcaagacccgtaagtacactgaggtgaagccagccctcacaaacatggttgccgcagcaaaactcatccgcaacgaacttgccaagtgaatggtataagaaagtagaatcatccaagtcatttggttctgctttatatta

SEQ ID NO: 156265 - DNA, 219 bp, Glycine max
caaaaccttaccagcccttgacatatgaacaacaaaaccagtccttaacgggatggtactgactttcatacaggtgctgcatggctgtcgtcagctcgtgtcgtgagatgtttggtcaagtcctataacgagcgaaaccctcgttttgtgttgctgagacatgcgcctaaggagaaagtctttgcaaccgaagtgagccgaggagccgagtgacgcgcc

SEQ ID NO: 156266 - DNA, 221 bp, Glycine max
aaatttcagaactacagtattttactgcaataaagtccgtgaaacaacagctttcatggttccattggtggctggtgatggaaccaaaactcaggcacttgctgtttgccactcagatacttctggaatgaatcatcacatgcttcatgaactcatgggagttgatcctggaactaaccctgtttgccatttccttggaagcaaggccattttatgggtac

SEQ ID NO: 156267 - DNA, 225 bp, Glycine max
aaattttgacgggaagaggctactcggacttagtggttcagatgcaacgaaagtgctcaacactttgatattcaactcctttgtattttgccaggtgtttaatgagataaacagcagagatattgataagataaacatattcagaggcatgtttgacagccggatatttttggcgataattttcgccaccgtggcatttcaagtggtgatagttgaattccttgg

SEQ ID NO: 156268 - DNA, 227 bp, Glycine max
gagagaaaccctagggtttggaagaagctgatcggagaagatggtgcagcgtctcacctaccgcaagcgccacccctatgccaccaaatccaaccagcacagagtcgtcaagactcccggtggcaagcttgtttatcagaccacgaagaagagggccagcggacccaagtgccctgtcactggaaagaggattcaagggattccacatttaaggccaacagaatata

SEQ ID NO: 156269 - DNA, 235 bp, Glycine max
attgaaattctttagttgtaactgacaaagttttctgagaaaataaggattattattgagagaatggctggctcatcggaagagggacaagtcattagctgccacaccgttgaagaatggaacgatcaactccagaagggcaacgaatccaagaaactcattgttgtggattttactgcttcttggtgtggaccatgcggtttaattgaacaatcctgggctgactgggcaaaaa

SEQ ID NO: 156270 - DNA, 274 bp, Glycine max
aaggaattagaggcttaagtggtaagaaagatttcttggatgaagatgatattcaaaagttttcctacttaagggcagtgataaaagagacacttagattgcacttaccagcaccactacttataccaagagaaacagataaaaaatgcatgttagatggctacgaaattccagccaagacattattatatgtgaatgcttgggcaattcatagagatcctaaggcttggaaagatccagaagagtttatacctgagaggtttttaaattgcga

SEQ ID NO: 156271 - DNA, 273 bp, Glycine max
atcgagccggtccagtatagaggaaaattggagagaactgctgtactcaaggctgtatactctggatttaaggagactactgaaccttcagtttgtgtaagtggagatgttgagactaatgagtgtcttgaaagaaatggaggatgttggcaagacaaacatgctaacataactgcttgcaaggatactttcaggggaagagtttgcgagtgccctgttgtgaacggtgttcagtataagggttacggttatacgacatgtgaaggttttgga

SEQ ID NO: 156272 - DNA, 269 bp, Glycine max
gcagtggagaggtccaacaagcaattccccttttacagaaagcatatggagatagcatgcataaagttttgcatgttggtcctgatacttgttatgtggtctctaaattgctgaaggaggatgaaactgacgccttgggaatagaaccatatgatatagaggatgctgataataattgcaaagcacttatacgtagaggcagtgtgcgtgtgtctgatatcaagtttcctcttccatacaggccaaaatctttctctcttgtaattgtt

SEQ ID NO: 156273 - DNA, 269 bp, Glycine max
agttcacaacattggttttggttgtggggaggacaatgaaggtgatggatttgaacaagcttcagggttggttggtcttggacgtggagctttgtccttggtttctcaactcaaggaaccgagattttcttattgtttgaccccaatggatgacacaaaagaaagtattttgttgttggggtctttgggtaaagtgaaagatgcaaaagaagtggtgacaacacctcttctcaaaaaccctttgcaaccttctttgtactatctttctc

SEQ ID NO: 156274 - DNA, 268 bp, Glycine max
agtcgctccgcaccagtttcaacgcacggatatcttgttgtttggagcgatccgagaaaaactctgtaaacatgttggtttaccaggacctccttacaggtgatgagcttctctctgactccttccgttacaaggaaattgagaatggaatgctgtgggaagttgaggggaagtgggttgttaaaggagcagttgatgtagacattggtgcaaacccttctgctgagggtggaggagaagatgagggagttgatgatgcagctgttaa

SEQ ID NO: 156275 - DNA, 270 bp, Glycine max
  unsure (1)..(270): unsure at all n locations
taaagaanagaccatcaaagtttcacttcagccttatccggtttagggtttcggtttttgacccaacctttgacgtatcgaaaccttaagtttcggatcaggtctgagcaatctggttggtagaacctttggtcttagagagtcaagttttatgtctgaattagacgatcaaattcctactgccttcgatccttttgctgatgcaaatgctgatgactcgggtgctgggtcaaaggagtatgtgcatattcgcgtacagcagcgaaatgg

SEQ ID NO: 156276 - DNA, 267 bp, Glycine max
cacatgtgaggattcactgttagctgctcctattatcttggacttggtccttcttgctgagctcagcactcgaatcgagtttaaagctgaaaatgagggaatattccactcattccacccagttgctaccatccttagttacctgaccaaggcccctctggttccaccgggtacaccagtggtgaatgcgttgtcaaagcagcgagctatgctggaaaacatcctgagggcttgtgttggattagctcctgagaacaacatgatcct

SEQ ID NO: 156277 - DNA, 122 bp, Glycine max
gaatggcacttcgttgcttggtgatgtccctttctgttctcttcactcttggtcttgcgaaagaaagccatgccagagacgaagatttttggcatgctgcatggccaaacactcccatacca

SEQ ID NO: 156278 - DNA, 268 bp, Glycine max
aaaacctttgtgaaggtttacaagtcagggtcctttggaagatccttggacatcactaaattcaccagctactctgatctacgcagtgagcttgctcgtatgtttggcctaaaaggtgacttggaggaccctgtgagatcaggctgccagcttgtagtcgttgactacgataatgacgttcttctccttggtgatggcctgtggccggaatttgtaaatagtgaccggtgcatcaagatactttcccctcaggcagtgcagcaaatgg

SEQ ID NO: 156279 - DNA, 271 bp, Glycine max
ggaaaccctagctggataggtcaaacatcatcatgtcggacgaagagcaccatttcgagtccaaggcagacgccggtgcctccaaaacctaccctcagcaagccggtaccattcgcaagaacggctacatcgtcatcaaaggacgcccctgcaaggttgtggaagtttcgacttccaaaactggaaagcacggtcacgccaagtgccactttgttggaattgatattttcactgccaagaaacttgaggatattgtgccctcttctcacaa

SEQ ID NO: 156280 - DNA, 262 bp, Glycine max
tagggagatgttgtcacaaacctatatttcatccggaagagtaagatttctagtgacttcaacatgatgatggatcagaaaatattcacatgtgagcatccccaatgcccttatagcgaagttcgccttggtttccatgataggtctgctatggacaatcatcagttgaattgtgcgtacagaaacagttctgcagattatggtggtggtcccagtttccatgctactgaggactggccagtcatattcccccagtcgcggg

SEQ ID NO: 156281 - DNA, 275 bp, Glycine max
gggaataatgctcttagcctctctgaattggatcagcagagaaacattgaagaatcaagtgtgtacaggacttcacatttgatagtcaaatgccgtagttctctagagctttttcttgccatatggttcgtgatgggcaatgtatgggcctttgactcacgttttggatccttcccacaagcctcaaaatttcaagtgctctgcatcatcttgctttcttggaatgcaatatgctactctttccctttcctattgtttttgcttttgtgttgtgg

SEQ ID NO: 156282 - DNA, 272 bp, Glycine max
gggacacaagtgcttgtgaatgtgtggactattgggagagacccttcaatttgggacaaccctacagagttccaaccagagaggtttcttactaaggagattgatgttaaaggacattactatgagctattgacatttggtgctgggagaaggatgtgccctggctaccctcttggccttaaggtcattcaagcaagtttggccaatttgttgcatggatttaactggagactgcctgataatgttatgaatgaggatttgaatatggatga

SEQ ID NO: 156283 - DNA, 264 bp, Glycine max
  unsure (1)..(264): unsure at all n locations
ctccaagctttggggatcttaaccaactaatttcagccaccatgagtggtgtgacatgttgtcatcgtttccctgggcaactcaacttagattttcgcaaacttgctgtgaatctcattcccttctttcgtctgtacttngtcatggngggttttgccccactcacatctcgtggttcccaacagtatagagcttttactgtacccgaattgacccaacaaatgtgggatgctaagaatatgatgtgtgcagctgatcctcgcc

SEQ ID NO: 156284 - DNA, 280 bp, Glycine max
agtaagaggaagatctctggtgactttaacatgataatggatcagaagatttacacatgtgaacaacctcagtgcccttacagtgaaactcgccatggttttgctgacagaaattccagggacaatcatcaattgagttgtccttatagaggtgctgcttcagattatggggcttcaaattttcaggttaacgaggtaaagccggtcatattcccccagtcctttgttcagccaaaacctactactcagtctgttaacttggttccatctgttattgatc

SEQ ID NO: 156285 - DNA, 267 bp, Glycine max
tatcgaccgattcggctcgagaaccatacaggtgcttctatcagtggcagcgcaccggcttctaaggcacaggttagcggttggcctcctattagatcatttaggaaaaactcaatggctaccaccactaacaggaacaatgatgaagtcgatggaaaaccaggtgttggcgcaatctttgtcaaggtcagcatggatggtgctccgtatcttaggaaagcagatctaagggtttatacgacatatcggggactatcttctgccctt

SEQ ID NO: 156286 - DNA, 261 bp, Glycine max
atttcttgtaagttgttatgcttggagtgctgatgggattaagactgatgacattggtgctttgcatctgataccgagggagctttcacttaagattgttagcaagattgaagcttgggaaaggttcagtgtttatattgtggttccaatgtggccagagggttacccagaaaaaggaacggttcaagcaatattggattggcagaggagaacaatggatatgatgtacaaggatgttgttggagactaacagtcgagggt

SEQ ID NO: 156287 - DNA, 261 bp, Glycine max
tggctagatgtggcaccttatattgatgtaaacctcttcatcagagtcatcattcagccatctagtgatgctagaatcaagactcagagaaccatcgcaacttcttactatgctctcttccttggtgggtccagaacactcctccaagtcatgaagacaagttttcctgaattggggttgacaataaaggattgcttggaaactagttggatcaaatctgtgctctatattgcatgctttccaagtgacacccccccagaa

SEQ ID NO: 156288 - DNA, 255 bp, Glycine max
  unsure (1)..(255): unsure at all n locations
gttgaaatcgagtgtagtgatcattgattaatgttggagaaattagcaattctgggtcattggtggtgtgtcagcacatctctttgctgttatacatggtcttctgatggttttgtctggaattgacaccaacttcactgtgacatccaaggcagcagttgatgaagaatttggagaattatacacctttaagtggactactctcctgattcctccaacagngatcacttctatcaacattgttggggttgtagc

SEQ ID NO: 156289 - DNA, 128 bp, Glycine max
ctcaaagtggaatgaaagagcatacttcagcacaagaaaagtgaagctcgaccacgaatatctttccatggcagtcctggttcaggaagtgataaatgctgactatgcttttgtcatccacacaacat

SEQ ID NO: 156290 - DNA, 259 bp, Glycine max
  unsure (1)..(259): unsure at all n locations
tccatacgtcggatctgctataatacgcttgatccatatgggcctcctcgaccacttgtgggacgacaccgtcgccggcccaaggccggaaaacggtctcggcaagctccggaaacaccacaccttcactttccgacctagctccggcaagggtacgccctgcctcagtgcctcgttaatcacactcatataagtcatcaacgattttcgtttaactacaagtccacacaacatacccagtcgctataggtngatgtgc

SEQ ID NO: 156291 - DNA, 260 bp, Glycine max
aagcagtgtatgttaactggggctttgcaagaataaagggtatgggatggggttgggctggtgtaatctggctgtacagtgtggtaacctatatccctcttgatttactcaaatttgctatccgctatattcttagtgggaaggcttgggataatcttttggagaacaagactgccttcactacaaagaaagactatggtaaagaagagagggaagctcaatgggcggctgcacagaggacacttcacggtcttcagcct

SEQ ID NO: 156292 - DNA, 260 bp, Glycine max
ccaacttttgagagattggataaattaggactgattgaagaagatgatggtgctcgtgtgatatttgttgagggtgcaaatataccaattatttctgtgaaaagagatggtggcttcaactattcttcaactgatctagcagcactttggtatcgtctaaatgtggaaaacgttgagtggaatatatacgttacagatgttgggcagtggcaacaccttgatatggtttttaaggcctttaggcgtgcaggatggctgcc

SEQ ID NO: 156293 - DNA, 260 bp, Glycine max
  unsure (1)..(260): unsure at all n locations
gcaagctagctaggttgaaaatagtttggttttgtagtaagtgaggtgaggtgccaaaatggtgaagataactcttggtactttcgatgactcttttggtgttgcctctcttaaggcttatttggcagagttccattcaactctgattctcgtgntcgctggtgttggttcagccatcgcttacaacgagcttacaaaagatgcagccttggatccaacggggctggtggcagtagctgtggcccatgcatttgcactgt

SEQ ID NO: 156294 - DNA, 270 bp, Glycine max
acttggcatcgcttctcctctctcccaagaaagaatcatcaatggcgattgaacacgaagacgatctcaaagacgagaagaaccctcgacctctcgacgaggatgacatcgccctcctcaagacctacggtttgggaccttactccacaagcataaaaaaggcggagaaggaaatcaaagatatggccaagaaagtgaatgacttatgtggtataaaggagtctgatactggtttagctgcaccaagccagtgggatcttgtttctgata

SEQ ID NO: 156295 - DNA, 266 bp, Glycine max
gaaagaacaagttcaacaaatcatcaaagacattaaggagtttaaggaaagcactaaggttgacaaggtggttgtcctgtggacagccaacatagagaggtacagcaacctagttgtgggactaaacgacaccatggaaaacctctttgcttccttggacaggaacgaggctgagatttccccttccaccttgtatgccattgcttgtgttatggaaaatgttcctttcatcaatggaagccctcagaacacctttgtcccagggc

SEQ ID NO: 156296 - DNA, 263 bp, Glycine max
aagtactgtcaggcgtgatgctcctcctggacagaaggttggtctcattgctgttaggaggactggtcgtcttagaggacaagctgctgcaactgctgccaaggctgataaggcttaaagagaacgttgttagggttattatatttgattgcaagtttttcagttttgtttttcttttttctgatagtttgtttgttaaactatttgggcaccttcttcagaaccattttcttcccaacatatggagttttcaatagacggtc

SEQ ID NO: 156297 - DNA, 259 bp, Glycine max
attaaaataaacatttttaatcaaataatttttttattgttttagtgtgtttattaaaactgttttagtttttttttttaaataatttttgtttattttaagaagtaaattttatgtgtttcttgaaaaaaaaaacttatataaaagtatttattttaaaattactttaaattttaaatttaaataaactcaccctaaactatgtcaattttgcaggaaaattaaaaggggtcgttggatttcgttttcgtggatgctg

SEQ ID NO: 156298 - DNA, 253 bp, Glycine max
agatctcaagaggggtgggaataacaggttcttgaagactgctgcatatggacacttcggcagagaggaccctgacttcacatgggaagtggtcaagcccctcaagtggaatgaatgggagttttttagcgttgcccttataatgtctattatccataactttccacgtcccttgctctgtgtttttctctcgtcgtcctcctcctatattgtttctccagcctttcatttgtaattttttacatgatcaact

SEQ ID NO: 156299 - DNA, 259 bp, Glycine max
gttaattaaatccgaggaaaaaagtttggtgactgagaaagggaaaatagaaagtgagagagaggaattgctcacacataaggctgtagttgagaaaataagagctaacaatgaagaagagtcgttgaggataaatgaagagattgatcgacttaaagtgactgaggaggagaggtctgaatatctgcgcttgcagtcacaattgaagcatgaagttgatcagtacagacaccagaaagaactacttctgaaggaagct

SEQ ID NO: 156300 - DNA, 259 bp, Glycine max
aagtgaccaagttttgccggattttaaatccagatcttgcaattcagcatattcttccttgtgtgaaggaattgtcatcagattcttcacagcatgtgcgctttggctaggcttcagtaataatgggaatggctccagtgttgggaaaggtagcaacaattgagcagcttcttcctattttcctttcccttttgaaggatgaatttcctgacgtacgcctaaacattatcagcaagcttgatcaagtgaatcaggttat

SEQ ID NO: 156301 - DNA, 257 bp, Glycine max
agaaaagaaaatcctcaattttctgagcagccaaacactctctctctgtctctcgaaaattctcagtttgcagagaaaatctgaatcatgtcgtggcaagcgtatgtcgacgatcaccttctgtgtgacatcgaaggtaaccacctcactcacgctgctatcatcggccaagacggcagcgtttgggctcagagtaccgacttccctcagttcaaatctgaggagataactgccatcatgaatgactttaatgagct

SEQ ID NO: 156302 - DNA, 254 bp, Glycine max
ccttgaggtggaaagctctgacaccatcgacaacgtcatggccaagatccaggacaaggaaggaatccccccggaccagcaacgtctcattttcgccggaaagcaacttgaggacggccgtacccttgctgactacaacattcagaaggagtctactcttcacctcgtcctccgtctccgtggtggcatgcagatcttcgttaagacactcaccggcaagaccataagcctagaggtcgatagctccgacacca

SEQ ID NO: 156303 - DNA, 257 bp, Glycine max
atgagcaccacagtgcaaagtactccaagatccagcaggcattctttatttttccaggatttggcttcacttgtttctgcccgtagaggataattttcgtgtccaggtcaagcagctgcagtatcttcactatggcgtgagaactttggtagttcagaccttcctccgcctcctgttttcaccttggaagacagatccgatttttctcctgaatcaggcatactagattatcaaatatcccctgaggctaagtcaga

SEQ ID NO: 156304 - DNA, 254 bp, Glycine max
ggttcgcgctgctcttcgttgtcggattgttaacgattctcaaattggctttcgatgttttcagatgggtctacgtcaatttcctccgaccaccggagattctcaaaaagtacggatcttgggcagtggttactggacccactgacggcattggaaagagcttcgctttcgagctcgctcgcaagggcctgaacctcgtccttgtcggaaagaaccccgacaagctcaaagacgtgtcggattcgatcgcggcg

SEQ ID NO: 156305 - DNA, 257 bp, Glycine max
cacttcgttaatcctcgcatatatgggacaagctgcatatctttccagacatcatacccttgaaagtgagtatagaattaggttctatgtatctgtacctgtaaaacttagatggcctgtacctgcaatagccatacttcaagctgtggttggaagtcaagctgtcatcacagggactttctccataatcaaacaatgtactgctatgggatgtatccccaaagtgaaactattcacactcatccaaaatgcatggc

SEQ ID NO: 156306 - DNA, 253 bp, Glycine max
aaactcttttgaatgttgtgggtaatgctgtcaaattcactaaggagggctatgtttctataagagtatcggttgcaaaaccagaatctttacaggattggcgacctccagagttttatccagcatctagtgatggccatttctacatacgagtccaggttaaggactctggatgtggcattcccccacaagaaattccgcatctctttaccaagtttgcccagtctcggagtggaccagctcgacctagcag

SEQ ID NO: 156307 - DNA, 253 bp, Glycine max
ctcactcacaaacgcacactgaattcaaaatcatcgaaagagagaggcatggccgagcaaaccttcatcatgatcaagccagatggcgttcaaagaggccttattggcgagattattagcagatttgagaggaagggtttttacttgaaagggttgaaactcgttactgtggaccgtccttttgctgagaagcactatgctgatttgtctgcaaagcctttctttagtggtttggtggattacattgtctctg

SEQ ID NO: 156308 - DNA, 254 bp, Glycine max
gtgcaaaagagcgtcgtagtcgcaaccctaatcagaagaagcgcagcttcaagcgagtgacagccaccagccatgggtcgtatgcacagccgcggtaagggtatattctcttctgctttgccctacaaaaggacacctcctagctggctcaagatctcttcgcaagatgtcgaagaaaatatctgcaagtttgcgaagaaaggtttgaccccgtctcagattggtgtcattctcagagattctcacggtattgc

SEQ ID NO: 156309 - DNA, 251 bp, Glycine max
cgttttgccccttttgttgccctaatttcaaccatgcctcgccgtagctccggtggaagatctgcccgtcctgctcctcgggcagctcctcgtcctgctctagttcaccatgctcctcctcctgcccctgctcagagtggtggtggatctatgcttggtggcattggttcaaccatagctcaaggtatggcttttggcaccggaagtgcagtggcacacagggctgtggatgcagtcatgggtcctcgtac

SEQ ID NO: 156310 - DNA, 253 bp, Glycine max
ctctcgaagcctctttctctctcttctagaagctatctgtgtttggtgttactaagtctccaacaagcaaagtacatggttgatttggaaatccaggtccccaccccattcgacatctttgccgaggcgagagaatcggatgcccccggagcaaaggagtatgtgcatattcgaattcagcagaggaatgggaagaagagtctgaccacagtgcaagggctgaagaaggagttcagctacgagaagatcctca

SEQ ID NO: 156311 - DNA, 254 bp, Glycine max
cgctcgagccgattcggctgagcatcagcccatcatggatggaattggcaaactatagtaattggagcttcctttctggcttttcttgtgtatgctaagtatattggatagaagaacccgaaattcttttgggtgccagcaattgccccattgatatctgttattctctctaccctttttgtattcttaatccgtgcagacaagcatggtgttgcaattgtaaaacatatagacaaagggctcaatccttcatc

SEQ ID NO: 156312 - DNA, 134 bp, Glycine max
tcaacttcacccattcatacgtggggttgttactgctgctcttttctctttgcttttctctttagtactctcttcccctttcttttactttatcttcttcttctgagcttgtttaagcttttcttccataaaca

SEQ ID NO: 156313 - DNA, 250 bp, Glycine max
cttacattgaactaaatgctcagggaagagccaggccaactatagctaaactttacaattggagatacagagatttgggagaccttccttctgtaaaggaggaagtcatattcaatagggcaaatgctgtgtttgcttatgattatcagttagtggatgttccagattaccttggtaacggggagacaacttcatctccttggttttaccaaaatgagggagaagcagaatatgttgtcagtgtctatat

SEQ ID NO: 156314 - DNA, 251 bp, Glycine max
gagcattccattgttgttatgttgtattgtagccggagaagaagagaagagatagcggcgaagaaagaaagatgacggaggcatatataaggaagaagcccgggatggcgagcgtgaaggacatgccgtttctccaggacggtccaccaccaggcgggttcgctccggtccggttcgcccggcgcatccccaacaagggccccagcgccgttgccatcttcctcactgctttcggcttaaactcttggggc

SEQ ID NO: 156315 - DNA, 233 bp, Glycine max
tttattgctctcatggcttttagtcttgcgtggctagttattgaagctggagttggtgttgctgtttttgtgcgtttctttgttaacaagagaggaatggagtctgaaatcattgatagactcggaaatggattctctcggcccccatttgcagccgttgtggttgtatgtactgtagtttctatcttggcttgtgtgcctttgggtgagcttttctttttccacacaacata

SEQ ID NO: 156316 - DNA, 249 bp, Glycine max
atcatctgttcctctgattccaaagcatgtatgtgatgatatctttatggattatgatgcattaaaggctgttgggacagggttggggactgcagctgtaattgtaatggataaatctacggatgttgtggatgctattgcaaggctttcctacttctacaagcacgaaagttgtgggcagtgcacaccatgcagggagggaactggttggctttggacaatcatggaaagaatgaaagttgggaatgc

SEQ ID NO: 156317 - DNA, 245 bp, Glycine max
ctttagtctgtacaaggataaatgcaaggccgaagatatacttctggagatggaccggattttgcgaccagaaggtgctgtcatattccgcgacgaagtagatgtgataattaaggtaaagaaaatagttggaggaatgagatgggacactaaaatggttgaccatgaggatggtcctacttgttcctgagaaggtgactgttgctgtcaagcagtattgggttactaattccacacaacatacg

SEQ ID NO: 156318 - DNA, 243 bp, Glycine max
gcggtaggctcatccgagaccggaagcagcaatggggatcgatctcaaggccggaggtaaaagcaaaaaaaccaaaagaacagcacccaagtccaatgatatctatcttaagctcttggtcaagctttatcgcttccttgttcggagaactggcagcaaattcaatgccgttatactcaagagattgttcatgagcaaggttaacaagcccccattgtctttgtcaaggttgattaagtatac

SEQ ID NO: 156319 - DNA, 244 bp, Glycine max
tattcttctaactcggactttcgatatcagcatcacgtatgattaatattatcaaataccacgagtatggcttactgggtatgacgagtcaaggatgctcttgcaaccagaacttgttcttgaagatgttagtcaagaccatgcacgcaaaacggtaactcttgaggaccatcctcacttgccagggaagcatgcatctattcatccatgtcgacatggagctgtgatgaagaaaatcattgat

SEQ ID NO: 156320 - DNA, 246 bp, Glycine max
ggcaatagtagcaacaacaataatataagtaaaagaatctctgtgttgtcatcacacttcgctagatccagccccatcatggcttcagagaagcaagcggctcttgccgtcactccctctgatgctgatgctcctaccatatttgacaagatcatcaataaggagattccttctactgtggtttatgaggatgacaaggtgcttgccttcagggacataactcctcaagctcctacacatattctt

SEQ ID NO: 156321 - DNA, 243 bp, Glycine max
tccttcccataatcatttcctacattcataaacgacgtcgtcatcgctcttccgccctaatctctatctagccccctctcttcctcgcctccgccctcatcggactcctcaccggcctcgacgactacctctacgcctgcggcgtggctcgccttccggtctccactttctctctaatccaagcctcccacctcgccttcaccgccgtcttcgccttcctcctcgtccgccacaggttcacgc

SEQ ID NO: 156322 - DNA, 242 bp, Glycine max
tctctatattccattgccacccagttttgaatatatttttattccttctttgtttcttcactttcttccatacacattaccatgtcttctcagactgttgtcctcaaagttggtatgtcatgtcaagggtgtgctggagcagtgaacagggttttgggaaaaatggaaggtgttgagtcatttgacattgatctgaaggagcagaaggtgacagtgaaaggaaatgtggagccagatgaagt

SEQ ID NO: 156323 - DNA, 243 bp, Glycine max
gggctttacagtgtttctcttccttcttcttcttcttcttcttcttcttcgttgaatcgcgattgttctgtgcgagagaaagaagagagagatcgaaaatggcgttggctttcgacgagttcggaaggccgttcataatcctgatggagcaggagcagaagagcagactccgaggattggacgctcagaaagccaacatctccgccggcaaagccgtggctcgcatcctccgaacctccctcg

SEQ ID NO: 156324 - DNA, 254 bp, Glycine max
gcgaaattgaaggtcttcatcgtgttctattcgatgtacggacacgtggaggggctgtcgaagaggttgaagaaaggcgtggacggagtggagggtgtggaaggtgttctgtatagggttccggagacattgccgattgaggtgctgaatcagatgagggcgccgcccaaggacgacgccataccagagattacggcggcggagttgacggccgccgatggggtactgtttgggtttccgacgaggtacgggtc

SEQ ID NO: 156325 - DNA, 251 bp, Glycine max
caaggagatagtattcaactatgtaaatcagctgtgcgagagcttgccaagtccaaatggagagtcagtagtagactgtaatagcatttatggattgccaaacatcacgtttactgttggagacaaacctttcccctcacccctgagcagtatattctgaaaactggagaaggcattgcagaagtttgccttagtgggtttattgcttttgacattcctcctcctcgaggtcctctctggattcttggcga

SEQ ID NO: 156326 - DNA, 231 bp, Glycine max
caagaagcccaccattacttccagggagatccaaacggcggtgcgtttggtcctccctggggagttggccaagcatgccgtttctgaaggcaccaaggccgtcaccaaattcaccagctcttgattggtttcggtgtttatgtcagggttttctgttagcccgatttaattagggtttcttttccttgtaatttctgtgagtatgtagatgtaaaattaaaccttttattt

SEQ ID NO: 156327 - DNA, 235 bp, Glycine max
ctttgaaggaaataagagtcaagaaaggtcttacagatgatcttggtgcagaggctctgatgatagatgcattggacaaaattgaaaaggatttaaaaaaacctttactgagaaatgataagaaaggaatggacttctcttggcagagtttgataagattaataagaaaattggaattcgaaaggaagatctaccaaagtatgaagaggagctagaacttaaagtagccaagcac

SEQ ID NO: 156328 - DNA, 251 bp, Glycine max
attggtgttgccggtcagatcattccttagaacttccctcttctcatgtttgcctggaaggttggaccggcattggcctgtggcaacaccattgttctcaaaacagctgagcagacaccgttatctgctttatatgcagcaaaactatttcatgaggctggacttcctgctggtgttttaaatgtagtatctggctttggtccaactgctggtgctgctcttgctagccacatggaagttgacaagcttgc

SEQ ID NO: 156329 - DNA, 260 bp, Glycine max
ttcggctcgaggaaaagatgaattggaggttttaagaggagatggagcagggaatagagaggactttgacagaatctatgattatgatgtctataatgatttgggcaatccagatggtggtgatcctcgtccaatccttggtgggtctagcatctatccctaccctcgcagggttagaacaggaagagaaaggaccaggacagatcccaacagtgagaaaccgggcgaggtttatgttccaagagatgaaaattttggtc

SEQ ID NO: 156330 - DNA, 189 bp, Glycine max
ctggagctcaaccttctgctatgaaagaaacaccaagcaaattgtcagaacgtccttgctcaactaataatggaaccggtcataaccatacaggtgcttctatcagtggcagcgcaccggcttctaaggcacaggtgttggttggcctcctattagatcatttaggaaaaactcaatggctaccaccac

SEQ ID NO: 156331 - DNA, 192 bp, Glycine max
ccattttccacttgaacccttcaggccgttttgtcattggtggccctcatggcgatgctggtctcaccggccgcaagatcattatcgatacttatggagtatggggtgtccttgttgttgttgctttcttcggggaggacctaccaaggttgataggagtggtgcttacattgtgagacaggtgctaagagc

SEQ ID NO: 156332 - DNA, 185 bp, Glycine max
gattcggctcgagtcactctcaactttactcctcttcaatcagttgcatattctttgctatcccaatggccactgttgaggttgtgtcagccaaggttgccctcccagaggacacaatagaggcatcattgaaggttgacgaggagagaacacagaagaagttgttgagactccatcaccaggaa

SEQ ID NO: 156333 - DNA, 128 bp, Glycine max
gagcaaaagtggtgattattctaaccagtggagactttgcaccgtgacacaagtagaggaattgaaaatcttgattcgaatgtttccagtttgggctactgggattgtttttgctgctgtttatgctc

SEQ ID NO: 156334 - DNA, 171 bp, Glycine max
agcactttggttggagtgagccctgaatttgaaattgctttgtataccctgtgtttctatgttggtagggaggataaccacattcagcttggtccatatggggttaatatcaagtgctatcgattgggtgacgaattggatctgttttctccattgcagattcttgaattt

SEQ ID NO: 156335 - DNA, 249 bp, Glycine max
gtcaatttttctcaggataagtcatggcgtgttcgttacatggttgctaatctgctatatgagctatgtgaagctgttggtcctgaccccaccaggtcagaattggtccctgcatatgttcgtctgctggtgataatgaggctgaagtacgtattgctgctgctgggaaagtaactaagttttcccgcattttaaatcctgaccttgccattcagcatattctaccatgtgtgaaggagttatcaacag

SEQ ID NO: 156336 - DNA, 180 bp, Glycine max
aataccaccaactgaagaaattgctgacagaatcaacaagatgctggcagtgctcgagaagaacatcttgtgggtgaaccctgactgtgggctcaagacccgtaagtacactgaggtgaagccagccctcacaaacatggttgccgcagcaaaactcatccgcaacgaacttgccaagtg

SEQ ID NO: 156337 - DNA, 240 bp, Glycine max
ctcttttgagcacaattgtgccctataccaccactcagctttccatctataactctttctagacatcttttgaagatgctgctgtggctatgaacatcaccagagtggcctcggtggcaccctttgagcttgtttcagttccaggggctcgcaagtggggcccagtatgccggttattgagttggtgctgcagagtgagatggtgaagtggaccatacattgaagaaactccatggtgag

SEQ ID NO: 156338 - DNA, 227 bp, Glycine max
tgggaattaacccttgtccatcttgcaaagctgcaaatgggagcagggtggtggctgctatcaacaatgttacatttattatgccaaccattgccttacttcaagcacattatttcaacatcaaaggggtgttcaccactgatttccctgccaatccaccccatgttttcaactactcagggcctggaccagccaatttgaacaccgaaaccggcacaaaggtttac

SEQ ID NO: 156339 - DNA, 238 bp, Glycine max
gacaattgcaaaagaaggtgagcttactattggcactattgatgatatacaaaaacttcatattcgctctattccgctgggggagcacgcaaaacgtatctgacaccaggagcaatctaggacttttgctatttgtagtttgaaatacaacccagctcagtggtgaagactcagaaatgcactttgtccgcttgctggatgaccagacttttgagttcatatcaacttattctcttga

SEQ ID NO: 156340 - DNA, 222 bp, Glycine max
gtattattggtgccaaacatgtgctcacttacggtactagataacaatcaaacatgaccagtgtgggcttgaacatgtaatttcgtgaactccgagctgtctctagctattctacaaaataacatctttgtagcttgggtgaaataatttaaaaaaaaaaaaaaaaaaaaaaaaaaaaaaaaaaaaaaaaaaaaaaaaaaaaaaaaaaaataaaaataaaaa

SEQ ID NO: 156341 - DNA, 259 bp, Glycine max
gcaaacggatggcataaggcccttcacaatgcctcttatgagacttgcttgcactgccttggaaagagttccactcacaaggagcattgttattgagaatttgatgaagaaatttaatcaagatttagtattttgccgtgcacctgatgacgatgagctgacaagctatgtacatgctcctcaggtggagaaaattgatccattgcttcgttgggtggagtcagaatttggctttaagccagttctttacaccagcttt

SEQ ID NO: 156342 - DNA, 262 bp, Glycine max
gcaggagagacagacagagaagagaatggacgctattgattctgtgttcgatccgctcagggaattcgccaaggacagcgtcaggctcgtcaagcgatgccacaagcccaatcgcaaagaattctccaaggttgctgtgcgtaccgcgatcggtatcgttgtgatgggattcgtgggttttttcgttaagctcatcttcattccaattaacaacatcatcgtcggatctggttaggatgaggggaatcgcaatcgcctcagg

SEQ ID NO: 156343 - DNA, 254 bp, Glycine max
caataatgaggcattgttgtttaatgtgtacccttacttagcttacattgaaaaccctagggacattagtcttgactatgcactctttaggtctccttcggtggtagtgcaagatggttcacttggttaccgtaacctttttgatgctatggttgatgctgtttatgctgcgttggagatatctggaggatggtcactgaacatagttgtgtctgagagtggatggccttcttctggtggaactgcaacttcac

SEQ ID NO: 156344 - DNA, 255 bp, Glycine max
gagctacactgagtcaaccaccaccgagaccttggtcatgggagtggcacctgttaaggctcaatttgagggtgctgaaatgggtgtgcccgctgagaacgatggctgcaaatgtggaccaaactgctcctgcaacccctgcacttgcaagtgaggtgttgggagagcaagcttcaagcagagatagcccttaattaggaataatgataaactattaatgtgtagctaaaaacttatgtattatgtctgtgatgg

SEQ ID NO: 156345 - DNA, 115 bp, Glycine max
gcaagagacatatcctttcagaacacagcagggcccgagaagcaccaagcagtggcactaagatcagactctgacctttccgtgttcttccgatgtgggattttcggttaccaag

SEQ ID NO: 156346 - DNA, 254 bp, Glycine max
ctcgaccgctcgagccgattcggctccagtcggcggtgacgaaaggaaagaagaagaaacagcgttcactcggagagttcgaacatgtcgggcgttaccaacaacaacgaggaagacaagaagccaaccgaacagggagcacacatcaaccttaaggttaaggggcaggatgggaatgaagtttttttcaggatcaagagaagcactcaattgaagaagcttatgaatgcttactgtgaccgacagtcggtgga

SEQ ID NO: 156347 - DNA, 253 bp, Glycine max
tcccttcacaccattctcacaaaacaactttcaaactctgagaaagaatggctgccaacacattgatgagtactgctatctcagccttcccatctctcctttcttcctcaaaatccagatttgccaccgcagttcctctttctagctttggtgtcaccaatgcctcttcttctcgcttttctatgagtgctgactggatgccaggccagcctagacctccttaccttgatggttcagcacctggtgactttgg

SEQ ID NO: 156348 - DNA, 151 bp, Glycine max
ataacgacgtgcaacttgtatttaggattcagccagctcttagttaagagcttcacctccgagttccctcacgtcgagaggtacttttggacattggtcaaccagcctaacttccgaaagatattaggtcaggttaagcaaactgagtctg

SEQ ID NO: 156349 - DNA, 149 bp, Glycine max
gacttgcaatgggcattgctggaactgaggtagcaaaagaaagcgctgatgtaataattctagatgataacttttcgactattgtgactgtagctaaatggggccgctcggtctacgtaaacattcagaaatttgtgcagtttcagcta

SEQ ID NO: 156350 - DNA, 248 bp, Glycine max
gggtcaacagtgtggactcagattactccaacccatgtatctgatgaagaggcaaaccttttcgccatgcaactagccagtgcctcagtactccctatggttctcaaatcagctcttgagcttgatctgttggaaatcatagccaaggctggccctggggtgtcacctttccccctccgacattgcgtctcggctcccaacacacaaccctgatgcacccgttatgttggaccgtatattgcgcctct

SEQ ID NO: 156351 - DNA, 249 bp, Glycine max
gcatactccactctctctacctcagagacttattaagatgaagcccaagacttgcgagctttgtcatcaactagcttctctctattgtccctccgattccgcatttctctgcttccactgcgacgccgccgcccacgccgccaacttcctcgtagctcgccacctccgccgcctcctctgctccaaatgcaaccgtttcgccgcaattcacatctccggtgctatatcccgccacctctcctccacctg

SEQ ID NO: 156352 - DNA, 250 bp, Glycine max
tttctattcctcactaggagctcctatccactggttcttcatctgcatgcacacagttgcatagttttggaaaccaagaattcctgaagaagggtagcatcaacaagcagttctgaaaatggagatcaccaatgtcagtgagtatgaggctattgcaaagcagaagttgccaaagatggcgtttgactactacgcatctggtgcagaggaccagtggactctgcaagagaacagaaatgccttttccaga

SEQ ID NO: 156353 - DNA, 248 bp, Glycine max
gggaatgttacaataaagttatgggatcttggagggcaacctaggttccgcagcatgtgggaacgttactgtcgtgccgtttctgctattgtttatgttgttgatgctgccgatccagataaccttagcatatcaagaagtgagcttcatgatttgctgagcaaaccatcattgggtggcatccctctgttggtattggggaacaagattgacaaagcgggggctctgtctaaacaagcattgactga

SEQ ID NO: 156354 - DNA, 244 bp, Glycine max
tcctcagagcggtggatagggatttttcactctgcagcgttccgttccattgtgatttgttgaagtttctgatggagcagcgaaagttgtggttttggggattccgtgggatatcgatactgagggattgagggaatatatgagcaagtttggtgagctggaagattgcattgtcatgaaggagcggtcaactggacggtctcgtggttttggatatgttacatttgcttcagtggatgatgct

SEQ ID NO: 156355 - DNA, 247 bp, Glycine max
gtttgttgttgtaactcgttcttcttcttttgttgttctgtgtttgtgtttgtactttctctcacctgaaaatgtcttgctgcggtggtaactgtggttgcggaagctcctgcaagtgcggcaacggctgcggaggctgcaagatgtacccagacttgagctacactgagtcaaccaccaccgagaccttggtcatgggagtggcacctgttaaggctcaatttgagggtgctgaaatgggtgtgcc

SEQ ID NO: 156356 - DNA, 243 bp, Glycine max
cctaaacctatctttcttctctctctgtgtgtgcgcttcaacggcaaccagaagcagccatggccactgcaaggactgtgaaggatgtttcacctcatgagttcgttaaggcgtactcctctcacctcaagcgatccggcaagatggagctgccagagtggactgatattgtgaaaactgcaagatttaaggagttggctccttatgatcctgactggtactatgtcagagctgcttccatgg

SEQ ID NO: 156357 - DNA, 243 bp, Glycine max
tctctatattccattgccacccagttttgaatatatttttattccttctttgtttcttcactttcttccatacacataaccatgacttctcagactgttgtcctcaaagttggtatgtcatgtcaagggtgtgctggagcagtgaacagggttttgggaaaaatggaaggtgttgagtcatttgacattgatctgaaggagcagaaggtgacagtgaaaggaaatgtggagcagatgaagttc

SEQ ID NO: 156358 - DNA, 246 bp, Glycine max
aagaaacctgaggactgggacgaaagagccaaaatcccggacccaagtgctgtgaagccagatgactgggatgaggatgcacccatggaaattttagatgaagaagcagagaaacctgaaggatggttggatgacgagccagaggaaattgatgacccagaggcgacaaaacccgaagactgggatgatgaggaggatggaatggggaaagccccaaagattgaaaacccgaagtgtgaggcagcc

SEQ ID NO: 156359 - DNA, 265 bp, Glycine max
aaaagttattaagagcttttgcttttctttctgcgcgcttttcccaattaagtagttcttccttttctcaaagcaaaaaaaatgttcatcgagagtttcaaggttgagagtcctaacgtgaagtacacagagactgagattcagtcctgtacaactatgaaaccactgaacttgttcacgagaacaataatggcacttatcagtgggttgtcaagcccaaaactgtcaaatatgaatttaaaaccaacacccatgtccctaaact

SEQ ID NO: 156360 - DNA, 224 bp, Glycine max
ggagaacatgtacatgtgggttttcaaggagaggccggagaacgcacttggtaagatgcagctgaggagttacatgaatgggcattctcgccaaggggagcgcccgtttccgttcagtgttgacaagggttttgctcggtcccacaggtgcagcgaaacattatagaggactatcaaaccctcagtgcgtgcatggtgttgaggttgtttccgcacccagtctg

SEQ ID NO: 156361 - DNA, 216 bp, Glycine max
tgctgaactcatgaccaagattgacaggcgatccggcaaagagcttgagaaggagcccaagtttttgaagaacggtgatgctggttttgttaagatgattccaaccaaacccatggttgttgaaactttctccgagtatcctccactggtaggtttgctgttagggacatgcgtcaaactgttgctgtgggagtcatcaagaacgttgagaagaag

SEQ ID NO: 156362 - DNA, 263 bp, Glycine max
ctgctgggctttcggccgacccagaaaccttcgccagaaaccgtgagctcgaagtgatccactccaggtgggccatgctcggggccttgggctgcgtcttccccgaactgttgtcccgcaacggggtcaagtttggagaagctgttggttcaaggccgggtcccagatcttcagcgagggtgggctggactacttgggcaacccaagccttgtccacgcccagagcatcctcgccatctgggccacccaagttatcctaatgg

SEQ ID NO: 156363 - DNA, 261 bp, Glycine max
gttgtccccagcttctaaggttttgaacaactggtttgagacagatgttctgaaggcaacccttgcaactgatgctgtgataggcagtacagtaagacaggccagtgtccacaccccaggaagtggctatgtgctgctacatcattgatgggcgaaactgatggggaacgaggaatttggtcgtatatatgttgaaggtggaatgggctcaatatccaaggctattggtaatgctgctattgaagctggagctcatgttgt

SEQ ID NO: 156364 - DNA, 129 bp, Glycine max
cggtggttgtcctgtgtactgccaacacagagaggtacagcaacgtagtgtgggactagacgacaccatggaaaacctctttgcttccttggacaggaatgaggctgagatttccccttccacacaaca

SEQ ID NO: 156365 - DNA, 262 bp, Glycine max
gatggtttatgggagcacctgagtaatgatcaagcagtggatattgttcacagcagtccatgcgcgggtagtgcgaagaaacttgtcaaggctgccctacaagaagcagcaagaaaacgtgaaatgcgatattcagacctttacagattgacaagaaggttcgtcgccattttcacgacgatataactgttattgttttattcttaaaccacaaccttatatccaggggtgcagttctaaatacaccacttacaattcgtag

SEQ ID NO: 156366 - DNA, 264 bp, Glycine max
ctagttctagatcgcgagcggccgcccttggtttggttgatagcaatgatagggatcgagtggttgagggcagggatgagttgcacaggatgttgaatgaggatgaacttagagatgctgttttgcttgtttttgccaacaagcagatcttcctaatgcaatgaatgctgcagacataactgacaagcttggacttcattcactccgtcaacgccactggtatatccatagcacttgtgcaacttctggagagggactctatga

SEQ ID NO: 156367 - DNA, 258 bp, Glycine max
ctcattaattgcaagaatggcacttcgttgcttggtgatgtcgctttctgttctcttcactcttggtcttgcgagagaaagccatgccagagacgaagatttttggcatgctgtttggccttacactcccattccaagttcatgcgagatcttctaaagcctagccctgcaagtgttgaaatcgatgatcacctcctgcaaattgaagaaacacagtacccgaaaaccttcttctatagagaagacctgtcatccggg

SEQ ID NO: 156368 - DNA, 152 bp, Glycine max
ttgacttgcctcatgtggttgccactgctcctaagttgatggaatcacccatgttggaggtgacatgttcgtgtccattccagatgctgatgctatttacatgaagtggattctgcatgactggagcgacgagcactgcgtcaagatcttga

SEQ ID NO: 156369 - DNA, 263 bp, Glycine max
gtgaatgcgtagaaaaggaaaataaagaaattagcgtgaaaaatgttgggtgtgttcagcagctccatagtgtcgccgccggaggagctcgttgccgccggcagccgtacaccgtcgccgaagatgacggcggcggcgctgcggagtggttcgaggagaagaacccctccgcagtgtcggtggaggtcggagagcatgtccagctcgcttatacccaccagaacgagtcgccgtttcagccaagatcctttgctgtgaaggat

SEQ ID NO: 156370 - DNA, 261 bp, Glycine max
gcaagagacatatcctttcagaacacagcagggcccgagaagcaccaagcagtggcactaagatcagactctgacctttccgtgttcttccgatgtgggattttcggttaccaagacagtctctacacccacacaatgcgccattcttcagagactgcacaatcagcggcacagttgattacatcttcggtgacgccactgcagtgttccaaaactgcttcctaagagtaaaaaaaggcttaccaaaccaaaagaacacaa

SEQ ID NO: 156371 - DNA, 262 bp, Glycine max
cgaagaagtcccattcattgcactgatagcagcgatggggatcgatcttaaggctgggggtaagagcaaaaagaccaaaagaacagcaccaaagtccaatgacatctacctcaaattacttgtcaagctttatcgattccttgtcgaaggacagacagcaatttcaatgctgtgatactcaagcgcttgttcatgagcaaggttaacaagcctccaatttctttgtcaaggttaattaagtatacgaaggggaaggaggata

SEQ ID NO: 156372 - DNA, 239 bp, Glycine max
gcaccacatgcaaaaaaggctcatccctggccggatcacttttatccgctgcacgttgctattggtgctgctggtgaagatgcaaaggccaaacttatccacagcagtattgaattgggcagtctctcttatgcctcttacagtttacatcagccgctagctgaatttcttaatacagaatagcttctgttcagttgcataccctggctcaaaacacagttatccaatatgtatgaaga

SEQ ID NO: 156373 - DNA, 259 bp, Glycine max
gggcctcaatggagtcccagatgttgtcgagtgctctttcgtgcaatccactgttactgaacttcccttctttgcttccaaggtgaggcttgggacggttggtgtggaggaagttctgggcttggggcacctctcagatttgagcaacaaggcctcgaaagccttaagcctgaactcaaatcatcaattgagaagggaatcaaatttgccaaccagtaattgaacatgttatcacatacatgtctggtaggttactgga

SEQ ID NO: 156374 - DNA, 255 bp, Glycine max
gaacggcaccgttttgaagaggaagcgacccgctaggttggacattcccgtttcctctctcacctttgcggttccgcccacgccctccgcggcggcgcgtgacttggtcgaggctgaggaagatgggtttggggtgtatgcaagagaggcaggagggagtacatggaggatcgttacaccgctgggaataatcttcgcggagaacacaaactggctttttttggcatatttgatgggcacggtggtgcaaaagct

SEQ ID NO: 156375 - DNA, 252 bp, Glycine max
taaaaatctaaatcccttttggtcttcatctttgcctctgacccaggtatggcttcgaaacgcatcctgaaggagctcaaggatttgcagaaggatcctcctacgtcatgcagcgcaggtcctgtggctgaagacatgttcactggcaagccacaatcatgggacctgctgatagcccatatgcaggtggtgttttcttagtttcaattcattttcctcctgactatcccttcaagccaccaaaggttgctt

SEQ ID NO: 156376 - DNA, 251 bp, Glycine max
gtgcttggatgtactttgctactggaaattcgtcgtaccttaagcttgctacggctcctggcctggccaagcatgctggtgccttctggggaggccctgattatggagtactcagctgggataacaagcttgctgggctcaggttcttctgagtcgtttgaggttattcttgagtcccgggtatccatatgaagaaattttaaagacctttcacaaccagacaagcataatcatgtgctcctatctaccag

SEQ ID NO: 156377 - DNA, 251 bp, Glycine max
aaaaacttgttcctttacagtagtttatctttgcagtgtcttaggtgtttgttttaccagttatattttgaagtgtccgccgatttcatgtagccgtagccttcaaaactgggttcttgatcggttgtaacatttcgttgctgtttgtttttgatgagtactgttttttgttttgatggtaaaagtctgagattttcaaattcacaagcagccatagggttttagtccatatcctttgctgctgaggaggg

SEQ ID NO: 156378 - DNA, 251 bp, Glycine max
gtgggtaatgaatgttgttccatctcacaagccaataactcttgatgcaatctttgacagaggtcttattggagtttatcatgattggtgtgaacctttctcaacatatcctcgcacctatgacctgatacatgggcaagcatggaatcacttgtaaaggatccagcctctggcagaaacagatgtacccttcttgatttgatggtggaactcgatcgaattttacgcccagaaggcactgttgtggtgag

SEQ ID NO: 156379 - DNA, 253 bp, Glycine max
ggcgccgggaccgggaggcccgaagcaccacttcaacggcgagcgccaggttaaggacttcatccacacactcttacatttccggaggttacaacgaaatggctgatattctcgtaaacctaacgtctctggccacgaaatgggaaggctagtttcagaaggttacgttctcaccgttttggctccaaacgacgaagccatggcgaagttaacgacggatcagttgagcgaacctggcgcaccggaacagata

SEQ ID NO: 156380 - DNA, 245 bp, Glycine max
attggctcttgttggtgtgtttgatccgtacaatcgaggggcactgtttactgcactggttgtcatatatgcacttacttcggggattgctggatacaccgcaacttcattctattgtcagttggaaggaacaactgggttaggaatctgctgttgactggatgccttttctgtggacctctgtttctgactttctgctttctaaacactgttgcaattgcttacaaagctactgctgccctccc

SEQ ID NO: 156381 - DNA, 274 bp, Glycine max
ggccaattctcggcaaaacatcaggaagttggttaaggatgggtttatcatcaggaagccaaccaagattcactcccgctcacgtgctcgtaggatgaaggaggcaaagaggaagggccgccactccggttatggtaaacgtaagggtacaagggaggcaaggcttcccaccaagatactctggatgagaaggatgcgtgtgctcagacggttgcttcgtaagtacagggaatcaaagaaaattgacaagcacatgtaccatgatatgtacatg

SEQ ID NO: 156382 - DNA, 208 bp, Glycine max
gtgaattggactcagttacactaccagtgaagtctggtagccgtattgggtctgggaattactgtgtggttgttggtcttggaacacgcaagagggacttgtcactcatcgtttgacactggcagtggatctcacttggactcagtgtgatccatgtactcgttcttggtacaagcaacacgatgctatctgtgatccatcaaggtct

SEQ ID NO: 156383 - DNA, 269 bp, Glycine max
gtgcgtgacacatgcaggaacattggttttgtctctgatgatgttggtcttgatgctgacaactgcaaggtcctcgtcaacattgagcaacagagtcctgatattgctcaaggtgtgcacggccacctcacaaagaggccttaggagattggtgctggtgaccaaggtcatatgttcggctatgccactgacgagactcccgagctcatgcccttgagccatgtccttgccacgaagctcggtgccaagctcaccgaggttcggaagaa

SEQ ID NO: 156384 - DNA, 267 bp, Glycine max
ggcgtcttcataaacgcctttcttctccgtttccgtttcctcgttcgaattcgctttttgatctgcgaaaatgagagagtgcatctcgatccacattggtcaggctggtatccaggtcggaaatgcttgctgggagctctactgcctcgagcacggcatcgggcccgatgggcaaatgccaagtgacaagacagttggcggtggtgatgatgctttcaatactttcttcagcgagactggtgctggaaagcacgtgccacgtgcagt

SEQ ID NO: 156385 - DNA, 263 bp, Glycine max
gtcaggactcggtatcgctcgccaacgtcaagccattgtggatggactgagggacagtgtgcttgctttctctgagaacgtgcctgggacaacagctaaagatgtcatggacatggtgctggtgactcaatactttgacaccatgaaagagattggagcatcttcaaagtcctcatctgttttcataccacatggtcctggcgcagttaaggacattgccatgcagattcgggatggtctgcttcaggccaccacttcacaga

SEQ ID NO: 156386 - DNA, 260 bp, Glycine max
tcaagattcaggcatatctttgcaaacggttttggaacttggaccaactgtgccattgtttggtgtgtgcatgggtttgcaatgcattggagaggcttttggagggaagattgttcgttctcctcatggtgttatgcatggaaaaagctctatggtttactatgatgagaaaggagaagatggattacttgctggactatcaaatcctttcttggctggtagatatcacagccttgtaattgaaaaagagagctttcctc

SEQ ID NO: 156387 - DNA, 263 bp, Glycine max
tgcaggaaaaatggtttcgctgaaactgcagaagcggctcgccgcgagcgtgctcaagtgtggcagaggaaaggtttggcttgaccccaatgaagtcaacgaaatctccatggccaattctcgccaaaacataaggaagctggttaaggatgggtttatcatcaggaagcccaccaagattcactctcgctcacgtgctcgtcgaatgaaggaagccaagaggaaaggacgtcactctggatacggtaagcgtaagggtacaa

SEQ ID NO: 156388 - DNA, 241 bp, Glycine max
cttttcagtggcaaagagttaaagaaagccacaaacgacttctccagtgaccggcatctaggtgttggaggctatggtgaagtctacaagggcattcttcaagatggcactgttgtggctgtcaagtgtgccaagcttggcaaccccaaaggcactgaccaagtcctcaatgaggttcgcatattatgccaagttaaccaccgcaaccttgttggttgacttggttgctgcgtggaattgg

SEQ ID NO: 156389 - DNA, 271 bp, Glycine max
caactatgctgacaaatgagcatggtctgagtttgaacctcaaggagactgagctttgcctcggtttgcctggcgggggctctgaagtggaaactccaagggccactgggaagagagggttctctgagaccgttgatctgaagcttaatcttcagaccaaggaagatctgaatgagaatctgaagaatgtctcaaaggagaagactctccttaaagatcctgctaagccgccggctaaggctcaagtggttggttggccaccagtgagatc

SEQ ID NO: 156390 - DNA, 266 bp, Glycine max
taagtttctcagattcctgaatgacaaggactaccacgggggatttgagcagggagagatcgagcaggtgttttcggcaatggaggcgaactacgaggcctgggtgaacggtttcgcgccgctgtcggtgggagcggatgttcccgcggcggtgcgggagttttcccggacgctgttcaacatgaggccggacatctcgctgttcgtgtcgcggacggtgttccacagcgacctgagggggattctgggtctggttaacgtcccct

SEQ ID NO: 156391 - DNA, 265 bp, Glycine max
cgtgtatactcattttagcatcaaggttgaatctcagagaaaaagaaacatcgacaagcatgtctggaagaggaaagggaggcaagggtctcggaaagggaggagccaaacgacaccgtaaggttctgagggataacattcagggaatcaccaagcccgcgattcgccgtctggccagacgtggtggcgtcaagcgtatcagtggtcttatctatgaagaaactcgcggtgttctcaagatctttctagagaacgtcattcgcga

SEQ ID NO: 156392 - DNA, 161 bp, Glycine max
agaattgagtgaatccatcagatatgcttctggggatcccattgaaagctggcgtaactctctactgtgcttagatgcttcaaagaccatccctaatattagcaggttacctccacctagcgagtgcgatatatactatgttaatcgggatacgctcttct

SEQ ID NO: 156393 - DNA, 263 bp, Glycine max
ttcttctcttgcggctagggttttagcgcacgtcttctagatttaaggaagatgggtaaggaaaaggttcacatcagtattgtggtcattggccatgtcgactctgggaaatccactaccactggtcacctgatttacaagcttggaggcattgacaagcgtgttattgagaggtttgagaaggaagctgctgagatgaacaagaggtctttcaagtatgcctgggtgctggacaaacttaaggctgagcgtgaaagaggaat

SEQ ID NO: 156394 - DNA, 264 bp, Glycine max
attttctgagcagccaaacactctctctctgtctctcgaaaattctcagtttgcagagaaaatctgaatcatgtcgtggcaagcgtatgtcgacgatcaccttctgtgtgacatcgaaggtaaccacctcactcacgctgctatcatcggccaagacggcagcgtttgggctcagagtaccgacttccctcagttcaaacctgaggagataactgccatcatgaatgactttaatgagcctggatcacttgctccaactggatt

SEQ ID NO: 156395 - DNA, 216 bp, Glycine max
ttcggctcgagctcgagcctcattggcctttgtgtccatcgagctttgctgtttaaagtgttggctgacttagtcaatctaccatgtgggattgcaaagggctgcgagtagtttaggaaggatgtgggtggctcatgtatagtgcaatttggttctgacagtgagtatatgagtgatttagttggaagacgtggggcaacatgccagcctgattct

SEQ ID NO: 156396 - DNA, 259 bp, Glycine max
actgcccagttcttaccacacaacatacaatataaaaaaaaagacgcttattgatctgcgaaaatgaaaaagtgcaacccgagccacacttgtcaggctggtatccaggtcggaaatgcttgctgggagctctactgcctcgagcacggcatcgggcccgatgggcaaatgccaagtgacaagacagttggcggtggtgatgatgctttcaatactttcttcagcgagactggtgctgtaaagcacgtgccacgtgcag

SEQ ID NO: 156397 - DNA, 257 bp, Glycine max
gctgagtatgaaaaacttatcaaagcttatgagaaaaagcaggcaagctctgcagatgatgatgaatcagacaagtccaaatctgaagtgaatgatgaagatgatgccagtggagaggaggaccaccaagaggacgaggatgatgaggaggaagaggacgatgaagatgatgactgagattgatgtccaaaaccttggttatgatattttgtttatgagggaggctattatatattctgactgtgcatactaggcta

SEQ ID NO: 156398 - DNA, 204 bp, Glycine max
gctcgagatcgatttcggattgtggaaggtctgatcgccagtgtgcatggcagccgagctagtcagcagactgttgatggtctattcagacaaggactgcagtggtggaagagctgcttccttcgatatgagtcccaggaggactggagccgggaaggctgtaggtcggcttcgtcgagcgctgattgggaaatggactggcat

SEQ ID NO: 156399 - DNA, 257 bp, Glycine max
gcagtctcattccttgcaactgtacctttgggagaattattctttttccatatgatcctgataccaaagggtatcacaacttacgagtatgttgttgccatgagaactctaagtgaaccacctgggccttcagtttatgggggtgaacagcagagtctaccatcgtctcctactagttcagctgtcactgcaatgagtggaagaagctccgttggaatgagtatacagtacaaaggtgcctggtgtacaccgccaag

SEQ ID NO: 156400 - DNA, 263 bp, Glycine max
agacgaaaccctaggttttagtgagtggcgaaaatggcggtgattttttcaagtgcaataccaggaggggcagcaccagcagcaatcgagcaagtgcagtgcttcgggcggaagaagacggcggtggcagtgacctactgcaagcgcggccgaggcctcattaagatcaacggctgcccgatcgagctggtggagccggagatcctccgcttcaaggccttcgagccaatcctcctcctcggtcgccaccgcttcgccggcgt

SEQ ID NO: 156401 - DNA, 263 bp, Glycine max
cccaagtgtaaaaatggcagcattgaatatgtccactgtgagacttccaagagcttccttgtctggaacgacaccagctaggagatcttgtgctctcatcaagaatccatcatctttgaggtctgtgaagaacgtgtctaaagtatttggattgaaatcatcttcctttagagtgtcagcgatggcggtatataaagtgaagctgattggaccagacggtgaagagaatgaatttgaagcccctgatgacacttacattctgg

SEQ ID NO: 156402 - DNA, 263 bp, Glycine max
tgttcctccgctcaacaactataataacatctttctttctccgaacagatcacactatggccacctcaagcgccaaatcagtccatgatttcaccgttaaagatgccaagggaaatgatattaatcttggtgactacaaaggaaaggtccttatcattgtcaatgttgcctcacaatgtggcttgactaattcaaattacactgagctcagtcagttgtatgagaaatacaaacagaaaggtctggaaattctggcatttcca

SEQ ID NO: 156403 - DNA, 269 bp, Glycine max
ggtattcggctcgagcaaaagctgatggagcatttgcaatttcagaagatacatggaatgaacctctagggcgtggaactgagattagattacacctacaaggaagaggctggggagtacttgcaggagtctaaactgaaagaattggtgaagagagactctgaatttattaacttccctatctatatttgggcaagcaaagaggttgatgtggaggttcccgctgatgaagatgattccagtgatgaagaggattcatctgaaagcag

SEQ ID NO: 156404 - DNA, 216 bp, Glycine max
caggagcagaaagtaccagtgtcgacgcatatgggaattcttttcatttcacaacaaagttcctgcacttagcatggcacccaactgagaattcaattgcttgtgctgctgcaaatagcttatacatgtactatgcttaaggcagatagatgattgcacagcatgtatttgctttcgttgacctgtttttaggttgctgtggagaaggcttcttta

SEQ ID NO: 156405 - DNA, 252 bp, Glycine max
gaagattcgtttgagagctgaggatgttcaagggaaaaatgttctgacaaacttttggggaatggatttcacaactgataagttgaggtccttggtgcggaaatggcaaactttaattgtggctcatgtggatgtcaagaccactgataattatacgttgaggatgttctgcattggctttaccaagaggcgtagtaatcaggtgaagaggacctgttatgcacaatcaagccaagtcagacagattcgcag

SEQ ID NO: 156406 - DNA, 251 bp, Glycine max
gctccggtctggaataatgatgttaggttcttctgtgttaaggattcttctggtagtccaattgcgtatttttattttgatccttatagtcgtcctgctgaaaaaaggcaaggtgcatggatggatgaagtctttgctcgtagtcgtgtgttatcgcgcgatggtacctcagcaagattgcctgttgctcacatggtgtgcaatcaaactcctccagtaggaaacaagccaagtctaatgacattccgtga

SEQ ID NO: 156407 - DNA, 242 bp, Glycine max
gaaaggttgagctatagcctaaagggagagacacataaatagtttctactttctattcatagatagatggctggcccaattatgagacctcagattgtgctatttggctcctccataattcaaatgagcttcgacaatggtggttggggtgctattctagctaacttgtacgctaggaaggcggacatcatcttaagaggatactctggttggaattcaaggcgggctttggaggttttgga

SEQ ID NO: 156408 - DNA, 250 bp, Glycine max
ctcaagtctctcgaagcctctttctctctcttctagaagctatctgtgtttggtgttactaagtctccaacaagcaaagtacagggttgatttggaaatccaggtccccaccccattcgacagaaataccgaggcgagagaatcggatgcccccggagcaaaggagtatgtgcatattcgaattcagcagaggaatgggaagaagagtctgaccacagtgcaagggctgaagaaggagttcagctacgag

SEQ ID NO: 156409 - DNA, 249 bp, Glycine max
atgaataacttggtcctatctcttgttcctaaattcgcaaaactgcaaactctaatcctccgtcaagacaagcctcaactagaggataatgctgttgagactattgcaaaatgctgtcatgaactgcagatcctggacctcagcaaaagtttcaagctaactgatcgttcactctatgagctcgcccttggttgtcgcgatcttacaaaactcaacatcagcgggtgttcagcatttagtgacaatgct

SEQ ID NO: 156410 - DNA, 249 bp, Glycine max
tgaggcagcactggaacttgtaaggaaggacaagcttagagaagtgaaggcaggccacgatggaacttgggctgcacatcctggtctcattccatcctgcatggaggttttcaacaacaacatgggcattgctcccaaccagatagacacagtgaaacgcgatgatgctgcaaacttaactgaacaagacctcttgcagataccaacaggaacccggaccatggaaggtctcagattgaatacaagggt

SEQ ID NO: 156411 - DNA, 93 bp, Glycine max
caaatatcaagacaaagagaacagttcagtttgttgactggtgccctactggattcaagtgtggtatcaactaccagcctccaacagtggtac

SEQ ID NO: 156412 - DNA, 88 bp, Glycine max
ggccaattctcggcaaaacatcaggaacttggttaaggatgggtttatcatcaggaagccaaccaagattcactcccgctcacgtgct

SEQ ID NO: 156413 - DNA, 89 bp, Glycine max
gacaggttcccttgcgttggcaataatagtcacaggcttcactttacaggatgggacttctcactacatgaaaggccttgttctcctgc

SEQ ID NO: 156414 - DNA, 89 bp, Glycine max
tgtgaatgctggatgcagggataaagatctggctcatattgaggagcatatgaaggcattcaaggccaaaggtggtgatgtgtcatggc

SEQ ID NO: 156415 - DNA, 90 bp, Glycine max
gcacctggtgactttggattcgaccctcttcgtcttggtgaagtaccagagaatcttgagaggttcaaagagtcagaactcattcactgc

SEQ ID NO: 156416 - DNA, 89 bp, Glycine max
cagtaattggttttgccatttcaaagctgggaaagaacattcaagtactttcaagttcctttgtcaataagcaagagcaatacactgtg

SEQ ID NO: 156417 - DNA, 256 bp, Glycine max
tcttcttccttattttcttccctagtcaaggagattcatctctgcaggttgttttagaaaagaaaaaatggtgaagatttgctgcattggtgctggatatgtggggggtccaacaatggcagtcattgctctgaagtgcccctccattgaagtgctgttgttgacatctccaaatcccggattgcagcatggaacttcctccagcttcctatcaatgacccaggccttgatggtggcgtgaagcaatgtcgtggca

SEQ ID NO: 156418 - DNA, 255 bp, Glycine max
gtcgtccttggaagctgccaacttcacatcccaagtcattatcatgaaccatcctggccagattggtaatggatacgcaccagtccttgactgccacacttctcacattgctgtgaagttttctgaaatcttgaccaagattgacaggcgatcggtaaggagcttgagaaggagcccaaatttttgaagaatggtgatgttggtatggttaagatggttccaaccaagcccatggtggttagaactttctctgag

SEQ ID NO: 156419 - DNA, 251 bp, Glycine max
tactcgagccgaatcggctcgagaatttgtgaagtcagtccaaactacagtttcaaagatgccacgtggaacgcttgaagttgatctgatcagcgccaaaggaatcgatgacaatgattttctctccagcattgatccttatgtgattctcacatcagggcacaggagaaaaagagcactgtgcaagaagatgctggatccaagccacaatggaatgagagctttcttttcactgtctctgacagtgcatc

SEQ ID NO: 156420 - DNA, 253 bp, Glycine max
gcaccatggcgacactggattccgacgtgaccatggttccggccggcgaaccctccaccagcgccggtccttcttcgtccaccaagaagccgaagcgattcgagatcaagaagtggaatgccgtttctctctgggcttgggatattgttgtgataattgcgctatctgccgcaaccatatcatggatctctgtattgagtgccaggccaaccaggctagcgccactagcgaggaatgcactgtagcttgggga

SEQ ID NO: 156421 - DNA, 257 bp, Glycine max
agcaaagtcaagcgagatcaatgtattggttcctggtgctgatcctgatggtgattgggtggagcattctttgccacaacaatacattcatttgttcaagaatgagcactttgaaacaactcctgctgctcattctggaggttaaattgattgcaatttggacttttggagtctctatttatatttaaatcgttttggaatactgtgggagtggcttcaatttgttgtttcgtcaattcatttacaaacacagtcat

SEQ ID NO: 156422 - DNA, 221 bp, Glycine max
caagtatgtgagctctgaggttgaggtccaggatcgtggtgtttttgactttctcggtaagaaaaaggatgaagaagacaagcctcatcctcaggaggaggtcatcgccaccgagtttcaaaaagtcactgtctcagaccaaggagagaacaagccagcctcttagaaaagcttcaccgatctgacagcagctcctagctctccaagtgaggaggagggag

SEQ ID NO: 156423 - DNA, 262 bp, Glycine max
ggctcgagaatgagacttcctattgttcttagagatttgaagtctccaaatcttttggttgatgattcatacactgttaaggtatgtgattttggcctttcacgtacaatggcaaacacatttctttcatctaaaaccgctaccggaactcctgaatggaggcacctgaagtcattcgaggagaactgtcaagcgacaaatgtgatgtattcagctttggtgtaatcttgtgggaactagtgaccctgcaacagccatggag

SEQ ID NO: 156424 - DNA, 257 bp, Glycine max
gcagacttaacaacagcacaaagcgggttactgtctgttcaagctaccatctctctctctctttcttagtgcctccttgccagaagttaaaatggcccaagaaactttcctattcacatctgaatcagtgaacgaggggcaccctgacaagcttgtgaccagatctccgatgctgtgctcgatgcatgcttggagcaggaccctgacagcaaggttgcctgtgaaacctgcaccaagaccaacatggtgatggtttt

SEQ ID NO: 156425 - DNA, 233 bp, Glycine max
caggacttgttgtgggggagactgcagttattgggaataatgtgtcaattttgcataatgtgacattgggagggactggtaaggcaagtggggagagacaccctaagattggtgatggggtgttgataggtgcagggacttgtattttggggacattaagattggtgatggagctaagattggtgcttgttctgttgtgttgaaggaagtgccaccaaggactactgctgttg

SEQ ID NO: 156426 - DNA, 123 bp, Glycine max
cttcgttgcttggtgatgtccctttctgttctcttcactcttggtcttgcgagagttagccatgccagagacgaagatttttggcatgctgtttggccaaactctcccattccaagttcatta

SEQ ID NO: 156427 - DNA, 96 bp, Glycine max
gtgttggtggatttccttgtgggggccggcatcaagccaacatctatagtgagttacaaccatctgggcaacaatgatggcatgaatctctcagcc

SEQ ID NO: 156428 - DNA, 189 bp, Glycine max
cgaaaaaaaaaagattcgatagaaactaagaaaataaacaaattgattcgccgagaaagaggagagatagggattcgaaccctcgatagttctttgttccgaactataccggttttcaagaccggggctatcaaccactcagccatctctccaaagctaatttatattttatctttattccacacaaca

SEQ ID NO: 156429 - DNA, 246 bp, Glycine max
gtagcaacaatgtcgaagcgtggtcgcggaggatcggcagggaacgcgctccgcatgtcactgggtctgccggtggcggcgacggtgaactgcgccgacaacaccggcgcgaagaatctctacatcatatcagtgaaggggatcaagggaggctgaaccggttgccgtcagcttgcgtgggtgacatggttatggccaccgtcaagaagggaaagcctgatctccgtaaaaaggtgctccccgccg

SEQ ID NO: 156430 - DNA, 257 bp, Glycine max
atcaactctttcaaaagggagatgaaaaggaaaggaaacaaaacgcacaaaggattattatagcaatggcagaacaaaaccaaaaccagacaactgaagctgcaaggcaccaagaggttggccacaagagccttctccagagtgatgctcttaccagtatattctggagaccagtgtctacccaagagaacctgaatccatgaaagaactgagagagttgacagcaaaacacccatggaacatcatgacaacctctg

SEQ ID NO: 156431 - DNA, 231 bp, Glycine max
agcaacgccgtcgtatccttgtcgacgtggcagaggggcttaactaccttcaccacggttgggaccaggttgttattcacagggacatcaaatcgagcaacattttgttggacgccgacatgagagggagattaggggactttggtttggcaagctttacacgcacggggaggttcccacaacaaacgtttgttgggaaccttgggcacttggcggcggatctggccacgg

SEQ ID NO: 156432 - DNA, 118 bp, Glycine max
ctcttccccatccttggctggcaaggccgtgaagctgggcccatcagcccccgaagtcgggagggtcagcatgaggaagaccgtcaccaagcaggcctcctccggaagcccatggtac

SEQ ID NO: 156433 - DNA, 249 bp, Glycine max
gcaagcattatcatccgtgacatctatggtactggacactgaacaatgtaggtaacataagcattatatacccagtaggactattgcactacatgaagcttactgtagcaggcacaatgttgtttgtcagcatgctggctgtggagttttcttaggattgaggagtccaagaaccacattcactgtgacagatgtgatcaggcgttccagcaggtagaattagaaaagcacatgaaagtttttcatgag

SEQ ID NO: 156434 - DNA, 251 bp, Glycine max
  unsure (1)..(251): unsure at all n locations
ttcctctcttccacacaagttactagaaatnatgctgnagaagtangagntggtcangtaaatgtcgagtccaatgacaaagtacataatgataataatcctgaagaagtgagagatggtacgagcaaatgttgattcgagggacaatcggccttgattgacaataacacggcacagagcctgactggtgaggatatagaagccatgcgaagacaaggtgcgggaggtaatgaaataaatgaagctctcat

SEQ ID NO: 156435 - DNA, 217 bp, Glycine max
cggaactatgatttacttctttgccataggcttcacattgttggtgaggtgcaattggctactaacctcgcccttctcgctctgcctggcgtcagaactgagtacctaaaacgggttctaagtcattcgcaggcatttgaattgagtgatatttcctgactaaattaggtgttgccagagagaacgttgatgacacagctaggtgactgctcagatt

SEQ ID NO: 156436 - DNA, 250 bp, Glycine max
gcatgaggaaatgctgaagaactctgaagatttctacaaagcgttaaaccttccctatcaagttgtttccattgtatctggtgctttgaatgatgctgcagcaaagaagtatgatctagaagcatggtttccagcctctcaagcttacaagagctagtgtccggtccaaactgtacagattatacggccagaagattagaaatccgatatggtcaaaaaaagagcaatgagcaaatgaagcaatatgttc

SEQ ID NO: 156437 - DNA, 233 bp, Glycine max
tgagttctttaagaagtactattctgatattgctggcccagagtatgcaagcaagtacaagaccttgatctaccttgctggttcagcatctgctgaggttattgctgatattgctctttgcccatttgaggctgtgaaggtccgtgtcaaactcagcctggttttgcaaggggtttgtctgatgggctcccaaaatttgtcagatctgaaggaaccttagggctgtacaaggg

SEQ ID NO: 156438 - DNA, 248 bp, Glycine max
ctgccttccgtggtcatgttgggcctgtttaccagatcagctggtctgcggacagtagacttcttttaagcggcagcaaagattcaacacttaaggtttgggatattcgaactcgtaagttgaagcaagatcttcctggtcatgctgtgaagttttttctgtcgattggagtccagatggagagaaggtagcctctggtggtaaggataaagtgttgaagttgtggatgggctaggctaatttttgga

SEQ ID NO: 156439 - DNA, 269 bp, Glycine max
cccttctttaatcctagcatatatgggacaagctgcatatctttccagacatcattcccttgaaagtgactatagaattgggttctatgtatctgtacctgtaaaacttagatggcctgttcttgcaatagccatacttcaagctgtggttggaagtcaagctgtcatcacagggactttctccataatcaaacaatgttctgctatgggatgtttccccaaagttaaaataattcacacatcatcgcaaatgcatggccagatttaca

SEQ ID NO: 156440 - DNA, 261 bp, Glycine max
agcagatgcggcatgagaagcattatagatatgtcagtacacatgatgttgcttattcgggcacgtagcttcttgcaggatctggaaagggcatgtagagatcatctgaggaggagatgctggggaattggttttggtttaggcttccgagtgattgctttggatccaaactttagaaagctatctgtggaacatattgtttcagcttataagaggaccaagcaccgagcaattcttttggattatgatggcactatggtg

SEQ ID NO: 156441 - DNA, 250 bp, Glycine max
catttccttgatatcttagttatctaattacctcaattaatcccttaattgcaagcatcatggctgaggagaaacaccaccaccacttccaccaccacaagggcgatgatgtgcctggcgaggttgattataagaaggaggagaagcaccacaagcatcttgagcaccttggggaacttggtgctgcggctgccggtgcttatgccttgcatgagaagcatgaggccaagaaagacccagagcctgctca

SEQ ID NO: 156442 - DNA, 261 bp, Glycine max
attctttcgcaccttcgaaaatcaattttctgtcttctctgcgtcttcttcctctatcaatacgtattccatggctacttccatgctaactgctcgcaaatccaccggtggaaaggctcctaggaagcaactcgccaccaaggctgcaaggaaatctgcaccgacaaccggtggagtcaagaagcctcatcgctatcgccctggaactgttgctcttcgtgagatccgaaaataccaaaagagcacagacttctgatccgc

SEQ ID NO: 156443 - DNA, 263 bp, Glycine max
gatctgcgctctccgttttcagatcgcgttttgtttcaattcgacactttcctcgctttaaagattatgcgaacaatatggttgtccttgctgcatccattgtgagcaaatctggcaaagtgctagtttctagacagtttgtggatatgactcgcataagaattgagggtcttctagcagcatttcccaagttggtagggactggaaaacagcacacgtatgttgaaactgagaatgtgcgctatgtttaccagccaatagaa

SEQ ID NO: 156444 - DNA, 235 bp, Glycine max
gaaagcgtggtctcaaagtttcagttgtaggtatccccaaaaccatagatagagatattccagttattgataagtcttttggctttgacactgctgttgaggaggctcaacgagctataaatgcagcacatgttgaagctgaaagtgtagaaaatggcataggtgttgtcaagttgatgggtagaaacagcggatttattgcaatgtatgctactcttgcgagtcgagacgtgga

SEQ ID NO: 156445 - DNA, 264 bp, Glycine max
tgattttattgaaggagaaagagttggcaatggtcagataccaaaagctacttttggcagctgctactgctagagctgaaaaagctgctgctgtagaaatgggtgatgtggaagaagctaatctcctacttgctgaagccgaggcagcagactgcgatgctgagaaacttaaatcaacttacaaatttgaggcagaagacttcactgatctacaaagacatttaatttcaatggatcttgtttcgcatcttgatcagaagcaac

SEQ ID NO: 156446 - DNA, 265 bp, Glycine max
agagcccggtatatcgcccagggtgtgcacggccacttcaccaagcgcccagaggaggttggtgctggtgaccagggtcacatgtttgggtatgccaccgatgaaacccccgagtacatgcccctcagccatgtccttgcaaccaaacttggtgctcgcctcacagaggttaggaagaatggcacctgtgcttggttgaggccagatggtaagacacaagtaaccgtcgagtactacaatgacaatggtgccatggttccagttc

SEQ ID NO: 156447 - DNA, 191 bp, Glycine max
cacagatcatagtgatcattttttaatttctcagatttatccgacgtcgctgcagatccaccaaccgttatggctgccttcagcggtgatgaaacggcaccgtttttcggcttccttggcgccgcagctgccctcgtcttctcctgtatgggagctgcctaatggcgcagcgatagatggcgtgggcgtca

SEQ ID NO: 156448 - DNA, 268 bp, Glycine max
aagcataatcaaatcaaccatggctaccctcattgctcccatcaccttttcgcctggtttagatgcagaagctcttagaaaagctttccaaggatgggggactgatgagaagaccgttatagcaatattgggtcacagaaatgttcatcagaggcaacaaatcagatagatttatgaggaaatttaccaagaggacctcatcaaacgcctagagtctgagctctctggtgactttgttaaagctgtgtaccgttggatgctggaacct

SEQ ID NO: 156449 - DNA, 265 bp, Glycine max
gctagctatgttgaaaatagtttggttttgtagtaagtgaggtgaggtgccaaaatggtgaagataactcttggtactttcgatgactcttttggtgttgcctctcttaaggcttatttggcagagttccatgcaactctgtttttagtgttcgctggtgttggttcagccatcgcttacaacgagcttacaaaagatgcagccttggatccaacggggctggtggcagtagctgtggcccatgcatttgcactgtttgtaggtg

SEQ ID NO: 156450 - DNA, 250 bp, Glycine max
ccttggtcatgggagtggcacctgttaaggctcaatttgagggtgctgaaatgggtgtgcccgctgagaacgatggctgcaaatgtggaccaaactgctcctgcaacccctgcacttgcaagtgaggtgttgggagagcaagcttcaagcagagatagcccttaattaggaataatgataaactattaatgtgtagctaaaaccttatgtattatgtctgtgatggtttcgcgcgccactcgggtgtttt

SEQ ID NO: 156451 - DNA, 226 bp, Glycine max
aagttaacaacacttttgtcttcgttccattatctagttctcaattctcttcaccctttgcctctgaaagaaatgggtagtcttgaagcggaaagaacaacagtaggattggcagcaagagacccttcagggattctctccccatacacctacaatctaagaaacacaggccctgatgatgtttacattacagtccactactgcaaaatttcccattagaaccaca

SEQ ID NO: 156452 - DNA, 265 bp, Glycine max
agctccatagctgcagcattagggtttttcatctgcttcaatggggaagggaacagggagttttggtaagagaaggaacaagactcacactctctgtgtgaggtgtggccgccgcagcttccatctccagcagagtcgttgcgccgcttgtgctttccccgccgcacgcactaggaaatataactggagcgtcaaggcaatccgcagaaagaccaccggaactggcaggatgaggtactatgcgtaacgtgcctcgccgattcaa

SEQ ID NO: 156453 - DNA, 254 bp, Glycine max
  unsure (1)..(254): unsure at all n locations
gcatcaaaactgaccctgattgcgttggttgttgcggccctgtgcgccgttgatctaacccagagagcatcatcatcattatcatcacctcacgcgctaggcncctccgtggactgctccaacctggttctcaccatggccgattgcttgttcttcgtcaccaacggcagcaccatcacaaagccagagggcacatgctgctctggtttgaagtctgttctcaaaaccgttccggcgtgtctctgcgaggcttt

SEQ ID NO: 156454 - DNA, 242 bp, Glycine max
gaaatcattacttatactagttttctacgattattcatagtgaggcaatagtagcagcaattcacactggtctttgcttctcgttactcatttctcacctaactttctattcttctcagtctcagatcagaaccttagccatggcagcgttccagaagatcaaggtcgccaaccccatcgtcgagatggacggagatgaaatgactagggttatctggaagtcaatcaaggacaagctcatt

SEQ ID NO: 156455 - DNA, 126 bp, Glycine max
cacccagttcatcttcatgggttcaatttctttgttgttggaagaggagtaggaaatttcaaccccaaaattgaacctaagaactttaaccttgttgatcctgttgaaaggacaactattggagta

SEQ ID NO: 156456 - DNA, 263 bp, Glycine max
gtctctctctccattcgtgctttcagctccggcaacctctcttccggcgccgcgctatctcggccgcgcaccaatcttcaatttgattacttgggtcaacgatttctgtcattctcaatcatggcaactagacttcagtttgaaaataattgtgaagttggagtcttctctaaacttaccaatgcctactgtttggttgccattggtggttctgaaagcttctacagtgtatttgaagccgagttagcaggtgttatccctgt

SEQ ID NO: 156457 - DNA, 262 bp, Glycine max
gtgcattattcaatggccactacagcagctctatccggaaccatggtgagcacctccttcatgtggaagcaacctatgacgaccaagagcctaaagacattccccaacgctctttttggtctgaaaggtggacgaggtggtcgtgtaacttgcatggcctcgtacaaggtgaagctcataaccccagcaggagaagtggagtttgaatgcccagatgatgttttcattgttgacaaggctgaggacgaaggcattaaacttc

SEQ ID NO: 156458 - DNA, 190 bp, Glycine max
ctcgagccgaatcggctcgaggttcggtggagggagggagccgtagcagcggaagctctaggctgggtagcgaatcacaatggcgagaggattaaacgagcatctgaagaggcttaatgccccaaagcgttggatgcttgacaaactgggtggtgcatttgctcctaagccctcatctggaccacacaac

SEQ ID NO: 156459 - DNA, 261 bp, Glycine max
ctcgagccgctcgagccgttcagaacctttacgaccacgttgctgatcctgttgccaacaatgcttgggcttatgccactaactttgtccctggacaatgaggatgcctacatgcaatgcaatcttctgctcccttttgcagttcccttgtgtttaactccattttcactaatgtaactacacctgtgtagcagaaaaatctgtatgagaaccattatattttaatatataagatatgtgggtccccaaaaaaaaaagaaa

SEQ ID NO: 156460 - DNA, 260 bp, Glycine max
gctctatttatctccatcattttaactagcgtgctggagctccgatggagtggtgttaccatcgaagccctttggcgtaacgagcaattttgggtcattggaggtgtttctgctcaccttttcgccgtgttccaaggctctctcaaagttcttggtggagtagacaccaacttcactgtgacagcaaaagcagcagaggacactgaattcggagagctctatctcttcaagtggaccactcttctcatccctccaactac

SEQ ID NO: 156461 - DNA, 255 bp, Glycine max
ctgcactatcgttaagaaagtttgtgcatcaggaatgaaagctgcaatgcttgctgcacagagtattcaattaggcacaaatgatgttgttgtggctggtggtatggaaagcatgtctaatgtacccaagtacctggctgaagcaaggaaaggatcacgccttggacatgattcacttgttgatgggatgttgaaagatggtttgtgggatgtctataaggatgttggcatgggagtgtgtgctgagctatgtgc

SEQ ID NO: 156462 - DNA, 230 bp, Glycine max
ggagctcatggaggtggatacggtggcggcgcgggtgccgtcggaggaggagggtatggggctggtggagcacatggtggtggttctggaggaggtggtagaagtggtggtggccatggtggctatgttccctaagaactactcttcaatgcacaatagctgtggaagtgtcccctttcgcgtatcaagaatgatgagtatgctattaataacaggatcataataattaa

SEQ ID NO: 156463 - DNA, 236 bp, Glycine max
cctgaagaaataagcatgcttgctaaggtgaaagctcaggtttctgaagttaaagatgtcatgatggagaacattgaaaaggttctggaccggggggaaaagatagagcttctggttgacaaaactgaaaatcttcatcaccaggcacaagacttcaggaattctgggaccaaaattcgtagaaaaatgtggctgcaaaccatgaagataaacctgattgtgttggcgattttgat

SEQ ID NO: 156464 - DNA, 264 bp, Glycine max
gtcagcaatagatttctactgctcggttgataaaattaaaggagtagatgggaaggatcgtgtggtattgacatttgatgggaaatatttgccacattcagaacagaaatctgagcacatggtttcaagaacaaggccactgggaaaacagtgagtatcttcattggaggaccaactacgcaatcttcaacaccagtctacctgcacatgaattatcattgatctgtaacaaccacaagttgtatttgatcagtgctattttgt

SEQ ID NO: 156465 - DNA, 266 bp, Glycine max
tagaaagaaatcttgctaacagcagatcaggcaagtgtggaattgcaattgagccatcttatccccttaagaatggtccaaatccccctaatcctggaccatcacccccttcacctgtgaagccgccaaatgtctgtgacaactactacagctgtgctgatagtgctacttgttgctgtatttttgagttcggaaatgcttgcttcgagtggggttgctgtcctcttgagggtgcttcctgctgtgatgaccactacagttgctgc

SEQ ID NO: 156466 - DNA, 259 bp, Glycine max
gttgcttgcaggttatcatacagaagttaggatcatctgaaccaacaaagtatcatttcatgcagtatgctgaccaaataatgggtttatttttgagagtgtttgcttctcgaagtgcaacagctcatgaggaggctatgcttgccattggagctttggcctatgcaactggtgctgattttgcgaaatacatgacagaattttacaagtacttggagatgggtctccaaaattttgaggactaccaggtatgtgctat

SEQ ID NO: 156467 - DNA, 262 bp, Glycine max
aagaaaaccaagtcaagttctcactttgaagagaaaataacaacgtaaagatgtctgcatcaggaggcagaggaagccaagaggaagagaagaagccttctgatcaaggagcacatattaatctcaaagtcaagggccaggatggtaatgaggttttctttaggattaaaagaagcactcagctcaagaaacttatgaatgcatactgtgatcgtcaatctgtagattttaactcaattgctttcttgtttgatggaaggag

SEQ ID NO: 156468 - DNA, 261 bp, Glycine max
ttctctctctagcttggacgagtgaattagattcatcatcaagatgtcgtctctgatagcagaagatgtgaagagcagatcagaggtgtaccacggggacgaaatgtgccaagtgaagtccaaggagcttctcaaggaaatcgccctccccaacggccttcttcccctcaaggacatggaggagtgcggctacgacagacaaaccggcttcgtctggctcaaacaaaagaagagttacacccacaagttcgacaagatcgg

SEQ ID NO: 156469 - DNA, 260 bp, Glycine max
ccgctgcttgccgccccagagtagataatttgggtatgggaaactgctggattgaaggacgaagctgcagcacatcaaatagctgcgatgaagacaatgaagagtatacagcagagacattcccgtggagaaggcaaacaagggacctgtcccgaggcgactctttcagtcaaaagacaatgaccatggggaggaactcgatgaaatttggaatgattgataattcattttatgcctcagattaccagtatagtccacag

SEQ ID NO: 156470 - DNA, 257 bp, Glycine max
ctatctggataaatccactccccatgccctctacagatggattgggactttcgtgattgcatccatctacgttctgcgtgttgtttatttgcaggggttttacattgtctcctacggcctcggaatctaccttctcaatctcttgattggctttctctcccctttggttgatccagagctcgatccctccaacgcccctatgcttccaaccaaaggctccgatgagttcaaacccttcattcgccgcctccctgagt

SEQ ID NO: 156471 - DNA, 126 bp, Glycine max
cccaagtcatcattgaaggcttatttggcagactcagatggcagagtctgggccttgttggctggtctactttgtgggtttgggaatggtcttgaatttatgggtggtcaagcagcaggatatgca

SEQ ID NO: 156472 - DNA, 266 bp, Glycine max
cgtgttttccttgtttcccctattattatctcgctctcacaaaatcatggcattctctagtgctttgattctgtggtcgttgctagcaatcaacatggccctgccaaccctcgcaaccgtctacaccgtgggagatacttcaggttgggcaattggtactgattatagcacttggactggcgacaagatcttttcagtgggtgatagtctcgcgttcaactatggagctgggcacacagtggatgaagttaaagagagcgattaca

SEQ ID NO: 156473 - DNA, 261 bp, Glycine max
atttcagttccaaacaaaacttatcaaaatctcatatactgattcagttctatacataaccatcgagatttactatcaaaccaaaaattctcaaaatctcttcacctctgtgatgaccatggaatacagaaccttagaactcaacatcatatccgcaaaggacatcaagaacgttaacctcttctccaagatggacgtatacgccgtcgttacgctctccggcgaccctctccaccctcagggcgccaccacccacgtcca

SEQ ID NO: 156474 - DNA, 253 bp, Glycine max
acttttgcagatgtttctgaggtggaagcatttgtcaaatggctagatggggaactatcttcattggtggatgaaaggtcagtgctaaaacattttcctcaatggccagaacaaaaagtagatgcactcagagaagcagcttgtaactacagagatctgaggaaccttgaatctgaagtttcatcctatgaggacaatcccaaagagtcattggctcagactttgagaaagatacaagcactgcaagacaggt

SEQ ID NO: 156475 - DNA, 245 bp, Glycine max
acggatgaagtatgaggggagtgctgctgggtctggtaaggtgtatgtgtatgatggggtgtataggattgttgattgctggtttgatgtggggaggtcgggttttggggtttataagtttaagctttggaggattgatgggcaggctaagatgggtagtgctattttgaaggaagctaggaatgttaggaggagtgagctggatttgaatcccacatctgctgatatggctaacaggaaggaga

SEQ ID NO: 156476 - DNA, 246 bp, Glycine max
ctggtacgatgctgtctcttctcaacttgctccaagctttcctggccacgctcaaggggtaagattcagtggcgctgctgctccagctgaagctgcacctgccaaagcggctgccactgctgaagaagatgatgatgatcttgatctctttggtgatgagacagaggaagataagaaggcagcagaggaaagggaggctgctaaaaagcctgccaagaaaaaagagagtggcaagtcttctgtcct

SEQ ID NO: 156477 - DNA, 241 bp, Glycine max
agtcgtccctcccattgttctcgccatttccaaatcacccgatctccacaagtacgacctgtcttccatcagagtcttgaagtccgggggagcccctctgggtaaggaactcgaagacactctcagagctaaattccccaacgccaaacttggccagggatacggaatgactgaggcagggcctgtgctaacaatgtctttagcttttgctagagaaccgatagacgtgagaccaggtgca

SEQ ID NO: 156478 - DNA, 240 bp, Glycine max
cgtggtgataccccttatagtttgatgtttggaccagatatatgtggttcacagacaaagaagctccatcttatactatcataccaggggcagaattaccccattagaaaagatctgcaatgtgaaacggataagttgactcatttctatacatttattctaaggcctgatgcctcttatagtatccttgttgataatcgggaaagagattctggaagcatgtacacagattgggacatc

SEQ ID NO: 156479 - DNA, 242 bp, Glycine max
caagaataggggatatgatgatgagtatgtttttgatacaagccgtatttacgatacattcaaatggaattatgaacctagcttattgatagaaataagctcaaatgtctctagtgaggattatgatataccgtctcctctaattatcagttctaagaaatttggaaatgtggctagatacatgaatcatagttgctccccaaatgttttctggcagccagtcttgtatgcagaaaataatc

SEQ ID NO: 156480 - DNA, 242 bp, Glycine max
agcatcctttggaaagaaggcatgctgaagcttctcgcattagagagaaatatcctgatagaatacctgtgattgtggagaaagctgaaagaagtgacattcctgatattgataagaaaaaataccttgtccctgctgatttgactgttggccagtttgtatatgttgtccgcaaaaggattaagctcagtgcagagaaggctatttttgttttcatcaataacactctgcctccaactgct

SEQ ID NO: 156481 - DNA, 249 bp, Glycine max
caaattctgggaaatcagaagtctttcctcaacggttatcttgaagatgttttcatggctagattatcaaatctttctaaggatattgattggcgtgaatttacgtgccctcaatgcacgtctctccttggagcctacccatgtcgtgagggacagacacctgtagatgggggagtacgatttttcaaatgttatatttcaacttgtgtgccagttggaggatcaggggatatgttcagggtgatagag

SEQ ID NO: 156482 - DNA, 241 bp, Glycine max
ctcgagcgttttcctttcgggattggtttctatggcttctgaagtaatagagtagcgatgctttgtcggtgggcttgcttgggccaccgacagcgatgctctcgagaaagccttctctcattatggtgagatcgtcgaatcgaaggttatcatcgatcgtgaaactggaagatcgagagggtttggatttgtgaccttcgcctcggagcaggcgatcaaagacgcaatcgaaggaatgaac

SEQ ID NO: 156483 - DNA, 240 bp, Glycine max
cgtttgttgttgtaactcgttcttcttcttttgttgttctgtgtttgtgtttgttttttctctcacctgaaaatgtcttgctgcggtggtatctgtggttgcggaagctcctgcaagtgcggcaacggctgcggaggctgcaagatgtacccagacttgagctacactgagtcaaccaccaccgagaccttggtcatgggagtggcacctgctaaggctcaatttgagggtgctgaaatg

SEQ ID NO: 156484 - DNA, 242 bp, Glycine max
cctctaacctacctctttagcttctctctcaacaacttcaccttcttcctcctcgatcatgtctcacttcaagggcaagtaccatgatgagcttatcgccaatgctgcgtacattggcactcctggaaagggtattcttgctgctgatgagtcaacagggacaattggcaagcgtttggccagcatcagtgtagagaacattcaatccaacaggcgagcttagggagctgcttttcactgct

SEQ ID NO: 156485 - DNA, 266 bp, Glycine max
tccaaagtttgtatagtgtaggatttgttggtattcgtgataaaaacacctcatcctattcattttgccatgacgggcgaactccagataaaggttttgaaagtaatgagaaattattaattcatccatgttactggcttggtttgaatctaaatcgtaatgcacttgctccagaggaagcagaggagataaatgacgaatatgatattaatattatttcagataattcagccattagaaataaaacaataggtcaaataactact

SEQ ID NO: 156486 - DNA, 242 bp, Glycine max
cagaggtgttacattgagtgatgctctactaaggcatgacaaatggtttgagaagaagggaataaagaattccaactttgctgtggttacatggtccaactgggattgtcgggtgatgctttagtctgagtgccgattcaagaagatacggaagcctccttacttcaaccgctggatcaacttaaggattcctttccgtgaggtatttggtgctgtgaagtgcaatctaaaggtagctgttg

SEQ ID NO: 156487 - DNA, 240 bp, Glycine max
ggaaacatgttgctgctcacccgtggcatgatcttgagataggacctgaagctccaaagatcttcaactgtgtggttgaaattgggaaaggaagtaaggtgaaatatgaacttgacaaaagaactggtcttattatggttgatcgtatcctttactcatcggttgtgtatcctcacaactatgggtttatcccacgtactatttgtgaggacggtgatcccatggatgtcttggttatca

SEQ ID NO: 156488 - DNA, 240 bp, Glycine max
atttgtacgatccttactacgatctggatgtgaaggaggcgctgaatcggcttccgaaagaggtggtggacgctcgccacgcgcgtcttaaacgcgccatcgatctttccatgaagcacgagtacctccctgacaatctgcagtcaatgcaaacaccattcaggggctaccttcaggatatgctgactcttgtgaagagagagagagcagaacgtgaagcattgggaggttcccccctat

SEQ ID NO: 156489 - DNA, 239 bp, Glycine max
ctcctcagagcatttggtatggccctgagcgtcccaagtacttgggtccattctcggagcagattccatcatacctgaccggtgaattccctggtgactacggatgggacactgctggattatcggctgagccggaaaccttcgccaggaaccgggagctggaggtgattcacagcagatgggcaatgcttggtgcccttggctgcaccttcccagagatccttgagaagaatggtgtc

SEQ ID NO: 156490 - DNA, 238 bp, Glycine max
caattttctagggttttattcattttccgatggcttctgcagatgttgagtaccgttgctttgtcggtgggctcgcttgggccactgacgaccatgccctcgagagagccttctctcagtacggcgaaatcgttgaaacgcaggtctgtttgttgcaggcatcacatctgatctcacacgattcggactcggaattttctcgatcccgttctgatctgtgatctctgatctgtttgcg

SEQ ID NO: 156491 - DNA, 256 bp, Glycine max
ttcggcgcgagctaccaggccttcaccatgtaatccgcattggtgatggtgaacaacttcctgcggtagtcaaaagccaggtgtctcaagaagctggatatggaagaagtttgtttgagaggctggtatcattgggacacatgaagcatctgtgtaatgttcagtatagaatgcacccatccatcagcttattcccaaataaggagtgctatgataagcaactttctgagtcccctttggtcagagaagtgagcta

SEQ ID NO: 156492 - DNA, 251 bp, Glycine max
attcagcattcagcattcaatggtcaaactgctctgaagcagctcaatgagttcgtccgcaataccggtggcgccggcaaaggccgcactaacatgcgccgcaccggcaagagtgatcctcagagcatttggtatggccctgaccgtcccaagtacttgggtccagtctcggagcagattccatcatacctgaccggtgaagtccctggtgactacggatgtgacactgctggagtatcagctgaccctga

SEQ ID NO: 156493 - DNA, 245 bp, Glycine max
ggatgacttaagctatgcaataatgtacgagacaaccaagttggcttatcgggtttcagaagatgatgtcacacgtgcttgtaatcagttgaaatcttcactcctgctccacatagatggaacaagtccagtagctgaagatattgggcgtcactactcacctacggcagaagaatcccatttgcagaattgtttgctagaattgacgctgttgatgcaagcacaataaaacgtgttgctaaccg

SEQ ID NO: 156494 - DNA, 247 bp, Glycine max
agtcgtcgcgtgtactttcttgcgaaacagaagggcgaaggggcaaacacaacttttttgttttttcgtagagcgagagagaaaaaaatgttagggatcttcagcagttccgtggtgtcgccgccggaggagctggtggctgccggcagcagaacgccgtcgccgaagacgacagcggggatagctgctgaaccggttcgtggagaacaaggcgtcggcggtgtcgctgcaggtgggaggacacgtg

SEQ ID NO: 156495 - DNA, 252 bp, Glycine max
cgtgttgctgttcaatgtaaggttgcatcagatcttcccaagcttgttgaaggtcttaagcggttggctaagtcagatcctatggttgtttgtaccattgaggagtctggtgaacacattgttgctggtgcaggagagcttcatcttgagatctgtttgaaggacttgcaggaggattgcatgggtcgagctgagagtatcaaatctgaccctgttgtgtcattcagggagactgttttggagagatcatgc

SEQ ID NO: 156496 - DNA, 251 bp, Glycine max
gccgccacaagtagtagcaacaatgtgaacatgggagcagctaccgttaaggtgagcatggatggtgctccctatttacgcaaggtggatttgaagatgtacaagagccaccaagagctgttggatgcactggctaaaatgtgcagttcattcaccatcgacaagtgtagttcccaaggcatgacagacttcatgaacgagggcaaattgattgatcttctcaacggctctgattacgtaccaacctgtgg

SEQ ID NO: 156497 - DNA, 247 bp, Glycine max
cgctaacactcattaattgcaagaatggcacttcgttgcttggtgatgtccctttctgttctcttcactcttggtcttgcgagagaaagccatgccagagacgaagatttttggcatgctgtttggccaaacactcccattccaagttcattgcgagatcttctaaagcctggccctgcaagtgttgaaatcgatgatcaccctatgcaaattgaagaaacacagtacccggaaaccttcttctata

SEQ ID NO: 156498 - DNA, 237 bp, Glycine max
gctggaaaagctcagatgagttctgaaagggagaatgagttgatacaacgatgtgagcagagcatgatagaagctgctgataaatattaagtcgcaaacttgtatgtaaaagatgtagatgatagcattggtgatgaaaaacttaaggagctgttctcccctgttggtaccattacctcgtgcaaggttatgagagacccaaatggcttaagtcgtggatcgggtgtggttgcattc

SEQ ID NO: 156499 - DNA, 227 bp, Glycine max
  unsure (1)..(227): unsure at all n locations
cagactttatcatcaccagcaccttccaagagattgctggaataanggacactgttggacagtatgagagtcacactgccttcacccttccaggactttaccgtgttgttcacggtattgatgcctttgatccaaagttcaacattgtctctcccggtgcagacatgggtatatacttcccatacactgaaactgagcgtaggttaacagaattccacactgcatac

SEQ ID NO: 156500 - DNA, 91 bp, Glycine max
caacatcaaactgtatgtccgccgtgttttcatcatggacaactgtgaggagttgatgccagaatatcttagctttgttaagggtattgtg

SEQ ID NO: 156501 - DNA, 241 bp, Glycine max
cagacccgatggagcctatgatgtccccggaagaggctacaaggagtacaggcttcacggcttctcctcctggttgaggaaccacgtcaccggtgccgggagttggcagaagataaggccctgtatggctgctgctgatgtctgctctaagctcacccaggattagatcactgctgatcaattcttcaattcccatatctgccccttacagtcaggatgttgcaagcctcccactgcttgt

SEQ ID NO: 156502 - DNA, 252 bp, Glycine max
cgcgtcgctccgcaccagtttcaccgcacgaatatcatcttgtttggagcgatccgagaaaaactctgtaaacatgttggtttaccaggacctccttacaggtgatgagcttctctctgactccttccgttacaaggaaattgagaatggaatgctgtgggaagttgaggggaagtggggtgttaaaggagcagttgatgtagacattggtgcagacccttctgctgagggtggaggagaagatgagggagt

SEQ ID NO: 156503 - DNA, 239 bp, Glycine max
  unsure (1)..(239): unsure at all n locations
gagcagaggggaggctggcaccgcgtcgagctctccagtggacagttcgttcagcgcctcactttgcctgagaattccatggtggatcatgttaaggcctatatggataacggagtgctcttaatcacggntcctaaacaccacagaggtgtcaataaccgtgttagaaacattaacatctcttctcgtccgtgagtgttgttgttgtgggtctcatgaaatgaaagaattgttaccta

SEQ ID NO: 156504 - DNA, 237 bp, Glycine max
aaaaaatctaagtccctttggtcttcatcttctgttctgatccaggtatggcttctaaacgcatcttgaaggagctcaaggatttgcagaaggatcctcctacctcatgcagtgcaggccctgtggctgaggacatgtttcactggcaagccacaatcatgggacctgctgatagcccatatgcaggtggtgttttcctagtttcaattcattgtcctcctgactatcccttcaagc

SEQ ID NO: 156505 - DNA, 236 bp, Glycine max
accatctatactcccagagactctcttgacaaaacaaaagctgaatctccagcactagcaccagacccagctcgagaaccagcatcagcagcaccagcaccagaaccaggcacagcaccaacaccagcaccctcagctgaacaagaaattgggtcaacaataccatctggaccagcaccagagcctgaatttgtcgacagtggagaggcttgtggcctctatgggagaggctctta

SEQ ID NO: 156506 - DNA, 237 bp, Glycine max
gtcggcggggaaatcgtgaccgttccgccggagacttttgccgttgatcaatccggcgccggaggtgtgattgtggattctggaaccgcgataactcggttgcggactcaggcctacaactcggtgcgcgacgctttcaagaggaagacttcgaacctgcgtcccgcggagggggttgcgcttttcgacacgtgctacgacctgtcgtctctgcagagcgtgcgggtgccgacggtg

SEQ ID NO: 156507 - DNA, 240 bp, Glycine max; identical to SEQ ID NO: 154610

SEQ ID NO: 156508 - DNA, 301 bp, Glycine max
attcggctcgagtgagaattaatcgtccagatgcaactatagtgctcaacacttctgatattcaactcctttgtattttgccaggttttcaatgagataaacagccgagaaatcgaaaagataaacatattcaaaggcatgtttgagagctggatattttttacggtgatcttctccacagtggtgttccaagtactcatagttgagttcctgggaacatttgccagtacagtgcctctaagctggcaattctgggtgctcagtgtcgtaatcggagcatttagcatgcctatatctgcta

SEQ ID NO: 156509 - DNA, 286 bp, Glycine max
gtcacaacgagagatggagcgtccaaagaaggtttttggttgggctgctcgggactcatctgggcttctctccccattcaacttctccagaagagaaacgggggagaaagatttggtattcaaagtgcaatactgtggaatatgccactcagatctacatatgttaaagaacgagtggggcaacacaacctatcctctggttcctgggcacgagattgctggtgtggtaacagaagttggaagcaaggtgcaaaagttcaaagttggagaccgggtaggtgtgggg

SEQ ID NO: 156510 - DNA, 286 bp, Glycine max
gctgtgcccgtatggttcaaaatggtggagcaaaaacttatcagtgagaaggtgttctctttttggcttaatggggatccgaatgcgaaaaaaggtggtgaattagtttttggtggtgttgacccaaagcacttcaaaggaaaccacacttatgttccaattactgaaaaaggttactggcagattgaaatgggagattttttcgttggaggtgtttcaacaggtgtttgtgagggtggctgtgctgctattgtggattcaggaacatctttgcttgctggtccaa

SEQ ID NO: 156511 - DNA, 288 bp, Glycine max
aaatcctctgagagaaaaaaaaattagggttttgcatttcgggtcagacagactcagacatgggaggaggcaatgcccagaagtcaaagatggctcgcgagaagaacctcgagaagcagagggctgccgctaagggaagccagttggattcaaacaagaaagccatgtctattcagtgcaaggtgtgcatgcaaacatttatatgcaccacatcagaagtgaagtgcaaggagcatgctgaagccaaacaccccaaatctgatctccatgtttgttttcctcatctta

SEQ ID NO: 156512 - DNA, 281 bp, Glycine max
gaaggagctaaagccatgcttctgtggctacctcaaaaaccctagcttgaagcagtatgttaactctcctaatgccaaaaaaaccgttagttcttgtggtattgcctatccaacttgttaagcacctcttatatatatatataaaatgtgtgaacaatatatatatattgattaaaaaatatagtttaatttatatacacactttgatcctataaaaacatcttgacacaagcattcaatagaatttcaccactttatcatgacattttactataatgatg

SEQ ID NO: 156513 - DNA, 286 bp, Glycine max
gttttctatatcactctcaactttactcctcttcaatcagttgcatattctttgctattccaatggccactgttgaggttgtgtcagccaaggttgccctcccagaggacacaaaagaggcatcattgaaggttgacgaggagaagaacacagaagaagttgttgagactccaacaccagaaactgtggtcactgagcaaaccaaggaggaaagtactgaggccccacgacctgcagcttcagaagacaagccctcggttgaagttcagactaaagaggtggcaga

SEQ ID NO: 156514 - DNA, 284 bp, Glycine max
gttgttaccatttgctcccagtacagagcttaaccgagcttcacaaagatgaatcgggaaaagttgatgaagatggccggttcggttagaactgggggaaagggtaccatgagaagaaagaagaaggctgtccacaagacaacaaccacagatgacaaaaggcttcagagcaccctgaagagaataggggtgaatgccatcccggctattgaggaggtcaatatctttaaggatgacgtagttatccagtttctaaatcccaaagttcaagcatccattgctgc

SEQ ID NO: 156515 - DNA, 283 bp, Glycine max
tctgcattttgattgattccctcattcttcatccatagacatggccaccgtcacttctgcagccgttgctattccctcattcactggcctcaaggcaagcgcaggcaaagtgagtgccgcagttaaagtctcagctccccaagccacaaggttgggcatcaaggcttcgctgaaagacgttggagtcgctgttgtggccactgccgcgagtgcagtgctggctagcaacgccatggccattgaagtgttgctgggtggtgatgacgggtctctggctttcgtt

SEQ ID NO: 156516 - DNA, 282 bp, Glycine max
tgattaccttgatctttacttgattcattggccatttagattgaaagatggtgccagcagaccccccaaagaaggagaagtattagagtttgacatggaaggggtgtggagagaaatggagaagcttgtcaaggaaaaccttgtcagagacattggaatatgcaatttcactcttacaaagctcgaaaagctgatgagcattgctcaaataatgccttctgtctgccagatggaaatgcatcctggatggagaaatgataagatgcttcaggcttgcaagaa

SEQ ID NO: 156517 - DNA, 282 bp, Glycine max
tgtctgagtccagtctctttgtttatgcctacaagatcatcatcaaaacctgtggtactacaaagctactgcttgcaatcccacccatattgaaatttgctgaaatgctttccctcaatgttagatctgtgaattacaccaggggaagtttcatctttcccggtgctcagccctatccccatcgcaacttttctgaggaagttgctattcttgatggctactttggcaagcttagtgcaggaagcaatgcttatattttgggtggccaagacaaatcacaga

SEQ ID NO: 156518 - DNA, 282 bp, Glycine max
gtgtcatttacgcttctcttctctgcagcaactatgcctcaccctaaggtcttcttcgacatgaccatcggcgctcaatctgctggccgcatcgtgatggagctctacgccgacgtcactccccgcaccgccgagaacttccgcgcgctttgcaccggcgagaagggcgtagggcggagcggcaagcccctccactacaagggctcgtccttccaccgcgtgatcccgagtttcatgtgtcagggtggcgacttcaccgccggaaacggaaccggcggcgag

SEQ ID NO: 156519 - DNA, 281 bp, Glycine max
catcgcactccgctctccgcactccgctattgcttctccctcgacggcacctcaggcgcactcgttttcggttccgattgcattgaatcaaatctgagaaccattctcattgcccgtctgtaatcatgtcaggaaagtatatcatttctgctattcttggatcatttggagttgcatgggtttgtgattattatgtttcagagaaaaagctatttggaggttctacccctggcactattacgaacaatgagtgggcagaagagactgacaaaaaattgcag

SEQ ID NO: 156520 - DNA, 279 bp, Glycine max
cttgctcaaggttgttgatagggagtacacatttgcatacattgctgacccctgcagtggaacataccctttgatgcaaaagctaaggcaagtgcttgtggactatgcattggccaatggagagaacgagaagaacacaaacacatcaatcttccaaaagattgcaacatttgaggaagagttgaagacccttttgcctaaggaagtggaaggtgcaagagttgcatatgagaatgaccaatgtgcaattccaaacaagatcaaggtctgcaggtctta

SEQ ID NO: 156521 - DNA, 281 bp, Glycine max
tagaaaccctcttcatcttgttctatctgtgacgagcatcatggcctcaagagcagtgttattgttggctatgtgtatgcttccggcgatggttgtggccattcgcccagcaaagaaccctttttacgtgaagggtcgtgtctactgtgacccttgccgtgctggttttgagacctcagctaccacctacattgctggtgctgagattatgttgcaatgcaagagcagggttagcaacgaggttgtgtacacgaagaaggggtataccgactcaaccggag

SEQ ID NO: 156522 - DNA, 283 bp, Glycine max
gtattgtctcacgcaaccatggcaatggcgccccaagcctctctcttaaccccacccctctccggtctcaaagccagcgaccgcgcctcctagccatggaagcaaaactccagcctctccttctccagcccgaagcccctcaagttctccagaacaatcagagtagcagccgccgacgagaccacagaggcaccagcaaaagtagaggctgcaccggtcgggttcaccccaccagaacttgacccaaacaccccttccccgatcttcgggggcagcaccggcg

SEQ ID NO: 156523 - DNA, 280 bp, Glycine max
gcttcttatgtatgtcaataggcatgatccttcagacaagtaccaccttctaagattgtatgattacttctattatagagaacatttgttaatagtatgtgaactacttaaagccaacttatatgagtttcacaaatttaatcgagtatcagggggtgaagtgtatttcacgatgccaaggttgcagtcaattaccattcagtgtttggatgcgcttcagtttttgcacagtcttggactaatacattgtgacttgaagccggagaatattttggttaag

SEQ ID NO: 156524 - DNA, 279 bp, Glycine max
agcagatctgaggtgtaccacggggacgtcatgtgccaagtgaagtccaaggagcttctcaaggatatcgccctccccaactgccttcttcccctcaaggacatggatgagtgcggctacgactgacaaaccggcttcgtctggctcaaacaaaagaagagttacacccacaagttcgacaagatcggaaagcttgtctcctacgcgcccgaggtaactgctcatgtccaacaaggtaaaattaccaaactcaccggggttaagaccaaggagctcttg

SEQ ID NO: 156525 - DNA, 275 bp, Glycine max
ccctaaacgactctatctctcttcgttttgtttgtccttgcgctcctcctcgttcgttcgttctccctcgcgtagatcggcaatggcggagaccgagacgtttgctttccaggctgagatcaaccagctcctcagtctcatcatcaacaccttctactccaacaaggaaatcttccttcgtgaactcatcagcaacgcctctgatgctttggacaagattagatttgagagtttgacggacaagagcaagctcgatgctcagccagagttgttca

SEQ ID NO: 156526 - DNA, 275 bp, Glycine max
tgcttaatgataaggggaatactgctgtttatttgctgtatgcacatgctaggatctgtgccattatcaggaaatctggtaaagacatagaagaagtaaagagaaacgggaaaatagtgttggatcatgaagatgaacgtgcattggggcttcatttgctacaatttcctgaggtttatgaggaggcatgcacctatttgttgcccaatttcttgtgtgaatacctttacaatttggcagaaatctttacaaaaaaattttatgctaattgtcag

SEQ ID NO: 156527 - DNA, 280 bp, Glycine max
gagaatgagtggcggaggagaagagggagcaactctggagttcactccgacgttggttgtggccgccttttgcacagtcatcgtcgccatttccctcgccgctgagcgcctccttcattatggcggaaagtttctcaaagccaaggaccagaagccgctctacgaagctctccagaagatcaaagaagagctgatgcttttggggttcatttccctgcttttgacggttacacaaaacggcattaccaaaatctgcgttcgaccctctttgacgctccac

SEQ ID NO: 156528 - DNA, 278 bp, Glycine max
ctcttggcagcctacgtcaattgtcaaaaggttggggctccgcctgaagtggtgggaaggttagaagaagcatgtgcatctgctgcagtgataatggcaggtggaacagccagcataggcgaggatccagcgctggatcagttcatggaggcttactgtgagatgctgatcaagtacgagcaagagctctccaaacccttcaaggaagccatgctctttcttcagaggatcgagtgccagttcaaatctctcactatttcttcttctttggacactac

SEQ ID NO: 156529 - DNA, 278 bp, Glycine max
gcagcagagagtgcggtaggctcttccgagacccgaagcagccatggggatcgatctcaaggccggaggtaagagcaaaaagaccaaaagaacagcacccaagtccaatgatatctatctcaagctcttggtcaagctttatcgcttccttgttcggagaactggcagcaacttcaatgctgttatacttaagagattgttcatgagcaaggttaacaaacccccattgtctttgtcaaggttgattaagtatacgaaggggaaggaagataagattg

SEQ ID NO: 156530 - DNA, 276 bp, Glycine max
ctagtcaccaaccaaacctctgcattattctcttctctcactctctctaagctctcttttagtcttactcacaaacacttttttcactgcttccattacgaacatatatttattatatggctcctgaacttgtccccaccgttgtgaaatccagtgctgcgttcacgaaacccgcgacccttccatggcgtgcctacgtgacattcctcgccggaaacggtgactacgtgaaaggggtggttggcctcgccaaagggttgcgaaaggtgaaaaccg

SEQ ID NO: 156531 - DNA, 279 bp, Glycine max
caatgagttattacaaccagcagcaaccgccggtcggagttccgccgccgcaaggttatccgccggaggggtacggaaaggagggatatccaccgccgggatacccgccagcgggatacccgccagcgggatacccaccgccgggatatccgccacaacaaggctatcctccgccgccctacccggcgcaggggtatcctccgccctacgctcctcaatacgctcagcctccgccccgtcaacaaaattcaactggccctggttgtttggaaggctgtt

SEQ ID NO: 156532 - DNA, 277 bp, Glycine max
gctaaatcggaaaccagaagaagagaattgtggggagcttgtttttggtggtgctgatcctgctcactacaagggcaaacacacttatgtaccagttacacgaaaaggatattggcagtttgacatgggagatgtgcttatttctggtaaacccactggatatgctactaatgactgttcagcaattgcagactctggaacttctttgttagctggtccaacgactgtaattaccatgataaatcaagcaatcggagcagctggagttgtaagcaaa

SEQ ID NO: 156533 - DNA, 278 bp, Glycine max
ttccgattccagtatataaggctgttccaaagccatttccagtgtataaacctatggcagagccagttccagttccagtgtacaagcctattccaaagccagtgtataagcctattccaaagccagttccagtgtacaagcctataccaaagccagttccagttccagtgtctaagcctattccaaagccagtgtacaagcctattccgaagccagtgtataagcctattccaaagccagtaccagtgtacaagcctataccaaagccagttccagtt

SEQ ID NO: 156534 - DNA, 277 bp, Glycine max
gaaaagaaaatcctcaattttctgagcagccaaacactctctctctgtctctcgaaaattctcagtttgcagagaaaatctgaatcatgtcgtggcaagcgtatgtcgacgatcaccttctgtgtgacatcgaaggtaaccacctcactcacgctgctatcatcggccaagacggcagcgtttgggctcagagtaccgacttccctcagttcaaacctgaggagataactgccatcatgaatgactttaatgagcctggatcacttgctccaactgg

SEQ ID NO: 156535 - DNA, 277 bp, Glycine max
gtagtgcgattttcgattctcttctctgcaactatgcctaaccctaaggtcttcttcgacatgaccatcggcggtcaacctgccggccgcatcgtgatggagctctacgccgacgtgactccgagcaccgccgagaacttccgcgcgctctgcaccggcgagaagggcgccgggcggagcggcaagcccctccactacaaaggctcgtccttccaccgcgtgatcccgaacttcatgtgccagggcggcgacttcaccgccggaaacggcaccggag

SEQ ID NO: 156536 - DNA, 273 bp, Glycine max
ctgaatgaatatccacaagttcatgaaattccagcattcaacaatatttacaatgacactggcatttttggtttccaagttacaacaggctcagattttgtatcaaaagccattgatatagctgctaatgagattcttgctgttgctactcctggacaagttgaccaggtacagctggatcgagccaaacaggctaccaaatctgcaattttgatgaatttggaatcaagaatggttgtttcagaagatataggaagacaaattttgacatat

SEQ ID NO: 156537 - DNA, 272 bp, Glycine max
gcggattattttcgatttgtcgattaatagaagttcatcttgttcattgacatctcgtaaatatctttcgcttcgtccaagcaggatctgaagtatctgccttattgggtcgattgccttctgctgtgggttatcaacccactcttagtactgaaatgggttctttacaagaaagaatcacttctaccaaagaggggtccttaacttctattcaagcagtttatgtacccgcagacgatttaaccgatcctgcgcctgctacgacatttgca

SEQ ID NO: 156538 - DNA, 276 bp, Glycine max
taagggttctgctcctatcaatctttctgatcgtctcaatcaggtgcttcggtgggccttgggttcaattgagatctttctaagcaggcattgtcccttgtggtatggctacaatgggaagttgaagcctctgatgaggcttgcttatattaacaccattgtctacccgtttacctcaatcccattgattgcttactgtacgcttcctgcattttgtcttctcacaaataaatttattattcctgagataagcaactttgccagtatgtggttcat

SEQ ID NO: 156539 - DNA, 266 bp, Glycine max
  unsure (1)..(266): unsure at all n locations
gaatacataaacatcaagatttcagttccacacaacatacgaccccatctcatatactgnttcaggtctatacatnacaataccacatnncctannanannaattattcacaaaatctcttcacctctgtgatgaccatggaatacagaaccttagaactcaacatcatatccgcaaaggacatcaagcacgttaacctcttctccaagatggacgtatacgccgtcgttacgctctccggcgaccctctccaccctcagggcgcc

SEQ ID NO: 156540 - DNA, 276 bp, Glycine max
  unsure (1)..(276): unsure at all n locations
ctcatccccccttcctcaaagccccgccnctcgncctcnctccacgtctgncnctccctcctctcctccctcgacctcaacggcgtcgttcgctgcgccgtctgcaaagaccaaattaccccccacgccgaagccaaacaattaccctgcaaacacttataccactccgattgcatcacgccgtggctcgaactccacgcctcgtgtccgctatgcaggtttcggttggaagaagaggaggaagaaggcggtgacggcgttatgacgaagatcagg

SEQ ID NO: 156541 - DNA, 275 bp, Glycine max
gtttgggattggagggattgacgctgcgtctcttcctcttctctttcgatccatccctcattcctcatcctccaatccaaccacctcagcctcacactcacatatacacatatctgaacgcgtatcgtccctcctatggcttcaaagcgcatcctcaaggagctcaaggacttgcagaaagacccaccaacttcttgcagcgctggtccagtagctgaggacatgttccattggcaagcaacaataatgggtcctgctgatagtccttatgctgg

SEQ ID NO: 156542 - DNA, 275 bp, Glycine max
caaaaaacacacacgacacactcccatacacacacgttgtttcgcacacattccttcattccgcagcagcaaacatctataccttaaacgacaacaatggccgatgccgaggatattcaacccctcgtttgcgataatggaaccggaatggtcaaggctggttttgccggagatgatgcgccgagggcggtgttccccagcattgtggggcgtccacgtcacacgggagtgatggttgggatggggcagaaggatgcgtatgttggggacgaggc

SEQ ID NO: 156543 - DNA, 271 bp, Glycine max
caagaattcatctattcatttcagcccatcagcatggcgaaggagaagaaaaacttgtccaacaagaacaagaagccaagcaatgcagacgaggttcacttccgcggagtccggaagcgcccctggggccgctatgccgccgagatccgcgaccctggaaagaagacccgcgtctggctcggcaccttcgacaccgccgaggatgccgcccgcgcctacgacgtcgccgcccgaaacttccgtggccccaaagccaaaaccaacttcccct

SEQ ID NO: 156544 - DNA, 271 bp, Glycine max
ccacccgtcggtgttcctcctccccaaggttacccaccgccggattcttacggaaaggacgcgtaccctccgccagggtacccgccgcaaggaggataccctccgcaggcgtatccagcacaggggtaccctccaccctacgcgcctcctcagtacgctcagcctccgccgcaacaacaccagaattcatctggcgcaggttgcttagaaggatgtttggctgctctctgctgctgctgtctgttggatgcgtgcttctgagaggagaaga

SEQ ID NO: 156545 - DNA, 255 bp, Glycine max
cgaaaatgagcggactaggggaagaagaagggacgagcttcgtgatcgattgcgcgaagcggtggaggataagattatggacattgcttctctggagaagttccttcaggagaggattaaggtcggcggcaagccggtgcactcggcgactccattaccgtcaccagggacaagagcaagatcaccgtcacctccgacagcaacttctctaaacggtatctgaaatatttgaccacgaagtacttgaaaaagcac

SEQ ID NO: 156546 - DNA, 236 bp, Glycine max
aaaaaaaaaaaagaaaaaaaaaaaaaaaaactaagaaaaagaaatgaatgcagcattcagagagagtgcagacaatgagctccaggaatcctctcgtgtgtgatgagccacttgtgtctgttgacttcagtgcactgtgtgtcctcaaccgttgactcatcgttgaccatggtcatggggagatgacatggttaaggtgattgccttggtatgacaatttgtctgggctattccca

SEQ ID NO: 156547 - DNA, 260 bp, Glycine max
gggaaactaagatcaaattttcttggaacaaagttcacaatctatgatggccagccacctcatgcaggagcaaagattatgaaaagtcgctccacaaggctggtgaatctaaagcaagtttcacccaaggtccctacagaaactatccagtggcccatatttcatatgaattgaatgtgcttggctcaagggggcctaggagaatgcattgtgtcatggattccattcctgccgctgcaattgaacctggaggtgtagct

SEQ ID NO: 156548 - DNA, 267 bp, Glycine max
agcaattcctggagagggcctacaacaatgcaaaaactattctgaccactcacaacaaggagcttcatgcacttgcaaatgcccttctggagcacgagacactttcaggaactcagataaagacattgcttgcccaagttagatctcagatgctgcagcagcagcagcagcagccaccccaaacaattgaagctcagagcagtttacaatccaacacggtgcctccatcatccagcaacccggcatctgctgctgccgctgctgctg

SEQ ID NO: 156549 - DNA, 255 bp, Glycine max
cactcataacacaaagcacacagcaaagctcatccttgagttaaaaaatggcagcagcttcttccatggctctctcatccccatccttggctggcaaggccgtgaagctgggcccatcagccccagaagtgggaaggtgagcatgaggaagaccgtcaccaagcaggtctcctcaggaagcccatggtacggcccagaccgagtcaagtacttgggcccattctctggcgagcccccgtcctacctaaccggtga

SEQ ID NO: 156550 - DNA, 243 bp, Glycine max
gaaattctgggttgttttctaatttagtagtatttaagtgtttttcctatgtactgagatttaggaactcggagtaatgtaattgctagtagcacatgtaaaaggctgcaagcctattatgcaataacatttgatactgcatttcaattatctccagtaaaatgtcattggttaaagcttaaaaagagatataaatgggtgcccgcaactaggacgctcgtcaacccggttattattccggac

SEQ ID NO: 156551 - DNA, 262 bp, Glycine max
attgagtcttggcgtggccaaagtagcagaaaataaaagtttcaaaggaagcctgatgggaattagcattggcacagtaacacaagccggaacagtcactagcacacagaaaatatggaggagtttacaagctctcgggcaatggcctttgcatactccttttccattatcctcatcgaaattcaggacaccataaaatctcctcctgcagagcacaagaccatgagaaaggccacaactttgagcatcgcagttactacag

SEQ ID NO: 156552 - DNA, 266 bp, Glycine max
gggagtggatgggagagaagtacttgttgcatttctttgactatgatatcgggcataaaaaatacatcatatggggtttaactgctgggatcttgattagggctgcatcagttgtgtaccaacggcagccagcttttgtggagcagaaccctaaattcaagcttccacaggatgtatccaatgacactacaataccttgagttcattgtttattgtattttgtccttgatacttgtccttaatcgtgcaaaaaaactcgtagcagc

SEQ ID NO: 156553 - DNA, 263 bp, Glycine max
gttactagcagctatgggatttgacaacagcactcgtttatatcttgcctctcataaggtctatggtggagaggcaaggatttcaactttgagggaattatttcctcggatggaagacaagaagagccttgcttcatctgagagcgttctgagataaagggaaaagcttctctactagctgcacttgactactatgttggcttgcatagtgacatatttatctctgcttccccaggaaacatgcacaatgcattggttggaca

SEQ ID NO: 156554 - DNA, 196 bp, Glycine max
gagaatggctcccaagggtttaacctttctggctgtgttaatatgcgtttcagcactgtcactgagtccttctgttgcgggggaagggcaaaataatggccttgttatgaacttctacaaggaatcatgccctcaggctgaaacatcatcacagaacaagtcaagcttctctacaagcgccacaagaacactgctt

SEQ ID NO: 156555 - DNA, 255 bp, Glycine max
gcgagcgcagttctagctagcaacgccatggccattgaagtgttactgggcactgatgacgggtctctggttttctctcccaactctttctccgtggcccctggggaaaagatcgtgttcaagaacaacgcagtttcccccacaacgttgtgttcgacgaggacgagattcctagcggcgtggatgcagggaaaatctccatgagcgaagaagaccttctcaatgcggctggtgagacttacagcgttactttgg

SEQ ID NO: 156556 - DNA, 258 bp, Glycine max
aaagaatggcaatgagcataggcattgcaagaggagttcaattcttacacacaggagttgctcctggcatatatggcaacaatttaaagattgagaacattctgttggatgatagtctcaatgcaaaagtcagagatacaacattccattgccatccaagattgcacatattgaacaaaatgccaccaatcatattggcagcacaaacgatgcagaaaaggaagatatctatcagttgggtattattctacttgaagt

SEQ ID NO: 156557 - DNA, 262 bp, Glycine max
caatagcattcgtttatatcttgcctctcacaaggtctatggtggagaggcaaagatttcaactttgagggaattatttcctctgatggaagacaagaagagccttacttcatctgaagagcgttctcagataaaggaaaagcttctctattagctgcacttgactactatgttggcttgcatagtgacatcttcatctctgctcccccaggaaatatgcacaatgcattggttggacaccggacatacttgaacttaaaga

SEQ ID NO: 156558 - DNA, 268 bp, Glycine max
cttcgtttcttttcgtgaaacaaaagaaaacaaaagattaggttttgtgatgtcgggcatggagaggcttcagaggatgttcgcgggtgcaggtggagcgctgggccatcccccaccggattcccccaccctcgattcctcgagcaggtctacatctcctccctcgcccttctcaaaatgctcaaacacggaagagctggggtacccatggaagtgatgggtctgatgttgggggagttcgtggatgagtacaccgttcgcgttgtgg

SEQ ID NO: 156559 - DNA, 256 bp, Glycine max
ctatttcttcatcggttgttcaagtaaatggccttcgtcaccactgctgaagtgtgtgatgcgaacccccagttaattttgagtggggagcttcgtgcccttcagccagtttttcagatttacggtcgtcgacaggtcttctctggacctatagttaccttgaaggtgtttgaagacaatgttttggttcgtgagttccttgaagagaaaggcaatggaagagtgcttgttgttgatggaggcgcgagtttacgct

SEQ ID NO: 156560 - DNA, 259 bp, Glycine max
gttgatttggttgtggtgcagccaaagaacaaggatcagaatcgtttaatcaagttgaggaagatggcactagtctccggaggaagatcaacactgaaccctaacgcccctctttacattcccgccgcgttccgcaagtggaggatttttctccagaatggtggcagctggtgacgacactgacatggtaccatgactactggctaagccagcagcacgatgatggagccttctatggcgaggatgggtttgatggcaa

SEQ ID NO: 156561 - DNA, 260 bp, Glycine max
ggagattagatgacaagcttcttcttgttgacatagatttgctggaaagcaagctgcacttctcattaagaaaccttccaaaggcaaaagctgcactcacggctgcaagaaccgctgcaaatgctatatatgtgccccagctcaacaatgtgccatagatctgcagagtggaatacttcatgctgaagagaaggattataaaactgcttatagttatttctttgaagcttttgaatcattcaatgctcttgatgacccca

SEQ ID NO: 156562 - DNA, 262 bp, Glycine max
gaatgggaaaaggatggtggaagaaggggacttgaggaagtacttggagaagtgggacaagacttattggccaacttacaaggtcttggatattcttcagaaggtgttttataggtccaaccctgcaagggaagcgttgtggagatgtgtgctgatgagtatgtgcagaagatgacctttgatagctacttgtacaagacagtggtgcctggcaatccattggaggatctgaaattggccattaacaccattgggagcttag

SEQ ID NO: 156563 - DNA, 263 bp, Glycine max
ccggtttcgctctctctctctctctcatggcgaatctagcacacttctccaagagagccctaagaagcgcacacgcgctcgcaaggcaccacgtgcagccgcggttgtggcagcggaaccgcttttgcgacggagcggcgaaatcgatatccccgtcggcggatcgcgtgaagtgggactaccgagggcagaggaagataatcccgttagggcagtggctccccaaagtggccgtggatgcttacgtagcacccaacgtggtc

SEQ ID NO: 156564 - DNA, 263 bp, Glycine max
gtccagtgtgtgtgatattccacccaggaatttgaagatgtcatccacctttattgggaactcgacatcaattcaagagatgtttaggagggtcagtgagcagttcactgctatgtaccggcgcaaagccttcttgcttggtacactggggagggtatggacgagatggagttcactgaggcagagagtaatatgaatgatttggtagcagagtaccagcagtaccaggatgcaacccagaggaggatgatgaatacgaggat

SEQ ID NO: 156565 - DNA, 237 bp, Glycine max
tcggctcgagattcttcaatttaaacacagaaacaaaatcaccaccttcaaagtcttctctctcgagaatcatcgaataaaactagggtttccgatcgtcgtcgaggagaatgccgaagaacaagggaaagggaggaaaaaccggaagcgcgggaagaacgatgcggacgacgagaagcgggagcttgtgttcaaggatgacggccatgcactagctcaggtgctccggatgctggg

SEQ ID NO: 156566 - DNA, 252 bp, Glycine max
gcgtcaaataacatcaaaagtcttggtttccgaagatggaatgtctaatgtttttttgcccggtgaactaattggattgttgcgagccgaacgagcagggcgttccttagaagaggcgatttgctatcggttctattattggggataacaaaaacatctctgaatactcaaagtttcatatctgaagcaagttttcaagaaactgctagagttttatcaaaagccgctctccgggggcgcatagattggttg

SEQ ID NO: 156567 - DNA, 258 bp, Glycine max
ctttccaatcctcctgatttcctcttctacgattctaaaatatcgcgaatggcatccaagagaatactgaaggagctcaaggacttacagagagatccaccaacttcatgcagtgcaggccctgtgggcgaggacatgttccattggcaagcaaccatcattggtccaaatgacagtccctatgctggtggtgttttccttgtgaccatccatttccctcccgattatcccttcaaacctcccaaggtagcattcagg

SEQ ID NO: 156568 - DNA, 258 bp, Glycine max
gcttcccagaggagaccaaataacatctgcactttccaaggcaattcaagagtccaggattgctattactgtgctttctcaaaactatgcttcttcctcgttttgtttagatgaacttgtaaccatccttcatgcaagaggaaagggttgttggttataccggtcttttacaaaatagatccttctgatgtcagacaccagaaaggtagttatggagaagcaatggctaagcatcagaagagcttcaaagctaagaag

SEQ ID NO: 156569 - DNA, 262 bp, Glycine max
ctctgctgcagtgaggtgaggggaggtttgtttgttgtttcgtttttcctttcctttccgccagaatccgttgagaatggcgttgccggtagtcgtcgatgcagagtacctcaaggaggtcgacaaggctcgccggatctccgcgcactcatcgctaacaggaactgcgctcctctcatgctccgattagcctggcacgatgccggaacttacgatgctaagaccaagaccggtggacctaacggttcgatccggaacgagg

SEQ ID NO: 156570 - DNA, 248 bp, Glycine max
aattcttgagacctacacaggctttgagggacttaaatccctggttgatgttggtggaggaactggagctgtagtcaacatgattgtctcaaagtatcccactattaagggcattaattttgattgccccatgtcattgaagatgccccatcttatccaggagtggaacatgttggtggagatatgtttgtcagtgttccaaaagctgatgctatttttatgaagtggatttgccacgattggagtga

SEQ ID NO: 156571 - DNA, 248 bp, Glycine max
aggtctcaaagaagacctttgcagaagaagtgaatgcagcattcagagagagtgcagacaatgagctccagggaatcctctctgtgtgtgatgagccacttgtgtctgttgacttcaggtgcactgtgtgtcctcaaccgttgactcatcgttgaccatggtcatgggagatgacatggttaaggtgattgcttggtatgacaatgagtggggctactcccaaagggttgtggatttggctgacattg

SEQ ID NO: 156572 - DNA, 251 bp, Glycine max
gtgctttggacaatgaccagatccatattccttttcgtggaagcaagcttacagaagtgctccgggactcctttgttggaaattcaaaaactgttatgatctcttgtatatccccaaatgctgggtctgtgaacacacacttaataccttgagatatgcagaccgagttaaaagtctatccaagagtggaaatcctagaaaggaccaggccccaaatcctataccaccaccagcaattaaagaggtttcat

SEQ ID NO: 156573 - DNA, 246 bp, Glycine max
caaaacactcataacacaaagcacaaagcaaagctcatccttgagttaaaaaatggcagcagcttcttccatggctctctcatccccatctttggctggcaaggccgtgaagctgggcccatcagcccagaagtgggaagggtgagcatgaggaagaccgtcaccaagcaggtctcctcaggaagcccatggtacggcccagaccgagtcaagtacttgggcccattctctggcgagccccgtcct

SEQ ID NO: 156574 - DNA, 253 bp, Glycine max
gtcttcatcctaacgacgagatttttgggtaaaaggaagaagaagctgttctggttggcatcaatctctcctcttgtatccgttgttctgtcaactctaattgtgtttctcacaagagctgataaaaatgagttaaaattgtgaaacatgtcaaaggggggttgaatccaagctccctccatcagttagacttcaataacccctacattggagaagtggccaaaattggactagtggttgctgtcgttgccct

SEQ ID NO: 156575 - DNA, 255 bp, Glycine max
gctgctggctctaatattactcttcttgctgaccagattaaaacatttaagcctgaagttgttggtcttagaaatgagtctttaattgatgaactcaaagaggctttggctgatgtggatcacaaacccaaatcatccctggagagcaaggagtcattgaggccgctcgtcaccctgatgccaccactgtagttacaggcatagttggttgtgcaggattaaagccaacagttgcagcaattgaagcagggaaag

SEQ ID NO: 156576 - DNA, 260 bp, Glycine max
ttccgggaactgatttgttctgcgatgtctatcagtatcctatggcagttaaggttcccggggttatgataatacgagtcaagtctgcgttgctttgctttgcaaatgccaatttcgttagagaaaggatcataaatgggtcactgaggaagaatcagaagatgacaagggaaattcaagaagcaccattcaactccaaattcttgacacctccaatttggtgaacattgacaccgctggaatcactgctctagaggaac

SEQ ID NO: 156577 - DNA, 224 bp, Glycine max
cggctcgagccggtctcatgatcttcactattactgcgacgatggttgatcaggctggataccctaggctctcttgttttggactcatgaaaaacagcagagctggcagaagctatagtacaaatttagctttcaccccacctgagtatttgaggacaggaagaatcacccgagaaagtgtaatatacagttttggcacactcttccttgatcttctgagtggc

SEQ ID NO: 156578 - DNA, 258 bp, Glycine max
tgggttcaacaggtgagactcagattactccaacccatgtatctgatgaagaggcaaaccttttcgccatgcaactagccagtgcctcagtactccctatggttctcaaatcagctcttgagcttgatctgttggaaatcatagccaaggctggccctggtgttcacctttccccctccgacattgcttctcggctcccaacacacaaccctgatgcacccgttatgttggaccgtatattgcgcctcttggcttgct

SEQ ID NO: 156579 - DNA, 238 bp, Glycine max
acttgaaatgactgaaaaagcgagtgatgatgataaagaagaggaggaggaggaggaggaggaggaagaaggagccattgaagatagcaaaaatggtttttttgttcctgggcctcttctttctctcaaggaacagatcgaacgggacaaggaggacgaaagcctaaggagatggaaagagaagctgttgggttgcttggaaagtgatatagatggtcaattggatcctgaagtgaaa

SEQ ID NO: 156580 - DNA, 221 bp, Glycine max
gtcgtgcctctcattgttctcgccatttccaaatcatccgatcgccacaagtacgatctgtcttccatcagagtcttgtcgtcctggggatcccctctgggtaaagaactcgaagacggtgtcacagctaaattccccaacgtcaaactttgccacggatacggcatgactgaggcagagcctctgctaacaatctctttagcttttgctaaagaatcgat

SEQ ID NO: 156581 - DNA, 262 bp, Glycine max
ggcatctttgactgagctctcgttcaactgggtcggcttcataagtgctatgatttcaaacatctccttcacataccgaagcatctattcaaagaaagccatgactgatatggacagtaccaatatctatgcctacatttccatcattgctctaattgtctgtataccacctgccgtaattttggaagggcctacactgttgaagcacggcttcaatgatgccattgctaaagtaggtttggtcaagttcgtctcagatctc

SEQ ID NO: 156582 - DNA, 263 bp, Glycine max
catccaaatacagaaatatcattttccgagacaatcccatcttccatttccatcttcaatatttctactcatcgagaagcttcgcgaacgaaaacaaagaaccctagacagatccattccatagccatgtcaggtgttggccctctatctcaggattgggaacccgtcgtcctccgcaagaaggctcccaccgccgccgccaagaaggacgagaaagccgtcaacgccgcccggcgctccggcgcggaaattgaaaccctaaa

SEQ ID NO: 156583 - DNA, 262 bp, Glycine max
caggaatcttactggtacaaaggcactggttcagtggttgctgttgatcaggaccccaacactcgctaccctgttgtggttcgattcaacaaagtcaactatgccaatgtatcaacaaacaactatgctttggatgagattgtggaagtggaatgagtctaatttatttgtaattttgattctggccatgctatgccagttactagcctaaggtttttttatgtcaaaaacaaaaaagaatttgtatcatattctctctgtt

SEQ ID NO: 156584 - DNA, 265 bp, Glycine max
atcagatctgccagatgtggatatcaccacaacaggtgttacaagctttacaggccctgaaggaccatttgatgttgaggtttttgattcagcaagtgattatataaaattgatgaagtcaatttttgattttgaatctatcaggaaactgctgtcatctcctaaattcacattctgttatgatgcactacatggggttggtggagcatatgcaaagagtatatttgtggatgagcttggggcacaagaaagctctttactgaac

SEQ ID NO: 156585 - DNA, 258 bp, Glycine max
  unsure (1)..(258): unsure at all n locations
gagcatataaataacatagtcctcctcctttgtttttccacataacataagatttggnanananaganatccatcgatcaattaatttccaattgccgatcagctcaccgacgaacagatctctgagttcaggaagcctttagcctcttcgacaaggacggcgatggttgtattaccaccaaggaacttgggactgtgatgcggtcgcttgggcagaacccaactgatgctgaactgcaggacatgataaatgaggtt

SEQ ID NO: 156586 - DNA, 257 bp, Glycine max; identical to SEQ ID NO: 130891

SEQ ID NO: 156587 - DNA, 175 bp, Glycine max
  unsure (1)..(175): unsure at all n locations
gttgagcacagtatacagtcggttatgtcangatgacatgcctatggttagaaggtcggctgtatcaaatcttgggaaatttgctgcaactgttgaatatgctcatgtgaaggctgatctcatggcaatttatgatgatctgactcaagatgatcaagattctgtcgattgttgg

SEQ ID NO: 156588 - DNA, 267 bp, Glycine max
  unsure (1)..(267): unsure at all n locations
catttccattcattcattcgttgttcttctttccaccaacaagacagactgtangagagaaactttcatttcatagattttcatcatctcagcaaaggaatcaatcaatcaagccatggcaggcttcagtggcgacgaaaccgctcctttcttcggcttcctcggtgccgctgcggccctcgtcttctcctgtatgggagcggcgtatggaacggcgaagagtggggtgggggtggcgtcgatgggagtgatgaggccggagctggt

SEQ ID NO: 156589 - DNA, 274 bp, Glycine max
tcggctcgagcacagtactgattaacgatctctctctctgtctctacaagacttagctcttgttgttaattattccttgcattctcttgagttcagatggaagcaactaatggccaccaaaatggttcgttttgcttgtccagtactaagggaagtgatccgttaaactggggagcggcggcggaggcgatgaaggggagccacctggacgaggtgaagcgcatggtgtccgagtaccggaagccggtggtccggctcggcggcgagacgctca

SEQ ID NO: 156590 - DNA, 257 bp, Glycine max
gaaagagaatccgaggcgaagagaagagaaaaattaagatggaggggaaggagcaggatgtgtcgctgggagcgaacaagttcccggagagacagccgattgggacggcggcgcagagccaagacgacggcaaggactaccaggagccggcgccggcgccactggttgacccgacggagtttacgtcatggtccttttacagagcagggatagcagagtttgttggccacttttctgtttctatacatcactgtctt

SEQ ID NO: 156591 - DNA, 242 bp, Glycine max
  unsure (1)..(242): unsure at all n locations
cgactttcctaagccaggaattttgtgtcaggacataaccacgctgctttttnatacaaaggctttcaaagacaccattgacttgtttgttgagaggtacagagatcaaaacatcaatgttgtcgcaggagttgaagctagaggctttatatttggtccacccattgcattagtcantngagcaaaatttgtccccatgaggaaacccaataaattgcctggggaggttatctcagaagggt

SEQ ID NO: 156592 - DNA, 259 bp, Glycine max
ctctgccactttctgagtacaatacaacactgccatggctgcctcagtctccactattggagctgtcaacagagctccactgagcttgaacagctctgaagctggagattcggttcccagttcagccttctttggcacaagcttgaagaaggttactgcctcaagggtccctaacgtcaagatttcttctggaagtttcaaaatcgttgcggcggagaaagagattgatgagcaacaacagacaaacaaggacagatgg

SEQ ID NO: 156593 - DNA, 266 bp, Glycine max
tcctacccttttgatttgtgaaaggcaagcaaacatgcttgatcaggtccaacaccctacaatcatggacaacgttgctggccagctccatctccgttctggtgtttcttgtattaggagttatgaaggagcctactgccaccccacaatgtaccaaacgccctctgttgggaattactcgaatgctgcattgcggcatcctggtgatgccctcatgcaaagctactcagggatttgtcggcggctgcaacaatggcctccccggt

SEQ ID NO: 156594 - DNA, 251 bp, Glycine max
ggaatgaagtaactgttgttagctgcttctaccggctgaagaacttgcctgatgaaactgtggatgtgaagtctccaagagatgccgtgttgaagttgataaggaggatcaatccaaacatgttcatccatggggtggtcaatggcacttacaatgcaccctttttcctgactcggtttagggaggcactctaccacttctcatcactgtttgatatgtttgaagctaatgtgcctcgtgaagacccggaa

SEQ ID NO: 156595 - DNA, 256 bp, Glycine max
ccaatctgcgctgcctacgacaactacctccgcctccctgagctcagagctctctgggcctccaacgacttccctaattgggccaacgagcccatcttaaagcccaccttacatgccctcgaaatcacttccgcttactcgcaaccgttttatccgacccgaggccgtacataaacaagctcgagtggacccggcgggtggagtctctcgccacggcccaaattcagatcatagctatgctgtgtgaagatgaaga

SEQ ID NO: 156596 - DNA, 257 bp, Glycine max
gttccactcattccacccagttgcgaccatcctcagttacctgaccaaggcccctctggttccaccgagtacgccagtggttaatgcactgtcaaagcagcgagctatgctggaaaacatcctaagggcttgtgttggattagctcctgagaacaacatgatcctggagtacaagtgaagttcaaagtcttaagagtaatggtttgggatactgtagttgaatgagatcaaaacttaactcatatcccataccctct

SEQ ID NO: 156597 - DNA, 256 bp, Glycine max
ctcttggggaacatggttccagatactacaccaagagtttcaaaggatcggtagatgctttccatgtcaatacagttgatacaactggtgccggtgattcctttgttggtgctttattggccaagattgtcgatgatcagtccatacttgaagatgaaccaaggttaagagaagtactaatgtttgcaaatgcatgtggagctattacaactacccaaaagggagcaattccggcccttcccaaagaggaggctgc

SEQ ID NO: 156598 - DNA, 257 bp, Glycine max
tgatgacgtaggaggaattatttcttctaaagcaggcctgcaatatcttggccctgacttggatgctatgaaagctgttgctgatgcacattctaagcggtcccttaagttgtttgaaattgctttgagggactacaaggcacagttggaggaagacccaattgtacacaggcacctttcatccttgtacgatacccttatggagcagaatctttgcagattgatcgagcctttctcaagggttgagattgcacata

SEQ ID NO: 156599 - DNA, 137 bp, Glycine max
ggaaagagaagggttctgggaagtatgagaagaaggtgtatgtgttgcccaagcaccttgacgagaaagtggcttctctccaccttggccagcttggagctaggctcaccaagctttccaaagaccagctgattaca

SEQ ID NO: 156600 - DNA, 255 bp, Glycine max
tagaacaaagaagaagagcaatccaaaacccgggttcagatcacaccgccacaacgttttcctacctagacacactttttgatctcaaagttgaagggaagaaatcagcaccttctgatgcagacattggtttcactgtgctcagagtttctcaacggtggcacagacacaacagcaacagcggttgagtggggcatagcacagctcatagcaaaccctcacgttcagaaaaagctctatgaagaaataaagagg

SEQ ID NO: 156601 - DNA, 240 bp, Glycine max
atctcctttccaaatggccagcgttgcggttgcacagcaaacaccaacaacagttccagaaaatgaaacaaccgaggtaagcaagacccaggaaacaaccccagtcactgaggctcctgcaacagaacaacccgcagctgaggttcctgcaacagaacaacccgccgctgaggctcctgccccagaatcaaccaccgaagcaccaaaggaagaaaccaccgaggcaccaacagatacagt

SEQ ID NO: 156602 - DNA, 134 bp, Glycine max
gaaagaacacaccaacaaaggagcttggaccaaagaagaagacgaacgcctcatcaactacatcaagctccatggtgaaggctgttggagatccctccccaaagctgctggcttgctcagatgtggcagagttg

SEQ ID NO: 156603 - DNA, 262 bp, Glycine max
tgcttttcacattattgattggtaacattcaggtattcttacatgcagtcatggcaaagaagagaaagatgcagctgagatgtcgtgacatggaatggtggatgaggaggaggcagttgccatcgcgattaggccagagtgttcgccatttggaacgtcagagatgggcagcaatgggaggagaagatgagatggaaatgatcaaagacttgccagaggggctgaggagggacatcaagcgccatctttgcctcgatctcat

SEQ ID NO: 156604 - DNA, 255 bp, Glycine max
gttcctcgatggtcatacaaatttattgacgaattggaacaactggagggaaatgaagcagagaattatcaaattcgttctagaaaagccaaacgtgtagtaattttgactaataaatctaaattttttaagaagtacgatacttataatcctacaggagatactgataacgctgaaaaaaaaaaaaatgaattggctttaatacgttattcccaacaatcggattttcggcgagacttaatcaaaggatctata

SEQ ID NO: 156605 - DNA, 252 bp, Glycine max
gccaagtggaaatttattggttgtgtctgaggaattgggtggggatccgaacgggatctttttggttagaagggatatagatagtgtatgtgctgacatctatgagtggcagccaaatcttgtaagttatgagatgcaagcttctggcaaagtcagaagtcctgtgagaccaaaagcacatttgtcatgtggacctggacaaaaaatatcatcaatcaagtttgctagctttggcactccagtagggtcttg

SEQ ID NO: 156606 - DNA, 139 bp, Glycine max
gcttttggaccatttcaagcattctggtcccaatggacagcatgtttgtatggtgtttgagtaccttggggacaatcttttgactcttattaagtactctgattatcgggggttgcctattgtcatggttaaggagatt

SEQ ID NO: 156607 - DNA, 258 bp, Glycine max
ctaacactcattaattgcaagaatggcacttcgttgcttggtgatgtccctttctgttctcttcactcttggtcttgcgagagaaagccatgccagagacgaagatttttggcatgctgtttggccaacactcccattccaagttcattgcgagatcttctaaagcctggccctgcaagtgttgaaatcgatgatcaccctatgcaaattgaagaaacacagtacccgaaaaccttcttctataaagaagaccttcat

SEQ ID NO: 156608 - DNA, 260 bp, Glycine max
tgtttataaaggagttccaaaggattacaccggtgaagatgttactgttgataacttttttgctgctttacttggaaataagtcagcactgactggtggcagtgggaaggttgtggacagtggtcctgatgatcatatatttgtatactatactgaccatggaggtcctggggtgctcgggatgcctgctggtccttacttatacgcggatgatctgattgaagtcttgaagaaaaagcatgcttctggaacatataaaa

SEQ ID NO: 156609 - DNA, 279 bp, Glycine max
atcggcggtacgctaaccccaccatcaacagccagggcaaccgttacacggctcccggagaccctgatgccaaggaggtgacgaagcgcgtggacacagacgatagagagtggagtggttggaattggaggacggaaggggacataatggtaaatggagcgttctttgtaccatcgggtgctgcggggcagagtggccagtaccaagaggccaccagtgtgcaagccaaatccgccgtgcaaattgaccagctcactatgtactccggtgtcttgggtg

SEQ ID NO: 156610 - DNA, 271 bp, Glycine max
ataaggacagcttggaagaacttgctgatccaaggattgggggaaggtacccaaaggaagattttgtacgtgtttgcactattgctgcagcctgtgttgctcctgaagcaagccaacgacctgcaatgggtgaagtggtacaatcacttaaaatggtgcagcgggtcacagaatctcatgatcctgtgttagcgtcatccaatacacggcccaacctgagacagtcctctaccacttacgattctgatgggacatcttcaatgttttcttc

SEQ ID NO: 156611 - DNA, 265 bp, Glycine max
cacaaacacacgtattctcttgcaaaactaagaatgaaggaggagttggtggttgaagaagggtaccttttcaaagaagagactcacttcacagtgctcaaaacctctctcttcttcaacggtgatggcttcgctgtctacgattgcaaaggccaactcgttttccgcttcgactcctacggtccccgcgcgcgtgacaaggacgagctcgttctcatggatccccatggccgttctcttctcactctccgccgaaagaaagcga

SEQ ID NO: 156612 - DNA, 279 bp, Glycine max
atcgctcatagagagttcgacgcggcggttgcagaagaagattgcaagatgaagttcaacatcgcgagtcccaccactggatgccagaagaagctcgagatcgacgacgatcagaaactacgagcattttgggacaagaggatctcacaggaggtcagcggagatgcacttggtgaggaatttaagggctatgtcttcaaaattactggaggttgtgacaaacaaggattcccgatgaaacagggagtgcttactcctggtcgtgttcgacttttgctt

SEQ ID NO: 156613 - DNA, 275 bp, Glycine max
tgttggtattatcctgtcttctcgtgctggtcagtctagagctgattaagaaatgatgtgctgcaaaatattctttgatctcccacctgttttaaaaccttcttattgtgagggcaaggggggtaaattgttagttgtgaggttagtgatgttgggatggcacttgcaaggtttaacaaatacatgtgaaatcagtagctgcaccagtcatttttatgtttgtttaactagtctttctttgcttaataaagcttcttaagcgtttttttccctat

SEQ ID NO: 156614 - DNA, 276 bp, Glycine max
taagctcccaagcagtgggaggaagctcgggactctgaccgcgtgcctgttgaagaatgagccggcgactcataggcagtggcttggttaagggaaaccaccggagccgtagcgaaagcgagtcttcacagggcaattgtcactgcttatggacccgaacctgggtgatctatccatgaccaggatgaagcttgggtgaaactaagtggaggtccgaaccgactgatgttgaagaatcagcggatgagttgtggttaggggtgaaatgccactcgt

SEQ ID NO: 156615 - DNA, 271 bp, Glycine max
attgatgcttcgcttggggattctgatgtgcccaaagatactgctttgaagagaagggctagatgtgattcaagtactgcttctagctctaaagcgtgtcgggagaagttgcggagggataggcttaatgacaaatttgttgaattgggctccatcttggagcctggaaggcctcccaaaacagacaaggctgccattctgattgatgctgcccgaatggtaacacagctgcgggatgaagaggctaagttgagagactcaaatacgagtc

SEQ ID NO: 156616 - DNA, 265 bp, Glycine max
agaaaagaggagtttgagaatggcaacgatcagcgcggttcaggtggagttcctggagtttccagcggtggttacttcaccagcctccggcaagacctatttcctcggcggcgcaggggagagaggattgacgattgaggggaagttcataaagttcacaggcataggagtatacttggaggataaggcggtgccatcactcgccgctaagtggaagggtaaaacttcagaggagttagttcacaccctccacttctacagggat

SEQ ID NO: 156617 - DNA, 285 bp, Glycine max
cggaacgacggactactctatgggatacatataagagtgattttgagaatgagaaggcctctgggaaatctttgggtgaaaaagcagcagaagatctgaggcaaagaataattgaacataatattcttgttgtatcaaaatactatgcaagaattacattgaagagacttgcagagcttttgtgcctcagtatacaggatgctgagaagcatctctcagatatggttgtgtctaaggcgctggtggcaaagattgataggccaatggggatagtctgtttccaaa

SEQ ID NO: 156618 - DNA, 272 bp, Glycine max
attcaaagaagataccgagagtttggatttaaacgcaaaagcaattaatacaagactaagtgatttgaagattgaagggataaacgatttgaagattgaaaggatgcaggaactggaagcagtgacaagtgagatcgttaggttgattgacacagcaacagtgcctattttggccgttgatgttgatgggctggtcaatgggtggaacataaaaattgctgagttgacgggtcttccaattggtgaagctactggaaagcatttactcacac

SEQ ID NO: 156619 - DNA, 275 bp, Glycine max
cattctcatctttctctcttctctctccacccaaaccctaactcgcgaccctgttcccctctcgtatccgtcatgaaaggaggaaagtccaagaccgaatctaagatagccgatcccaaacttgctgtgaataagaagggagccgccaccaaggctaggaaacccgccggcaaggggaaggcagcgaaagaccctaacaagccaaagaggcctccaagtgctttcttcggtttcatggaggagttcaggaaggtattcaacatagaacatcctgt

SEQ ID NO: 156620 - DNA, 266 bp, Glycine max
attctctttgctcagttccctacctctcctttcaagatgcagatcttcgtcaagaccctcaccggaaagaccatcacccttgaggtggaaagctctgacaccatcgacaacgtcaaggccaagatccaggacaaggaaggaattcccccggatcagcaacgtctcatcttcgccggaaagcagctcgaggacggccgtaccctcgccgactacaacatccagaaggagtcaacccttcacctggtcctgcgtctccggggaggtat

SEQ ID NO: 156621 - DNA, 249 bp, Glycine max
ggctgtcggagtcatcaagagtgttgagaagaaagaccccaccggagccaaggtcaccaaggccgctgccaagaagaagtgattgcatttgggcaattttgctagcacatgtgatcatcatcgtggttactcctttatagtagttttatccttgcagagtcttaggtgttttgcttaagttatatgtttaagtttctgccgatttcatgtagccggaactttcaaaactagggtcttgatcggcggtgg

SEQ ID NO: 156622 - DNA, 234 bp, Glycine max
cagaaagcaagctcatcctagagttttaaaaatggcagcagcctcctccatggctctctcttccccatccttggctggcaaggccgtgaagctgggcccatcagcccccgaagtcgggagggtcagcatgaggaagaccgtcaccaagcaggcctcctccggaagcccatggtacggctcagaccgcgtcaagtacttgggcccattctctggcgagcccccgtcctacctgag

SEQ ID NO: 156623 - DNA, 255 bp, Glycine max
ggcccggacatttggaacaagagctggtatccaaaagctgcagatcatgtgaatacagaaaaaacatggtatgttgttgatgctacagacaaagttcttggaagactagcatcgacgattgctattcacatccgagggaaaaacttggcaacctacacacccagtgtggacatgggtgcgtttgtaattgtggtaaatgcagaaaaggttgctgtatctgggaaaaagaggagcgtaaagcaaaacaggaggcac

SEQ ID NO: 156624 - DNA, 264 bp, Glycine max
accggagcagtttgatgtcatggtaacccccaatctttatggaaatcttgttgcaaatacagcggcaggtattgctggaggcactggagtcatgccgggaggtaatgttggggctgatcacgctgtgtttgaacaaggtgcttcagcaggaaatgttggcaatgataaagtagtagaacaacagaaagcgaacccagtggcactccttctctcgtcggccatgatgcttagacatctccagtttcctgcatttgctgaccgatt

SEQ ID NO: 156625 - DNA, 267 bp, Glycine max
aaaattgccattaatatatgttatggtaggcaccatcctttaaattggttagcctttggcttgaatggtgcagagattgttttcaacccttctgccactgttggtgaactaagtgaaccaatgtggccaatagaggcacgtaatgctgcaatagctaatagttactttgttgcttcaatcaaccgtgttggaactgagacattccccaatcaatttacttctggcgatggaaagccggcacatgcagatttcgggcacttctatgga

SEQ ID NO: 156626 - DNA, 230 bp, Glycine max
tgtattttttgatttgatcatttcaatcttcaatttgtggttatatatccaccagtccgcaaagtgcaaatttctaatctttcacgtattgggttcttctctgttccctcttcgtctccgatcgatccaattctcttcccatggcgacgatcggacacaacaatctcaatgccaagttggttcttctcggggacatgggtgctgggaaatccagcctcgttttgcgcttt

SEQ ID NO: 156627 - DNA, 270 bp, Glycine max
gagagagcgagcagtttcagacacagagagaggggtttgggattggagggattgacgctgcgtctcttcctcttctctttcgatccatccctcattcctaatcctccaatccaaccacctcagcctcacactcacatatacacatatctgaacgcgtatcgtccctcctatggcttcaaagcgcatcctcaaggagctcaaggacttgcagaaagacccaccaacttcttgcagcgctggtccagtagctgaggacatgttccattggca

SEQ ID NO: 156628 - DNA, 267 bp, Glycine max
atggtatgatgctgggaaatcggagtactttgcttcatcgtcgaccctctttgtgatcgagttcatcttgttccactacgtcgagatccggagatggcaggacatcaagaaccctggctctgtcaaccaagaccccatcttcaagcaatacagcttgccccaacatgagtgtggataccctggtagtgtgtttaaccccttgaactttgcacctactttggaggccaaggagaaggaacttgccaatgggagattggctatgttggc

SEQ ID NO: 156629 - DNA, 268 bp, Glycine max
tccagcagcaatggtgtacgtcaaggctcagaaatcaaaagcctacttcaagagatatcaagtcaagttcaagagaagaagagagggaaaaaccgattaccgtgccaggattcggttgattaatcaggacaagaacaaatataacactccgaaataccgatttgtggttcgctttagcaacaaggacattgttgcacaaataatatctgctagcattgccggcgatttagttcttgctacagcatattcacatgagctgccacgatat

SEQ ID NO: 156630 - DNA, 268 bp, Glycine max
gaaagaattgggggaatggagaacaaccagcaacaaggcgctcaagcccaatcgggaccgtaccccggcggcgcggtggaagtgcaggtgcaggtgcaggtgcaggcgcggccccgttccagcacctgctccagcagcagcagcagcagctgcagatgttctggtcgtaccagcggcaagagatcgagcacgtgaacgacttcaagaaccaccagctccctttggcccgcatcaagaagatcatgaaggccgacgaggacgtccgcat

SEQ ID NO: 156631 - DNA, 266 bp, Glycine max
ggcaagatgtcgaagagaggacgcggtggttcggcggggaacaagttccggatgtcgctgggtctgccggtggcggcgacggtgaactgcgccgacaatacgggggcgaagaacctctacatcatatcggtgaaagggatcaaagggcgtttgaaccgtctcccctcggcttgcgttggcgacatggtgatggccaccgtgaagaaggggaaacccgatctgaggaagaaggttttgccagctgtcattgttcgccagcgcaacca

SEQ ID NO: 156632 - DNA, 263 bp, Glycine max
atcattttttgcctctggttctgttgctatatacatctttttgtactccgtaaactatcttgtatttgatctcaagaatctgagtgggcctgtttctgcaactctttacttgggatattccctcttcatggttctagcaatcatgttggctacaggcacagttgggttcctttcctcattctggttcgtgtattacttgttctcttcagtcaagttggattgaagactcttcacagttaaaaaaattagctctacagagaaca

SEQ ID NO: 156633 - DNA, 264 bp, Glycine max
ctactggccaagttccaaattcaggtccatgagtttttacaaagggtttagaaacctctggggccctcagcaccaaagcctagaccaaaatgcattaacaatctggcttgatagaacctcaggaagtggattcaagtcagtaaggccatttcgatccgggtactttggtgcttccattaaggttcaacctggatacactgcaggtgttataacagctttctatctctcaaacaatgaagcacatcccggtttccatgatgaagt

SEQ ID NO: 156634 - DNA, 269 bp, Glycine max
  unsure (1)..(269): unsure at all n locations
ggaattgggatggaggtttttatgtatgatgagattggatttaatggggaaaagtgaaggtttggagtcatgattaagaaaggagatggaggtgatgtgtataaaggagtcgnaaaggattagaggggtgaagatgttaatgttgataagttttttgctggtttagttggaaataagtgagcactgagtggtggcagtgggaaggttgtggagagtggtgatgatgatgatatatttgtatagtatactgacgatggaggtggtggggt

SEQ ID NO: 156635 - DNA, 262 bp, Glycine max
gtgggtaatgaatgttgttccatctcacaagccaataactcttgatgcaatctttgacagaggtcttattggagtttatcatgattggtgtgaacctttctcaacatatcctcgcacctatgacctgatacatgtggcaagcatggaatcacttgtaaaggatccagcctctggcagaaacagatgtacccttcttgatttgatggtggaactcgatcgaattttacgcccagaaggcactgttgtggtgagggatacccct

SEQ ID NO: 156636 - DNA, 260 bp, Glycine max
gtttcagaaggaatgggacacaagctatgtaggattcacagttgatggagctaagtggctagtggataacacggatatcaaacttgttggaattgattacctatctgttgcttcttatgattacttgattccatctcaccttgtttttctaaaagacagggagatcattctcgtggaaggcttgaagcttgatgatgttccagcaggattatattcagtccattgcttacctcttaggttggctggtgctgagggatcac

SEQ ID NO: 156637 - DNA, 256 bp, Glycine max
cgagaggctgctcgtaagactcggttgaggaaaaaggcctatgtgcagcagttagaatcaagtcgtttgaagttgatgcagttggagcaagagcttgaacgtgcaatacagcagggaatgtatatagtcggtgggttggattctaatcatctgggctttgctggatcagtaaattcaggaattacaaccttcgagatggaggtatgacattgggtaaatcactaaagtagtccaatcagagctctgggttatgttt

SEQ ID NO: 156638 - DNA, 250 bp, Glycine max
cggctcgagctcgagccgttctgatggaaattggcatagagctaacaaaggggctcctgagcagataatcaccctttgcaactgcaaagaggatgtcataagaaaggtccatgctgtaattgataagtttgctgagcgtggacttcggtctgtaggtgtcgcaagacaggaagtacctgagaagtcggaagatagtcccggtggaccatggcaattggttggttctctacgattgtttgatcctcccagg

SEQ ID NO: 156639 - DNA, 256 bp, Glycine max
ctattactcagcagctgcgccttatggagaaaggtgttgatatattggttgcaactcctgggcgtttggtggatattattgaaagagaaagggtttcgttgacaaagataaagtatcttgctttggatgaggctgatcgtatgttggacatgggttttgaacaccaaatacgcaagattgtggagcaaatgcagatgccctcgccaggtattaggcaaacattgttaggttaaagccacgtttcctaatgatatac

SEQ ID NO: 156640 - DNA, 259 bp, Glycine max
caacactggcggtgcttgggataatgctaagaagtacatagaggctggtgcgtctgagcatgcaaggaccctgggccagcaaggatctgaaccacataaggcagctgttattggagataccattggagaccctcttaaagatacttcaggtccttcactcaacatcctcatcaagctcatggccgttgagtcgctcgtcttcgcaccatttttcgccactcacggtggcctgcttttcaagatcttttgatttgagggt

SEQ ID NO: 156641 - DNA, 255 bp, Glycine max
ctgcaatgcgtcctttgacagcagctgtggttgctgcaggtggaaatgcaagctacgtacttgatggggtgccccgaatgagagagaggccaattggggatttggttgctggtcttaagcaacttggtgcagatgttgattgctttcttggcacaaactgtccacctgttcgtgtaaatgggaagggaggacttcctggcggaaaggtgaaactgtctggatcagttagcagtcaatacttgactgctttgctta

SEQ ID NO: 156642 - DNA, 256 bp, Glycine max
aatagtttgattggaggagatgactttaagagtggtcagaccaaaatgaaatcggtgttggtggatttcctagtaggggccggcatcaagccaacatctatagtgagttacaaccatttgggaaacaatgatggcatgaatctctcagcccctcaaaccttccgctcgaaggaaatttccaagagcaatgttgttgacgatatggtcaacagcaacgccatcctctatgagcctggtgaacatccggaccatgtgg

SEQ ID NO: 156643 - DNA, 253 bp, Glycine max
gaaggaacaaaagtgaacagtgatcagataaacaagaaggctgaggcagagttgactgtgaatggcaatcttgggagctgaactggtgaggtcaaatgcctggagcagggaatagattaataagctctcagcatctctcttctcattctggcccctttaaatctgtttgaaaatgactagtttttgttaatgttatttatctgattgtttattaaaacaacaatatacgtgtatagagcatagccctatcgtg

SEQ ID NO: 156644 - DNA, 258 bp, Glycine max
gattgctagaatggaatttcgatgctcagtcatctcttttaccattctcttctctcttgctcttgcaggagagagccatgtccatgcatcgctacctgaggaagattattgggaagctgtttggccaaacactcccattcccactgcactgcgagagcttctaaagcctctccctgcaggtgttgaaatcgatgaactccctaagcaaattgatgatacacagtacccaaaaacattcttctataaagaagaccttca

SEQ ID NO: 156645 - DNA, 257 bp, Glycine max
gaactctataacagcatggtagaggaagagggcccaaatggtaaaaaagatgcctttaaggcatataaagctgcccgagaggaacatgaacacactaatgagttggatgaaggggataaggtgtcatcagcactcattgggagagttgatgctatgcttcaaaatcttgagaaggaaatagatgacgtcgatgcaaaaattggtgaccgttggaggctgctggacagagattatgatgggaaagtaactcctgaggg

SEQ ID NO: 156646 - DNA, 254 bp, Glycine max
caaattacggtcccttcttctaattgtgtgcgagtagctgttcttctgcttctgctttacaagttttgttgccatggaagcagagttggataccgagcagcagcagcaaatgacggaaggaagctattcccaaactatgcaaattgatccaaaaagggctcgatttccatgctccgttgtgtggtcaccacttcctgtaatctcgtggttcattccttgcattggtcacattggcatctgcagagaggatgggg

SEQ ID NO: 156647 - DNA, 248 bp, Glycine max
cagtgttgatgatcatcagaagaactgcctaaagtggtttccatctgttcatcgaattttagtccttgatgggattcaggatcctggtaatcttggtacattgctcagatcagccgtggccttcagatgggatggagttttccttctccccggctgctgtgatccattcaatgagaaagctcttcgggctagccggggtgcctcgtttcagctccctgttgtttctggcagttggaatcacctggagt

SEQ ID NO: 156648 - DNA, 291 bp, Glycine max
ggaacctcaaccgtgacttcgattctgccactctcaacgatttcgatgtcctggaagtggaggagatggagaaagtggtgaggcgcatgtgggatgtgtatactcaaagcaagagtggcaggggaagtggcttacctcgtttttggagtgatgcttttcatgcggcttacgaccacttggtcagtgatgttcagagcgtccgagatgctgctgtctccgaaattgccaagatatccctccattctcttcctctgcaccacctcaaatcacattccattgtgcagaatatca

SEQ ID NO: 156649 - DNA, 281 bp, Glycine max
gtatgaggcaatctacagcttctactttggggactacggtcacatttcagtgcagggttcatacctgacctatgaggacacttatcttgctgtgactggtggatctggcatctttgaaggggcttatggtcaggtcaagctgcatcaaattgtgttcccctttaaactattctacacattttatcttaagggcatcaaggacttgcctcaggagcttctttcccagcctgttgagcccagcccagctattgagcccagcccatctgccaaggcctgtgaac

SEQ ID NO: 156650 - DNA, 282 bp, Glycine max
gttcttcacatcatcctcatcatcttcttcaatcagttgactcttcgttcctccctctattctttcggatggagcccatggacatcgttgggaaggccaaggaagacgcttctcttcctaaagcgacaatgacgaaaattattaaagagatgttgcccccggacgtgcgtgtcgccagagatgcacaggatttattgatcgagtgttgtgtcgagtttataaaccttgtctcgtcagagtccaatgaagtctgtaacaaagaagaaagaaggacgattgcac

SEQ ID NO: 156651 - DNA, 276 bp, Glycine max
aatagctttaggagctggaagaggcttgctatatttgcatgaacagtgtgacccaaagattattcacagggatgtgaaggcagcaaatatcttgcttgatgattattgtgaggctgtggtgggagattttgggttggcaaagctgttggaccacagggattctcatgtgacaacagcagtgagaggcactgtggggcacatagcccctgagtatctctctacaggccaatcttctgagaaaacagatgtgtttgggtttggcattcttcttcttga

SEQ ID NO: 156652 - DNA, 276 bp, Glycine max
ctcgtgtgacaacatcaaataatgggaaaagggaacatggaactcgagacaaacaaggtctatgactacgaggatgcacgaggggacgttgaagtcccagataccgctcatcagataagcactgattcatggtttcaagtggcttttatcctcacaaccggaatcaacagtgcctttgttcttggatatccagggaccgtcatggttcccctgggttggatcgggggtgtgattggtctaattcttgctaccatggtgtcactctatgcaaatgct

SEQ ID NO: 156653 - DNA, 276 bp, Glycine max
aattaacgaatgcagagttttcaattggagaagcggactgggaacaagtgttacatgctttccgctagagatctgagcattatatggggtgacactactcattattgggagtggacaaccctaccagagtccaggttcgaagaagttgctaggcttcgagctgtgtgttggtttgacattactgggaggatgaacacccgcgttttgtcgccaaatactaattatgcagcttttcttgtgttcaagatgatcgatgccggtggatttcactacgat

SEQ ID NO: 156654 - DNA, 283 bp, Glycine max
ccgagggcatgcccggcaaccgctactacggcggcaacgaattcatcgaccagatcgaaaacctctgccgctcacgcgccctccaggccttccacctcgacgcccaatgctggggcgtcaatgtgcagccctactccggctcccctgccaacttcgccgcctacaccgccgtcctcaacccccacgaccgcatcatggggctggatctcccctccggcggccacctcacccacggctactacacctccggcggcaagaagatctccgccacctccatttactt

SEQ ID NO: 156655 - DNA, 282 bp, Glycine max
gtgctagattccctctctgatctctccggtgctgatgttggaaacttagcagatgatggattttttgagtgcaagcacttgcttcgacttgatgatggtgctgagattgtgaggggcaggaccgaatggaggccaaaacccttaaacagaaactttggtcatgttttgagtcaggttcctgttccagcagaaagcacctgaatctcattgattgacatcaatggaagagtggcataattcatgttcccacttgcagattggagagctttgcttgttgcctta

SEQ ID NO: 156656 - DNA, 279 bp, Glycine max
gaactctgtcccagccattacatttctcatggcagtcatactcaggatagagcaagtgaggctgaacagaaaggatgggatagcgaaggtggcgggaacgatattctgtgtggctggggcgacggtgattacactatacaagggtccaacaatatatagcccaagtccacctctacagagtgagagctcagtagtagttgagtttgggacactctcatcactgggagatgcaaaggggaagaactggacgcgtgggtgcctctacctcatagggcattg

SEQ ID NO: 156657 - DNA, 279 bp, Glycine max
cagaattttcgcagtccaagaggacacgcatcccaaaccgttttgatttggaacgtgtcacgctctaaatttacatggcatattgtctttaactgagtcaatttcgcttaataaaacctctcttcactcctctgctttagcaacccaaccccctgttcctgtgtgtgtgagtgaccgagtgagtttgtttttctcagctgatatatatggcgcttgatcgctccattatgagcaaaacgacgtggtacagcgtcgtattatggatgatggtggtgctgg

SEQ ID NO: 156658 - DNA, 278 bp, Glycine max
cgcaacaaaaagaaagaatcccaggcgaggagaaagatggaggggaaggagcaggatgtgtcgttgggagcgaacaagttccccgagagacagccgattgggacggcggcgcagagccaagacgacggcaaggactaccaggagccggcgccggcgccgctggttgacccgacggagtttacgtcatggtcgttttacagagcagggatagcagagtttgtggccacttttctgtttctctacatcaccgtcttaaccgttatgggagtcgccggggc

SEQ ID NO: 156659 - DNA, 276 bp, Glycine max
gcgagacgtgctttctttttccatcttttgcgttacggcactcaacattttacactcttttcttcttctcgttgttgcttcgttgttgaatcatggatcagaaggtcgatttcagcgctccccattccatgggtaccactatcatcggcgttacttacaacggcggtgtcgttctcggagccgactctcgaaccagcaccggagtgtatgttgccaaccgagcatcggacaaaatcactcagctcactgataatgtatacgtgtgtcgctctgggt

SEQ ID NO: 156660 - DNA, 278 bp, Glycine max
ctaaactccataaactcacaagaccaaatgcagttgatatagttccacattctccccactctctacaccatctcacagttccaaaccgcaagcaaccctttgcacacgcaagctgggaacagtgatgatggagagtaccctttaaatgtcaccacctcagggaaccaagtgaatgtaacaactggggtggttgatactacagtgtccaatactatctacagtgataaccagcttgcagtgtatcaggtagataaggtacttcttccaatgaagctttt

SEQ ID NO: 156661 - DNA, 277 bp, Glycine max
cacacaaacccgtccctcacactctccaaaccctagcggcactacacactagttctatcgctatctccccaagatgtcgagcgccgatcccgagcacagagaagaggaggaggcacccgccgttggcgacgacgaggacaccggagctcacgtcgctccaatcgtcaagctcgaggaggttgctgtcaccaccggcgaggaggacgaagatgcaatcctggatctcaaatcgaagctttaccggttcgacaaggacgggaaccagtggaaggagcgt

SEQ ID NO: 156662 - DNA, 273 bp, Glycine max
ccattggctgttctggaaacctttcaattgcaatttttgcaatggattccttgcgtcagttgtcaatgaaatttctggagcgggaggagttggctaattataattttcaaaatgaatttatgaagcctttcgtcattgttatgcgcaagagtagtgctgttgaaattagagaacttatcattagatgtgtctctcagatggttttatctcgtgtcaacaatgtaaaatcaggatggaagagcatgttcatggtattcacaacagcggcatatg

SEQ ID NO: 156663 - DNA, 272 bp, Glycine max
cgaactattgatcggaagcaagaagtacctcatgatggtgccatgtgtgaccttctatggtcagatcctgaagatattgtggataactggggtcttagtccccgcggtgctggttacttatttggtggcagtgttgttacttcctttaaccactcaaataacattgactatatatgtcgtgcacatcagttggtaatggaaggatataaatggatgttcaataaccagatagttactgtctggtcagctccaaattattgctacagatgtgg

SEQ ID NO: 156664 - DNA, 280 bp, Glycine max
gtttcgttcgtcaccatgactttcaagcgcaggaatggaggtcgcaacaaacacggccgcggccacgtcaagttcattcgatgctccaactgcggcaaatgctgccctaaggacaaggctatcaagaggtttctggtgaggaacattgttgaacaggctgcagtcagagatgtgcaggaggcttgtgtctacgaacaatacacgcttccgaagctgtatgtgaagatgcagtattgtgtttcctgtgctatccactctcatgttgtgagggttcgatccc

SEQ ID NO: 156665 - DNA, 280 bp, Glycine max
ttgcaatcaaattagttcattctctttgcgcagttccctacctctcctttcaagatgcagatgttcgtcaagaccctcaccggaaagaccatcacccttgaggtggaaagctctgacaccatcgacaacgtcaaggccaagatccaggacaaggaaggaattcccccggatcagcaacgtctcatcttcgccggaaagcagctcgaggacggccgtaccctcgccgactacaacatccagaaggagtcaactcttcaccttgtccttcgtctccgtggtg

SEQ ID NO: 156666 - DNA, 276 bp, Glycine max
cgccaccgccatacgcggcgccatcattctcgcaaagctctctgttattcctgtgaggagaggctattggggtaacaagatcggaaagccccacaccgttccctgcaaggttaccggaaagtgtggctccgtcaccgtccgcatggtccccgcccctcgtgggtccggaatcgtcgccgctagggtccccaagaaggtcttgcagttcgctggaatcgatgacgtcttcacttcctccaggggttccaccaaaaccctcggaaatttcgtcaaggc

SEQ ID NO: 156667 - DNA, 277 bp, Glycine max
gcttcaacggcgtttgatgtcagtgacagtgcgctcaaattcacccacgtcctctacaatctctcccccgctgagctgtatgagcaagcgattaagcacgagaaaggatcattcataacggcaacgggagcgttagctacactttctggagcaaaaacgggacgctctccccgagacaaacgggttgtcagggacgacaccaccgagcatgacctctggtggggaaagggctcgcccaatattgaaatggacgaacataccttcttaatcaacagag

SEQ ID NO: 156668 - DNA, 272 bp, Glycine max
gcacccgatctgtgtagcaaagattattggtgagtgtttgcaaggcatcagcagcactctttgctacacatatgctcggtgcacccgatctgtttcaattgtgcctcctgcatactatgctcaccttgctgcattccgtgcaaggttttacatggaacccgagacttcggatagtggctctatgacaagtggtgctgttgcaggccgtgggatgggtggcggcggtggtggtggtgtagggcgtacacccgggcacctggtgctaatgctgc

SEQ ID NO: 156669 - DNA, 272 bp, Glycine max
ctttcatctggtattagaggttatgatggagcctaccgccacccagctatgtaccgcagacccgctttggggaattactcggatgctgcattgcagtttcctgtgatgcccacatgcaaagctaccatggatttgtctgctactgctacatctgcctcacccgtctttgttgctgctccagcagagaaaggccattttcttttagactttctcatgggaggtgtttcagcagctgtctccaaaactgctgctgctcccattgaacgtgttaa

SEQ ID NO: 156670 - DNA, 266 bp, Glycine max
catgctttggcgcttcatagtgatgatcgctacttggctgagccagcactggacactgtgaagagaatgaagttatatgcagagtctcttgcacgctttcaaggagggtcaccttacatatatcctttgtatggtttaggagagcttccccaggcatttgcacggcttagtgctgtttatggtgggacatatatgttgaataagcctgagtgcaaggtagaatttgatgaggaaggaaaggttgttggtgtcacatctgaagggga

SEQ ID NO: 156671 - DNA, 277 bp, Glycine max
gcaccaacagcatcggcggcgacagtcactctccgacaacaacacttccgcggcgaaaaatgtctctggtggcgaacgaggatttccagcacattctgcgtgtgctgaacaccaacgtggatgggaagcagaagataatgttcgctatgacctccatcaagggtattggaaggagattcgccaacatcgcttgcaagaaggccgatgttgacatgaacaaaagggctggtgagttgagtgctgcagagttggatagtgtgatgactgtggtggcgaa

SEQ ID NO: 156672 - DNA, 275 bp, Glycine max
ggaagacgccgccaacaacttcgcgcgtggccactacaccatcggaaaggagatcgtcgatctctgcctcgacaggatccgaaaactcgccgacaactgcactggtctccagggcttccttgtcttcaacgccgtcggtggcggcaccggttccggcttgggctcgcttctcttggagcgtctctccgttgactacgggaaaaagtcaaagctcggtttcaccgtttatccttcgcctcaggtttcgacctcggtggtggaaccctataacagcg

SEQ ID NO: 156673 - DNA, 275 bp, Glycine max
tgtttcccctattattatctcgctctcacaaaatcatggcattctctagtgctttgattctgtggtcgttgctagcaatcaacatggccctgccaaccctcgcaaccgtctacaccgtgggagatacttcaggttgggcaattggtactgattatagcacttggactggcgacaagatcttttcagtgggtgatagtctcgcgttcaactatggagctgggcacacagtggatgaagttaaagagagcgattacaagtcgtgcactcgcaggaat

SEQ ID NO: 156674 - DNA, 271 bp, Glycine max
ctaacttgtagcagcgatacctcttctcttatcactaaaaaatgaccaagagaaccaagaaggccggtattgttggaaaatacggcacccgatagcgtgctagtttaaggaagcaaatcaagaagatggaagttagtcagcacagtaaattcttttgtgagttctgtggaaagtacgctgttaagaggaaggccgtgggtatttggggctgcaaagattgtggaaaagtgaaggctggaggtgcttacacattgaatactgcgagtgctgt

SEQ ID NO: 156675 - DNA, 275 bp, Glycine max
cttcaactcatctgcttcccctagcaaccttcttcttacttctctccgcttcttatctccagattgctggggcggaagcacaaccgttgactagtctcaagcttaactctcatattcttcaggagtctactgctaaagagattaatgaaaatcccgaggcaggatgggaggctgctataaatcctcgtttctccaattatacagttgaacaatttaagcgccttcttggagtcaaaccaatgcctaagaaggaacttagaagtacacctgctata

SEQ ID NO: 156676 - DNA, 272 bp, Glycine max
gctccttcttctctaaacactcatctatgactacctttccctcccctccttcaccatcttcttcttcttcaattccttctccaagatctagcatgttttactatgctggaagtgaagatcactctgaggagcctcacttcctccaagcttgttttctttgcagaaaaccactcggccaaaaccgtgacatcttcatgtacagagggaacacaccattttgtagcaaagagtgcagacaggaacaaatagagattgatgagtcaaaggagaaa

SEQ ID NO: 156677 - DNA, 267 bp, Glycine max
ctcgagcgattgaatcggcggcggaaatgctttatggtatgattcatgctcgatatgtgatgaccagcaaaggaatggctgccatgcttgacaaatacaagagctatgattttggtagatgcccaagagtttactgctctggacagccctgccttccagttggtcaatcggacattcctaggtcaagtactgtgaaaatatactgccctaggtgtgaagatctttactatccgcgttccaagtatcaaggcaacattgatggagctt

SEQ ID NO: 156678 - DNA, 269 bp, Glycine max
agtgagaaagagagagagagagagagaaactgagagaaattcgcaaaccctaatttcggaaagatcggcgatggctgcctccaaggatcgcgagaagcttcgtctacatcgccaagctcgccgaacaggccgagcgatacgaagagatggtggaatcaatgaagaacgttgcgaatctcgacgttgaactgactgtggaggagcggaatttactttctgttgggtacaagaatgtgattggtgctcggagacatcgtggaggatcctgt

SEQ ID NO: 156679 - DNA, 278 bp, Glycine max
cttgtattcacatttcaacaactatagccatggctttctccacctcaaaggcactacttgtccttgcctgctccttctgcctatttgcatcttttacttttggacgcgatttctccattgtgggctattcatcggaggacttaaagtccatggataagctcattgaactctttgaatcatggatatcaagacatggcaagatttaccaaagcattgaggagaagctgcataggttcgagattttcaaggacaacctaaagcacatagatgagagaaac

SEQ ID NO: 156680 - DNA, 277 bp, Glycine max
actgtgtcaagagtaactctaaacgtatcaacatggtggggattcacactccaaagaaagacaatgaaccattgctacaatgcactcatcatatgtgcccaataagggtacactggcacgtgaagctcaactataaggactattggcgagtcaaggttgccgtgacaaatttcaactacaggatgaattactccctctggactcttgctgttcagcatccaaatcttaacaatgtcacccaagttttcagctttgattacaagcctttacttcccta

SEQ ID NO: 156681 - DNA, 274 bp, Glycine max
caagaatggcacttcgttgcttggtgatgtccctttctgttctcttcactcttggtcttgcgagagaaagccatgccagagacgaagatttttggcatgctgtttggccaaacactcccattccaagttcattgcgagatcttctaaagcctggccctgcaagtgttgaaatcgatgatcaccctatgcaaattgaagaaacacagtacccgaaaaccttcttctataaagaagaccttcatccaggcaaaacaatgaaagtacaattcagcaa

SEQ ID NO: 156682 - DNA, 271 bp, Glycine max
ggttgaaatacaggctcctgaacaagctcttggtggaatctacagtgttcttaaccagaagcgtggacacgtgttcgaggaaatgcagaggccaggtaccccactatacaacatcaaggcatacctccctgtcatcgagtcctttggtttctcgagcacattgagggctgcaacatcaggccaggccttcccacaatgtgtgtttgatcactgggacatgatgtcttctgacccattggaggctggatcacaagctgcacagcttgtcact

SEQ ID NO: 156683 - DNA, 269 bp, Glycine max
cgttatctgaagatgatgcatttgcctttctgaagggtgacaactatgctgattctgtgacatattttagcttctccgaagcacttcggcaggtgaagttaattggtgtgccttatggactacgttttcaacagttgcaagatctatggaatcaagcagatgctgatggaaatggtgtcatagactttgaagaattcaagcagaaaatatggaattctacatgtccagagcatgtgttggaaaatctgaatggttgcacggaagattgt

SEQ ID NO: 156684 - DNA, 267 bp, Glycine max
tgatttgaggccaggcaagccctgctcaaccaccacacttctcctcgttcacgctacccctttctgctcttcttctacctttcaagttttaaaagtataaagatggcagagacattcctatttacctcagagtcggtgaacgagggacaccctgacaagctctgcgaccaaatctccgatgctgtcctcgacgcttgcctcgagcaggacccagacagcaaagttgcctgcgaaacatgcaccaaaaccaacttggtcatggtcttc

SEQ ID NO: 156685 - DNA, 274 bp, Glycine max
gtcaaagtatttggtgatcttcatggtcagtttggtgatttgatgcggctatttgatgaatatggatttccttctactgcaggagacatcacctatattgactacctgttttttggagattacgttgatcgaggacagcatagcttggaaaccattaccttgctacttgctcttaagatcgaatatcctgagaatgttcacttgatacggggaaaccacgaagctgctgacataaatgcactatttggttttcggattgagtgcattgaaagaa

SEQ ID NO: 156686 - DNA, 270 bp, Glycine max
agaagagacactgaggtcgttggcgagaatgggaagaaagaaggggtatgttgagttcgaggagtcgccgccggacgattttgatccggcgaatccgtacaaggacccggtggcgatgctggagatgagggagcacatcgtgagagagaagtggatccaaatcgagaaggccaagatcattagggagaagctccgctggtgctaccgcatcgaaggcgtcaaccacctccagaagtgccgccacctcgtcaaccagtatctcgagtccac

SEQ ID NO: 156687 - DNA, 270 bp, Glycine max
ggacaatcaattggggtaattcctgatggtgttgacaagaatggcaaacctcataaactgagattgtattctattgctagcagtgccattggtgattttggagattccaagactgtttctctatgcgtgaaacggctagtgtacacaaatgaaaatggagaaattgtcaagggagtctgctcaaatttcttgtgtgacctgaagccaggagctgaagtaacaataactggacctgttgggaaagaaatgcttatgccaggagatcctaat

SEQ ID NO: 156688 - DNA, 268 bp, Glycine max
gaaattgtcattgttgatgcaataggaagtagtggcttggacttgaaggtgccaccttaaacttaaacattctgcagttagttcttttatttatacagactgacccaggtgtgccagttgtatatgctggatttggtgctctaatgatcactacttgcatcagttatttgtctcattcacagatttgggctttacaagacggcacagcagtcttcattggagtgaagactaacagagcaaagatggaatttccagaggagatgaaccg

SEQ ID NO: 156689 - DNA, 270 bp, Glycine max
caagcgcatccgcggcgacaaggccaagctcaacttcccggccaccgctccgccaccctccaaaaaagtggtgtcatcatgtgagaagaagaagaagaaaagtgtgagtgcagaaaagaagagtggtgggcgagctcggaagaacgtgtacagaggaatcaggcaaaggccgtggggcaagtgggccgcggaaataagggacccacataagggcgtccgcgtctggctcggcaccttccccaccgccgaggaagccgcccgagcctacga

SEQ ID NO: 156690 - DNA, 265 bp, Glycine max
tttgagtcttatggacatgtaactgatgtagtagtcatgtatgaccagaatactgggcgtccacggggatttgggtttatttcatttgatactgaggaggcagttgatagggttttgcacaaatcatttcatgatttaaatggtaaacaagttgaggtaaagcgtgcacttcccaaggatgccaatcctggtgcaagtggccgtatgatgggtggtgctggaggtggtggtgctggaatttgtgggtatcaaggttatggggcat

SEQ ID NO: 156691 - DNA, 263 bp, Glycine max
acaccttttccttttcccttccgttggtgccattcgtgcagcaccggatcctctcatttctccggcgataactctcccttttccggcgaattcaccgcttcctcgatatgaatcccgagtatgactatctgttcaagctccttctgattggagactctggtgttggtaaatcatgccttcttctaagatttgctgatgattcatacattgagagctacataagcaccatcggagttgattttaaaattcgcactgttgagcag

SEQ ID NO: 156692 - DNA, 266 bp, Glycine max
gtcaggctgaacgatatagttgggcagcaacaaggggagtgaatgaagaaatacttctggagaatttgccagaagatctccagacagacataagacgtcatctcttcaaatttgttaaaaaagttcgaatcttttccctgatggatgagcctatcttagatgccatttgtgagagactaaaacaaaagacgtacatcaaaggaagtaaagttttgagtcagggtggtcttgtagagaagatggtctttgttgtacgtgggaaattg

SEQ ID NO: 156693 - DNA, 270 bp, Glycine max
ggacgctggtgtcatttctgggctcaacgtgatgcgaattatcaacgagcctaccgcggctgccattgcttatgggctcgacaaaaaggccactagctctggggagaagaatgttctcatttttgatctcggtggtgggacttttgatgtctctcttctcaccatcgaggagggtattttcgaggtgaaggccactgctggtgatactcacttgggaggtgaagattttgataacagaatggtgaaccattttgttcaggaattcaagag

SEQ ID NO: 156694 - DNA, 275 bp, Glycine max
ctgaggcaagttttcagccagtatggagaattagttcatgtgaagattccagcaggcaagcgatgtgggtttgtccaatttgcagacaggagctgtgctgaagaggcccttcgggtgttgaatgggacgctgttgggtggacaaaatgtgcgtctttcatggggtcgcagtccttcaaacaaacaggctcaggcagatccaaaccagtggaatggtgctgctggtgctggttctggtggtggatattatgggtatgctgctcaagggtatgaaaa

SEQ ID NO: 156695 - DNA, 259 bp, Glycine max
aacaactttcacttggccaatatgcttggcaagggaggttttggtccggtatacaaggggcaattggataacggacaagaaattgccgtgaaaagactttcaaaagcatctggacaaggattggaagaatttatgaatgaagttgttgtgatttctaaacttcaacatcgcaatctagtgagacttcttggttgttgtatagaacgagatgaacaaatgttggtatatgagtttatgccaaataaaagtttggattcat

SEQ ID NO: 156696 - DNA, 257 bp, Glycine max
aggatgcagcgcgagctctgtaacagtcccgcgaagttgttctgcgaatcagatcaagccagcctctgttggaaatgcgatgctaaggttcacagtgcaaacttcctcgtcaccaaacatcccaggattcttctctgccatgtttgtcaatcactaacagcgtggcacggcaaaggacccaagtttgtacccacaatgtcagtttgcaacacttgtgtcaacaacaatagtactgagactggaaccaacagaatcat

SEQ ID NO: 156697 - DNA, 253 bp, Glycine max
aaatgttcccagatagtgattttctgaacaaagaaattgaaattccaatccctggtttccatccctacaggctcaacctcttcaggttggtttggaggacaatatatgtaatgttgagcactgtaatatcaatgctcctcccattcttcaatgacataggtggacttcttggagcatttggattttggcccttacagtgtatttcccagtggagatgtacattattcaaaagagaataccaaagtggagcaca

SEQ ID NO: 156698 - DNA, 251 bp, Glycine max
gtcctgatgatcatatatttgtatactatactgaccatggaggtcctggggtgctcgggatgcctgctggtccttacttatacgcggatgatctgattgaagtcttgaagaaaaagcatgcttctggaacatataaaaacctagtattttatctggaggcatgtgaatctgggagtatctttgaaggctttttcctgaagatatcaatatttatgcaaccactgcttccaatgcagaagaaagtagttggg

SEQ ID NO: 156699 - DNA, 250 bp, Glycine max
gcaatcacagctagccactcctccaacacgggccattggtcctagtgctggaaccagttctggaatgccccccgctgttactaatgctgataggcatacaggaggggaagaaggtagacctcctgctttggtttcagtggattcctcgaggcgcagaatgtcagggcccattttaaatactttatcaagtgccaatgccttgggtcagtcaagtggatcatctaggagggttgctgtctctagtagccgt

SEQ ID NO: 156700 - DNA, 251 bp, Glycine max
gcaatcacagctagccactcctccaacacgggccattggtcctagtgctggaaccagttctggaatgccccccgctgttactaatgctgataggcatacaggaggggaagaaggtagacctcctgctttggtttcagtggattcctcgaggcgcagaatgtcagggcccattttaaatactttatcaagtgccaatgccttgggtcagtcaagtggatcatctaggagggttgctgtctctagtagccgtg

SEQ ID NO: 156701 - DNA, 252 bp, Glycine max
cggtgagggccttccatggcttccgcttgtgcttcctctgcaattacagctgttgccatctctacgccgagttccgggcagaagaatggatcaggaggttgttttcttagtggaaggaaattgagggtgaaaaaggagagagcagcaattggaggacgatcgatgggcactacagtgtgcgcagttgctgagcctgacagacctctatggttcccaggcagcacccctcctccatggcttgatggcactcta

SEQ ID NO: 156702 - DNA, 250 bp, Glycine max
ttggacttggtccttcttgctgagcttagcactcgaatcgagtttaaagctgaaaatgagggaaagttccactcattccacccagttgcgaccatcctcagttacctgaccaaggcccctctggttccaccgagtacgccagtggttaatgcactgtcaaagcagcgagctatgctggaaaacatctaagggcttgtgttggattagctcctgagaacaacatgatcctggagtacaagtgaagttcaaa

SEQ ID NO: 156703 - DNA, 249 bp, Glycine max
ggcatgaaggtgtctattaggcaccttggtccttctatgattcagcagatgcagcatccttgcaatgagtgtaagggtactggagagacaatcaatgacagagacaggtgccaacagtgcaaaggagagaaagttgttcaggagaagaaagtacttgaagttgttgtggagaagggaatgcagaatggacagaagattacattccctggtgaagctgatgaagcacctgatacagtcactggggatatt

SEQ ID NO: 156704 - DNA, 250 bp, Glycine max
taaagtatggcttcgacggcagcgtaccttgctcggcgcgcggccagaaggagagggttcggatcctctaccgccgcgccctcaaagacactctcaactgggccgtacatcgccacctcttctacgacgacgcttcaaacctccgcgaaaggttcgaggagaacagacacgtggaagaccctgataccattgacaggctcataacggatgctgaagcttcctacaacaagtggcgccatcccgatcccta

SEQ ID NO: 156705 - DNA, 249 bp, Glycine max
gtgataataaatttgaggttgagagagtgaaagaggagatgggtgcgataacgagcgcggtgatagcagttgtaggagttcttctaggttggatcacaatagagatcgcatgtaaaccttgtcttgaaaagggtcgcgaagcatcgatcgaagtctcgatccagattacgatcccgacgacaccgcattcgcgccccactcaaccccaccgccgcctccgccaccgtcaaagccgtttgagaaattgat

SEQ ID NO: 156706 - DNA, 255 bp, Glycine max
cgatcgtaaccaggctctggttttgcggttagggtagctctttctactcaaaacaaaacaaaacatcaatttctgtttcagttcgcggagatcaatatttgtcgctgaggtcgatcgtcgataaaaggcaatgtttttgtgggattggttttatgggattctagcgtcgcttggcctgtggcagaaggaggccaagatcttattcttgggcctcgataacgctggcaaaaccaccttgcttcacatgctcaaaga

SEQ ID NO: 156707 - DNA, 248 bp, Glycine max
gaagaggcaaaaaaagaagaaaattgatgttgttattgttgatactgctggtaggctgcagattgacaagacaatgatggatgagttaaaagaagtgaaaaaggcattgaatccaacagaagtgttgctagttgtggatgcaatgacagggcaagaagccgcagcgttggtgactactttcaatcttgagattggaataacaggtgccatcttgacaaagcttgatggcgattcaagaggtggagcag

SEQ ID NO: 156708 - DNA, 250 bp, Glycine max
ggatttttgcatggactcagacaaggtttcatcttccagtgtggctaggctttggagcagcatttaaaaaagtcattgaggaaaatgttaagaatctcaatatgctgcaagagatgtacaatcaatggcctttctttagggtcacacttgatttggtggaaatggtgtttgccaaaggagatccgacaattgccgctctgaatgatagactccttgtttcaaaggatctgtggccgtttggggatcaatt

SEQ ID NO: 156709 - DNA, 252 bp, Glycine max
ctacgatccgtctctgaaaaaagcccgcaagtccctcctcgccaagcatgacgtcttcatcgtcgatggcgacctcaacgacgccaagctcttggcaaagctcttcgatgtggtcgcttatcacccacgtgatgcacctcgcggcgcaggccggggttcgctacgccatggagaatccccactcctacgtccacagcaacatcgcgtcgctcgtcacgcttctcgaggcctgcaaatcggcgaaccctcagc

SEQ ID NO: 156710 - DNA, 246 bp, Glycine max
attcggagatagttgacaggagaaatgggctgcgcaaacagattgaagataggttgattgcagctgctgcaagtggcaaggatttagaagagactggcagtgaggatgatggtcttttggatctgagtgatgatgattttttccttgctgggagttctagtgacgaagcagatgcggatgatgatggacagacaaaagtgcaagagagcaggcttctagtgcttctgggaaaggcgtgtctggcat

SEQ ID NO: 156711 - DNA, 247 bp, Glycine max
gcttggagctctttgcatgcaatggctaaaggacaaggtatactcaatccgtgatgcagccgctaataacatcaaacgcttggcagaagaatttggaccggattgggcaatgcagcacattattccccaggttttggacatggttactgatccacattatctgtatcggatgacaatcttacaagcaatttctctactagctcctgttctgggctcggagattacttcttcaaaactgctccctctg

SEQ ID NO: 156712 - DNA, 247 bp, Glycine max
ctagtaggggccggcatcaagccaacatctatagtgagttacaaccatttgggaaacaatgatggcatgaatctctcagcccctcaaaccttccgctcgaaggaaatttccaagagcaatgttgttgacgatatggtcaacagcaacgccatcctctatgagcctggtgaacatccggaccatgtggttgtcattaagtatgtaccttacgttggggacagcaagagggccatggatgagtactctt

SEQ ID NO: 156713 - DNA, 246 bp, Glycine max
gcgttgctgtgtgagagaaagagaaatggcaacaagcgaagaagtggttgccgcggcgcggagtgagccgcgccggaggcagggttgaagcacaaactggagagaaaatggacgttttggtgcgacaaccaatccaaacccaagcaaggcgctgcttggggaacctctcttcgcaaggtctacacttcgacaccgttgaagagttctggtgtttgtatgatcaggtattcaagcccagcaagttgc

SEQ ID NO: 156714 - DNA, 248 bp, Glycine max
cggtggcatttttgttggttcgagtgagcgagggaagatgtactctagagattcatggggtggtccgttggagataaacgcgacggactcggcaacggaggacgagcggaccggaacctgcaggacgtggacagggcggcgctgtcgcgtcccttggacgagacgcagcagagctggctcctaggccccggcgagcagaagaagaagaagtacgtcgatctcggctgcatcatcgtcagccgcaagat

SEQ ID NO: 156715 - DNA, 246 bp, Glycine max
cgaatatcttgttgtttggagcgatccgagaaaaactctgtaaacatgttggtttaccaggacctccttacaggtgatgagcttctctctgactccttccgttacaaggaaattgagaatggaatgctgtgggaagttgaggggaagtgggttgttaaaggagcagttgatgtagacattggtgcaacccttctgctgagggtggaggagaagatgagggatttgatgatgcagctgtaaaggttg

SEQ ID NO: 156716 - DNA, 251 bp, Glycine max
tgcaaaacatgtgactgaaaaaatgatgcttaatgctggtaacatttacccccacaacaccccaaaaaccaaggaagcatattactacagaatgatctttgagaggttcttccctcagaactcagctaggctcactgttcctggaggagcaagtgttgcatgtagcacagccaaagctgttgagtgggatgctgcttggtctaacaaccttgatccctctggtagagcagcacttggagtgcacatttcag

SEQ ID NO: 156717 - DNA, 248 bp, Glycine max
caattctacaactccccaaactgcccctcaattgaacacaacatatgctccgaggaagccgtccacgtggcaatgacactcgacacgacatacatccgaggatccatggcggcgatcctttccgtcctccaacactcttcgtgcccccaaaacaccttcttccacttcgtgtgctcctccaatgacaacaccaacgcgtccctcctacgcgccacaatctccaacacattcccctacctgaatttcca

SEQ ID NO: 156718 - DNA, 247 bp, Glycine max
gagaaaccctaggtaagaagaaaagatgccggctggtcatggtttgagatcccgcaccagagattccttctctcgtcctttcaggaagaagggaaccatcgccctcaccacatacctgagaacctaccacgtcggcgactatgttgacgtcaaggttaacggtgccgttcacaagggaatgcccacaaattctaccatggccgcaccggacgcgtctggaatgtcaccaaacgtgctgttggcgtcg

SEQ ID NO: 156719 - DNA, 247 bp, Glycine max
agtgcccgaaactttcgacgacacggaggaggacgacggtgctgatggctccaccgccacgaacaccgtccccaccaccaagcctaagaaaggcaaggccgcattgcctctcaagagggacaggacgagatctaagaggttcttggaaattcaacaattgacggagcgtaagaaagagtatgacttgaagacagcaatatctttggttaaagaaacagctaaaaccaagtttgtagaaacagtagaa

SEQ ID NO: 156720 - DNA, 245 bp, Glycine max
cagctcttgtaaaatattatcttgctagccttcctgagccactaaccacattagagctttataatgagattagaagtgctcgatccagtatatattccatgagaaacatactcaagaggctttccagtgtaaactacatgactctggagtttataacagcacttctactccgtgttagccagaaatcacttctcaataagatggatgctcggagccttgctatggaaatggcacctgttattatg

SEQ ID NO: 156721 - DNA, 241 bp, Glycine max
agctcatccttgagttaaaaaatggcagcagcttcttccatggctctctcatccccatccttggctggcaaggccgtgaagctgggcccatcagccccagaagtgggaagggtgagcatgaggaagaccgtcaccaagcaggtctcctcaggaagcccatggtacggcccagaccgagtcaagtattgggcccattctctggcgagccccggtcttacctaaccggtgagttcccaggcga

SEQ ID NO: 156722 - DNA, 247 bp, Glycine max
gtggagtgggcagtttcccttgaagtggcacataattaaagatgttccaaatagtcagtttcgtcacattattcttgaaaataatgataacaagcctgtgacaaacagtcgagatactcaggaggtgaagttgggacagggggttgaaatgttgaccatttttaaaaactatgaaactgatgtgtccatcctggatgattttgatttttatgaagaccggcagaaggctatgcaagaacggaaggca

SEQ ID NO: 156723 - DNA, 245 bp, Glycine max
atgatcgtgaaaccgccagggtaccagagtggatcgcctccggtttctcctgccggttctactcctccgatttctccgttttccggaggaaaagattcgcttcggtttcgaagaaggtcgggatctgatgcgtacgagaagagagggcagaacagatcaggcccttcttctcctttcgatgtgtgacgcattttctcgtacctgaaagctgaggatgtagcagcttttttggcctttgctgtatt

SEQ ID NO: 156724 - DNA, 245 bp, Glycine max
gagcaagatgatttatgcaagctccaaagacagattcaagagggagctggatggaattcaagtagagttgcaagcaactgatcctactgagatgggtcttgatgtgttcaaaagccgtgccaactaaaatgattatataaaatagtaggctttctggtgggagcagcacccctgaagccttagttactcatatggaaaatatcctagtttgtgggatggtcaacttgggtagttatggtcccaaa

SEQ ID NO: 156725 - DNA, 246 bp, Glycine max
gggaaaagaaaaaccagctttcttcaagcacctagatttcctctctctctaaatggcgttctcttcttttctcggcagagtcctcttcgcctccgttttcatcctctccgcttaccaagaatttaattcttatggagttgatgggggacccgcagcaaaagcactcagaccgaagtttgatgcctttgcacatcaagtacattctaaagttggctttcaacttccagatattgatatgaaattttt

SEQ ID NO: 156726 - DNA, 245 bp, Glycine max
gtcacaatcctccagtatatcaattcaaccagcaatccagtggcaacaattctaccaacagctacagttacttgattataagccagcgcccgtggtgccaaacttttcatcaagagggccttcatcgctttcaagcaatattctcaagcctgatattgcagcaccaggagtgaacattctcgctgcatggattggaaataacgcagatgatgttccaaaaggaagaaaaccctcactatacaaca

SEQ ID NO: 156727 - DNA, 243 bp, Glycine max
tgcattcttccggtggctccagactctagcttggccacaaagggtgtggttcacatcgatgtgatcatgttggctcacaatccaggtgggaaagagagaacagagaaagagtttgaggctctggccaaaggctctggattccaaggtttccaagtcctgtgctgtgctttcaatacctacgtcatggaatttctcaaaaaggtttaagttctttggcgtggattcatatcaagttgcatttgg

SEQ ID NO: 156728 - DNA, 250 bp, Glycine max
atttgactctcacaaaccttgcatccatccacacatggctggcatgaactctagcgtattggcctgtagctatgccatatctggtgcagcatgctccgagctcaatgggaaggtcacttccgtggcctctgttgcatcctctggctacaagttgccattgatcaaatgtgaggccagagttcccaaagccaaagaatctgaaggaaggagaggtgcccttgttctcttggcagctacccttttcatctct

SEQ ID NO: 156729 - DNA, 116 bp, Glycine max
cacttaccgtcaactcttccaccccgaacaactcatctccggcaaggaagatgccgccaacaactttgccagaggccactacaccgttggcaaagagatcgtagatctgtgcttgg

SEQ ID NO: 156730 - DNA, 242 bp, Glycine max
ctcattaattgcaagaatggcacttcgttgcttggtgatgtccctttctgttctcttcactcttggtcttgcgagagaaagccatgccagagacgaagatttttggcatgctgtttggccaaacactcccattccaagttcattgcgagatcttctaaagcctggccctgcaagtgttgaaatcgatgatcaccctatgcaaattgaagaaacacagtacccgaaaaccttcttctataaag

SEQ ID NO: 156731 - DNA, 244 bp, Glycine max
cgatccttcactctccttcttccgcgactatctcgaaagtctcggggcgaaactccctgaatctgcttattccgaatcgacgggcgtggagagcgatgaggacatagaagatgttacggaggagcaagagaaggtagaagaagaagaagaagatgatgaaataattgaatccgatgttgagctcgagggtgaaacctgtcagtctgatgatgatcctccacagaagatgggagacccctctgtc

SEQ ID NO: 156732 - DNA, 242 bp, Glycine max
cctcaaggagcatgtgatcaagccggtgatcccggagaagtaccttgatgagaagaccattttccacttgaacccctctggccgttttgtcattggaggtcctcacggtgatgctggtctcaccggccgcaagatcatcatcgatacttacggaggatggggtgctcatggtggtggtgcttctccgggaaggatcccaccaaggttgataggagtggtgcttacattgtgagacaggctgc

SEQ ID NO: 156733 - DNA, 234 bp, Glycine max
ctaaatgaagcttcagagcagcaagtggtatcatgtgtatcagaacctagaaatgctcaacttgaagcaccggaactctcacaggctgataagaaatatcaaccatcttcccaggccattgacaaacctgcagatgatggctacaactggcgtaagtatgggcagaagcaggttaagggtagtgagtatccacgaagctattacaagtgcacacatctgaattgcgtcgtgaag

SEQ ID NO: 156734 - DNA, 244 bp, Glycine max
attgctgccaaccaaggagatcgtgccactaacgtaatcaggggcacaaagaaagaacaagttcaacaaatcatcaaagatcttaaggagttcaaagaaagcactaaggttgacaaggtggttgtcctgtggacagccaacacagagaggtacagcaacgtagttgtgtggactaaacgacaccatggattacctctttgcttccttggacaggaatgaggctgagatttccccttccaccttg

SEQ ID NO: 156735 - DNA, 241 bp, Glycine max
ggaacgcttctccgtccccctcgacgccgtcacctcctttctcctcctcttcaacttcgccgtcgtcggagtcctctccgtctttgccggcggcggcctcccgatcctgctccgccagtgctacacggtctgcctcggcatcatcgttgccgcgtggttcaccaagcttcccgagtggaccacgtggacggtcctcgtcgcgctcgcgctctacgacctggtagccgtcctcgctcccggc

SEQ ID NO: 156736 - DNA, 239 bp, Glycine max
agaaattggtgctggtgaccagggtcacatgtttggctatgccactgatgaaacccctgaattgatgccattgagccatgttcttgcaacaaaactcggtgctcgtctcaccgaggttcgcaagaacggtacctgcccttggctgaggcctgatgggaagacccaagtgaccgttgagtattacaatgacaatggtgccagggttcctattcgtgtacacaccgtgctaatctccaccc

SEQ ID NO: 156737 - DNA, 242 bp, Glycine max
gttctgttctacttgctctcaagtttcatcttgggctgtaggctgtagcataccatgaccaccaaggatccaaaatccgtgtacgactttgttgtcaaggatgctaagggagatgatgtagatctctccttttacaagggaaaagtccttctgattgtcaatgttgcttctcaatgcggcttgaccaactccaattatacggagctgaatcaattgtatgacaagtataaagaccaaggcct

SEQ ID NO: 156738 - DNA, 247 bp, Glycine max
cctcgagccgaatcggctcgagatcttatccctctaatcactctagccgttgcaaatttctactcatttttcaatggcttctgcacgatgttgagttccgttgctttgttcgtgggcttgcttgggtcaccggcaacgatgccctcgagaaagccttttcaatctacggcgacatcgttgaatcgaaggttatcaacgaccgtgagactggaaggtccagaggattcggatttgtgaccttcgcctc

SEQ ID NO: 156739 - DNA, 239 bp, Glycine max
cacgaagatcattgacacatacttcctgggatatttccaactccagggaatatgaccgccggggatggcatccagtgacttacaagtactcagacgctacacctatgcttctaaactttatcaaggaaatagataatatttattttgaaaccgaataccgaagagaatggtgcagcacaagggtaaaccatccacttgcttcctttttgcaagaaaattcactcggactgctgctttaa

SEQ ID NO: 156740 - DNA, 241 bp, Glycine max
ctggaggcatgtgaatctgggagtatctttgaaggtcttcttcccgaagatatcaatatttatgcaaccacagcttccaatgcagaagaaagtagttggggaacatattgccctggggagtatcctagtcctcccccagaatattcaacctgcttgggtgatctgtacagtgttgcttggatggaagacagtgacagacacaatttacgaacagaaactctgcatcaacaatataaattgg

SEQ ID NO: 156741 - DNA, 241 bp, Glycine max
gaaacttaatcgatcatcacttcacttcactaatacatcatggcagacgagacccagaacaagtatgagagctctgaggttgaggtccaggatcgtggtgtttttgactttctcggtaagaaaaaggatgaagaagacaagcctcatcctcaggaggaggtcatcgccaccgagtttcaaaaagtcactgtctcagaccaaggagagaacaagcacagcctcttagaaaagcttcaccgat

SEQ ID NO: 156742 - DNA, 239 bp, Glycine max
gtttctttctctctcatgttgtagtatctcactagtgtttttcattcgtttctgaaccacacaaacatcaccaccgaacaatgccgacggggttaccggcggcgaattccttagtggcgccggacgaagaggggtgggtgtgggggcagatcaaggcggaggcgcgccgcgacgccgagtcggagcctgctttggcgagctacctctactcgacgatcctctcgcactcgtcgctcgag
